United States Patent Application Publication US 2022/0267394 A1 - sequence listing, part 5

SEQ ID NO: 48234 - protein, 42 aa, Artificial Sequence; identical to SEQ ID NO: 11204
  GFR-binding peptide
  MOD_RES (2), (4), (38): Xaa is C or S
  MOD_RES (16), (17), (18), (19), (20): Xaa is A or G
  MOD_RES (21), (22), (23), (24): Xaa is A or G or is absent

SEQ ID NO: 48235 - protein, 41 aa, Artificial Sequence
  GFR-binding peptide
  MOD_RES (1), (3), (37), (38): Xaa is C or S
  MOD_RES (15), (16), (17), (18), (19): Xaa is A or G
  MOD_RES (20), (21), (22), (23): Xaa is A or G or is absent
XGXARVVMNVTAKKXXXXXXXXXIKRVQVPRLQTPAXXPKP

SEQ ID NO: 48236 - protein, 41 aa, Artificial Sequence
  GFR-binding peptide
  MOD_RES (1), (3), (37), (38): Xaa is C or S
  MOD_RES (15), (16), (17), (18), (19): Xaa is A or G
  MOD_RES (20), (21), (22), (23): Xaa is A or G or is absent
XGXGEVVMEVQVEKXXXXXXXXXVKAMKVSRLETPVXXAKP

SEQ ID NO: 48237 - protein, 39 aa, Artificial Sequence
  GFR-binding peptide
  MOD_RES (2), (4): Xaa is C or S
AXAXELHEELRNSLQELKPKKRVYEYYLVTLPEHHVRSP

SEQ ID NO: 48238 - protein, 33 aa, Artificial Sequence
  GFR-binding peptide
  MOD_RES (33), (33): Xaa is C or S
  MOD_RES (11), (12), (13), (14), (15): Xaa is A or G
  MOD_RES (16), (17), (18), (19): Xaa is A or G or is absent
SRVIMVQVEKXXXXXXXXXVKAIKVSRLAQPVX

SEQ ID NO: 48239 - protein, 40 aa, Artificial Sequence
  GFR-binding peptide
  MOD_RES (37), (37): Xaa is C or S
  MOD_RES (13), (14), (15), (16), (17): Xaa is A or G
  MOD_RES (18), (19), (20), (21): Xaa is A or G or is absent
ALHDELTNSLQEXXXXXXXXXYYVVPLPELQVQTPRXQVN

SEQ ID NO: 48240 - protein, 36 aa, Artificial Sequence; identical to SEQ ID NO: 11210
  GFR-binding peptide
  MOD_RES (2), (34), (35): Xaa is C or S

SEQ ID NO: 48241 - protein, 37 aa, Artificial Sequence
  GFR-binding peptide
  MOD_RES (1), (3), (37): Xaa is C or S
  MOD_RES (15), (16), (17), (18), (19): Xaa is A or G
  MOD_RES (20), (21), (22), (23): Xaa is A or G or is absent
XGXGEVVMDVTAKKXXXXXXXXXIKRMQVPRLETPVX

SEQ ID NO: 48242 - protein, 35 aa, Artificial Sequence
  GFR-binding peptide
  MOD_RES (32), (33): Xaa is C or S
ARVVMNSMEGIIVNSSDDMIQVTINSLQTPAXXPK

SEQ ID NO: 48243 - protein, 38 aa, Artificial Sequence; identical to SEQ ID NO: 11211
  GFR-binding peptide
  MOD_RES (1), (32), (33): Xaa is C or S

SEQ ID NO: 48244 - protein, 37 aa, Artificial Sequence
  GFR-binding peptide
  MOD_RES (1), (3), (36), (37): Xaa is C or S
  MOD_RES (14), (15), (16), (17), (18): Xaa is A or G
  MOD_RES (19), (20), (21), (22): Xaa is A or G or is absent
XKXSKVVMVQVEKXXXXXXXXXVKAIKVSRLDQPVXX

SEQ ID NO: 48245 - protein, 35 aa, Artificial Sequence; identical to SEQ ID NO: 11212
  GFR-binding peptide
  MOD_RES (2), (4): Xaa is C or S

SEQ ID NO: 48246 - protein, 32 aa, Artificial Sequence; identical to SEQ ID NO: 37820
  GFR-binding peptide
  MOD_RES (11), (12), (13), (14), (15): Xaa is A or G
  MOD_RES (16), (17), (18), (19): Xaa is A or G or is absent

SEQ ID NO: 48247 - protein, 32 aa, Artificial Sequence
  GFR-binding peptide
  MOD_RES (11), (12), (13), (14), (15): Xaa is A or G
  MOD_RES (16), (17), (18), (19): Xaa is A or G or is absent
SKVVMSMEGIXXXXXXXXXMIQITINSLDQPV

SEQ ID NO: 48248 - protein, 40 aa, Artificial Sequence; identical to SEQ ID NO: 11213
  GFR-binding peptide
  MOD_RES (1), (3), (35), (36): Xaa is C or S

SEQ ID NO: 48249 - protein, 38 aa, Artificial Sequence
  GFR-binding peptide
  MOD_RES (1), (3), (36), (37): Xaa is C or S
  MOD_RES (14), (15), (16), (17), (18): Xaa is A or G
  MOD_RES (19), (20), (21), (22): Xaa is A or G or is absent
XKXSKVIMVTAKKXXXXXXXXXIKRIQVPRLDQSVXXP

SEQ ID NO: 48250 - protein, 37 aa, Artificial Sequence
  GFR-binding peptide
  MOD_RES (1), (34), (35): Xaa is C or S
  MOD_RES (12), (13), (14), (15), (16): Xaa is A or G
  MOD_RES (17), (18), (19), (20): Xaa is A or G or is absent
XSKVVMVQVEKXXXXXXXXXVKAIKVSRLDQPVXXPS

SEQ ID NO: 48251 - protein, 35 aa, Artificial Sequence; identical to SEQ ID NO: 18303
  GFR-binding peptide
  MOD_RES (12), (13), (14), (15), (16): Xaa is A or G
  MOD_RES (17), (18), (19), (20): Xaa is A or G or is absent

SEQ ID NO: 48252 - protein, 40 aa, Artificial Sequence
  GFR-binding peptide
  MOD_RES (1), (34), (35): Xaa is C or S
  MOD_RES (12), (13), (14), (15), (16): Xaa is A or G
  MOD_RES (17), (18), (19), (20): Xaa is A or G or is absent
XSKVIMSMEGIXXXXXXXXXMIQITINSLDQSVXXPSASA

SEQ ID NO: 48253 - protein, 40 aa, Artificial Sequence
  GFR-binding peptide
  MOD_RES (1), (35), (36): Xaa is C or S
  MOD_RES (13), (14), (15), (16), (17): Xaa is A or G
  MOD_RES (18), (19), (20), (21): Xaa is A or G or is absent
XSRVVMNVQVEKXXXXXXXXXVKAVKVSRLKTPAXXPKPV

SEQ ID NO: 48254 - protein, 37 aa, Artificial Sequence
  GFR-binding peptide
  MOD_RES (31), (32): Xaa is C or S
RVVMNVTAKKIVNSSDDIKRVQVPRLKTPAXXPKPVY

SEQ ID NO: 48255 - protein, 39 aa, Artificial Sequence
  GFR-binding peptide
  MOD_RES (2), (35), (36): Xaa is C or S
  MOD_RES (13), (14), (15), (16), (17): Xaa is A or G
  MOD_RES (18), (19), (20), (21): Xaa is A or G or is absent
KXSKVVMSMEGIXXXXXXXXXMIQITINSLDQPVXXPSA

SEQ ID NO: 48256 - protein, 34 aa, Artificial Sequence
  GFR-binding peptide
  MOD_RES (2), (2): Xaa is C or S
  MOD_RES (13), (14), (15), (16), (17): Xaa is A or G
  MOD_RES (18), (19), (20), (21): Xaa is A or G or is absent
KXSKVIMVQVEKXXXXXXXXXVKAIKVSRLDQSV

SEQ ID NO: 48257 - protein, 40 aa, Artificial Sequence
  GFR-binding peptide
  MOD_RES (2), (4), (35), (36): Xaa is C or S
SXKXSRVIMVTAKKVKPKRGVIKRIQVPRLAQPVXXPAAS

SEQ ID NO: 48258 - protein, 40 aa, Artificial Sequence
  GFR-binding peptide
  MOD_RES (2), (4): Xaa is C or S
AXAXELHEELRNSLQELKPKKRVYEYYLVTLPEHHVRSPQ

SEQ ID NO: 48259 - protein, 37 aa, Artificial Sequence
  GFR-binding peptide
  MOD_RES (2), (34): Xaa is C or S
GXSRVVMNSMEGIIVNSSDDMIQVTINSLKTPAXTPK

SEQ ID NO: 48260 - protein, 35 aa, Artificial Sequence; identical to SEQ ID NO: 11222
  GFR-binding peptide
  MOD_RES (1), (32), (33): Xaa is C or S

SEQ ID NO: 48261 - protein, 42 aa, Artificial Sequence
  GFR-binding peptide
  MOD_RES (2), (39): Xaa is C or S
  MOD_RES (15), (16), (17), (18), (19): Xaa is A or G
  MOD_RES (20), (21), (22), (23): Xaa is A or G or is absent
KXALHDELTNSLQEXXXXXXXXXYYVVPLPELQVQTPRXQVN

SEQ ID NO: 48262 - protein, 41 aa, Artificial Sequence
  GFR-binding peptide
  MOD_RES (2), (4), (35), (36): Xaa is C or S
SXKXSKVIMVQVEKIKPTKGIVKAIKVSRLDQSVXXPSASA

SEQ ID NO: 48263 - protein, 33 aa, Artificial Sequence
  GFR-binding peptide
  MOD_RES (12), (13), (14), (15), (16): Xaa is A or G
  MOD_RES (17), (18), (19), (20): Xaa is A or G or is absent
KNHQLFNSLQEXXXXXXXXXYYLMTLPEEETPV

SEQ ID NO: 48264 - protein, 39 aa, Artificial Sequence; identical to SEQ ID NO: 11224
  GFR-binding peptide
  MOD_RES (2), (35), (36): Xaa is C or S
  MOD_RES (13), (14), (15), (16), (17): Xaa is A or G
  MOD_RES (18), (19), (20), (21): Xaa is A or G or is absent

SEQ ID NO: 48265 - protein, 36 aa, Artificial Sequence; identical to SEQ ID NO: 18306
  GFR-binding peptide
  MOD_RES (35), (35): Xaa is C or S

SEQ ID NO: 48266 - protein, 40 aa, Artificial Sequence; identical to SEQ ID NO: 18307
  GFR-binding peptide
  MOD_RES (2), (36): Xaa is C or S
  MOD_RES (14), (15), (16), (17), (18): Xaa is A or G
  MOD_RES (19), (20), (21), (22): Xaa is A or G or is absent

SEQ ID NO: 48267 - protein, 39 aa, Artificial Sequence; identical to SEQ ID NO: 11226
  GFR-binding peptide
  MOD_RES (2), (4), (38), (39): Xaa is C or S
  MOD_RES (16), (17), (18), (19), (20): Xaa is A or G
  MOD_RES (21), (22), (23), (24): Xaa is A or G or is absent

SEQ ID NO: 48268 - protein, 35 aa, Artificial Sequence; identical to SEQ ID NO: 18308
  GFR-binding peptide
  MOD_RES (2), (2): Xaa is C or S
  MOD_RES (14), (15), (16), (17), (18): Xaa is A or G
  MOD_RES (19), (20), (21), (22): Xaa is A or G or is absent

SEQ ID NO: 48269 - protein, 35 aa, Artificial Sequence; identical to SEQ ID NO: 11228
  GFR-binding peptide
  MOD_RES (34), (35): Xaa is C or S
  MOD_RES (12), (13), (14), (15), (16): Xaa is A or G
  MOD_RES (17), (18), (19), (20): Xaa is A or G or is absent

SEQ ID NO: 48270 - protein, 37 aa, Artificial Sequence
  GFR-binding peptide
  MOD_RES (33), (34): Xaa is C or S
  MOD_RES (11), (12), (13), (14), (15): Xaa is A or G
  MOD_RES (16), (17), (18), (19): Xaa is A or G or is absent
RVVMNSMEGIXXXXXXXXXMIQVTINSLKTPAXXPKP

SEQ ID NO: 48271 - protein, 39 aa, Artificial Sequence; identical to SEQ ID NO: 18310
  GFR-binding peptide
  MOD_RES (1), (3): Xaa is C or S
  MOD_RES (16), (17), (18), (19), (20): Xaa is A or G
  MOD_RES (21), (22), (23), (24): Xaa is A or G or is absent

SEQ ID NO: 48272 - protein, 40 aa, Artificial Sequence
  GFR-binding peptide
  MOD_RES (2), (4), (38): Xaa is C or S
RXEXKNHQLFNSLQEHQGQHPKIRYYLMTLPEEETPVXEL

SEQ ID NO: 48273 - protein, 39 aa, Artificial Sequence; identical to SEQ ID NO: 11231
  GFR-binding peptide
  MOD_RES (34), (35): Xaa is C or S
  MOD_RES (12), (13), (14), (15), (16): Xaa is A or G
  MOD_RES (17), (18), (19), (20): Xaa is A or G or is absent

SEQ ID NO: 48274 - protein, 38 aa, Artificial Sequence
  GFR-binding peptide
  MOD_RES (33), (34): Xaa is C or S
  MOD_RES (11), (12), (13), (14), (15): Xaa is A or G
  MOD_RES (16), (17), (18), (19): Xaa is A or G or is absent
RVVMNVTAKKXXXXXXXXXIKRVQVPRLKTPAXXPKPV

SEQ ID NO: 48275 - protein, 41 aa, Artificial Sequence
  GFR-binding peptide
  MOD_RES (1), (3), (37), (38): Xaa is C or S
  MOD_RES (15), (16), (17), (18), (19): Xaa is A or G
  MOD_RES (20), (21), (22), (23): Xaa is A or G or is absent
XGXARVVMNSMEGIXXXXXXXXXMIQVTINSLQTPAXXPKP

SEQ ID NO: 48276 - protein, 31 aa, Artificial Sequence
  GFR-binding peptide
  MOD_RES (1), (1): Xaa is C or S
XSKVIMVTAKKIKPTKGIIKRIQVPRLDQSV

SEQ ID NO: 48277 - protein, 34 aa, Artificial Sequence; identical to SEQ ID NO: 18316
  GFR-binding peptide
  MOD_RES (34), (34): Xaa is C or S
  MOD_RES (12), (13), (14), (15), (16): Xaa is A or G
  MOD_RES (17), (18), (19), (20): Xaa is A or G or is absent

SEQ ID NO: 48278 - protein, 37 aa, Artificial Sequence
  GFR-binding peptide
  MOD_RES (1), (35), (36): Xaa is C or S
  MOD_RES (13), (14), (15), (16), (17): Xaa is A or G
  MOD_RES (18), (19), (20), (21): Xaa is A or G or is absent
XGEVVMESMEGIXXXXXXXXXMIQMTINSLETPVXXA

SEQ ID NO: 48279 - protein, 36 aa, Artificial Sequence; identical to SEQ ID NO: 11233
  GFR-binding peptide
  MOD_RES (31), (32): Xaa is C or S

SEQ ID NO: 48280 - protein, 30 aa, Artificial Sequence
  GFR-binding peptide
SKVIMVTAKKIKPTKGIIKRIQVPRLDQSV

SEQ ID NO: 48281 - protein, 39 aa, Artificial Sequence
  GFR-binding peptide
  MOD_RES (1), (3), (36), (37): Xaa is C or S
  MOD_RES (14), (15), (16), (17), (18): Xaa is A or G
  MOD_RES (19), (20), (21), (22): Xaa is A or G or is absent
XKXSRVIMVQVEKXXXXXXXXXVKAIKVSRLAQPVXXPA

SEQ ID NO: 48282 - protein, 40 aa, Artificial Sequence; identical to SEQ ID NO: 11236
  GFR-binding peptide
  MOD_RES (34), (35): Xaa is C or S
  MOD_RES (12), (13), (14), (15), (16): Xaa is A or G
  MOD_RES (17), (18), (19), (20): Xaa is A or G or is absent

SEQ ID NO: 48283 - protein, 36 aa, Artificial Sequence; identical to SEQ ID NO: 18320
  GFR-binding peptide
  MOD_RES (36), (36): Xaa is C or S

SEQ ID NO: 48284 - protein, 43 aa, Artificial Sequence; identical to SEQ ID NO: 18324
  GFR-binding peptide
  MOD_RES (2), (4), (41): Xaa is C or S

SEQ ID NO: 48285 - protein, 33 aa, Artificial Sequence
  GFR-binding peptide
  MOD_RES (32), (33): Xaa is C or S
GEVVMEVTAKKVVKDYEDIKRMQVPRLETPVXX

SEQ ID NO: 48286 - protein, 38 aa, Artificial Sequence
  GFR-binding peptide
  MOD_RES (1), (35): Xaa is C or S
XKNHQLFNSLQEHQGQHPKIRYYVMPLPEEETPVXELG

SEQ ID NO: 48287 - protein, 33 aa, Artificial Sequence
  GFR-binding peptide
  MOD_RES (1), (33): Xaa is C or S
XGEVVMDSMEGIVVKENEDMIQMTINSLETPVX

SEQ ID NO: 48288 - protein, 32 aa, Artificial Sequence; identical to SEQ ID NO: 11238
  GFR-binding peptide
  MOD_RES (31), (32): Xaa is C or S

SEQ ID NO: 48289 - protein, 39 aa, Artificial Sequence
  GFR-binding peptide
  MOD_RES (1), (33), (34): Xaa is C or S
XARVVMNVTAKKIVNSSDDIKRVQVPRLQTPAXXPKPVT

SEQ ID NO: 48290 - protein, 41 aa, Artificial Sequence; identical to SEQ ID NO: 18327
  GFR-binding peptide
  MOD_RES (1), (38): Xaa is C or S
  MOD_RES (14), (15), (16), (17), (18): Xaa is A or G
  MOD_RES (19), (20), (21), (22): Xaa is A or G or is absent

SEQ ID NO: 48291 - protein, 43 aa, Artificial Sequence; identical to SEQ ID NO: 18328
  GFR-binding peptide
  MOD_RES (1), (3), (40): Xaa is C or S
  MOD_RES (16), (17), (18), (19), (20): Xaa is A or G
  MOD_RES (21), (22), (23), (24): Xaa is A or G or is absent

SEQ ID NO: 48292 - protein, 37 aa, Artificial Sequence
  GFR-binding peptide
  MOD_RES (31), (32): Xaa is C or S
RVVMNVQVEKIVNSSDDVKAVKVSRLQTPAXXPKPVT

SEQ ID NO: 48293 - protein, 40 aa, Artificial Sequence
  GFR-binding peptide
  MOD_RES (1), (35), (36): Xaa is C or S
  MOD_RES (13), (14), (15), (16), (17): Xaa is A or G
  MOD_RES (18), (19), (20), (21): Xaa is A or G or is absent
XARVVMNSMEGIXXXXXXXXXMIQVTINSLQTPAXXPKPV

SEQ ID NO: 48294 - protein, 34 aa, Artificial Sequence
  GFR-binding peptide
  MOD_RES (31), (32): Xaa is C or S
SKVVMVTAKKVKPTRGVIKRIQVPRLDQPVXXPS

SEQ ID NO: 48295 - protein, 44 aa, Artificial Sequence; identical to SEQ ID NO: 18331
  GFR-binding peptide
  MOD_RES (2), (4), (38): Xaa is C or S

SEQ ID NO: 48296 - protein, 41 aa, Artificial Sequence
  GFR-binding peptide
  MOD_RES (37), (37): Xaa is C or S
ALHDELTNSLQEFIPKKRVIEYYVVPLPELQVQTPRXQVNR

SEQ ID NO: 48297 - protein, 39 aa, Artificial Sequence
  GFR-binding peptide
  MOD_RES (1), (3), (36), (37): Xaa is C or S
  MOD_RES (14), (15), (16), (17), (18): Xaa is A or G
  MOD_RES (19), (20), (21), (22): Xaa is A or G or is absent
XKXSKVIMVQVEKXXXXXXXXXVKAIKVSRLDQSVXXPS

SEQ ID NO: 48298 - protein, 32 aa, Artificial Sequence
  GFR-binding peptide
  MOD_RES (1), (1): Xaa is C or S
XSRVVMNVTAKKIVNSSDDIKRVQVPRLKTPA

SEQ ID NO: 48299 - protein, 32 aa, Artificial Sequence
  GFR-binding peptide
NHQLFNSLQEHQGQHPKIRYYLMTLPEEETPV

SEQ ID NO: 48300 - protein, 36 aa, Artificial Sequence
  GFR-binding peptide
  MOD_RES (32), (33): Xaa is C or S
GEVVMESMEGIVVKDYEDMIQMTINSLETPVXXAKP

SEQ ID NO: 48301 - protein, 38 aa, Artificial Sequence
  GFR-binding peptide
  MOD_RES (2), (36): Xaa is C or S
  MOD_RES (14), (15), (16), (17), (18): Xaa is A or G
  MOD_RES (19), (20), (21), (22): Xaa is A or G or is absent
GXSRVVMNVTAKKXXXXXXXXXIKRVQVPRLKTPAXTP

SEQ ID NO: 48302 - protein, 36 aa, Artificial Sequence; identical to SEQ ID NO: 18334
  GFR-binding peptide
  MOD_RES (1), (1): Xaa is C or S
  MOD_RES (14), (15), (16), (17), (18): Xaa is A or G
  MOD_RES (19), (20), (21), (22): Xaa is A or G or is absent

SEQ ID NO: 48303 - protein, 40 aa, Artificial Sequence; identical to SEQ ID NO: 11246
  GFR-binding peptide
  MOD_RES (2), (34), (35): Xaa is C or S

SEQ ID NO: 48304 - protein, 39 aa, Artificial Sequence
  GFR-binding peptide
  MOD_RES (2), (36), (37): Xaa is C or S
  MOD_RES (14), (15), (16), (17), (18): Xaa is A or G
  MOD_RES (19), (20), (21), (22): Xaa is A or G or is absent
GXGEVVMEVTAKKXXXXXXXXXIKRMQVPRLETPVXXAK

SEQ ID NO: 48305 - protein, 36 aa, Artificial Sequence
  GFR-binding peptide
  MOD_RES (31), (31): Xaa is C or S
RVVMNSMEGIIVNSSDDMIQVTINSLKTPAXTPKTV

SEQ ID NO: 48306 - protein, 40 aa, Artificial Sequence
  GFR-binding peptide
  MOD_RES (2), (4), (36): Xaa is C or S
HXGXSRVVMNSMEGIIVNSSDDMIQVTINSLKTPAXTPKT

SEQ ID NO: 48307 - protein, 38 aa, Artificial Sequence; identical to SEQ ID NO: 18337
  GFR-binding peptide
  MOD_RES (1), (35): Xaa is C or S
  MOD_RES (13), (14), (15), (16), (17): Xaa is A or G
  MOD_RES (18), (19), (20), (21): Xaa is A or G or is absent

SEQ ID NO: 48308 - protein, 39 aa, Artificial Sequence
  GFR-binding peptide
  MOD_RES (1), (35): Xaa is C or S
XKNHQLFNSLQEHQGQHPKIRYYVMPLPEEETPVXELGE

SEQ ID NO: 48309 - protein, 40 aa, Artificial Sequence
  GFR-binding peptide
  MOD_RES (2), (4): Xaa is C or S
  MOD_RES (17), (18), (19), (20), (21): Xaa is A or G
  MOD_RES (22), (23), (24), (25): Xaa is A or G or is absent
EXKXALHDELTNSLQEXXXXXXXXXYYVVPLPELQVQTPR

SEQ ID NO: 48310 - protein, 34 aa, Artificial Sequence
  GFR-binding peptide
  MOD_RES (1), (32), (33): Xaa is C or S
XSKVIMVQVEKIKPTKGIVKAIKVSRLDQSVXXP

SEQ ID NO: 48311 - protein, 42 aa, Artificial Sequence
  GFR-binding peptide
  MOD_RES (2), (4), (41): Xaa is C or S
EXKXALHDELTNSLQEFIPKKRVIEYYVVPLPELQVQTPRXQ

SEQ ID NO: 48312 - protein, 37 aa, Artificial Sequence
  GFR-binding peptide
  MOD_RES (2), (36): Xaa is C or S
  MOD_RES (14), (15), (16), (17), (18): Xaa is A or G
  MOD_RES (19), (20), (21), (22): Xaa is A or G or is absent
EXKNHQLFNSLQEXXXXXXXXXYYLMTLPEEETPVXE

SEQ ID NO: 48313 - protein, 42 aa, Artificial Sequence; identical to SEQ ID NO: 11249
  GFR-binding peptide
  MOD_RES (2), (36), (37): Xaa is C or S
  MOD_RES (14), (15), (16), (17), (18): Xaa is A or G
  MOD_RES (19), (20), (21), (22): Xaa is A or G or is absent

SEQ ID NO: 48314 - protein, 38 aa, Artificial Sequence; identical to SEQ ID NO: 11250
  GFR-binding peptide
  MOD_RES (2), (36), (37): Xaa is C or S
  MOD_RES (14), (15), (16), (17), (18): Xaa is A or G
  MOD_RES (19), (20), (21), (22): Xaa is A or G or is absent

SEQ ID NO: 48315 - protein, 35 aa, Artificial Sequence
  GFR-binding peptide
  MOD_RES (1), (35): Xaa is C or S
  MOD_RES (13), (14), (15), (16), (17): Xaa is A or G
  MOD_RES (18), (19), (20), (21): Xaa is A or G or is absent
XGEVVMDVTAKKXXXXXXXXXIKRMQVPRLETPVX

SEQ ID NO: 48316 - protein, 43 aa, Artificial Sequence
  GFR-binding peptide
  MOD_RES (2), (4), (38): Xaa is C or S
  MOD_RES (16), (17), (18), (19), (20): Xaa is A or G
  MOD_RES (21), (22), (23), (24): Xaa is A or G or is absent
HXGXSRVVMNSMEGIXXXXXXXXXMIQVTINSLKTPAXTPKTV

SEQ ID NO: 48317 - protein, 38 aa, Artificial Sequence; identical to SEQ ID NO: 18342
  GFR-binding peptide
  MOD_RES (1), (3): Xaa is C or S

SEQ ID NO: 48318 - protein, 32 aa, Artificial Sequence; identical to SEQ ID NO: 37894
  GFR-binding peptide
  MOD_RES (31), (32): Xaa is C or S

SEQ ID NO: 48319 - protein, 38 aa, Artificial Sequence
  GFR-binding peptide
  MOD_RES (2), (36), (37): Xaa is C or S
  MOD_RES (14), (15), (16), (17), (18): Xaa is A or G
  MOD_RES (19), (20), (21), (22): Xaa is A or G or is absent
GXGEVVMDVTAKKXXXXXXXXXIKRMQVPRLETPVXXA

SEQ ID NO: 48320 - protein, 36 aa, Artificial Sequence
  GFR-binding peptide
  MOD_RES (1), (32), (33): Xaa is C or S
XSKVIMVQVEKIKPTKGIVKAIKVSRLDQSVXXPSA

SEQ ID NO: 48321 - protein, 33 aa, Artificial Sequence; identical to SEQ ID NO: 11254
  GFR-binding peptide
  MOD_RES (33), (33): Xaa is C or S
  MOD_RES (11), (12), (13), (14), (15): Xaa is A or G
  MOD_RES (16), (17), (18), (19): Xaa is A or G or is absent

SEQ ID NO: 48322 - protein, 34 aa, Artificial Sequence; identical to SEQ ID NO: 18344
  GFR-binding peptide
  MOD_RES (13), (14), (15), (16), (17): Xaa is A or G
  MOD_RES (18), (19), (20), (21): Xaa is A or G or is absent

SEQ ID NO: 48323 - protein, 34 aa, Artificial Sequence
  GFR-binding peptide
  MOD_RES (13), (14), (15), (16), (17): Xaa is A or G
  MOD_RES (18), (19), (20), (21): Xaa is A or G or is absent
ALHDELTNSLQEXXXXXXXXXYYVVPLPELQVQT

SEQ ID NO: 48324 - protein, 36 aa, Artificial Sequence
  GFR-binding peptide
  MOD_RES (2), (4), (35), (36): Xaa is C or S
SXKXSKVVMVTAKKVKPTRGVIKRIQVPRLDQPVXX

SEQ ID NO: 48325 - protein, 35 aa, Artificial Sequence; identical to SEQ ID NO: 18347
  GFR-binding peptide

SEQ ID NO: 48326 - protein, 35 aa, Artificial Sequence
  GFR-binding peptide
  MOD_RES (2), (4), (35): Xaa is C or S
SXKXSRVIMVTAKKVKPKRGVIKRIQVPRLAQPVX

SEQ ID NO: 48327 - protein, 39 aa, Artificial Sequence
  GFR-binding peptide
  MOD_RES (2), (4), (38): Xaa is C or S
RXEXKNHQLFNSLQEHQGQHPKIRYYVMPLPEEETPVXE

SEQ ID NO: 48328 - protein, 41 aa, Artificial Sequence
  GFR-binding peptide
  MOD_RES (2), (4), (38), (39): Xaa is C or S
  MOD_RES (16), (17), (18), (19), (20): Xaa is A or G
  MOD_RES (21), (22), (23), (24): Xaa is A or G or is absent
HXGXARVVMNVQVEKXXXXXXXXXVKAVKVSRLQTPAXXPK

SEQ ID NO: 48329 - protein, 39 aa, Artificial Sequence
  GFR-binding peptide
  MOD_RES (33), (34): Xaa is C or S
  MOD_RES (11), (12), (13), (14), (15): Xaa is A or G
  MOD_RES (16), (17), (18), (19): Xaa is A or G or is absent
EVVMDVQVEKXXXXXXXXXVKAMKVSRLETPVXXAKPIK

SEQ ID NO: 48330 - protein, 39 aa, Artificial Sequence; identical to SEQ ID NO: 11258
  GFR-binding peptide
  MOD_RES (1), (3), (35), (36): Xaa is C or S

SEQ ID NO: 48331 - protein, 34 aa, Artificial Sequence; identical to SEQ ID NO: 11259
  GFR-binding peptide
  MOD_RES (33), (34): Xaa is C or S
  MOD_RES (11), (12), (13), (14), (15): Xaa is A or G
  MOD_RES (16), (17), (18), (19): Xaa is A or G or is absent

SEQ ID NO: 48332 - protein, 44 aa, Artificial Sequence; identical to SEQ ID NO: 18351
  GFR-binding peptide
  MOD_RES (1), (3), (40): Xaa is C or S
  MOD_RES (16), (17), (18), (19), (20): Xaa is A or G
  MOD_RES (21), (22), (23), (24): Xaa is A or G or is absent

SEQ ID NO: 48333 - protein, 39 aa, Artificial Sequence; identical to SEQ ID NO: 11262
  GFR-binding peptide
  MOD_RES (2), (33), (34): Xaa is C or S

SEQ ID NO: 48334 - protein, 33 aa, Artificial Sequence
  GFR-binding peptide
LHDELTNSLQEFIPKKRVIEYYVVPLPELQVQT

SEQ ID NO: 48335 - protein, 41 aa, Artificial Sequence; identical to SEQ ID NO: 11265
  GFR-binding peptide
  MOD_RES (1), (35): Xaa is C or S
  MOD_RES (13), (14), (15), (16), (17): Xaa is A or G
  MOD_RES (18), (19), (20), (21): Xaa is A or G or is absent

SEQ ID NO: 48336 - protein, 38 aa, Artificial Sequence
  GFR-binding peptide
  MOD_RES (1), (35): Xaa is C or S
  MOD_RES (13), (14), (15), (16), (17): Xaa is A or G
  MOD_RES (18), (19), (20), (21): Xaa is A or G or is absent
XSRVVMNVQVEKXXXXXXXXXVKAVKVSRLKTPAXTPK

SEQ ID NO: 48337 - protein, 37 aa, Artificial Sequence; identical to SEQ ID NO: 18358
  GFR-binding peptide
  MOD_RES (1), (3), (37): Xaa is C or S
  MOD_RES (15), (16), (17), (18), (19): Xaa is A or G
  MOD_RES (20), (21), (22), (23): Xaa is A or G or is absent

SEQ ID NO: 48338 - protein, 42 aa, Artificial Sequence; identical to SEQ ID NO: 11268
  GFR-binding peptide
  MOD_RES (2), (4), (36), (37): Xaa is C or S

SEQ ID NO: 48339 - protein, 34 aa, Artificial Sequence; identical to SEQ ID NO: 18359
  GFR-binding peptide
  MOD_RES (34), (34): Xaa is C or S

SEQ ID NO: 48340 - protein, 39 aa, Artificial Sequence; identical to SEQ ID NO: 11270
  GFR-binding peptide
  MOD_RES (2), (4), (36), (37): Xaa is C or S

SEQ ID NO: 48341 - protein, 39 aa, Artificial Sequence
  GFR-binding peptide
  MOD_RES (1), (33), (34): Xaa is C or S
XGEVVMEVTAKKVVKDYEDIKRMQVPRLETPVXXAKPIS

SEQ ID NO: 48342 - protein, 38 aa, Artificial Sequence
  GFR-binding peptide
  MOD_RES (1), (35): Xaa is C or S
  MOD_RES (13), (14), (15), (16), (17): Xaa is A or G
  MOD_RES (18), (19), (20), (21): Xaa is A or G or is absent
XKNHQLFNSLQEXXXXXXXXXYYVMPLPEEETPVXELG

SEQ ID NO: 48343 - protein, 40 aa, Artificial Sequence; identical to SEQ ID NO: 18361
  GFR-binding peptide
  MOD_RES (1), (38): Xaa is C or S

SEQ ID NO: 48344 - protein, 34 aa, Artificial Sequence
  GFR-binding peptide
  MOD_RES (31), (32): Xaa is C or S
RVVMNVQVEKIVNSSDDVKAVKVSRLKTPAXXPK

SEQ ID NO: 48345 - protein, 38 aa, Artificial Sequence; identical to SEQ ID NO: 18364
  GFR-binding peptide
  MOD_RES (35), (35): Xaa is C or S
  MOD_RES (11), (12), (13), (14), (15): Xaa is A or G
  MOD_RES (16), (17), (18), (19): Xaa is A or G or is absent

SEQ ID NO: 48346 - protein, 38 aa, Artificial Sequence; identical to SEQ ID NO: 11272
  GFR-binding peptide
  MOD_RES (2), (33), (34): Xaa is C or S

SEQ ID NO: 48347 - protein, 38 aa, Artificial Sequence; identical to SEQ ID NO: 11274
  GFR-binding peptide
  MOD_RES (1), (3), (35), (36): Xaa is C or S

SEQ ID NO: 48348 - protein, 42 aa, Artificial Sequence; identical to SEQ ID NO: 18365
  GFR-binding peptide
  MOD_RES (1), (3), (40): Xaa is C or S
  MOD_RES (16), (17), (18), (19), (20): Xaa is A or G
  MOD_RES (21), (22), (23), (24): Xaa is A or G or is absent

SEQ ID NO: 48349 - protein, 39 aa, Artificial Sequence; identical to SEQ ID NO: 18368
  GFR-binding peptide
  MOD_RES (2), (39): Xaa is C or S
  MOD_RES (15), (16), (17), (18), (19): Xaa is A or G
  MOD_RES (20), (21), (22), (23): Xaa is A or G or is absent

SEQ ID NO: 48350 - protein, 35 aa, Artificial Sequence; identical to SEQ ID NO: 11276
  GFR-binding peptide
  MOD_RES (32), (33): Xaa is C or S

SEQ ID NO: 48351 - protein, 42 aa, Artificial Sequence
  GFR-binding peptide
  MOD_RES (2), (4), (36), (37): Xaa is C or S
RXGXGEVVMDVTAKKVVKENEDIKRMQVPRLETPVXXAKPIK

SEQ ID NO: 48352 - protein, 35 aa, Artificial Sequence; identical to SEQ ID NO: 18369
  GFR-binding peptide
  MOD_RES (34), (34): Xaa is C or S
  MOD_RES (12), (13), (14), (15), (16): Xaa is A or G
  MOD_RES (17), (18), (19), (20): Xaa is A or G or is absent

SEQ ID NO: 48353 - protein, 41 aa, Artificial Sequence
  GFR-binding peptide
  MOD_RES (2), (36), (37): Xaa is C or S
  MOD_RES (14), (15), (16), (17), (18): Xaa is A or G
  MOD_RES (19), (20), (21), (22): Xaa is A or G or is absent
GXARVVMNVTAKKXXXXXXXXXIKRVQVPRLQTPAXXPKPV

SEQ ID NO: 48354 - protein, 40 aa, Artificial Sequence; identical to SEQ ID NO: 11279
  GFR-binding peptide
  MOD_RES (1), (34), (35): Xaa is C or S
  MOD_RES (12), (13), (14), (15), (16): Xaa is A or G
  MOD_RES (17), (18), (19), (20): Xaa is A or G or is absent

SEQ ID NO: 48355 - protein, 39 aa, Artificial Sequence; identical to SEQ ID NO: 18370
  GFR-binding peptide
  MOD_RES (36), (36): Xaa is C or S
  MOD_RES (12), (13), (14), (15), (16): Xaa is A or G
  MOD_RES (17), (18), (19), (20): Xaa is A or G or is absent

SEQ ID NO: 48356 - protein, 40 aa, Artificial Sequence; identical to SEQ ID NO: 18372
  GFR-binding peptide
  MOD_RES (1), (38): Xaa is C or S

SEQ ID NO: 48357 - protein, 35 aa, Artificial Sequence; identical to SEQ ID NO: 11282
  GFR-binding peptide
  MOD_RES (31), (32): Xaa is C or S

SEQ ID NO: 48358 - protein, 32 aa, Artificial Sequence
  GFR-binding peptide
  MOD_RES (1), (1): Xaa is C or S
XGEVVMDSMEGIVVKENEDMIQMTINSLETPV

SEQ ID NO: 48359 - protein, 41 aa, Artificial Sequence
  GFR-binding peptide
  MOD_RES (2), (36): Xaa is C or S
  MOD_RES (14), (15), (16), (17), (18): Xaa is A or G
  MOD_RES (19), (20), (21), (22): Xaa is A or G or is absent
GXSRVVMNVTAKKXXXXXXXXXIKRVQVPRLKTPAXTPKTV

SEQ ID NO: 48360 - protein, 37 aa, Artificial Sequence
  GFR-binding peptide
  MOD_RES (2), (4), (35), (36): Xaa is C or S
SXKXSRVIMSMEGIVKPKRGVMIQITINSLAQPVXXP

SEQ ID NO: 48361 - protein, 37 aa, Artificial Sequence; identical to SEQ ID NO: 11285
  GFR-binding peptide
  MOD_RES (33), (34): Xaa is C or S
  MOD_RES (11), (12), (13), (14), (15): Xaa is A or G
  MOD_RES (16), (17), (18), (19): Xaa is A or G or is absent

SEQ ID NO: 48362 - protein, 37 aa, Artificial Sequence; identical to SEQ ID NO: 11286
  GFR-binding peptide
  MOD_RES (2), (4), (35), (36): Xaa is C or S

SEQ ID NO: 48363 - protein, 34 aa, Artificial Sequence
  GFR-binding peptide
  MOD_RES (32), (33): Xaa is C or S
GEVVMEVQVEKVVKDYEDVKAMKVSRLETPVXXA

SEQ ID NO: 48364 - protein, 40 aa, Artificial Sequence
  GFR-binding peptide
  MOD_RES (1), (3), (37), (38): Xaa is C or S
  MOD_RES (15), (16), (17), (18), (19): Xaa is A or G
  MOD_RES (20), (21), (22), (23): Xaa is A or G or is absent
XGXARVVMNVQVEKXXXXXXXXXVKAVKVSRLQTPAXXPK

SEQ ID NO: 48365 - protein, 39 aa, Artificial Sequence
  GFR-binding peptide
  MOD_RES (35), (35): Xaa is C or S
  MOD_RES (11), (12), (13), (14), (15): Xaa is A or G
  MOD_RES (16), (17), (18), (19): Xaa is A or G or is absent
HDELTNSLQEXXXXXXXXXYYLVTLPELQVQTPRXQVNR

SEQ ID NO: 48366 - protein, 36 aa, Artificial Sequence; identical to SEQ ID NO: 18373
  GFR-binding peptide
  MOD_RES (35), (35): Xaa is C or S

SEQ ID NO: 48367 - protein, 37 aa, Artificial Sequence; identical to SEQ ID NO: 11288
  GFR-binding peptide
  MOD_RES (2), (4), (35), (36): Xaa is C or S

SEQ ID NO: 48368 - protein, 37 aa, Artificial Sequence
  GFR-binding peptide
  MOD_RES (2), (4), (37): Xaa is C or S
  MOD_RES (15), (16), (17), (18), (19): Xaa is A or G
  MOD_RES (20), (21), (22), (23): Xaa is A or G or is absent
SXKXSKVVMVQVEKXXXXXXXXXVKAIKVSRLDQPVX

SEQ ID NO: 48369 - protein, 40 aa, Artificial Sequence
  GFR-binding peptide
  MOD_RES (1), (3), (34), (35): Xaa is C or S
XKXSRVIMVTAKKVKPKRGVIKRIQVPRLAQPVXXPAASA

SEQ ID NO: 48370 - protein, 37 aa, Artificial Sequence
  GFR-binding peptide
  MOD_RES (1), (3), (36), (37): Xaa is C or S
  MOD_RES (14), (15), (16), (17), (18): Xaa is A or G
  MOD_RES (19), (20), (21), (22): Xaa is A or G or is absent
XKXSKVIMVQVEKXXXXXXXXXVKAIKVSRLDQSVXX

SEQ ID NO: 48371 - protein, 36 aa, Artificial Sequence; identical to SEQ ID NO: 37950
  GFR-binding peptide
  MOD_RES (2), (4): Xaa is C or S
  MOD_RES (15), (16), (17), (18), (19): Xaa is A or G
  MOD_RES (20), (21), (22), (23): Xaa is A or G or is absent

SEQ ID NO: 48372 - protein, 38 aa, Artificial Sequence
  GFR-binding peptide
  MOD_RES (32), (33): Xaa is C or S
GEVVMDVTAKKVVKENEDIKRMQVPRLETPVXXAKPIK

SEQ ID NO: 48373 - protein, 33 aa, Artificial Sequence; identical to SEQ ID NO: 18384
  GFR-binding peptide

SEQ ID NO: 48374 - protein, 36 aa, Artificial Sequence
  GFR-binding peptide
ELHEELRNSLQELKPKKRVYEYYLVTLPEHHVRSPQ

SEQ ID NO: 48375 - protein, 33 aa, Artificial Sequence
  GFR-binding peptide
  MOD_RES (33), (33): Xaa is C or S
  MOD_RES (11), (12), (13), (14), (15): Xaa is A or G
  MOD_RES (16), (17), (18), (19): Xaa is A or G or is absent
SKVIMVTAKKXXXXXXXXXIKRIQVPRLDQSVX

SEQ ID NO: 48376 - protein, 39 aa, Artificial Sequence
  GFR-binding peptide
  MOD_RES (1), (3), (35), (36): Xaa is C or S
XGXARVVMNSMEGIIVNSSDDMIQVTINSLQTPAXXPKP

SEQ ID NO: 48377 - protein, 34 aa, Artificial Sequence
  GFR-binding peptide
  MOD_RES (2), (34): Xaa is C or S
GXGEVVMDSMEGIVVKENEDMIQMTINSLETPVX

SEQ ID NO: 48378 - protein, 38 aa, Artificial Sequence
  GFR-binding peptide
  MOD_RES (36), (36): Xaa is C or S
LHEELRNSLQELKPKKRVYEYYLVTLPEHHVRSPQXKV

SEQ ID NO: 48379 - protein, 33 aa, Artificial Sequence
  GFR-binding peptide
  MOD_RES (2), (2): Xaa is C or S
GXSRVVMNSMEGIIVNSSDDMIQVTINSLKTPA

SEQ ID NO: 48380 - protein, 34 aa, Artificial Sequence; identical to SEQ ID NO: 18387
  GFR-binding peptide
  MOD_RES (13), (14), (15), (16), (17): Xaa is A or G
  MOD_RES (18), (19), (20), (21): Xaa is A or G or is absent

SEQ ID NO: 48381 - protein, 38 aa, Artificial Sequence
  GFR-binding peptide
  MOD_RES (1), (3), (35), (36): Xaa is C or S
XGXARVVMNSMEGIIVNSSDDMIQVTINSLQTPAXXPK

SEQ ID NO: 48382 - protein, 40 aa, Artificial Sequence
  GFR-binding peptide
  MOD_RES (34), (34): Xaa is C or S
  MOD_RES (12), (13), (14), (15), (16): Xaa is A or G
  MOD_RES (17), (18), (19), (20): Xaa is A or G or is absent
SRVVMNVTAKKXXXXXXXXXIKRVQVPRLKTPAXTPKTVH

SEQ ID NO: 48383 - protein, 33 aa, Artificial Sequence; identical to SEQ ID NO: 18388
  GFR-binding peptide

SEQ ID NO: 48384 - protein, 41 aa, Artificial Sequence
  GFR-binding peptide
  MOD_RES (1), (3), (35), (36): Xaa is C or S
XGXGEVVMEVTAKKVVKDYEDIKRMQVPRLETPVXXAKPIS

SEQ ID NO: 48385 - protein, 44 aa, Artificial Sequence; identical to SEQ ID NO: 18390
  GFR-binding peptide
  MOD_RES (2), (4), (41): Xaa is C or S

SEQ ID NO: 48386 - protein, 36 aa, Artificial Sequence; identical to SEQ ID NO: 37964
  GFR-binding peptide
  MOD_RES (1), (3), (34), (35): Xaa is C or S

SEQ ID NO: 48387 - protein, 31 aa, Artificial Sequence
  GFR-binding peptide
  MOD_RES (31), (31): Xaa is C or S
SKVVMVQVEKVKPTRGVVKAIKVSRLDQPVX

SEQ ID NO: 48388 - protein, 40 aa, Artificial Sequence
  GFR-binding peptide
  MOD_RES (2), (4), (37), (38): Xaa is C or S
  MOD_RES (15), (16), (17), (18), (19): Xaa is A or G
  MOD_RES (20), (21), (22), (23): Xaa is A or G or is absent
SXKXSKVIMVQVEKXXXXXXXXXVKAIKVSRLDQSVXXPS

SEQ ID NO: 48389 - protein, 38 aa, Artificial Sequence
  GFR-binding peptide
  MOD_RES (2), (35), (36): Xaa is C or S
  MOD_RES (13), (14), (15), (16), (17): Xaa is A or G
  MOD_RES (18), (19), (20), (21): Xaa is A or G or is absent
KXSRVIMVQVEKXXXXXXXXXVKAIKVSRLAQPVXXPA

SEQ ID NO: 48390 - protein, 38 aa, Artificial Sequence
  GFR-binding peptide
  MOD_RES (2), (34), (35): Xaa is C or S
GXSRVVMNVQVEKIVNSSDDVKAVKVSRLKTPAXXPKP

SEQ ID NO: 48391 - protein, 40 aa, Artificial Sequence; identical to SEQ ID NO: 11299
  GFR-binding peptide
  MOD_RES (2), (4), (36): Xaa is C or S

SEQ ID NO: 48392 - protein, 38 aa, Artificial Sequence
  GFR-binding peptide
  MOD_RES (2), (4), (38): Xaa is C or S
  MOD_RES (16), (17), (18), (19), (20): Xaa is A or G
  MOD_RES (21), (22), (23), (24): Xaa is A or G or is absent
RXGXGEVVMESMEGIXXXXXXXXXMIQMTINSLETPVX

SEQ ID NO: 48393 - protein, 33 aa, Artificial Sequence
  GFR-binding peptide
  MOD_RES (31), (32): Xaa is C or S
EVVMESMEGIVVKDYEDMIQMTINSLETPVXXA

SEQ ID NO: 48394 - protein, 40 aa, Artificial Sequence; identical to SEQ ID NO: 18399
  GFR-binding peptide
  MOD_RES (34), (34): Xaa is C or S

SEQ ID NO: 48395 - protein, 40 aa, Artificial Sequence
  GFR-binding peptide
  MOD_RES (36), (36): Xaa is C or S
  MOD_RES (12), (13), (14), (15), (16): Xaa is A or G
  MOD_RES (17), (18), (19), (20): Xaa is A or G or is absent
LHEELRNSLQEXXXXXXXXXYYVVPLPEHHVRSPQXKVSS

SEQ ID NO: 48396 - protein, 35 aa, Artificial Sequence
  GFR-binding peptide
  MOD_RES (1), (3): Xaa is C or S
  MOD_RES (14), (15), (16), (17), (18): Xaa is A or G
  MOD_RES (19), (20), (21), (22): Xaa is A or G or is absent
XKXSKVIMVTAKKXXXXXXXXXIKRIQVPRLDQSV

SEQ ID NO: 48397 - protein, 35 aa, Artificial Sequence; identical to SEQ ID NO: 18400
  GFR-binding peptide

SEQ ID NO: 48398 - protein, 39 aa, Artificial Sequence; identical to SEQ ID NO: 18401
  GFR-binding peptide
  MOD_RES (35), (35): Xaa is C or S

SEQ ID NO: 48399 - protein, 35 aa, Artificial Sequence
  GFR-binding peptide
  MOD_RES (2), (35): Xaa is C or S
  MOD_RES (13), (14), (15), (16), (17): Xaa is A or G
  MOD_RES (18), (19), (20), (21): Xaa is A or G or is absent
KXSRVIMSMEGIXXXXXXXXXMIQITINSLAQPVX

SEQ ID NO: 48400 - protein, 39 aa, Artificial Sequence
  GFR-binding peptide
  MOD_RES (35), (35): Xaa is C or S
HDELTNSLQEFIPKKRVIEYYLVTLPELQVQTPRXQVNR

SEQ ID NO: 48401 - protein, 37 aa, Artificial Sequence
  GFR-binding peptide
  MOD_RES (2), (4), (36): Xaa is C or S
HXGXSRVVMNVTAKKIVNSSDDIKRVQVPRLKTPAXT

SEQ ID NO: 48402 - protein, 37 aa, Artificial Sequence; identical to SEQ ID NO: 18403
  GFR-binding peptide
  MOD_RES (2), (2): Xaa is C or S
  MOD_RES (15), (16), (17), (18), (19): Xaa is A or G
  MOD_RES (20), (21), (22), (23): Xaa is A or G or is absent

SEQ ID NO: 48403 - protein, 36 aa, Artificial Sequence; identical to SEQ ID NO: 18404
  GFR-binding peptide

SEQ ID NO: 48404 - protein, 37 aa, Artificial Sequence; identical to SEQ ID NO: 18405
  GFR-binding peptide
  MOD_RES (1), (1): Xaa is C or S
  MOD_RES (14), (15), (16), (17), (18): Xaa is A or G
  MOD_RES (19), (20), (21), (22): Xaa is A or G or is absent

SEQ ID NO: 48405 - protein, 38 aa, Artificial Sequence
  GFR-binding peptide
  MOD_RES (1), (33), (34): Xaa is C or S
XARVVMNVQVEKIVNSSDDVKAVKVSRLQTPAXXPKPV

SEQ ID NO: 48406 - protein, 34 aa, Artificial Sequence; identical to SEQ ID NO: 18407
  GFR-binding peptide
  MOD_RES (12), (13), (14), (15), (16): Xaa is A or G
  MOD_RES (17), (18), (19), (20): Xaa is A or G or is absent

SEQ ID NO: 48407 - protein, 39 aa, Artificial Sequence
  GFR-binding peptide
  MOD_RES (2), (4), (35), (36): Xaa is C or S
SXKXSKVIMVQVEKIKPTKGIVKAIKVSRLDQSVXXPSA

SEQ ID NO: 48408 - protein, 39 aa, Artificial Sequence; identical to SEQ ID NO: 11306
  GFR-binding peptide
  MOD_RES (1), (3), (35), (36): Xaa is C or S

SEQ ID NO: 48409 - protein, 39 aa, Artificial Sequence
  GFR-binding peptide
  MOD_RES (1), (33), (34): Xaa is C or S
XSRVVMNVQVEKIVNSSDDVKAVKVSRLKTPAXXPKPVY

SEQ ID NO: 48410 - protein, 38 aa, Artificial Sequence; identical to SEQ ID NO: 18411
  GFR-binding peptide
  MOD_RES (36), (36): Xaa is C or S
  MOD_RES (12), (13), (14), (15), (16): Xaa is A or G
  MOD_RES (17), (18), (19), (20): Xaa is A or G or is absent

SEQ ID NO: 48411 - protein, 39 aa, Artificial Sequence
  GFR-binding peptide
  MOD_RES (1), (3), (37): Xaa is C or S
XEXKNHQLFNSLQEHQGQHPKIRYYVMPLPEEETPVXEL

SEQ ID NO: 48412 - protein, 38 aa, Artificial Sequence
  GFR-binding peptide
  MOD_RES (36), (36): Xaa is C or S
  MOD_RES (12), (13), (14), (15), (16): Xaa is A or G
  MOD_RES (17), (18), (19), (20): Xaa is A or G or is absent
LHDELTNSLQEXXXXXXXXXYYVVPLPELQVQTPRXQV

SEQ ID NO: 48413 - protein, 39 aa, Artificial Sequence
  GFR-binding peptide
  MOD_RES (1), (34), (35): Xaa is C or S
  MOD_RES (12), (13), (14), (15), (16): Xaa is A or G
  MOD_RES (17), (18), (19), (20): Xaa is A or G or is absent
XSKVVMVTAKKXXXXXXXXXIKRIQVPRLDQPVXXPSAS

SEQ ID NO: 48414 - protein, 35 aa, Artificial Sequence
  GFR-binding peptide
  MOD_RES (2), (34), (35): Xaa is C or S
GXARVVMNSMEGIIVNSSDDMIQVTINSLQTPAXX

SEQ ID NO: 48415 - protein, 38 aa, Artificial Sequence; identical to SEQ ID NO: 18412
  GFR-binding peptide
  MOD_RES (36), (36): Xaa is C or S

SEQ ID NO: 48416 - protein, 40 aa, Artificial Sequence; identical to SEQ ID NO: 18413
  GFR-binding peptide
  MOD_RES (2), (4): Xaa is C or S
  MOD_RES (17), (18), (19), (20), (21): Xaa is A or G
  MOD_RES (22), (23), (24), (25): Xaa is A or G or is absent

SEQ ID NO: 48417 - protein, 32 aa, Artificial Sequence
  GFR-binding peptide
  MOD_RES (11), (12), (13), (14), (15): Xaa is A or G
  MOD_RES (16), (17), (18), (19): Xaa is A or G or is absent
EVVMEVTAKKXXXXXXXXXIKRMQVPRLETPV

SEQ ID NO: 48418 - protein, 41 aa, Artificial Sequence; identical to SEQ ID NO: 11311
  GFR-binding peptide
  MOD_RES (1), (35), (36): Xaa is C or S
  MOD_RES (13), (14), (15), (16), (17): Xaa is A or G
  MOD_RES (18), (19), (20), (21): Xaa is A or G or is absent

SEQ ID NO: 48419 - protein, 37 aa, Artificial Sequence; identical to SEQ ID NO: 11313
  GFR-binding peptide
  MOD_RES (1), (32), (33): Xaa is C or S

SEQ ID NO: 48420 - protein, 43 aa, Artificial Sequence; identical to SEQ ID NO: 18416
  GFR-binding peptide
  MOD_RES (1), (3), (40): Xaa is C or S

SEQ ID NO: 48421 - protein, 40 aa, Artificial Sequence; identical to SEQ ID NO: 18417
  GFR-binding peptide
  MOD_RES (2), (39): Xaa is C or S

SEQ ID NO: 48422 - protein, 42 aa, Artificial Sequence; identical to SEQ ID NO: 11314
  GFR-binding peptide
  MOD_RES (2), (36): Xaa is C or S
  MOD_RES (14), (15), (16), (17), (18): Xaa is A or G
  MOD_RES (19), (20), (21), (22): Xaa is A or G or is absent

SEQ ID NO: 48423 - protein, 37 aa, Artificial Sequence
  GFR-binding peptide
  MOD_RES (1), (35): Xaa is C or S
  MOD_RES (13), (14), (15), (16), (17): Xaa is A or G
  MOD_RES (18), (19), (20), (21): Xaa is A or G or is absent
XSRVVMNSMEGIXXXXXXXXXMIQVTINSLKTPAXTP

SEQ ID NO: 48424 - protein, 37 aa, Artificial Sequence
  GFR-binding peptide
  MOD_RES (2), (4), (35), (36): Xaa is C or S
SXKXSKVVMVTAKKVKPTRGVIKRIQVPRLDQPVXXP

SEQ ID NO: 48425 - protein, 32 aa, Artificial Sequence
  GFR-binding peptide
  MOD_RES (11), (12), (13), (14), (15): Xaa is A or G
  MOD_RES (16), (17), (18), (19): Xaa is A or G or is absent
RVVMNVQVEKXXXXXXXXXVKAVKVSRLKTPA

SEQ ID NO: 48426 - protein, 34 aa, Artificial Sequence
  GFR-binding peptide
  MOD_RES (1), (33), (34): Xaa is C or S
XGEVVMDVQVEKVVKENEDVKAMKVSRLETPVXX

SEQ ID NO: 48427 - protein, 39 aa, Artificial Sequence
  GFR-binding peptide
  MOD_RES (1), (35): Xaa is C or S
  MOD_RES (13), (14), (15), (16), (17): Xaa is A or G
  MOD_RES (18), (19), (20), (21): Xaa is A or G or is absent
XKNHQLFNSLQEXXXXXXXXXYYVMPLPEEETPVXELGE

SEQ ID NO: 48428 - protein, 36 aa, Artificial Sequence
  GFR-binding peptide
  MOD_RES (1), (34), (35): Xaa is C or S
  MOD_RES (12), (13), (14), (15), (16): Xaa is A or G
  MOD_RES (17), (18), (19), (20): Xaa is A or G or is absent
XSKVIMVQVEKXXXXXXXXXVKAIKVSRLDQSVXXP

SEQ ID NO: 48429 - protein, 41 aa, Artificial Sequence; identical to SEQ ID NO: 11315
  GFR-binding peptide
  MOD_RES (1), (3), (35): Xaa is C or S

SEQ ID NO: 48430 - protein, 39 aa, Artificial Sequence; identical to SEQ ID NO: 18420
  GFR-binding peptide
  MOD_RES (2), (36): Xaa is C or S

SEQ ID NO: 48431 - protein, 35 aa, Artificial Sequence; identical to SEQ ID NO: 11317
  GFR-binding peptide
  MOD_RES (31), (32): Xaa is C or S

SEQ ID NO: 48432 - protein, 41 aa, Artificial Sequence
  GFR-binding peptide
  MOD_RES (1), (3), (37), (38): Xaa is C or S
  MOD_RES (15), (16), (17), (18), (19): Xaa is A or G
  MOD_RES (20), (21), (22), (23): Xaa is A or G or is absent
XGXARVVMNVQVEKXXXXXXXXXVKAVKVSRLQTPAXXPKP

SEQ ID NO: 48433 - protein, 37 aa, Artificial Sequence
  GFR-binding peptide
  MOD_RES (1), (3), (37): Xaa is C or S
  MOD_RES (15), (16), (17), (18), (19): Xaa is A or G
  MOD_RES (20), (21), (22), (23): Xaa is A or G or is absent
XGXGEVVMDVQVEKXXXXXXXXXVKAMKVSRLETPVX

SEQ ID NO: 48434 - protein, 39 aa, Artificial Sequence
  GFR-binding peptide
  MOD_RES (34), (35): Xaa is C or S
  MOD_RES (12), (13), (14), (15), (16): Xaa is A or G
  MOD_RES (17), (18), (19), (20): Xaa is A or G or is absent
GEVVMEVQVEKXXXXXXXXXVKAMKVSRLETPVXXAKPI

SEQ ID NO: 48435 - protein, 37 aa, Artificial Sequence
  GFR-binding peptide
  MOD_RES (35), (35): Xaa is C or S
HDELTNSLQEFIPKKRVIEYYVVPLPELQVQTPRXQV

SEQ ID NO: 48436 - protein, 37 aa, Artificial Sequence
  GFR-binding peptide
  MOD_RES (1), (3), (36), (37): Xaa is C or S
  MOD_RES (14), (15), (16), (17), (18): Xaa is A or G
  MOD_RES (19), (20), (21), (22): Xaa is A or G or is absent
XKXSRVIMVTAKKXXXXXXXXXIKRIQVPRLAQPVXX

SEQ ID NO: 48437 - protein, 33 aa, Artificial Sequence; identical to SEQ ID NO: 11321
  GFR-binding peptide
  MOD_RES (12), (13), (14), (15), (16): Xaa is A or G
  MOD_RES (17), (18), (19), (20): Xaa is A or G or is absent

SEQ ID NO: 48438 - protein, 40 aa, Artificial Sequence
  GFR-binding peptide
  MOD_RES (1), (3), (35), (36): Xaa is C or S
XGXGEVVMESMEGIVVKDYEDMIQMTINSLETPVXXAKPI

SEQ ID NO: 48439 - protein, 33 aa, Artificial Sequence; identical to SEQ ID NO: 38013
  GFR-binding peptide
  MOD_RES (2), (33): Xaa is C or S

SEQ ID NO: 48440 - protein, 38 aa, Artificial Sequence; identical to SEQ ID NO: 11323
  GFR-binding peptide
  MOD_RES (2), (34), (35): Xaa is C or S

SEQ ID NO: 48441 - protein, 30 aa, Artificial Sequence; identical to SEQ ID NO: 11324
  GFR-binding peptide

SEQ ID NO: 48442 - protein, 42 aa, Artificial Sequence
  GFR-binding peptide
  MOD_RES (2), (4), (38): Xaa is C or S
RXEXKNHQLFNSLQEHQGQHPKIRYYLMTLPEEETPVXELGE

SEQ ID NO: 48443 - protein, 38 aa, Artificial Sequence; identical to SEQ ID NO: 18428
  GFR-binding peptide
  MOD_RES (1), (3), (37): Xaa is C or S
  MOD_RES (15), (16), (17), (18), (19): Xaa is A or G
  MOD_RES (20), (21), (22), (23): Xaa is A or G or is absent

SEQ ID NO: 48444 - protein, 35 aa, Artificial Sequence; identical to SEQ ID NO: 18429
  GFR-binding peptide
  MOD_RES (35), (35): Xaa is C or S
  MOD_RES (11), (12), (13), (14), (15): Xaa is A or G
  MOD_RES (16), (17), (18), (19): Xaa is A or G or is absent

SEQ ID NO: 48445 - protein, 38 aa, Artificial Sequence; identical to SEQ ID NO: 11325
  GFR-binding peptide
  MOD_RES (1), (3), (36), (37): Xaa is C or S
  MOD_RES (14), (15), (16), (17), (18): Xaa is A or G
  MOD_RES (19), (20), (21), (22): Xaa is A or G or is absent

SEQ ID NO: 48446 - protein, 35 aa, Artificial Sequence
  GFR-binding peptide
  MOD_RES (32), (32): Xaa is C or S
SRVVMNVQVEKIVNSSDDVKAVKVSRLKTPAXTPK

SEQ ID NO: 48447 - protein, 43 aa, Artificial Sequence; identical to SEQ ID NO: 11326
  GFR-binding peptide
  MOD_RES (2), (4), (38), (39): Xaa is C or S
  MOD_RES (16), (17), (18), (19), (20): Xaa is A or G
  MOD_RES (21), (22), (23), (24): Xaa is A or G or is absent

SEQ ID NO: 48448 - protein, 38 aa, Artificial Sequence
  GFR-binding peptide
  MOD_RES (34), (34): Xaa is C or S
  MOD_RES (12), (13), (14), (15), (16): Xaa is A or G
  MOD_RES (17), (18), (19), (20): Xaa is A or G or is absent
SRVVMNSMEGIXXXXXXXXXMIQVTINSLKTPAXTPKT

SEQ ID NO: 48449 - protein, 40 aa, Artificial Sequence
  GFR-binding peptide
  MOD_RES (2), (36), (37): Xaa is C or S
  MOD_RES (14), (15), (16), (17), (18): Xaa is A or G
  MOD_RES (19), (20), (21), (22): Xaa is A or G or is absent
GXSRVVMNSMEGIXXXXXXXXXMIQVTINSLKTPAXXPKP

SEQ ID NO: 48450 - protein, 37 aa, Artificial Sequence; identical to SEQ ID NO: 18436
  GFR-binding peptide
  MOD_RES (35), (35): Xaa is C or S

SEQ ID NO: 48451 - protein, 33 aa, Artificial Sequence; identical to SEQ ID NO: 18437
  GFR-binding peptide
  MOD_RES (12), (13), (14), (15), (16): Xaa is A or G
  MOD_RES (17), (18), (19), (20): Xaa is A or G or is absent

SEQ ID NO: 48452 - protein, 40 aa, Artificial Sequence; identical to SEQ ID NO: 18438
  GFR-binding peptide
  MOD_RES (37), (37): Xaa is C or S
  MOD_RES (13), (14), (15), (16), (17): Xaa is A or G
  MOD_RES (18), (19), (20), (21): Xaa is A or G or is absent

SEQ ID NO: 48453 - protein, 41 aa, Artificial Sequence
  GFR-binding peptide
  MOD_RES (1), (3), (40): Xaa is C or S
  MOD_RES (16), (17), (18), (19), (20): Xaa is A or G
  MOD_RES (21), (22), (23), (24): Xaa is A or G or is absent
XKXALHDELTNSLQEXXXXXXXXXYYLVTLPELQVQTPRXQ

SEQ ID NO: 48454 - protein, 35 aa, Artificial Sequence; identical to SEQ ID NO: 11332
  GFR-binding peptide
  MOD_RES (1), (3): Xaa is C or S
  MOD_RES (14), (15), (16), (17), (18): Xaa is A or G
  MOD_RES (19), (20), (21), (22): Xaa is A or G or is absent

SEQ ID NO: 48455 - protein, 43 aa, Artificial Sequence
  GFR-binding peptide
  MOD_RES (2), (39): Xaa is C or S
AXELHEELRNSLQELKPKKRVYEYYVVPLPEHHVRSPQXKVSS

SEQ ID NO: 48456 - protein, 35 aa, Artificial Sequence
  GFR-binding peptide
  MOD_RES (12), (13), (14), (15), (16): Xaa is A or G
  MOD_RES (17), (18), (19), (20): Xaa is A or G or is absent
LHEELRNSLQEXXXXXXXXXYYVVPLPEHHVRSPQ

SEQ ID NO: 48457 - protein, 31 aa, Artificial Sequence
  GFR-binding peptide
  MOD_RES (31), (31): Xaa is C or S
RVVMNSMEGIIVNSSDDMIQVTINSLQTPAX

SEQ ID NO: 48458 - protein, 37 aa, Artificial Sequence; identical to SEQ ID NO: 11335
  GFR-binding peptide
  MOD_RES (32), (33): Xaa is C or S

SEQ ID NO: 48459 - protein, 40 aa, Artificial Sequence; identical to SEQ ID NO: 18441
  GFR-binding peptide
  MOD_RES (1), (3), (40): Xaa is C or S
  MOD_RES (16), (17), (18), (19), (20): Xaa is A or G
  MOD_RES (21), (22), (23), (24): Xaa is A or G or is absent

SEQ ID NO: 48460 - protein, 37 aa, Artificial Sequence; identical to SEQ ID NO: 11336
  GFR-binding peptide
  MOD_RES (1), (3), (37): Xaa is C or S
  MOD_RES (15), (16), (17), (18), (19): Xaa is A or G
  MOD_RES (20), (21), (22), (23): Xaa is A or G or is absent

SEQ ID NO: 48461 - protein, 38 aa, Artificial Sequence
  GFR-binding peptide
  MOD_RES (2), (4), (38): Xaa is C or S
  MOD_RES (16), (17), (18), (19), (20): Xaa is A or G
  MOD_RES (21), (22), (23), (24): Xaa is A or G or is absent
RXEXKNHQLFNSLQEXXXXXXXXXYYVMPLPEEETPVX

SEQ ID NO: 48462 - protein, 41 aa, Artificial Sequence
  GFR-binding peptide
  MOD_RES (2), (4), (38), (39): Xaa is C or S
  MOD_RES (16), (17), (18), (19), (20): Xaa is A or G
  MOD_RES (21), (22), (23), (24): Xaa is A or G or is absent
RXGXGEVVMEVQVEKXXXXXXXXXVKAMKVSRLETPVXXAK

SEQ ID NO: 48463 - protein, 38 aa, Artificial Sequence
  GFR-binding peptide
  MOD_RES (1), (33), (34): Xaa is C or S
XSRVVMNVTAKKIVNSSDDIKRVQVPRLKTPAXXPKPV

SEQ ID NO: 48464 - protein, 40 aa, Artificial Sequence; identical to SEQ ID NO: 18442
  GFR-binding peptide
  MOD_RES (37), (37): Xaa is C or S
  MOD_RES (13), (14), (15), (16), (17): Xaa is A or G
  MOD_RES (18), (19), (20), (21): Xaa is A or G or is absent

SEQ ID NO: 48465 - protein, 40 aa, Artificial Sequence
  GFR-binding peptide
  MOD_RES (2), (4): Xaa is C or S
AXAXELHEELRNSLQELKPKKRVYEYYVVPLPEHHVRSPQ

SEQ ID NO: 48466 - protein, 38 aa, Artificial Sequence; identical to SEQ ID NO: 18443
  GFR-binding peptide
  MOD_RES (2), (36): Xaa is C or S
  MOD_RES (14), (15), (16), (17), (18): Xaa is A or G
  MOD_RES (19), (20), (21), (22): Xaa is A or G or is absent

SEQ ID NO: 48467 - protein, 38 aa, Artificial Sequence; identical to SEQ ID NO: 11339
  GFR-binding peptide
  MOD_RES (34), (35): Xaa is C or S
  MOD_RES (12), (13), (14), (15), (16): Xaa is A or G
  MOD_RES (17), (18), (19), (20): Xaa is A or G or is absent

SEQ ID NO: 48468 - protein, 33 aa, Artificial Sequence
  GFR-binding peptide
  MOD_RES (2), (33): Xaa is C or S
KXSRVIMVTAKKVKPKRGVIKRIQVPRLAQPVX

SEQ ID NO: 48469 - protein, 35 aa, Artificial Sequence
  GFR-binding peptide
  MOD_RES (32), (33): Xaa is C or S
GEVVMESMEGIVVKDYEDMIQMTINSLETPVXXAK

SEQ ID NO: 48470 - protein, 37 aa, Artificial Sequence
  GFR-binding peptide
  MOD_RES (2), (35), (36): Xaa is C or S
  MOD_RES (13), (14), (15), (16), (17): Xaa is A or G
  MOD_RES (18), (19), (20), (21): Xaa is A or G or is absent
KXSRVIMVQVEKXXXXXXXXXVKAIKVSRLAQPVXXP

SEQ ID NO: 48471 - protein, 38 aa, Artificial Sequence
  GFR-binding peptide
  MOD_RES (2), (36), (37): Xaa is C or S
  MOD_RES (14), (15), (16), (17), (18): Xaa is A or G
  MOD_RES (19), (20), (21), (22): Xaa is A or G or is absent
GXARVVMNVTAKKXXXXXXXXXIKRVQVPRLQTPAXXP

SEQ ID NO: 48472 - protein, 37 aa, Artificial Sequence
  GFR-binding peptide
  MOD_RES (1), (1): Xaa is C or S
XELHEELRNSLQELKPKKRVYEYYVVPLPEHHVRSPQ

SEQ ID NO: 48473 - protein, 36 aa, Artificial Sequence
  GFR-binding peptide
  MOD_RES (1), (3): Xaa is C or S
  MOD_RES (15), (16), (17), (18), (19): Xaa is A or G
  MOD_RES (20), (21), (22), (23): Xaa is A or G or is absent
XGXSRVVMNVTAKKXXXXXXXXXIKRVQVPRLKTPA

SEQ ID NO: 48474 - protein, 34 aa, Artificial Sequence; identical to SEQ ID NO: 38050
  GFR-binding peptide
  MOD_RES (2), (4): Xaa is C or S

SEQ ID NO: 48475 - protein, 38 aa, Artificial Sequence
  GFR-binding peptide
  MOD_RES (2), (4): Xaa is C or S
EXKXALHDELTNSLQEFIPKKRVIEYYLVTLPELQVQT

SEQ ID NO: 48476 - protein, 33 aa, Artificial Sequence
  GFR-binding peptide
  MOD_RES (33), (33): Xaa is C or S
  MOD_RES (11), (12), (13), (14), (15): Xaa is A or G
  MOD_RES (16), (17), (18), (19): Xaa is A or G or is absent
EVVMEVQVEKXXXXXXXXXVKAMKVSRLETPVX

SEQ ID NO: 48477 - protein, 39 aa, Artificial Sequence; identical to SEQ ID NO: 11341
  GFR-binding peptide
  MOD_RES (1), (3), (37), (38): Xaa is C or S
  MOD_RES (15), (16), (17), (18), (19): Xaa is A or G
  MOD_RES (20), (21), (22), (23): Xaa is A or G or is absent

SEQ ID NO: 48478 - protein, 36 aa, Artificial Sequence
  GFR-binding peptide
  MOD_RES (33), (34): Xaa is C or S
  MOD_RES (11), (12), (13), (14), (15): Xaa is A or G
  MOD_RES (16), (17), (18), (19): Xaa is A or G or is absent
EVVMESMEGIXXXXXXXXXMIQMTINSLETPVXXAK

SEQ ID NO: 48479 - protein, 41 aa, Artificial Sequence; identical to SEQ ID NO: 11346
  GFR-binding peptide
  MOD_RES (2), (36), (37): Xaa is C or S
  MOD_RES (14), (15), (16), (17), (18): Xaa is A or G
  MOD_RES (19), (20), (21), (22): Xaa is A or G or is absent

SEQ ID NO: 48480 - protein, 39 aa, Artificial Sequence
  GFR-binding peptide
  MOD_RES (35), (35): Xaa is C or S
HDELTNSLQEFIPKKRVIEYYVVPLPELQVQTPRXQVNR

SEQ ID NO: 48481 - protein, 39 aa, Artificial Sequence
  GFR-binding peptide
  MOD_RES (1), (3), (35), (36): Xaa is C or S
XGXSRVVMNSMEGIIVNSSDDMIQVTINSLKTPAXXPKP

SEQ ID NO: 48482 - protein, 33 aa, Artificial Sequence
  GFR-binding peptide
  MOD_RES (33), (33): Xaa is C or S
  MOD_RES (11), (12), (13), (14), (15): Xaa is A or G
  MOD_RES (16), (17), (18), (19): Xaa is A or G or is absent
EVVMEVTAKKXXXXXXXXXIKRMQVPRLETPVX

SEQ ID NO: 48483 - protein, 31 aa, Artificial Sequence
  GFR-binding peptide
  MOD_RES (31), (31): Xaa is C or S
SKVIMVTAKKIKPTKGIIKRIQVPRLDQSVX

SEQ ID NO: 48484 - protein, 40 aa, Artificial Sequence
  GFR-binding peptide
  MOD_RES (2), (36): Xaa is C or S
  MOD_RES (14), (15), (16), (17), (18): Xaa is A or G
  MOD_RES (19), (20), (21), (22): Xaa is A or G or is absent
GXSRVVMNVQVEKXXXXXXXXXVKAVKVSRLKTPAXTPKT

SEQ ID NO: 48485 - protein, 36 aa, Artificial Sequence
  GFR-binding peptide
  MOD_RES (2), (35), (36): Xaa is C or S
  MOD_RES (13), (14), (15), (16), (17): Xaa is A or G
  MOD_RES (18), (19), (20), (21): Xaa is A or G or is absent
KXSKVIMVTAKKXXXXXXXXXIKRIQVPRLDQSVXX

SEQ ID NO: 48486 - protein, 37 aa, Artificial Sequence
  GFR-binding peptide
  MOD_RES (33), (34): Xaa is C or S
  MOD_RES (11), (12), (13), (14), (15): Xaa is A or G
  MOD_RES (16), (17), (18), (19): Xaa is A or G or is absent
RVVMNVQVEKXXXXXXXXXVKAVKVSRLQTPAXXPKP

SEQ ID NO: 48487 - protein, 32 aa, Artificial Sequence
  GFR-binding peptide
  MOD_RES (11), (12), (13), (14), (15): Xaa is A or G
  MOD_RES (16), (17), (18), (19): Xaa is A or G or is absent
SRVIMVTAKKXXXXXXXXXIKRIQVPRLAQPV

SEQ ID NO: 48488 - protein, 37 aa, Artificial Sequence
  GFR-binding peptide
  MOD_RES (1), (3): Xaa is C or S
XAXELHEELRNSLQELKPKKRVYEYYVVPLPEHHVRS

SEQ ID NO: 48489 - protein, 36 aa, Artificial Sequence
  GFR-binding peptide
  MOD_RES (1), (33), (34): Xaa is C or S
XGEVVMEVTAKKVVKDYEDIKRMQVPRLETPVXXAK

SEQ ID NO: 48490 - protein, 34 aa, Artificial Sequence; identical to SEQ ID NO: 18458
  GFR-binding peptide

SEQ ID NO: 48491 - protein, 37 aa, Artificial Sequence; identical to SEQ ID NO: 11353
  GFR-binding peptide
  MOD_RES (1), (32), (33): Xaa is C or S

SEQ ID NO: 48492 - protein, 39 aa, Artificial Sequence
  GFR-binding peptide
  MOD_RES (2), (36), (37): Xaa is C or S
  MOD_RES (14), (15), (16), (17), (18): Xaa is A or G
  MOD_RES (19), (20), (21), (22): Xaa is A or G or is absent
GXSRVVMNSMEGIXXXXXXXXXMIQVTINSLKTPAXXPK

SEQ ID NO: 48493 - protein, 41 aa, Artificial Sequence
  GFR-binding peptide
  MOD_RES (1), (3), (36), (37): Xaa is C or S
  MOD_RES (14), (15), (16), (17), (18): Xaa is A or G
  MOD_RES (19), (20), (21), (22): Xaa is A or G or is absent
XKXSKVIMSMEGIXXXXXXXXXMIQITINSLDQSVXXPSAS

SEQ ID NO: 48494 - protein, 37 aa, Artificial Sequence; identical to SEQ ID NO: 18461
  GFR-binding peptide
  MOD_RES (1), (3), (37): Xaa is C or S
  MOD_RES (15), (16), (17), (18), (19): Xaa is A or G
  MOD_RES (20), (21), (22), (23): Xaa is A or G or is absent

SEQ ID NO: 48495 - protein, 38 aa, Artificial Sequence
  GFR-binding peptide
  MOD_RES (1), (34), (35): Xaa is C or S
  MOD_RES (12), (13), (14), (15), (16): Xaa is A or G
  MOD_RES (17), (18), (19), (20): Xaa is A or G or is absent
XSKVVMVQVEKXXXXXXXXXVKAIKVSRLDQPVXXPSA

SEQ ID NO: 48496 - protein, 41 aa, Artificial Sequence; identical to SEQ ID NO: 18463
  GFR-binding peptide
  MOD_RES (2), (39): Xaa is C or S
  MOD_RES (15), (16), (17), (18), (19): Xaa is A or G
  MOD_RES (20), (21), (22), (23): Xaa is A or G or is absent

SEQ ID NO: 48497 - protein, 42 aa, Artificial Sequence; identical to SEQ ID NO: 18464
  GFR-binding peptide
  MOD_RES (1), (3), (40): Xaa is C or S
  MOD_RES (16), (17), (18), (19), (20): Xaa is A or G
  MOD_RES (21), (22), (23), (24): Xaa is A or G or is absent

SEQ ID NO: 48498 - protein, 40 aa, Artificial Sequence
  GFR-binding peptide
  MOD_RES (2), (4), (36), (37): Xaa is C or S
RXGXGEVVMESMEGIVVKDYEDMIQMTINSLETPVXXAKP

SEQ ID NO: 48499 - protein, 34 aa, Artificial Sequence
  GFR-binding peptide
  MOD_RES (1), (1): Xaa is C or S
  MOD_RES (13), (14), (15), (16), (17): Xaa is A or G
  MOD_RES (18), (19), (20), (21): Xaa is A or G or is absent
XSRVVMNVQVEKXXXXXXXXXVKAVKVSRLKTPA

SEQ ID NO: 48500 - protein, 41 aa, Artificial Sequence; identical to SEQ ID NO: 18467
  GFR-binding peptide
  MOD_RES (2), (4), (38): Xaa is C or S

SEQ ID NO: 48501 - protein, 37 aa, Artificial Sequence
  GFR-binding peptide
  MOD_RES (2), (4): Xaa is C or S
  MOD_RES (16), (17), (18), (19), (20): Xaa is A or G
  MOD_RES (21), (22), (23), (24): Xaa is A or G or is absent
HXGXARVVMNSMEGIXXXXXXXXXMIQVTINSLQTPA

SEQ ID NO: 48502 - protein, 42 aa, Artificial Sequence
  GFR-binding peptide
  MOD_RES (1), (3), (37): Xaa is C or S
  MOD_RES (15), (16), (17), (18), (19): Xaa is A or G
  MOD_RES (20), (21), (22), (23): Xaa is A or G or is absent
XGXSRVVMNSMEGIXXXXXXXXXMIQVTINSLKTPAXTPKTV

SEQ ID NO: 48503 - protein, 39 aa, Artificial Sequence
  GFR-binding peptide
  MOD_RES (2), (34): Xaa is C or S
GXSRVVMNVQVEKIVNSSDDVKAVKVSRLKTPAXTPKTV

SEQ ID NO: 48504 - protein, 37 aa, Artificial Sequence; identical to SEQ ID NO: 38082
  GFR-binding peptide
  MOD_RES (1), (3), (36), (37): Xaa is C or S
  MOD_RES (14), (15), (16), (17), (18): Xaa is A or G
  MOD_RES (19), (20), (21), (22): Xaa is A or G or is absent

SEQ ID NO: 48505 - protein, 35 aa, Artificial Sequence; identical to SEQ ID NO: 11359
  GFR-binding peptide
  MOD_RES (1), (34), (35): Xaa is C or S
  MOD_RES (12), (13), (14), (15), (16): Xaa is A or G
  MOD_RES (17), (18), (19), (20): Xaa is A or G or is absent

SEQ ID NO: 48506 - protein, 38 aa, Artificial Sequence; identical to SEQ ID NO: 18469
  GFR-binding peptide
  MOD_RES (37), (37): Xaa is C or S

SEQ ID NO: 48507 - protein, 37 aa, Artificial Sequence
  GFR-binding peptide
  MOD_RES (34), (35): Xaa is C or S
  MOD_RES (12), (13), (14), (15), (16): Xaa is A or G
  MOD_RES (17), (18), (19), (20): Xaa is A or G or is absent
SRVVMNVQVEKXXXXXXXXXVKAVKVSRLKTPAXXPK

SEQ ID NO: 48508 - protein, 41 aa, Artificial Sequence
  GFR-binding peptide
  MOD_RES (2), (4), (36): Xaa is C or S
HXGXSRVVMNVQVEKIVNSSDDVKAVKVSRLKTPAXTPKTV

SEQ ID NO: 48509 - protein, 36 aa, Artificial Sequence; identical to SEQ ID NO: 11365
  GFR-binding peptide
  MOD_RES (1), (3), (34), (35): Xaa is C or S

SEQ ID NO: 48510 - protein, 38 aa, Artificial Sequence
  GFR-binding peptide
  MOD_RES (2), (35), (36): Xaa is C or S
  MOD_RES (13), (14), (15), (16), (17): Xaa is A or G
  MOD_RES (18), (19), (20), (21): Xaa is A or G or is absent
KXSKVIMVQVEKXXXXXXXXXVKAIKVSRLDQSVXXPS

SEQ ID NO: 48511 - protein, 40 aa, Artificial Sequence; identical to SEQ ID NO: 11366
  GFR-binding peptide
  MOD_RES (2), (4), (36), (37): Xaa is C or S

SEQ ID NO: 48512 - protein, 33 aa, Artificial Sequence; identical to SEQ ID NO: 11368
  GFR-binding peptide
  MOD_RES (32), (33): Xaa is C or S

SEQ ID NO: 48513 - protein, 40 aa, Artificial Sequence; identical to SEQ ID NO: 11369
  GFR-binding peptide
  MOD_RES (2), (35), (36): Xaa is C or S
  MOD_RES (13), (14), (15), (16), (17): Xaa is A or G
  MOD_RES (18), (19), (20), (21): Xaa is A or G or is absent

SEQ ID NO: 48514 - protein, 36 aa, Artificial Sequence; identical to SEQ ID NO: 11372
  GFR-binding peptide
  MOD_RES (2), (36): Xaa is C or S
  MOD_RES (14), (15), (16), (17), (18): Xaa is A or G
  MOD_RES (19), (20), (21), (22): Xaa is A or G or is absent

SEQ ID NO: 48515 - protein, 37 aa, Artificial Sequence; identical to SEQ ID NO: 11373
  GFR-binding peptide
  MOD_RES (1), (35), (36): Xaa is C or S
  MOD_RES (13), (14), (15), (16), (17): Xaa is A or G
  MOD_RES (18), (19), (20), (21): Xaa is A or G or is absent

SEQ ID NO: 48516 - protein, 41 aa, Artificial Sequence; identical to SEQ ID NO: 11376
  GFR-binding peptide
  MOD_RES (1), (3), (37), (38): Xaa is C or S
  MOD_RES (15), (16), (17), (18), (19): Xaa is A or G
  MOD_RES (20), (21), (22), (23): Xaa is A or G or is absent

SEQ ID NO: 48517 - protein, 42 aa, Artificial Sequence; identical to SEQ ID NO: 18474
  GFR-binding peptide
  MOD_RES (2), (36): Xaa is C or S

SEQ ID NO: 48518 - protein, 37 aa, Artificial Sequence; identical to SEQ ID NO: 18476
  GFR-binding peptide
  MOD_RES (1), (3): Xaa is C or S
  MOD_RES (16), (17), (18), (19), (20): Xaa is A or G
  MOD_RES (21), (22), (23), (24): Xaa is A or G or is absent

SEQ ID NO: 48519 - protein, 39 aa, Artificial Sequence; identical to SEQ ID NO: 11381
  GFR-binding peptide
  MOD_RES (2), (34): Xaa is C or S

SEQ ID NO: 48520 - protein, 40 aa, Artificial Sequence; identical to SEQ ID NO: 18477
  GFR-binding peptide
  MOD_RES (1), (38): Xaa is C or S

SEQ ID NO: 48521 - protein, 40 aa, Artificial Sequence
  GFR-binding peptide
  MOD_RES (34), (35): Xaa is C or S
  MOD_RES (12), (13), (14), (15), (16): Xaa is A or G
  MOD_RES (17), (18), (19), (20): Xaa is A or G or is absent
GEVVMDVQVEKXXXXXXXXXVKAMKVSRLETPVXXAKPIK

SEQ ID NO: 48522 - protein, 35 aa, Artificial Sequence
  GFR-binding peptide
  MOD_RES (2), (4): Xaa is C or S
HXGXSRVVMNVQVEKIVNSSDDVKAVKVSRLKTPA

SEQ ID NO: 48523 - protein, 33 aa, Artificial Sequence; identical to SEQ ID NO: 11382
  GFR-binding peptide
  MOD_RES (31), (31): Xaa is C or S

SEQ ID NO: 48524 - protein, 42 aa, Artificial Sequence; identical to SEQ ID NO: 18479
  GFR-binding peptide
  MOD_RES (1), (38): Xaa is C or S
  MOD_RES (14), (15), (16), (17), (18): Xaa is A or G
  MOD_RES (19), (20), (21), (22): Xaa is A or G or is absent

SEQ ID NO: 48525 - protein, 39 aa, Artificial Sequence
  GFR-binding peptide
  MOD_RES (2), (39): Xaa is C or S
  MOD_RES (15), (16), (17), (18), (19): Xaa is A or G
  MOD_RES (20), (21), (22), (23): Xaa is A or G or is absent
AXELHEELRNSLQEXXXXXXXXXYYLVTLPEHHVRSPQX

SEQ ID NO: 48526 - protein, 37 aa, Artificial Sequence
  GFR-binding peptide
  MOD_RES (31), (31): Xaa is C or S
RVVMNVQVEKIVNSSDDVKAVKVSRLKTPAXTPKTVH

SEQ ID NO: 48527 - protein, 37 aa, Artificial Sequence
  GFR-binding peptide
  MOD_RES (1), (1): Xaa is C or S
XALHDELTNSLQEFIPKKRVIEYYVVPLPELQVQTPR

SEQ ID NO: 48528 - protein, 44 aa, Artificial Sequence; identical to SEQ ID NO: 11387
  GFR-binding peptide
  MOD_RES (2), (4), (38), (39): Xaa is C or S
  MOD_RES (16), (17), (18), (19), (20): Xaa is A or G
  MOD_RES (21), (22), (23), (24): Xaa is A or G or is absent

SEQ ID NO: 48529 - protein, 41 aa, Artificial Sequence; identical to SEQ ID NO: 11388
  GFR-binding peptide
  MOD_RES (1), (3), (36), (37): Xaa is C or S
  MOD_RES (14), (15), (16), (17), (18): Xaa is A or G
  MOD_RES (19), (20), (21), (22): Xaa is A or G or is absent

SEQ ID NO: 48530 - protein, 40 aa, Artificial Sequence; identical to SEQ ID NO: 18484
  GFR-binding peptide
  MOD_RES (36), (36): Xaa is C or S

SEQ ID NO: 48531 - protein, 40 aa, Artificial Sequence
  GFR-binding peptide
  MOD_RES (2), (36), (37): Xaa is C or S
  MOD_RES (14), (15), (16), (17), (18): Xaa is A or G
  MOD_RES (19), (20), (21), (22): Xaa is A or G or is absent
GXGEVVMEVTAKKXXXXXXXXXIKRMQVPRLETPVXXAKP

SEQ ID NO: 48532 - protein, 39 aa, Artificial Sequence
  GFR-binding peptide
  MOD_RES (1), (35): Xaa is C or S
  MOD_RES (13), (14), (15), (16), (17): Xaa is A or G
  MOD_RES (18), (19), (20), (21): Xaa is A or G or is absent
XSRVVMNVQVEKXXXXXXXXXVKAVKVSRLKTPAXTPKT

SEQ ID NO: 48533 - protein, 39 aa, Artificial Sequence; identical to SEQ ID NO: 11394
  GFR-binding peptide
  MOD_RES (1), (3), (34), (35): Xaa is C or S

SEQ ID NO: 48534 - protein, 38 aa, Artificial Sequence
  GFR-binding peptide
  MOD_RES (37), (37): Xaa is C or S
ALHDELTNSLQEFIPKKRVIEYYLVTLPELQVQTPRXQ

SEQ ID NO: 48535 - protein, 37 aa, Artificial Sequence
  GFR-binding peptide
  MOD_RES (33), (34): Xaa is C or S
  MOD_RES (11), (12), (13), (14), (15): Xaa is A or G
  MOD_RES (16), (17), (18), (19): Xaa is A or G or is absent
EVVMDSMEGIXXXXXXXXXMIQMTINSLETPVXXAKP

SEQ ID NO: 48536 - protein, 34 aa, Artificial Sequence; identical to SEQ ID NO: 11396
  GFR-binding peptide
  MOD_RES (34), (34): Xaa is C or S
  MOD_RES (12), (13), (14), (15), (16): Xaa is A or G
  MOD_RES (17), (18), (19), (20): Xaa is A or G or is absent

SEQ ID NO: 48537 - protein, 42 aa, Artificial Sequence; identical to SEQ ID NO: 18488
  GFR-binding peptide
  MOD_RES (1), (3), (40): Xaa is C or S
  MOD_RES (16), (17), (18), (19), (20): Xaa is A or G
  MOD_RES (21), (22), (23), (24): Xaa is A or G or is absent

SEQ ID NO: 48538 - protein, 34 aa, Artificial Sequence
  GFR-binding peptide
  MOD_RES (1), (32), (33): Xaa is C or S
XSRVIMSMEGIVKPKRGVMIQITINSLAQPVXXP

SEQ ID NO: 48539 - protein, 36 aa, Artificial Sequence
  GFR-binding peptide
  MOD_RES (2), (36): Xaa is C or S
  MOD_RES (14), (15), (16), (17), (18): Xaa is A or G
  MOD_RES (19), (20), (21), (22): Xaa is A or G or is absent
GXSRVVMNVQVEKXXXXXXXXXVKAVKVSRLKTPAX

SEQ ID NO: 48540 - protein, 38 aa, Artificial Sequence; identical to SEQ ID NO: 38136
  GFR-binding peptide
  MOD_RES (2), (4), (37), (38): Xaa is C or S
  MOD_RES (15), (16), (17), (18), (19): Xaa is A or G
  MOD_RES (20), (21), (22), (23): Xaa is A or G or is absent

SEQ ID NO: 48541 - protein, 43 aa, Artificial Sequence; identical to SEQ ID NO: 18493
  GFR-binding peptide
  MOD_RES (2), (39): Xaa is C or S
  MOD_RES (15), (16), (17), (18), (19): Xaa is A or G
  MOD_RES (20), (21), (22), (23): Xaa is A or G or is absent

SEQ ID NO: 48542 - protein, 37 aa, Artificial Sequence
  GFR-binding peptide
  MOD_RES (32), (33): Xaa is C or S
SRVVMNSMEGIIVNSSDDMIQVTINSLKTPAXXPKPV

SEQ ID NO: 48543 - protein, 40 aa, Artificial Sequence; identical to SEQ ID NO: 11402
  GFR-binding peptide
  MOD_RES (1), (34), (35): Xaa is C or S
  MOD_RES (12), (13), (14), (15), (16): Xaa is A or G
  MOD_RES (17), (18), (19), (20): Xaa is A or G or is absent

SEQ ID NO: 48544 - protein, 37 aa, Artificial Sequence; identical to SEQ ID NO: 18495
  GFR-binding peptide
  MOD_RES (1), (3): Xaa is C or S
  MOD_RES (16), (17), (18), (19), (20): Xaa is A or G
  MOD_RES (21), (22), (23), (24): Xaa is A or G or is absent

SEQ ID NO: 48545 - protein, 35 aa, Artificial Sequence
  GFR-binding peptide
  MOD_RES (31), (32): Xaa is C or S
RVVMNSMEGIIVNSSDDMIQVTINSLQTPAXXPKP

SEQ ID NO: 48546 - protein, 38 aa, Artificial Sequence
  GFR-binding peptide
  MOD_RES (2), (2): Xaa is C or S
KXALHDELTNSLQEFIPKKRVIEYYVVPLPELQVQTPR

SEQ ID NO: 48547 - protein, 38 aa, Artificial Sequence; identical to SEQ ID NO: 11404
  GFR-binding peptide
  MOD_RES (2), (4), (38): Xaa is C or S
  MOD_RES (16), (17), (18), (19), (20): Xaa is A or G
  MOD_RES (21), (22), (23), (24): Xaa is A or G or is absent

SEQ ID NO: 48548 - protein, 42 aa, Artificial Sequence; identical to SEQ ID NO: 11405
  GFR-binding peptide
  MOD_RES (2), (4), (38), (39): Xaa is C or S
  MOD_RES (16), (17), (18), (19), (20): Xaa is A or G
  MOD_RES (21), (22), (23), (24): Xaa is A or G or is absent

SEQ ID NO: 48549 - protein, 34 aa, Artificial Sequence
  GFR-binding peptide
  MOD_RES (34), (34): Xaa is C or S
  MOD_RES (12), (13), (14), (15), (16): Xaa is A or G
  MOD_RES (17), (18), (19), (20): Xaa is A or G or is absent
SRVVMNSMEGIXXXXXXXXXMIQVTINSLKTPAX

SEQ ID NO: 48550 - protein, 37 aa, Artificial Sequence
  GFR-binding peptide
  MOD_RES (2), (36), (37): Xaa is C or S
  MOD_RES (14), (15), (16), (17), (18): Xaa is A or G
  MOD_RES (19), (20), (21), (22): Xaa is A or G or is absent
GXARVVMNVTAKKXXXXXXXXXIKRVQVPRLQTPAXX

SEQ ID NO: 48551 - protein, 40 aa, Artificial Sequence
  GFR-binding peptide
  MOD_RES (2), (34), (35): Xaa is C or S
GXGEVVMDVTAKKVVKENEDIKRMQVPRLETPVXXAKPIK

SEQ ID NO: 48552 - protein, 42 aa, Artificial Sequence
  GFR-binding peptide
  MOD_RES (2), (36), (37): Xaa is C or S
  MOD_RES (14), (15), (16), (17), (18): Xaa is A or G
  MOD_RES (19), (20), (21), (22): Xaa is A or G or is absent
GXGEVVMDVQVEKXXXXXXXXXVKAMKVSRLETPVXXAKPIK

SEQ ID NO: 48553 - protein, 41 aa, Artificial Sequence; identical to SEQ ID NO: 18497
  GFR-binding peptide
  MOD_RES (37), (37): Xaa is C or S
  MOD_RES (13), (14), (15), (16), (17): Xaa is A or G
  MOD_RES (18), (19), (20), (21): Xaa is A or G or is absent

SEQ ID NO: 48554 - protein, 39 aa, Artificial Sequence
  GFR-binding peptide
  MOD_RES (2), (4), (38), (39): Xaa is C or S
  MOD_RES (16), (17), (18), (19), (20): Xaa is A or G
  MOD_RES (21), (22), (23), (24): Xaa is A or G or is absent
RXGXGEVVMDVTAKKXXXXXXXXXIKRMQVPRLETPVXX

SEQ ID NO: 48555 - protein, 41 aa, Artificial Sequence
  GFR-binding peptide
  MOD_RES (1), (3), (40): Xaa is C or S
XKXALHDELTNSLQEFIPKKRVIEYYLVTLPELQVQTPRXQ

SEQ ID NO: 48556 - protein, 40 aa, Artificial Sequence; identical to SEQ ID NO: 11413
  GFR-binding peptide
  MOD_RES (2), (35), (36): Xaa is C or S
  MOD_RES (13), (14), (15), (16), (17): Xaa is A or G
  MOD_RES (18), (19), (20), (21): Xaa is A or G or is absent

SEQ ID NO: 48557 - protein, 38 aa, Artificial Sequence; identical to SEQ ID NO: 11414
  GFR-binding peptide
  MOD_RES (1), (35), (36): Xaa is C or S
  MOD_RES (13), (14), (15), (16), (17): Xaa is A or G
  MOD_RES (18), (19), (20), (21): Xaa is A or G or is absent

SEQ ID NO: 48558 - protein, 33 aa, Artificial Sequence
  GFR-binding peptide
  MOD_RES (32), (33): Xaa is C or S
ARVVMNVTAKKIVNSSDDIKRVQVPRLQTPAXX

SEQ ID NO: 48559 - protein, 37 aa, Artificial Sequence
  GFR-binding peptide
  MOD_RES (2), (36), (37): Xaa is C or S
  MOD_RES (14), (15), (16), (17), (18): Xaa is A or G
  MOD_RES (19), (20), (21), (22): Xaa is A or G or is absent
GXGEVVMDVTAKKXXXXXXXXXIKRMQVPRLETPVXX

SEQ ID NO: 48560 - protein, 38 aa, Artificial Sequence; identical to SEQ ID NO: 18502
  GFR-binding peptide
  MOD_RES (1), (3): Xaa is C or S

SEQ ID NO: 48561 - protein, 35 aa, Artificial Sequence
  GFR-binding peptide
  MOD_RES (1), (33), (34): Xaa is C or S
XARVVMNVTAKKIVNSSDDIKRVQVPRLQTPAXXP

SEQ ID NO: 48562 - protein, 39 aa, Artificial Sequence
  GFR-binding peptide
  MOD_RES (34), (35): Xaa is C or S
  MOD_RES (12), (13), (14), (15), (16): Xaa is A or G
  MOD_RES (17), (18), (19), (20): Xaa is A or G or is absent
GEVVMEVTAKKXXXXXXXXXIKRMQVPRLETPVXXAKPI

SEQ ID NO: 48563 - protein, 39 aa, Artificial Sequence; identical to SEQ ID NO: 11419
  GFR-binding peptide
  MOD_RES (34), (34): Xaa is C or S
  MOD_RES (12), (13), (14), (15), (16): Xaa is A or G
  MOD_RES (17), (18), (19), (20): Xaa is A or G or is absent

SEQ ID NO: 48564 - protein, 35 aa, Artificial Sequence; identical to SEQ ID NO: 18504
  GFR-binding peptide
  MOD_RES (13), (14), (15), (16), (17): Xaa is A or G
  MOD_RES (18), (19), (20), (21): Xaa is A or G or is absent

SEQ ID NO: 48565 - protein, 38 aa, Artificial Sequence
  GFR-binding peptide
  MOD_RES (2), (4): Xaa is C or S
  MOD_RES (17), (18), (19), (20), (21): Xaa is A or G
  MOD_RES (22), (23), (24), (25): Xaa is A or G or is absent
EXKXALHDELTNSLQEXXXXXXXXXYYLVTLPELQVQT

SEQ ID NO: 48566 - protein, 41 aa, Artificial Sequence; identical to SEQ ID NO: 18505
  GFR-binding peptide
  MOD_RES (2), (36): Xaa is C or S
  MOD_RES (14), (15), (16), (17), (18): Xaa is A or G
  MOD_RES (19), (20), (21), (22): Xaa is A or G or is absent

SEQ ID NO: 48567 - protein, 34 aa, Artificial Sequence; identical to SEQ ID NO: 11420
  GFR-binding peptide
  MOD_RES (31), (32): Xaa is C or S

SEQ ID NO: 48568 - protein, 40 aa, Artificial Sequence; identical to SEQ ID NO: 18507
  GFR-binding peptide
  MOD_RES (2), (4): Xaa is C or S

SEQ ID NO: 48569 - protein, 33 aa, Artificial Sequence
  GFR-binding peptide
  MOD_RES (1), (33): Xaa is C or S
XARVVMNSMEGIIVNSSDDMIQVTINSLQTPAX

SEQ ID NO: 48570 - protein, 35 aa, Artificial Sequence
  GFR-binding peptide
  MOD_RES (1), (33), (34): Xaa is C or S
XGEVVMDVTAKKVVKENEDIKRMQVPRLETPVXXA

SEQ ID NO: 48571 - protein, 39 aa, Artificial Sequence; identical to SEQ ID NO: 18511
  GFR-binding peptide
  MOD_RES (2), (4): Xaa is C or S
  MOD_RES (17), (18), (19), (20), (21): Xaa is A or G
  MOD_RES (22), (23), (24), (25): Xaa is A or G or is absent

SEQ ID NO: 48572 - protein, 40 aa, Artificial Sequence
  GFR-binding peptide
  MOD_RES (2), (35), (36): Xaa is C or S
  MOD_RES (13), (14), (15), (16), (17): Xaa is A or G
  MOD_RES (18), (19), (20), (21): Xaa is A or G or is absent
KXSRVIMVTAKKXXXXXXXXXIKRIQVPRLAQPVXXPAAS

SEQ ID NO: 48573 - protein, 31 aa, Artificial Sequence; identical to SEQ ID NO: 11422
  GFR-binding peptide
  MOD_RES (31), (31): Xaa is C or S

SEQ ID NO: 48574 - protein, 34 aa, Artificial Sequence; identical to SEQ ID NO: 11426
  GFR-binding peptide
  MOD_RES (1), (3): Xaa is C or S

SEQ ID NO: 48575 - protein, 44 aa, Artificial Sequence
  GFR-binding peptide
  MOD_RES (1), (3), (40): Xaa is C or S
XAXELHEELRNSLQELKPKKRVYEYYVVPLPEHHVRSPQXKVSS

SEQ ID NO: 48576 - protein, 40 aa, Artificial Sequence
  GFR-binding peptide
  MOD_RES (34), (34): Xaa is C or S
  MOD_RES (12), (13), (14), (15), (16): Xaa is A or G
  MOD_RES (17), (18), (19), (20): Xaa is A or G or is absent
SRVVMNVQVEKXXXXXXXXXVKAVKVSRLKTPAXTPKTVH

SEQ ID NO: 48577 - protein, 35 aa, Artificial Sequence
  GFR-binding peptide
  MOD_RES (2), (2): Xaa is C or S
  MOD_RES (14), (15), (16), (17), (18): Xaa is A or G
  MOD_RES (19), (20), (21), (22): Xaa is A or G or is absent
EXKNHQLFNSLQEXXXXXXXXXYYLMTLPEEETPV

SEQ ID NO: 48578 - protein, 43 aa, Artificial Sequence
  GFR-binding peptide
  MOD_RES (1), (3), (40): Xaa is C or S
XAXELHEELRNSLQELKPKKRVYEYYVVPLPEHHVRSPQXKVS

SEQ ID NO: 48579 - protein, 33 aa, Artificial Sequence; identical to SEQ ID NO: 11427
  GFR-binding peptide
  MOD_RES (2), (33): Xaa is C or S

SEQ ID NO: 48580 - protein, 38 aa, Artificial Sequence; identical to SEQ ID NO: 11430
  GFR-binding peptide
  MOD_RES (2), (4), (38): Xaa is C or S
  MOD_RES (16), (17), (18), (19), (20): Xaa is A or G
  MOD_RES (21), (22), (23), (24): Xaa is A or G or is absent

SEQ ID NO: 48581 - protein, 35 aa, Artificial Sequence
  GFR-binding peptide
  MOD_RES (2), (34), (35): Xaa is C or S
GXGEVVMEVTAKKVVKDYEDIKRMQVPRLETPVXX

SEQ ID NO: 48582 - protein, 37 aa, Artificial Sequence
  GFR-binding peptide
  MOD_RES (2), (4): Xaa is C or S
  MOD_RES (16), (17), (18), (19), (20): Xaa is A or G
  MOD_RES (21), (22), (23), (24): Xaa is A or G or is absent
RXGXGEVVMDVTAKKXXXXXXXXXIKRMQVPRLETPV

SEQ ID NO: 48583 - protein, 38 aa, Artificial Sequence; identical to SEQ ID NO: 18513
  GFR-binding peptide
  MOD_RES (36), (36): Xaa is C or S

SEQ ID NO: 48584 - protein, 40 aa, Artificial Sequence
  GFR-binding peptide
  MOD_RES (2), (39): Xaa is C or S
  MOD_RES (15), (16), (17), (18), (19): Xaa is A or G
  MOD_RES (20), (21), (22), (23): Xaa is A or G or is absent
KXALHDELTNSLQEXXXXXXXXXYYLVTLPELQVQTPRXQ

SEQ ID NO: 48585 - protein, 37 aa, Artificial Sequence
  GFR-binding peptide
  MOD_RES (35), (35): Xaa is C or S
HDELTNSLQEFIPKKRVIEYYLVTLPELQVQTPRXQV

SEQ ID NO: 48586 - protein, 33 aa, Artificial Sequence; identical to SEQ ID NO: 18515
  GFR-binding peptide

SEQ ID NO: 48587 - protein, 38 aa, Artificial Sequence; identical to SEQ ID NO: 11436
  GFR-binding peptide
  MOD_RES (2), (34), (35): Xaa is C or S

SEQ ID NO: 48588 - protein, 42 aa, Artificial Sequence; identical to SEQ ID NO: 18517
  GFR-binding peptide
  MOD_RES (2), (39): Xaa is C or S

SEQ ID NO: 48589 - protein, 38 aa, Artificial Sequence; identical to SEQ ID NO: 18519
  GFR-binding peptide
  MOD_RES (1), (3): Xaa is C or S
  MOD_RES (16), (17), (18), (19), (20): Xaa is A or G
  MOD_RES (21), (22), (23), (24): Xaa is A or G or is absent

SEQ ID NO: 48590 - protein, 38 aa, Artificial Sequence
  GFR-binding peptide
  MOD_RES (33), (34): Xaa is C or S
  MOD_RES (11), (12), (13), (14), (15): Xaa is A or G
  MOD_RES (16), (17), (18), (19): Xaa is A or G or is absent
RVVMNVQVEKXXXXXXXXXVKAVKVSRLKTPAXXPKPV

SEQ ID NO: 48591 - protein, 36 aa, Artificial Sequence; identical to SEQ ID NO: 11439
  GFR-binding peptide
  MOD_RES (2), (4), (35), (36): Xaa is C or S

SEQ ID NO: 48592 - protein, 42 aa, Artificial Sequence
  GFR-binding peptide
  MOD_RES (1), (3), (37), (38): Xaa is C or S
  MOD_RES (15), (16), (17), (18), (19): Xaa is A or G
  MOD_RES (20), (21), (22), (23): Xaa is A or G or is absent
XGXGEVVMDSMEGIXXXXXXXXXMIQMTINSLETPVXXAKPI

SEQ ID NO: 48593 - protein, 43 aa, Artificial Sequence
  GFR-binding peptide
  MOD_RES (1), (3), (37): Xaa is C or S
XEXKNHQLFNSLQEHQGQHPKIRYYVMPLPEEETPVXELGEDN

SEQ ID NO: 48594 - protein, 35 aa, Artificial Sequence; identical to SEQ ID NO: 18521
  GFR-binding peptide
  MOD_RES (1), (1): Xaa is C or S

SEQ ID NO: 48595 - protein, 36 aa, Artificial Sequence; identical to SEQ ID NO: 18523
  GFR-binding peptide
  MOD_RES (1), (1): Xaa is C or S

SEQ ID NO: 48596 - protein, 42 aa, Artificial Sequence
  GFR-binding peptide
  MOD_RES (2), (39): Xaa is C or S
  MOD_RES (15), (16), (17), (18), (19): Xaa is A or G
  MOD_RES (20), (21), (22), (23): Xaa is A or G or is absent
AXELHEELRNSLQEXXXXXXXXXYYVVPLPEHHVRSPQXKVS

SEQ ID NO: 48597 - protein, 34 aa, Artificial Sequence; identical to SEQ ID NO: 11442
  GFR-binding peptide
  MOD_RES (2), (33), (34): Xaa is C or S

SEQ ID NO: 48598 - protein, 40 aa, Artificial Sequence
  GFR-binding peptide
  MOD_RES (37), (37): Xaa is C or S
ALHDELTNSLQEFIPKKRVIEYYLVTLPELQVQTPRXQVN

SEQ ID NO: 48599 - protein, 41 aa, Artificial Sequence
  GFR-binding peptide
  MOD_RES (1), (35): Xaa is C or S
  MOD_RES (13), (14), (15), (16), (17): Xaa is A or G
  MOD_RES (18), (19), (20), (21): Xaa is A or G or is absent
XSRVVMNVTAKKXXXXXXXXXIKRVQVPRLKTPAXTPKTVH

SEQ ID NO: 48600 - protein, 34 aa, Artificial Sequence; identical to SEQ ID NO: 18527
  GFR-binding peptide

SEQ ID NO: 48601 - protein, 42 aa, Artificial Sequence
  GFR-binding peptide
  MOD_RES (1), (3), (36), (37): Xaa is C or S
  MOD_RES (14), (15), (16), (17), (18): Xaa is A or G
  MOD_RES (19), (20), (21), (22): Xaa is A or G or is absent
XKXSKVVMVTAKKXXXXXXXXXIKRIQVPRLDQPVXXPSASA

SEQ ID NO: 48602 - protein, 35 aa, Artificial Sequence; identical to SEQ ID NO: 11449
  GFR-binding peptide
  MOD_RES (1), (32), (33): Xaa is C or S

SEQ ID NO: 48603 - protein, 33 aa, Artificial Sequence
  GFR-binding peptide
  MOD_RES (1), (32), (33): Xaa is C or S
XSKVVMVQVEKVKPTRGVVKAIKVSRLDQPVXX

SEQ ID NO: 48604 - protein, 38 aa, Artificial Sequence
  GFR-binding peptide
  MOD_RES (2), (34), (35): Xaa is C or S
GXGEVVMDVQVEKVVKENEDVKAMKVSRLETPVXXAKP

SEQ ID NO: 48605 - protein, 35 aa, Artificial Sequence
  GFR-binding peptide
  MOD_RES (1), (32), (33): Xaa is C or S
XSRVIMVTAKKVKPKRGVIKRIQVPRLAQPVXXPA

SEQ ID NO: 48606 - protein, 38 aa, Artificial Sequence; identical to SEQ ID NO: 18532
  GFR-binding peptide
  MOD_RES (37), (37): Xaa is C or S

SEQ ID NO: 48607 - protein, 34 aa, Artificial Sequence; identical to SEQ ID NO: 11456
  GFR-binding peptide
  MOD_RES (2), (34): Xaa is C or S

SEQ ID NO: 48608 - protein, 35 aa, Artificial Sequence; identical to SEQ ID NO: 11457
  GFR-binding peptide
  MOD_RES (31), (32): Xaa is C or S

SEQ ID NO: 48609 - protein, 32 aa, Artificial Sequence
  GFR-binding peptide
  MOD_RES (2), (2): Xaa is C or S
KXSRVIMVTAKKVKPKRGVIKRIQVPRLAQPV

SEQ ID NO: 48610 - protein, 36 aa, Artificial Sequence; identical to SEQ ID NO: 11458
  GFR-binding peptide
  MOD_RES (1), (3), (35), (36): Xaa is C or S

SEQ ID NO: 48611 - protein, 38 aa, Artificial Sequence
  GFR-binding peptide
  MOD_RES (2), (4), (35), (36): Xaa is C or S
SXKXSKVVMVTAKKVKPTRGVIKRIQVPRLDQPVXXPS

SEQ ID NO: 48612 - protein, 34 aa, Artificial Sequence
  GFR-binding peptide
  MOD_RES (1), (33), (34): Xaa is C or S
XARVVMNVQVEKIVNSSDDVKAVKVSRLQTPAXX

SEQ ID NO: 48613 - protein, 33 aa, Artificial Sequence
  GFR-binding peptide
  MOD_RES (31), (32): Xaa is C or S
SRVIMVTAKKVKPKRGVIKRIQVPRLAQPVXXP

SEQ ID NO: 48614 - protein, 39 aa, Artificial Sequence
  GFR-binding peptide
  MOD_RES (2), (4), (36), (37): Xaa is C or S
HXGXSRVVMNVQVEKIVNSSDDVKAVKVSRLKTPAXXPK

SEQ ID NO: 48615 - protein, 32 aa, Artificial Sequence; identical to SEQ ID NO: 11459
  GFR-binding peptide
  MOD_RES (11), (12), (13), (14), (15): Xaa is A or G
  MOD_RES (16), (17), (18), (19): Xaa is A or G or is absent

SEQ ID NO: 48616 - protein, 39 aa, Artificial Sequence; identical to SEQ ID NO: 11460
  GFR-binding peptide
  MOD_RES (2), (35), (36): Xaa is C or S
  MOD_RES (13), (14), (15), (16), (17): Xaa is A or G
  MOD_RES (18), (19), (20), (21): Xaa is A or G or is absent

SEQ ID NO: 48617 - protein, 34 aa, Artificial Sequence; identical to SEQ ID NO: 11461
  GFR-binding peptide
  MOD_RES (31), (32): Xaa is C or S

SEQ ID NO: 48618 - protein, 42 aa, Artificial Sequence; identical to SEQ ID NO: 11465
  GFR-binding peptide
  MOD_RES (2), (36), (37): Xaa is C or S
  MOD_RES (14), (15), (16), (17), (18): Xaa is A or G
  MOD_RES (19), (20), (21), (22): Xaa is A or G or is absent

SEQ ID NO: 48619 - protein, 37 aa, Artificial Sequence; identical to SEQ ID NO: 11467
  GFR-binding peptide
  MOD_RES (33), (34): Xaa is C or S
  MOD_RES (11), (12), (13), (14), (15): Xaa is A or G
  MOD_RES (16), (17), (18), (19): Xaa is A or G or is absent

SEQ ID NO: 48620 - protein, 41 aa, Artificial Sequence
  GFR-binding peptide
  MOD_RES (1), (3), (36), (37): Xaa is C or S
  MOD_RES (14), (15), (16), (17), (18): Xaa is A or G
  MOD_RES (19), (20), (21), (22): Xaa is A or G or is absent
XKXSRVIMSMEGIXXXXXXXXXMIQITINSLAQPVXXPAAS

SEQ ID NO: 48621 - protein, 37 aa, Artificial Sequence; identical to SEQ ID NO: 18538
  GFR-binding peptide
  MOD_RES (1), (3), (37): Xaa is C or S
  MOD_RES (15), (16), (17), (18), (19): Xaa is A or G
  MOD_RES (20), (21), (22), (23): Xaa is A or G or is absent

SEQ ID NO: 48622 - protein, 40 aa, Artificial Sequence; identical to SEQ ID NO: 18543
  GFR-binding peptide
  MOD_RES (1), (38): Xaa is C or S
  MOD_RES (14), (15), (16), (17), (18): Xaa is A or G
  MOD_RES (19), (20), (21), (22): Xaa is A or G or is absent

SEQ ID NO: 48623 - protein, 42 aa, Artificial Sequence
  GFR-binding peptide
  MOD_RES (1), (3), (40): Xaa is C or S
XAXELHEELRNSLQELKPKKRVYEYYLVTLPEHHVRSPQXKV

SEQ ID NO: 48624 - protein, 37 aa, Artificial Sequence; identical to SEQ ID NO: 11471
  GFR-binding peptide
  MOD_RES (33), (34): Xaa is C or S
  MOD_RES (11), (12), (13), (14), (15): Xaa is A or G
  MOD_RES (16), (17), (18), (19): Xaa is A or G or is absent

SEQ ID NO: 48625 - protein, 38 aa, Artificial Sequence; identical to SEQ ID NO: 11472
  GFR-binding peptide
  MOD_RES (1), (35), (36): Xaa is C or S
  MOD_RES (13), (14), (15), (16), (17): Xaa is A or G
  MOD_RES (18), (19), (20), (21): Xaa is A or G or is absent

SEQ ID NO: 48626 - protein, 40 aa, Artificial Sequence
  GFR-binding peptide
  MOD_RES (1), (35): Xaa is C or S
  MOD_RES (13), (14), (15), (16), (17): Xaa is A or G
  MOD_RES (18), (19), (20), (21): Xaa is A or G or is absent
XSRVVMNVTAKKXXXXXXXXXIKRVQVPRLKTPAXTPKTV

SEQ ID NO: 48627 - protein, 36 aa, Artificial Sequence
  GFR-binding peptide
  MOD_RES (32), (33): Xaa is C or S
GEVVMDVQVEKVVKENEDVKAMKVSRLETPVXXAKP

SEQ ID NO: 48628 - protein, 40 aa, Artificial Sequence
  GFR-binding peptide
  MOD_RES (34), (35): Xaa is C or S
  MOD_RES (12), (13), (14), (15), (16): Xaa is A or G
  MOD_RES (17), (18), (19), (20): Xaa is A or G or is absent
GEVVMEVTAKKXXXXXXXXXIKRMQVPRLETPVXXAKPIS

SEQ ID NO: 48629 - protein, 44 aa, Artificial Sequence
  GFR-binding peptide
  MOD_RES (2), (4), (41): Xaa is C or S
  MOD_RES (17), (18), (19), (20), (21): Xaa is A or G
  MOD_RES (22), (23), (24), (25): Xaa is A or G or is absent
EXKXALHDELTNSLQEXXXXXXXXXYYLVTLPELQVQTPRXQVN

SEQ ID NO: 48630 - protein, 38 aa, Artificial Sequence
  GFR-binding peptide
  MOD_RES (1), (3), (35), (36): Xaa is C or S
XGXGEVVMDVQVEKVVKENEDVKAMKVSRLETPVXXAK

SEQ ID NO: 48631 - protein, 38 aa, Artificial Sequence
  GFR-binding peptide
  MOD_RES (1), (3), (35), (36): Xaa is C or S
XGXGEVVMEVQVEKVVKDYEDVKAMKVSRLETPVXXAK

SEQ ID NO: 48632 - protein, 40 aa, Artificial Sequence
  GFR-binding peptide
  MOD_RES (1), (3), (36), (37): Xaa is C or S
  MOD_RES (14), (15), (16), (17), (18): Xaa is A or G
  MOD_RES (19), (20), (21), (22): Xaa is A or G or is absent
XKXSKVVMVTAKKXXXXXXXXXIKRIQVPRLDQPVXXPSA

SEQ ID NO: 48633 - protein, 40 aa, Artificial Sequence
  GFR-binding peptide
  MOD_RES (34), (34): Xaa is C or S
KNHQLFNSLQEHQGQHPKIRYYVMPLPEEETPVXELGEDN

SEQ ID NO: 48634 - protein, 40 aa, Artificial Sequence; identical to SEQ ID NO: 18547
  GFR-binding peptide
  MOD_RES (2), (4): Xaa is C or S

SEQ ID NO: 48635 - protein, 33 aa, Artificial Sequence
  GFR-binding peptide
  MOD_RES (2), (2): Xaa is C or S
GXARVVMNSMEGIIVNSSDDMIQVTINSLQTPA

SEQ ID NO: 48636 - protein, 42 aa, Artificial Sequence
  GFR-binding peptide
  MOD_RES (2), (36), (37): Xaa is C or S
  MOD_RES (14), (15), (16), (17), (18): Xaa is A or G
  MOD_RES (19), (20), (21), (22): Xaa is A or G or is absent
GXARVVMNSMEGIXXXXXXXXXMIQVTINSLQTPAXXPKPVT

SEQ ID NO: 48637 - protein, 36 aa, Artificial Sequence; identical to SEQ ID NO: 18549
  GFR-binding peptide
  MOD_RES (36), (36): Xaa is C or S
  MOD_RES (12), (13), (14), (15), (16): Xaa is A or G
  MOD_RES (17), (18), (19), (20): Xaa is A or G or is absent

SEQ ID NO: 48638 - protein, 39 aa, Artificial Sequence
  GFR-binding peptide
  MOD_RES (33), (34): Xaa is C or S
  MOD_RES (11), (12), (13), (14), (15): Xaa is A or G
  MOD_RES (16), (17), (18), (19): Xaa is A or G or is absent
RVVMNSMEGIXXXXXXXXXMIQVTINSLQTPAXXPKPVT

SEQ ID NO: 48639 - protein, 33 aa, Artificial Sequence; identical to SEQ ID NO: 18551
  GFR-binding peptide

SEQ ID NO: 48640 - protein, 36 aa, Artificial Sequence
  GFR-binding peptide
  MOD_RES (2), (4), (35), (36): Xaa is C or S
SXKXSRVIMSMEGIVKPKRGVMIQITINSLAQPVXX

SEQ ID NO: 48641 - protein, 34 aa, Artificial Sequence
  GFR-binding peptide
  MOD_RES (34), (34): Xaa is C or S
  MOD_RES (12), (13), (14), (15), (16): Xaa is A or G
  MOD_RES (17), (18), (19), (20): Xaa is A or G or is absent
KNHQLFNSLQEXXXXXXXXXYYVMPLPEEETPVX

SEQ ID NO: 48642 - protein, 42 aa, Artificial Sequence
  GFR-binding peptide
  MOD_RES (1), (3), (40): Xaa is C or S
  MOD_RES (16), (17), (18), (19), (20): Xaa is A or G
  MOD_RES (21), (22), (23), (24): Xaa is A or G or is absent
XKXALHDELTNSLQEXXXXXXXXXYYVVPLPELQVQTPRXQV

SEQ ID NO: 48643 - protein, 38 aa, Artificial Sequence; identical to SEQ ID NO: 18555
  GFR-binding peptide
  MOD_RES (1), (38): Xaa is C or S
  MOD_RES (14), (15), (16), (17), (18): Xaa is A or G
  MOD_RES (19), (20), (21), (22): Xaa is A or G or is absent

SEQ ID NO: 48644 - protein, 38 aa, Artificial Sequence
  GFR-binding peptide
  MOD_RES (1), (35), (36): Xaa is C or S
  MOD_RES (13), (14), (15), (16), (17): Xaa is A or G
  MOD_RES (18), (19), (20), (21): Xaa is A or G or is absent
XSRVVMNVQVEKXXXXXXXXXVKAVKVSRLKTPAXXPK

SEQ ID NO: 48645 - protein, 35 aa, Artificial Sequence; identical to SEQ ID NO: 11479
  GFR-binding peptide
  MOD_RES (32), (33): Xaa is C or S

SEQ ID NO: 48646 - protein, 40 aa, Artificial Sequence; identical to SEQ ID NO: 11481
  GFR-binding peptide
  MOD_RES (2), (4), (35), (36): Xaa is C or S

SEQ ID NO: 48647 - protein, 36 aa, Artificial Sequence; identical to SEQ ID NO: 18558
  GFR-binding peptide
  MOD_RES (36), (36): Xaa is C or S

SEQ ID NO: 48648 - protein, 44 aa, Artificial Sequence
  GFR-binding peptide
  MOD_RES (2), (4), (38), (39): Xaa is C or S
  MOD_RES (16), (17), (18), (19), (20): Xaa is A or G
  MOD_RES (21), (22), (23), (24): Xaa is A or G or is absent
RXGXGEVVMDVTAKKXXXXXXXXXIKRMQVPRLETPVXXAKPIK

SEQ ID NO: 48649 - protein, 35 aa, Artificial Sequence
  GFR-binding peptide
  MOD_RES (2), (2): Xaa is C or S
EXKNHQLFNSLQEHQGQHPKIRYYLMTLPEEETPV

SEQ ID NO: 48650 - protein, 38 aa, Artificial Sequence; identical to SEQ ID NO: 38267
  GFR-binding peptide
  MOD_RES (2), (33), (34): Xaa is C or S

SEQ ID NO: 48651 - protein, 36 aa, Artificial Sequence; identical to SEQ ID NO: 11485
  GFR-binding peptide
  MOD_RES (1), (34), (35): Xaa is C or S
  MOD_RES (12), (13), (14), (15), (16): Xaa is A or G
  MOD_RES (17), (18), (19), (20): Xaa is A or G or is absent

SEQ ID NO: 48652 - protein, 41 aa, Artificial Sequence; identical to SEQ ID NO: 18561
  GFR-binding peptide
  MOD_RES (37), (37): Xaa is C or S
  MOD_RES (13), (14), (15), (16), (17): Xaa is A or G
  MOD_RES (18), (19), (20), (21): Xaa is A or G or is absent

SEQ ID NO: 48653 - protein, 42 aa, Artificial Sequence; identical to SEQ ID NO: 18562
  GFR-binding peptide
  MOD_RES (2), (4), (41): Xaa is C or S
  MOD_RES (17), (18), (19), (20), (21): Xaa is A or G
  MOD_RES (22), (23), (24), (25): Xaa is A or G or is absent

SEQ ID NO: 48654 - protein, 36 aa, Artificial Sequence
  GFR-binding peptide
  MOD_RES (1), (34), (35): Xaa is C or S
  MOD_RES (12), (13), (14), (15), (16): Xaa is A or G
  MOD_RES (17), (18), (19), (20): Xaa is A or G or is absent
XSKVVMSMEGIXXXXXXXXXMIQITINSLDQPVXXP

SEQ ID NO: 48655 - protein, 33 aa, Artificial Sequence; identical to SEQ ID NO: 11492
  GFR-binding peptide
  MOD_RES (33), (33): Xaa is C or S
  MOD_RES (11), (12), (13), (14), (15): Xaa is A or G
  MOD_RES (16), (17), (18), (19): Xaa is A or G or is absent

SEQ ID NO: 48656 - protein, 34 aa, Artificial Sequence; identical to SEQ ID NO: 11495
  GFR-binding peptide
  MOD_RES (33), (34): Xaa is C or S
  MOD_RES (11), (12), (13), (14), (15): Xaa is A or G
  MOD_RES (16), (17), (18), (19): Xaa is A or G or is absent

SEQ ID NO: 48657 - protein, 39 aa, Artificial Sequence; identical to SEQ ID NO: 11496
  GFR-binding peptide
  MOD_RES (2), (35), (36): Xaa is C or S
  MOD_RES (13), (14), (15), (16), (17): Xaa is A or G
  MOD_RES (18), (19), (20), (21): Xaa is A or G or is absent

SEQ ID NO: 48658 - protein, 38 aa, Artificial Sequence
  GFR-binding peptide
  MOD_RES (2), (34), (35): Xaa is C or S
GXARVVMNVTAKKIVNSSDDIKRVQVPRLQTPAXXPKP

SEQ ID NO: 48659 - protein, 34 aa, Artificial Sequence
  GFR-binding peptide
ALHDELTNSLQEFIPKKRVIEYYVVPLPELQVQT

SEQ ID NO: 48660 - protein, 41 aa, Artificial Sequence
  GFR-binding peptide
  MOD_RES (37), (37): Xaa is C or S
  MOD_RES (13), (14), (15), (16), (17): Xaa is A or G
  MOD_RES (18), (19), (20), (21): Xaa is A or G or is absent
ALHDELTNSLQEXXXXXXXXXYYVVPLPELQVQTPRXQVNR

SEQ ID NO: 48661 - protein, 41 aa, Artificial Sequence; identical to SEQ ID NO: 18570
  GFR-binding peptide
  MOD_RES (2), (36): Xaa is C or S

SEQ ID NO: 48662 - protein, 36 aa, Artificial Sequence
  GFR-binding peptide
  MOD_RES (1), (35), (36): Xaa is C or S
  MOD_RES (13), (14), (15), (16), (17): Xaa is A or G
  MOD_RES (18), (19), (20), (21): Xaa is A or G or is absent
XARVVMNVQVEKXXXXXXXXXVKAVKVSRLQTPAXX

SEQ ID NO: 48663 - protein, 41 aa, Artificial Sequence; identical to SEQ ID NO: 11499
  GFR-binding peptide
  MOD_RES (2), (4), (36), (37): Xaa is C or S

SEQ ID NO: 48664 - protein, 36 aa, Artificial Sequence; identical to SEQ ID NO: 11500
  GFR-binding peptide
  MOD_RES (2), (35), (36): Xaa is C or S
  MOD_RES (13), (14), (15), (16), (17): Xaa is A or G
  MOD_RES (18), (19), (20), (21): Xaa is A or G or is absent

SEQ ID NO: 48665 - protein, 43 aa, Artificial Sequence
  GFR-binding peptide
  MOD_RES (1), (3), (37): Xaa is C or S
  MOD_RES (15), (16), (17), (18), (19): Xaa is A or G
  MOD_RES (20), (21), (22), (23): Xaa is A or G or is absent
XGXSRVVMNVTAKKXXXXXXXXXIKRVQVPRLKTPAXTPKTVH

SEQ ID NO: 48666 - protein, 35 aa, Artificial Sequence; identical to SEQ ID NO: 18572
  GFR-binding peptide
  MOD_RES (12), (13), (14), (15), (16): Xaa is A or G
  MOD_RES (17), (18), (19), (20): Xaa is A or G or is absent

SEQ ID NO: 48667 - protein, 40 aa, Artificial Sequence; identical to SEQ ID NO: 11502
  GFR-binding peptide
  MOD_RES (1), (3), (37), (38): Xaa is C or S
  MOD_RES (15), (16), (17), (18), (19): Xaa is A or G
  MOD_RES (20), (21), (22), (23): Xaa is A or G or is absent

SEQ ID NO: 48668 - protein, 39 aa, Artificial Sequence; identical to SEQ ID NO: 18573
  GFR-binding peptide
  MOD_RES (1), (3): Xaa is C or S
  MOD_RES (16), (17), (18), (19), (20): Xaa is A or G
  MOD_RES (21), (22), (23), (24): Xaa is A or G or is absent

SEQ ID NO: 48669 - protein, 39 aa, Artificial Sequence; identical to SEQ ID NO: 11503
  GFR-binding peptide
  MOD_RES (2), (34), (35): Xaa is C or S

SEQ ID NO: 48670 - protein, 39 aa, Artificial Sequence; identical to SEQ ID NO: 18574
  GFR-binding peptide
  MOD_RES (2), (39): Xaa is C or S

SEQ ID NO: 48671 - protein, 36 aa, Artificial Sequence
  GFR-binding peptide
  MOD_RES (1), (35), (36): Xaa is C or S
  MOD_RES (13), (14), (15), (16), (17): Xaa is A or G
  MOD_RES (18), (19), (20), (21): Xaa is A or G or is absent
XGEVVMEVQVEKXXXXXXXXXVKAMKVSRLETPVXX

SEQ ID NO: 48672 - protein, 43 aa, Artificial Sequence
  GFR-binding peptide
  MOD_RES (2), (4), (37), (38): Xaa is C or S
  MOD_RES (15), (16), (17), (18), (19): Xaa is A or G
  MOD_RES (20), (21), (22), (23): Xaa is A or G or is absent
SXKXSKVIMVQVEKXXXXXXXXXVKAIKVSRLDQSVXXPSASA

SEQ ID NO: 48673 - protein, 43 aa, Artificial Sequence; identical to SEQ ID NO: 11507
  GFR-binding peptide
  MOD_RES (1), (3), (37), (38): Xaa is C or S
  MOD_RES (15), (16), (17), (18), (19): Xaa is A or G
  MOD_RES (20), (21), (22), (23): Xaa is A or G or is absent

SEQ ID NO: 48674 - protein, 32 aa, Artificial Sequence; identical to SEQ ID NO: 11508
  GFR-binding peptide
  MOD_RES (31), (32): Xaa is C or S

SEQ ID NO: 48675 - protein, 35 aa, Artificial Sequence; identical to SEQ ID NO: 18576
  GFR-binding peptide

SEQ ID NO: 48676 - protein, 39 aa, Artificial Sequence; identical to SEQ ID NO: 18579
  GFR-binding peptide
  MOD_RES (2), (36): Xaa is C or S
  MOD_RES (14), (15), (16), (17), (18): Xaa is A or G
  MOD_RES (19), (20), (21), (22): Xaa is A or G or is absent

SEQ ID NO: 48677 - protein, 39 aa, Artificial Sequence; identical to SEQ ID NO: 11509
  GFR-binding peptide
  MOD_RES (34), (34): Xaa is C or S
  MOD_RES (12), (13), (14), (15), (16): Xaa is A or G
  MOD_RES (17), (18), (19), (20): Xaa is A or G or is absent

SEQ ID NO: 48678 - protein, 37 aa, Artificial Sequence
  GFR-binding peptide
  MOD_RES (31), (32): Xaa is C or S
SKVIMVQVEKIKPTKGIVKAIKVSRLDQSVXXPSASA

SEQ ID NO: 48679 - protein, 38 aa, Artificial Sequence
  GFR-binding peptide
  MOD_RES (1), (3), (35), (36): Xaa is C or S
XGXSRVVMNSMEGIIVNSSDDMIQVTINSLKTPAXXPK

SEQ ID NO: 48680 - protein, 38 aa, Artificial Sequence; identical to SEQ ID NO: 11510
  GFR-binding peptide
  MOD_RES (2), (36), (37): Xaa is C or S
  MOD_RES (14), (15), (16), (17), (18): Xaa is A or G
  MOD_RES (19), (20), (21), (22): Xaa is A or G or is absent

SEQ ID NO: 48681 - protein, 44 aa, Artificial Sequence; identical to SEQ ID NO: 11511
  GFR-binding peptide
  MOD_RES (2), (4), (38), (39): Xaa is C or S
  MOD_RES (16), (17), (18), (19), (20): Xaa is A or G
  MOD_RES (21), (22), (23), (24): Xaa is A or G or is absent

SEQ ID NO: 48682 - protein, 31 aa, Artificial Sequence; identical to SEQ ID NO: 11513
  GFR-binding peptide
  MOD_RES (31), (31): Xaa is C or S

SEQ ID NO: 48683 - protein, 37 aa, Artificial Sequence
  GFR-binding peptide
  MOD_RES (33), (34): Xaa is C or S
  MOD_RES (11), (12), (13), (14), (15): Xaa is A or G
  MOD_RES (16), (17), (18), (19): Xaa is A or G or is absent
SKVIMVQVEKXXXXXXXXXVKAIKVSRLDQSVXXPSA

SEQ ID NO: 48684 - protein, 39 aa, Artificial Sequence; identical to SEQ ID NO: 18585
  GFR-binding peptide
  MOD_RES (35), (35): Xaa is C or S
  MOD_RES (11), (12), (13), (14), (15): Xaa is A or G
  MOD_RES (16), (17), (18), (19): Xaa is A or G or is absent

SEQ ID NO: 48685 - protein, 43 aa, Artificial Sequence
  GFR-binding peptide
  MOD_RES (2), (4), (38), (39): Xaa is C or S
  MOD_RES (16), (17), (18), (19), (20): Xaa is A or G
  MOD_RES (21), (22), (23), (24): Xaa is A or G or is absent
RXGXGEVVMEVQVEKXXXXXXXXXVKAMKVSRLETPVXXAKPI

SEQ ID NO: 48686 - protein, 42 aa, Artificial Sequence
  GFR-binding peptide
  MOD_RES (1), (3), (36), (37): Xaa is C or S
  MOD_RES (14), (15), (16), (17), (18): Xaa is A or G
  MOD_RES (19), (20), (21), (22): Xaa is A or G or is absent
XKXSKVIMVQVEKXXXXXXXXXVKAIKVSRLDQSVXXPSASA

SEQ ID NO: 48687 - protein, 34 aa, Artificial Sequence; identical to SEQ ID NO: 11515
  GFR-binding peptide
  MOD_RES (32), (33): Xaa is C or S

SEQ ID NO: 48688 - protein, 36 aa, Artificial Sequence; identical to SEQ ID NO: 18586
  GFR-binding peptide

SEQ ID NO: 48689 - protein, 32 aa, Artificial Sequence; identical to SEQ ID NO: 11520
  GFR-binding peptide
  MOD_RES (11), (12), (13), (14), (15): Xaa is A or G
  MOD_RES (16), (17), (18), (19): Xaa is A or G or is absent

SEQ ID NO: 48690 - protein, 41 aa, Artificial Sequence
  GFR-binding peptide
  MOD_RES (1), (35), (36): Xaa is C or S
  MOD_RES (13), (14), (15), (16), (17): Xaa is A or G
  MOD_RES (18), (19), (20), (21): Xaa is A or G or is absent
XARVVMNVTAKKXXXXXXXXXIKRVQVPRLQTPAXXPKPVT

SEQ ID NO: 48691 - protein, 37 aa, Artificial Sequence; identical to SEQ ID NO: 11523
  GFR-binding peptide
  MOD_RES (33), (34): Xaa is C or S
  MOD_RES (11), (12), (13), (14), (15): Xaa is A or G
  MOD_RES (16), (17), (18), (19): Xaa is A or G or is absent

SEQ ID NO: 48692 - protein, 37 aa, Artificial Sequence
  GFR-binding peptide
  MOD_RES (34), (34): Xaa is C or S
KNHQLFNSLQEHQGQHPKIRYYLMTLPEEETPVXELG

SEQ ID NO: 48693 - protein, 33 aa, Artificial Sequence
  GFR-binding peptide
  MOD_RES (12), (13), (14), (15), (16): Xaa is A or G
  MOD_RES (17), (18), (19), (20): Xaa is A or G or is absent
KNHQLFNSLQEXXXXXXXXXYYVMPLPEEETPV

SEQ ID NO: 48694 - protein, 42 aa, Artificial Sequence; identical to SEQ ID NO: 18594
  GFR-binding peptide
  MOD_RES (1), (3), (40): Xaa is C or S

SEQ ID NO: 48695 - protein, 40 aa, Artificial Sequence
  GFR-binding peptide
  MOD_RES (2), (35), (36): Xaa is C or S
  MOD_RES (13), (14), (15), (16), (17): Xaa is A or G
  MOD_RES (18), (19), (20), (21): Xaa is A or G or is absent
KXSKVIMVTAKKXXXXXXXXXIKRIQVPRLDQSVXXPSAS

SEQ ID NO: 48696 - protein, 33 aa, Artificial Sequence
  GFR-binding peptide
  MOD_RES (1), (33): Xaa is C or S
XARVVMNVQVEKIVNSSDDVKAVKVSRLQTPAX

SEQ ID NO: 48697 - protein, 40 aa, Artificial Sequence; identical to SEQ ID NO: 18596
  GFR-binding peptide
  MOD_RES (36), (36): Xaa is C or S
  MOD_RES (12), (13), (14), (15), (16): Xaa is A or G
  MOD_RES (17), (18), (19), (20): Xaa is A or G or is absent

SEQ ID NO: 48698 - protein, 40 aa, Artificial Sequence; identical to SEQ ID NO: 11531
  GFR-binding peptide
  MOD_RES (2), (4), (38), (39): Xaa is C or S
  MOD_RES (16), (17), (18), (19), (20): Xaa is A or G
  MOD_RES (21), (22), (23), (24): Xaa is A or G or is absent

SEQ ID NO: 48699 - protein, 30 aa, Artificial Sequence
  GFR-binding peptide
SRVIMSMEGIVKPKRGVMIQITINSLAQPV

SEQ ID NO: 48700 - protein, 37 aa, Artificial Sequence; identical to SEQ ID NO: 11532
  GFR-binding peptide
  MOD_RES (2), (4), (37): Xaa is C or S
  MOD_RES (15), (16), (17), (18), (19): Xaa is A or G
  MOD_RES (20), (21), (22), (23): Xaa is A or G or is absent

SEQ ID NO: 48701 - protein, 33 aa, Artificial Sequence
  GFR-binding peptide
  MOD_RES (32), (32): Xaa is C or S
SRVVMNVQVEKIVNSSDDVKAVKVSRLKTPAXT

SEQ ID NO: 48702 - protein, 36 aa, Artificial Sequence
  GFR-binding peptide
  MOD_RES (2), (33), (34): Xaa is C or S
KXSKVIMSMEGIIKPTKGIMIQITINSLDQSVXXPS

SEQ ID NO: 48703 - protein, 37 aa, Artificial Sequence
  GFR-binding peptide
  MOD_RES (32), (33): Xaa is C or S
GEVVMDSMEGIVVKENEDMIQMTINSLETPVXXAKPI

SEQ ID NO: 48704 - protein, 37 aa, Artificial Sequence
  GFR-binding peptide
  MOD_RES (31), (31): Xaa is C or S
RVVMNVTAKKIVNSSDDIKRVQVPRLKTPAXTPKTVH

SEQ ID NO: 48705 - protein, 42 aa, Artificial Sequence
  GFR-binding peptide
  MOD_RES (1), (3), (37): Xaa is C or S
  MOD_RES (15), (16), (17), (18), (19): Xaa is A or G
  MOD_RES (20), (21), (22), (23): Xaa is A or G or is absent
XGXSRVVMNVQVEKXXXXXXXXXVKAVKVSRLKTPAXTPKTV

SEQ ID NO: 48706 - protein, 33 aa, Artificial Sequence
  GFR-binding peptide
  MOD_RES (31), (32): Xaa is C or S
EVVMDVQVEKVVKENEDVKAMKVSRLETPVXXA

SEQ ID NO: 48707 - protein, 33 aa, Artificial Sequence
  GFR-binding peptide
  MOD_RES (31), (32): Xaa is C or S
SRVIMVQVEKVKPKRGVVKAIKVSRLAQPVXXP

SEQ ID NO: 48708 - protein, 34 aa, Artificial Sequence; identical to SEQ ID NO: 11539
  GFR-binding peptide
  MOD_RES (1), (34): Xaa is C or S
  MOD_RES (12), (13), (14), (15), (16): Xaa is A or G
  MOD_RES (17), (18), (19), (20): Xaa is A or G or is absent

SEQ ID NO: 48709 - protein, 35 aa, Artificial Sequence
  GFR-binding peptide
  MOD_RES (2), (4): Xaa is C or S
HXGXSRVVMNSMEGIIVNSSDDMIQVTINSLKTPA

SEQ ID NO: 48710 - protein, 40 aa, Artificial Sequence; identical to SEQ ID NO: 11541
  GFR-binding peptide
  MOD_RES (1), (3), (34), (35): Xaa is C or S

SEQ ID NO: 48711 - protein, 38 aa, Artificial Sequence
  GFR-binding peptide
  MOD_RES (1), (35): Xaa is C or S
XKNHQLFNSLQEHQGQHPKIRYYLMTLPEEETPVXELG

SEQ ID NO: 48712 - protein, 32 aa, Artificial Sequence
  GFR-binding peptide
  MOD_RES (31), (32): Xaa is C or S
SKVIMVQVEKIKPTKGIVKAIKVSRLDQSVXX

SEQ ID NO: 48713 - protein, 33 aa, Artificial Sequence; identical to SEQ ID NO: 11542
  GFR-binding peptide
  MOD_RES (2), (33): Xaa is C or S

SEQ ID NO: 48714 - protein, 35 aa, Artificial Sequence; identical to SEQ ID NO: 18605
  GFR-binding peptide
  MOD_RES (1), (35): Xaa is C or S

SEQ ID NO: 48715 - protein, 36 aa, Artificial Sequence
  GFR-binding peptide
  MOD_RES (35), (35): Xaa is C or S
HEELRNSLQELKPKKRVYEYYVVPLPEHHVRSPQXK

SEQ ID NO: 48716 - protein, 38 aa, Artificial Sequence; identical to SEQ ID NO: 38348
  GFR-binding peptide
  MOD_RES (2), (35), (36): Xaa is C or S
  MOD_RES (13), (14), (15), (16), (17): Xaa is A or G
  MOD_RES (18), (19), (20), (21): Xaa is A or G or is absent

SEQ ID NO: 48717 - protein, 32 aa, Artificial Sequence; identical to SEQ ID NO: 11543
  GFR-binding peptide
  MOD_RES (2), (2): Xaa is C or S

SEQ ID NO: 48718 - protein, 43 aa, Artificial Sequence; identical to SEQ ID NO: 18608
  GFR-binding peptide
  MOD_RES (2), (39): Xaa is C or S

SEQ ID NO: 48719 - protein, 36 aa, Artificial Sequence
  GFR-binding peptide
  MOD_RES (33), (34): Xaa is C or S
  MOD_RES (11), (12), (13), (14), (15): Xaa is A or G
  MOD_RES (16), (17), (18), (19): Xaa is A or G or is absent
SKVVMVTAKKXXXXXXXXXIKRIQVPRLDQPVXXPS

SEQ ID NO: 48720 - protein, 41 aa, Artificial Sequence; identical to SEQ ID NO: 18609
  GFR-binding peptide
  MOD_RES (1), (3), (40): Xaa is C or S

SEQ ID NO: 48721 - protein, 38 aa, Artificial Sequence
  GFR-binding peptide
  MOD_RES (2), (2): Xaa is C or S
  MOD_RES (15), (16), (17), (18), (19): Xaa is A or G
  MOD_RES (20), (21), (22), (23): Xaa is A or G or is absent
KXALHDELTNSLQEXXXXXXXXXYYVVPLPELQVQTPR

SEQ ID NO: 48722 - protein, 34 aa, Artificial Sequence; identical to SEQ ID NO: 11547
  GFR-binding peptide
  MOD_RES (1), (32), (33): Xaa is C or S

SEQ ID NO: 48723 - protein, 37 aa, Artificial Sequence; identical to SEQ ID NO: 18611
  GFR-binding peptide
  MOD_RES (2), (36): Xaa is C or S

SEQ ID NO: 48724 - protein, 38 aa, Artificial Sequence
  GFR-binding peptide
  MOD_RES (1), (3): Xaa is C or S
XAXELHEELRNSLQELKPKKRVYEYYVVPLPEHHVRSP

SEQ ID NO: 48725 - protein, 36 aa, Artificial Sequence
  GFR-binding peptide
ALHDELTNSLQEFIPKKRVIEYYLVTLPELQVQTPR

SEQ ID NO: 48726 - protein, 37 aa, Artificial Sequence; identical to SEQ ID NO: 11549
  GFR-binding peptide
  MOD_RES (31), (32): Xaa is C or S

SEQ ID NO: 48727 - protein, 37 aa, Artificial Sequence; identical to SEQ ID NO: 11550
  GFR-binding peptide
  MOD_RES (32), (33): Xaa is C or S

SEQ ID NO: 48728 - protein, 33 aa, Artificial Sequence
  GFR-binding peptide
  MOD_RES (1), (33): Xaa is C or S
XSRVVMNVTAKKIVNSSDDIKRVQVPRLKTPAX

SEQ ID NO: 48729 - protein, 44 aa, Artificial Sequence; identical to SEQ ID NO: 18615
  GFR-binding peptide
  MOD_RES (1), (3), (40): Xaa is C or S

SEQ ID NO: 48730 - protein, 33 aa, Artificial Sequence
  GFR-binding peptide
  MOD_RES (1), (1): Xaa is C or S
  MOD_RES (12), (13), (14), (15), (16): Xaa is A or G
  MOD_RES (17), (18), (19), (20): Xaa is A or G or is absent
XSKVIMSMEGIXXXXXXXXXMIQITINSLDQSV

SEQ ID NO: 48731 - protein, 39 aa, Artificial Sequence; identical to SEQ ID NO: 11552
  GFR-binding peptide
  MOD_RES (1), (35), (36): Xaa is C or S
  MOD_RES (13), (14), (15), (16), (17): Xaa is A or G
  MOD_RES (18), (19), (20), (21): Xaa is A or G or is absent

SEQ ID NO: 48732 - protein, 32 aa, Artificial Sequence; identical to SEQ ID NO: 11554
  GFR-binding peptide
  MOD_RES (32), (32): Xaa is C or S

SEQ ID NO: 48733 - protein, 38 aa, Artificial Sequence
  GFR-binding peptide
  MOD_RES (36), (36): Xaa is C or S
  MOD_RES (12), (13), (14), (15), (16): Xaa is A or G
  MOD_RES (17), (18), (19), (20): Xaa is A or G or is absent
LHEELRNSLQEXXXXXXXXXYYLVTLPEHHVRSPQXKV

SEQ ID NO: 48734 - protein, 42 aa, Artificial Sequence; identical to SEQ ID NO: 18616
  GFR-binding peptide
  MOD_RES (2), (36): Xaa is C or S
  MOD_RES (14), (15), (16), (17), (18): Xaa is A or G
  MOD_RES (19), (20), (21), (22): Xaa is A or G or is absent

SEQ ID NO: 48735 - protein, 35 aa, Artificial Sequence
  GFR-binding peptide
ELHEELRNSLQELKPKKRVYEYYLVTLPEHHVRSP

SEQ ID NO: 48736 - protein, 36 aa, Artificial Sequence; identical to SEQ ID NO: 11557
  GFR-binding peptide
  MOD_RES (2), (4), (35), (36): Xaa is C or S

SEQ ID NO: 48737 - protein, 44 aa, Artificial Sequence; identical to SEQ ID NO: 11558
  GFR-binding peptide
  MOD_RES (2), (4), (38), (39): Xaa is C or S
  MOD_RES (16), (17), (18), (19), (20): Xaa is A or G
  MOD_RES (21), (22), (23), (24): Xaa is A or G or is absent

SEQ ID NO: 48738 - protein, 31 aa, Artificial Sequence
  GFR-binding peptide
SRVVMNVTAKKIVNSSDDIKRVQVPRLKTPA

SEQ ID NO: 48739 - protein, 38 aa, Artificial Sequence
  GFR-binding peptide
  MOD_RES (34), (35): Xaa is C or S
  MOD_RES (12), (13), (14), (15), (16): Xaa is A or G
  MOD_RES (17), (18), (19), (20): Xaa is A or G or is absent
GEVVMEVQVEKXXXXXXXXXVKAMKVSRLETPVXXAKP

SEQ ID NO: 48740 - protein, 39 aa, Artificial Sequence; identical to SEQ ID NO: 18618
  GFR-binding peptide
  MOD_RES (2), (4): Xaa is C or S
  MOD_RES (17), (18), (19), (20), (21): Xaa is A or G
  MOD_RES (22), (23), (24), (25): Xaa is A or G or is absent

SEQ ID NO: 48741 - protein, 38 aa, Artificial Sequence
  GFR-binding peptide
  MOD_RES (1), (35): Xaa is C or S
  MOD_RES (13), (14), (15), (16), (17): Xaa is A or G
  MOD_RES (18), (19), (20), (21): Xaa is A or G or is absent
XKNHQLFNSLQEXXXXXXXXXYYLMTLPEEETPVXELG

SEQ ID NO: 48742 - protein, 36 aa, Artificial Sequence; identical to SEQ ID NO: 11561
  GFR-binding peptide
  MOD_RES (2), (36): Xaa is C or S
  MOD_RES (14), (15), (16), (17), (18): Xaa is A or G
  MOD_RES (19), (20), (21), (22): Xaa is A or G or is absent

SEQ ID NO: 48743 - protein, 37 aa, Artificial Sequence; identical to SEQ ID NO: 18619
  GFR-binding peptide
  MOD_RES (35), (35): Xaa is C or S

SEQ ID NO: 48744 - protein, 42 aa, Artificial Sequence
  GFR-binding peptide
  MOD_RES (2), (4), (36), (37): Xaa is C or S
RXGXGEVVMEVQVEKVVKDYEDVKAMKVSRLETPVXXAKPIS

SEQ ID NO: 48745 - protein, 38 aa, Artificial Sequence
  GFR-binding peptide
  MOD_RES (2), (34), (35): Xaa is C or S
GXSRVVMNVTAKKIVNSSDDIKRVQVPRLKTPAXXPKP

SEQ ID NO: 48746 - protein, 38 aa, Artificial Sequence
  GFR-binding peptide
  MOD_RES (2), (33), (34): Xaa is C or S
KXSRVIMVTAKKVKPKRGVIKRIQVPRLAQPVXXPAAS

SEQ ID NO: 48747 - protein, 41 aa, Artificial Sequence
  GFR-binding peptide
  MOD_RES (1), (3), (40): Xaa is C or S
  MOD_RES (16), (17), (18), (19), (20): Xaa is A or G
  MOD_RES (21), (22), (23), (24): Xaa is A or G or is absent
XAXELHEELRNSLQEXXXXXXXXXYYLVTLPEHHVRSPQXK

SEQ ID NO: 48748 - protein, 36 aa, Artificial Sequence
  GFR-binding peptide
  MOD_RES (34), (35): Xaa is C or S
  MOD_RES (12), (13), (14), (15), (16): Xaa is A or G
  MOD_RES (17), (18), (19), (20): Xaa is A or G or is absent
GEVVMESMEGIXXXXXXXXXMIQMTINSLETPVXXA

SEQ ID NO: 48749 - protein, 37 aa, Artificial Sequence; identical to SEQ ID NO: 11564
  GFR-binding peptide
  MOD_RES (1), (3), (35), (36): Xaa is C or S

SEQ ID NO: 48750 - protein, 36 aa, Artificial Sequence
  GFR-binding peptide
  MOD_RES (35), (35): Xaa is C or S
HEELRNSLQELKPKKRVYEYYLVTLPEHHVRSPQXK

SEQ ID NO: 48751 - protein, 43 aa, Artificial Sequence; identical to SEQ ID NO: 18623
  GFR-binding peptide
  MOD_RES (2), (4), (41): Xaa is C or S
  MOD_RES (17), (18), (19), (20), (21): Xaa is A or G
  MOD_RES (22), (23), (24), (25): Xaa is A or G or is absent

SEQ ID NO: 48752 - protein, 41 aa, Artificial Sequence; identical to SEQ ID NO: 18625
  GFR-binding peptide
  MOD_RES (2), (39): Xaa is C or S

SEQ ID NO: 48753 - protein, 32 aa, Artificial Sequence; identical to SEQ ID NO: 11566
  GFR-binding peptide
  MOD_RES (11), (12), (13), (14), (15): Xaa is A or G
  MOD_RES (16), (17), (18), (19): Xaa is A or G or is absent

SEQ ID NO: 48754 - protein, 40 aa, Artificial Sequence
  GFR-binding peptide
  MOD_RES (36), (36): Xaa is C or S
LHEELRNSLQELKPKKRVYEYYVVPLPEHHVRSPQXKVSS

SEQ ID NO: 48755 - protein, 37 aa, Artificial Sequence; identical to SEQ ID NO: 11567
  GFR-binding peptide
  MOD_RES (2), (33), (34): Xaa is C or S

SEQ ID NO: 48756 - protein, 38 aa, Artificial Sequence
  GFR-binding peptide
  MOD_RES (1), (35), (36): Xaa is C or S
  MOD_RES (13), (14), (15), (16), (17): Xaa is A or G
  MOD_RES (18), (19), (20), (21): Xaa is A or G or is absent
XGEVVMDVQVEKXXXXXXXXXVKAMKVSRLETPVXXAK

SEQ ID NO: 48757 - protein, 41 aa, Artificial Sequence; identical to SEQ ID NO: 18626
  GFR-binding peptide
  MOD_RES (2), (4), (38): Xaa is C or S

SEQ ID NO: 48758 - protein, 39 aa, Artificial Sequence
  GFR-binding peptide
  MOD_RES (1), (3), (35), (36): Xaa is C or S
XGXGEVVMDVQVEKVVKENEDVKAMKVSRLETPVXXAKP

SEQ ID NO: 48759 - protein, 36 aa, Artificial Sequence
  GFR-binding peptide
  MOD_RES (33), (34): Xaa is C or S
  MOD_RES (11), (12), (13), (14), (15): Xaa is A or G
  MOD_RES (16), (17), (18), (19): Xaa is A or G or is absent
SKVVMVQVEKXXXXXXXXXVKAIKVSRLDQPVXXPS

SEQ ID NO: 48760 - protein, 36 aa, Artificial Sequence
  GFR-binding peptide
  MOD_RES (1), (3), (35), (36): Xaa is C or S
XGXGEVVMESMEGIVVKDYEDMIQMTINSLETPVXX

SEQ ID NO: 48761 - protein, 33 aa, Artificial Sequence; identical to SEQ ID NO: 11568
  GFR-binding peptide
  MOD_RES (33), (33): Xaa is C or S
  MOD_RES (11), (12), (13), (14), (15): Xaa is A or G
  MOD_RES (16), (17), (18), (19): Xaa is A or G or is absent

SEQ ID NO: 48762 - protein, 33 aa, Artificial Sequence; identical to SEQ ID NO: 38396
  GFR-binding peptide
  MOD_RES (33), (33): Xaa is C or S
  MOD_RES (11), (12), (13), (14), (15): Xaa is A or G
  MOD_RES (16), (17), (18), (19): Xaa is A or G or is absent

SEQ ID NO: 48763 - protein, 37 aa, Artificial Sequence
  GFR-binding peptide
  MOD_RES (2), (4), (36), (37): Xaa is C or S
HXGXARVVMNVQVEKIVNSSDDVKAVKVSRLQTPAXX

SEQ ID NO: 48764 - protein, 33 aa, Artificial Sequence; identical to SEQ ID NO: 11570
  GFR-binding peptide
  MOD_RES (33), (33): Xaa is C or S
  MOD_RES (11), (12), (13), (14), (15): Xaa is A or G
  MOD_RES (16), (17), (18), (19): Xaa is A or G or is absent

SEQ ID NO: 48765 - protein, 38 aa, Artificial Sequence; identical to SEQ ID NO: 11571
  GFR-binding peptide
  MOD_RES (2), (4), (35), (36): Xaa is C or S

SEQ ID NO: 48766 - protein, 37 aa, Artificial Sequence
  GFR-binding peptide
  MOD_RES (33), (34): Xaa is C or S
  MOD_RES (11), (12), (13), (14), (15): Xaa is A or G
  MOD_RES (16), (17), (18), (19): Xaa is A or G or is absent
SKVVMSMEGIXXXXXXXXXMIQITINSLDQPVXXPSA

SEQ ID NO: 48767 - protein, 36 aa, Artificial Sequence
  GFR-binding peptide
  MOD_RES (1), (33): Xaa is C or S
XSRVVMNVQVEKIVNSSDDVKAVKVSRLKTPAXTPK

SEQ ID NO: 48768 - protein, 38 aa, Artificial Sequence; identical to SEQ ID NO: 18634
  GFR-binding peptide
  MOD_RES (1), (3), (37): Xaa is C or S
  MOD_RES (15), (16), (17), (18), (19): Xaa is A or G
  MOD_RES (20), (21), (22), (23): Xaa is A or G or is absent

SEQ ID NO: 48769 - protein, 38 aa, Artificial Sequence
  GFR-binding peptide
  MOD_RES (1), (35), (36): Xaa is C or S
  MOD_RES (13), (14), (15), (16), (17): Xaa is A or G
  MOD_RES (18), (19), (20), (21): Xaa is A or G or is absent
XARVVMNSMEGIXXXXXXXXXMIQVTINSLQTPAXXPK

SEQ ID NO: 48770 - protein, 39 aa, Artificial Sequence
  GFR-binding peptide
  MOD_RES (2), (39): Xaa is C or S
AXELHEELRNSLQELKPKKRVYEYYVVPLPEHHVRSPQX

SEQ ID NO: 48771 - protein, 35 aa, Artificial Sequence; identical to SEQ ID NO: 18638
  GFR-binding peptide
  MOD_RES (12), (13), (14), (15), (16): Xaa is A or G
  MOD_RES (17), (18), (19), (20): Xaa is A or G or is absent

SEQ ID NO: 48772 - protein, 36 aa, Artificial Sequence
  GFR-binding peptide
  MOD_RES (1), (35), (36): Xaa is C or S
  MOD_RES (13), (14), (15), (16), (17): Xaa is A or G
  MOD_RES (18), (19), (20), (21): Xaa is A or G or is absent
XGEVVMDSMEGIXXXXXXXXXMIQMTINSLETPVXX

SEQ ID NO: 48773 - protein, 40 aa, Artificial Sequence; identical to SEQ ID NO: 11576
  GFR-binding peptide
  MOD_RES (2), (4), (37), (38): Xaa is C or S
  MOD_RES (15), (16), (17), (18), (19): Xaa is A or G
  MOD_RES (20), (21), (22), (23): Xaa is A or G or is absent

SEQ ID NO: 48774 - protein, 43 aa, Artificial Sequence; identical to SEQ ID NO: 18640
  GFR-binding peptide
  MOD_RES (1), (3), (40): Xaa is C or S
  MOD_RES (16), (17), (18), (19), (20): Xaa is A or G
  MOD_RES (21), (22), (23), (24): Xaa is A or G or is absent

SEQ ID NO: 48775 - protein, 43 aa, Artificial Sequence
  GFR-binding peptide
  MOD_RES (1), (3), (37): Xaa is C or S
  MOD_RES (15), (16), (17), (18), (19): Xaa is A or G
  MOD_RES (20), (21), (22), (23): Xaa is A or G or is absent
XGXSRVVMNSMEGIXXXXXXXXXMIQVTINSLKTPAXTPKTVH

SEQ ID NO: 48776 - protein, 33 aa, Artificial Sequence
  GFR-binding peptide
  MOD_RES (12), (13), (14), (15), (16): Xaa is A or G
  MOD_RES (17), (18), (19), (20): Xaa is A or G or is absent
SRVVMNSMEGIXXXXXXXXXMIQVTINSLKTPA

SEQ ID NO: 48777 - protein, 41 aa, Artificial Sequence
  GFR-binding peptide
  MOD_RES (2), (4), (36), (37): Xaa is C or S
HXGXSRVVMNSMEGIIVNSSDDMIQVTINSLKTPAXXPKPV

SEQ ID NO: 48778 - protein, 41 aa, Artificial Sequence
  GFR-binding peptide
  MOD_RES (2), (36), (37): Xaa is C or S
  MOD_RES (14), (15), (16), (17), (18): Xaa is A or G
  MOD_RES (19), (20), (21), (22): Xaa is A or G or is absent
GXGEVVMEVTAKKXXXXXXXXXIKRMQVPRLETPVXXAKPI

SEQ ID NO: 48779 - protein, 38 aa, Artificial Sequence; identical to SEQ ID NO: 18644
  GFR-binding peptide
  MOD_RES (2), (36): Xaa is C or S

SEQ ID NO: 48780 - protein, 35 aa, Artificial Sequence
  GFR-binding peptide
  MOD_RES (1), (33): Xaa is C or S
XSRVVMNVTAKKIVNSSDDIKRVQVPRLKTPAXTP

SEQ ID NO: 48781 - protein, 37 aa, Artificial Sequence
  GFR-binding peptide
  MOD_RES (36), (36): Xaa is C or S
LHDELTNSLQEFIPKKRVIEYYLVTLPELQVQTPRXQ

SEQ ID NO: 48782 - protein, 38 aa, Artificial Sequence; identical to SEQ ID NO: 11582
  GFR-binding peptide
  MOD_RES (2), (4), (36), (37): Xaa is C or S

SEQ ID NO: 48783 - protein, 32 aa, Artificial Sequence
  GFR-binding peptide
  MOD_RES (11), (12), (13), (14), (15): Xaa is A or G
  MOD_RES (16), (17), (18), (19): Xaa is A or G or is absent
RVVMNSMEGIXXXXXXXXXMIQVTINSLQTPA

SEQ ID NO: 48784 - protein, 39 aa, Artificial Sequence; identical to SEQ ID NO: 11584
  GFR-binding peptide
  MOD_RES (2), (4), (36): Xaa is C or S

SEQ ID NO: 48785 - protein, 37 aa, Artificial Sequence
  GFR-binding peptide
  MOD_RES (1), (3), (35), (36): Xaa is C or S
XGXGEVVMESMEGIVVKDYEDMIQMTINSLETPVXXA

SEQ ID NO: 48786 - protein, 40 aa, Artificial Sequence; identical to SEQ ID NO: 11585
  GFR-binding peptide
  MOD_RES (1), (3), (37), (38): Xaa is C or S
  MOD_RES (15), (16), (17), (18), (19): Xaa is A or G
  MOD_RES (20), (21), (22), (23): Xaa is A or G or is absent

SEQ ID NO: 48787 - protein, 42 aa, Artificial Sequence
  GFR-binding peptide
  MOD_RES (1), (3), (37), (38): Xaa is C or S
  MOD_RES (15), (16), (17), (18), (19): Xaa is A or G
  MOD_RES (20), (21), (22), (23): Xaa is A or G or is absent
XGXGEVVMDVQVEKXXXXXXXXXVKAMKVSRLETPVXXAKPI

SEQ ID NO: 48788 - protein, 38 aa, Artificial Sequence; identical to SEQ ID NO: 11588
  GFR-binding peptide
  MOD_RES (1), (3), (36), (37): Xaa is C or S
  MOD_RES (14), (15), (16), (17), (18): Xaa is A or G
  MOD_RES (19), (20), (21), (22): Xaa is A or G or is absent

SEQ ID NO: 48789 - protein, 34 aa, Artificial Sequence; identical to SEQ ID NO: 11589
  GFR-binding peptide
  MOD_RES (34), (34): Xaa is C or S
  MOD_RES (12), (13), (14), (15), (16): Xaa is A or G
  MOD_RES (17), (18), (19), (20): Xaa is A or G or is absent

SEQ ID NO: 48790 - protein, 41 aa, Artificial Sequence; identical to SEQ ID NO: 18650
  GFR-binding peptide
  MOD_RES (2), (4), (38): Xaa is C or S
  MOD_RES (16), (17), (18), (19), (20): Xaa is A or G
  MOD_RES (21), (22), (23), (24): Xaa is A or G or is absent

SEQ ID NO: 48791 - protein, 41 aa, Artificial Sequence; identical to SEQ ID NO: 18651
  GFR-binding peptide
  MOD_RES (2), (39): Xaa is C or S
  MOD_RES (15), (16), (17), (18), (19): Xaa is A or G
  MOD_RES (20), (21), (22), (23): Xaa is A or G or is absent

SEQ ID NO: 48792 - protein, 41 aa, Artificial Sequence
  GFR-binding peptide
  MOD_RES (1), (35), (36): Xaa is C or S
  MOD_RES (13), (14), (15), (16), (17): Xaa is A or G
  MOD_RES (18), (19), (20), (21): Xaa is A or G or is absent
XGEVVMDVTAKKXXXXXXXXXIKRMQVPRLETPVXXAKPIK

SEQ ID NO: 48793 - protein, 34 aa, Artificial Sequence; identical to SEQ ID NO: 11591
  GFR-binding peptide
  MOD_RES (1), (32), (33): Xaa is C or S

SEQ ID NO: 48794 - protein, 35 aa, Artificial Sequence; identical to SEQ ID NO: 18652
  GFR-binding peptide
  MOD_RES (1), (35): Xaa is C or S
  MOD_RES (13), (14), (15), (16), (17): Xaa is A or G
  MOD_RES (18), (19), (20), (21): Xaa is A or G or is absent

SEQ ID NO: 48795 - protein, 41 aa, Artificial Sequence; identical to SEQ ID NO: 11593
  GFR-binding peptide
  MOD_RES (2), (4), (36): Xaa is C or S

SEQ ID NO: 48796 - protein, 39 aa, Artificial Sequence
  GFR-binding peptide
  MOD_RES (2), (4), (36): Xaa is C or S
HXGXSRVVMNVTAKKIVNSSDDIKRVQVPRLKTPAXTPK

SEQ ID NO: 48797 - protein, 37 aa, Artificial Sequence
  GFR-binding peptide
  MOD_RES (1), (3), (37): Xaa is C or S
  MOD_RES (15), (16), (17), (18), (19): Xaa is A or G
  MOD_RES (20), (21), (22), (23): Xaa is A or G or is absent
XGXGEVVMDSMEGIXXXXXXXXXMIQMTINSLETPVX

SEQ ID NO: 48798 - protein, 37 aa, Artificial Sequence
  GFR-binding peptide
  MOD_RES (1), (35), (36): Xaa is C or S
  MOD_RES (13), (14), (15), (16), (17): Xaa is A or G
  MOD_RES (18), (19), (20), (21): Xaa is A or G or is absent
XARVVMNVQVEKXXXXXXXXXVKAVKVSRLQTPAXXP

SEQ ID NO: 48799 - protein, 34 aa, Artificial Sequence; identical to SEQ ID NO: 11596
  GFR-binding peptide
  MOD_RES (1), (1): Xaa is C or S
  MOD_RES (13), (14), (15), (16), (17): Xaa is A or G
  MOD_RES (18), (19), (20), (21): Xaa is A or G or is absent

SEQ ID NO: 48800 - protein, 37 aa, Artificial Sequence
  GFR-binding peptide
  MOD_RES (2), (4): Xaa is C or S
  MOD_RES (16), (17), (18), (19), (20): Xaa is A or G
  MOD_RES (21), (22), (23), (24): Xaa is A or G or is absent
HXGXARVVMNVQVEKXXXXXXXXXVKAVKVSRLQTPA

SEQ ID NO: 48801 - protein, 32 aa, Artificial Sequence
  GFR-binding peptide
  MOD_RES (31), (31): Xaa is C or S
RVVMNSMEGIIVNSSDDMIQVTINSLKTPAXT

SEQ ID NO: 48802 - protein, 43 aa, Artificial Sequence
  GFR-binding peptide
  MOD_RES (1), (3), (37): Xaa is C or S
XEXKNHQLFNSLQEHQGQHPKIRYYLMTLPEEETPVXELGEDN

SEQ ID NO: 48803 - protein, 37 aa, Artificial Sequence; identical to SEQ ID NO: 18656
  GFR-binding peptide
  MOD_RES (2), (2): Xaa is C or S

SEQ ID NO: 48804 - protein, 39 aa, Artificial Sequence
  GFR-binding peptide
  MOD_RES (2), (4): Xaa is C or S
EXKXALHDELTNSLQEFIPKKRVIEYYLVTLPELQVQTP

SEQ ID NO: 48805 - protein, 42 aa, Artificial Sequence
  GFR-binding peptide
  MOD_RES (1), (3), (36), (37): Xaa is C or S
  MOD_RES (14), (15), (16), (17), (18): Xaa is A or G
  MOD_RES (19), (20), (21), (22): Xaa is A or G or is absent
XKXSRVIMVQVEKXXXXXXXXXVKAIKVSRLAQPVXXPAASA

SEQ ID NO: 48806 - protein, 38 aa, Artificial Sequence
  GFR-binding peptide
  MOD_RES (33), (34): Xaa is C or S
  MOD_RES (11), (12), (13), (14), (15): Xaa is A or G
  MOD_RES (16), (17), (18), (19): Xaa is A or G or is absent
RVVMNSMEGIXXXXXXXXXMIQVTINSLQTPAXXPKPV

SEQ ID NO: 48807 - protein, 36 aa, Artificial Sequence
  GFR-binding peptide
  MOD_RES (1), (1): Xaa is C or S
  MOD_RES (14), (15), (16), (17), (18): Xaa is A or G
  MOD_RES (19), (20), (21), (22): Xaa is A or G or is absent
XALHDELTNSLQEXXXXXXXXXYYVVPLPELQVQTP

SEQ ID NO: 48808 - protein, 37 aa, Artificial Sequence
  GFR-binding peptide
  MOD_RES (1), (3), (35), (36): Xaa is C or S
XGXGEVVMDSMEGIVVKENEDMIQMTINSLETPVXXA

SEQ ID NO: 48809 - protein, 40 aa, Artificial Sequence; identical to SEQ ID NO: 11601
  GFR-binding peptide
  MOD_RES (1), (35), (36): Xaa is C or S
  MOD_RES (13), (14), (15), (16), (17): Xaa is A or G
  MOD_RES (18), (19), (20), (21): Xaa is A or G or is absent

SEQ ID NO: 48810 - protein, 40 aa, Artificial Sequence
  GFR-binding peptide
  MOD_RES (34), (35): Xaa is C or S
  MOD_RES (12), (13), (14), (15), (16): Xaa is A or G
  MOD_RES (17), (18), (19), (20): Xaa is A or G or is absent
GEVVMDVTAKKXXXXXXXXXIKRMQVPRLETPVXXAKPIK

SEQ ID NO: 48811 - protein, 41 aa, Artificial Sequence
  GFR-binding peptide
  MOD_RES (37), (37): Xaa is C or S
  MOD_RES (13), (14), (15), (16), (17): Xaa is A or G
  MOD_RES (18), (19), (20), (21): Xaa is A or G or is absent
ELHEELRNSLQEXXXXXXXXXYYLVTLPEHHVRSPQXKVSS

SEQ ID NO: 48812 - protein, 41 aa, Artificial Sequence; identical to SEQ ID NO: 18661
  GFR-binding peptide
  MOD_RES (1), (38): Xaa is C or S

SEQ ID NO: 48813 - protein, 41 aa, Artificial Sequence; identical to SEQ ID NO: 18662
  GFR-binding peptide
  MOD_RES (1), (3), (37): Xaa is C or S

SEQ ID NO: 48814 - protein, 39 aa, Artificial Sequence
  GFR-binding peptide
  MOD_RES (34), (35): Xaa is C or S
  MOD_RES (12), (13), (14), (15), (16): Xaa is A or G
  MOD_RES (17), (18), (19), (20): Xaa is A or G or is absent
SRVVMNSMEGIXXXXXXXXXMIQVTINSLKTPAXXPKPV

SEQ ID NO: 48815 - protein, 35 aa, Artificial Sequence
  GFR-binding peptide
  MOD_RES (31), (32): Xaa is C or S
SKVVMSMEGIVKPTRGVMIQITINSLDQPVXXPSA

SEQ ID NO: 48816 - protein, 41 aa, Artificial Sequence
  GFR-binding peptide
  MOD_RES (2), (35), (36): Xaa is C or S
  MOD_RES (13), (14), (15), (16), (17): Xaa is A or G
  MOD_RES (18), (19), (20), (21): Xaa is A or G or is absent
KXSRVIMVTAKKXXXXXXXXXIKRIQVPRLAQPVXXPAASA

SEQ ID NO: 48817 - protein, 36 aa, Artificial Sequence; identical to SEQ ID NO: 11605
  GFR-binding peptide
  MOD_RES (1), (3), (35), (36): Xaa is C or S

SEQ ID NO: 48818 - protein, 34 aa, Artificial Sequence; identical to SEQ ID NO: 11606
  GFR-binding peptide
  MOD_RES (2), (34): Xaa is C or S

SEQ ID NO: 48819 - protein, 39 aa, Artificial Sequence; identical to SEQ ID NO: 18668
  GFR-binding peptide
  MOD_RES (36), (36): Xaa is C or S

SEQ ID NO: 48820 - protein, 32 aa, Artificial Sequence; identical to SEQ ID NO: 18669
  GFR-binding peptide
  MOD_RES (11), (12), (13), (14), (15): Xaa is A or G
  MOD_RES (16), (17), (18), (19): Xaa is A or G or is absent

SEQ ID NO: 48821 - protein, 31 aa, Artificial Sequence
  GFR-binding peptide
  MOD_RES (31), (31): Xaa is C or S
SKVIMVQVEKIKPTKGIVKAIKVSRLDQSVX

SEQ ID NO: 48822 - protein, 35 aa, Artificial Sequence; identical to SEQ ID NO: 11608
  GFR-binding peptide
  MOD_RES (34), (35): Xaa is C or S
  MOD_RES (12), (13), (14), (15), (16): Xaa is A or G
  MOD_RES (17), (18), (19), (20): Xaa is A or G or is absent

SEQ ID NO: 48823 - protein, 34 aa, Artificial Sequence; identical to SEQ ID NO: 18673
  GFR-binding peptide
  MOD_RES (1), (1): Xaa is C or S
  MOD_RES (13), (14), (15), (16), (17): Xaa is A or G
  MOD_RES (18), (19), (20), (21): Xaa is A or G or is absent

SEQ ID NO: 48824 - protein, 37 aa, Artificial Sequence; identical to SEQ ID NO: 11609
  GFR-binding peptide
  MOD_RES (2), (4), (37): Xaa is C or S
  MOD_RES (15), (16), (17), (18), (19): Xaa is A or G
  MOD_RES (20), (21), (22), (23): Xaa is A or G or is absent

SEQ ID NO: 48825 - protein, 35 aa, Artificial Sequence; identical to SEQ ID NO: 11610
  GFR-binding peptide
  MOD_RES (1), (35): Xaa is C or S
  MOD_RES (13), (14), (15), (16), (17): Xaa is A or G
  MOD_RES (18), (19), (20), (21): Xaa is A or G or is absent

SEQ ID NO: 48826 - protein, 34 aa, Artificial Sequence
  GFR-binding peptide
  MOD_RES (1), (33), (34): Xaa is C or S
XARVVMNSMEGIIVNSSDDMIQVTINSLQTPAXX

SEQ ID NO: 48827 - protein, 36 aa, Artificial Sequence; identical to SEQ ID NO: 18677
  GFR-binding peptide
  MOD_RES (2), (36): Xaa is C or S

SEQ ID NO: 48828 - protein, 38 aa, Artificial Sequence; identical to SEQ ID NO: 18678
  GFR-binding peptide
  MOD_RES (1), (3), (37): Xaa is C or S
  MOD_RES (15), (16), (17), (18), (19): Xaa is A or G
  MOD_RES (20), (21), (22), (23): Xaa is A or G or is absent

SEQ ID NO: 48829 - protein, 39 aa, Artificial Sequence; identical to SEQ ID NO: 11614
  GFR-binding peptide
  MOD_RES (33), (34): Xaa is C or S
  MOD_RES (11), (12), (13), (14), (15): Xaa is A or G
  MOD_RES (16), (17), (18), (19): Xaa is A or G or is absent

SEQ ID NO: 48830 - protein, 35 aa, Artificial Sequence
  GFR-binding peptide
  MOD_RES (2), (34): Xaa is C or S
GXSRVVMNVQVEKIVNSSDDVKAVKVSRLKTPAXT

SEQ ID NO: 48831 - protein, 39 aa, Artificial Sequence; identical to SEQ ID NO: 11615
  GFR-binding peptide
  MOD_RES (33), (34): Xaa is C or S
  MOD_RES (11), (12), (13), (14), (15): Xaa is A or G
  MOD_RES (16), (17), (18), (19): Xaa is A or G or is absent

SEQ ID NO: 48832 - protein, 39 aa, Artificial Sequence
  GFR-binding peptide
  MOD_RES (1), (3), (35), (36): Xaa is C or S
XGXGEVVMEVQVEKVVKDYEDVKAMKVSRLETPVXXAKP

SEQ ID NO: 48833 - protein, 38 aa, Artificial Sequence
  GFR-binding peptide
  MOD_RES (36), (36): Xaa is C or S
LHEELRNSLQELKPKKRVYEYYVVPLPEHHVRSPQXKV

SEQ ID NO: 48834 - protein, 36 aa, Artificial Sequence; identical to SEQ ID NO: 18682
  GFR-binding peptide
  MOD_RES (36), (36): Xaa is C or S
  MOD_RES (12), (13), (14), (15), (16): Xaa is A or G
  MOD_RES (17), (18), (19), (20): Xaa is A or G or is absent

SEQ ID NO: 48835 - protein, 31 aa, Artificial Sequence
  GFR-binding peptide
GEVVMDVTAKKVVKENEDIKRMQVPRLETPV

SEQ ID NO: 48836 - protein, 42 aa, Artificial Sequence; identical to SEQ ID NO: 18683
  GFR-binding peptide
  MOD_RES (2), (4), (41): Xaa is C or S

SEQ ID NO: 48837 - protein, 38 aa, Artificial Sequence; identical to SEQ ID NO: 11620
  GFR-binding peptide
  MOD_RES (2), (35), (36): Xaa is C or S
  MOD_RES (13), (14), (15), (16), (17): Xaa is A or G
  MOD_RES (18), (19), (20), (21): Xaa is A or G or is absent

SEQ ID NO: 48838 - protein, 34 aa, Artificial Sequence; identical to SEQ ID NO: 18685
  GFR-binding peptide
  MOD_RES (11), (12), (13), (14), (15): Xaa is A or G
  MOD_RES (16), (17), (18), (19): Xaa is A or G or is absent

SEQ ID NO: 48839 - protein, 34 aa, Artificial Sequence; identical to SEQ ID NO: 18686
  GFR-binding peptide
  MOD_RES (1), (1): Xaa is C or S

SEQ ID NO: 48840 - protein, 34 aa, Artificial Sequence
  GFR-binding peptide
  MOD_RES (1), (34): Xaa is C or S
  MOD_RES (12), (13), (14), (15), (16): Xaa is A or G
  MOD_RES (17), (18), (19), (20): Xaa is A or G or is absent
XSKVIMVQVEKXXXXXXXXXVKAIKVSRLDQSVX

SEQ ID NO: 48841 - protein, 36 aa, Artificial Sequence; identical to SEQ ID NO: 11624
  GFR-binding peptide
  MOD_RES (1), (34), (35): Xaa is C or S
  MOD_RES (12), (13), (14), (15), (16): Xaa is A or G
  MOD_RES (17), (18), (19), (20): Xaa is A or G or is absent

SEQ ID NO: 48842 - protein, 37 aa, Artificial Sequence
  GFR-binding peptide
  MOD_RES (2), (34), (35): Xaa is C or S
GXGEVVMDVTAKKVVKENEDIKRMQVPRLETPVXXAK

SEQ ID NO: 48843 - protein, 41 aa, Artificial Sequence
  GFR-binding peptide
  MOD_RES (2), (4), (36): Xaa is C or S
HXGXSRVVMNSMEGIIVNSSDDMIQVTINSLKTPAXTPKTV

SEQ ID NO: 48844 - protein, 36 aa, Artificial Sequence; identical to SEQ ID NO: 11625
  GFR-binding peptide
  MOD_RES (1), (3), (36): Xaa is C or S
  MOD_RES (14), (15), (16), (17), (18): Xaa is A or G
  MOD_RES (19), (20), (21), (22): Xaa is A or G or is absent

SEQ ID NO: 48845 - protein, 39 aa, Artificial Sequence
  GFR-binding peptide
  MOD_RES (2), (34): Xaa is C or S
GXSRVVMNVTAKKIVNSSDDIKRVQVPRLKTPAXTPKTV

SEQ ID NO: 48846 - protein, 35 aa, Artificial Sequence
  GFR-binding peptide
  MOD_RES (2), (4): Xaa is C or S
RXGXGEVVMDSMEGIVVKENEDMIQMTINSLETPV

SEQ ID NO: 48847 - protein, 37 aa, Artificial Sequence; identical to SEQ ID NO: 11628
  GFR-binding peptide
  MOD_RES (2), (35), (36): Xaa is C or S
  MOD_RES (13), (14), (15), (16), (17): Xaa is A or G
  MOD_RES (18), (19), (20), (21): Xaa is A or G or is absent

SEQ ID NO: 48848 - protein, 40 aa, Artificial Sequence; identical to SEQ ID NO: 18691
  GFR-binding peptide
  MOD_RES (1), (38): Xaa is C or S
  MOD_RES (14), (15), (16), (17), (18): Xaa is A or G
  MOD_RES (19), (20), (21), (22): Xaa is A or G or is absent

SEQ ID NO: 48849 - protein, 38 aa, Artificial Sequence
  GFR-binding peptide
  MOD_RES (2), (4), (36), (37): Xaa is C or S
RXGXGEVVMEVTAKKVVKDYEDIKRMQVPRLETPVXXA

SEQ ID NO: 48850 - protein, 36 aa, Artificial Sequence
  GFR-binding peptide
  MOD_RES (1), (33): Xaa is C or S
XSRVVMNSMEGIIVNSSDDMIQVTINSLKTPAXTPK

SEQ ID NO: 48851 - protein, 34 aa, Artificial Sequence
  GFR-binding peptide
  MOD_RES (2), (4): Xaa is C or S
SXKXSKVVMVQVEKVKPTRGVVKAIKVSRLDQPV

SEQ ID NO: 48852 - protein, 35 aa, Artificial Sequence; identical to SEQ ID NO: 11635
  GFR-binding peptide
  MOD_RES (2), (34): Xaa is C or S

SEQ ID NO: 48853 - protein, 41 aa, Artificial Sequence
  GFR-binding peptide
  MOD_RES (2), (4), (38), (39): Xaa is C or S
  MOD_RES (16), (17), (18), (19), (20): Xaa is A or G
  MOD_RES (21), (22), (23), (24): Xaa is A or G or is absent
RXGXGEVVMESMEGIXXXXXXXXXMIQMTINSLETPVXXAK

SEQ ID NO: 48854 - protein, 42 aa, Artificial Sequence; identical to SEQ ID NO: 17047
  GFR-binding peptide
  MOD_RES (2), (36): Xaa is C or S
  MOD_RES (14), (15), (16), (17), (18): Xaa is A or G
  MOD_RES (19), (20), (21), (22): Xaa is A or G or is absent

SEQ ID NO: 48855 - protein, 37 aa, Artificial Sequence
  GFR-binding peptide
  MOD_RES (2), (4): Xaa is C or S
  MOD_RES (16), (17), (18), (19), (20): Xaa is A or G
  MOD_RES (21), (22), (23), (24): Xaa is A or G or is absent
RXGXGEVVMEVQVEKXXXXXXXXXVKAMKVSRLETPV

SEQ ID NO: 48856 - protein, 39 aa, Artificial Sequence
  GFR-binding peptide
  MOD_RES (2), (33), (34): Xaa is C or S
KXSKVIMVTAKKIKPTKGIIKRIQVPRLDQSVXXPSASA

SEQ ID NO: 48857 - protein, 37 aa, Artificial Sequence
  GFR-binding peptide
  MOD_RES (31), (32): Xaa is C or S
SKVIMSMEGIIKPTKGIMIQITINSLDQSVXXPSASA

SEQ ID NO: 48858 - protein, 42 aa, Artificial Sequence; identical to SEQ ID NO: 11640
  GFR-binding peptide
  MOD_RES (2), (36), (37): Xaa is C or S
  MOD_RES (14), (15), (16), (17), (18): Xaa is A or G
  MOD_RES (19), (20), (21), (22): Xaa is A or G or is absent

SEQ ID NO: 48859 - protein, 37 aa, Artificial Sequence
  GFR-binding peptide
  MOD_RES (2), (4): Xaa is C or S
  MOD_RES (16), (17), (18), (19), (20): Xaa is A or G
  MOD_RES (21), (22), (23), (24): Xaa is A or G or is absent
RXGXGEVVMDSMEGIXXXXXXXXXMIQMTINSLETPV

SEQ ID NO: 48860 - protein, 38 aa, Artificial Sequence
  GFR-binding peptide
  MOD_RES (33), (34): Xaa is C or S
  MOD_RES (11), (12), (13), (14), (15): Xaa is A or G
  MOD_RES (16), (17), (18), (19): Xaa is A or G or is absent
SKVIMSMEGIXXXXXXXXXMIQITINSLDQSVXXPSAS

SEQ ID NO: 48861 - protein, 35 aa, Artificial Sequence; identical to SEQ ID NO: 11647
  GFR-binding peptide
  MOD_RES (2), (2): Xaa is C or S
  MOD_RES (14), (15), (16), (17), (18): Xaa is A or G
  MOD_RES (19), (20), (21), (22): Xaa is A or G or is absent

SEQ ID NO: 48862 - protein, 32 aa, Artificial Sequence
  GFR-binding peptide
  MOD_RES (11), (12), (13), (14), (15): Xaa is A or G
  MOD_RES (16), (17), (18), (19): Xaa is A or G or is absent
SKVVMVQVEKXXXXXXXXXVKAIKVSRLDQPV

SEQ ID NO: 48863 - protein, 35 aa, Artificial Sequence; identical to SEQ ID NO: 11649
  GFR-binding peptide
  MOD_RES (1), (3): Xaa is C or S
  MOD_RES (14), (15), (16), (17), (18): Xaa is A or G
  MOD_RES (19), (20), (21), (22): Xaa is A or G or is absent

SEQ ID NO: 48864 - protein, 34 aa, Artificial Sequence; identical to SEQ ID NO: 35526
  GFR-binding peptide
  MOD_RES (1), (34): Xaa is C or S
  MOD_RES (12), (13), (14), (15), (16): Xaa is A or G
  MOD_RES (17), (18), (19), (20): Xaa is A or G or is absent

SEQ ID NO: 48865 - protein, 36 aa, Artificial Sequence
  GFR-binding peptide
  MOD_RES (33), (34): Xaa is C or S
  MOD_RES (11), (12), (13), (14), (15): Xaa is A or G
  MOD_RES (16), (17), (18), (19): Xaa is A or G or is absent
EVVMDVTAKKXXXXXXXXXIKRMQVPRLETPVXXAK

SEQ ID NO: 48866 - protein, 37 aa, Artificial Sequence
  GFR-binding peptide
  MOD_RES (1), (3), (37): Xaa is C or S
XEXKNHQLFNSLQEHQGQHPKIRYYVMPLPEEETPVX

SEQ ID NO: 48867 - protein, 35 aa, Artificial Sequence
  GFR-binding peptide
  MOD_RES (1), (1): Xaa is C or S
  MOD_RES (14), (15), (16), (17), (18): Xaa is A or G
  MOD_RES (19), (20), (21), (22): Xaa is A or G or is absent
XALHDELTNSLQEXXXXXXXXXYYLVTLPELQVQT

SEQ ID NO: 48868 - protein, 42 aa, Artificial Sequence; identical to SEQ ID NO: 17053
  GFR-binding peptide
  MOD_RES (2), (4), (41): Xaa is C or S
  MOD_RES (17), (18), (19), (20), (21): Xaa is A or G
  MOD_RES (22), (23), (24), (25): Xaa is A or G or is absent

SEQ ID NO: 48869 - protein, 36 aa, Artificial Sequence; identical to SEQ ID NO: 11652
  GFR-binding peptide
  MOD_RES (31), (31): Xaa is C or S

SEQ ID NO: 48870 - protein, 41 aa, Artificial Sequence
  GFR-binding peptide
  MOD_RES (1), (3), (35): Xaa is C or S
XGXSRVVMNVTAKKIVNSSDDIKRVQVPRLKTPAXTPKTVH

SEQ ID NO: 48871 - protein, 35 aa, Artificial Sequence; identical to SEQ ID NO: 11653
  GFR-binding peptide
  MOD_RES (2), (35): Xaa is C or S
  MOD_RES (13), (14), (15), (16), (17): Xaa is A or G
  MOD_RES (18), (19), (20), (21): Xaa is A or G or is absent

SEQ ID NO: 48872 - protein, 36 aa, Artificial Sequence
  GFR-binding peptide
  MOD_RES (31), (32): Xaa is C or S
RVVMNVTAKKIVNSSDDIKRVQVPRLKTPAXXPKPV

SEQ ID NO: 48873 - protein, 41 aa, Artificial Sequence; identical to SEQ ID NO: 17055
  GFR-binding peptide
  MOD_RES (1), (3), (40): Xaa is C or S
  MOD_RES (16), (17), (18), (19), (20): Xaa is A or G
  MOD_RES (21), (22), (23), (24): Xaa is A or G or is absent

SEQ ID NO: 48874 - protein, 37 aa, Artificial Sequence
  GFR-binding peptide
  MOD_RES (1), (35), (36): Xaa is C or S
  MOD_RES (13), (14), (15), (16), (17): Xaa is A or G
  MOD_RES (18), (19), (20), (21): Xaa is A or G or is absent
XARVVMNVTAKKXXXXXXXXXIKRVQVPRLQTPAXXP

SEQ ID NO: 48875 - protein, 40 aa, Artificial Sequence
  GFR-binding peptide
  MOD_RES (36), (36): Xaa is C or S
LHDELTNSLQEFIPKKRVIEYYLVTLPELQVQTPRXQVNR

SEQ ID NO: 48876 - protein, 39 aa, Artificial Sequence
  GFR-binding peptide
  MOD_RES (1), (35), (36): Xaa is C or S
  MOD_RES (13), (14), (15), (16), (17): Xaa is A or G
  MOD_RES (18), (19), (20), (21): Xaa is A or G or is absent
XGEVVMEVQVEKXXXXXXXXXVKAMKVSRLETPVXXAKP

SEQ ID NO: 48877 - protein, 40 aa, Artificial Sequence
  GFR-binding peptide
  MOD_RES (2), (4), (38): Xaa is C or S
  MOD_RES (16), (17), (18), (19), (20): Xaa is A or G
  MOD_RES (21), (22), (23), (24): Xaa is A or G or is absent
HXGXSRVVMNVTAKKXXXXXXXXXIKRVQVPRLKTPAXTP

SEQ ID NO: 48878 - protein, 32 aa, Artificial Sequence
  GFR-binding peptide
  MOD_RES (11), (12), (13), (14), (15): Xaa is A or G
  MOD_RES (16), (17), (18), (19): Xaa is A or G or is absent
HEELRNSLQEXXXXXXXXXYYLVTLPEHHVRS

SEQ ID NO: 48879 - protein, 34 aa, Artificial Sequence; identical to SEQ ID NO: 11658
  GFR-binding peptide
  MOD_RES (32), (33): Xaa is C or S

SEQ ID NO: 48880 - protein, 37 aa, Artificial Sequence
  GFR-binding peptide
  MOD_RES (1), (3): Xaa is C or S
XAXELHEELRNSLQELKPKKRVYEYYLVTLPEHHVRS

SEQ ID NO: 48881 - protein, 34 aa, Artificial Sequence; identical to SEQ ID NO: 11660
  GFR-binding peptide
  MOD_RES (1), (32), (33): Xaa is C or S

SEQ ID NO: 48882 - protein, 32 aa, Artificial Sequence
  GFR-binding peptide
  MOD_RES (1), (32): Xaa is C or S
XSKVIMSMEGIIKPTKGIMIQITINSLDQSVX

SEQ ID NO: 48883 - protein, 34 aa, Artificial Sequence
  GFR-binding peptide
  MOD_RES (32), (33): Xaa is C or S
SRVVMNSMEGIIVNSSDDMIQVTINSLKTPAXXP

SEQ ID NO: 48884 - protein, 32 aa, Artificial Sequence
  GFR-binding peptide
  MOD_RES (1), (1): Xaa is C or S
XGEVVMDVTAKKVVKENEDIKRMQVPRLETPV

SEQ ID NO: 48885 - protein, 37 aa, Artificial Sequence
  GFR-binding peptide
  MOD_RES (2), (36): Xaa is C or S
  MOD_RES (14), (15), (16), (17), (18): Xaa is A or G
  MOD_RES (19), (20), (21), (22): Xaa is A or G or is absent
GXSRVVMNSMEGIXXXXXXXXXMIQVTINSLKTPAXT

SEQ ID NO: 48886 - protein, 32 aa, Artificial Sequence
  GFR-binding peptide
  MOD_RES (32), (32): Xaa is C or S
GEVVMDVTAKKVVKENEDIKRMQVPRLETPVX

SEQ ID NO: 48887 - protein, 36 aa, Artificial Sequence
  GFR-binding peptide
  MOD_RES (36), (36): Xaa is C or S
  MOD_RES (12), (13), (14), (15), (16): Xaa is A or G
  MOD_RES (17), (18), (19), (20): Xaa is A or G or is absent
LHDELTNSLQEXXXXXXXXXYYVVPLPELQVQTPRX

SEQ ID NO: 48888 - protein, 40 aa, Artificial Sequence
  GFR-binding peptide
  MOD_RES (1), (38): Xaa is C or S
  MOD_RES (14), (15), (16), (17), (18): Xaa is A or G
  MOD_RES (19), (20), (21), (22): Xaa is A or G or is absent
XALHDELTNSLQEXXXXXXXXXYYLVTLPELQVQTPRXQV

SEQ ID NO: 48889 - protein, 34 aa, Artificial Sequence
  GFR-binding peptide
  MOD_RES (34), (34): Xaa is C or S
  MOD_RES (12), (13), (14), (15), (16): Xaa is A or G
  MOD_RES (17), (18), (19), (20): Xaa is A or G or is absent
GEVVMDVQVEKXXXXXXXXXVKAMKVSRLETPVX

SEQ ID NO: 48890 - protein, 34 aa, Artificial Sequence
  GFR-binding peptide
  MOD_RES (32), (33): Xaa is C or S
ARVVMNVTAKKIVNSSDDIKRVQVPRLQTPAXXP

SEQ ID NO: 48891 - protein, 38 aa, Artificial Sequence; identical to SEQ ID NO: 17064
  GFR-binding peptide
  MOD_RES (37), (37): Xaa is C or S
  MOD_RES (13), (14), (15), (16), (17): Xaa is A or G
  MOD_RES (18), (19), (20), (21): Xaa is A or G or is absent

SEQ ID NO: 48892 - protein, 37 aa, Artificial Sequence
  GFR-binding peptide
  MOD_RES (2), (4): Xaa is C or S
  MOD_RES (16), (17), (18), (19), (20): Xaa is A or G
  MOD_RES (21), (22), (23), (24): Xaa is A or G or is absent
RXGXGEVVMEVTAKKXXXXXXXXXIKRMQVPRLETPV

SEQ ID NO: 48893 - protein, 40 aa, Artificial Sequence
  GFR-binding peptide
  MOD_RES (2), (4), (37), (38): Xaa is C or S
  MOD_RES (15), (16), (17), (18), (19): Xaa is A or G
  MOD_RES (20), (21), (22), (23): Xaa is A or G or is absent
SXKXSRVIMVQVEKXXXXXXXXXVKAIKVSRLAQPVXXPA

SEQ ID NO: 48894 - protein, 36 aa, Artificial Sequence; identical to SEQ ID NO: 17067
  GFR-binding peptide
  MOD_RES (2), (36): Xaa is C or S
  MOD_RES (14), (15), (16), (17), (18): Xaa is A or G
  MOD_RES (19), (20), (21), (22): Xaa is A or G or is absent

SEQ ID NO: 48895 - protein, 40 aa, Artificial Sequence; identical to SEQ ID NO: 11662
  GFR-binding peptide
  MOD_RES (1), (35), (36): Xaa is C or S
  MOD_RES (13), (14), (15), (16), (17): Xaa is A or G
  MOD_RES (18), (19), (20), (21): Xaa is A or G or is absent

SEQ ID NO: 48896 - protein, 35 aa, Artificial Sequence
  GFR-binding peptide
  MOD_RES (2), (4), (35): Xaa is C or S
SXKXSKVVMVTAKKVKPTRGVIKRIQVPRLDQPVX

SEQ ID NO: 48897 - protein, 38 aa, Artificial Sequence; identical to SEQ ID NO: 17070
  GFR-binding peptide
  MOD_RES (1), (35): Xaa is C or S
  MOD_RES (13), (14), (15), (16), (17): Xaa is A or G
  MOD_RES (18), (19), (20), (21): Xaa is A or G or is absent

SEQ ID NO: 48898 - protein, 38 aa, Artificial Sequence; identical to SEQ ID NO: 11665
  GFR-binding peptide
  MOD_RES (2), (34), (35): Xaa is C or S

SEQ ID NO: 48899 - protein, 36 aa, Artificial Sequence; identical to SEQ ID NO: 17071
  GFR-binding peptide
  MOD_RES (1), (3): Xaa is C or S

SEQ ID NO: 48900 - protein, 38 aa, Artificial Sequence; identical to SEQ ID NO: 11668
  GFR-binding peptide
  MOD_RES (1), (35), (36): Xaa is C or S
  MOD_RES (13), (14), (15), (16), (17): Xaa is A or G
  MOD_RES (18), (19), (20), (21): Xaa is A or G or is absent

SEQ ID NO: 48901 - protein, 34 aa, Artificial Sequence
  GFR-binding peptide
  MOD_RES (1), (33), (34): Xaa is C or S
XGEVVMEVTAKKVVKDYEDIKRMQVPRLETPVXX

SEQ ID NO: 48902 - protein, 39 aa, Artificial Sequence
  GFR-binding peptide
  MOD_RES (34), (34): Xaa is C or S
  MOD_RES (12), (13), (14), (15), (16): Xaa is A or G
  MOD_RES (17), (18), (19), (20): Xaa is A or G or is absent
SRVVMNVTAKKXXXXXXXXXIKRVQVPRLKTPAXTPKTV

SEQ ID NO: 48903 - protein, 40 aa, Artificial Sequence
  GFR-binding peptide
  MOD_RES (1), (3), (40): Xaa is C or S
  MOD_RES (16), (17), (18), (19), (20): Xaa is A or G
  MOD_RES (21), (22), (23), (24): Xaa is A or G or is absent
XKXALHDELTNSLQEXXXXXXXXXYYLVTLPELQVQTPRX

SEQ ID NO: 48904 - protein, 37 aa, Artificial Sequence; identical to SEQ ID NO: 11672
  GFR-binding peptide
  MOD_RES (32), (32): Xaa is C or S

SEQ ID NO: 48905 - protein, 36 aa, Artificial Sequence
  GFR-binding peptide
  MOD_RES (35), (35): Xaa is C or S
HDELTNSLQEFIPKKRVIEYYVVPLPELQVQTPRXQ

SEQ ID NO: 48906 - protein, 40 aa, Artificial Sequence; identical to SEQ ID NO: 17075
  GFR-binding peptide
  MOD_RES (2), (4): Xaa is C or S
  MOD_RES (17), (18), (19), (20), (21): Xaa is A or G
  MOD_RES (22), (23), (24), (25): Xaa is A or G or is absent

SEQ ID NO: 48907 - protein, 40 aa, Artificial Sequence
  GFR-binding peptide
  MOD_RES (2), (4), (38): Xaa is C or S
  MOD_RES (16), (17), (18), (19), (20): Xaa is A or G
  MOD_RES (21), (22), (23), (24): Xaa is A or G or is absent
HXGXSRVVMNVQVEKXXXXXXXXXVKAVKVSRLKTPAXTP

SEQ ID NO: 48908 - protein, 37 aa, Artificial Sequence; identical to SEQ ID NO: 17076
  GFR-binding peptide
  MOD_RES (37), (37): Xaa is C or S

SEQ ID NO: 48909 - protein, 42 aa, Artificial Sequence; identical to SEQ ID NO: 17077
  GFR-binding peptide
  MOD_RES (1), (38): Xaa is C or S
  MOD_RES (14), (15), (16), (17), (18): Xaa is A or G
  MOD_RES (19), (20), (21), (22): Xaa is A or G or is absent

SEQ ID NO: 48910 - protein, 36 aa, Artificial Sequence; identical to SEQ ID NO: 17078
  GFR-binding peptide
  MOD_RES (2), (2): Xaa is C or S
  MOD_RES (15), (16), (17), (18), (19): Xaa is A or G
  MOD_RES (20), (21), (22), (23): Xaa is A or G or is absent

SEQ ID NO: 48911 - protein, 36 aa, Artificial Sequence; identical to SEQ ID NO: 17079
  GFR-binding peptide
  MOD_RES (36), (36): Xaa is C or S

SEQ ID NO: 48912 - protein, 38 aa, Artificial Sequence
  GFR-binding peptide
  MOD_RES (1), (3), (37), (38): Xaa is C or S
  MOD_RES (15), (16), (17), (18), (19): Xaa is A or G
  MOD_RES (20), (21), (22), (23): Xaa is A or G or is absent
XGXSRVVMNVQVEKXXXXXXXXXVKAVKVSRLKTPAXX

SEQ ID NO: 48913 - protein, 35 aa, Artificial Sequence; identical to SEQ ID NO: 11677
  GFR-binding peptide
  MOD_RES (1), (33), (34): Xaa is C or S

SEQ ID NO: 48914 - protein, 36 aa, Artificial Sequence
  GFR-binding peptide
  MOD_RES (1), (33), (34): Xaa is C or S
XGEVVMESMEGIVVKDYEDMIQMTINSLETPVXXAK

SEQ ID NO: 48915 - protein, 45 aa, Artificial Sequence; identical to SEQ ID NO: 17080
  GFR-binding peptide
  MOD_RES (2), (4), (41): Xaa is C or S

SEQ ID NO: 48916 - protein, 37 aa, Artificial Sequence; identical to SEQ ID NO: 35579
  GFR-binding peptide
  MOD_RES (31), (32): Xaa is C or S

SEQ ID NO: 48917 - protein, 34 aa, Artificial Sequence; identical to SEQ ID NO: 17081
  GFR-binding peptide

SEQ ID NO: 48918 - protein, 39 aa, Artificial Sequence
  GFR-binding peptide
  MOD_RES (2), (4), (35), (36): Xaa is C or S
SXKXSKVIMSMEGIIKPTKGIMIQITINSLDQSVXXPSA

SEQ ID NO: 48919 - protein, 40 aa, Artificial Sequence; identical to SEQ ID NO: 11682
  GFR-binding peptide
  MOD_RES (2), (4), (36), (37): Xaa is C or S

SEQ ID NO: 48920 - protein, 37 aa, Artificial Sequence; identical to SEQ ID NO: 11683
  GFR-binding peptide
  MOD_RES (1), (34), (35): Xaa is C or S
  MOD_RES (12), (13), (14), (15), (16): Xaa is A or G
  MOD_RES (17), (18), (19), (20): Xaa is A or G or is absent

SEQ ID NO: 48921 - protein, 37 aa, Artificial Sequence
  GFR-binding peptide
  MOD_RES (1), (3): Xaa is C or S
XKXALHDELTNSLQEFIPKKRVIEYYLVTLPELQVQT

SEQ ID NO: 48922 - protein, 34 aa, Artificial Sequence
  GFR-binding peptide
  MOD_RES (1), (34): Xaa is C or S
  MOD_RES (12), (13), (14), (15), (16): Xaa is A or G
  MOD_RES (17), (18), (19), (20): Xaa is A or G or is absent
XSKVIMSMEGIXXXXXXXXXMIQITINSLDQSVX

SEQ ID NO: 48923 - protein, 37 aa, Artificial Sequence; identical to SEQ ID NO: 17084
  GFR-binding peptide
  MOD_RES (1), (1): Xaa is C or S
  MOD_RES (14), (15), (16), (17), (18): Xaa is A or G
  MOD_RES (19), (20), (21), (22): Xaa is A or G or is absent

SEQ ID NO: 48924 - protein, 37 aa, Artificial Sequence
  GFR-binding peptide
  MOD_RES (1), (3), (36), (37): Xaa is C or S
  MOD_RES (14), (15), (16), (17), (18): Xaa is A or G
  MOD_RES (19), (20), (21), (22): Xaa is A or G or is absent
XKXSRVIMVQVEKXXXXXXXXXVKAIKVSRLAQPVXX

SEQ ID NO: 48925 - protein, 36 aa, Artificial Sequence; identical to SEQ ID NO: 11685
  GFR-binding peptide
  MOD_RES (2), (35), (36): Xaa is C or S
  MOD_RES (13), (14), (15), (16), (17): Xaa is A or G
  MOD_RES (18), (19), (20), (21): Xaa is A or G or is absent

SEQ ID NO: 48926 - protein, 33 aa, Artificial Sequence
  GFR-binding peptide
  MOD_RES (1), (1): Xaa is C or S
  MOD_RES (12), (13), (14), (15), (16): Xaa is A or G
  MOD_RES (17), (18), (19), (20): Xaa is A or G or is absent
XSKVVMSMEGIXXXXXXXXXMIQITINSLDQPV

SEQ ID NO: 48927 - protein, 44 aa, Artificial Sequence; identical to SEQ ID NO: 17087
  GFR-binding peptide
  MOD_RES (2), (4), (41): Xaa is C or S

SEQ ID NO: 48928 - protein, 42 aa, Artificial Sequence
  GFR-binding peptide
  MOD_RES (2), (36), (37): Xaa is C or S
  MOD_RES (14), (15), (16), (17), (18): Xaa is A or G
  MOD_RES (19), (20), (21), (22): Xaa is A or G or is absent
GXGEVVMEVQVEKXXXXXXXXXVKAMKVSRLETPVXXAKPIS

SEQ ID NO: 48929 - protein, 40 aa, Artificial Sequence
  GFR-binding peptide
  MOD_RES (2), (35), (36): Xaa is C or S
  MOD_RES (13), (14), (15), (16), (17): Xaa is A or G
  MOD_RES (18), (19), (20), (21): Xaa is A or G or is absent
KXSRVIMSMEGIXXXXXXXXXMIQITINSLAQPVXXPAAS

SEQ ID NO: 48930 - protein, 38 aa, Artificial Sequence; identical to SEQ ID NO: 11687
  GFR-binding peptide
  MOD_RES (2), (34), (35): Xaa is C or S

SEQ ID NO: 48931 - protein, 39 aa, Artificial Sequence; identical to SEQ ID NO: 11688
  GFR-binding peptide
  MOD_RES (2), (33), (34): Xaa is C or S

SEQ ID NO: 48932 - protein, 36 aa, Artificial Sequence
  GFR-binding peptide
  MOD_RES (2), (33), (34): Xaa is C or S
KXSKVIMVTAKKIKPTKGIIKRIQVPRLDQSVXXPS

SEQ ID NO: 48933 - protein, 41 aa, Artificial Sequence; identical to SEQ ID NO: 11689
  GFR-binding peptide
  MOD_RES (2), (4), (38), (39): Xaa is C or S
  MOD_RES (16), (17), (18), (19), (20): Xaa is A or G
  MOD_RES (21), (22), (23), (24): Xaa is A or G or is absent

SEQ ID NO: 48934 - protein, 44 aa, Artificial Sequence
  GFR-binding peptide
  MOD_RES (1), (3), (40): Xaa is C or S
  MOD_RES (16), (17), (18), (19), (20): Xaa is A or G
  MOD_RES (21), (22), (23), (24): Xaa is A or G or is absent
XAXELHEELRNSLQEXXXXXXXXXYYVVPLPEHHVRSPQXKVSS

SEQ ID NO: 48935 - protein, 35 aa, Artificial Sequence
  GFR-binding peptide
  MOD_RES (1), (3), (35): Xaa is C or S
XGXSRVVMNVQVEKIVNSSDDVKAVKVSRLKTPAX

SEQ ID NO: 48936 - protein, 36 aa, Artificial Sequence; identical to SEQ ID NO: 11693
  GFR-binding peptide
  MOD_RES (2), (33), (34): Xaa is C or S

SEQ ID NO: 48937 - protein, 36 aa, Artificial Sequence; identical to SEQ ID NO: 11694
  GFR-binding peptide
  MOD_RES (1), (33), (34): Xaa is C or S

SEQ ID NO: 48938 - protein, 37 aa, Artificial Sequence
  GFR-binding peptide
  MOD_RES (2), (36), (37): Xaa is C or S
  MOD_RES (14), (15), (16), (17), (18): Xaa is A or G
  MOD_RES (19), (20), (21), (22): Xaa is A or G or is absent
GXSRVVMNVTAKKXXXXXXXXXIKRVQVPRLKTPAXX

SEQ ID NO: 48939 - protein, 38 aa, Artificial Sequence
  GFR-binding peptide
  MOD_RES (2), (34), (35): Xaa is C or S
GXARVVMNVQVEKIVNSSDDVKAVKVSRLQTPAXXPKP

SEQ ID NO: 48940 - protein, 40 aa, Artificial Sequence; identical to SEQ ID NO: 17092
  GFR-binding peptide
  MOD_RES (2), (39): Xaa is C or S

SEQ ID NO: 48941 - protein, 42 aa, Artificial Sequence; identical to SEQ ID NO: 17093
  GFR-binding peptide
  MOD_RES (2), (39): Xaa is C or S
  MOD_RES (15), (16), (17), (18), (19): Xaa is A or G
  MOD_RES (20), (21), (22), (23): Xaa is A or G or is absent

SEQ ID NO: 48942 - protein, 37 aa, Artificial Sequence
  GFR-binding peptide
  MOD_RES (1), (3), (37): Xaa is C or S
  MOD_RES (15), (16), (17), (18), (19): Xaa is A or G
  MOD_RES (20), (21), (22), (23): Xaa is A or G or is absent
XEXKNHQLFNSLQEXXXXXXXXXYYLMTLPEEETPVX

SEQ ID NO: 48943 - protein, 40 aa, Artificial Sequence
  GFR-binding peptide
  MOD_RES (2), (34), (35): Xaa is C or S
GXGEVVMESMEGIVVKDYEDMIQMTINSLETPVXXAKPIS

SEQ ID NO: 48944 - protein, 40 aa, Artificial Sequence; identical to SEQ ID NO: 11701
  GFR-binding peptide
  MOD_RES (2), (4), (36), (37): Xaa is C or S

SEQ ID NO: 48945 - protein, 37 aa, Artificial Sequence
  GFR-binding peptide
  MOD_RES (32), (33): Xaa is C or S
GEVVMDVTAKKVVKENEDIKRMQVPRLETPVXXAKPI

SEQ ID NO: 48946 - protein, 36 aa, Artificial Sequence
  GFR-binding peptide
  MOD_RES (2), (4): Xaa is C or S
  MOD_RES (15), (16), (17), (18), (19): Xaa is A or G
  MOD_RES (20), (21), (22), (23): Xaa is A or G or is absent
SXKXSRVIMSMEGIXXXXXXXXXMIQITINSLAQPV

SEQ ID NO: 48947 - protein, 39 aa, Artificial Sequence; identical to SEQ ID NO: 17099
  GFR-binding peptide
  MOD_RES (35), (35): Xaa is C or S
  MOD_RES (11), (12), (13), (14), (15): Xaa is A or G
  MOD_RES (16), (17), (18), (19): Xaa is A or G or is absent

SEQ ID NO: 48948 - protein, 39 aa, Artificial Sequence
  GFR-binding peptide
  MOD_RES (1), (3), (35): Xaa is C or S
XGXSRVVMNVQVEKIVNSSDDVKAVKVSRLKTPAXTPKT

SEQ ID NO: 48949 - protein, 37 aa, Artificial Sequence; identical to SEQ ID NO: 11702
  GFR-binding peptide
  MOD_RES (1), (35), (36): Xaa is C or S
  MOD_RES (13), (14), (15), (16), (17): Xaa is A or G
  MOD_RES (18), (19), (20), (21): Xaa is A or G or is absent

SEQ ID NO: 48950 - protein, 39 aa, Artificial Sequence; identical to SEQ ID NO: 11703
  GFR-binding peptide
  MOD_RES (1), (3), (37), (38): Xaa is C or S
  MOD_RES (15), (16), (17), (18), (19): Xaa is A or G
  MOD_RES (20), (21), (22), (23): Xaa is A or G or is absent

SEQ ID NO: 48951 - protein, 33 aa, Artificial Sequence
  GFR-binding peptide
  MOD_RES (33), (33): Xaa is C or S
  MOD_RES (11), (12), (13), (14), (15): Xaa is A or G
  MOD_RES (16), (17), (18), (19): Xaa is A or G or is absent
EVVMESMEGIXXXXXXXXXMIQMTINSLETPVX

SEQ ID NO: 48952 - protein, 35 aa, Artificial Sequence
  GFR-binding peptide
  MOD_RES (1), (33), (34): Xaa is C or S
XSRVVMNVQVEKIVNSSDDVKAVKVSRLKTPAXXP

SEQ ID NO: 48953 - protein, 38 aa, Artificial Sequence
  GFR-binding peptide
  MOD_RES (33), (34): Xaa is C or S
  MOD_RES (11), (12), (13), (14), (15): Xaa is A or G
  MOD_RES (16), (17), (18), (19): Xaa is A or G or is absent
RVVMNVTAKKXXXXXXXXXIKRVQVPRLQTPAXXPKPV

SEQ ID NO: 48954 - protein, 40 aa, Artificial Sequence; identical to SEQ ID NO: 11704
  GFR-binding peptide
  MOD_RES (1), (3), (34), (35): Xaa is C or S

SEQ ID NO: 48955 - protein, 35 aa, Artificial Sequence
  GFR-binding peptide
  MOD_RES (1), (1): Xaa is C or S
XALHDELTNSLQEFIPKKRVIEYYLVTLPELQVQT

SEQ ID NO: 48956 - protein, 39 aa, Artificial Sequence; identical to SEQ ID NO: 17102
  GFR-binding peptide
  MOD_RES (37), (37): Xaa is C or S

SEQ ID NO: 48957 - protein, 40 aa, Artificial Sequence
  GFR-binding peptide
  MOD_RES (1), (38): Xaa is C or S
XALHDELTNSLQEFIPKKRVIEYYLVTLPELQVQTPRXQV

SEQ ID NO: 48958 - protein, 38 aa, Artificial Sequence
  GFR-binding peptide
  MOD_RES (32), (33): Xaa is C or S
ARVVMNSMEGIIVNSSDDMIQVTINSLQTPAXXPKPVT

SEQ ID NO: 48959 - protein, 41 aa, Artificial Sequence; identical to SEQ ID NO: 17105
  GFR-binding peptide
  MOD_RES (1), (38): Xaa is C or S

SEQ ID NO: 48960 - protein, 38 aa, Artificial Sequence
  GFR-binding peptide
  MOD_RES (34), (35): Xaa is C or S
  MOD_RES (12), (13), (14), (15), (16): Xaa is A or G
  MOD_RES (17), (18), (19), (20): Xaa is A or G or is absent
GEVVMEVTAKKXXXXXXXXXIKRMQVPRLETPVXXAKP

SEQ ID NO: 48961 - protein, 33 aa, Artificial Sequence
  GFR-binding peptide
  MOD_RES (2), (33): Xaa is C or S
KXSKVVMSMEGIVKPTRGVMIQITINSLDQPVX

SEQ ID NO: 48962 - protein, 38 aa, Artificial Sequence
  GFR-binding peptide
  MOD_RES (1), (3), (35): Xaa is C or S
XGXSRVVMNVQVEKIVNSSDDVKAVKVSRLKTPAXTPK

SEQ ID NO: 48963 - protein, 35 aa, Artificial Sequence; identical to SEQ ID NO: 11705
  GFR-binding peptide
  MOD_RES (1), (3), (35): Xaa is C or S

SEQ ID NO: 48964 - protein, 37 aa, Artificial Sequence
  GFR-binding peptide
  MOD_RES (1), (32), (33): Xaa is C or S
XSKVVMVQVEKVKPTRGVVKAIKVSRLDQPVXXPSAS

SEQ ID NO: 48965 - protein, 38 aa, Artificial Sequence; identical to SEQ ID NO: 17107
  GFR-binding peptide
  MOD_RES (35), (35): Xaa is C or S

SEQ ID NO: 48966 - protein, 37 aa, Artificial Sequence; identical to SEQ ID NO: 17108
  GFR-binding peptide
  MOD_RES (33), (33): Xaa is C or S

SEQ ID NO: 48967 - protein, 33 aa, Artificial Sequence; identical to SEQ ID NO: 11706
  GFR-binding peptide
  MOD_RES (1), (32), (33): Xaa is C or S

SEQ ID NO: 48968 - protein, 35 aa, Artificial Sequence
  GFR-binding peptide
  MOD_RES (33), (34): Xaa is C or S
  MOD_RES (11), (12), (13), (14), (15): Xaa is A or G
  MOD_RES (16), (17), (18), (19): Xaa is A or G or is absent
EVVMDVTAKKXXXXXXXXXIKRMQVPRLETPVXXA

SEQ ID NO: 48969 - protein, 35 aa, Artificial Sequence
  GFR-binding peptide
  MOD_RES (33), (33): Xaa is C or S
  MOD_RES (11), (12), (13), (14), (15): Xaa is A or G
  MOD_RES (16), (17), (18), (19): Xaa is A or G or is absent
NHQLFNSLQEXXXXXXXXXYYLMTLPEEETPVXEL

SEQ ID NO: 48970 - protein, 37 aa, Artificial Sequence; identical to SEQ ID NO: 11708
  GFR-binding peptide
  MOD_RES (2), (34), (35): Xaa is C or S

SEQ ID NO: 48971 - protein, 32 aa, Artificial Sequence
  GFR-binding peptide
  MOD_RES (1), (32): Xaa is C or S
XSKVIMVQVEKIKPTKGIVKAIKVSRLDQSVX

SEQ ID NO: 48972 - protein, 42 aa, Artificial Sequence; identical to SEQ ID NO: 11710
  GFR-binding peptide
  MOD_RES (2), (4), (36), (37): Xaa is C or S

SEQ ID NO: 48973 - protein, 35 aa, Artificial Sequence; identical to SEQ ID NO: 17112
  GFR-binding peptide
  MOD_RES (35), (35): Xaa is C or S

SEQ ID NO: 48974 - protein, 37 aa, Artificial Sequence
  GFR-binding peptide
  MOD_RES (2), (4): Xaa is C or S
RXEXKNHQLFNSLQEHQGQHPKIRYYLMTLPEEETPV

SEQ ID NO: 48975 - protein, 40 aa, Artificial Sequence; identical to SEQ ID NO: 11713
  GFR-binding peptide
  MOD_RES (2), (4), (35), (36): Xaa is C or S

SEQ ID NO: 48976 - protein, 34 aa, Artificial Sequence
  GFR-binding peptide
  MOD_RES (31), (32): Xaa is C or S
RVVMNVTAKKIVNSSDDIKRVQVPRLKTPAXXPK

SEQ ID NO: 48977 - protein, 37 aa, Artificial Sequence
  GFR-binding peptide
  MOD_RES (2), (4), (36), (37): Xaa is C or S
HXGXARVVMNVTAKKIVNSSDDIKRVQVPRLQTPAXX

SEQ ID NO: 48978 - protein, 33 aa, Artificial Sequence
  GFR-binding peptide
  MOD_RES (33), (33): Xaa is C or S
  MOD_RES (11), (12), (13), (14), (15): Xaa is A or G
  MOD_RES (16), (17), (18), (19): Xaa is A or G or is absent
SRVIMSMEGIXXXXXXXXXMIQITINSLAQPVX

SEQ ID NO: 48979 - protein, 40 aa, Artificial Sequence
  GFR-binding peptide
  MOD_RES (2), (36), (37): Xaa is C or S
  MOD_RES (14), (15), (16), (17), (18): Xaa is A or G
  MOD_RES (19), (20), (21), (22): Xaa is A or G or is absent
GXGEVVMDVQVEKXXXXXXXXXVKAMKVSRLETPVXXAKP

SEQ ID NO: 48980 - protein, 35 aa, Artificial Sequence; identical to SEQ ID NO: 11717
  GFR-binding peptide
  MOD_RES (34), (35): Xaa is C or S
  MOD_RES (12), (13), (14), (15), (16): Xaa is A or G
  MOD_RES (17), (18), (19), (20): Xaa is A or G or is absent

SEQ ID NO: 48981 - protein, 36 aa, Artificial Sequence
  GFR-binding peptide
  MOD_RES (2), (4), (35), (36): Xaa is C or S
SXKXSKVVMSMEGIVKPTRGVMIQITINSLDQPVXX

SEQ ID NO: 48982 - protein, 42 aa, Artificial Sequence
  GFR-binding peptide
  MOD_RES (1), (38): Xaa is C or S
XELHEELRNSLQELKPKKRVYEYYVVPLPEHHVRSPQXKVSS

SEQ ID NO: 48983 - protein, 36 aa, Artificial Sequence; identical to SEQ ID NO: 11718
  GFR-binding peptide
  MOD_RES (1), (3), (36): Xaa is C or S
  MOD_RES (14), (15), (16), (17), (18): Xaa is A or G
  MOD_RES (19), (20), (21), (22): Xaa is A or G or is absent

SEQ ID NO: 48984 - protein, 39 aa, Artificial Sequence; identical to SEQ ID NO: 11721
  GFR-binding peptide
  MOD_RES (2), (36), (37): Xaa is C or S
  MOD_RES (14), (15), (16), (17), (18): Xaa is A or G
  MOD_RES (19), (20), (21), (22): Xaa is A or G or is absent

SEQ ID NO: 48985 - protein, 42 aa, Artificial Sequence
  GFR-binding peptide
  MOD_RES (2), (4), (38): Xaa is C or S
  MOD_RES (16), (17), (18), (19), (20): Xaa is A or G
  MOD_RES (21), (22), (23), (24): Xaa is A or G or is absent
RXEXKNHQLFNSLQEXXXXXXXXXYYVMPLPEEETPVXELGE

SEQ ID NO: 48986 - protein, 41 aa, Artificial Sequence; identical to SEQ ID NO: 11723
  GFR-binding peptide
  MOD_RES (1), (3), (36), (37): Xaa is C or S
  MOD_RES (14), (15), (16), (17), (18): Xaa is A or G
  MOD_RES (19), (20), (21), (22): Xaa is A or G or is absent

SEQ ID NO: 48987 - protein, 33 aa, Artificial Sequence
  GFR-binding peptide
  MOD_RES (2), (2): Xaa is C or S
GXGEVVMEVTAKKVVKDYEDIKRMQVPRLETPV

SEQ ID NO: 48988 - protein, 43 aa, Artificial Sequence
  GFR-binding peptide
  MOD_RES (1), (3), (40): Xaa is C or S
XAXELHEELRNSLQELKPKKRVYEYYLVTLPEHHVRSPQXKVS

SEQ ID NO: 48989 - protein, 40 aa, Artificial Sequence
  GFR-binding peptide
  MOD_RES (1), (3), (36), (37): Xaa is C or S
  MOD_RES (14), (15), (16), (17), (18): Xaa is A or G
  MOD_RES (19), (20), (21), (22): Xaa is A or G or is absent
XKXSRVIMSMEGIXXXXXXXXXMIQITINSLAQPVXXPAA

SEQ ID NO: 48990 - protein, 39 aa, Artificial Sequence; identical to SEQ ID NO: 17123
  GFR-binding peptide
  MOD_RES (34), (34): Xaa is C or S

SEQ ID NO: 48991 - protein, 36 aa, Artificial Sequence; identical to SEQ ID NO: 17125
  GFR-binding peptide
  MOD_RES (1), (35): Xaa is C or S
  MOD_RES (13), (14), (15), (16), (17): Xaa is A or G
  MOD_RES (18), (19), (20), (21): Xaa is A or G or is absent

SEQ ID NO: 48992 - protein, 42 aa, Artificial Sequence; identical to SEQ ID NO: 17127
  GFR-binding peptide
  MOD_RES (1), (38): Xaa is C or S

SEQ ID NO: 48993 - protein, 41 aa, Artificial Sequence
  GFR-binding peptide
  MOD_RES (1), (3), (37): Xaa is C or S
  MOD_RES (15), (16), (17), (18), (19): Xaa is A or G
  MOD_RES (20), (21), (22), (23): Xaa is A or G or is absent
XGXSRVVMNVQVEKXXXXXXXXXVKAVKVSRLKTPAXTPKT

SEQ ID NO: 48994 - protein, 39 aa, Artificial Sequence; identical to SEQ ID NO: 11728
  GFR-binding peptide
  MOD_RES (2), (34), (35): Xaa is C or S

SEQ ID NO: 48995 - protein, 36 aa, Artificial Sequence; identical to SEQ ID NO: 11732
  GFR-binding peptide
  MOD_RES (1), (3), (35), (36): Xaa is C or S

SEQ ID NO: 48996 - protein, 38 aa, Artificial Sequence
  GFR-binding peptide
  MOD_RES (1), (3): Xaa is C or S
  MOD_RES (16), (17), (18), (19), (20): Xaa is A or G
  MOD_RES (21), (22), (23), (24): Xaa is A or G or is absent
XKXALHDELTNSLQEXXXXXXXXXYYLVTLPELQVQTP

SEQ ID NO: 48997 - protein, 36 aa, Artificial Sequence
  GFR-binding peptide
  MOD_RES (2), (34), (35): Xaa is C or S
GXARVVMNSMEGIIVNSSDDMIQVTINSLQTPAXXP

SEQ ID NO: 48998 - protein, 35 aa, Artificial Sequence; identical to SEQ ID NO: 17130
  GFR-binding peptide
  MOD_RES (34), (34): Xaa is C or S
  MOD_RES (12), (13), (14), (15), (16): Xaa is A or G
  MOD_RES (17), (18), (19), (20): Xaa is A or G or is absent

SEQ ID NO: 48999 - protein, 37 aa, Artificial Sequence; identical to SEQ ID NO: 11736
  GFR-binding peptide
  MOD_RES (33), (34): Xaa is C or S
  MOD_RES (11), (12), (13), (14), (15): Xaa is A or G
  MOD_RES (16), (17), (18), (19): Xaa is A or G or is absent

SEQ ID NO: 49000 - protein, 41 aa, Artificial Sequence
  GFR-binding peptide
  MOD_RES (2), (4), (37), (38): Xaa is C or S
  MOD_RES (15), (16), (17), (18), (19): Xaa is A or G
  MOD_RES (20), (21), (22), (23): Xaa is A or G or is absent
SXKXSRVIMVQVEKXXXXXXXXXVKAIKVSRLAQPVXXPAA

SEQ ID NO: 49001 - protein, 41 aa, Artificial Sequence; identical to SEQ ID NO: 11737
  GFR-binding peptide
  MOD_RES (2), (4), (38), (39): Xaa is C or S
  MOD_RES (16), (17), (18), (19), (20): Xaa is A or G
  MOD_RES (21), (22), (23), (24): Xaa is A or G or is absent

SEQ ID NO: 49002 - protein, 34 aa, Artificial Sequence
  GFR-binding peptide
  MOD_RES (33), (33): Xaa is C or S
NHQLFNSLQEHQGQHPKIRYYLMTLPEEETPVXE

SEQ ID NO: 49003 - protein, 38 aa, Artificial Sequence; identical to SEQ ID NO: 17136
  GFR-binding peptide
  MOD_RES (2), (36): Xaa is C or S

SEQ ID NO: 49004 - protein, 37 aa, Artificial Sequence
  GFR-binding peptide
  MOD_RES (2), (4), (35), (36): Xaa is C or S
SXKXSRVIMVTAKKVKPKRGVIKRIQVPRLAQPVXXP

SEQ ID NO: 49005 - protein, 35 aa, Artificial Sequence; identical to SEQ ID NO: 17138
  GFR-binding peptide

SEQ ID NO: 49006 - protein, 34 aa, Artificial Sequence
  GFR-binding peptide
  MOD_RES (34), (34): Xaa is C or S
  MOD_RES (12), (13), (14), (15), (16): Xaa is A or G
  MOD_RES (17), (18), (19), (20): Xaa is A or G or is absent
ARVVMNVTAKKXXXXXXXXXIKRVQVPRLQTPAX

SEQ ID NO: 49007 - protein, 39 aa, Artificial Sequence
  GFR-binding peptide
  MOD_RES (36), (36): Xaa is C or S
LHEELRNSLQELKPKKRVYEYYVVPLPEHHVRSPQXKVS

SEQ ID NO: 49008 - protein, 36 aa, Artificial Sequence
  GFR-binding peptide
  MOD_RES (1), (33), (34): Xaa is C or S
XARVVMNSMEGIIVNSSDDMIQVTINSLQTPAXXPK

SEQ ID NO: 49009 - protein, 42 aa, Artificial Sequence
  GFR-binding peptide
  MOD_RES (2), (4), (38), (39): Xaa is C or S
  MOD_RES (16), (17), (18), (19), (20): Xaa is A or G
  MOD_RES (21), (22), (23), (24): Xaa is A or G or is absent
RXGXGEVVMESMEGIXXXXXXXXXMIQMTINSLETPVXXAKP

SEQ ID NO: 49010 - protein, 33 aa, Artificial Sequence; identical to SEQ ID NO: 11744
  GFR-binding peptide
  MOD_RES (2), (2): Xaa is C or S

SEQ ID NO: 49011 - protein, 31 aa, Artificial Sequence
  GFR-binding peptide
  MOD_RES (31), (31): Xaa is C or S
SKVVMSMEGIVKPTRGVMIQITINSLDQPVX

SEQ ID NO: 49012 - protein, 39 aa, Artificial Sequence; identical to SEQ ID NO: 17144
  GFR-binding peptide
  MOD_RES (2), (39): Xaa is C or S
  MOD_RES (15), (16), (17), (18), (19): Xaa is A or G
  MOD_RES (20), (21), (22), (23): Xaa is A or G or is absent

SEQ ID NO: 49013 - protein, 34 aa, Artificial Sequence; identical to SEQ ID NO: 17145
  GFR-binding peptide
  MOD_RES (11), (12), (13), (14), (15): Xaa is A or G
  MOD_RES (16), (17), (18), (19): Xaa is A or G or is absent

SEQ ID NO: 49014 - protein, 38 aa, Artificial Sequence
  GFR-binding peptide
  MOD_RES (1), (34), (35): Xaa is C or S
  MOD_RES (12), (13), (14), (15), (16): Xaa is A or G
  MOD_RES (17), (18), (19), (20): Xaa is A or G or is absent
XSKVIMSMEGIXXXXXXXXXMIQITINSLDQSVXXPSA

SEQ ID NO: 49015 - protein, 37 aa, Artificial Sequence
  GFR-binding peptide
  MOD_RES (1), (32), (33): Xaa is C or S
XSKVVMSMEGIVKPTRGVMIQITINSLDQPVXXPSAS

SEQ ID NO: 49016 - protein, 39 aa, Artificial Sequence
  GFR-binding peptide
  MOD_RES (1), (35), (36): Xaa is C or S
  MOD_RES (13), (14), (15), (16), (17): Xaa is A or G
  MOD_RES (18), (19), (20), (21): Xaa is A or G or is absent
XSRVVMNSMEGIXXXXXXXXXMIQVTINSLKTPAXXPKP

SEQ ID NO: 49017 - protein, 35 aa, Artificial Sequence
  GFR-binding peptide
  MOD_RES (33), (34): Xaa is C or S
  MOD_RES (11), (12), (13), (14), (15): Xaa is A or G
  MOD_RES (16), (17), (18), (19): Xaa is A or G or is absent
SKVIMVTAKKXXXXXXXXXIKRIQVPRLDQSVXXP

SEQ ID NO: 49018 - protein, 42 aa, Artificial Sequence
  GFR-binding peptide
  MOD_RES (2), (36), (37): Xaa is C or S
  MOD_RES (14), (15), (16), (17), (18): Xaa is A or G
  MOD_RES (19), (20), (21), (22): Xaa is A or G or is absent
GXGEVVMDSMEGIXXXXXXXXXMIQMTINSLETPVXXAKPIK

SEQ ID NO: 49019 - protein, 41 aa, Artificial Sequence
  GFR-binding peptide
  MOD_RES (1), (3), (35), (36): Xaa is C or S
XGXGEVVMDSMEGIVVKENEDMIQMTINSLETPVXXAKPIK

SEQ ID NO: 49020 - protein, 43 aa, Artificial Sequence
  GFR-binding peptide
  MOD_RES (2), (4), (37), (38): Xaa is C or S
  MOD_RES (15), (16), (17), (18), (19): Xaa is A or G
  MOD_RES (20), (21), (22), (23): Xaa is A or G or is absent
SXKXSKVIMSMEGIXXXXXXXXXMIQITINSLDQSVXXPSASA

SEQ ID NO: 49021 - protein, 36 aa, Artificial Sequence
  GFR-binding peptide
  MOD_RES (31), (32): Xaa is C or S
EVVMEVQVEKVVKDYEDVKAMKVSRLETPVXXAKPI

SEQ ID NO: 49022 - protein, 33 aa, Artificial Sequence
  GFR-binding peptide
  MOD_RES (33), (33): Xaa is C or S
  MOD_RES (11), (12), (13), (14), (15): Xaa is A or G
  MOD_RES (16), (17), (18), (19): Xaa is A or G or is absent
SKVIMVQVEKXXXXXXXXXVKAIKVSRLDQSVX

SEQ ID NO: 49023 - protein, 37 aa, Artificial Sequence; identical to SEQ ID NO: 11756
  GFR-binding peptide
  MOD_RES (1), (35), (36): Xaa is C or S
  MOD_RES (13), (14), (15), (16), (17): Xaa is A or G
  MOD_RES (18), (19), (20), (21): Xaa is A or G or is absent

SEQ ID NO: 49024 - protein, 45 aa, Artificial Sequence; identical to SEQ ID NO: 17155
  GFR-binding peptide
  MOD_RES (2), (4), (41): Xaa is C or S
  MOD_RES (17), (18), (19), (20), (21): Xaa is A or G
  MOD_RES (22), (23), (24), (25): Xaa is A or G or is absent

SEQ ID NO: 49025 - protein, 42 aa, Artificial Sequence; identical to SEQ ID NO: 11757
  GFR-binding peptide
  MOD_RES (1), (3), (36), (37): Xaa is C or S
  MOD_RES (14), (15), (16), (17), (18): Xaa is A or G
  MOD_RES (19), (20), (21), (22): Xaa is A or G or is absent

SEQ ID NO: 49026 - protein, 39 aa, Artificial Sequence
  GFR-binding peptide
  MOD_RES (1), (3), (35): Xaa is C or S
XGXSRVVMNVTAKKIVNSSDDIKRVQVPRLKTPAXTPKT

SEQ ID NO: 49027 - protein, 43 aa, Artificial Sequence; identical to SEQ ID NO: 11758
  GFR-binding peptide
  MOD_RES (2), (4), (37), (38): Xaa is C or S
  MOD_RES (15), (16), (17), (18), (19): Xaa is A or G
  MOD_RES (20), (21), (22), (23): Xaa is A or G or is absent

SEQ ID NO: 49028 - protein, 44 aa, Artificial Sequence
  GFR-binding peptide
  MOD_RES (1), (3), (40): Xaa is C or S
XKXALHDELTNSLQEFIPKKRVIEYYLVTLPELQVQTPRXQVNR

SEQ ID NO: 49029 - protein, 35 aa, Artificial Sequence
  GFR-binding peptide
  MOD_RES (31), (32): Xaa is C or S
RVVMNVTAKKIVNSSDDIKRVQVPRLQTPAXXPKP

SEQ ID NO: 49030 - protein, 39 aa, Artificial Sequence; identical to SEQ ID NO: 17156
  GFR-binding peptide
  MOD_RES (1), (3): Xaa is C or S

SEQ ID NO: 49031 - protein, 38 aa, Artificial Sequence
  GFR-binding peptide
  MOD_RES (1), (3), (36), (37): Xaa is C or S
  MOD_RES (14), (15), (16), (17), (18): Xaa is A or G
  MOD_RES (19), (20), (21), (22): Xaa is A or G or is absent
XKXSKVIMVQVEKXXXXXXXXXVKAIKVSRLDQSVXXP

SEQ ID NO: 49032 - protein, 36 aa, Artificial Sequence
  GFR-binding peptide
  MOD_RES (2), (2): Xaa is C or S
  MOD_RES (15), (16), (17), (18), (19): Xaa is A or G
  MOD_RES (20), (21), (22), (23): Xaa is A or G or is absent
KXALHDELTNSLQEXXXXXXXXXYYLVTLPELQVQT

SEQ ID NO: 49033 - protein, 43 aa, Artificial Sequence; identical to SEQ ID NO: 17157
  GFR-binding peptide
  MOD_RES (2), (4), (38): Xaa is C or S

SEQ ID NO: 49034 - protein, 41 aa, Artificial Sequence
  GFR-binding peptide
  MOD_RES (2), (35), (36): Xaa is C or S
  MOD_RES (13), (14), (15), (16), (17): Xaa is A or G
  MOD_RES (18), (19), (20), (21): Xaa is A or G or is absent
KXSKVVMVQVEKXXXXXXXXXVKAIKVSRLDQPVXXPSASA

SEQ ID NO: 49035 - protein, 39 aa, Artificial Sequence
  GFR-binding peptide
  MOD_RES (2), (4), (36), (37): Xaa is C or S
RXGXGEVVMDVTAKKVVKENEDIKRMQVPRLETPVXXAK

SEQ ID NO: 49036 - protein, 38 aa, Artificial Sequence; identical to SEQ ID NO: 11760
  GFR-binding peptide
  MOD_RES (2), (36), (37): Xaa is C or S
  MOD_RES (14), (15), (16), (17), (18): Xaa is A or G
  MOD_RES (19), (20), (21), (22): Xaa is A or G or is absent

SEQ ID NO: 49037 - protein, 37 aa, Artificial Sequence
  GFR-binding peptide
  MOD_RES (2), (35), (36): Xaa is C or S
  MOD_RES (13), (14), (15), (16), (17): Xaa is A or G
  MOD_RES (18), (19), (20), (21): Xaa is A or G or is absent
KXSRVIMVTAKKXXXXXXXXXIKRIQVPRLAQPVXXP

SEQ ID NO: 49038 - protein, 40 aa, Artificial Sequence; identical to SEQ ID NO: 17161
  GFR-binding peptide
  MOD_RES (2), (39): Xaa is C or S

SEQ ID NO: 49039 - protein, 35 aa, Artificial Sequence
  GFR-binding peptide
  MOD_RES (34), (34): Xaa is C or S
  MOD_RES (12), (13), (14), (15), (16): Xaa is A or G
  MOD_RES (17), (18), (19), (20): Xaa is A or G or is absent
KNHQLFNSLQEXXXXXXXXXYYLMTLPEEETPVXE

SEQ ID NO: 49040 - protein, 37 aa, Artificial Sequence
  GFR-binding peptide
  MOD_RES (2), (36): Xaa is C or S
  MOD_RES (14), (15), (16), (17), (18): Xaa is A or G
  MOD_RES (19), (20), (21), (22): Xaa is A or G or is absent
EXKNHQLFNSLQEXXXXXXXXXYYVMPLPEEETPVXE

SEQ ID NO: 49041 - protein, 32 aa, Artificial Sequence; identical to SEQ ID NO: 11761
  GFR-binding peptide
  MOD_RES (31), (32): Xaa is C or S

SEQ ID NO: 49042 - protein, 40 aa, Artificial Sequence
  GFR-binding peptide
  MOD_RES (34), (34): Xaa is C or S
  MOD_RES (12), (13), (14), (15), (16): Xaa is A or G
  MOD_RES (17), (18), (19), (20): Xaa is A or G or is absent
SRVVMNSMEGIXXXXXXXXXMIQVTINSLKTPAXTPKTVH

SEQ ID NO: 49043 - protein, 36 aa, Artificial Sequence; identical to SEQ ID NO: 11764
  GFR-binding peptide
  MOD_RES (2), (34), (35): Xaa is C or S

SEQ ID NO: 49044 - protein, 34 aa, Artificial Sequence; identical to SEQ ID NO: 11767
  GFR-binding peptide
  MOD_RES (1), (3): Xaa is C or S

SEQ ID NO: 49045 - protein, 39 aa, Artificial Sequence; identical to SEQ ID NO: 11768
  GFR-binding peptide
  MOD_RES (1), (3), (36), (37): Xaa is C or S
  MOD_RES (14), (15), (16), (17), (18): Xaa is A or G
  MOD_RES (19), (20), (21), (22): Xaa is A or G or is absent

SEQ ID NO: 49046 - protein, 37 aa, Artificial Sequence; identical to SEQ ID NO: 11769
  GFR-binding peptide
  MOD_RES (31), (32): Xaa is C or S

SEQ ID NO: 49047 - protein, 40 aa, Artificial Sequence
  GFR-binding peptide
  MOD_RES (2), (39): Xaa is C or S
AXELHEELRNSLQELKPKKRVYEYYLVTLPEHHVRSPQXK

SEQ ID NO: 49048 - protein, 32 aa, Artificial Sequence
  GFR-binding peptide
  MOD_RES (1), (32): Xaa is C or S
XSRVIMVQVEKVKPKRGVVKAIKVSRLAQPVX

SEQ ID NO: 49049 - protein, 34 aa, Artificial Sequence
  GFR-binding peptide
LHEELRNSLQELKPKKRVYEYYVVPLPEHHVRSP

SEQ ID NO: 49050 - protein, 33 aa, Artificial Sequence; identical to SEQ ID NO: 11772
  GFR-binding peptide
  MOD_RES (31), (32): Xaa is C or S

SEQ ID NO: 49051 - protein, 40 aa, Artificial Sequence
  GFR-binding peptide
  MOD_RES (1), (34), (35): Xaa is C or S
  MOD_RES (12), (13), (14), (15), (16): Xaa is A or G
  MOD_RES (17), (18), (19), (20): Xaa is A or G or is absent
XSKVVMVQVEKXXXXXXXXXVKAIKVSRLDQPVXXPSASA

SEQ ID NO: 49052 - protein, 38 aa, Artificial Sequence; identical to SEQ ID NO: 11776
  GFR-binding peptide
  MOD_RES (2), (4), (35), (36): Xaa is C or S

SEQ ID NO: 49053 - protein, 42 aa, Artificial Sequence
  GFR-binding peptide
  MOD_RES (2), (4), (37), (38): Xaa is C or S
  MOD_RES (15), (16), (17), (18), (19): Xaa is A or G
  MOD_RES (20), (21), (22), (23): Xaa is A or G or is absent
SXKXSRVIMSMEGIXXXXXXXXXMIQITINSLAQPVXXPAAS

SEQ ID NO: 49054 - protein, 39 aa, Artificial Sequence; identical to SEQ ID NO: 17168
  GFR-binding peptide
  MOD_RES (1), (3): Xaa is C or S

SEQ ID NO: 49055 - protein, 40 aa, Artificial Sequence
  GFR-binding peptide
  MOD_RES (1), (35), (36): Xaa is C or S
  MOD_RES (13), (14), (15), (16), (17): Xaa is A or G
  MOD_RES (18), (19), (20), (21): Xaa is A or G or is absent
XARVVMNVQVEKXXXXXXXXXVKAVKVSRLQTPAXXPKPV

SEQ ID NO: 49056 - protein, 38 aa, Artificial Sequence
  GFR-binding peptide
  MOD_RES (1), (32), (33): Xaa is C or S
XSRVIMVQVEKVKPKRGVVKAIKVSRLAQPVXXPAASA

SEQ ID NO: 49057 - protein, 42 aa, Artificial Sequence
  GFR-binding peptide
  MOD_RES (2), (36): Xaa is C or S
  MOD_RES (14), (15), (16), (17), (18): Xaa is A or G
  MOD_RES (19), (20), (21), (22): Xaa is A or G or is absent
EXKNHQLFNSLQEXXXXXXXXXYYVMPLPEEETPVXELGEDN

SEQ ID NO: 49058 - protein, 36 aa, Artificial Sequence
  GFR-binding peptide
  MOD_RES (1), (3), (36): Xaa is C or S
  MOD_RES (14), (15), (16), (17), (18): Xaa is A or G
  MOD_RES (19), (20), (21), (22): Xaa is A or G or is absent
XKXSRVIMVQVEKXXXXXXXXXVKAIKVSRLAQPVX

SEQ ID NO: 49059 - protein, 39 aa, Artificial Sequence; identical to SEQ ID NO: 35743
  GFR-binding peptide
  MOD_RES (2), (35), (36): Xaa is C or S
  MOD_RES (13), (14), (15), (16), (17): Xaa is A or G
  MOD_RES (18), (19), (20), (21): Xaa is A or G or is absent

SEQ ID NO: 49060 - protein, 35 aa, Artificial Sequence
  GFR-binding peptide
  MOD_RES (1), (35): Xaa is C or S
  MOD_RES (13), (14), (15), (16), (17): Xaa is A or G
  MOD_RES (18), (19), (20), (21): Xaa is A or G or is absent
XGEVVMDVQVEKXXXXXXXXXVKAMKVSRLETPVX

SEQ ID NO: 49061 - protein, 34 aa, Artificial Sequence
  GFR-binding peptide
HDELTNSLQEFIPKKRVIEYYLVTLPELQVQTPR

SEQ ID NO: 49062 - protein, 32 aa, Artificial Sequence
  GFR-binding peptide
  MOD_RES (31), (32): Xaa is C or S
EVVMEVTAKKVVKDYEDIKRMQVPRLETPVXX

SEQ ID NO: 49063 - protein, 40 aa, Artificial Sequence
  GFR-binding peptide
  MOD_RES (2), (4): Xaa is C or S
  MOD_RES (17), (18), (19), (20), (21): Xaa is A or G
  MOD_RES (22), (23), (24), (25): Xaa is A or G or is absent
AXAXELHEELRNSLQEXXXXXXXXXYYVVPLPEHHVRSPQ

SEQ ID NO: 49064 - protein, 32 aa, Artificial Sequence; identical to SEQ ID NO: 11782
  GFR-binding peptide
  MOD_RES (11), (12), (13), (14), (15): Xaa is A or G
  MOD_RES (16), (17), (18), (19): Xaa is A or G or is absent

SEQ ID NO: 49065 - protein, 44 aa, Artificial Sequence; identical to SEQ ID NO: 17171
  GFR-binding peptide
  MOD_RES (2), (4), (41): Xaa is C or S

SEQ ID NO: 49066 - protein, 36 aa, Artificial Sequence
  GFR-binding peptide
  MOD_RES (1), (33), (34): Xaa is C or S
XGEVVMDVTAKKVVKENEDIKRMQVPRLETPVXXAK

SEQ ID NO: 49067 - protein, 34 aa, Artificial Sequence; identical to SEQ ID NO: 11783
  GFR-binding peptide
  MOD_RES (31), (32): Xaa is C or S

SEQ ID NO: 49068 - protein, 43 aa, Artificial Sequence; identical to SEQ ID NO: 17172
  GFR-binding peptide
  MOD_RES (2), (39): Xaa is C or S

SEQ ID NO: 49069 - protein, 31 aa, Artificial Sequence
  GFR-binding peptide
GEVVMDSMEGIVVKENEDMIQMTINSLETPV

SEQ ID NO: 49070 - protein, 33 aa, Artificial Sequence
  GFR-binding peptide
  MOD_RES (12), (13), (14), (15), (16): Xaa is A or G
  MOD_RES (17), (18), (19), (20): Xaa is A or G or is absent
GEVVMDVTAKKXXXXXXXXXIKRMQVPRLETPV

SEQ ID NO: 49071 - protein, 41 aa, Artificial Sequence
  GFR-binding peptide
  MOD_RES (2), (4), (38): Xaa is C or S
  MOD_RES (16), (17), (18), (19), (20): Xaa is A or G
  MOD_RES (21), (22), (23), (24): Xaa is A or G or is absent
RXEXKNHQLFNSLQEXXXXXXXXXYYLMTLPEEETPVXELG

SEQ ID NO: 49072 - protein, 40 aa, Artificial Sequence; identical to SEQ ID NO: 17174
  GFR-binding peptide
  MOD_RES (34), (34): Xaa is C or S

SEQ ID NO: 49073 - protein, 36 aa, Artificial Sequence; identical to SEQ ID NO: 11785
  GFR-binding peptide
  MOD_RES (1), (3), (36): Xaa is C or S
  MOD_RES (14), (15), (16), (17), (18): Xaa is A or G
  MOD_RES (19), (20), (21), (22): Xaa is A or G or is absent

SEQ ID NO: 49074 - protein, 32 aa, Artificial Sequence; identical to SEQ ID NO: 11786
  GFR-binding peptide
  MOD_RES (1), (32): Xaa is C or S

SEQ ID NO: 49075 - protein, 41 aa, Artificial Sequence
  GFR-binding peptide
  MOD_RES (2), (4), (37), (38): Xaa is C or S
  MOD_RES (15), (16), (17), (18), (19): Xaa is A or G
  MOD_RES (20), (21), (22), (23): Xaa is A or G or is absent
SXKXSRVIMVTAKKXXXXXXXXXIKRIQVPRLAQPVXXPAA

SEQ ID NO: 49076 - protein, 36 aa, Artificial Sequence; identical to SEQ ID NO: 11788
  GFR-binding peptide
  MOD_RES (31), (32): Xaa is C or S

SEQ ID NO: 49077 - protein, 36 aa, Artificial Sequence
  GFR-binding peptide
  MOD_RES (2), (33), (34): Xaa is C or S
KXSKVVMVTAKKVKPTRGVIKRIQVPRLDQPVXXPS

SEQ ID NO: 49078 - protein, 34 aa, Artificial Sequence; identical to SEQ ID NO: 35763
  GFR-binding peptide
  MOD_RES (2), (2): Xaa is C or S
  MOD_RES (13), (14), (15), (16), (17): Xaa is A or G
  MOD_RES (18), (19), (20), (21): Xaa is A or G or is absent

SEQ ID NO: 49079 - protein, 36 aa, Artificial Sequence; identical to SEQ ID NO: 17177
  GFR-binding peptide
  MOD_RES (36), (36): Xaa is C or S

SEQ ID NO: 49080 - protein, 41 aa, Artificial Sequence; identical to SEQ ID NO: 11791
  GFR-binding peptide
  MOD_RES (1), (3), (37), (38): Xaa is C or S
  MOD_RES (15), (16), (17), (18), (19): Xaa is A or G
  MOD_RES (20), (21), (22), (23): Xaa is A or G or is absent

SEQ ID NO: 49081 - protein, 32 aa, Artificial Sequence
  GFR-binding peptide
  MOD_RES (11), (12), (13), (14), (15): Xaa is A or G
  MOD_RES (16), (17), (18), (19): Xaa is A or G or is absent
RVVMNSMEGIXXXXXXXXXMIQVTINSLKTPA

SEQ ID NO: 49082 - protein, 33 aa, Artificial Sequence
  GFR-binding peptide
  MOD_RES (33), (33): Xaa is C or S
  MOD_RES (11), (12), (13), (14), (15): Xaa is A or G
  MOD_RES (16), (17), (18), (19): Xaa is A or G or is absent
RVVMNVQVEKXXXXXXXXXVKAVKVSRLKTPAX

SEQ ID NO: 49083 - protein, 37 aa, Artificial Sequence; identical to SEQ ID NO: 11793
  GFR-binding peptide
  MOD_RES (31), (32): Xaa is C or S

SEQ ID NO: 49084 - protein, 37 aa, Artificial Sequence; identical to SEQ ID NO: 11795
  GFR-binding peptide
  MOD_RES (1), (3), (36), (37): Xaa is C or S
  MOD_RES (14), (15), (16), (17), (18): Xaa is A or G
  MOD_RES (19), (20), (21), (22): Xaa is A or G or is absent

SEQ ID NO: 49085 - protein, 40 aa, Artificial Sequence; identical to SEQ ID NO: 11796
  GFR-binding peptide
  MOD_RES (2), (4), (38), (39): Xaa is C or S
  MOD_RES (16), (17), (18), (19), (20): Xaa is A or G
  MOD_RES (21), (22), (23), (24): Xaa is A or G or is absent

SEQ ID NO: 49086 - protein, 37 aa, Artificial Sequence
  GFR-binding peptide
  MOD_RES (33), (33): Xaa is C or S
  MOD_RES (11), (12), (13), (14), (15): Xaa is A or G
  MOD_RES (16), (17), (18), (19): Xaa is A or G or is absent
RVVMNVTAKKXXXXXXXXXIKRVQVPRLKTPAXTPKT

SEQ ID NO: 49087 - protein, 37 aa, Artificial Sequence
  GFR-binding peptide
  MOD_RES (33), (33): Xaa is C or S
  MOD_RES (11), (12), (13), (14), (15): Xaa is A or G
  MOD_RES (16), (17), (18), (19): Xaa is A or G or is absent
RVVMNVQVEKXXXXXXXXXVKAVKVSRLKTPAXTPKT

SEQ ID NO: 49088 - protein, 38 aa, Artificial Sequence
  GFR-binding peptide
  MOD_RES (2), (4), (36), (37): Xaa is C or S
HXGXARVVMNSMEGIIVNSSDDMIQVTINSLQTPAXXP

SEQ ID NO: 49089 - protein, 36 aa, Artificial Sequence
  GFR-binding peptide
  MOD_RES (2), (4): Xaa is C or S
  MOD_RES (15), (16), (17), (18), (19): Xaa is A or G
  MOD_RES (20), (21), (22), (23): Xaa is A or G or is absent
SXKXSKVVMSMEGIXXXXXXXXXMIQITINSLDQPV

SEQ ID NO: 49090 - protein, 31 aa, Artificial Sequence
  GFR-binding peptide
GEVVMESMEGIVVKDYEDMIQMTINSLETPV

SEQ ID NO: 49091 - protein, 43 aa, Artificial Sequence; identical to SEQ ID NO: 11806
  GFR-binding peptide
  MOD_RES (2), (4), (38), (39): Xaa is C or S
  MOD_RES (16), (17), (18), (19), (20): Xaa is A or G
  MOD_RES (21), (22), (23), (24): Xaa is A or G or is absent

SEQ ID NO: 49092 - protein, 37 aa, Artificial Sequence; identical to SEQ ID NO: 17182
  GFR-binding peptide
  MOD_RES (35), (35): Xaa is C or S

SEQ ID NO: 49093 - protein, 38 aa, Artificial Sequence
  GFR-binding peptide
  MOD_RES (2), (4), (38): Xaa is C or S
  MOD_RES (16), (17), (18), (19), (20): Xaa is A or G
  MOD_RES (21), (22), (23), (24): Xaa is A or G or is absent
RXGXGEVVMEVTAKKXXXXXXXXXIKRMQVPRLETPVX

SEQ ID NO: 49094 - protein, 43 aa, Artificial Sequence
  GFR-binding peptide
  MOD_RES (2), (4), (38): Xaa is C or S
  MOD_RES (16), (17), (18), (19), (20): Xaa is A or G
  MOD_RES (21), (22), (23), (24): Xaa is A or G or is absent
HXGXSRVVMNVTAKKXXXXXXXXXIKRVQVPRLKTPAXTPKTV

SEQ ID NO: 49095 - protein, 41 aa, Artificial Sequence
  GFR-binding peptide
  MOD_RES (1), (3), (37): Xaa is C or S
  MOD_RES (15), (16), (17), (18), (19): Xaa is A or G
  MOD_RES (20), (21), (22), (23): Xaa is A or G or is absent
XGXSRVVMNVTAKKXXXXXXXXXIKRVQVPRLKTPAXTPKT

SEQ ID NO: 49096 - protein, 34 aa, Artificial Sequence; identical to SEQ ID NO: 17186
  GFR-binding peptide

SEQ ID NO: 49097 - protein, 36 aa, Artificial Sequence; identical to SEQ ID NO: 11810
  GFR-binding peptide
  MOD_RES (1), (35), (36): Xaa is C or S
  MOD_RES (13), (14), (15), (16), (17): Xaa is A or G
  MOD_RES (18), (19), (20), (21): Xaa is A or G or is absent

SEQ ID NO: 49098 - protein, 39 aa, Artificial Sequence
  GFR-binding peptide
  MOD_RES (1), (33), (34): Xaa is C or S
XARVVMNSMEGIIVNSSDDMIQVTINSLQTPAXXPKPVT

SEQ ID NO: 49099 - protein, 43 aa, Artificial Sequence
  GFR-binding peptide
  MOD_RES (2), (4), (37), (38): Xaa is C or S
  MOD_RES (15), (16), (17), (18), (19): Xaa is A or G
  MOD_RES (20), (21), (22), (23): Xaa is A or G or is absent
SXKXSKVVMVTAKKXXXXXXXXXIKRIQVPRLDQPVXXPSASA

SEQ ID NO: 49100 - protein, 36 aa, Artificial Sequence
  GFR-binding peptide
  MOD_RES (36), (36): Xaa is C or S
LHDELTNSLQEFIPKKRVIEYYLVTLPELQVQTPRX

SEQ ID NO: 49101 - protein, 40 aa, Artificial Sequence
  GFR-binding peptide
  MOD_RES (2), (4): Xaa is C or S
EXKXALHDELTNSLQEFIPKKRVIEYYLVTLPELQVQTPR

SEQ ID NO: 49102 - protein, 44 aa, Artificial Sequence; identical to SEQ ID NO: 11815
  GFR-binding peptide
  MOD_RES (2), (4), (38): Xaa is C or S
  MOD_RES (16), (17), (18), (19), (20): Xaa is A or G
  MOD_RES (21), (22), (23), (24): Xaa is A or G or is absent

SEQ ID NO: 49103 - protein, 33 aa, Artificial Sequence
  GFR-binding peptide
  MOD_RES (33), (33): Xaa is C or S
  MOD_RES (11), (12), (13), (14), (15): Xaa is A or G
  MOD_RES (16), (17), (18), (19): Xaa is A or G or is absent
RVVMNVTAKKXXXXXXXXXIKRVQVPRLKTPAX

SEQ ID NO: 49104 - protein, 39 aa, Artificial Sequence; identical to SEQ ID NO: 11816
  GFR-binding peptide
  MOD_RES (2), (33), (34): Xaa is C or S

SEQ ID NO: 49105 - protein, 37 aa, Artificial Sequence
  GFR-binding peptide
  MOD_RES (2), (4), (36), (37): Xaa is C or S
RXGXGEVVMEVQVEKVVKDYEDVKAMKVSRLETPVXX

SEQ ID NO: 49106 - protein, 42 aa, Artificial Sequence
  GFR-binding peptide
  MOD_RES (2), (39): Xaa is C or S
  MOD_RES (15), (16), (17), (18), (19): Xaa is A or G
  MOD_RES (20), (21), (22), (23): Xaa is A or G or is absent
AXELHEELRNSLQEXXXXXXXXXYYLVTLPEHHVRSPQXKVS

SEQ ID NO: 49107 - protein, 34 aa, Artificial Sequence
  GFR-binding peptide
  MOD_RES (33), (34): Xaa is C or S
  MOD_RES (11), (12), (13), (14), (15): Xaa is A or G
  MOD_RES (16), (17), (18), (19): Xaa is A or G or is absent
RVVMNSMEGIXXXXXXXXXMIQVTINSLQTPAXX

SEQ ID NO: 49108 - protein, 32 aa, Artificial Sequence
  GFR-binding peptide
  MOD_RES (31), (32): Xaa is C or S
SRVIMVTAKKVKPKRGVIKRIQVPRLAQPVXX

SEQ ID NO: 49109 - protein, 40 aa, Artificial Sequence
  GFR-binding peptide
  MOD_RES (2), (39): Xaa is C or S
KXALHDELTNSLQEFIPKKRVIEYYLVTLPELQVQTPRXQ

SEQ ID NO: 49110 - protein, 36 aa, Artificial Sequence; identical to SEQ ID NO: 17193
  GFR-binding peptide
  MOD_RES (1), (1): Xaa is C or S
  MOD_RES (14), (15), (16), (17), (18): Xaa is A or G
  MOD_RES (19), (20), (21), (22): Xaa is A or G or is absent

SEQ ID NO: 49111 - protein, 41 aa, Artificial Sequence
  GFR-binding peptide
  MOD_RES (2), (4), (38): Xaa is C or S
  MOD_RES (16), (17), (18), (19), (20): Xaa is A or G
  MOD_RES (21), (22), (23), (24): Xaa is A or G or is absent
HXGXSRVVMNSMEGIXXXXXXXXXMIQVTINSLKTPAXTPK

SEQ ID NO: 49112 - protein, 40 aa, Artificial Sequence; identical to SEQ ID NO: 11823
  GFR-binding peptide
  MOD_RES (2), (36), (37): Xaa is C or S
  MOD_RES (14), (15), (16), (17), (18): Xaa is A or G
  MOD_RES (19), (20), (21), (22): Xaa is A or G or is absent

SEQ ID NO: 49113 - protein, 41 aa, Artificial Sequence; identical to SEQ ID NO: 17195
  GFR-binding peptide
  MOD_RES (2), (39): Xaa is C or S
  MOD_RES (15), (16), (17), (18), (19): Xaa is A or G
  MOD_RES (20), (21), (22), (23): Xaa is A or G or is absent

SEQ ID NO: 49114 - protein, 38 aa, Artificial Sequence; identical to SEQ ID NO: 11824
  GFR-binding peptide
  MOD_RES (2), (35), (36): Xaa is C or S
  MOD_RES (13), (14), (15), (16), (17): Xaa is A or G
  MOD_RES (18), (19), (20), (21): Xaa is A or G or is absent

SEQ ID NO: 49115 - protein, 37 aa, Artificial Sequence; identical to SEQ ID NO: 17199
  GFR-binding peptide
  MOD_RES (35), (35): Xaa is C or S

SEQ ID NO: 49116 - protein, 40 aa, Artificial Sequence
  GFR-binding peptide
  MOD_RES (2), (34), (35): Xaa is C or S
GXSRVVMNVTAKKIVNSSDDIKRVQVPRLKTPAXXPKPVY

SEQ ID NO: 49117 - protein, 38 aa, Artificial Sequence
  GFR-binding peptide
  MOD_RES (2), (4), (36), (37): Xaa is C or S
RXGXGEVVMESMEGIVVKDYEDMIQMTINSLETPVXXA

SEQ ID NO: 49118 - protein, 37 aa, Artificial Sequence
  GFR-binding peptide
  MOD_RES (1), (1): Xaa is C or S
  MOD_RES (14), (15), (16), (17), (18): Xaa is A or G
  MOD_RES (19), (20), (21), (22): Xaa is A or G or is absent
XELHEELRNSLQEXXXXXXXXXYYVVPLPEHHVRSPQ

SEQ ID NO: 49119 - protein, 38 aa, Artificial Sequence; identical to SEQ ID NO: 17201
  GFR-binding peptide
  MOD_RES (1), (38): Xaa is C or S

SEQ ID NO: 49120 - protein, 38 aa, Artificial Sequence
  GFR-binding peptide
  MOD_RES (2), (4), (38): Xaa is C or S
  MOD_RES (16), (17), (18), (19), (20): Xaa is A or G
  MOD_RES (21), (22), (23), (24): Xaa is A or G or is absent
RXGXGEVVMDVQVEKXXXXXXXXXVKAMKVSRLETPVX

SEQ ID NO: 49121 - protein, 35 aa, Artificial Sequence; identical to SEQ ID NO: 11827
  GFR-binding peptide
  MOD_RES (32), (33): Xaa is C or S

SEQ ID NO: 49122 - protein, 36 aa, Artificial Sequence; identical to SEQ ID NO: 11828
  GFR-binding peptide
  MOD_RES (31), (32): Xaa is C or S

SEQ ID NO: 49123 - protein, 39 aa, Artificial Sequence
  GFR-binding peptide
  MOD_RES (33), (34): Xaa is C or S
  MOD_RES (11), (12), (13), (14), (15): Xaa is A or G
  MOD_RES (16), (17), (18), (19): Xaa is A or G or is absent
SRVIMSMEGIXXXXXXXXXMIQITINSLAQPVXXPAASA

SEQ ID NO: 49124 - protein, 35 aa, Artificial Sequence
  GFR-binding peptide
  MOD_RES (2), (4), (35): Xaa is C or S
SXKXSKVVMVQVEKVKPTRGVVKAIKVSRLDQPVX

SEQ ID NO: 49125 - protein, 41 aa, Artificial Sequence; identical to SEQ ID NO: 17204
  GFR-binding peptide
  MOD_RES (2), (39): Xaa is C or S
  MOD_RES (15), (16), (17), (18), (19): Xaa is A or G
  MOD_RES (20), (21), (22), (23): Xaa is A or G or is absent

SEQ ID NO: 49126 - protein, 43 aa, Artificial Sequence; identical to SEQ ID NO: 17207
  GFR-binding peptide
  MOD_RES (1), (3), (37): Xaa is C or S
  MOD_RES (15), (16), (17), (18), (19): Xaa is A or G
  MOD_RES (20), (21), (22), (23): Xaa is A or G or is absent

SEQ ID NO: 49127 - protein, 41 aa, Artificial Sequence; identical to SEQ ID NO: 11833
  GFR-binding peptide
  MOD_RES (2), (36), (37): Xaa is C or S
  MOD_RES (14), (15), (16), (17), (18): Xaa is A or G
  MOD_RES (19), (20), (21), (22): Xaa is A or G or is absent

SEQ ID NO: 49128 - protein, 32 aa, Artificial Sequence; identical to SEQ ID NO: 11834
  GFR-binding peptide
  MOD_RES (1), (1): Xaa is C or S

SEQ ID NO: 49129 - protein, 33 aa, Artificial Sequence; identical to SEQ ID NO: 17208
  GFR-binding peptide
  MOD_RES (33), (33): Xaa is C or S

SEQ ID NO: 49130 - protein, 32 aa, Artificial Sequence; identical to SEQ ID NO: 11837
  GFR-binding peptide
  MOD_RES (32), (32): Xaa is C or S

SEQ ID NO: 49131 - protein, 37 aa, Artificial Sequence
  GFR-binding peptide
  MOD_RES (2), (33), (34): Xaa is C or S
KXSRVIMVTAKKVKPKRGVIKRIQVPRLAQPVXXPAA

SEQ ID NO: 49132 - protein, 37 aa, Artificial Sequence; identical to SEQ ID NO: 17209
  GFR-binding peptide
  MOD_RES (37), (37): Xaa is C or S
  MOD_RES (13), (14), (15), (16), (17): Xaa is A or G
  MOD_RES (18), (19), (20), (21): Xaa is A or G or is absent

SEQ ID NO: 49133 - protein, 42 aa, Artificial Sequence; identical to SEQ ID NO: 17211
  GFR-binding peptide
  MOD_RES (1), (38): Xaa is C or S

SEQ ID NO: 49134 - protein, 39 aa, Artificial Sequence; identical to SEQ ID NO: 11839
  GFR-binding peptide
  MOD_RES (2), (4), (36), (37): Xaa is C or S

SEQ ID NO: 49135 - protein, 38 aa, Artificial Sequence; identical to SEQ ID NO: 35843
  GFR-binding peptide
  MOD_RES (1), (32), (33): Xaa is C or S

SEQ ID NO: 49136 - protein, 41 aa, Artificial Sequence; identical to SEQ ID NO: 17212
  GFR-binding peptide
  MOD_RES (2), (36): Xaa is C or S

SEQ ID NO: 49137 - protein, 36 aa, Artificial Sequence
  GFR-binding peptide
  MOD_RES (2), (36): Xaa is C or S
  MOD_RES (14), (15), (16), (17), (18): Xaa is A or G
  MOD_RES (19), (20), (21), (22): Xaa is A or G or is absent
GXARVVMNVQVEKXXXXXXXXXVKAVKVSRLQTPAX

SEQ ID NO: 49138 - protein, 40 aa, Artificial Sequence
  GFR-binding peptide
  MOD_RES (2), (36), (37): Xaa is C or S
  MOD_RES (14), (15), (16), (17), (18): Xaa is A or G
  MOD_RES (19), (20), (21), (22): Xaa is A or G or is absent
GXARVVMNVTAKKXXXXXXXXXIKRVQVPRLQTPAXXPKP

SEQ ID NO: 49139 - protein, 40 aa, Artificial Sequence; identical to SEQ ID NO: 17216
  GFR-binding peptide
  MOD_RES (2), (36): Xaa is C or S

SEQ ID NO: 49140 - protein, 34 aa, Artificial Sequence
  GFR-binding peptide
  MOD_RES (1), (1): Xaa is C or S
  MOD_RES (13), (14), (15), (16), (17): Xaa is A or G
  MOD_RES (18), (19), (20), (21): Xaa is A or G or is absent
XGEVVMDSMEGIXXXXXXXXXMIQMTINSLETPV

SEQ ID NO: 49141 - protein, 34 aa, Artificial Sequence
  GFR-binding peptide
  MOD_RES (31), (32): Xaa is C or S
EVVMDVQVEKVVKENEDVKAMKVSRLETPVXXAK

SEQ ID NO: 49142 - protein, 41 aa, Artificial Sequence
  GFR-binding peptide
  MOD_RES (2), (4), (38), (39): Xaa is C or S
  MOD_RES (16), (17), (18), (19), (20): Xaa is A or G
  MOD_RES (21), (22), (23), (24): Xaa is A or G or is absent
HXGXSRVVMNVTAKKXXXXXXXXXIKRVQVPRLKTPAXXPK

SEQ ID NO: 49143 - protein, 38 aa, Artificial Sequence
  GFR-binding peptide
  MOD_RES (2), (33), (34): Xaa is C or S
KXSRVIMSMEGIVKPKRGVMIQITINSLAQPVXXPAAS

SEQ ID NO: 49144 - protein, 34 aa, Artificial Sequence
  GFR-binding peptide
  MOD_RES (11), (12), (13), (14), (15): Xaa is A or G
  MOD_RES (16), (17), (18), (19): Xaa is A or G or is absent
HEELRNSLQEXXXXXXXXXYYVVPLPEHHVRSPQ

SEQ ID NO: 49145 - protein, 36 aa, Artificial Sequence
  GFR-binding peptide
  MOD_RES (2), (4), (36): Xaa is C or S
HXGXSRVVMNSMEGIIVNSSDDMIQVTINSLKTPAX

SEQ ID NO: 49146 - protein, 43 aa, Artificial Sequence; identical to SEQ ID NO: 11847
  GFR-binding peptide
  MOD_RES (1), (3), (37), (38): Xaa is C or S
  MOD_RES (15), (16), (17), (18), (19): Xaa is A or G
  MOD_RES (20), (21), (22), (23): Xaa is A or G or is absent

SEQ ID NO: 49147 - protein, 43 aa, Artificial Sequence
  GFR-binding peptide
  MOD_RES (1), (3), (40): Xaa is C or S
XKXALHDELTNSLQEFIPKKRVIEYYVVPLPELQVQTPRXQVN

SEQ ID NO: 49148 - protein, 34 aa, Artificial Sequence; identical to SEQ ID NO: 11848
  GFR-binding peptide
  MOD_RES (1), (3): Xaa is C or S

SEQ ID NO: 49149 - protein, 42 aa, Artificial Sequence
  GFR-binding peptide
  MOD_RES (2), (36), (37): Xaa is C or S
  MOD_RES (14), (15), (16), (17), (18): Xaa is A or G
  MOD_RES (19), (20), (21), (22): Xaa is A or G or is absent
GXARVVMNVTAKKXXXXXXXXXIKRVQVPRLQTPAXXPKPVT

SEQ ID NO: 49150 - protein, 36 aa, Artificial Sequence; identical to SEQ ID NO: 11852
  GFR-binding peptide
  MOD_RES (1), (3), (34), (35): Xaa is C or S

SEQ ID NO: 49151 - protein, 42 aa, Artificial Sequence; identical to SEQ ID NO: 11855
  GFR-binding peptide
  MOD_RES (2), (4), (36), (37): Xaa is C or S

SEQ ID NO: 49152 - protein, 44 aa, Artificial Sequence; identical to SEQ ID NO: 17220
  GFR-binding peptide
  MOD_RES (2), (4), (41): Xaa is C or S
  MOD_RES (17), (18), (19), (20), (21): Xaa is A or G
  MOD_RES (22), (23), (24), (25): Xaa is A or G or is absent

SEQ ID NO: 49153 - protein, 36 aa, Artificial Sequence; identical to SEQ ID NO: 17221
  GFR-binding peptide
  MOD_RES (1), (3): Xaa is C or S

SEQ ID NO: 49154 - protein, 35 aa, Artificial Sequence
  GFR-binding peptide
ALHDELTNSLQEFIPKKRVIEYYLVTLPELQVQTP

SEQ ID NO: 49155 - protein, 38 aa, Artificial Sequence
  GFR-binding peptide
  MOD_RES (1), (33), (34): Xaa is C or S
XARVVMNSMEGIIVNSSDDMIQVTINSLQTPAXXPKPV

SEQ ID NO: 49156 - protein, 35 aa, Artificial Sequence
  GFR-binding peptide
  MOD_RES (2), (34): Xaa is C or S
GXSRVVMNSMEGIIVNSSDDMIQVTINSLKTPAXT

SEQ ID NO: 49157 - protein, 38 aa, Artificial Sequence; identical to SEQ ID NO: 17227
  GFR-binding peptide
  MOD_RES (2), (2): Xaa is C or S
  MOD_RES (15), (16), (17), (18), (19): Xaa is A or G
  MOD_RES (20), (21), (22), (23): Xaa is A or G or is absent

SEQ ID NO: 49158 - protein, 39 aa, Artificial Sequence
  GFR-binding peptide
  MOD_RES (1), (3), (35), (36): Xaa is C or S
XGXGEVVMEVTAKKVVKDYEDIKRMQVPRLETPVXXAKP

SEQ ID NO: 49159 - protein, 35 aa, Artificial Sequence
  GFR-binding peptide
  MOD_RES (1), (3): Xaa is C or S
  MOD_RES (14), (15), (16), (17), (18): Xaa is A or G
  MOD_RES (19), (20), (21), (22): Xaa is A or G or is absent
XKXSKVIMSMEGIXXXXXXXXXMIQITINSLDQSV

SEQ ID NO: 49160 - protein, 38 aa, Artificial Sequence; identical to SEQ ID NO: 11861
  GFR-binding peptide
  MOD_RES (2), (4), (36), (37): Xaa is C or S

SEQ ID NO: 49161 - protein, 37 aa, Artificial Sequence
  GFR-binding peptide
  MOD_RES (37), (37): Xaa is C or S
  MOD_RES (13), (14), (15), (16), (17): Xaa is A or G
  MOD_RES (18), (19), (20), (21): Xaa is A or G or is absent
ALHDELTNSLQEXXXXXXXXXYYVVPLPELQVQTPRX

SEQ ID NO: 49162 - protein, 36 aa, Artificial Sequence
  GFR-binding peptide
  MOD_RES (1), (35): Xaa is C or S
  MOD_RES (13), (14), (15), (16), (17): Xaa is A or G
  MOD_RES (18), (19), (20), (21): Xaa is A or G or is absent
XSRVVMNVTAKKXXXXXXXXXIKRVQVPRLKTPAXT

SEQ ID NO: 49163 - protein, 35 aa, Artificial Sequence; identical to SEQ ID NO: 11865
  GFR-binding peptide
  MOD_RES (33), (34): Xaa is C or S
  MOD_RES (11), (12), (13), (14), (15): Xaa is A or G
  MOD_RES (16), (17), (18), (19): Xaa is A or G or is absent

SEQ ID NO: 49164 - protein, 34 aa, Artificial Sequence
  GFR-binding peptide
  MOD_RES (1), (1): Xaa is C or S
  MOD_RES (13), (14), (15), (16), (17): Xaa is A or G
  MOD_RES (18), (19), (20), (21): Xaa is A or G or is absent
XKNHQLFNSLQEXXXXXXXXXYYLMTLPEEETPV

SEQ ID NO: 49165 - protein, 40 aa, Artificial Sequence; identical to SEQ ID NO: 17237
  GFR-binding peptide
  MOD_RES (36), (36): Xaa is C or S

SEQ ID NO: 49166 - protein, 37 aa, Artificial Sequence
  GFR-binding peptide
  MOD_RES (2), (34), (35): Xaa is C or S
GXGEVVMDVQVEKVVKENEDVKAMKVSRLETPVXXAK

SEQ ID NO: 49167 - protein, 39 aa, Artificial Sequence
  GFR-binding peptide
  MOD_RES (1), (3), (34), (35): Xaa is C or S
XKXSRVIMVTAKKVKPKRGVIKRIQVPRLAQPVXXPAAS

SEQ ID NO: 49168 - protein, 35 aa, Artificial Sequence; identical to SEQ ID NO: 11868
  GFR-binding peptide
  MOD_RES (33), (34): Xaa is C or S
  MOD_RES (11), (12), (13), (14), (15): Xaa is A or G
  MOD_RES (16), (17), (18), (19): Xaa is A or G or is absent

SEQ ID NO: 49169 - protein, 35 aa, Artificial Sequence; identical to SEQ ID NO: 11870
  GFR-binding peptide
  MOD_RES (33), (34): Xaa is C or S
  MOD_RES (11), (12), (13), (14), (15): Xaa is A or G
  MOD_RES (16), (17), (18), (19): Xaa is A or G or is absent

SEQ ID NO: 49170 - protein, 38 aa, Artificial Sequence
  GFR-binding peptide
  MOD_RES (2), (4), (38): Xaa is C or S
RXEXKNHQLFNSLQEHQGQHPKIRYYLMTLPEEETPVX

SEQ ID NO: 49171 - protein, 42 aa, Artificial Sequence; identical to SEQ ID NO: 35885
  GFR-binding peptide
  MOD_RES (1), (3), (36), (37): Xaa is C or S
  MOD_RES (14), (15), (16), (17), (18): Xaa is A or G
  MOD_RES (19), (20), (21), (22): Xaa is A or G or is absent

SEQ ID NO: 49172 - protein, 36 aa, Artificial Sequence
  GFR-binding peptide
  MOD_RES (34), (34): Xaa is C or S
  MOD_RES (12), (13), (14), (15), (16): Xaa is A or G
  MOD_RES (17), (18), (19), (20): Xaa is A or G or is absent
SRVVMNSMEGIXXXXXXXXXMIQVTINSLKTPAXTP

SEQ ID NO: 49173 - protein, 39 aa, Artificial Sequence
  GFR-binding peptide
  MOD_RES (1), (3): Xaa is C or S
  MOD_RES (16), (17), (18), (19), (20): Xaa is A or G
  MOD_RES (21), (22), (23), (24): Xaa is A or G or is absent
XKXALHDELTNSLQEXXXXXXXXXYYVVPLPELQVQTPR

SEQ ID NO: 49174 - protein, 41 aa, Artificial Sequence; identical to SEQ ID NO: 11873
  GFR-binding peptide
  MOD_RES (1), (3), (36), (37): Xaa is C or S
  MOD_RES (14), (15), (16), (17), (18): Xaa is A or G
  MOD_RES (19), (20), (21), (22): Xaa is A or G or is absent

SEQ ID NO: 49175 - protein, 39 aa, Artificial Sequence
  GFR-binding peptide
  MOD_RES (33), (34): Xaa is C or S
  MOD_RES (11), (12), (13), (14), (15): Xaa is A or G
  MOD_RES (16), (17), (18), (19): Xaa is A or G or is absent
EVVMDSMEGIXXXXXXXXXMIQMTINSLETPVXXAKPIK

SEQ ID NO: 49176 - protein, 36 aa, Artificial Sequence; identical to SEQ ID NO: 11875
  GFR-binding peptide
  MOD_RES (1), (3), (35): Xaa is C or S

SEQ ID NO: 49177 - protein, 37 aa, Artificial Sequence; identical to SEQ ID NO: 17242
  GFR-binding peptide
  MOD_RES (1), (35): Xaa is C or S
  MOD_RES (13), (14), (15), (16), (17): Xaa is A or G
  MOD_RES (18), (19), (20), (21): Xaa is A or G or is absent

SEQ ID NO: 49178 - protein, 33 aa, Artificial Sequence; identical to SEQ ID NO: 11877
  GFR-binding peptide
  MOD_RES (1), (1): Xaa is C or S
  MOD_RES (12), (13), (14), (15), (16): Xaa is A or G
  MOD_RES (17), (18), (19), (20): Xaa is A or G or is absent

SEQ ID NO: 49179 - protein, 39 aa, Artificial Sequence; identical to SEQ ID NO: 17243
  GFR-binding peptide
  MOD_RES (37), (37): Xaa is C or S
  MOD_RES (13), (14), (15), (16), (17): Xaa is A or G
  MOD_RES (18), (19), (20), (21): Xaa is A or G or is absent

SEQ ID NO: 49180 - protein, 36 aa, Artificial Sequence
  GFR-binding peptide
  MOD_RES (31), (31): Xaa is C or S
RVVMNVQVEKIVNSSDDVKAVKVSRLKTPAXTPKTV

SEQ ID NO: 49181 - protein, 40 aa, Artificial Sequence
  GFR-binding peptide
  MOD_RES (36), (36): Xaa is C or S
  MOD_RES (12), (13), (14), (15), (16): Xaa is A or G
  MOD_RES (17), (18), (19), (20): Xaa is A or G or is absent
LHDELTNSLQEXXXXXXXXXYYVVPLPELQVQTPRXQVNR

SEQ ID NO: 49182 - protein, 36 aa, Artificial Sequence; identical to SEQ ID NO: 11878
  GFR-binding peptide
  MOD_RES (34), (35): Xaa is C or S
  MOD_RES (12), (13), (14), (15), (16): Xaa is A or G
  MOD_RES (17), (18), (19), (20): Xaa is A or G or is absent

SEQ ID NO: 49183 - protein, 39 aa, Artificial Sequence
  GFR-binding peptide
  MOD_RES (2), (36): Xaa is C or S
  MOD_RES (14), (15), (16), (17), (18): Xaa is A or G
  MOD_RES (19), (20), (21), (22): Xaa is A or G or is absent
EXKNHQLFNSLQEXXXXXXXXXYYLMTLPEEETPVXELG

SEQ ID NO: 49184 - protein, 42 aa, Artificial Sequence
  GFR-binding peptide
  MOD_RES (2), (4), (38), (39): Xaa is C or S
  MOD_RES (16), (17), (18), (19), (20): Xaa is A or G
  MOD_RES (21), (22), (23), (24): Xaa is A or G or is absent
RXGXGEVVMDSMEGIXXXXXXXXXMIQMTINSLETPVXXAKP

SEQ ID NO: 49185 - protein, 36 aa, Artificial Sequence
  GFR-binding peptide
  MOD_RES (31), (32): Xaa is C or S
EVVMDVTAKKVVKENEDIKRMQVPRLETPVXXAKPI

SEQ ID NO: 49186 - protein, 39 aa, Artificial Sequence; identical to SEQ ID NO: 17246
  GFR-binding peptide
  MOD_RES (36), (36): Xaa is C or S

SEQ ID NO: 49187 - protein, 35 aa, Artificial Sequence
  GFR-binding peptide
  MOD_RES (1), (35): Xaa is C or S
XKNHQLFNSLQEHQGQHPKIRYYVMPLPEEETPVX

SEQ ID NO: 49188 - protein, 38 aa, Artificial Sequence
  GFR-binding peptide
  MOD_RES (2), (36), (37): Xaa is C or S
  MOD_RES (14), (15), (16), (17), (18): Xaa is A or G
  MOD_RES (19), (20), (21), (22): Xaa is A or G or is absent
GXGEVVMEVQVEKXXXXXXXXXVKAMKVSRLETPVXXA

SEQ ID NO: 49189 - protein, 37 aa, Artificial Sequence; identical to SEQ ID NO: 17248
  GFR-binding peptide
  MOD_RES (2), (36): Xaa is C or S

SEQ ID NO: 49190 - protein, 37 aa, Artificial Sequence; identical to SEQ ID NO: 11887
  GFR-binding peptide
  MOD_RES (2), (4), (35), (36): Xaa is C or S

SEQ ID NO: 49191 - protein, 37 aa, Artificial Sequence; identical to SEQ ID NO: 11888
  GFR-binding peptide
  MOD_RES (2), (34), (35): Xaa is C or S

SEQ ID NO: 49192 - protein, 37 aa, Artificial Sequence; identical to SEQ ID NO: 17251
  GFR-binding peptide
  MOD_RES (2), (36): Xaa is C or S
  MOD_RES (14), (15), (16), (17), (18): Xaa is A or G
  MOD_RES (19), (20), (21), (22): Xaa is A or G or is absent

SEQ ID NO: 49193 - protein, 36 aa, Artificial Sequence; identical to SEQ ID NO: 11892
  GFR-binding peptide
  MOD_RES (34), (34): Xaa is C or S
  MOD_RES (12), (13), (14), (15), (16): Xaa is A or G
  MOD_RES (17), (18), (19), (20): Xaa is A or G or is absent

SEQ ID NO: 49194 - protein, 37 aa, Artificial Sequence; identical to SEQ ID NO: 11893
  GFR-binding peptide
  MOD_RES (2), (34), (35): Xaa is C or S

SEQ ID NO: 49195 - protein, 40 aa, Artificial Sequence
  GFR-binding peptide
  MOD_RES (2), (4), (35), (36): Xaa is C or S
SXKXSRVIMVQVEKVKPKRGVVKAIKVSRLAQPVXXPAAS

SEQ ID NO: 49196 - protein, 38 aa, Artificial Sequence; identical to SEQ ID NO: 11898
  GFR-binding peptide
  MOD_RES (1), (32), (33): Xaa is C or S

SEQ ID NO: 49197 - protein, 36 aa, Artificial Sequence
  GFR-binding peptide
  MOD_RES (1), (34), (35): Xaa is C or S
  MOD_RES (12), (13), (14), (15), (16): Xaa is A or G
  MOD_RES (17), (18), (19), (20): Xaa is A or G or is absent
XSRVIMVTAKKXXXXXXXXXIKRIQVPRLAQPVXXP

SEQ ID NO: 49198 - protein, 34 aa, Artificial Sequence; identical to SEQ ID NO: 17257
  GFR-binding peptide

SEQ ID NO: 49199 - protein, 38 aa, Artificial Sequence
  GFR-binding peptide
  MOD_RES (2), (36), (37): Xaa is C or S
  MOD_RES (14), (15), (16), (17), (18): Xaa is A or G
  MOD_RES (19), (20), (21), (22): Xaa is A or G or is absent
GXSRVVMNVTAKKXXXXXXXXXIKRVQVPRLKTPAXXP

SEQ ID NO: 49200 - protein, 41 aa, Artificial Sequence; identical to SEQ ID NO: 11899
  GFR-binding peptide
  MOD_RES (2), (4), (37), (38): Xaa is C or S
  MOD_RES (15), (16), (17), (18), (19): Xaa is A or G
  MOD_RES (20), (21), (22), (23): Xaa is A or G or is absent

SEQ ID NO: 49201 - protein, 40 aa, Artificial Sequence; identical to SEQ ID NO: 17260
  GFR-binding peptide
  MOD_RES (37), (37): Xaa is C or S

SEQ ID NO: 49202 - protein, 42 aa, Artificial Sequence
  GFR-binding peptide
  MOD_RES (2), (4), (41): Xaa is C or S
AXAXELHEELRNSLQELKPKKRVYEYYVVPLPEHHVRSPQXK

SEQ ID NO: 49203 - protein, 31 aa, Artificial Sequence; identical to SEQ ID NO: 11901
  GFR-binding peptide
  MOD_RES (31), (31): Xaa is C or S

SEQ ID NO: 49204 - protein, 35 aa, Artificial Sequence; identical to SEQ ID NO: 11903
  GFR-binding peptide
  MOD_RES (2), (4), (35): Xaa is C or S

SEQ ID NO: 49205 - protein, 35 aa, Artificial Sequence
  GFR-binding peptide
  MOD_RES (1), (34), (35): Xaa is C or S
  MOD_RES (12), (13), (14), (15), (16): Xaa is A or G
  MOD_RES (17), (18), (19), (20): Xaa is A or G or is absent
XSKVVMVQVEKXXXXXXXXXVKAIKVSRLDQPVXX

SEQ ID NO: 49206 - protein, 33 aa, Artificial Sequence
  GFR-binding peptide
  MOD_RES (1), (3): Xaa is C or S
XKXSKVVMVQVEKVKPTRGVVKAIKVSRLDQPV

SEQ ID NO: 49207 - protein, 38 aa, Artificial Sequence; identical to SEQ ID NO: 11904
  GFR-binding peptide
  MOD_RES (32), (33): Xaa is C or S

SEQ ID NO: 49208 - protein, 32 aa, Artificial Sequence
  GFR-binding peptide
  MOD_RES (11), (12), (13), (14), (15): Xaa is A or G
  MOD_RES (16), (17), (18), (19): Xaa is A or G or is absent
NHQLFNSLQEXXXXXXXXXYYLMTLPEEETPV

SEQ ID NO: 49209 - protein, 41 aa, Artificial Sequence
  GFR-binding peptide
  MOD_RES (1), (3), (35), (36): Xaa is C or S
XGXSRVVMNSMEGIIVNSSDDMIQVTINSLKTPAXXPKPVY

SEQ ID NO: 49210 - protein, 36 aa, Artificial Sequence; identical to SEQ ID NO: 11908
  GFR-binding peptide
  MOD_RES (1), (33), (34): Xaa is C or S

SEQ ID NO: 49211 - protein, 32 aa, Artificial Sequence
  GFR-binding peptide
  MOD_RES (11), (12), (13), (14), (15): Xaa is A or G
  MOD_RES (16), (17), (18), (19): Xaa is A or G or is absent
SKVVMVTAKKXXXXXXXXXIKRIQVPRLDQPV

SEQ ID NO: 49212 - protein, 34 aa, Artificial Sequence
  GFR-binding peptide
  MOD_RES (2), (4): Xaa is C or S
SXKXSRVIMSMEGIVKPKRGVMIQITINSLAQPV

SEQ ID NO: 49213 - protein, 38 aa, Artificial Sequence
  GFR-binding peptide
  MOD_RES (1), (3), (37), (38): Xaa is C or S
  MOD_RES (15), (16), (17), (18), (19): Xaa is A or G
  MOD_RES (20), (21), (22), (23): Xaa is A or G or is absent
XGXGEVVMEVTAKKXXXXXXXXXIKRMQVPRLETPVXX

SEQ ID NO: 49214 - protein, 35 aa, Artificial Sequence
  GFR-binding peptide
  MOD_RES (1), (33): Xaa is C or S
XSRVVMNSMEGIIVNSSDDMIQVTINSLKTPAXTP

SEQ ID NO: 49215 - protein, 36 aa, Artificial Sequence
  GFR-binding peptide
  MOD_RES (1), (35), (36): Xaa is C or S
  MOD_RES (13), (14), (15), (16), (17): Xaa is A or G
  MOD_RES (18), (19), (20), (21): Xaa is A or G or is absent
XGEVVMESMEGIXXXXXXXXXMIQMTINSLETPVXX

SEQ ID NO: 49216 - protein, 34 aa, Artificial Sequence
  GFR-binding peptide
  MOD_RES (33), (33): Xaa is C or S
NHQLFNSLQEHQGQHPKIRYYVMPLPEEETPVXE

SEQ ID NO: 49217 - protein, 37 aa, Artificial Sequence
  GFR-binding peptide
  MOD_RES (2), (4): Xaa is C or S
RXEXKNHQLFNSLQEHQGQHPKIRYYVMPLPEEETPV

SEQ ID NO: 49218 - protein, 35 aa, Artificial Sequence
  GFR-binding peptide
  MOD_RES (34), (35): Xaa is C or S
  MOD_RES (12), (13), (14), (15), (16): Xaa is A or G
  MOD_RES (17), (18), (19), (20): Xaa is A or G or is absent
GEVVMDVTAKKXXXXXXXXXIKRMQVPRLETPVXX

SEQ ID NO: 49219 - protein, 32 aa, Artificial Sequence; identical to SEQ ID NO: 17271
  GFR-binding peptide

SEQ ID NO: 49220 - protein, 37 aa, Artificial Sequence; identical to SEQ ID NO: 11910
  GFR-binding peptide
  MOD_RES (33), (34): Xaa is C or S
  MOD_RES (11), (12), (13), (14), (15): Xaa is A or G
  MOD_RES (16), (17), (18), (19): Xaa is A or G or is absent

SEQ ID NO: 49221 - protein, 38 aa, Artificial Sequence; identical to SEQ ID NO: 17273
  GFR-binding peptide
  MOD_RES (2), (4): Xaa is C or S

SEQ ID NO: 49222 - protein, 39 aa, Artificial Sequence; identical to SEQ ID NO: 11912
  GFR-binding peptide
  MOD_RES (34), (35): Xaa is C or S
  MOD_RES (12), (13), (14), (15), (16): Xaa is A or G
  MOD_RES (17), (18), (19), (20): Xaa is A or G or is absent

SEQ ID NO: 49223 - protein, 41 aa, Artificial Sequence; identical to SEQ ID NO: 17277
  GFR-binding peptide
  MOD_RES (1), (3), (40): Xaa is C or S
  MOD_RES (16), (17), (18), (19), (20): Xaa is A or G
  MOD_RES (21), (22), (23), (24): Xaa is A or G or is absent

SEQ ID NO: 49224 - protein, 37 aa, Artificial Sequence
  GFR-binding peptide
  MOD_RES (2), (34), (35): Xaa is C or S
GXARVVMNVQVEKIVNSSDDVKAVKVSRLQTPAXXPK

SEQ ID NO: 49225 - protein, 38 aa, Artificial Sequence; identical to SEQ ID NO: 17278
  GFR-binding peptide
  MOD_RES (2), (2): Xaa is C or S
  MOD_RES (15), (16), (17), (18), (19): Xaa is A or G
  MOD_RES (20), (21), (22), (23): Xaa is A or G or is absent

SEQ ID NO: 49226 - protein, 35 aa, Artificial Sequence; identical to SEQ ID NO: 11918
  GFR-binding peptide
  MOD_RES (1), (33), (34): Xaa is C or S

SEQ ID NO: 49227 - protein, 36 aa, Artificial Sequence; identical to SEQ ID NO: 11919
  GFR-binding peptide
  MOD_RES (2), (4): Xaa is C or S
  MOD_RES (15), (16), (17), (18), (19): Xaa is A or G
  MOD_RES (20), (21), (22), (23): Xaa is A or G or is absent

SEQ ID NO: 49228 - protein, 38 aa, Artificial Sequence; identical to SEQ ID NO: 35958
  GFR-binding peptide
  MOD_RES (1), (3), (36), (37): Xaa is C or S
  MOD_RES (14), (15), (16), (17), (18): Xaa is A or G
  MOD_RES (19), (20), (21), (22): Xaa is A or G or is absent

SEQ ID NO: 49229 - protein, 39 aa, Artificial Sequence; identical to SEQ ID NO: 17282
  GFR-binding peptide
  MOD_RES (36), (36): Xaa is C or S

SEQ ID NO: 49230 - protein, 33 aa, Artificial Sequence; identical to SEQ ID NO: 17285
  GFR-binding peptide
  MOD_RES (12), (13), (14), (15), (16): Xaa is A or G
  MOD_RES (17), (18), (19), (20): Xaa is A or G or is absent

SEQ ID NO: 49231 - protein, 32 aa, Artificial Sequence
  GFR-binding peptide
  MOD_RES (32), (32): Xaa is C or S
GEVVMEVTAKKVVKDYEDIKRMQVPRLETPVX

SEQ ID NO: 49232 - protein, 33 aa, Artificial Sequence; identical to SEQ ID NO: 11926
  GFR-binding peptide
  MOD_RES (32), (33): Xaa is C or S

SEQ ID NO: 49233 - protein, 41 aa, Artificial Sequence; identical to SEQ ID NO: 17288
  GFR-binding peptide
  MOD_RES (1), (3), (40): Xaa is C or S
  MOD_RES (16), (17), (18), (19), (20): Xaa is A or G
  MOD_RES (21), (22), (23), (24): Xaa is A or G or is absent

SEQ ID NO: 49234 - protein, 39 aa, Artificial Sequence; identical to SEQ ID NO: 17290
  GFR-binding peptide
  MOD_RES (2), (39): Xaa is C or S

SEQ ID NO: 49235 - protein, 35 aa, Artificial Sequence; identical to SEQ ID NO: 11927
  GFR-binding peptide
  MOD_RES (1), (34), (35): Xaa is C or S
  MOD_RES (12), (13), (14), (15), (16): Xaa is A or G
  MOD_RES (17), (18), (19), (20): Xaa is A or G or is absent

SEQ ID NO: 49236 - protein, 37 aa, Artificial Sequence; identical to SEQ ID NO: 11929
  GFR-binding peptide
  MOD_RES (33), (34): Xaa is C or S
  MOD_RES (11), (12), (13), (14), (15): Xaa is A or G
  MOD_RES (16), (17), (18), (19): Xaa is A or G or is absent

SEQ ID NO: 49237 - protein, 35 aa, Artificial Sequence; identical to SEQ ID NO: 11930
  GFR-binding peptide
  MOD_RES (1), (3): Xaa is C or S
  MOD_RES (14), (15), (16), (17), (18): Xaa is A or G
  MOD_RES (19), (20), (21), (22): Xaa is A or G or is absent

SEQ ID NO: 49238 - protein, 41 aa, Artificial Sequence
  GFR-binding peptide
  MOD_RES (2), (4), (38), (39): Xaa is C or S
  MOD_RES (16), (17), (18), (19), (20): Xaa is A or G
  MOD_RES (21), (22), (23), (24): Xaa is A or G or is absent
HXGXARVVMNSMEGIXXXXXXXXXMIQVTINSLQTPAXXPK

SEQ ID NO: 49239 - protein, 36 aa, Artificial Sequence; identical to SEQ ID NO: 11932
  GFR-binding peptide
  MOD_RES (2), (33), (34): Xaa is C or S

SEQ ID NO: 49240 - protein, 36 aa, Artificial Sequence; identical to SEQ ID NO: 11934
  GFR-binding peptide
  MOD_RES (32), (33): Xaa is C or S

SEQ ID NO: 49241 - protein, 37 aa, Artificial Sequence
  GFR-binding peptide
  MOD_RES (32), (33): Xaa is C or S
SRVVMNVQVEKIVNSSDDVKAVKVSRLKTPAXXPKPV

SEQ ID NO: 49242 - protein, 34 aa, Artificial Sequence
  GFR-binding peptide
  MOD_RES (33), (34): Xaa is C or S
  MOD_RES (11), (12), (13), (14), (15): Xaa is A or G
  MOD_RES (16), (17), (18), (19): Xaa is A or G or is absent
EVVMEVTAKKXXXXXXXXXIKRMQVPRLETPVXX

SEQ ID NO: 49243 - protein, 41 aa, Artificial Sequence
  GFR-binding peptide
  MOD_RES (2), (4), (35), (36): Xaa is C or S
SXKXSRVIMVQVEKVKPKRGVVKAIKVSRLAQPVXXPAASA

SEQ ID NO: 49244 - protein, 35 aa, Artificial Sequence
  GFR-binding peptide
  MOD_RES (1), (35): Xaa is C or S
  MOD_RES (13), (14), (15), (16), (17): Xaa is A or G
  MOD_RES (18), (19), (20), (21): Xaa is A or G or is absent
XKNHQLFNSLQEXXXXXXXXXYYLMTLPEEETPVX

SEQ ID NO: 49245 - protein, 37 aa, Artificial Sequence
  GFR-binding peptide
  MOD_RES (1), (3), (36), (37): Xaa is C or S
  MOD_RES (14), (15), (16), (17), (18): Xaa is A or G
  MOD_RES (19), (20), (21), (22): Xaa is A or G or is absent
XKXSKVIMSMEGIXXXXXXXXXMIQITINSLDQSVXX

SEQ ID NO: 49246 - protein, 34 aa, Artificial Sequence
  GFR-binding peptide
  MOD_RES (34), (34): Xaa is C or S
  MOD_RES (12), (13), (14), (15), (16): Xaa is A or G
  MOD_RES (17), (18), (19), (20): Xaa is A or G or is absent
KNHQLFNSLQEXXXXXXXXXYYLMTLPEEETPVX

SEQ ID NO: 49247 - protein, 35 aa, Artificial Sequence; identical to SEQ ID NO: 17300
  GFR-binding peptide
  MOD_RES (1), (1): Xaa is C or S
  MOD_RES (14), (15), (16), (17), (18): Xaa is A or G
  MOD_RES (19), (20), (21), (22): Xaa is A or G or is absent

SEQ ID NO: 49248 - protein, 40 aa, Artificial Sequence; identical to SEQ ID NO: 17301
  GFR-binding peptide
  MOD_RES (36), (36): Xaa is C or S

SEQ ID NO: 49249 - protein, 36 aa, Artificial Sequence
  GFR-binding peptide
  MOD_RES (1), (35): Xaa is C or S
XKNHQLFNSLQEHQGQHPKIRYYLMTLPEEETPVXE

SEQ ID NO: 49250 - protein, 32 aa, Artificial Sequence; identical to SEQ ID NO: 11941
  GFR-binding peptide
  MOD_RES (11), (12), (13), (14), (15): Xaa is A or G
  MOD_RES (16), (17), (18), (19): Xaa is A or G or is absent

SEQ ID NO: 49251 - protein, 34 aa, Artificial Sequence; identical to SEQ ID NO: 11942
  GFR-binding peptide
  MOD_RES (1), (33), (34): Xaa is C or S

SEQ ID NO: 49252 - protein, 34 aa, Artificial Sequence; identical to SEQ ID NO: 17307
  GFR-binding peptide

SEQ ID NO: 49253 - protein, 42 aa, Artificial Sequence; identical to SEQ ID NO: 11945
  GFR-binding peptide
  MOD_RES (1), (3), (36), (37): Xaa is C or S
  MOD_RES (14), (15), (16), (17), (18): Xaa is A or G
  MOD_RES (19), (20), (21), (22): Xaa is A or G or is absent

SEQ ID NO: 49254 - protein, 33 aa, Artificial Sequence; identical to SEQ ID NO: 17308
  GFR-binding peptide
  MOD_RES (12), (13), (14), (15), (16): Xaa is A or G
  MOD_RES (17), (18), (19), (20): Xaa is A or G or is absent

SEQ ID NO: 49255 - protein, 36 aa, Artificial Sequence
  GFR-binding peptide
  MOD_RES (33), (34): Xaa is C or S
  MOD_RES (11), (12), (13), (14), (15): Xaa is A or G
  MOD_RES (16), (17), (18), (19): Xaa is A or G or is absent
RVVMNVTAKKXXXXXXXXXIKRVQVPRLKTPAXXPK

SEQ ID NO: 49256 - protein, 39 aa, Artificial Sequence
  GFR-binding peptide
  MOD_RES (2), (34), (35): Xaa is C or S
GXSRVVMNSMEGIIVNSSDDMIQVTINSLKTPAXXPKPV

SEQ ID NO: 49257 - protein, 32 aa, Artificial Sequence
  GFR-binding peptide
  MOD_RES (31), (32): Xaa is C or S
RVVMNVQVEKIVNSSDDVKAVKVSRLKTPAXX

SEQ ID NO: 49258 - protein, 33 aa, Artificial Sequence; identical to SEQ ID NO: 17310
  GFR-binding peptide
  MOD_RES (12), (13), (14), (15), (16): Xaa is A or G
  MOD_RES (17), (18), (19), (20): Xaa is A or G or is absent

SEQ ID NO: 49259 - protein, 36 aa, Artificial Sequence; identical to SEQ ID NO: 11948
  GFR-binding peptide
  MOD_RES (32), (33): Xaa is C or S

SEQ ID NO: 49260 - protein, 35 aa, Artificial Sequence
  GFR-binding peptide
  MOD_RES (1), (35): Xaa is C or S
  MOD_RES (13), (14), (15), (16), (17): Xaa is A or G
  MOD_RES (18), (19), (20), (21): Xaa is A or G or is absent
XGEVVMESMEGIXXXXXXXXXMIQMTINSLETPVX

SEQ ID NO: 49261 - protein, 35 aa, Artificial Sequence
  GFR-binding peptide
  MOD_RES (13), (14), (15), (16), (17): Xaa is A or G
  MOD_RES (18), (19), (20), (21): Xaa is A or G or is absent
ELHEELRNSLQEXXXXXXXXXYYLVTLPEHHVRSP

SEQ ID NO: 49262 - protein, 36 aa, Artificial Sequence
  GFR-binding peptide
  MOD_RES (34), (35): Xaa is C or S
  MOD_RES (12), (13), (14), (15), (16): Xaa is A or G
  MOD_RES (17), (18), (19), (20): Xaa is A or G or is absent
SRVVMNVQVEKXXXXXXXXXVKAVKVSRLKTPAXXP

SEQ ID NO: 49263 - protein, 42 aa, Artificial Sequence; identical to SEQ ID NO: 11949
  GFR-binding peptide
  MOD_RES (2), (4), (37), (38): Xaa is C or S
  MOD_RES (15), (16), (17), (18), (19): Xaa is A or G
  MOD_RES (20), (21), (22), (23): Xaa is A or G or is absent

SEQ ID NO: 49264 - protein, 41 aa, Artificial Sequence; identical to SEQ ID NO: 11950
  GFR-binding peptide
  MOD_RES (1), (3), (37), (38): Xaa is C or S
  MOD_RES (15), (16), (17), (18), (19): Xaa is A or G
  MOD_RES (20), (21), (22), (23): Xaa is A or G or is absent

SEQ ID NO: 49265 - protein, 38 aa, Artificial Sequence; identical to SEQ ID NO: 11952
  GFR-binding peptide
  MOD_RES (32), (33): Xaa is C or S

SEQ ID NO: 49266 - protein, 40 aa, Artificial Sequence
  GFR-binding peptide
  MOD_RES (1), (38): Xaa is C or S
XELHEELRNSLQELKPKKRVYEYYLVTLPEHHVRSPQXKV

SEQ ID NO: 49267 - protein, 32 aa, Artificial Sequence; identical to SEQ ID NO: 11954
  GFR-binding peptide
  MOD_RES (32), (32): Xaa is C or S

SEQ ID NO: 49268 - protein, 39 aa, Artificial Sequence; identical to SEQ ID NO: 11955
  GFR-binding peptide
  MOD_RES (1), (35), (36): Xaa is C or S
  MOD_RES (13), (14), (15), (16), (17): Xaa is A or G
  MOD_RES (18), (19), (20), (21): Xaa is A or G or is absent

SEQ ID NO: 49269 - protein, 38 aa, Artificial Sequence; identical to SEQ ID NO: 11956
  GFR-binding peptide
  MOD_RES (2), (4), (36): Xaa is C or S

SEQ ID NO: 49270 - protein, 41 aa, Artificial Sequence; identical to SEQ ID NO: 11957
  GFR-binding peptide
  MOD_RES (1), (35), (36): Xaa is C or S
  MOD_RES (13), (14), (15), (16), (17): Xaa is A or G
  MOD_RES (18), (19), (20), (21): Xaa is A or G or is absent

SEQ ID NO: 49271 - protein, 38 aa, Artificial Sequence
  GFR-binding peptide
  MOD_RES (1), (34), (35): Xaa is C or S
  MOD_RES (12), (13), (14), (15), (16): Xaa is A or G
  MOD_RES (17), (18), (19), (20): Xaa is A or G or is absent
XSRVIMVTAKKXXXXXXXXXIKRIQVPRLAQPVXXPAA

SEQ ID NO: 49272 - protein, 34 aa, Artificial Sequence; identical to SEQ ID NO: 17318
  GFR-binding peptide
  MOD_RES (33), (33): Xaa is C or S

SEQ ID NO: 49273 - protein, 37 aa, Artificial Sequence; identical to SEQ ID NO: 17319
  GFR-binding peptide
  MOD_RES (35), (35): Xaa is C or S
  MOD_RES (11), (12), (13), (14), (15): Xaa is A or G
  MOD_RES (16), (17), (18), (19): Xaa is A or G or is absent

SEQ ID NO: 49274 - protein, 42 aa, Artificial Sequence; identical to SEQ ID NO: 11958
  GFR-binding peptide
  MOD_RES (2), (4), (38): Xaa is C or S
  MOD_RES (16), (17), (18), (19), (20): Xaa is A or G
  MOD_RES (21), (22), (23), (24): Xaa is A or G or is absent

SEQ ID NO: 49275 - protein, 40 aa, Artificial Sequence; identical to SEQ ID NO: 11959
  GFR-binding peptide
  MOD_RES (1), (34), (35): Xaa is C or S
  MOD_RES (12), (13), (14), (15), (16): Xaa is A or G
  MOD_RES (17), (18), (19), (20): Xaa is A or G or is absent

SEQ ID NO: 49276 - protein, 37 aa, Artificial Sequence
  GFR-binding peptide
  MOD_RES (31), (32): Xaa is C or S
SKVVMVTAKKVKPTRGVIKRIQVPRLDQPVXXPSASA

SEQ ID NO: 49277 - protein, 42 aa, Artificial Sequence; identical to SEQ ID NO: 11964
  GFR-binding peptide
  MOD_RES (1), (3), (36), (37): Xaa is C or S
  MOD_RES (14), (15), (16), (17), (18): Xaa is A or G
  MOD_RES (19), (20), (21), (22): Xaa is A or G or is absent

SEQ ID NO: 49278 - protein, 42 aa, Artificial Sequence
  GFR-binding peptide
  MOD_RES (2), (4), (38), (39): Xaa is C or S
  MOD_RES (16), (17), (18), (19), (20): Xaa is A or G
  MOD_RES (21), (22), (23), (24): Xaa is A or G or is absent
RXGXGEVVMEVTAKKXXXXXXXXXIKRMQVPRLETPVXXAKP

SEQ ID NO: 49279 - protein, 37 aa, Artificial Sequence; identical to SEQ ID NO: 17326
  GFR-binding peptide
  MOD_RES (33), (33): Xaa is C or S

SEQ ID NO: 49280 - protein, 37 aa, Artificial Sequence
  GFR-binding peptide
  MOD_RES (2), (4), (37): Xaa is C or S
  MOD_RES (15), (16), (17), (18), (19): Xaa is A or G
  MOD_RES (20), (21), (22), (23): Xaa is A or G or is absent
SXKXSRVIMVTAKKXXXXXXXXXIKRIQVPRLAQPVX

SEQ ID NO: 49281 - protein, 38 aa, Artificial Sequence
  GFR-binding peptide
  MOD_RES (2), (4), (35), (36): Xaa is C or S
SXKXSRVIMVQVEKVKPKRGVVKAIKVSRLAQPVXXPA

SEQ ID NO: 49282 - protein, 37 aa, Artificial Sequence
  GFR-binding peptide
  MOD_RES (31), (32): Xaa is C or S
SKVVMVQVEKVKPTRGVVKAIKVSRLDQPVXXPSASA

SEQ ID NO: 49283 - protein, 32 aa, Artificial Sequence
  GFR-binding peptide
  MOD_RES (1), (1): Xaa is C or S
XGEVVMESMEGIVVKDYEDMIQMTINSLETPV

SEQ ID NO: 49284 - protein, 35 aa, Artificial Sequence
  GFR-binding peptide
  MOD_RES (33), (34): Xaa is C or S
  MOD_RES (11), (12), (13), (14), (15): Xaa is A or G
  MOD_RES (16), (17), (18), (19): Xaa is A or G or is absent
EVVMDVQVEKXXXXXXXXXVKAMKVSRLETPVXXA

SEQ ID NO: 49285 - protein, 32 aa, Artificial Sequence
  GFR-binding peptide
  MOD_RES (1), (32): Xaa is C or S
XSRVIMSMEGIVKPKRGVMIQITINSLAQPVX

SEQ ID NO: 49286 - protein, 33 aa, Artificial Sequence; identical to SEQ ID NO: 11970
  GFR-binding peptide
  MOD_RES (2), (33): Xaa is C or S

SEQ ID NO: 49287 - protein, 37 aa, Artificial Sequence; identical to SEQ ID NO: 11972
  GFR-binding peptide
  MOD_RES (34), (35): Xaa is C or S
  MOD_RES (12), (13), (14), (15), (16): Xaa is A or G
  MOD_RES (17), (18), (19), (20): Xaa is A or G or is absent

SEQ ID NO: 49288 - protein, 35 aa, Artificial Sequence; identical to SEQ ID NO: 17332
  GFR-binding peptide
  MOD_RES (1), (1): Xaa is C or S

SEQ ID NO: 49289 - protein, 38 aa, Artificial Sequence; identical to SEQ ID NO: 36034
  GFR-binding peptide
  MOD_RES (33), (34): Xaa is C or S
  MOD_RES (11), (12), (13), (14), (15): Xaa is A or G
  MOD_RES (16), (17), (18), (19): Xaa is A or G or is absent

SEQ ID NO: 49290 - protein, 38 aa, Artificial Sequence; identical to SEQ ID NO: 11976
  GFR-binding peptide
  MOD_RES (1), (3), (35), (36): Xaa is C or S

SEQ ID NO: 49291 - protein, 42 aa, Artificial Sequence
  GFR-binding peptide
  MOD_RES (1), (3), (40): Xaa is C or S
XKXALHDELTNSLQEFIPKKRVIEYYVVPLPELQVQTPRXQV

SEQ ID NO: 49292 - protein, 41 aa, Artificial Sequence
  GFR-binding peptide
  MOD_RES (1), (3), (40): Xaa is C or S
  MOD_RES (16), (17), (18), (19), (20): Xaa is A or G
  MOD_RES (21), (22), (23), (24): Xaa is A or G or is absent
XAXELHEELRNSLQEXXXXXXXXXYYVVPLPEHHVRSPQXK

SEQ ID NO: 49293 - protein, 36 aa, Artificial Sequence
  GFR-binding peptide
  MOD_RES (33), (34): Xaa is C or S
  MOD_RES (11), (12), (13), (14), (15): Xaa is A or G
  MOD_RES (16), (17), (18), (19): Xaa is A or G or is absent
EVVMDVQVEKXXXXXXXXXVKAMKVSRLETPVXXAK

SEQ ID NO: 49294 - protein, 33 aa, Artificial Sequence; identical to SEQ ID NO: 17337
  GFR-binding peptide
  MOD_RES (11), (12), (13), (14), (15): Xaa is A or G
  MOD_RES (16), (17), (18), (19): Xaa is A or G or is absent

SEQ ID NO: 49295 - protein, 37 aa, Artificial Sequence
  GFR-binding peptide
  MOD_RES (31), (32): Xaa is C or S
SRVIMSMEGIVKPKRGVMIQITINSLAQPVXXPAASA

SEQ ID NO: 49296 - protein, 41 aa, Artificial Sequence
  GFR-binding peptide
  MOD_RES (2), (4), (38): Xaa is C or S
  MOD_RES (16), (17), (18), (19), (20): Xaa is A or G
  MOD_RES (21), (22), (23), (24): Xaa is A or G or is absent
RXEXKNHQLFNSLQEXXXXXXXXXYYVMPLPEEETPVXELG

SEQ ID NO: 49297 - protein, 32 aa, Artificial Sequence
  GFR-binding peptide
  MOD_RES (11), (12), (13), (14), (15): Xaa is A or G
  MOD_RES (16), (17), (18), (19): Xaa is A or G or is absent
HEELRNSLQEXXXXXXXXXYYVVPLPEHHVRS

SEQ ID NO: 49298 - protein, 43 aa, Artificial Sequence; identical to SEQ ID NO: 17338
  GFR-binding peptide
  MOD_RES (2), (4), (41): Xaa is C or S
  MOD_RES (17), (18), (19), (20), (21): Xaa is A or G
  MOD_RES (22), (23), (24), (25): Xaa is A or G or is absent

SEQ ID NO: 49299 - protein, 40 aa, Artificial Sequence
  GFR-binding peptide
  MOD_RES (1), (3), (40): Xaa is C or S
  MOD_RES (16), (17), (18), (19), (20): Xaa is A or G
  MOD_RES (21), (22), (23), (24): Xaa is A or G or is absent
XAXELHEELRNSLQEXXXXXXXXXYYVVPLPEHHVRSPQX

SEQ ID NO: 49300 - protein, 35 aa, Artificial Sequence; identical to SEQ ID NO: 11984
  GFR-binding peptide
  MOD_RES (2), (33), (34): Xaa is C or S

SEQ ID NO: 49301 - protein, 39 aa, Artificial Sequence
  GFR-binding peptide
  MOD_RES (2), (36), (37): Xaa is C or S
  MOD_RES (14), (15), (16), (17), (18): Xaa is A or G
  MOD_RES (19), (20), (21), (22): Xaa is A or G or is absent
GXGEVVMDSMEGIXXXXXXXXXMIQMTINSLETPVXXAK

SEQ ID NO: 49302 - protein, 36 aa, Artificial Sequence
  GFR-binding peptide
  MOD_RES (31), (32): Xaa is C or S
SKVVMSMEGIVKPTRGVMIQITINSLDQPVXXPSAS

SEQ ID NO: 49303 - protein, 39 aa, Artificial Sequence; identical to SEQ ID NO: 11987
  GFR-binding peptide
  MOD_RES (1), (3), (36), (37): Xaa is C or S
  MOD_RES (14), (15), (16), (17), (18): Xaa is A or G
  MOD_RES (19), (20), (21), (22): Xaa is A or G or is absent

SEQ ID NO: 49304 - protein, 36 aa, Artificial Sequence
  GFR-binding peptide
  MOD_RES (34), (35): Xaa is C or S
  MOD_RES (12), (13), (14), (15), (16): Xaa is A or G
  MOD_RES (17), (18), (19), (20): Xaa is A or G or is absent
SRVVMNVTAKKXXXXXXXXXIKRVQVPRLKTPAXXP

SEQ ID NO: 49305 - protein, 38 aa, Artificial Sequence
  GFR-binding peptide
  MOD_RES (1), (3): Xaa is C or S
  MOD_RES (16), (17), (18), (19), (20): Xaa is A or G
  MOD_RES (21), (22), (23), (24): Xaa is A or G or is absent
XAXELHEELRNSLQEXXXXXXXXXYYVVPLPEHHVRSP

SEQ ID NO: 49306 - protein, 37 aa, Artificial Sequence; identical to SEQ ID NO: 11988
  GFR-binding peptide
  MOD_RES (2), (33), (34): Xaa is C or S

SEQ ID NO: 49307 - protein, 35 aa, Artificial Sequence
  GFR-binding peptide
  MOD_RES (1), (33), (34): Xaa is C or S
XARVVMNVQVEKIVNSSDDVKAVKVSRLQTPAXXP

SEQ ID NO: 49308 - protein, 40 aa, Artificial Sequence; identical to SEQ ID NO: 17339
  GFR-binding peptide
  MOD_RES (1), (35): Xaa is C or S

SEQ ID NO: 49309 - protein, 36 aa, Artificial Sequence
  GFR-binding peptide
  MOD_RES (1), (3), (34), (35): Xaa is C or S
XKXSKVVMSMEGIVKPTRGVMIQITINSLDQPVXXP

SEQ ID NO: 49310 - protein, 37 aa, Artificial Sequence; identical to SEQ ID NO: 11990
  GFR-binding peptide
  MOD_RES (32), (32): Xaa is C or S

SEQ ID NO: 49311 - protein, 40 aa, Artificial Sequence; identical to SEQ ID NO: 17340
  GFR-binding peptide
  MOD_RES (2), (4): Xaa is C or S

SEQ ID NO: 49312 - protein, 37 aa, Artificial Sequence; identical to SEQ ID NO: 17341
  GFR-binding peptide
  MOD_RES (2), (2): Xaa is C or S

SEQ ID NO: 49313 - protein, 38 aa, Artificial Sequence; identical to SEQ ID NO: 17343
  GFR-binding peptide
  MOD_RES (34), (34): Xaa is C or S
  MOD_RES (12), (13), (14), (15), (16): Xaa is A or G
  MOD_RES (17), (18), (19), (20): Xaa is A or G or is absent

SEQ ID NO: 49314 - protein, 38 aa, Artificial Sequence
  GFR-binding peptide
  MOD_RES (1), (3), (37), (38): Xaa is C or S
  MOD_RES (15), (16), (17), (18), (19): Xaa is A or G
  MOD_RES (20), (21), (22), (23): Xaa is A or G or is absent
XGXSRVVMNVTAKKXXXXXXXXXIKRVQVPRLKTPAXX

SEQ ID NO: 49315 - protein, 35 aa, Artificial Sequence; identical to SEQ ID NO: 17345
  GFR-binding peptide
  MOD_RES (2), (2): Xaa is C or S

SEQ ID NO: 49316 - protein, 32 aa, Artificial Sequence; identical to SEQ ID NO: 11994
  GFR-binding peptide
  MOD_RES (31), (32): Xaa is C or S

SEQ ID NO: 49317 - protein, 42 aa, Artificial Sequence; identical to SEQ ID NO: 17348
  GFR-binding peptide
  MOD_RES (2), (39): Xaa is C or S
  MOD_RES (15), (16), (17), (18), (19): Xaa is A or G
  MOD_RES (20), (21), (22), (23): Xaa is A or G or is absent

SEQ ID NO: 49318 - protein, 38 aa, Artificial Sequence
  GFR-binding peptide
  MOD_RES (33), (34): Xaa is C or S
  MOD_RES (11), (12), (13), (14), (15): Xaa is A or G
  MOD_RES (16), (17), (18), (19): Xaa is A or G or is absent
SRVIMVQVEKXXXXXXXXXVKAIKVSRLAQPVXXPAAS

SEQ ID NO: 49319 - protein, 41 aa, Artificial Sequence; identical to SEQ ID NO: 11995
  GFR-binding peptide
  MOD_RES (2), (4), (36), (37): Xaa is C or S

SEQ ID NO: 49320 - protein, 37 aa, Artificial Sequence; identical to SEQ ID NO: 11996
  GFR-binding peptide
  MOD_RES (34), (35): Xaa is C or S
  MOD_RES (12), (13), (14), (15), (16): Xaa is A or G
  MOD_RES (17), (18), (19), (20): Xaa is A or G or is absent

SEQ ID NO: 49321 - protein, 35 aa, Artificial Sequence
  GFR-binding peptide
  MOD_RES (33), (34): Xaa is C or S
  MOD_RES (11), (12), (13), (14), (15): Xaa is A or G
  MOD_RES (16), (17), (18), (19): Xaa is A or G or is absent
RVVMNVTAKKXXXXXXXXXIKRVQVPRLKTPAXXP

SEQ ID NO: 49322 - protein, 35 aa, Artificial Sequence; identical to SEQ ID NO: 11997
  GFR-binding peptide
  MOD_RES (2), (4), (35): Xaa is C or S

SEQ ID NO: 49323 - protein, 42 aa, Artificial Sequence; identical to SEQ ID NO: 17351
  GFR-binding peptide
  MOD_RES (2), (39): Xaa is C or S

SEQ ID NO: 49324 - protein, 37 aa, Artificial Sequence
  GFR-binding peptide
  MOD_RES (1), (34), (35): Xaa is C or S
  MOD_RES (12), (13), (14), (15), (16): Xaa is A or G
  MOD_RES (17), (18), (19), (20): Xaa is A or G or is absent
XSKVIMVTAKKXXXXXXXXXIKRIQVPRLDQSVXXPS

SEQ ID NO: 49325 - protein, 34 aa, Artificial Sequence
  GFR-binding peptide
  MOD_RES (31), (32): Xaa is C or S
EVVMEVQVEKVVKDYEDVKAMKVSRLETPVXXAK

SEQ ID NO: 49326 - protein, 40 aa, Artificial Sequence; identical to SEQ ID NO: 12000
  GFR-binding peptide
  MOD_RES (2), (34), (35): Xaa is C or S

SEQ ID NO: 49327 - protein, 34 aa, Artificial Sequence
  GFR-binding peptide
  MOD_RES (2), (33), (34): Xaa is C or S
KXSKVVMSMEGIVKPTRGVMIQITINSLDQPVXX

SEQ ID NO: 49328 - protein, 35 aa, Artificial Sequence; identical to SEQ ID NO: 12001
  GFR-binding peptide
  MOD_RES (2), (2): Xaa is C or S
  MOD_RES (14), (15), (16), (17), (18): Xaa is A or G
  MOD_RES (19), (20), (21), (22): Xaa is A or G or is absent

SEQ ID NO: 49329 - protein, 44 aa, Artificial Sequence
  GFR-binding peptide
  MOD_RES (1), (3), (40): Xaa is C or S
  MOD_RES (16), (17), (18), (19), (20): Xaa is A or G
  MOD_RES (21), (22), (23), (24): Xaa is A or G or is absent
XAXELHEELRNSLQEXXXXXXXXXYYLVTLPEHHVRSPQXKVSS

SEQ ID NO: 49330 - protein, 37 aa, Artificial Sequence
  GFR-binding peptide
  MOD_RES (2), (4): Xaa is C or S
  MOD_RES (16), (17), (18), (19), (20): Xaa is A or G
  MOD_RES (21), (22), (23), (24): Xaa is A or G or is absent
RXGXGEVVMESMEGIXXXXXXXXXMIQMTINSLETPV

SEQ ID NO: 49331 - protein, 36 aa, Artificial Sequence
  GFR-binding peptide
  MOD_RES (31), (32): Xaa is C or S
SRVIMVQVEKVKPKRGVVKAIKVSRLAQPVXXPAAS

SEQ ID NO: 49332 - protein, 40 aa, Artificial Sequence; identical to SEQ ID NO: 12004
  GFR-binding peptide
  MOD_RES (2), (34), (35): Xaa is C or S

SEQ ID NO: 49333 - protein, 41 aa, Artificial Sequence; identical to SEQ ID NO: 17355
  GFR-binding peptide
  MOD_RES (1), (35): Xaa is C or S

SEQ ID NO: 49334 - protein, 33 aa, Artificial Sequence; identical to SEQ ID NO: 12005
  GFR-binding peptide
  MOD_RES (32), (33): Xaa is C or S

SEQ ID NO: 49335 - protein, 36 aa, Artificial Sequence
  GFR-binding peptide
  MOD_RES (2), (4), (35), (36): Xaa is C or S
SXKXSRVIMVQVEKVKPKRGVVKAIKVSRLAQPVXX

SEQ ID NO: 49336 - protein, 41 aa, Artificial Sequence; identical to SEQ ID NO: 17356
  GFR-binding peptide
  MOD_RES (2), (4), (41): Xaa is C or S
  MOD_RES (17), (18), (19), (20), (21): Xaa is A or G
  MOD_RES (22), (23), (24), (25): Xaa is A or G or is absent

SEQ ID NO: 49337 - protein, 39 aa, Artificial Sequence; identical to SEQ ID NO: 17357
  GFR-binding peptide
  MOD_RES (1), (3): Xaa is C or S

SEQ ID NO: 49338 - protein, 38 aa, Artificial Sequence
  GFR-binding peptide
  MOD_RES (1), (3), (36), (37): Xaa is C or S
  MOD_RES (14), (15), (16), (17), (18): Xaa is A or G
  MOD_RES (19), (20), (21), (22): Xaa is A or G or is absent
XKXSKVVMVTAKKXXXXXXXXXIKRIQVPRLDQPVXXP

SEQ ID NO: 49339 - protein, 39 aa, Artificial Sequence
  GFR-binding peptide
  MOD_RES (1), (3), (34), (35): Xaa is C or S
XKXSRVIMVQVEKVKPKRGVVKAIKVSRLAQPVXXPAAS

SEQ ID NO: 49340 - protein, 41 aa, Artificial Sequence
  GFR-binding peptide
  MOD_RES (1), (3), (37), (38): Xaa is C or S
  MOD_RES (15), (16), (17), (18), (19): Xaa is A or G
  MOD_RES (20), (21), (22), (23): Xaa is A or G or is absent
XGXGEVVMDSMEGIXXXXXXXXXMIQMTINSLETPVXXAKP

SEQ ID NO: 49341 - protein, 33 aa, Artificial Sequence
  GFR-binding peptide
  MOD_RES (2), (33): Xaa is C or S
KXSKVIMVTAKKIKPTKGIIKRIQVPRLDQSVX

SEQ ID NO: 49342 - protein, 45 aa, Artificial Sequence
  GFR-binding peptide
  MOD_RES (2), (4), (41): Xaa is C or S
  MOD_RES (17), (18), (19), (20), (21): Xaa is A or G
  MOD_RES (22), (23), (24), (25): Xaa is A or G or is absent
EXKXALHDELTNSLQEXXXXXXXXXYYLVTLPELQVQTPRXQVNR

SEQ ID NO: 49343 - protein, 36 aa, Artificial Sequence
  GFR-binding peptide
  MOD_RES (1), (3): Xaa is C or S
  MOD_RES (15), (16), (17), (18), (19): Xaa is A or G
  MOD_RES (20), (21), (22), (23): Xaa is A or G or is absent
XGXGEVVMDSMEGIXXXXXXXXXMIQMTINSLETPV

SEQ ID NO: 49344 - protein, 42 aa, Artificial Sequence; identical to SEQ ID NO: 17360
  GFR-binding peptide
  MOD_RES (2), (4), (41): Xaa is C or S
  MOD_RES (17), (18), (19), (20), (21): Xaa is A or G
  MOD_RES (22), (23), (24), (25): Xaa is A or G or is absent

SEQ ID NO: 49345 - protein, 35 aa, Artificial Sequence
  GFR-binding peptide
  MOD_RES (1), (32), (33): Xaa is C or S
XSKVIMSMEGIIKPTKGIMIQITINSLDQSVXXPS

SEQ ID NO: 49346 - protein, 35 aa, Artificial Sequence; identical to SEQ ID NO: 12008
  GFR-binding peptide
  MOD_RES (1), (35): Xaa is C or S
  MOD_RES (13), (14), (15), (16), (17): Xaa is A or G
  MOD_RES (18), (19), (20), (21): Xaa is A or G or is absent

SEQ ID NO: 49347 - protein, 41 aa, Artificial Sequence; identical to SEQ ID NO: 12010
  GFR-binding peptide
  MOD_RES (2), (36), (37): Xaa is C or S
  MOD_RES (14), (15), (16), (17), (18): Xaa is A or G
  MOD_RES (19), (20), (21), (22): Xaa is A or G or is absent

SEQ ID NO: 49348 - protein, 36 aa, Artificial Sequence
  GFR-binding peptide
  MOD_RES (31), (32): Xaa is C or S
SRVIMSMEGIVKPKRGVMIQITINSLAQPVXXPAAS

SEQ ID NO: 49349 - protein, 34 aa, Artificial Sequence
  GFR-binding peptide
  MOD_RES (1), (32), (33): Xaa is C or S
XSKVIMVTAKKIKPTKGIIKRIQVPRLDQSVXXP

SEQ ID NO: 49350 - protein, 34 aa, Artificial Sequence
  GFR-binding peptide
  MOD_RES (32), (33): Xaa is C or S
ARVVMNVQVEKIVNSSDDVKAVKVSRLQTPAXXP

SEQ ID NO: 49351 - protein, 36 aa, Artificial Sequence
  GFR-binding peptide
  MOD_RES (1), (3), (35), (36): Xaa is C or S
XGXSRVVMNSMEGIIVNSSDDMIQVTINSLKTPAXX

SEQ ID NO: 49352 - protein, 36 aa, Artificial Sequence
  GFR-binding peptide
  MOD_RES (1), (35), (36): Xaa is C or S
  MOD_RES (13), (14), (15), (16), (17): Xaa is A or G
  MOD_RES (18), (19), (20), (21): Xaa is A or G or is absent
XGEVVMDVTAKKXXXXXXXXXIKRMQVPRLETPVXX

SEQ ID NO: 49353 - protein, 39 aa, Artificial Sequence
  GFR-binding peptide
  MOD_RES (37), (37): Xaa is C or S
ELHEELRNSLQELKPKKRVYEYYVVPLPEHHVRSPQXKV

SEQ ID NO: 49354 - protein, 39 aa, Artificial Sequence
  GFR-binding peptide
  MOD_RES (2), (34), (35): Xaa is C or S
GXARVVMNVQVEKIVNSSDDVKAVKVSRLQTPAXXPKPV

SEQ ID NO: 49355 - protein, 39 aa, Artificial Sequence; identical to SEQ ID NO: 12016
  GFR-binding peptide
  MOD_RES (33), (34): Xaa is C or S
  MOD_RES (11), (12), (13), (14), (15): Xaa is A or G
  MOD_RES (16), (17), (18), (19): Xaa is A or G or is absent

SEQ ID NO: 49356 - protein, 41 aa, Artificial Sequence
  GFR-binding peptide
  MOD_RES (1), (3), (37), (38): Xaa is C or S
  MOD_RES (15), (16), (17), (18), (19): Xaa is A or G
  MOD_RES (20), (21), (22), (23): Xaa is A or G or is absent
XGXGEVVMESMEGIXXXXXXXXXMIQMTINSLETPVXXAKP

SEQ ID NO: 49357 - protein, 40 aa, Artificial Sequence
  GFR-binding peptide
  MOD_RES (2), (39): Xaa is C or S
KXALHDELTNSLQEFIPKKRVIEYYVVPLPELQVQTPRXQ

SEQ ID NO: 49358 - protein, 37 aa, Artificial Sequence
  GFR-binding peptide
  MOD_RES (2), (36): Xaa is C or S
EXKNHQLFNSLQEHQGQHPKIRYYVMPLPEEETPVXE

SEQ ID NO: 49359 - protein, 34 aa, Artificial Sequence; identical to SEQ ID NO: 17367
  GFR-binding peptide
  MOD_RES (34), (34): Xaa is C or S
  MOD_RES (12), (13), (14), (15), (16): Xaa is A or G
  MOD_RES (17), (18), (19), (20): Xaa is A or G or is absent

SEQ ID NO: 49360 - protein, 37 aa, Artificial Sequence; identical to SEQ ID NO: 17368
  GFR-binding peptide
  MOD_RES (37), (37): Xaa is C or S
  MOD_RES (13), (14), (15), (16), (17): Xaa is A or G
  MOD_RES (18), (19), (20), (21): Xaa is A or G or is absent

SEQ ID NO: 49361 - protein, 36 aa, Artificial Sequence
  GFR-binding peptide
  MOD_RES (1), (3): Xaa is C or S
  MOD_RES (15), (16), (17), (18), (19): Xaa is A or G
  MOD_RES (20), (21), (22), (23): Xaa is A or G or is absent
XGXGEVVMESMEGIXXXXXXXXXMIQMTINSLETPV

SEQ ID NO: 49362 - protein, 37 aa, Artificial Sequence
  GFR-binding peptide
  MOD_RES (32), (33): Xaa is C or S
GEVVMDVQVEKVVKENEDVKAMKVSRLETPVXXAKPI

SEQ ID NO: 49363 - protein, 36 aa, Artificial Sequence
  GFR-binding peptide
  MOD_RES (1), (3), (36): Xaa is C or S
  MOD_RES (14), (15), (16), (17), (18): Xaa is A or G
  MOD_RES (19), (20), (21), (22): Xaa is A or G or is absent
XKXSKVIMSMEGIXXXXXXXXXMIQITINSLDQSVX

SEQ ID NO: 49364 - protein, 35 aa, Artificial Sequence; identical to SEQ ID NO: 12029
  GFR-binding peptide
  MOD_RES (32), (32): Xaa is C or S

SEQ ID NO: 49365 - protein, 36 aa, Artificial Sequence; identical to SEQ ID NO: 12032
  GFR-binding peptide
  MOD_RES (1), (32), (33): Xaa is C or S

SEQ ID NO: 49366 - protein, 38 aa, Artificial Sequence
  GFR-binding peptide
  MOD_RES (2), (4), (38): Xaa is C or S
  MOD_RES (16), (17), (18), (19), (20): Xaa is A or G
  MOD_RES (21), (22), (23), (24): Xaa is A or G or is absent
RXGXGEVVMDSMEGIXXXXXXXXXMIQMTINSLETPVX

SEQ ID NO: 49367 - protein, 38 aa, Artificial Sequence
  GFR-binding peptide
  MOD_RES (2), (4), (38): Xaa is C or S
  MOD_RES (16), (17), (18), (19), (20): Xaa is A or G
  MOD_RES (21), (22), (23), (24): Xaa is A or G or is absent
RXGXGEVVMEVQVEKXXXXXXXXXVKAMKVSRLETPVX

SEQ ID NO: 49368 - protein, 38 aa, Artificial Sequence
  GFR-binding peptide
  MOD_RES (1), (38): Xaa is C or S
XELHEELRNSLQELKPKKRVYEYYLVTLPEHHVRSPQX

SEQ ID NO: 49369 - protein, 34 aa, Artificial Sequence
  GFR-binding peptide
  MOD_RES (2), (34): Xaa is C or S
GXGEVVMESMEGIVVKDYEDMIQMTINSLETPVX

SEQ ID NO: 49370 - protein, 37 aa, Artificial Sequence
  GFR-binding peptide
  MOD_RES (31), (32): Xaa is C or S
EVVMEVTAKKVVKDYEDIKRMQVPRLETPVXXAKPIS

SEQ ID NO: 49371 - protein, 42 aa, Artificial Sequence
  GFR-binding peptide
  MOD_RES (2), (36), (37): Xaa is C or S
  MOD_RES (14), (15), (16), (17), (18): Xaa is A or G
  MOD_RES (19), (20), (21), (22): Xaa is A or G or is absent
GXSRVVMNVTAKKXXXXXXXXXIKRVQVPRLKTPAXXPKPVY

SEQ ID NO: 49372 - protein, 43 aa, Artificial Sequence
  GFR-binding peptide
  MOD_RES (2), (4), (38): Xaa is C or S
  MOD_RES (16), (17), (18), (19), (20): Xaa is A or G
  MOD_RES (21), (22), (23), (24): Xaa is A or G or is absent
HXGXSRVVMNVQVEKXXXXXXXXXVKAVKVSRLKTPAXTPKTV

SEQ ID NO: 49373 - protein, 37 aa, Artificial Sequence
  GFR-binding peptide
  MOD_RES (2), (4), (35), (36): Xaa is C or S
SXKXSKVVMSMEGIVKPTRGVMIQITINSLDQPVXXP

SEQ ID NO: 49374 - protein, 38 aa, Artificial Sequence
  GFR-binding peptide
  MOD_RES (1), (3): Xaa is C or S
  MOD_RES (16), (17), (18), (19), (20): Xaa is A or G
  MOD_RES (21), (22), (23), (24): Xaa is A or G or is absent
XKXALHDELTNSLQEXXXXXXXXXYYVVPLPELQVQTP

SEQ ID NO: 49375 - protein, 37 aa, Artificial Sequence
  GFR-binding peptide
  MOD_RES (2), (34), (35): Xaa is C or S
GXSRVVMNVQVEKIVNSSDDVKAVKVSRLKTPAXXPK

SEQ ID NO: 49376 - protein, 34 aa, Artificial Sequence
  GFR-binding peptide
HEELRNSLQELKPKKRVYEYYLVTLPEHHVRSPQ

SEQ ID NO: 49377 - protein, 38 aa, Artificial Sequence
  GFR-binding peptide
  MOD_RES (2), (4), (38): Xaa is C or S
RXEXKNHQLFNSLQEHQGQHPKIRYYVMPLPEEETPVX

SEQ ID NO: 49378 - protein, 41 aa, Artificial Sequence
  GFR-binding peptide
  MOD_RES (2), (39): Xaa is C or S
  MOD_RES (15), (16), (17), (18), (19): Xaa is A or G
  MOD_RES (20), (21), (22), (23): Xaa is A or G or is absent
KXALHDELTNSLQEXXXXXXXXXYYVVPLPELQVQTPRXQV

SEQ ID NO: 49379 - protein, 36 aa, Artificial Sequence; identical to SEQ ID NO: 12039
  GFR-binding peptide
  MOD_RES (2), (34): Xaa is C or S

SEQ ID NO: 49380 - protein, 34 aa, Artificial Sequence; identical to SEQ ID NO: 17380
  GFR-binding peptide

SEQ ID NO: 49381 - protein, 33 aa, Artificial Sequence
  GFR-binding peptide
HDELTNSLQEFIPKKRVIEYYLVTLPELQVQTP

SEQ ID NO: 49382 - protein, 37 aa, Artificial Sequence; identical to SEQ ID NO: 12040
  GFR-binding peptide
  MOD_RES (1), (3), (34), (35): Xaa is C or S

SEQ ID NO: 49383 - protein, 39 aa, Artificial Sequence; identical to SEQ ID NO: 12041
  GFR-binding peptide
  MOD_RES (1), (3), (35): Xaa is C or S

SEQ ID NO: 49384 - protein, 34 aa, Artificial Sequence; identical to SEQ ID NO: 12042
  GFR-binding peptide
  MOD_RES (31), (32): Xaa is C or S

SEQ ID NO: 49385 - protein, 39 aa, Artificial Sequence
  GFR-binding peptide
  MOD_RES (1), (33), (34): Xaa is C or S
XGEVVMDSMEGIVVKENEDMIQMTINSLETPVXXAKPIK

SEQ ID NO: 49386 - protein, 38 aa, Artificial Sequence; identical to SEQ ID NO: 17382
  GFR-binding peptide
  MOD_RES (1), (3), (37): Xaa is C or S

SEQ ID NO: 49387 - protein, 36 aa, Artificial Sequence
  GFR-binding peptide
  MOD_RES (34), (35): Xaa is C or S
  MOD_RES (12), (13), (14), (15), (16): Xaa is A or G
  MOD_RES (17), (18), (19), (20): Xaa is A or G or is absent
ARVVMNVQVEKXXXXXXXXXVKAVKVSRLQTPAXXP

SEQ ID NO: 49388 - protein, 36 aa, Artificial Sequence; identical to SEQ ID NO: 17385
  GFR-binding peptide
  MOD_RES (35), (35): Xaa is C or S
  MOD_RES (11), (12), (13), (14), (15): Xaa is A or G
  MOD_RES (16), (17), (18), (19): Xaa is A or G or is absent

SEQ ID NO: 49389 - protein, 41 aa, Artificial Sequence; identical to SEQ ID NO: 17388
  GFR-binding peptide
  MOD_RES (1), (38): Xaa is C or S
  MOD_RES (14), (15), (16), (17), (18): Xaa is A or G
  MOD_RES (19), (20), (21), (22): Xaa is A or G or is absent

SEQ ID NO: 49390 - protein, 32 aa, Artificial Sequence
  GFR-binding peptide
  MOD_RES (1), (1): Xaa is C or S
XARVVMNVTAKKIVNSSDDIKRVQVPRLQTPA

SEQ ID NO: 49391 - protein, 37 aa, Artificial Sequence; identical to SEQ ID NO: 12048
  GFR-binding peptide
  MOD_RES (33), (34): Xaa is C or S
  MOD_RES (11), (12), (13), (14), (15): Xaa is A or G
  MOD_RES (16), (17), (18), (19): Xaa is A or G or is absent

SEQ ID NO: 49392 - protein, 38 aa, Artificial Sequence; identical to SEQ ID NO: 36148
  GFR-binding peptide
  MOD_RES (1), (34), (35): Xaa is C or S
  MOD_RES (12), (13), (14), (15), (16): Xaa is A or G
  MOD_RES (17), (18), (19), (20): Xaa is A or G or is absent

SEQ ID NO: 49393 - protein, 42 aa, Artificial Sequence; identical to SEQ ID NO: 12049
  GFR-binding peptide
  MOD_RES (2), (36), (37): Xaa is C or S
  MOD_RES (14), (15), (16), (17), (18): Xaa is A or G
  MOD_RES (19), (20), (21), (22): Xaa is A or G or is absent

SEQ ID NO: 49394 - protein, 33 aa, Artificial Sequence
  GFR-binding peptide
HDELTNSLQEFIPKKRVIEYYVVPLPELQVQTP

SEQ ID NO: 49395 - protein, 34 aa, Artificial Sequence
  GFR-binding peptide
  MOD_RES (1), (3): Xaa is C or S
XGXSRVVMNVTAKKIVNSSDDIKRVQVPRLKTPA

SEQ ID NO: 49396 - protein, 36 aa, Artificial Sequence
  GFR-binding peptide
  MOD_RES (1), (3): Xaa is C or S
  MOD_RES (15), (16), (17), (18), (19): Xaa is A or G
  MOD_RES (20), (21), (22), (23): Xaa is A or G or is absent
XGXSRVVMNVQVEKXXXXXXXXXVKAVKVSRLKTPA

SEQ ID NO: 49397 - protein, 37 aa, Artificial Sequence
  GFR-binding peptide
  MOD_RES (37), (37): Xaa is C or S
ALHDELTNSLQEFIPKKRVIEYYVVPLPELQVQTPRX

SEQ ID NO: 49398 - protein, 34 aa, Artificial Sequence
  GFR-binding peptide
  MOD_RES (2), (33), (34): Xaa is C or S
KXSRVIMVQVEKVKPKRGVVKAIKVSRLAQPVXX

SEQ ID NO: 49399 - protein, 33 aa, Artificial Sequence; identical to SEQ ID NO: 12052
  GFR-binding peptide
  MOD_RES (1), (32), (33): Xaa is C or S

SEQ ID NO: 49400 - protein, 35 aa, Artificial Sequence; identical to SEQ ID NO: 17389
  GFR-binding peptide
  MOD_RES (33), (33): Xaa is C or S
  MOD_RES (11), (12), (13), (14), (15): Xaa is A or G
  MOD_RES (16), (17), (18), (19): Xaa is A or G or is absent

SEQ ID NO: 49401 - protein, 33 aa, Artificial Sequence; identical to SEQ ID NO: 12053
  GFR-binding peptide
  MOD_RES (31), (32): Xaa is C or S

SEQ ID NO: 49402 - protein, 36 aa, Artificial Sequence
  GFR-binding peptide
  MOD_RES (31), (32): Xaa is C or S
SKVVMVQVEKVKPTRGVVKAIKVSRLDQPVXXPSAS

SEQ ID NO: 49403 - protein, 43 aa, Artificial Sequence; identical to SEQ ID NO: 17390
  GFR-binding peptide
  MOD_RES (2), (4), (38): Xaa is C or S

SEQ ID NO: 49404 - protein, 40 aa, Artificial Sequence; identical to SEQ ID NO: 17391
  GFR-binding peptide
  MOD_RES (1), (3), (40): Xaa is C or S

SEQ ID NO: 49405 - protein, 38 aa, Artificial Sequence; identical to SEQ ID NO: 12057
  GFR-binding peptide
  MOD_RES (2), (35), (36): Xaa is C or S
  MOD_RES (13), (14), (15), (16), (17): Xaa is A or G
  MOD_RES (18), (19), (20), (21): Xaa is A or G or is absent

SEQ ID NO: 49406 - protein, 37 aa, Artificial Sequence
  GFR-binding peptide
  MOD_RES (31), (32): Xaa is C or S
SRVIMVQVEKVKPKRGVVKAIKVSRLAQPVXXPAASA

SEQ ID NO: 49407 - protein, 38 aa, Artificial Sequence; identical to SEQ ID NO: 12059
  GFR-binding peptide
  MOD_RES (1), (33), (34): Xaa is C or S

SEQ ID NO: 49408 - protein, 35 aa, Artificial Sequence
  GFR-binding peptide
  MOD_RES (2), (33), (34): Xaa is C or S
KXSKVVMVTAKKVKPTRGVIKRIQVPRLDQPVXXP

SEQ ID NO: 49409 - protein, 44 aa, Artificial Sequence
  GFR-binding peptide
  MOD_RES (2), (4), (38), (39): Xaa is C or S
  MOD_RES (16), (17), (18), (19), (20): Xaa is A or G
  MOD_RES (21), (22), (23), (24): Xaa is A or G or is absent
HXGXSRVVMNVTAKKXXXXXXXXXIKRVQVPRLKTPAXXPKPVY

SEQ ID NO: 49410 - protein, 37 aa, Artificial Sequence
  GFR-binding peptide
  MOD_RES (2), (36), (37): Xaa is C or S
  MOD_RES (14), (15), (16), (17), (18): Xaa is A or G
  MOD_RES (19), (20), (21), (22): Xaa is A or G or is absent
GXGEVVMESMEGIXXXXXXXXXMIQMTINSLETPVXX

SEQ ID NO: 49411 - protein, 37 aa, Artificial Sequence; identical to SEQ ID NO: 12061
  GFR-binding peptide
  MOD_RES (1), (3), (36), (37): Xaa is C or S
  MOD_RES (14), (15), (16), (17), (18): Xaa is A or G
  MOD_RES (19), (20), (21), (22): Xaa is A or G or is absent

SEQ ID NO: 49412 - protein, 36 aa, Artificial Sequence; identical to SEQ ID NO: 12062
  GFR-binding peptide
  MOD_RES (32), (33): Xaa is C or S

SEQ ID NO: 49413 - protein, 36 aa, Artificial Sequence
  GFR-binding peptide
  MOD_RES (2), (4), (36): Xaa is C or S
RXGXGEVVMEVQVEKVVKDYEDVKAMKVSRLETPVX

SEQ ID NO: 49414 - protein, 34 aa, Artificial Sequence
  GFR-binding peptide
  MOD_RES (1), (3): Xaa is C or S
XGXARVVMNVQVEKIVNSSDDVKAVKVSRLQTPA

SEQ ID NO: 49415 - protein, 34 aa, Artificial Sequence; identical to SEQ ID NO: 12064
  GFR-binding peptide
  MOD_RES (1), (32), (33): Xaa is C or S

SEQ ID NO: 49416 - protein, 35 aa, Artificial Sequence
  GFR-binding peptide
  MOD_RES (2), (2): Xaa is C or S
  MOD_RES (14), (15), (16), (17), (18): Xaa is A or G
  MOD_RES (19), (20), (21), (22): Xaa is A or G or is absent
GXARVVMNSMEGIXXXXXXXXXMIQVTINSLQTPA

SEQ ID NO: 49417 - protein, 40 aa, Artificial Sequence; identical to SEQ ID NO: 12065
  GFR-binding peptide
  MOD_RES (34), (34): Xaa is C or S
  MOD_RES (12), (13), (14), (15), (16): Xaa is A or G
  MOD_RES (17), (18), (19), (20): Xaa is A or G or is absent

SEQ ID NO: 49418 - protein, 37 aa, Artificial Sequence
  GFR-binding peptide
  MOD_RES (32), (33): Xaa is C or S
SRVVMNVTAKKIVNSSDDIKRVQVPRLKTPAXXPKPV

SEQ ID NO: 49419 - protein, 38 aa, Artificial Sequence
  GFR-binding peptide
  MOD_RES (1), (33): Xaa is C or S
XSRVVMNVQVEKIVNSSDDVKAVKVSRLKTPAXTPKTV

SEQ ID NO: 49420 - protein, 34 aa, Artificial Sequence
  GFR-binding peptide
  MOD_RES (33), (34): Xaa is C or S
  MOD_RES (11), (12), (13), (14), (15): Xaa is A or G
  MOD_RES (16), (17), (18), (19): Xaa is A or G or is absent
SRVIMVQVEKXXXXXXXXXVKAIKVSRLAQPVXX

SEQ ID NO: 49421 - protein, 32 aa, Artificial Sequence
  GFR-binding peptide
  MOD_RES (11), (12), (13), (14), (15): Xaa is A or G
  MOD_RES (16), (17), (18), (19): Xaa is A or G or is absent
NHQLFNSLQEXXXXXXXXXYYVMPLPEEETPV

SEQ ID NO: 49422 - protein, 36 aa, Artificial Sequence
  GFR-binding peptide
  MOD_RES (2), (34): Xaa is C or S
GXSRVVMNVQVEKIVNSSDDVKAVKVSRLKTPAXTP

SEQ ID NO: 49423 - protein, 34 aa, Artificial Sequence; identical to SEQ ID NO: 12068
  GFR-binding peptide
  MOD_RES (2), (2): Xaa is C or S
  MOD_RES (13), (14), (15), (16), (17): Xaa is A or G
  MOD_RES (18), (19), (20), (21): Xaa is A or G or is absent

SEQ ID NO: 49424 - protein, 39 aa, Artificial Sequence
  GFR-binding peptide
  MOD_RES (1), (38): Xaa is C or S
  MOD_RES (14), (15), (16), (17), (18): Xaa is A or G
  MOD_RES (19), (20), (21), (22): Xaa is A or G or is absent
XALHDELTNSLQEXXXXXXXXXYYLVTLPELQVQTPRXQ

SEQ ID NO: 49425 - protein, 39 aa, Artificial Sequence; identical to SEQ ID NO: 12069
  GFR-binding peptide
  MOD_RES (1), (34), (35): Xaa is C or S
  MOD_RES (12), (13), (14), (15), (16): Xaa is A or G
  MOD_RES (17), (18), (19), (20): Xaa is A or G or is absent

SEQ ID NO: 49426 - protein, 37 aa, Artificial Sequence
  GFR-binding peptide
  MOD_RES (2), (4), (37): Xaa is C or S
  MOD_RES (15), (16), (17), (18), (19): Xaa is A or G
  MOD_RES (20), (21), (22), (23): Xaa is A or G or is absent
SXKXSKVIMSMEGIXXXXXXXXXMIQITINSLDQSVX

SEQ ID NO: 49427 - protein, 39 aa, Artificial Sequence; identical to SEQ ID NO: 12070
  GFR-binding peptide
  MOD_RES (1), (3), (34), (35): Xaa is C or S

SEQ ID NO: 49428 - protein, 33 aa, Artificial Sequence; identical to SEQ ID NO: 12072
  GFR-binding peptide
  MOD_RES (2), (33): Xaa is C or S

SEQ ID NO: 49429 - protein, 38 aa, Artificial Sequence; identical to SEQ ID NO: 12073
  GFR-binding peptide
  MOD_RES (2), (36), (37): Xaa is C or S
  MOD_RES (14), (15), (16), (17), (18): Xaa is A or G
  MOD_RES (19), (20), (21), (22): Xaa is A or G or is absent

SEQ ID NO: 49430 - protein, 34 aa, Artificial Sequence; identical to SEQ ID NO: 12077
  GFR-binding peptide
  MOD_RES (1), (1): Xaa is C or S
  MOD_RES (13), (14), (15), (16), (17): Xaa is A or G
  MOD_RES (18), (19), (20), (21): Xaa is A or G or is absent

SEQ ID NO: 49431 - protein, 41 aa, Artificial Sequence; identical to SEQ ID NO: 12078
  GFR-binding peptide
  MOD_RES (2), (4), (36), (37): Xaa is C or S

SEQ ID NO: 49432 - protein, 37 aa, Artificial Sequence
  GFR-binding peptide
  MOD_RES (32), (33): Xaa is C or S
GEVVMEVQVEKVVKDYEDVKAMKVSRLETPVXXAKPI

SEQ ID NO: 49433 - protein, 39 aa, Artificial Sequence
  GFR-binding peptide
  MOD_RES (2), (34), (35): Xaa is C or S
GXGEVVMDVTAKKVVKENEDIKRMQVPRLETPVXXAKPI

SEQ ID NO: 49434 - protein, 36 aa, Artificial Sequence; identical to SEQ ID NO: 12081
  GFR-binding peptide
  MOD_RES (34), (35): Xaa is C or S
  MOD_RES (12), (13), (14), (15), (16): Xaa is A or G
  MOD_RES (17), (18), (19), (20): Xaa is A or G or is absent

SEQ ID NO: 49435 - protein, 41 aa, Artificial Sequence
  GFR-binding peptide
  MOD_RES (2), (35), (36): Xaa is C or S
  MOD_RES (13), (14), (15), (16), (17): Xaa is A or G
  MOD_RES (18), (19), (20), (21): Xaa is A or G or is absent
KXSRVIMSMEGIXXXXXXXXXMIQITINSLAQPVXXPAASA

SEQ ID NO: 49436 - protein, 36 aa, Artificial Sequence; identical to SEQ ID NO: 12084
  GFR-binding peptide
  MOD_RES (31), (32): Xaa is C or S

SEQ ID NO: 49437 - protein, 36 aa, Artificial Sequence
  GFR-binding peptide
  MOD_RES (31), (31): Xaa is C or S
RVVMNVTAKKIVNSSDDIKRVQVPRLKTPAXTPKTV

SEQ ID NO: 49438 - protein, 38 aa, Artificial Sequence
  GFR-binding peptide
  MOD_RES (36), (36): Xaa is C or S
LHDELTNSLQEFIPKKRVIEYYVVPLPELQVQTPRXQV

SEQ ID NO: 49439 - protein, 36 aa, Artificial Sequence
  GFR-binding peptide
  MOD_RES (36), (36): Xaa is C or S
LHEELRNSLQELKPKKRVYEYYVVPLPEHHVRSPQX

SEQ ID NO: 49440 - protein, 35 aa, Artificial Sequence
  GFR-binding peptide
LHEELRNSLQELKPKKRVYEYYVVPLPEHHVRSPQ

SEQ ID NO: 49441 - protein, 39 aa, Artificial Sequence; identical to SEQ ID NO: 17401
  GFR-binding peptide
  MOD_RES (33), (33): Xaa is C or S

SEQ ID NO: 49442 - protein, 36 aa, Artificial Sequence
  GFR-binding peptide
  MOD_RES (1), (35), (36): Xaa is C or S
  MOD_RES (13), (14), (15), (16), (17): Xaa is A or G
  MOD_RES (18), (19), (20), (21): Xaa is A or G or is absent
XGEVVMDVQVEKXXXXXXXXXVKAMKVSRLETPVXX

SEQ ID NO: 49443 - protein, 34 aa, Artificial Sequence
  GFR-binding peptide
  MOD_RES (31), (32): Xaa is C or S
EVVMESMEGIVVKDYEDMIQMTINSLETPVXXAK

SEQ ID NO: 49444 - protein, 36 aa, Artificial Sequence; identical to SEQ ID NO: 12086
  GFR-binding peptide
  MOD_RES (31), (32): Xaa is C or S

SEQ ID NO: 49445 - protein, 33 aa, Artificial Sequence; identical to SEQ ID NO: 17402
  GFR-binding peptide
  MOD_RES (11), (12), (13), (14), (15): Xaa is A or G
  MOD_RES (16), (17), (18), (19): Xaa is A or G or is absent

SEQ ID NO: 49446 - protein, 39 aa, Artificial Sequence
  GFR-binding peptide
  MOD_RES (2), (4), (38), (39): Xaa is C or S
  MOD_RES (16), (17), (18), (19), (20): Xaa is A or G
  MOD_RES (21), (22), (23), (24): Xaa is A or G or is absent
RXGXGEVVMEVTAKKXXXXXXXXXIKRMQVPRLETPVXX

SEQ ID NO: 49447 - protein, 40 aa, Artificial Sequence
  GFR-binding peptide
  MOD_RES (1), (3), (35), (36): Xaa is C or S
XGXARVVMNSMEGIIVNSSDDMIQVTINSLQTPAXXPKPV

SEQ ID NO: 49448 - protein, 33 aa, Artificial Sequence
  GFR-binding peptide
  MOD_RES (1), (33): Xaa is C or S
XGEVVMEVTAKKVVKDYEDIKRMQVPRLETPVX

SEQ ID NO: 49449 - protein, 38 aa, Artificial Sequence; identical to SEQ ID NO: 17406
  GFR-binding peptide
  MOD_RES (36), (36): Xaa is C or S
  MOD_RES (12), (13), (14), (15), (16): Xaa is A or G
  MOD_RES (17), (18), (19), (20): Xaa is A or G or is absent

SEQ ID NO: 49450 - protein, 39 aa, Artificial Sequence; identical to SEQ ID NO: 17407
  GFR-binding peptide
  MOD_RES (33), (33): Xaa is C or S

SEQ ID NO: 49451 - protein, 39 aa, Artificial Sequence; identical to SEQ ID NO: 17408
  GFR-binding peptide
  MOD_RES (1), (3): Xaa is C or S

SEQ ID NO: 49452 - protein, 36 aa, Artificial Sequence; identical to SEQ ID NO: 17409
  GFR-binding peptide
  MOD_RES (34), (34): Xaa is C or S

SEQ ID NO: 49453 - protein, 37 aa, Artificial Sequence; identical to SEQ ID NO: 17410
  GFR-binding peptide
  MOD_RES (37), (37): Xaa is C or S
  MOD_RES (13), (14), (15), (16), (17): Xaa is A or G
  MOD_RES (18), (19), (20), (21): Xaa is A or G or is absent

SEQ ID NO: 49454 - protein, 43 aa, Artificial Sequence
  GFR-binding peptide
  MOD_RES (2), (4), (37), (38): Xaa is C or S
  MOD_RES (15), (16), (17), (18), (19): Xaa is A or G
  MOD_RES (20), (21), (22), (23): Xaa is A or G or is absent
SXKXSRVIMSMEGIXXXXXXXXXMIQITINSLAQPVXXPAASA

SEQ ID NO: 49455 - protein, 36 aa, Artificial Sequence
  GFR-binding peptide
  MOD_RES (1), (3), (34), (35): Xaa is C or S
XKXSKVIMVTAKKIKPTKGIIKRIQVPRLDQSVXXP

SEQ ID NO: 49456 - protein, 34 aa, Artificial Sequence; identical to SEQ ID NO: 12090
  GFR-binding peptide
  MOD_RES (2), (34): Xaa is C or S

SEQ ID NO: 49457 - protein, 43 aa, Artificial Sequence
  GFR-binding peptide
  MOD_RES (1), (3), (37): Xaa is C or S
  MOD_RES (15), (16), (17), (18), (19): Xaa is A or G
  MOD_RES (20), (21), (22), (23): Xaa is A or G or is absent
XEXKNHQLFNSLQEXXXXXXXXXYYLMTLPEEETPVXELGEDN

SEQ ID NO: 49458 - protein, 36 aa, Artificial Sequence
  GFR-binding peptide
  MOD_RES (1), (1): Xaa is C or S
  MOD_RES (14), (15), (16), (17), (18): Xaa is A or G
  MOD_RES (19), (20), (21), (22): Xaa is A or G or is absent
XELHEELRNSLQEXXXXXXXXXYYVVPLPEHHVRSP

SEQ ID NO: 49459 - protein, 36 aa, Artificial Sequence
  GFR-binding peptide
  MOD_RES (32), (33): Xaa is C or S
ARVVMNSMEGIIVNSSDDMIQVTINSLQTPAXXPKP

SEQ ID NO: 49460 - protein, 40 aa, Artificial Sequence
  GFR-binding peptide
  MOD_RES (1), (3), (40): Xaa is C or S
  MOD_RES (16), (17), (18), (19), (20): Xaa is A or G
  MOD_RES (21), (22), (23), (24): Xaa is A or G or is absent
XKXALHDELTNSLQEXXXXXXXXXYYVVPLPELQVQTPRX

SEQ ID NO: 49461 - protein, 40 aa, Artificial Sequence; identical to SEQ ID NO: 12095
  GFR-binding peptide
  MOD_RES (2), (4), (38), (39): Xaa is C or S
  MOD_RES (16), (17), (18), (19), (20): Xaa is A or G
  MOD_RES (21), (22), (23), (24): Xaa is A or G or is absent

SEQ ID NO: 49462 - protein, 33 aa, Artificial Sequence; identical to SEQ ID NO: 17413
  GFR-binding peptide
  MOD_RES (11), (12), (13), (14), (15): Xaa is A or G
  MOD_RES (16), (17), (18), (19): Xaa is A or G or is absent

SEQ ID NO: 49463 - protein, 43 aa, Artificial Sequence; identical to SEQ ID NO: 17414
  GFR-binding peptide
  MOD_RES (1), (3), (40): Xaa is C or S
  MOD_RES (16), (17), (18), (19), (20): Xaa is A or G
  MOD_RES (21), (22), (23), (24): Xaa is A or G or is absent

SEQ ID NO: 49464 - protein, 38 aa, Artificial Sequence; identical to SEQ ID NO: 17416
  GFR-binding peptide
  MOD_RES (2), (36): Xaa is C or S
  MOD_RES (14), (15), (16), (17), (18): Xaa is A or G
  MOD_RES (19), (20), (21), (22): Xaa is A or G or is absent

SEQ ID NO: 49465 - protein, 32 aa, Artificial Sequence
  GFR-binding peptide
  MOD_RES (11), (12), (13), (14), (15): Xaa is A or G
  MOD_RES (16), (17), (18), (19): Xaa is A or G or is absent
HDELTNSLQEXXXXXXXXXYYLVTLPELQVQT

SEQ ID NO: 49466 - protein, 36 aa, Artificial Sequence; identical to SEQ ID NO: 17417
  GFR-binding peptide
  MOD_RES (13), (14), (15), (16), (17): Xaa is A or G
  MOD_RES (18), (19), (20), (21): Xaa is A or G or is absent

SEQ ID NO: 49467 - protein, 36 aa, Artificial Sequence; identical to SEQ ID NO: 17419
  GFR-binding peptide
  MOD_RES (2), (2): Xaa is C or S
  MOD_RES (15), (16), (17), (18), (19): Xaa is A or G
  MOD_RES (20), (21), (22), (23): Xaa is A or G or is absent

SEQ ID NO: 49468 - protein, 35 aa, Artificial Sequence
  GFR-binding peptide
  MOD_RES (1), (3): Xaa is C or S
  MOD_RES (14), (15), (16), (17), (18): Xaa is A or G
  MOD_RES (19), (20), (21), (22): Xaa is A or G or is absent
XKXSRVIMVQVEKXXXXXXXXXVKAIKVSRLAQPV

SEQ ID NO: 49469 - protein, 40 aa, Artificial Sequence; identical to SEQ ID NO: 17422
  GFR-binding peptide
  MOD_RES (2), (4): Xaa is C or S

SEQ ID NO: 49470 - protein, 34 aa, Artificial Sequence; identical to SEQ ID NO: 12100
  GFR-binding peptide
  MOD_RES (31), (32): Xaa is C or S

SEQ ID NO: 49471 - protein, 37 aa, Artificial Sequence; identical to SEQ ID NO: 12101
  GFR-binding peptide
  MOD_RES (33), (34): Xaa is C or S
  MOD_RES (11), (12), (13), (14), (15): Xaa is A or G
  MOD_RES (16), (17), (18), (19): Xaa is A or G or is absent

SEQ ID NO: 49472 - protein, 36 aa, Artificial Sequence
  GFR-binding peptide
  MOD_RES (1), (3), (34), (35): Xaa is C or S
XKXSKVVMVTAKKVKPTRGVIKRIQVPRLDQPVXXP

SEQ ID NO: 49473 - protein, 34 aa, Artificial Sequence
  GFR-binding peptide
  MOD_RES (33), (34): Xaa is C or S
  MOD_RES (11), (12), (13), (14), (15): Xaa is A or G
  MOD_RES (16), (17), (18), (19): Xaa is A or G or is absent
SRVIMVTAKKXXXXXXXXXIKRIQVPRLAQPVXX

SEQ ID NO: 49474 - protein, 38 aa, Artificial Sequence
  GFR-binding peptide
  MOD_RES (1), (32), (33): Xaa is C or S
XSRVIMSMEGIVKPKRGVMIQITINSLAQPVXXPAASA

SEQ ID NO: 49475 - protein, 38 aa, Artificial Sequence; identical to SEQ ID NO: 12103
  GFR-binding peptide
  MOD_RES (2), (35), (36): Xaa is C or S
  MOD_RES (13), (14), (15), (16), (17): Xaa is A or G
  MOD_RES (18), (19), (20), (21): Xaa is A or G or is absent

SEQ ID NO: 49476 - protein, 32 aa, Artificial Sequence
  GFR-binding peptide
  MOD_RES (11), (12), (13), (14), (15): Xaa is A or G
  MOD_RES (16), (17), (18), (19): Xaa is A or G or is absent
HDELTNSLQEXXXXXXXXXYYVVPLPELQVQT

SEQ ID NO: 49477 - protein, 35 aa, Artificial Sequence
  GFR-binding peptide
  MOD_RES (2), (2): Xaa is C or S
  MOD_RES (14), (15), (16), (17), (18): Xaa is A or G
  MOD_RES (19), (20), (21), (22): Xaa is A or G or is absent
GXGEVVMDVQVEKXXXXXXXXXVKAMKVSRLETPV

SEQ ID NO: 49478 - protein, 39 aa, Artificial Sequence; identical to SEQ ID NO: 12105
  GFR-binding peptide
  MOD_RES (2), (34), (35): Xaa is C or S

SEQ ID NO: 49479 - protein, 40 aa, Artificial Sequence; identical to SEQ ID NO: 12107
  GFR-binding peptide
  MOD_RES (1), (35): Xaa is C or S
  MOD_RES (13), (14), (15), (16), (17): Xaa is A or G
  MOD_RES (18), (19), (20), (21): Xaa is A or G or is absent

SEQ ID NO: 49480 - protein, 41 aa, Artificial Sequence
  GFR-binding peptide
  MOD_RES (2), (4), (38), (39): Xaa is C or S
  MOD_RES (16), (17), (18), (19), (20): Xaa is A or G
  MOD_RES (21), (22), (23), (24): Xaa is A or G or is absent
HXGXSRVVMNVQVEKXXXXXXXXXVKAVKVSRLKTPAXXPK

SEQ ID NO: 49481 - protein, 36 aa, Artificial Sequence
  GFR-binding peptide
  MOD_RES (1), (3), (35), (36): Xaa is C or S
XGXGEVVMDVQVEKVVKENEDVKAMKVSRLETPVXX

SEQ ID NO: 49482 - protein, 36 aa, Artificial Sequence
  GFR-binding peptide
  MOD_RES (1), (3): Xaa is C or S
  MOD_RES (15), (16), (17), (18), (19): Xaa is A or G
  MOD_RES (20), (21), (22), (23): Xaa is A or G or is absent
XGXARVVMNVTAKKXXXXXXXXXIKRVQVPRLQTPA

SEQ ID NO: 49483 - protein, 34 aa, Artificial Sequence; identical to SEQ ID NO: 12108
  GFR-binding peptide
  MOD_RES (2), (33), (34): Xaa is C or S

SEQ ID NO: 49484 - protein, 33 aa, Artificial Sequence
  GFR-binding peptide
  MOD_RES (31), (32): Xaa is C or S
SKVVMVTAKKVKPTRGVIKRIQVPRLDQPVXXP

SEQ ID NO: 49485 - protein, 38 aa, Artificial Sequence
  GFR-binding peptide
  MOD_RES (1), (35), (36): Xaa is C or S
  MOD_RES (13), (14), (15), (16), (17): Xaa is A or G
  MOD_RES (18), (19), (20), (21): Xaa is A or G or is absent
XARVVMNVQVEKXXXXXXXXXVKAVKVSRLQTPAXXPK

SEQ ID NO: 49486 - protein, 34 aa, Artificial Sequence
  GFR-binding peptide
  MOD_RES (32), (32): Xaa is C or S
SRVVMNSMEGIIVNSSDDMIQVTINSLKTPAXTP

SEQ ID NO: 49487 - protein, 39 aa, Artificial Sequence; identical to SEQ ID NO: 12111
  GFR-binding peptide
  MOD_RES (34), (35): Xaa is C or S
  MOD_RES (12), (13), (14), (15), (16): Xaa is A or G
  MOD_RES (17), (18), (19), (20): Xaa is A or G or is absent

SEQ ID NO: 49488 - protein, 37 aa, Artificial Sequence
  GFR-binding peptide
  MOD_RES (33), (34): Xaa is C or S
  MOD_RES (11), (12), (13), (14), (15): Xaa is A or G
  MOD_RES (16), (17), (18), (19): Xaa is A or G or is absent
SRVIMVTAKKXXXXXXXXXIKRIQVPRLAQPVXXPAA

SEQ ID NO: 49489 - protein, 39 aa, Artificial Sequence; identical to SEQ ID NO: 12115
  GFR-binding peptide
  MOD_RES (2), (35), (36): Xaa is C or S
  MOD_RES (13), (14), (15), (16), (17): Xaa is A or G
  MOD_RES (18), (19), (20), (21): Xaa is A or G or is absent

SEQ ID NO: 49490 - protein, 37 aa, Artificial Sequence; identical to SEQ ID NO: 12116
  GFR-binding peptide
  MOD_RES (1), (3), (37): Xaa is C or S
  MOD_RES (15), (16), (17), (18), (19): Xaa is A or G
  MOD_RES (20), (21), (22), (23): Xaa is A or G or is absent

SEQ ID NO: 49491 - protein, 36 aa, Artificial Sequence
  GFR-binding peptide
  MOD_RES (2), (4), (36): Xaa is C or S
RXGXGEVVMDVTAKKVVKENEDIKRMQVPRLETPVX

SEQ ID NO: 49492 - protein, 39 aa, Artificial Sequence; identical to SEQ ID NO: 17435
  GFR-binding peptide
  MOD_RES (1), (35): Xaa is C or S

SEQ ID NO: 49493 - protein, 39 aa, Artificial Sequence
  GFR-binding peptide
  MOD_RES (2), (4), (38): Xaa is C or S
  MOD_RES (16), (17), (18), (19), (20): Xaa is A or G
  MOD_RES (21), (22), (23), (24): Xaa is A or G or is absent
RXEXKNHQLFNSLQEXXXXXXXXXYYLMTLPEEETPVXE

SEQ ID NO: 49494 - protein, 41 aa, Artificial Sequence
  GFR-binding peptide
  MOD_RES (2), (35), (36): Xaa is C or S
  MOD_RES (13), (14), (15), (16), (17): Xaa is A or G
  MOD_RES (18), (19), (20), (21): Xaa is A or G or is absent
KXSKVIMSMEGIXXXXXXXXXMIQITINSLDQSVXXPSASA

SEQ ID NO: 49495 - protein, 33 aa, Artificial Sequence
  GFR-binding peptide
  MOD_RES (31), (31): Xaa is C or S
RVVMNSMEGIIVNSSDDMIQVTINSLKTPAXTP

SEQ ID NO: 49496 - protein, 38 aa, Artificial Sequence; identical to SEQ ID NO: 17440
  GFR-binding peptide
  MOD_RES (1), (3): Xaa is C or S

SEQ ID NO: 49497 - protein, 34 aa, Artificial Sequence
  GFR-binding peptide
  MOD_RES (1), (1): Xaa is C or S
  MOD_RES (13), (14), (15), (16), (17): Xaa is A or G
  MOD_RES (18), (19), (20), (21): Xaa is A or G or is absent
XGEVVMDVQVEKXXXXXXXXXVKAMKVSRLETPV

SEQ ID NO: 49498 - protein, 38 aa, Artificial Sequence; identical to SEQ ID NO: 12123
  GFR-binding peptide
  MOD_RES (2), (4), (36): Xaa is C or S

SEQ ID NO: 49499 - protein, 35 aa, Artificial Sequence; identical to SEQ ID NO: 12124
  GFR-binding peptide
  MOD_RES (32), (32): Xaa is C or S

SEQ ID NO: 49500 - protein, 39 aa, Artificial Sequence
  GFR-binding peptide
  MOD_RES (2), (4), (37), (38): Xaa is C or S
  MOD_RES (15), (16), (17), (18), (19): Xaa is A or G
  MOD_RES (20), (21), (22), (23): Xaa is A or G or is absent
SXKXSKVIMVQVEKXXXXXXXXXVKAIKVSRLDQSVXXP

SEQ ID NO: 49501 - protein, 35 aa, Artificial Sequence; identical to SEQ ID NO: 12126
  GFR-binding peptide
  MOD_RES (1), (3), (35): Xaa is C or S

SEQ ID NO: 49502 - protein, 40 aa, Artificial Sequence; identical to SEQ ID NO: 17446
  GFR-binding peptide
  MOD_RES (1), (35): Xaa is C or S

SEQ ID NO: 49503 - protein, 37 aa, Artificial Sequence; identical to SEQ ID NO: 12132
  GFR-binding peptide
  MOD_RES (2), (35), (36): Xaa is C or S
  MOD_RES (13), (14), (15), (16), (17): Xaa is A or G
  MOD_RES (18), (19), (20), (21): Xaa is A or G or is absent

SEQ ID NO: 49504 - protein, 30 aa, Artificial Sequence
  GFR-binding peptide
SRVIMVTAKKVKPKRGVIKRIQVPRLAQPV

SEQ ID NO: 49505 - protein, 33 aa, Artificial Sequence
  GFR-binding peptide
HEELRNSLQELKPKKRVYEYYVVPLPEHHVRSP

SEQ ID NO: 49506 - protein, 36 aa, Artificial Sequence
  GFR-binding peptide
  MOD_RES (1), (35): Xaa is C or S
  MOD_RES (13), (14), (15), (16), (17): Xaa is A or G
  MOD_RES (18), (19), (20), (21): Xaa is A or G or is absent
XSRVVMNVQVEKXXXXXXXXXVKAVKVSRLKTPAXT

SEQ ID NO: 49507 - protein, 38 aa, Artificial Sequence; identical to SEQ ID NO: 12136
  GFR-binding peptide
  MOD_RES (2), (33), (34): Xaa is C or S

SEQ ID NO: 49508 - protein, 36 aa, Artificial Sequence
  GFR-binding peptide
  MOD_RES (1), (35): Xaa is C or S
XKNHQLFNSLQEHQGQHPKIRYYVMPLPEEETPVXE

SEQ ID NO: 49509 - protein, 32 aa, Artificial Sequence
  GFR-binding peptide
  MOD_RES (1), (32): Xaa is C or S
XSKVVMVTAKKVKPTRGVIKRIQVPRLDQPVX

SEQ ID NO: 49510 - protein, 32 aa, Artificial Sequence; identical to SEQ ID NO: 17450
  GFR-binding peptide
  MOD_RES (11), (12), (13), (14), (15): Xaa is A or G
  MOD_RES (16), (17), (18), (19): Xaa is A or G or is absent

SEQ ID NO: 49511 - protein, 33 aa, Artificial Sequence
  GFR-binding peptide
LHEELRNSLQELKPKKRVYEYYLVTLPEHHVRS

SEQ ID NO: 49512 - protein, 33 aa, Artificial Sequence
  GFR-binding peptide
  MOD_RES (31), (32): Xaa is C or S
RVVMNSMEGIIVNSSDDMIQVTINSLKTPAXXP

SEQ ID NO: 49513 - protein, 37 aa, Artificial Sequence
  GFR-binding peptide
  MOD_RES (2), (4), (37): Xaa is C or S
  MOD_RES (15), (16), (17), (18), (19): Xaa is A or G
  MOD_RES (20), (21), (22), (23): Xaa is A or G or is absent
SXKXSKVVMVTAKKXXXXXXXXXIKRIQVPRLDQPVX

SEQ ID NO: 49514 - protein, 41 aa, Artificial Sequence
  GFR-binding peptide
  MOD_RES (2), (4), (37), (38): Xaa is C or S
  MOD_RES (15), (16), (17), (18), (19): Xaa is A or G
  MOD_RES (20), (21), (22), (23): Xaa is A or G or is absent
SXKXSKVIMVTAKKXXXXXXXXXIKRIQVPRLDQSVXXPSA

SEQ ID NO: 49515 - protein, 42 aa, Artificial Sequence
  GFR-binding peptide
  MOD_RES (1), (3), (37), (38): Xaa is C or S
  MOD_RES (15), (16), (17), (18), (19): Xaa is A or G
  MOD_RES (20), (21), (22), (23): Xaa is A or G or is absent
XGXGEVVMESMEGIXXXXXXXXXMIQMTINSLETPVXXAKPI

SEQ ID NO: 49516 - protein, 34 aa, Artificial Sequence
  GFR-binding peptide
  MOD_RES (2), (34): Xaa is C or S
GXSRVVMNVTAKKIVNSSDDIKRVQVPRLKTPAX

SEQ ID NO: 49517 - protein, 33 aa, Artificial Sequence
  GFR-binding peptide
  MOD_RES (2), (33): Xaa is C or S
KXSKVVMVTAKKVKPTRGVIKRIQVPRLDQPVX

SEQ ID NO: 49518 - protein, 37 aa, Artificial Sequence; identical to SEQ ID NO: 17453
  GFR-binding peptide
  MOD_RES (1), (35): Xaa is C or S

SEQ ID NO: 49519 - protein, 38 aa, Artificial Sequence
  GFR-binding peptide
  MOD_RES (2), (4), (37), (38): Xaa is C or S
  MOD_RES (15), (16), (17), (18), (19): Xaa is A or G
  MOD_RES (20), (21), (22), (23): Xaa is A or G or is absent
SXKXSKVVMSMEGIXXXXXXXXXMIQITINSLDQPVXX

SEQ ID NO: 49520 - protein, 43 aa, Artificial Sequence; identical to SEQ ID NO: 12143
  GFR-binding peptide
  MOD_RES (1), (3), (37): Xaa is C or S
  MOD_RES (15), (16), (17), (18), (19): Xaa is A or G
  MOD_RES (20), (21), (22), (23): Xaa is A or G or is absent

SEQ ID NO: 49521 - protein, 41 aa, Artificial Sequence; identical to SEQ ID NO: 17455
  GFR-binding peptide
  MOD_RES (37), (37): Xaa is C or S
  MOD_RES (13), (14), (15), (16), (17): Xaa is A or G
  MOD_RES (18), (19), (20), (21): Xaa is A or G or is absent

SEQ ID NO: 49522 - protein, 41 aa, Artificial Sequence
  GFR-binding peptide
  MOD_RES (2), (4), (36), (37): Xaa is C or S
RXGXGEVVMDVTAKKVVKENEDIKRMQVPRLETPVXXAKPI

SEQ ID NO: 49523 - protein, 40 aa, Artificial Sequence
  GFR-binding peptide
  MOD_RES (2), (4), (37), (38): Xaa is C or S
  MOD_RES (15), (16), (17), (18), (19): Xaa is A or G
  MOD_RES (20), (21), (22), (23): Xaa is A or G or is absent
SXKXSKVIMVTAKKXXXXXXXXXIKRIQVPRLDQSVXXPS

SEQ ID NO: 49524 - protein, 36 aa, Artificial Sequence; identical to SEQ ID NO: 12145
  GFR-binding peptide
  MOD_RES (33), (34): Xaa is C or S
  MOD_RES (11), (12), (13), (14), (15): Xaa is A or G
  MOD_RES (16), (17), (18), (19): Xaa is A or G or is absent

SEQ ID NO: 49525 - protein, 34 aa, Artificial Sequence
  GFR-binding peptide
  MOD_RES (32), (33): Xaa is C or S
SRVVMNVQVEKIVNSSDDVKAVKVSRLKTPAXXP

SEQ ID NO: 49526 - protein, 41 aa, Artificial Sequence; identical to SEQ ID NO: 12146
  GFR-binding peptide
  MOD_RES (2), (36), (37): Xaa is C or S
  MOD_RES (14), (15), (16), (17), (18): Xaa is A or G
  MOD_RES (19), (20), (21), (22): Xaa is A or G or is absent

SEQ ID NO: 49527 - protein, 45 aa, Artificial Sequence; identical to SEQ ID NO: 17458
  GFR-binding peptide
  MOD_RES (2), (4), (41): Xaa is C or S
  MOD_RES (17), (18), (19), (20), (21): Xaa is A or G
  MOD_RES (22), (23), (24), (25): Xaa is A or G or is absent

SEQ ID NO: 49528 - protein, 35 aa, Artificial Sequence; identical to SEQ ID NO: 12149
  GFR-binding peptide
  MOD_RES (1), (35): Xaa is C or S
  MOD_RES (13), (14), (15), (16), (17): Xaa is A or G
  MOD_RES (18), (19), (20), (21): Xaa is A or G or is absent

SEQ ID NO: 49529 - protein, 34 aa, Artificial Sequence
  GFR-binding peptide
  MOD_RES (11), (12), (13), (14), (15): Xaa is A or G
  MOD_RES (16), (17), (18), (19): Xaa is A or G or is absent
HEELRNSLQEXXXXXXXXXYYLVTLPEHHVRSPQ

SEQ ID NO: 49530 - protein, 38 aa, Artificial Sequence; identical to SEQ ID NO: 17459
  GFR-binding peptide
  MOD_RES (2), (4): Xaa is C or S
  MOD_RES (17), (18), (19), (20), (21): Xaa is A or G
  MOD_RES (22), (23), (24), (25): Xaa is A or G or is absent

SEQ ID NO: 49531 - protein, 36 aa, Artificial Sequence
  GFR-binding peptide
  MOD_RES (1), (3): Xaa is C or S
  MOD_RES (15), (16), (17), (18), (19): Xaa is A or G
  MOD_RES (20), (21), (22), (23): Xaa is A or G or is absent
XGXGEVVMEVQVEKXXXXXXXXXVKAMKVSRLETPV

SEQ ID NO: 49532 - protein, 40 aa, Artificial Sequence
  GFR-binding peptide
  MOD_RES (1), (3), (37), (38): Xaa is C or S
  MOD_RES (15), (16), (17), (18), (19): Xaa is A or G
  MOD_RES (20), (21), (22), (23): Xaa is A or G or is absent
XGXSRVVMNVQVEKXXXXXXXXXVKAVKVSRLKTPAXXPK

SEQ ID NO: 49533 - protein, 35 aa, Artificial Sequence; identical to SEQ ID NO: 17462
  GFR-binding peptide
  MOD_RES (33), (33): Xaa is C or S

SEQ ID NO: 49534 - protein, 41 aa, Artificial Sequence
  GFR-binding peptide
  MOD_RES (2), (4), (36), (37): Xaa is C or S
HXGXARVVMNVTAKKIVNSSDDIKRVQVPRLQTPAXXPKPV

SEQ ID NO: 49535 - protein, 38 aa, Artificial Sequence; identical to SEQ ID NO: 17463
  GFR-binding peptide
  MOD_RES (2), (2): Xaa is C or S

SEQ ID NO: 49536 - protein, 37 aa, Artificial Sequence; identical to SEQ ID NO: 12154
  GFR-binding peptide
  MOD_RES (31), (32): Xaa is C or S

SEQ ID NO: 49537 - protein, 35 aa, Artificial Sequence; identical to SEQ ID NO: 12155
  GFR-binding peptide
  MOD_RES (31), (32): Xaa is C or S

SEQ ID NO: 49538 - protein, 36 aa, Artificial Sequence
  GFR-binding peptide
  MOD_RES (2), (33), (34): Xaa is C or S
KXSRVIMSMEGIVKPKRGVMIQITINSLAQPVXXPA

SEQ ID NO: 49539 - protein, 35 aa, Artificial Sequence
  GFR-binding peptide
  MOD_RES (31), (32): Xaa is C or S
RVVMNVQVEKIVNSSDDVKAVKVSRLQTPAXXPKP

SEQ ID NO: 49540 - protein, 40 aa, Artificial Sequence
  GFR-binding peptide
  MOD_RES (2), (35), (36): Xaa is C or S
  MOD_RES (13), (14), (15), (16), (17): Xaa is A or G
  MOD_RES (18), (19), (20), (21): Xaa is A or G or is absent
KXSKVVMVQVEKXXXXXXXXXVKAIKVSRLDQPVXXPSAS

SEQ ID NO: 49541 - protein, 42 aa, Artificial Sequence; identical to SEQ ID NO: 17465
  GFR-binding peptide
  MOD_RES (2), (36): Xaa is C or S

SEQ ID NO: 49542 - protein, 38 aa, Artificial Sequence
  GFR-binding peptide
  MOD_RES (1), (35), (36): Xaa is C or S
  MOD_RES (13), (14), (15), (16), (17): Xaa is A or G
  MOD_RES (18), (19), (20), (21): Xaa is A or G or is absent
XSRVVMNVTAKKXXXXXXXXXIKRVQVPRLKTPAXXPK

SEQ ID NO: 49543 - protein, 32 aa, Artificial Sequence; identical to SEQ ID NO: 36299
  GFR-binding peptide
  MOD_RES (2), (2): Xaa is C or S

SEQ ID NO: 49544 - protein, 41 aa, Artificial Sequence; identical to SEQ ID NO: 12164
  GFR-binding peptide
  MOD_RES (1), (3), (37), (38): Xaa is C or S
  MOD_RES (15), (16), (17), (18), (19): Xaa is A or G
  MOD_RES (20), (21), (22), (23): Xaa is A or G or is absent

SEQ ID NO: 49545 - protein, 41 aa, Artificial Sequence
  GFR-binding peptide
  MOD_RES (1), (3), (36), (37): Xaa is C or S
  MOD_RES (14), (15), (16), (17), (18): Xaa is A or G
  MOD_RES (19), (20), (21), (22): Xaa is A or G or is absent
XKXSKVIMVQVEKXXXXXXXXXVKAIKVSRLDQSVXXPSAS

SEQ ID NO: 49546 - protein, 37 aa, Artificial Sequence; identical to SEQ ID NO: 17466
  GFR-binding peptide
  MOD_RES (1), (35): Xaa is C or S
  MOD_RES (13), (14), (15), (16), (17): Xaa is A or G
  MOD_RES (18), (19), (20), (21): Xaa is A or G or is absent

SEQ ID NO: 49547 - protein, 34 aa, Artificial Sequence
  GFR-binding peptide
  MOD_RES (33), (34): Xaa is C or S
  MOD_RES (11), (12), (13), (14), (15): Xaa is A or G
  MOD_RES (16), (17), (18), (19): Xaa is A or G or is absent
EVVMEVQVEKXXXXXXXXXVKAMKVSRLETPVXX

SEQ ID NO: 49548 - protein, 38 aa, Artificial Sequence; identical to SEQ ID NO: 17470
  GFR-binding peptide
  MOD_RES (1), (3): Xaa is C or S

SEQ ID NO: 49549 - protein, 36 aa, Artificial Sequence
  GFR-binding peptide
  MOD_RES (32), (33): Xaa is C or S
ARVVMNVTAKKIVNSSDDIKRVQVPRLQTPAXXPKP

SEQ ID NO: 49550 - protein, 39 aa, Artificial Sequence
  GFR-binding peptide
  MOD_RES (1), (3): Xaa is C or S
  MOD_RES (16), (17), (18), (19), (20): Xaa is A or G
  MOD_RES (21), (22), (23), (24): Xaa is A or G or is absent
XKXALHDELTNSLQEXXXXXXXXXYYLVTLPELQVQTPR

SEQ ID NO: 49551 - protein, 36 aa, Artificial Sequence; identical to SEQ ID NO: 12167
  GFR-binding peptide
  MOD_RES (32), (33): Xaa is C or S

SEQ ID NO: 49552 - protein, 33 aa, Artificial Sequence
  GFR-binding peptide
  MOD_RES (1), (1): Xaa is C or S
  MOD_RES (12), (13), (14), (15), (16): Xaa is A or G
  MOD_RES (17), (18), (19), (20): Xaa is A or G or is absent
XSRVIMVTAKKXXXXXXXXXIKRIQVPRLAQPV

SEQ ID NO: 49553 - protein, 38 aa, Artificial Sequence
  GFR-binding peptide
  MOD_RES (37), (37): Xaa is C or S
ELHEELRNSLQELKPKKRVYEYYVVPLPEHHVRSPQXK

SEQ ID NO: 49554 - protein, 39 aa, Artificial Sequence
  GFR-binding peptide
  MOD_RES (2), (4), (37), (38): Xaa is C or S
  MOD_RES (15), (16), (17), (18), (19): Xaa is A or G
  MOD_RES (20), (21), (22), (23): Xaa is A or G or is absent
SXKXSKVVMVTAKKXXXXXXXXXIKRIQVPRLDQPVXXP

SEQ ID NO: 49555 - protein, 37 aa, Artificial Sequence
  GFR-binding peptide
  MOD_RES (1), (34), (35): Xaa is C or S
  MOD_RES (12), (13), (14), (15), (16): Xaa is A or G
  MOD_RES (17), (18), (19), (20): Xaa is A or G or is absent
XSKVIMVQVEKXXXXXXXXXVKAIKVSRLDQSVXXPS

SEQ ID NO: 49556 - protein, 38 aa, Artificial Sequence
  GFR-binding peptide
  MOD_RES (1), (3), (35), (36): Xaa is C or S
XGXGEVVMDSMEGIVVKENEDMIQMTINSLETPVXXAK

SEQ ID NO: 49557 - protein, 34 aa, Artificial Sequence
  GFR-binding peptide
  MOD_RES (33), (33): Xaa is C or S
  MOD_RES (11), (12), (13), (14), (15): Xaa is A or G
  MOD_RES (16), (17), (18), (19): Xaa is A or G or is absent
NHQLFNSLQEXXXXXXXXXYYVMPLPEEETPVXE

SEQ ID NO: 49558 - protein, 38 aa, Artificial Sequence; identical to SEQ ID NO: 12172
  GFR-binding peptide
  MOD_RES (2), (36), (37): Xaa is C or S
  MOD_RES (14), (15), (16), (17), (18): Xaa is A or G
  MOD_RES (19), (20), (21), (22): Xaa is A or G or is absent

SEQ ID NO: 49559 - protein, 39 aa, Artificial Sequence; identical to SEQ ID NO: 12174
  GFR-binding peptide
  MOD_RES (2), (36), (37): Xaa is C or S
  MOD_RES (14), (15), (16), (17), (18): Xaa is A or G
  MOD_RES (19), (20), (21), (22): Xaa is A or G or is absent

SEQ ID NO: 49560 - protein, 39 aa, Artificial Sequence
  GFR-binding peptide
  MOD_RES (2), (34), (35): Xaa is C or S
GXGEVVMEVTAKKVVKDYEDIKRMQVPRLETPVXXAKPI

SEQ ID NO: 49561 - protein, 41 aa, Artificial Sequence; identical to SEQ ID NO: 12176
  GFR-binding peptide
  MOD_RES (2), (35), (36): Xaa is C or S
  MOD_RES (13), (14), (15), (16), (17): Xaa is A or G
  MOD_RES (18), (19), (20), (21): Xaa is A or G or is absent

SEQ ID NO: 49562 - protein, 34 aa, Artificial Sequence
  GFR-binding peptide
  MOD_RES (31), (32): Xaa is C or S
EVVMDSMEGIVVKENEDMIQMTINSLETPVXXAK

SEQ ID NO: 49563 - protein, 32 aa, Artificial Sequence; identical to SEQ ID NO: 12179
  GFR-binding peptide
  MOD_RES (1), (1): Xaa is C or S

SEQ ID NO: 49564 - protein, 39 aa, Artificial Sequence; identical to SEQ ID NO: 17476
  GFR-binding peptide
  MOD_RES (2), (4): Xaa is C or S

SEQ ID NO: 49565 - protein, 33 aa, Artificial Sequence; identical to SEQ ID NO: 17477
  GFR-binding peptide

SEQ ID NO: 49566 - protein, 36 aa, Artificial Sequence
  GFR-binding peptide
  MOD_RES (1), (3), (34), (35): Xaa is C or S
XKXSKVIMVQVEKIKPTKGIVKAIKVSRLDQSVXXP

SEQ ID NO: 49567 - protein, 39 aa, Artificial Sequence; identical to SEQ ID NO: 17478
  GFR-binding peptide
  MOD_RES (2), (39): Xaa is C or S

SEQ ID NO: 49568 - protein, 42 aa, Artificial Sequence
  GFR-binding peptide
  MOD_RES (2), (4), (37), (38): Xaa is C or S
  MOD_RES (15), (16), (17), (18), (19): Xaa is A or G
  MOD_RES (20), (21), (22), (23): Xaa is A or G or is absent
SXKXSKVIMVQVEKXXXXXXXXXVKAIKVSRLDQSVXXPSAS

SEQ ID NO: 49569 - protein, 44 aa, Artificial Sequence
  GFR-binding peptide
  MOD_RES (2), (4), (38): Xaa is C or S
RXEXKNHQLFNSLQEHQGQHPKIRYYLMTLPEEETPVXELGEDN

SEQ ID NO: 49570 - protein, 41 aa, Artificial Sequence; identical to SEQ ID NO: 12182
  GFR-binding peptide
  MOD_RES (1), (35), (36): Xaa is C or S
  MOD_RES (13), (14), (15), (16), (17): Xaa is A or G
  MOD_RES (18), (19), (20), (21): Xaa is A or G or is absent

SEQ ID NO: 49571 - protein, 40 aa, Artificial Sequence
  GFR-binding peptide
  MOD_RES (1), (3), (40): Xaa is C or S
  MOD_RES (16), (17), (18), (19), (20): Xaa is A or G
  MOD_RES (21), (22), (23), (24): Xaa is A or G or is absent
XAXELHEELRNSLQEXXXXXXXXXYYLVTLPEHHVRSPQX

SEQ ID NO: 49572 - protein, 37 aa, Artificial Sequence; identical to SEQ ID NO: 17481
  GFR-binding peptide
  MOD_RES (1), (1): Xaa is C or S
  MOD_RES (14), (15), (16), (17), (18): Xaa is A or G
  MOD_RES (19), (20), (21), (22): Xaa is A or G or is absent

SEQ ID NO: 49573 - protein, 40 aa, Artificial Sequence
  GFR-binding peptide
  MOD_RES (2), (36): Xaa is C or S
  MOD_RES (14), (15), (16), (17), (18): Xaa is A or G
  MOD_RES (19), (20), (21), (22): Xaa is A or G or is absent
EXKNHQLFNSLQEXXXXXXXXXYYVMPLPEEETPVXELGE

SEQ ID NO: 49574 - protein, 33 aa, Artificial Sequence; identical to SEQ ID NO: 17482
  GFR-binding peptide
  MOD_RES (12), (13), (14), (15), (16): Xaa is A or G
  MOD_RES (17), (18), (19), (20): Xaa is A or G or is absent

SEQ ID NO: 49575 - protein, 39 aa, Artificial Sequence
  GFR-binding peptide
  MOD_RES (2), (4), (38), (39): Xaa is C or S
  MOD_RES (16), (17), (18), (19), (20): Xaa is A or G
  MOD_RES (21), (22), (23), (24): Xaa is A or G or is absent
RXGXGEVVMEVQVEKXXXXXXXXXVKAMKVSRLETPVXX

SEQ ID NO: 49576 - protein, 36 aa, Artificial Sequence
  GFR-binding peptide
  MOD_RES (1), (3), (34), (35): Xaa is C or S
XKXSRVIMVQVEKVKPKRGVVKAIKVSRLAQPVXXP

SEQ ID NO: 49577 - protein, 39 aa, Artificial Sequence; identical to SEQ ID NO: 17484
  GFR-binding peptide
  MOD_RES (1), (35): Xaa is C or S

SEQ ID NO: 49578 - protein, 36 aa, Artificial Sequence
  GFR-binding peptide
  MOD_RES (2), (4), (36): Xaa is C or S
RXGXGEVVMESMEGIVVKDYEDMIQMTINSLETPVX

SEQ ID NO: 49579 - protein, 42 aa, Artificial Sequence
  GFR-binding peptide
  MOD_RES (2), (4), (38), (39): Xaa is C or S
  MOD_RES (16), (17), (18), (19), (20): Xaa is A or G
  MOD_RES (21), (22), (23), (24): Xaa is A or G or is absent
RXGXGEVVMDVQVEKXXXXXXXXXVKAMKVSRLETPVXXAKP

SEQ ID NO: 49580 - protein, 39 aa, Artificial Sequence; identical to SEQ ID NO: 12184
  GFR-binding peptide
  MOD_RES (33), (34): Xaa is C or S
  MOD_RES (11), (12), (13), (14), (15): Xaa is A or G
  MOD_RES (16), (17), (18), (19): Xaa is A or G or is absent

SEQ ID NO: 49581 - protein, 39 aa, Artificial Sequence; identical to SEQ ID NO: 12185
  GFR-binding peptide
  MOD_RES (2), (4), (36), (37): Xaa is C or S

SEQ ID NO: 49582 - protein, 38 aa, Artificial Sequence
  GFR-binding peptide
  MOD_RES (32), (33): Xaa is C or S
ARVVMNVQVEKIVNSSDDVKAVKVSRLQTPAXXPKPVT

SEQ ID NO: 49583 - protein, 36 aa, Artificial Sequence; identical to SEQ ID NO: 12187
  GFR-binding peptide
  MOD_RES (1), (33), (34): Xaa is C or S

SEQ ID NO: 49584 - protein, 39 aa, Artificial Sequence
  GFR-binding peptide
  MOD_RES (1), (38): Xaa is C or S
  MOD_RES (14), (15), (16), (17), (18): Xaa is A or G
  MOD_RES (19), (20), (21), (22): Xaa is A or G or is absent
XELHEELRNSLQEXXXXXXXXXYYVVPLPEHHVRSPQXK

SEQ ID NO: 49585 - protein, 35 aa, Artificial Sequence
  GFR-binding peptide
  MOD_RES (1), (35): Xaa is C or S
  MOD_RES (13), (14), (15), (16), (17): Xaa is A or G
  MOD_RES (18), (19), (20), (21): Xaa is A or G or is absent
XSRVVMNSMEGIXXXXXXXXXMIQVTINSLKTPAX

SEQ ID NO: 49586 - protein, 31 aa, Artificial Sequence; identical to SEQ ID NO: 12193
  GFR-binding peptide
  MOD_RES (1), (1): Xaa is C or S

SEQ ID NO: 49587 - protein, 38 aa, Artificial Sequence; identical to SEQ ID NO: 17489
  GFR-binding peptide
  MOD_RES (1), (3), (37): Xaa is C or S

SEQ ID NO: 49588 - protein, 31 aa, Artificial Sequence; identical to SEQ ID NO: 12195
  GFR-binding peptide
  MOD_RES (31), (31): Xaa is C or S

SEQ ID NO: 49589 - protein, 34 aa, Artificial Sequence
  GFR-binding peptide
  MOD_RES (32), (32): Xaa is C or S
SRVVMNVTAKKIVNSSDDIKRVQVPRLKTPAXTP

SEQ ID NO: 49590 - protein, 35 aa, Artificial Sequence; identical to SEQ ID NO: 12198
  GFR-binding peptide
  MOD_RES (1), (33), (34): Xaa is C or S

SEQ ID NO: 49591 - protein, 36 aa, Artificial Sequence
  GFR-binding peptide
  MOD_RES (34), (35): Xaa is C or S
  MOD_RES (12), (13), (14), (15), (16): Xaa is A or G
  MOD_RES (17), (18), (19), (20): Xaa is A or G or is absent
ARVVMNVTAKKXXXXXXXXXIKRVQVPRLQTPAXXP

SEQ ID NO: 49592 - protein, 39 aa, Artificial Sequence; identical to SEQ ID NO: 12202
  GFR-binding peptide
  MOD_RES (1), (3), (35), (36): Xaa is C or S

SEQ ID NO: 49593 - protein, 38 aa, Artificial Sequence; identical to SEQ ID NO: 17494
  GFR-binding peptide
  MOD_RES (2), (4): Xaa is C or S

SEQ ID NO: 49594 - protein, 31 aa, Artificial Sequence
  GFR-binding peptide
  MOD_RES (31), (31): Xaa is C or S
RVVMNVQVEKIVNSSDDVKAVKVSRLQTPAX

SEQ ID NO: 49595 - protein, 32 aa, Artificial Sequence
  GFR-binding peptide
  MOD_RES (31), (32): Xaa is C or S
RVVMNSMEGIIVNSSDDMIQVTINSLKTPAXX

SEQ ID NO: 49596 - protein, 38 aa, Artificial Sequence
  GFR-binding peptide
  MOD_RES (37), (37): Xaa is C or S
  MOD_RES (13), (14), (15), (16), (17): Xaa is A or G
  MOD_RES (18), (19), (20), (21): Xaa is A or G or is absent
ALHDELTNSLQEXXXXXXXXXYYVVPLPELQVQTPRXQ

SEQ ID NO: 49597 - protein, 36 aa, Artificial Sequence
  GFR-binding peptide
  MOD_RES (32), (33): Xaa is C or S
SRVVMNSMEGIIVNSSDDMIQVTINSLKTPAXXPKP

SEQ ID NO: 49598 - protein, 38 aa, Artificial Sequence
  GFR-binding peptide
  MOD_RES (2), (4), (37), (38): Xaa is C or S
  MOD_RES (15), (16), (17), (18), (19): Xaa is A or G
  MOD_RES (20), (21), (22), (23): Xaa is A or G or is absent
SXKXSKVVMVTAKKXXXXXXXXXIKRIQVPRLDQPVXX

SEQ ID NO: 49599 - protein, 32 aa, Artificial Sequence
  GFR-binding peptide
  MOD_RES (11), (12), (13), (14), (15): Xaa is A or G
  MOD_RES (16), (17), (18), (19): Xaa is A or G or is absent
EVVMDSMEGIXXXXXXXXXMIQMTINSLETPV

SEQ ID NO: 49600 - protein, 40 aa, Artificial Sequence; identical to SEQ ID NO: 12207
  GFR-binding peptide
  MOD_RES (34), (35): Xaa is C or S
  MOD_RES (12), (13), (14), (15), (16): Xaa is A or G
  MOD_RES (17), (18), (19), (20): Xaa is A or G or is absent

SEQ ID NO: 49601 - protein, 34 aa, Artificial Sequence
  GFR-binding peptide
LHDELTNSLQEFIPKKRVIEYYVVPLPELQVQTP

SEQ ID NO: 49602 - protein, 37 aa, Artificial Sequence
  GFR-binding peptide
  MOD_RES (2), (4), (36), (37): Xaa is C or S
RXGXGEVVMDVTAKKVVKENEDIKRMQVPRLETPVXX

SEQ ID NO: 49603 - protein, 38 aa, Artificial Sequence; identical to SEQ ID NO: 12208
  GFR-binding peptide
  MOD_RES (1), (3), (37): Xaa is C or S
  MOD_RES (15), (16), (17), (18), (19): Xaa is A or G
  MOD_RES (20), (21), (22), (23): Xaa is A or G or is absent

SEQ ID NO: 49604 - protein, 33 aa, Artificial Sequence
  GFR-binding peptide
  MOD_RES (31), (32): Xaa is C or S
SKVIMSMEGIIKPTKGIMIQITINSLDQSVXXP

SEQ ID NO: 49605 - protein, 34 aa, Artificial Sequence
  GFR-binding peptide
  MOD_RES (1), (33), (34): Xaa is C or S
XGEVVMDVTAKKVVKENEDIKRMQVPRLETPVXX

SEQ ID NO: 49606 - protein, 39 aa, Artificial Sequence
  GFR-binding peptide
  MOD_RES (2), (4), (38), (39): Xaa is C or S
  MOD_RES (16), (17), (18), (19), (20): Xaa is A or G
  MOD_RES (21), (22), (23), (24): Xaa is A or G or is absent
RXGXGEVVMDSMEGIXXXXXXXXXMIQMTINSLETPVXX

SEQ ID NO: 49607 - protein, 39 aa, Artificial Sequence
  GFR-binding peptide
  MOD_RES (1), (35), (36): Xaa is C or S
  MOD_RES (13), (14), (15), (16), (17): Xaa is A or G
  MOD_RES (18), (19), (20), (21): Xaa is A or G or is absent
XSRVVMNVQVEKXXXXXXXXXVKAVKVSRLKTPAXXPKP

SEQ ID NO: 49608 - protein, 39 aa, Artificial Sequence
  GFR-binding peptide
  MOD_RES (2), (33), (34): Xaa is C or S
KXSRVIMSMEGIVKPKRGVMIQITINSLAQPVXXPAASA

SEQ ID NO: 49609 - protein, 42 aa, Artificial Sequence; identical to SEQ ID NO: 17502
  GFR-binding peptide
  MOD_RES (1), (38): Xaa is C or S
  MOD_RES (14), (15), (16), (17), (18): Xaa is A or G
  MOD_RES (19), (20), (21), (22): Xaa is A or G or is absent

SEQ ID NO: 49610 - protein, 39 aa, Artificial Sequence; identical to SEQ ID NO: 17503
  GFR-binding peptide
  MOD_RES (1), (3): Xaa is C or S

SEQ ID NO: 49611 - protein, 35 aa, Artificial Sequence
  GFR-binding peptide
  MOD_RES (34), (35): Xaa is C or S
  MOD_RES (12), (13), (14), (15), (16): Xaa is A or G
  MOD_RES (17), (18), (19), (20): Xaa is A or G or is absent
ARVVMNVTAKKXXXXXXXXXIKRVQVPRLQTPAXX

SEQ ID NO: 49612 - protein, 39 aa, Artificial Sequence
  GFR-binding peptide
  MOD_RES (1), (3), (35), (36): Xaa is C or S
XGXGEVVMDSMEGIVVKENEDMIQMTINSLETPVXXAKP

SEQ ID NO: 49613 - protein, 36 aa, Artificial Sequence; identical to SEQ ID NO: 12215
  GFR-binding peptide
  MOD_RES (1), (32), (33): Xaa is C or S

SEQ ID NO: 49614 - protein, 42 aa, Artificial Sequence
  GFR-binding peptide
  MOD_RES (1), (3), (37): Xaa is C or S
XEXKNHQLFNSLQEHQGQHPKIRYYLMTLPEEETPVXELGED

SEQ ID NO: 49615 - protein, 39 aa, Artificial Sequence
  GFR-binding peptide
  MOD_RES (2), (36), (37): Xaa is C or S
  MOD_RES (14), (15), (16), (17), (18): Xaa is A or G
  MOD_RES (19), (20), (21), (22): Xaa is A or G or is absent
GXGEVVMEVQVEKXXXXXXXXXVKAMKVSRLETPVXXAK

SEQ ID NO: 49616 - protein, 36 aa, Artificial Sequence
  GFR-binding peptide
  MOD_RES (33), (34): Xaa is C or S
  MOD_RES (11), (12), (13), (14), (15): Xaa is A or G
  MOD_RES (16), (17), (18), (19): Xaa is A or G or is absent
RVVMNVQVEKXXXXXXXXXVKAVKVSRLKTPAXXPK

SEQ ID NO: 49617 - protein, 40 aa, Artificial Sequence; identical to SEQ ID NO: 17513
  GFR-binding peptide
  MOD_RES (1), (35): Xaa is C or S
  MOD_RES (13), (14), (15), (16), (17): Xaa is A or G
  MOD_RES (18), (19), (20), (21): Xaa is A or G or is absent

SEQ ID NO: 49618 - protein, 38 aa, Artificial Sequence
  GFR-binding peptide
  MOD_RES (2), (4), (36), (37): Xaa is C or S
HXGXARVVMNVQVEKIVNSSDDVKAVKVSRLQTPAXXP

SEQ ID NO: 49619 - protein, 34 aa, Artificial Sequence
  GFR-binding peptide
  MOD_RES (33), (34): Xaa is C or S
  MOD_RES (11), (12), (13), (14), (15): Xaa is A or G
  MOD_RES (16), (17), (18), (19): Xaa is A or G or is absent
RVVMNSMEGIXXXXXXXXXMIQVTINSLKTPAXX

SEQ ID NO: 49620 - protein, 36 aa, Artificial Sequence
  GFR-binding peptide
  MOD_RES (1), (3): Xaa is C or S
  MOD_RES (15), (16), (17), (18), (19): Xaa is A or G
  MOD_RES (20), (21), (22), (23): Xaa is A or G or is absent
XGXARVVMNVQVEKXXXXXXXXXVKAVKVSRLQTPA

SEQ ID NO: 49621 - protein, 38 aa, Artificial Sequence
  GFR-binding peptide
  MOD_RES (2), (36), (37): Xaa is C or S
  MOD_RES (14), (15), (16), (17), (18): Xaa is A or G
  MOD_RES (19), (20), (21), (22): Xaa is A or G or is absent
GXGEVVMDVQVEKXXXXXXXXXVKAMKVSRLETPVXXA

SEQ ID NO: 49622 - protein, 31 aa, Artificial Sequence
  GFR-binding peptide
  MOD_RES (1), (1): Xaa is C or S
XSKVVMSMEGIVKPTRGVMIQITINSLDQPV

SEQ ID NO: 49623 - protein, 36 aa, Artificial Sequence; identical to SEQ ID NO: 12220
  GFR-binding peptide
  MOD_RES (32), (33): Xaa is C or S

SEQ ID NO: 49624 - protein, 42 aa, Artificial Sequence
  GFR-binding peptide
  MOD_RES (1), (3), (37), (38): Xaa is C or S
  MOD_RES (15), (16), (17), (18), (19): Xaa is A or G
  MOD_RES (20), (21), (22), (23): Xaa is A or G or is absent
XGXGEVVMEVQVEKXXXXXXXXXVKAMKVSRLETPVXXAKPI

SEQ ID NO: 49625 - protein, 39 aa, Artificial Sequence; identical to SEQ ID NO: 17517
  GFR-binding peptide
  MOD_RES (2), (4): Xaa is C or S

SEQ ID NO: 49626 - protein, 34 aa, Artificial Sequence; identical to SEQ ID NO: 12221
  GFR-binding peptide
  MOD_RES (31), (32): Xaa is C or S

SEQ ID NO: 49627 - protein, 35 aa, Artificial Sequence
  GFR-binding peptide
  MOD_RES (1), (3), (35): Xaa is C or S
XGXGEVVMESMEGIVVKDYEDMIQMTINSLETPVX

SEQ ID NO: 49628 - protein, 40 aa, Artificial Sequence
  GFR-binding peptide
  MOD_RES (2), (39): Xaa is C or S
AXELHEELRNSLQELKPKKRVYEYYVVPLPEHHVRSPQXK

SEQ ID NO: 49629 - protein, 43 aa, Artificial Sequence; identical to SEQ ID NO: 17518
  GFR-binding peptide
  MOD_RES (2), (39): Xaa is C or S
  MOD_RES (15), (16), (17), (18), (19): Xaa is A or G
  MOD_RES (20), (21), (22), (23): Xaa is A or G or is absent

SEQ ID NO: 49630 - protein, 37 aa, Artificial Sequence
  GFR-binding peptide
  MOD_RES (2), (4), (37): Xaa is C or S
  MOD_RES (15), (16), (17), (18), (19): Xaa is A or G
  MOD_RES (20), (21), (22), (23): Xaa is A or G or is absent
SXKXSKVIMVTAKKXXXXXXXXXIKRIQVPRLDQSVX

SEQ ID NO: 49631 - protein, 41 aa, Artificial Sequence
  GFR-binding peptide
  MOD_RES (2), (4), (35), (36): Xaa is C or S
SXKXSRVIMVTAKKVKPKRGVIKRIQVPRLAQPVXXPAASA

SEQ ID NO: 49632 - protein, 41 aa, Artificial Sequence
  GFR-binding peptide
  MOD_RES (1), (35): Xaa is C or S
  MOD_RES (13), (14), (15), (16), (17): Xaa is A or G
  MOD_RES (18), (19), (20), (21): Xaa is A or G or is absent
XSRVVMNVQVEKXXXXXXXXXVKAVKVSRLKTPAXTPKTVH

SEQ ID NO: 49633 - protein, 34 aa, Artificial Sequence
  GFR-binding peptide
  MOD_RES (1), (34): Xaa is C or S
  MOD_RES (12), (13), (14), (15), (16): Xaa is A or G
  MOD_RES (17), (18), (19), (20): Xaa is A or G or is absent
XSKVVMVQVEKXXXXXXXXXVKAIKVSRLDQPVX

SEQ ID NO: 49634 - protein, 33 aa, Artificial Sequence; identical to SEQ ID NO: 17521
  GFR-binding peptide
  MOD_RES (33), (33): Xaa is C or S
  MOD_RES (11), (12), (13), (14), (15): Xaa is A or G
  MOD_RES (16), (17), (18), (19): Xaa is A or G or is absent

SEQ ID NO: 49635 - protein, 33 aa, Artificial Sequence; identical to SEQ ID NO: 17523
  GFR-binding peptide
  MOD_RES (11), (12), (13), (14), (15): Xaa is A or G
  MOD_RES (16), (17), (18), (19): Xaa is A or G or is absent

SEQ ID NO: 49636 - protein, 37 aa, Artificial Sequence
  GFR-binding peptide
  MOD_RES (36), (36): Xaa is C or S
  MOD_RES (12), (13), (14), (15), (16): Xaa is A or G
  MOD_RES (17), (18), (19), (20): Xaa is A or G or is absent
LHDELTNSLQEXXXXXXXXXYYVVPLPELQVQTPRXQ

SEQ ID NO: 49637 - protein, 33 aa, Artificial Sequence; identical to SEQ ID NO: 12228
  GFR-binding peptide
  MOD_RES (1), (33): Xaa is C or S

SEQ ID NO: 49638 - protein, 43 aa, Artificial Sequence; identical to SEQ ID NO: 12229
  GFR-binding peptide
  MOD_RES (2), (4), (37), (38): Xaa is C or S
  MOD_RES (15), (16), (17), (18), (19): Xaa is A or G
  MOD_RES (20), (21), (22), (23): Xaa is A or G or is absent

SEQ ID NO: 49639 - protein, 36 aa, Artificial Sequence; identical to SEQ ID NO: 12230
  GFR-binding peptide
  MOD_RES (1), (33), (34): Xaa is C or S

SEQ ID NO: 49640 - protein, 34 aa, Artificial Sequence; identical to SEQ ID NO: 12231
  GFR-binding peptide
  MOD_RES (31), (32): Xaa is C or S

SEQ ID NO: 49641 - protein, 36 aa, Artificial Sequence
  GFR-binding peptide
  MOD_RES (1), (32), (33): Xaa is C or S
XSKVIMSMEGIIKPTKGIMIQITINSLDQSVXXPSA

SEQ ID NO: 49642 - protein, 39 aa, Artificial Sequence
  GFR-binding peptide
  MOD_RES (2), (4), (35), (36): Xaa is C or S
SXKXSKVVMSMEGIVKPTRGVMIQITINSLDQPVXXPSA

SEQ ID NO: 49643 - protein, 36 aa, Artificial Sequence; identical to SEQ ID NO: 12233
  GFR-binding peptide
  MOD_RES (31), (32): Xaa is C or S

SEQ ID NO: 49644 - protein, 40 aa, Artificial Sequence
  GFR-binding peptide
  MOD_RES (1), (34), (35): Xaa is C or S
  MOD_RES (12), (13), (14), (15), (16): Xaa is A or G
  MOD_RES (17), (18), (19), (20): Xaa is A or G or is absent
XSKVVMVTAKKXXXXXXXXXIKRIQVPRLDQPVXXPSASA

SEQ ID NO: 49645 - protein, 36 aa, Artificial Sequence
  GFR-binding peptide
  MOD_RES (2), (34), (35): Xaa is C or S
GXSRVVMNSMEGIIVNSSDDMIQVTINSLKTPAXXP

SEQ ID NO: 49646 - protein, 36 aa, Artificial Sequence; identical to SEQ ID NO: 12236
  GFR-binding peptide
  MOD_RES (2), (34), (35): Xaa is C or S

SEQ ID NO: 49647 - protein, 40 aa, Artificial Sequence; identical to SEQ ID NO: 12237
  GFR-binding peptide
  MOD_RES (1), (35), (36): Xaa is C or S
  MOD_RES (13), (14), (15), (16), (17): Xaa is A or G
  MOD_RES (18), (19), (20), (21): Xaa is A or G or is absent

SEQ ID NO: 49648 - protein, 32 aa, Artificial Sequence
  GFR-binding peptide
  MOD_RES (32), (32): Xaa is C or S
GEVVMDVQVEKVVKENEDVKAMKVSRLETPVX

SEQ ID NO: 49649 - protein, 40 aa, Artificial Sequence; identical to SEQ ID NO: 12238
  GFR-binding peptide
  MOD_RES (2), (36), (37): Xaa is C or S
  MOD_RES (14), (15), (16), (17), (18): Xaa is A or G
  MOD_RES (19), (20), (21), (22): Xaa is A or G or is absent

SEQ ID NO: 49650 - protein, 38 aa, Artificial Sequence; identical to SEQ ID NO: 12239
  GFR-binding peptide
  MOD_RES (1), (3), (36), (37): Xaa is C or S
  MOD_RES (14), (15), (16), (17), (18): Xaa is A or G
  MOD_RES (19), (20), (21), (22): Xaa is A or G or is absent

SEQ ID NO: 49651 - protein, 40 aa, Artificial Sequence
  GFR-binding peptide
  MOD_RES (2), (4), (38), (39): Xaa is C or S
  MOD_RES (16), (17), (18), (19), (20): Xaa is A or G
  MOD_RES (21), (22), (23), (24): Xaa is A or G or is absent
RXGXGEVVMESMEGIXXXXXXXXXMIQMTINSLETPVXXA

SEQ ID NO: 49652 - protein, 36 aa, Artificial Sequence; identical to SEQ ID NO: 17535
  GFR-binding peptide
  MOD_RES (33), (33): Xaa is C or S

SEQ ID NO: 49653 - protein, 39 aa, Artificial Sequence; identical to SEQ ID NO: 12242
  GFR-binding peptide
  MOD_RES (2), (4), (35), (36): Xaa is C or S

SEQ ID NO: 49654 - protein, 37 aa, Artificial Sequence; identical to SEQ ID NO: 17537
  GFR-binding peptide
  MOD_RES (36), (36): Xaa is C or S

SEQ ID NO: 49655 - protein, 41 aa, Artificial Sequence
  GFR-binding peptide
  MOD_RES (1), (35), (36): Xaa is C or S
  MOD_RES (13), (14), (15), (16), (17): Xaa is A or G
  MOD_RES (18), (19), (20), (21): Xaa is A or G or is absent
XARVVMNVQVEKXXXXXXXXXVKAVKVSRLQTPAXXPKPVT

SEQ ID NO: 49656 - protein, 38 aa, Artificial Sequence; identical to SEQ ID NO: 12245
  GFR-binding peptide
  MOD_RES (1), (3), (34), (35): Xaa is C or S

SEQ ID NO: 49657 - protein, 37 aa, Artificial Sequence; identical to SEQ ID NO: 12246
  GFR-binding peptide
  MOD_RES (1), (3), (36), (37): Xaa is C or S
  MOD_RES (14), (15), (16), (17), (18): Xaa is A or G
  MOD_RES (19), (20), (21), (22): Xaa is A or G or is absent

SEQ ID NO: 49658 - protein, 37 aa, Artificial Sequence
  GFR-binding peptide
  MOD_RES (35), (35): Xaa is C or S
  MOD_RES (11), (12), (13), (14), (15): Xaa is A or G
  MOD_RES (16), (17), (18), (19): Xaa is A or G or is absent
HDELTNSLQEXXXXXXXXXYYLVTLPELQVQTPRXQV

SEQ ID NO: 49659 - protein, 37 aa, Artificial Sequence; identical to SEQ ID NO: 12247
  GFR-binding peptide
  MOD_RES (2), (34), (35): Xaa is C or S

SEQ ID NO: 49660 - protein, 37 aa, Artificial Sequence; identical to SEQ ID NO: 12248
  GFR-binding peptide
  MOD_RES (31), (32): Xaa is C or S

SEQ ID NO: 49661 - protein, 39 aa, Artificial Sequence; identical to SEQ ID NO: 12252
  GFR-binding peptide
  MOD_RES (1), (3), (35), (36): Xaa is C or S

SEQ ID NO: 49662 - protein, 39 aa, Artificial Sequence
  GFR-binding peptide
  MOD_RES (2), (4), (37), (38): Xaa is C or S
  MOD_RES (15), (16), (17), (18), (19): Xaa is A or G
  MOD_RES (20), (21), (22), (23): Xaa is A or G or is absent
SXKXSKVVMVQVEKXXXXXXXXXVKAIKVSRLDQPVXXP

SEQ ID NO: 49663 - protein, 42 aa, Artificial Sequence
  GFR-binding peptide
  MOD_RES (1), (3), (40): Xaa is C or S
  MOD_RES (16), (17), (18), (19), (20): Xaa is A or G
  MOD_RES (21), (22), (23), (24): Xaa is A or G or is absent
XAXELHEELRNSLQEXXXXXXXXXYYLVTLPEHHVRSPQXKV

SEQ ID NO: 49664 - protein, 35 aa, Artificial Sequence
  GFR-binding peptide
  MOD_RES (2), (4), (35): Xaa is C or S
SXKXSKVIMVTAKKIKPTKGIIKRIQVPRLDQSVX

SEQ ID NO: 49665 - protein, 37 aa, Artificial Sequence; identical to SEQ ID NO: 36432
  GFR-binding peptide
  MOD_RES (1), (3), (34), (35): Xaa is C or S

SEQ ID NO: 49666 - protein, 38 aa, Artificial Sequence
  GFR-binding peptide
  MOD_RES (33), (34): Xaa is C or S
  MOD_RES (11), (12), (13), (14), (15): Xaa is A or G
  MOD_RES (16), (17), (18), (19): Xaa is A or G or is absent
SRVIMVTAKKXXXXXXXXXIKRIQVPRLAQPVXXPAAS

SEQ ID NO: 49667 - protein, 35 aa, Artificial Sequence
  GFR-binding peptide
  MOD_RES (33), (34): Xaa is C or S
  MOD_RES (11), (12), (13), (14), (15): Xaa is A or G
  MOD_RES (16), (17), (18), (19): Xaa is A or G or is absent
RVVMNVQVEKXXXXXXXXXVKAVKVSRLKTPAXXP

SEQ ID NO: 49668 - protein, 36 aa, Artificial Sequence
  GFR-binding peptide
  MOD_RES (2), (36): Xaa is C or S
  MOD_RES (14), (15), (16), (17), (18): Xaa is A or G
  MOD_RES (19), (20), (21), (22): Xaa is A or G or is absent
GXGEVVMEVTAKKXXXXXXXXXIKRMQVPRLETPVX

SEQ ID NO: 49669 - protein, 43 aa, Artificial Sequence
  GFR-binding peptide
  MOD_RES (2), (39): Xaa is C or S
  MOD_RES (15), (16), (17), (18), (19): Xaa is A or G
  MOD_RES (20), (21), (22), (23): Xaa is A or G or is absent
KXALHDELTNSLQEXXXXXXXXXYYLVTLPELQVQTPRXQVNR

SEQ ID NO: 49670 - protein, 33 aa, Artificial Sequence
  GFR-binding peptide
  MOD_RES (33), (33): Xaa is C or S
  MOD_RES (11), (12), (13), (14), (15): Xaa is A or G
  MOD_RES (16), (17), (18), (19): Xaa is A or G or is absent
EVVMDVTAKKXXXXXXXXXIKRMQVPRLETPVX

SEQ ID NO: 49671 - protein, 36 aa, Artificial Sequence
  GFR-binding peptide
  MOD_RES (1), (3), (36): Xaa is C or S
  MOD_RES (14), (15), (16), (17), (18): Xaa is A or G
  MOD_RES (19), (20), (21), (22): Xaa is A or G or is absent
XKXSKVVMVQVEKXXXXXXXXXVKAIKVSRLDQPVX

SEQ ID NO: 49672 - protein, 42 aa, Artificial Sequence
  GFR-binding peptide
  MOD_RES (2), (4), (36), (37): Xaa is C or S
HXGXSRVVMNSMEGIIVNSSDDMIQVTINSLKTPAXXPKPVY

SEQ ID NO: 49673 - protein, 36 aa, Artificial Sequence; identical to SEQ ID NO: 17545
  GFR-binding peptide
  MOD_RES (33), (33): Xaa is C or S

SEQ ID NO: 49674 - protein, 39 aa, Artificial Sequence; identical to SEQ ID NO: 12265
  GFR-binding peptide
  MOD_RES (2), (4), (38), (39): Xaa is C or S
  MOD_RES (16), (17), (18), (19), (20): Xaa is A or G
  MOD_RES (21), (22), (23), (24): Xaa is A or G or is absent

SEQ ID NO: 49675 - protein, 37 aa, Artificial Sequence
  GFR-binding peptide
  MOD_RES (2), (4), (35), (36): Xaa is C or S
SXKXSKVIMSMEGIIKPTKGIMIQITINSLDQSVXXP

SEQ ID NO: 49676 - protein, 34 aa, Artificial Sequence
  GFR-binding peptide
  MOD_RES (2), (4): Xaa is C or S
SXKXSKVVMVTAKKVKPTRGVIKRIQVPRLDQPV

SEQ ID NO: 49677 - protein, 36 aa, Artificial Sequence
  GFR-binding peptide
  MOD_RES (31), (32): Xaa is C or S
EVVMESMEGIVVKDYEDMIQMTINSLETPVXXAKPI

SEQ ID NO: 49678 - protein, 41 aa, Artificial Sequence
  GFR-binding peptide
  MOD_RES (2), (36), (37): Xaa is C or S
  MOD_RES (14), (15), (16), (17), (18): Xaa is A or G
  MOD_RES (19), (20), (21), (22): Xaa is A or G or is absent
GXARVVMNVQVEKXXXXXXXXXVKAVKVSRLQTPAXXPKPV

SEQ ID NO: 49679 - protein, 43 aa, Artificial Sequence; identical to SEQ ID NO: 12270
  GFR-binding peptide
  MOD_RES (1), (3), (37), (38): Xaa is C or S
  MOD_RES (15), (16), (17), (18), (19): Xaa is A or G
  MOD_RES (20), (21), (22), (23): Xaa is A or G or is absent

SEQ ID NO: 49680 - protein, 31 aa, Artificial Sequence
  GFR-binding peptide
  MOD_RES (1), (1): Xaa is C or S
XSKVVMVQVEKVKPTRGVVKAIKVSRLDQPV

SEQ ID NO: 49681 - protein, 39 aa, Artificial Sequence
  GFR-binding peptide
  MOD_RES (1), (38): Xaa is C or S
XALHDELTNSLQEFIPKKRVIEYYLVTLPELQVQTPRXQ

SEQ ID NO: 49682 - protein, 34 aa, Artificial Sequence; identical to SEQ ID NO: 12271
  GFR-binding peptide
  MOD_RES (33), (34): Xaa is C or S
  MOD_RES (11), (12), (13), (14), (15): Xaa is A or G
  MOD_RES (16), (17), (18), (19): Xaa is A or G or is absent

SEQ ID NO: 49683 - protein, 35 aa, Artificial Sequence; identical to SEQ ID NO: 12273
  GFR-binding peptide
  MOD_RES (2), (34), (35): Xaa is C or S

SEQ ID NO: 49684 - protein, 40 aa, Artificial Sequence; identical to SEQ ID NO: 17552
  GFR-binding peptide
  MOD_RES (2), (39): Xaa is C or S
  MOD_RES (15), (16), (17), (18), (19): Xaa is A or G
  MOD_RES (20), (21), (22), (23): Xaa is A or G or is absent

SEQ ID NO: 49685 - protein, 38 aa, Artificial Sequence
  GFR-binding peptide
  MOD_RES (2), (4), (36): Xaa is C or S
HXGXSRVVMNVTAKKIVNSSDDIKRVQVPRLKTPAXTP

SEQ ID NO: 49686 - protein, 33 aa, Artificial Sequence; identical to SEQ ID NO: 12276
  GFR-binding peptide
  MOD_RES (32), (32): Xaa is C or S

SEQ ID NO: 49687 - protein, 35 aa, Artificial Sequence
  GFR-binding peptide
  MOD_RES (33), (34): Xaa is C or S
  MOD_RES (11), (12), (13), (14), (15): Xaa is A or G
  MOD_RES (16), (17), (18), (19): Xaa is A or G or is absent
SKVVMSMEGIXXXXXXXXXMIQITINSLDQPVXXP

SEQ ID NO: 49688 - protein, 37 aa, Artificial Sequence; identical to SEQ ID NO: 12277
  GFR-binding peptide
  MOD_RES (1), (3), (36), (37): Xaa is C or S
  MOD_RES (14), (15), (16), (17), (18): Xaa is A or G
  MOD_RES (19), (20), (21), (22): Xaa is A or G or is absent

SEQ ID NO: 49689 - protein, 37 aa, Artificial Sequence; identical to SEQ ID NO: 17554
  GFR-binding peptide
  MOD_RES (34), (34): Xaa is C or S

SEQ ID NO: 49690 - protein, 39 aa, Artificial Sequence; identical to SEQ ID NO: 12279
  GFR-binding peptide
  MOD_RES (2), (33), (34): Xaa is C or S

SEQ ID NO: 49691 - protein, 35 aa, Artificial Sequence
  GFR-binding peptide
  MOD_RES (33), (33): Xaa is C or S
  MOD_RES (11), (12), (13), (14), (15): Xaa is A or G
  MOD_RES (16), (17), (18), (19): Xaa is A or G or is absent
RVVMNSMEGIXXXXXXXXXMIQVTINSLKTPAXTP

SEQ ID NO: 49692 - protein, 39 aa, Artificial Sequence
  GFR-binding peptide
  MOD_RES (35), (35): Xaa is C or S
HEELRNSLQELKPKKRVYEYYVVPLPEHHVRSPQXKVSS

SEQ ID NO: 49693 - protein, 41 aa, Artificial Sequence; identical to SEQ ID NO: 17557
  GFR-binding peptide
  MOD_RES (2), (4), (41): Xaa is C or S

SEQ ID NO: 49694 - protein, 39 aa, Artificial Sequence
  GFR-binding peptide
  MOD_RES (36), (36): Xaa is C or S
LHDELTNSLQEFIPKKRVIEYYLVTLPELQVQTPRXQVN

SEQ ID NO: 49695 - protein, 41 aa, Artificial Sequence; identical to SEQ ID NO: 36463
  GFR-binding peptide
  MOD_RES (1), (3), (36), (37): Xaa is C or S
  MOD_RES (14), (15), (16), (17), (18): Xaa is A or G
  MOD_RES (19), (20), (21), (22): Xaa is A or G or is absent

SEQ ID NO: 49696 - protein, 33 aa, Artificial Sequence
  GFR-binding peptide
  MOD_RES (1), (3): Xaa is C or S
XKXSKVIMVQVEKIKPTKGIVKAIKVSRLDQSV

SEQ ID NO: 49697 - protein, 37 aa, Artificial Sequence
  GFR-binding peptide
  MOD_RES (2), (4), (36), (37): Xaa is C or S
HXGXSRVVMNVQVEKIVNSSDDVKAVKVSRLKTPAXX

SEQ ID NO: 49698 - protein, 39 aa, Artificial Sequence; identical to SEQ ID NO: 17564
  GFR-binding peptide
  MOD_RES (2), (4), (38): Xaa is C or S
  MOD_RES (16), (17), (18), (19), (20): Xaa is A or G
  MOD_RES (21), (22), (23), (24): Xaa is A or G or is absent

SEQ ID NO: 49699 - protein, 39 aa, Artificial Sequence; identical to SEQ ID NO: 12286
  GFR-binding peptide
  MOD_RES (1), (3), (37), (38): Xaa is C or S
  MOD_RES (15), (16), (17), (18), (19): Xaa is A or G
  MOD_RES (20), (21), (22), (23): Xaa is A or G or is absent

SEQ ID NO: 49700 - protein, 37 aa, Artificial Sequence
  GFR-binding peptide
  MOD_RES (34), (35): Xaa is C or S
  MOD_RES (12), (13), (14), (15), (16): Xaa is A or G
  MOD_RES (17), (18), (19), (20): Xaa is A or G or is absent
ARVVMNSMEGIXXXXXXXXXMIQVTINSLQTPAXXPK

SEQ ID NO: 49701 - protein, 36 aa, Artificial Sequence; identical to SEQ ID NO: 12289
  GFR-binding peptide
  MOD_RES (1), (3), (34), (35): Xaa is C or S

SEQ ID NO: 49702 - protein, 45 aa, Artificial Sequence; identical to SEQ ID NO: 17570
  GFR-binding peptide
  MOD_RES (2), (4), (41): Xaa is C or S

SEQ ID NO: 49703 - protein, 37 aa, Artificial Sequence
  GFR-binding peptide
  MOD_RES (1), (3), (35), (36): Xaa is C or S
XGXSRVVMNSMEGIIVNSSDDMIQVTINSLKTPAXXP

SEQ ID NO: 49704 - protein, 34 aa, Artificial Sequence
  GFR-binding peptide
  MOD_RES (1), (1): Xaa is C or S
  MOD_RES (13), (14), (15), (16), (17): Xaa is A or G
  MOD_RES (18), (19), (20), (21): Xaa is A or G or is absent
XKNHQLFNSLQEXXXXXXXXXYYVMPLPEEETPV

SEQ ID NO: 49705 - protein, 40 aa, Artificial Sequence; identical to SEQ ID NO: 17572
  GFR-binding peptide
  MOD_RES (1), (38): Xaa is C or S
  MOD_RES (14), (15), (16), (17), (18): Xaa is A or G
  MOD_RES (19), (20), (21), (22): Xaa is A or G or is absent

SEQ ID NO: 49706 - protein, 40 aa, Artificial Sequence; identical to SEQ ID NO: 17573
  GFR-binding peptide
  MOD_RES (1), (3), (40): Xaa is C or S

SEQ ID NO: 49707 - protein, 35 aa, Artificial Sequence
  GFR-binding peptide
  MOD_RES (2), (35): Xaa is C or S
  MOD_RES (13), (14), (15), (16), (17): Xaa is A or G
  MOD_RES (18), (19), (20), (21): Xaa is A or G or is absent
KXSKVVMSMEGIXXXXXXXXXMIQITINSLDQPVX

SEQ ID NO: 49708 - protein, 33 aa, Artificial Sequence
  GFR-binding peptide
  MOD_RES (32), (33): Xaa is C or S
ARVVMNSMEGIIVNSSDDMIQVTINSLQTPAXX

SEQ ID NO: 49709 - protein, 35 aa, Artificial Sequence
  GFR-binding peptide
  MOD_RES (31), (32): Xaa is C or S
EVVMEVTAKKVVKDYEDIKRMQVPRLETPVXXAKP

SEQ ID NO: 49710 - protein, 34 aa, Artificial Sequence; identical to SEQ ID NO: 12298
  GFR-binding peptide
  MOD_RES (2), (2): Xaa is C or S
  MOD_RES (13), (14), (15), (16), (17): Xaa is A or G
  MOD_RES (18), (19), (20), (21): Xaa is A or G or is absent

SEQ ID NO: 49711 - protein, 38 aa, Artificial Sequence; identical to SEQ ID NO: 12299
  GFR-binding peptide
  MOD_RES (1), (33), (34): Xaa is C or S

SEQ ID NO: 49712 - protein, 38 aa, Artificial Sequence; identical to SEQ ID NO: 12300
  GFR-binding peptide
  MOD_RES (2), (4), (37), (38): Xaa is C or S
  MOD_RES (15), (16), (17), (18), (19): Xaa is A or G
  MOD_RES (20), (21), (22), (23): Xaa is A or G or is absent

SEQ ID NO: 49713 - protein, 45 aa, Artificial Sequence; identical to SEQ ID NO: 17577
  GFR-binding peptide
  MOD_RES (2), (4), (41): Xaa is C or S
  MOD_RES (17), (18), (19), (20), (21): Xaa is A or G
  MOD_RES (22), (23), (24), (25): Xaa is A or G or is absent

SEQ ID NO: 49714 - protein, 44 aa, Artificial Sequence
  GFR-binding peptide
  MOD_RES (2), (4), (41): Xaa is C or S
  MOD_RES (17), (18), (19), (20), (21): Xaa is A or G
  MOD_RES (22), (23), (24), (25): Xaa is A or G or is absent
AXAXELHEELRNSLQEXXXXXXXXXYYLVTLPEHHVRSPQXKVS

SEQ ID NO: 49715 - protein, 37 aa, Artificial Sequence
  GFR-binding peptide
  MOD_RES (32), (33): Xaa is C or S
GEVVMEVTAKKVVKDYEDIKRMQVPRLETPVXXAKPI

SEQ ID NO: 49716 - protein, 35 aa, Artificial Sequence; identical to SEQ ID NO: 12302
  GFR-binding peptide
  MOD_RES (1), (32), (33): Xaa is C or S

SEQ ID NO: 49717 - protein, 32 aa, Artificial Sequence; identical to SEQ ID NO: 12304
  GFR-binding peptide
  MOD_RES (1), (32): Xaa is C or S

SEQ ID NO: 49718 - protein, 39 aa, Artificial Sequence
  GFR-binding peptide
  MOD_RES (33), (34): Xaa is C or S
  MOD_RES (11), (12), (13), (14), (15): Xaa is A or G
  MOD_RES (16), (17), (18), (19): Xaa is A or G or is absent
SKVVMSMEGIXXXXXXXXXMIQITINSLDQPVXXPSASA

SEQ ID NO: 49719 - protein, 42 aa, Artificial Sequence
  GFR-binding peptide
  MOD_RES (2), (4), (37), (38): Xaa is C or S
  MOD_RES (15), (16), (17), (18), (19): Xaa is A or G
  MOD_RES (20), (21), (22), (23): Xaa is A or G or is absent
SXKXSKVVMVQVEKXXXXXXXXXVKAIKVSRLDQPVXXPSAS

SEQ ID NO: 49720 - protein, 36 aa, Artificial Sequence; identical to SEQ ID NO: 12305
  GFR-binding peptide
  MOD_RES (1), (3), (34), (35): Xaa is C or S

SEQ ID NO: 49721 - protein, 38 aa, Artificial Sequence; identical to SEQ ID NO: 17585
  GFR-binding peptide
  MOD_RES (35), (35): Xaa is C or S

SEQ ID NO: 49722 - protein, 31 aa, Artificial Sequence; identical to SEQ ID NO: 12307
  GFR-binding peptide
  MOD_RES (1), (1): Xaa is C or S

SEQ ID NO: 49723 - protein, 31 aa, Artificial Sequence
  GFR-binding peptide
GEVVMDVQVEKVVKENEDVKAMKVSRLETPV

SEQ ID NO: 49724 - protein, 40 aa, Artificial Sequence; identical to SEQ ID NO: 17589
  GFR-binding peptide
  MOD_RES (2), (4), (38): Xaa is C or S

SEQ ID NO: 49725 - protein, 40 aa, Artificial Sequence; identical to SEQ ID NO: 12309
  GFR-binding peptide
  MOD_RES (2), (4), (36), (37): Xaa is C or S

SEQ ID NO: 49726 - protein, 39 aa, Artificial Sequence
  GFR-binding peptide
  MOD_RES (2), (4), (36), (37): Xaa is C or S
HXGXARVVMNVQVEKIVNSSDDVKAVKVSRLQTPAXXPK

SEQ ID NO: 49727 - protein, 38 aa, Artificial Sequence
  GFR-binding peptide
  MOD_RES (1), (3): Xaa is C or S
  MOD_RES (16), (17), (18), (19), (20): Xaa is A or G
  MOD_RES (21), (22), (23), (24): Xaa is A or G or is absent
XAXELHEELRNSLQEXXXXXXXXXYYLVTLPEHHVRSP

SEQ ID NO: 49728 - protein, 41 aa, Artificial Sequence; identical to SEQ ID NO: 12310
  GFR-binding peptide
  MOD_RES (2), (4), (36), (37): Xaa is C or S

SEQ ID NO: 49729 - protein, 35 aa, Artificial Sequence
  GFR-binding peptide
  MOD_RES (33), (33): Xaa is C or S
  MOD_RES (11), (12), (13), (14), (15): Xaa is A or G
  MOD_RES (16), (17), (18), (19): Xaa is A or G or is absent
NHQLFNSLQEXXXXXXXXXYYVMPLPEEETPVXEL

SEQ ID NO: 49730 - protein, 36 aa, Artificial Sequence; identical to SEQ ID NO: 17593
  GFR-binding peptide
  MOD_RES (1), (1): Xaa is C or S

SEQ ID NO: 49731 - protein, 37 aa, Artificial Sequence
  GFR-binding peptide
  MOD_RES (34), (35): Xaa is C or S
  MOD_RES (12), (13), (14), (15), (16): Xaa is A or G
  MOD_RES (17), (18), (19), (20): Xaa is A or G or is absent
GEVVMDVTAKKXXXXXXXXXIKRMQVPRLETPVXXAK

SEQ ID NO: 49732 - protein, 42 aa, Artificial Sequence
  GFR-binding peptide
  MOD_RES (2), (4), (37), (38): Xaa is C or S
  MOD_RES (15), (16), (17), (18), (19): Xaa is A or G
  MOD_RES (20), (21), (22), (23): Xaa is A or G or is absent
SXKXSKVIMSMEGIXXXXXXXXXMIQITINSLDQSVXXPSAS

SEQ ID NO: 49733 - protein, 40 aa, Artificial Sequence; identical to SEQ ID NO: 17594
  GFR-binding peptide
  MOD_RES (2), (36): Xaa is C or S
  MOD_RES (14), (15), (16), (17), (18): Xaa is A or G
  MOD_RES (19), (20), (21), (22): Xaa is A or G or is absent

SEQ ID NO: 49734 - protein, 39 aa, Artificial Sequence; identical to SEQ ID NO: 17595
  GFR-binding peptide
  MOD_RES (2), (4): Xaa is C or S

SEQ ID NO: 49735 - protein, 35 aa, Artificial Sequence
  GFR-binding peptide
  MOD_RES (34), (35): Xaa is C or S
  MOD_RES (12), (13), (14), (15), (16): Xaa is A or G
  MOD_RES (17), (18), (19), (20): Xaa is A or G or is absent
GEVVMDVQVEKXXXXXXXXXVKAMKVSRLETPVXX

SEQ ID NO: 49736 - protein, 41 aa, Artificial Sequence
  GFR-binding peptide
  MOD_RES (1), (3), (37): Xaa is C or S
XEXKNHQLFNSLQEHQGQHPKIRYYVMPLPEEETPVXELGE

SEQ ID NO: 49737 - protein, 36 aa, Artificial Sequence
  GFR-binding peptide
  MOD_RES (1), (3), (34), (35): Xaa is C or S
XKXSKVIMSMEGIIKPTKGIMIQITINSLDQSVXXP

SEQ ID NO: 49738 - protein, 35 aa, Artificial Sequence; identical to SEQ ID NO: 17596
  GFR-binding peptide
  MOD_RES (1), (1): Xaa is C or S

SEQ ID NO: 49739 - protein, 37 aa, Artificial Sequence; identical to SEQ ID NO: 12318
  GFR-binding peptide
  MOD_RES (2), (36), (37): Xaa is C or S
  MOD_RES (14), (15), (16), (17), (18): Xaa is A or G
  MOD_RES (19), (20), (21), (22): Xaa is A or G or is absent

SEQ ID NO: 49740 - protein, 42 aa, Artificial Sequence; identical to SEQ ID NO: 17598
  GFR-binding peptide
  MOD_RES (2), (4), (38): Xaa is C or S

SEQ ID NO: 49741 - protein, 41 aa, Artificial Sequence
  GFR-binding peptide
  MOD_RES (1), (38): Xaa is C or S
  MOD_RES (14), (15), (16), (17), (18): Xaa is A or G
  MOD_RES (19), (20), (21), (22): Xaa is A or G or is absent
XALHDELTNSLQEXXXXXXXXXYYLVTLPELQVQTPRXQVN

SEQ ID NO: 49742 - protein, 33 aa, Artificial Sequence
  GFR-binding peptide
  MOD_RES (31), (32): Xaa is C or S
SRVIMSMEGIVKPKRGVMIQITINSLAQPVXXP

SEQ ID NO: 49743 - protein, 41 aa, Artificial Sequence
  GFR-binding peptide
  MOD_RES (1), (35): Xaa is C or S
XKNHQLFNSLQEHQGQHPKIRYYLMTLPEEETPVXELGEDN

SEQ ID NO: 49744 - protein, 35 aa, Artificial Sequence
  GFR-binding peptide
  MOD_RES (1), (3), (35): Xaa is C or S
XGXARVVMNSMEGIIVNSSDDMIQVTINSLQTPAX

SEQ ID NO: 49745 - protein, 35 aa, Artificial Sequence; identical to SEQ ID NO: 12320
  GFR-binding peptide
  MOD_RES (1), (32), (33): Xaa is C or S

SEQ ID NO: 49746 - protein, 40 aa, Artificial Sequence; identical to SEQ ID NO: 12321
  GFR-binding peptide
  MOD_RES (2), (4), (36), (37): Xaa is C or S

SEQ ID NO: 49747 - protein, 33 aa, Artificial Sequence
  GFR-binding peptide
  MOD_RES (1), (1): Xaa is C or S
  MOD_RES (12), (13), (14), (15), (16): Xaa is A or G
  MOD_RES (17), (18), (19), (20): Xaa is A or G or is absent
XSKVIMVQVEKXXXXXXXXXVKAIKVSRLDQSV

SEQ ID NO: 49748 - protein, 41 aa, Artificial Sequence
  GFR-binding peptide
  MOD_RES (1), (3), (36), (37): Xaa is C or S
  MOD_RES (14), (15), (16), (17), (18): Xaa is A or G
  MOD_RES (19), (20), (21), (22): Xaa is A or G or is absent
XKXSKVVMSMEGIXXXXXXXXXMIQITINSLDQPVXXPSAS

SEQ ID NO: 49749 - protein, 36 aa, Artificial Sequence; identical to SEQ ID NO: 17602
  GFR-binding peptide
  MOD_RES (2), (2): Xaa is C or S

SEQ ID NO: 49750 - protein, 39 aa, Artificial Sequence
  GFR-binding peptide
  MOD_RES (34), (34): Xaa is C or S
  MOD_RES (12), (13), (14), (15), (16): Xaa is A or G
  MOD_RES (17), (18), (19), (20): Xaa is A or G or is absent
SRVVMNVQVEKXXXXXXXXXVKAVKVSRLKTPAXTPKTV

SEQ ID NO: 49751 - protein, 39 aa, Artificial Sequence; identical to SEQ ID NO: 17604
  GFR-binding peptide
  MOD_RES (2), (39): Xaa is C or S
  MOD_RES (15), (16), (17), (18), (19): Xaa is A or G
  MOD_RES (20), (21), (22), (23): Xaa is A or G or is absent

SEQ ID NO: 49752 - protein, 40 aa, Artificial Sequence; identical to SEQ ID NO: 12325
  GFR-binding peptide
  MOD_RES (1), (34), (35): Xaa is C or S
  MOD_RES (12), (13), (14), (15), (16): Xaa is A or G
  MOD_RES (17), (18), (19), (20): Xaa is A or G or is absent

SEQ ID NO: 49753 - protein, 32 aa, Artificial Sequence
  GFR-binding peptide
  MOD_RES (31), (32): Xaa is C or S
RVVMNVTAKKIVNSSDDIKRVQVPRLKTPAXX

SEQ ID NO: 49754 - protein, 37 aa, Artificial Sequence; identical to SEQ ID NO: 12329
  GFR-binding peptide
  MOD_RES (1), (35), (36): Xaa is C or S
  MOD_RES (13), (14), (15), (16), (17): Xaa is A or G
  MOD_RES (18), (19), (20), (21): Xaa is A or G or is absent

SEQ ID NO: 49755 - protein, 31 aa, Artificial Sequence
  GFR-binding peptide
GEVVMEVQVEKVVKDYEDVKAMKVSRLETPV

SEQ ID NO: 49756 - protein, 37 aa, Artificial Sequence; identical to SEQ ID NO: 12332
  GFR-binding peptide
  MOD_RES (34), (34): Xaa is C or S
  MOD_RES (12), (13), (14), (15), (16): Xaa is A or G
  MOD_RES (17), (18), (19), (20): Xaa is A or G or is absent

SEQ ID NO: 49757 - protein, 42 aa, Artificial Sequence
  GFR-binding peptide
  MOD_RES (1), (3), (37), (38): Xaa is C or S
  MOD_RES (15), (16), (17), (18), (19): Xaa is A or G
  MOD_RES (20), (21), (22), (23): Xaa is A or G or is absent
XGXGEVVMEVTAKKXXXXXXXXXIKRMQVPRLETPVXXAKPI

SEQ ID NO: 49758 - protein, 33 aa, Artificial Sequence
  GFR-binding peptide
KNHQLFNSLQEHQGQHPKIRYYVMPLPEEETPV

SEQ ID NO: 49759 - protein, 32 aa, Artificial Sequence; identical to SEQ ID NO: 17608
  GFR-binding peptide

SEQ ID NO: 49760 - protein, 36 aa, Artificial Sequence; identical to SEQ ID NO: 12335
  GFR-binding peptide
  MOD_RES (31), (32): Xaa is C or S

SEQ ID NO: 49761 - protein, 37 aa, Artificial Sequence
  GFR-binding peptide
  MOD_RES (2), (4), (37): Xaa is C or S
  MOD_RES (15), (16), (17), (18), (19): Xaa is A or G
  MOD_RES (20), (21), (22), (23): Xaa is A or G or is absent
SXKXSRVIMVQVEKXXXXXXXXXVKAIKVSRLAQPVX

SEQ ID NO: 49762 - protein, 35 aa, Artificial Sequence; identical to SEQ ID NO: 12336
  GFR-binding peptide
  MOD_RES (2), (34), (35): Xaa is C or S

SEQ ID NO: 49763 - protein, 39 aa, Artificial Sequence
  GFR-binding peptide
  MOD_RES (1), (35), (36): Xaa is C or S
  MOD_RES (13), (14), (15), (16), (17): Xaa is A or G
  MOD_RES (18), (19), (20), (21): Xaa is A or G or is absent
XGEVVMEVTAKKXXXXXXXXXIKRMQVPRLETPVXXAKP

SEQ ID NO: 49764 - protein, 37 aa, Artificial Sequence
  GFR-binding peptide
  MOD_RES (31), (32): Xaa is C or S
SKVVMSMEGIVKPTRGVMIQITINSLDQPVXXPSASA

SEQ ID NO: 49765 - protein, 34 aa, Artificial Sequence
  GFR-binding peptide
  MOD_RES (1), (1): Xaa is C or S
XKNHQLFNSLQEHQGQHPKIRYYVMPLPEEETPV

SEQ ID NO: 49766 - protein, 35 aa, Artificial Sequence
  GFR-binding peptide
LHDELTNSLQEFIPKKRVIEYYLVTLPELQVQTPR

SEQ ID NO: 49767 - protein, 34 aa, Artificial Sequence
  GFR-binding peptide
  MOD_RES (34), (34): Xaa is C or S
  MOD_RES (12), (13), (14), (15), (16): Xaa is A or G
  MOD_RES (17), (18), (19), (20): Xaa is A or G or is absent
GEVVMEVTAKKXXXXXXXXXIKRMQVPRLETPVX

SEQ ID NO: 49768 - protein, 38 aa, Artificial Sequence
  GFR-binding peptide
  MOD_RES (34), (35): Xaa is C or S
  MOD_RES (12), (13), (14), (15), (16): Xaa is A or G
  MOD_RES (17), (18), (19), (20): Xaa is A or G or is absent
GEVVMDVQVEKXXXXXXXXXVKAMKVSRLETPVXXAKP

SEQ ID NO: 49769 - protein, 34 aa, Artificial Sequence; identical to SEQ ID NO: 12346
  GFR-binding peptide
  MOD_RES (34), (34): Xaa is C or S
  MOD_RES (12), (13), (14), (15), (16): Xaa is A or G
  MOD_RES (17), (18), (19), (20): Xaa is A or G or is absent

SEQ ID NO: 49770 - protein, 40 aa, Artificial Sequence
  GFR-binding peptide
  MOD_RES (1), (3), (37): Xaa is C or S
XEXKNHQLFNSLQEHQGQHPKIRYYVMPLPEEETPVXELG

SEQ ID NO: 49771 - protein, 32 aa, Artificial Sequence; identical to SEQ ID NO: 12347
  GFR-binding peptide
  MOD_RES (31), (32): Xaa is C or S

SEQ ID NO: 49772 - protein, 38 aa, Artificial Sequence
  GFR-binding peptide
  MOD_RES (2), (4), (37), (38): Xaa is C or S
  MOD_RES (15), (16), (17), (18), (19): Xaa is A or G
  MOD_RES (20), (21), (22), (23): Xaa is A or G or is absent
SXKXSKVVMVQVEKXXXXXXXXXVKAIKVSRLDQPVXX

SEQ ID NO: 49773 - protein, 32 aa, Artificial Sequence; identical to SEQ ID NO: 12348
  GFR-binding peptide
  MOD_RES (2), (2): Xaa is C or S

SEQ ID NO: 49774 - protein, 38 aa, Artificial Sequence; identical to SEQ ID NO: 17623
  GFR-binding peptide
  MOD_RES (2), (4): Xaa is C or S

SEQ ID NO: 49775 - protein, 36 aa, Artificial Sequence
  GFR-binding peptide
  MOD_RES (34), (35): Xaa is C or S
  MOD_RES (12), (13), (14), (15), (16): Xaa is A or G
  MOD_RES (17), (18), (19), (20): Xaa is A or G or is absent
GEVVMDSMEGIXXXXXXXXXMIQMTINSLETPVXXA

SEQ ID NO: 49776 - protein, 32 aa, Artificial Sequence
  GFR-binding peptide
  MOD_RES (2), (2): Xaa is C or S
KXSRVIMVQVEKVKPKRGVVKAIKVSRLAQPV

SEQ ID NO: 49777 - protein, 41 aa, Artificial Sequence
  GFR-binding peptide
  MOD_RES (2), (35), (36): Xaa is C or S
  MOD_RES (13), (14), (15), (16), (17): Xaa is A or G
  MOD_RES (18), (19), (20), (21): Xaa is A or G or is absent
KXSKVVMSMEGIXXXXXXXXXMIQITINSLDQPVXXPSASA

SEQ ID NO: 49778 - protein, 36 aa, Artificial Sequence
  GFR-binding peptide
  MOD_RES (2), (35), (36): Xaa is C or S
  MOD_RES (13), (14), (15), (16), (17): Xaa is A or G
  MOD_RES (18), (19), (20), (21): Xaa is A or G or is absent
KXSKVIMSMEGIXXXXXXXXXMIQITINSLDQSVXX

SEQ ID NO: 49779 - protein, 39 aa, Artificial Sequence; identical to SEQ ID NO: 12351
  GFR-binding peptide
  MOD_RES (1), (33), (34): Xaa is C or S

SEQ ID NO: 49780 - protein, 41 aa, Artificial Sequence
  GFR-binding peptide
  MOD_RES (2), (4), (38): Xaa is C or S
  MOD_RES (16), (17), (18), (19), (20): Xaa is A or G
  MOD_RES (21), (22), (23), (24): Xaa is A or G or is absent
HXGXSRVVMNVTAKKXXXXXXXXXIKRVQVPRLKTPAXTPK

SEQ ID NO: 49781 - protein, 43 aa, Artificial Sequence; identical to SEQ ID NO: 17627
  GFR-binding peptide
  MOD_RES (2), (39): Xaa is C or S
  MOD_RES (15), (16), (17), (18), (19): Xaa is A or G
  MOD_RES (20), (21), (22), (23): Xaa is A or G or is absent

SEQ ID NO: 49782 - protein, 38 aa, Artificial Sequence; identical to SEQ ID NO: 12361
  GFR-binding peptide
  MOD_RES (1), (35), (36): Xaa is C or S
  MOD_RES (13), (14), (15), (16), (17): Xaa is A or G
  MOD_RES (18), (19), (20), (21): Xaa is A or G or is absent

SEQ ID NO: 49783 - protein, 37 aa, Artificial Sequence
  GFR-binding peptide
  MOD_RES (36), (36): Xaa is C or S
LHEELRNSLQELKPKKRVYEYYVVPLPEHHVRSPQXK

SEQ ID NO: 49784 - protein, 37 aa, Artificial Sequence
  GFR-binding peptide
  MOD_RES (31), (32): Xaa is C or S
SRVIMVTAKKVKPKRGVIKRIQVPRLAQPVXXPAASA

SEQ ID NO: 49785 - protein, 40 aa, Artificial Sequence
  GFR-binding peptide
  MOD_RES (2), (34), (35): Xaa is C or S
GXARVVMNSMEGIIVNSSDDMIQVTINSLQTPAXXPKPVT

SEQ ID NO: 49786 - protein, 36 aa, Artificial Sequence; identical to SEQ ID NO: 12363
  GFR-binding peptide
  MOD_RES (2), (35), (36): Xaa is C or S
  MOD_RES (13), (14), (15), (16), (17): Xaa is A or G
  MOD_RES (18), (19), (20), (21): Xaa is A or G or is absent

SEQ ID NO: 49787 - protein, 41 aa, Artificial Sequence; identical to SEQ ID NO: 17635
  GFR-binding peptide
  MOD_RES (2), (4), (41): Xaa is C or S
  MOD_RES (17), (18), (19), (20), (21): Xaa is A or G
  MOD_RES (22), (23), (24), (25): Xaa is A or G or is absent

SEQ ID NO: 49788 - protein, 36 aa, Artificial Sequence
  GFR-binding peptide
  MOD_RES (31), (32): Xaa is C or S
SKVVMVTAKKVKPTRGVIKRIQVPRLDQPVXXPSAS

SEQ ID NO: 49789 - protein, 44 aa, Artificial Sequence; identical to SEQ ID NO: 12364
  GFR-binding peptide
  MOD_RES (2), (4), (38), (39): Xaa is C or S
  MOD_RES (16), (17), (18), (19), (20): Xaa is A or G
  MOD_RES (21), (22), (23), (24): Xaa is A or G or is absent

SEQ ID NO: 49790 - protein, 36 aa, Artificial Sequence; identical to SEQ ID NO: 12365
  GFR-binding peptide
  MOD_RES (1), (35), (36): Xaa is C or S
  MOD_RES (13), (14), (15), (16), (17): Xaa is A or G
  MOD_RES (18), (19), (20), (21): Xaa is A or G or is absent

SEQ ID NO: 49791 - protein, 43 aa, Artificial Sequence; identical to SEQ ID NO: 17638
  GFR-binding peptide
  MOD_RES (2), (4), (38): Xaa is C or S

SEQ ID NO: 49792 - protein, 36 aa, Artificial Sequence; identical to SEQ ID NO: 17639
  GFR-binding peptide
  MOD_RES (34), (34): Xaa is C or S

SEQ ID NO: 49793 - protein, 34 aa, Artificial Sequence
  GFR-binding peptide
  MOD_RES (1), (32), (33): Xaa is C or S
XSRVIMVTAKKVKPKRGVIKRIQVPRLAQPVXXP

SEQ ID NO: 49794 - protein, 34 aa, Artificial Sequence
  GFR-binding peptide
  MOD_RES (1), (3), (34): Xaa is C or S
XKXSKVVMVQVEKVKPTRGVVKAIKVSRLDQPVX

SEQ ID NO: 49795 - protein, 37 aa, Artificial Sequence
  GFR-binding peptide
  MOD_RES (2), (34), (35): Xaa is C or S
GXGEVVMESMEGIVVKDYEDMIQMTINSLETPVXXAK

SEQ ID NO: 49796 - protein, 45 aa, Artificial Sequence; identical to SEQ ID NO: 17644
  GFR-binding peptide
  MOD_RES (2), (4), (41): Xaa is C or S
  MOD_RES (17), (18), (19), (20), (21): Xaa is A or G
  MOD_RES (22), (23), (24), (25): Xaa is A or G or is absent

SEQ ID NO: 49797 - protein, 33 aa, Artificial Sequence
  GFR-binding peptide
  MOD_RES (33), (33): Xaa is C or S
  MOD_RES (11), (12), (13), (14), (15): Xaa is A or G
  MOD_RES (16), (17), (18), (19): Xaa is A or G or is absent
EVVMDVQVEKXXXXXXXXXVKAMKVSRLETPVX

SEQ ID NO: 49798 - protein, 38 aa, Artificial Sequence; identical to SEQ ID NO: 17647
  GFR-binding peptide
  MOD_RES (37), (37): Xaa is C or S

SEQ ID NO: 49799 - protein, 39 aa, Artificial Sequence
  GFR-binding peptide
  MOD_RES (1), (33): Xaa is C or S
XSRVVMNSMEGIIVNSSDDMIQVTINSLKTPAXTPKTVH

SEQ ID NO: 49800 - protein, 32 aa, Artificial Sequence; identical to SEQ ID NO: 17653
  GFR-binding peptide
  MOD_RES (11), (12), (13), (14), (15): Xaa is A or G
  MOD_RES (16), (17), (18), (19): Xaa is A or G or is absent

SEQ ID NO: 49801 - protein, 37 aa, Artificial Sequence
  GFR-binding peptide
  MOD_RES (2), (2): Xaa is C or S
  MOD_RES (15), (16), (17), (18), (19): Xaa is A or G
  MOD_RES (20), (21), (22), (23): Xaa is A or G or is absent
KXALHDELTNSLQEXXXXXXXXXYYVVPLPELQVQTP

SEQ ID NO: 49802 - protein, 31 aa, Artificial Sequence
  GFR-binding peptide
SRVVMNVQVEKIVNSSDDVKAVKVSRLKTPA

SEQ ID NO: 49803 - protein, 40 aa, Artificial Sequence
  GFR-binding peptide
  MOD_RES (2), (4): Xaa is C or S
  MOD_RES (17), (18), (19), (20), (21): Xaa is A or G
  MOD_RES (22), (23), (24), (25): Xaa is A or G or is absent
EXKXALHDELTNSLQEXXXXXXXXXYYLVTLPELQVQTPR

SEQ ID NO: 49804 - protein, 38 aa, Artificial Sequence
  GFR-binding peptide
  MOD_RES (34), (34): Xaa is C or S
  MOD_RES (12), (13), (14), (15), (16): Xaa is A or G
  MOD_RES (17), (18), (19), (20): Xaa is A or G or is absent
KNHQLFNSLQEXXXXXXXXXYYLMTLPEEETPVXELGE

SEQ ID NO: 49805 - protein, 35 aa, Artificial Sequence; identical to SEQ ID NO: 36601
  GFR-binding peptide
  MOD_RES (2), (35): Xaa is C or S
  MOD_RES (13), (14), (15), (16), (17): Xaa is A or G
  MOD_RES (18), (19), (20), (21): Xaa is A or G or is absent

SEQ ID NO: 49806 - protein, 38 aa, Artificial Sequence
  GFR-binding peptide
  MOD_RES (2), (33), (34): Xaa is C or S
KXSKVVMVTAKKVKPTRGVIKRIQVPRLDQPVXXPSAS

SEQ ID NO: 49807 - protein, 37 aa, Artificial Sequence; identical to SEQ ID NO: 12373
  GFR-binding peptide
  MOD_RES (2), (36), (37): Xaa is C or S
  MOD_RES (14), (15), (16), (17), (18): Xaa is A or G
  MOD_RES (19), (20), (21), (22): Xaa is A or G or is absent

SEQ ID NO: 49808 - protein, 35 aa, Artificial Sequence; identical to SEQ ID NO: 12374
  GFR-binding peptide
  MOD_RES (33), (34): Xaa is C or S
  MOD_RES (11), (12), (13), (14), (15): Xaa is A or G
  MOD_RES (16), (17), (18), (19): Xaa is A or G or is absent

SEQ ID NO: 49809 - protein, 39 aa, Artificial Sequence
  GFR-binding peptide
  MOD_RES (2), (39): Xaa is C or S
KXALHDELTNSLQEFIPKKRVIEYYVVPLPELQVQTPRX

SEQ ID NO: 49810 - protein, 44 aa, Artificial Sequence
  GFR-binding peptide
  MOD_RES (2), (4), (38), (39): Xaa is C or S
  MOD_RES (16), (17), (18), (19), (20): Xaa is A or G
  MOD_RES (21), (22), (23), (24): Xaa is A or G or is absent
HXGXSRVVMNVQVEKXXXXXXXXXVKAVKVSRLKTPAXXPKPVY

SEQ ID NO: 49811 - protein, 38 aa, Artificial Sequence
  GFR-binding peptide
  MOD_RES (2), (33), (34): Xaa is C or S
KXSKVIMVTAKKIKPTKGIIKRIQVPRLDQSVXXPSAS

SEQ ID NO: 49812 - protein, 34 aa, Artificial Sequence
  GFR-binding peptide
  MOD_RES (2), (2): Xaa is C or S
  MOD_RES (13), (14), (15), (16), (17): Xaa is A or G
  MOD_RES (18), (19), (20), (21): Xaa is A or G or is absent
KXSKVVMSMEGIXXXXXXXXXMIQITINSLDQPV

SEQ ID NO: 49813 - protein, 35 aa, Artificial Sequence; identical to SEQ ID NO: 17662
  GFR-binding peptide
  MOD_RES (35), (35): Xaa is C or S
  MOD_RES (11), (12), (13), (14), (15): Xaa is A or G
  MOD_RES (16), (17), (18), (19): Xaa is A or G or is absent

SEQ ID NO: 49814 - protein, 38 aa, Artificial Sequence
  GFR-binding peptide
  MOD_RES (2), (4): Xaa is C or S
  MOD_RES (17), (18), (19), (20), (21): Xaa is A or G
  MOD_RES (22), (23), (24), (25): Xaa is A or G or is absent
AXAXELHEELRNSLQEXXXXXXXXXYYLVTLPEHHVRS

SEQ ID NO: 49815 - protein, 34 aa, Artificial Sequence; identical to SEQ ID NO: 12380
  GFR-binding peptide
  MOD_RES (32), (33): Xaa is C or S

SEQ ID NO: 49816 - protein, 40 aa, Artificial Sequence; identical to SEQ ID NO: 12381
  GFR-binding peptide
  MOD_RES (1), (3), (36), (37): Xaa is C or S
  MOD_RES (14), (15), (16), (17), (18): Xaa is A or G
  MOD_RES (19), (20), (21), (22): Xaa is A or G or is absent

SEQ ID NO: 49817 - protein, 39 aa, Artificial Sequence
  GFR-binding peptide
  MOD_RES (1), (3), (34), (35): Xaa is C or S
XKXSRVIMSMEGIVKPKRGVMIQITINSLAQPVXXPAAS

SEQ ID NO: 49818 - protein, 37 aa, Artificial Sequence; identical to SEQ ID NO: 12385
  GFR-binding peptide
  MOD_RES (1), (35), (36): Xaa is C or S
  MOD_RES (13), (14), (15), (16), (17): Xaa is A or G
  MOD_RES (18), (19), (20), (21): Xaa is A or G or is absent

SEQ ID NO: 49819 - protein, 39 aa, Artificial Sequence
  GFR-binding peptide
  MOD_RES (34), (35): Xaa is C or S
  MOD_RES (12), (13), (14), (15), (16): Xaa is A or G
  MOD_RES (17), (18), (19), (20): Xaa is A or G or is absent
ARVVMNSMEGIXXXXXXXXXMIQVTINSLQTPAXXPKPV

SEQ ID NO: 49820 - protein, 39 aa, Artificial Sequence
  GFR-binding peptide
  MOD_RES (37), (37): Xaa is C or S
  MOD_RES (13), (14), (15), (16), (17): Xaa is A or G
  MOD_RES (18), (19), (20), (21): Xaa is A or G or is absent
ELHEELRNSLQEXXXXXXXXXYYLVTLPEHHVRSPQXKV

SEQ ID NO: 49821 - protein, 30 aa, Artificial Sequence; identical to SEQ ID NO: 12388
  GFR-binding peptide

SEQ ID NO: 49822 - protein, 31 aa, Artificial Sequence; identical to SEQ ID NO: 12389
  GFR-binding peptide
  MOD_RES (1), (1): Xaa is C or S

SEQ ID NO: 49823 - protein, 33 aa, Artificial Sequence; identical to SEQ ID NO: 17669
  GFR-binding peptide

SEQ ID NO: 49824 - protein, 34 aa, Artificial Sequence
  GFR-binding peptide
ELHEELRNSLQELKPKKRVYEYYVVPLPEHHVRS

SEQ ID NO: 49825 - protein, 35 aa, Artificial Sequence; identical to SEQ ID NO: 12394
  GFR-binding peptide
  MOD_RES (2), (34), (35): Xaa is C or S

SEQ ID NO: 49826 - protein, 39 aa, Artificial Sequence; identical to SEQ ID NO: 17673
  GFR-binding peptide
  MOD_RES (34), (34): Xaa is C or S

SEQ ID NO: 49827 - protein, 38 aa, Artificial Sequence
  GFR-binding peptide
  MOD_RES (1), (33), (34): Xaa is C or S
XSRVVMNSMEGIIVNSSDDMIQVTINSLKTPAXXPKPV

SEQ ID NO: 49828 - protein, 39 aa, Artificial Sequence; identical to SEQ ID NO: 12396
  GFR-binding peptide
  MOD_RES (1), (33): Xaa is C or S

SEQ ID NO: 49829 - protein, 39 aa, Artificial Sequence
  GFR-binding peptide
  MOD_RES (2), (34), (35): Xaa is C or S
GXGEVVMEVQVEKVVKDYEDVKAMKVSRLETPVXXAKPI

SEQ ID NO: 49830 - protein, 36 aa, Artificial Sequence
  GFR-binding peptide
  MOD_RES (31), (32): Xaa is C or S
SRVIMVTAKKVKPKRGVIKRIQVPRLAQPVXXPAAS

SEQ ID NO: 49831 - protein, 38 aa, Artificial Sequence
  GFR-binding peptide
  MOD_RES (2), (34), (35): Xaa is C or S
GXGEVVMESMEGIVVKDYEDMIQMTINSLETPVXXAKP

SEQ ID NO: 49832 - protein, 37 aa, Artificial Sequence
  GFR-binding peptide
  MOD_RES (1), (32), (33): Xaa is C or S
XSRVIMVTAKKVKPKRGVIKRIQVPRLAQPVXXPAAS

SEQ ID NO: 49833 - protein, 32 aa, Artificial Sequence; identical to SEQ ID NO: 12402
  GFR-binding peptide
  MOD_RES (1), (1): Xaa is C or S

SEQ ID NO: 49834 - protein, 40 aa, Artificial Sequence; identical to SEQ ID NO: 17680
  GFR-binding peptide
  MOD_RES (2), (39): Xaa is C or S
  MOD_RES (15), (16), (17), (18), (19): Xaa is A or G
  MOD_RES (20), (21), (22), (23): Xaa is A or G or is absent

SEQ ID NO: 49835 - protein, 36 aa, Artificial Sequence
  GFR-binding peptide
  MOD_RES (2), (34), (35): Xaa is C or S
GXGEVVMDSMEGIVVKENEDMIQMTINSLETPVXXA

SEQ ID NO: 49836 - protein, 38 aa, Artificial Sequence; identical to SEQ ID NO: 12405
  GFR-binding peptide
  MOD_RES (1), (34), (35): Xaa is C or S
  MOD_RES (12), (13), (14), (15), (16): Xaa is A or G
  MOD_RES (17), (18), (19), (20): Xaa is A or G or is absent

SEQ ID NO: 49837 - protein, 35 aa, Artificial Sequence
  GFR-binding peptide
  MOD_RES (33), (33): Xaa is C or S
NHQLFNSLQEHQGQHPKIRYYLMTLPEEETPVXEL

SEQ ID NO: 49838 - protein, 41 aa, Artificial Sequence; identical to SEQ ID NO: 12407
  GFR-binding peptide
  MOD_RES (2), (36): Xaa is C or S
  MOD_RES (14), (15), (16), (17), (18): Xaa is A or G
  MOD_RES (19), (20), (21), (22): Xaa is A or G or is absent

SEQ ID NO: 49839 - protein, 33 aa, Artificial Sequence; identical to SEQ ID NO: 12408
  GFR-binding peptide
  MOD_RES (1), (1): Xaa is C or S
  MOD_RES (12), (13), (14), (15), (16): Xaa is A or G
  MOD_RES (17), (18), (19), (20): Xaa is A or G or is absent

SEQ ID NO: 49840 - protein, 39 aa, Artificial Sequence
  GFR-binding peptide
  MOD_RES (1), (33), (34): Xaa is C or S
XGEVVMDVTAKKVVKENEDIKRMQVPRLETPVXXAKPIK

SEQ ID NO: 49841 - protein, 35 aa, Artificial Sequence; identical to SEQ ID NO: 17686
  GFR-binding peptide
  MOD_RES (13), (14), (15), (16), (17): Xaa is A or G
  MOD_RES (18), (19), (20), (21): Xaa is A or G or is absent

SEQ ID NO: 49842 - protein, 39 aa, Artificial Sequence
  GFR-binding peptide
  MOD_RES (2), (4), (38): Xaa is C or S
  MOD_RES (16), (17), (18), (19), (20): Xaa is A or G
  MOD_RES (21), (22), (23), (24): Xaa is A or G or is absent
HXGXSRVVMNSMEGIXXXXXXXXXMIQVTINSLKTPAXT

SEQ ID NO: 49843 - protein, 35 aa, Artificial Sequence
  GFR-binding peptide
  MOD_RES (2), (4): Xaa is C or S
RXGXGEVVMEVQVEKVVKDYEDVKAMKVSRLETPV

SEQ ID NO: 49844 - protein, 36 aa, Artificial Sequence; identical to SEQ ID NO: 12411
  GFR-binding peptide
  MOD_RES (34), (35): Xaa is C or S
  MOD_RES (12), (13), (14), (15), (16): Xaa is A or G
  MOD_RES (17), (18), (19), (20): Xaa is A or G or is absent

SEQ ID NO: 49845 - protein, 35 aa, Artificial Sequence
  GFR-binding peptide
  MOD_RES (35), (35): Xaa is C or S
  MOD_RES (11), (12), (13), (14), (15): Xaa is A or G
  MOD_RES (16), (17), (18), (19): Xaa is A or G or is absent
HDELTNSLQEXXXXXXXXXYYVVPLPELQVQTPRX

SEQ ID NO: 49846 - protein, 38 aa, Artificial Sequence
  GFR-binding peptide
  MOD_RES (32), (33): Xaa is C or S
SRVVMNSMEGIIVNSSDDMIQVTINSLKTPAXXPKPVY

SEQ ID NO: 49847 - protein, 38 aa, Artificial Sequence
  GFR-binding peptide
  MOD_RES (1), (3), (35): Xaa is C or S
XGXSRVVMNVTAKKIVNSSDDIKRVQVPRLKTPAXTPK

SEQ ID NO: 49848 - protein, 33 aa, Artificial Sequence
  GFR-binding peptide
  MOD_RES (2), (2): Xaa is C or S
GXGEVVMEVQVEKVVKDYEDVKAMKVSRLETPV

SEQ ID NO: 49849 - protein, 39 aa, Artificial Sequence; identical to SEQ ID NO: 17689
  GFR-binding peptide
  MOD_RES (2), (4): Xaa is C or S

SEQ ID NO: 49850 - protein, 37 aa, Artificial Sequence; identical to SEQ ID NO: 12413
  GFR-binding peptide
  MOD_RES (1), (3), (35), (36): Xaa is C or S

SEQ ID NO: 49851 - protein, 34 aa, Artificial Sequence; identical to SEQ ID NO: 12414
  GFR-binding peptide
  MOD_RES (1), (34): Xaa is C or S
  MOD_RES (12), (13), (14), (15), (16): Xaa is A or G
  MOD_RES (17), (18), (19), (20): Xaa is A or G or is absent

SEQ ID NO: 49852 - protein, 34 aa, Artificial Sequence; identical to SEQ ID NO: 12415
  GFR-binding peptide
  MOD_RES (33), (34): Xaa is C or S
  MOD_RES (11), (12), (13), (14), (15): Xaa is A or G
  MOD_RES (16), (17), (18), (19): Xaa is A or G or is absent

SEQ ID NO: 49853 - protein, 38 aa, Artificial Sequence; identical to SEQ ID NO: 17691
  GFR-binding peptide
  MOD_RES (2), (4): Xaa is C or S

SEQ ID NO: 49854 - protein, 41 aa, Artificial Sequence
  GFR-binding peptide
  MOD_RES (37), (37): Xaa is C or S
  MOD_RES (13), (14), (15), (16), (17): Xaa is A or G
  MOD_RES (18), (19), (20), (21): Xaa is A or G or is absent
ELHEELRNSLQEXXXXXXXXXYYVVPLPEHHVRSPQXKVSS

SEQ ID NO: 49855 - protein, 38 aa, Artificial Sequence
  GFR-binding peptide
  MOD_RES (1), (35): Xaa is C or S
  MOD_RES (13), (14), (15), (16), (17): Xaa is A or G
  MOD_RES (18), (19), (20), (21): Xaa is A or G or is absent
XSRVVMNVTAKKXXXXXXXXXIKRVQVPRLKTPAXTPK

SEQ ID NO: 49856 - protein, 37 aa, Artificial Sequence; identical to SEQ ID NO: 12422
  GFR-binding peptide
  MOD_RES (34), (35): Xaa is C or S
  MOD_RES (12), (13), (14), (15), (16): Xaa is A or G
  MOD_RES (17), (18), (19), (20): Xaa is A or G or is absent

SEQ ID NO: 49857 - protein, 37 aa, Artificial Sequence
  GFR-binding peptide
  MOD_RES (2), (4), (36), (37): Xaa is C or S
HXGXSRVVMNSMEGIIVNSSDDMIQVTINSLKTPAXX

SEQ ID NO: 49858 - protein, 35 aa, Artificial Sequence
  GFR-binding peptide
  MOD_RES (1), (3), (35): Xaa is C or S
XGXSRVVMNVTAKKIVNSSDDIKRVQVPRLKTPAX

SEQ ID NO: 49859 - protein, 44 aa, Artificial Sequence
  GFR-binding peptide
  MOD_RES (2), (4), (38), (39): Xaa is C or S
  MOD_RES (16), (17), (18), (19), (20): Xaa is A or G
  MOD_RES (21), (22), (23), (24): Xaa is A or G or is absent
HXGXSRVVMNSMEGIXXXXXXXXXMIQVTINSLKTPAXXPKPVY

SEQ ID NO: 49860 - protein, 36 aa, Artificial Sequence; identical to SEQ ID NO: 12428
  GFR-binding peptide
  MOD_RES (1), (34), (35): Xaa is C or S
  MOD_RES (12), (13), (14), (15), (16): Xaa is A or G
  MOD_RES (17), (18), (19), (20): Xaa is A or G or is absent

SEQ ID NO: 49861 - protein, 41 aa, Artificial Sequence; identical to SEQ ID NO: 12429
  GFR-binding peptide
  MOD_RES (2), (36), (37): Xaa is C or S
  MOD_RES (14), (15), (16), (17), (18): Xaa is A or G
  MOD_RES (19), (20), (21), (22): Xaa is A or G or is absent

SEQ ID NO: 49862 - protein, 33 aa, Artificial Sequence; identical to SEQ ID NO: 17695
  GFR-binding peptide
  MOD_RES (33), (33): Xaa is C or S

SEQ ID NO: 49863 - protein, 42 aa, Artificial Sequence
  GFR-binding peptide
  MOD_RES (2), (4), (38), (39): Xaa is C or S
  MOD_RES (16), (17), (18), (19), (20): Xaa is A or G
  MOD_RES (21), (22), (23), (24): Xaa is A or G or is absent
RXGXGEVVMEVQVEKXXXXXXXXXVKAMKVSRLETPVXXAKP

SEQ ID NO: 49864 - protein, 37 aa, Artificial Sequence
  GFR-binding peptide
  MOD_RES (2), (33), (34): Xaa is C or S
KXSKVIMVQVEKIKPTKGIVKAIKVSRLDQSVXXPSA

SEQ ID NO: 49865 - protein, 36 aa, Artificial Sequence
  GFR-binding peptide
  MOD_RES (2), (35), (36): Xaa is C or S
  MOD_RES (13), (14), (15), (16), (17): Xaa is A or G
  MOD_RES (18), (19), (20), (21): Xaa is A or G or is absent
KXSKVVMSMEGIXXXXXXXXXMIQITINSLDQPVXX

SEQ ID NO: 49866 - protein, 38 aa, Artificial Sequence; identical to SEQ ID NO: 12432
  GFR-binding peptide
  MOD_RES (1), (3), (35), (36): Xaa is C or S

SEQ ID NO: 49867 - protein, 36 aa, Artificial Sequence
  GFR-binding peptide
  MOD_RES (2), (4): Xaa is C or S
  MOD_RES (15), (16), (17), (18), (19): Xaa is A or G
  MOD_RES (20), (21), (22), (23): Xaa is A or G or is absent
SXKXSKVVMVQVEKXXXXXXXXXVKAIKVSRLDQPV

SEQ ID NO: 49868 - protein, 38 aa, Artificial Sequence
  GFR-binding peptide
  MOD_RES (32), (32): Xaa is C or S
SRVVMNSMEGIIVNSSDDMIQVTINSLKTPAXTPKTVH

SEQ ID NO: 49869 - protein, 32 aa, Artificial Sequence; identical to SEQ ID NO: 12437
  GFR-binding peptide
  MOD_RES (32), (32): Xaa is C or S

SEQ ID NO: 49870 - protein, 42 aa, Artificial Sequence
  GFR-binding peptide
  MOD_RES (2), (4), (41): Xaa is C or S
EXKXALHDELTNSLQEFIPKKRVIEYYLVTLPELQVQTPRXQ

SEQ ID NO: 49871 - protein, 41 aa, Artificial Sequence; identical to SEQ ID NO: 12439
  GFR-binding peptide
  MOD_RES (2), (4), (38), (39): Xaa is C or S
  MOD_RES (16), (17), (18), (19), (20): Xaa is A or G
  MOD_RES (21), (22), (23), (24): Xaa is A or G or is absent

SEQ ID NO: 49872 - protein, 41 aa, Artificial Sequence; identical to SEQ ID NO: 17700
  GFR-binding peptide
  MOD_RES (1), (35): Xaa is C or S

SEQ ID NO: 49873 - protein, 36 aa, Artificial Sequence; identical to SEQ ID NO: 12440
  GFR-binding peptide
  MOD_RES (1), (34), (35): Xaa is C or S
  MOD_RES (12), (13), (14), (15), (16): Xaa is A or G
  MOD_RES (17), (18), (19), (20): Xaa is A or G or is absent

SEQ ID NO: 49874 - protein, 41 aa, Artificial Sequence; identical to SEQ ID NO: 17701
  GFR-binding peptide
  MOD_RES (1), (35): Xaa is C or S
  MOD_RES (13), (14), (15), (16), (17): Xaa is A or G
  MOD_RES (18), (19), (20), (21): Xaa is A or G or is absent

SEQ ID NO: 49875 - protein, 39 aa, Artificial Sequence
  GFR-binding peptide
  MOD_RES (1), (34), (35): Xaa is C or S
  MOD_RES (12), (13), (14), (15), (16): Xaa is A or G
  MOD_RES (17), (18), (19), (20): Xaa is A or G or is absent
XSKVVMSMEGIXXXXXXXXXMIQITINSLDQPVXXPSAS

SEQ ID NO: 49876 - protein, 34 aa, Artificial Sequence; identical to SEQ ID NO: 12442
  GFR-binding peptide
  MOD_RES (1), (1): Xaa is C or S
  MOD_RES (13), (14), (15), (16), (17): Xaa is A or G
  MOD_RES (18), (19), (20), (21): Xaa is A or G or is absent

SEQ ID NO: 49877 - protein, 35 aa, Artificial Sequence
  GFR-binding peptide
  MOD_RES (2), (33), (34): Xaa is C or S
KXSRVIMSMEGIVKPKRGVMIQITINSLAQPVXXP

SEQ ID NO: 49878 - protein, 40 aa, Artificial Sequence
  GFR-binding peptide
  MOD_RES (2), (35), (36): Xaa is C or S
  MOD_RES (13), (14), (15), (16), (17): Xaa is A or G
  MOD_RES (18), (19), (20), (21): Xaa is A or G or is absent
KXSKVIMVQVEKXXXXXXXXXVKAIKVSRLDQSVXXPSAS

SEQ ID NO: 49879 - protein, 42 aa, Artificial Sequence
  GFR-binding peptide
  MOD_RES (1), (3), (37): Xaa is C or S
XEXKNHQLFNSLQEHQGQHPKIRYYVMPLPEEETPVXELGED

SEQ ID NO: 49880 - protein, 45 aa, Artificial Sequence
  GFR-binding peptide
  MOD_RES (2), (4), (41): Xaa is C or S
EXKXALHDELTNSLQEFIPKKRVIEYYLVTLPELQVQTPRXQVNR

SEQ ID NO: 49881 - protein, 33 aa, Artificial Sequence; identical to SEQ ID NO: 12445
  GFR-binding peptide
  MOD_RES (31), (32): Xaa is C or S

SEQ ID NO: 49882 - protein, 37 aa, Artificial Sequence; identical to SEQ ID NO: 12447
  GFR-binding peptide
  MOD_RES (1), (35), (36): Xaa is C or S
  MOD_RES (13), (14), (15), (16), (17): Xaa is A or G
  MOD_RES (18), (19), (20), (21): Xaa is A or G or is absent

SEQ ID NO: 49883 - protein, 31 aa, Artificial Sequence
  GFR-binding peptide
  MOD_RES (31), (31): Xaa is C or S
RVVMNVTAKKIVNSSDDIKRVQVPRLQTPAX

SEQ ID NO: 49884 - protein, 32 aa, Artificial Sequence
  GFR-binding peptide
  MOD_RES (31), (32): Xaa is C or S
SRVIMSMEGIVKPKRGVMIQITINSLAQPVXX

SEQ ID NO: 49885 - protein, 37 aa, Artificial Sequence; identical to SEQ ID NO: 12450
  GFR-binding peptide
  MOD_RES (1), (3), (35), (36): Xaa is C or S

SEQ ID NO: 49886 - protein, 39 aa, Artificial Sequence; identical to SEQ ID NO: 17708
  GFR-binding peptide
  MOD_RES (1), (3), (37): Xaa is C or S
  MOD_RES (15), (16), (17), (18), (19): Xaa is A or G
  MOD_RES (20), (21), (22), (23): Xaa is A or G or is absent

SEQ ID NO: 49887 - protein, 40 aa, Artificial Sequence
  GFR-binding peptide
  MOD_RES (1), (38): Xaa is C or S
  MOD_RES (14), (15), (16), (17), (18): Xaa is A or G
  MOD_RES (19), (20), (21), (22): Xaa is A or G or is absent
XELHEELRNSLQEXXXXXXXXXYYLVTLPEHHVRSPQXKV

SEQ ID NO: 49888 - protein, 35 aa, Artificial Sequence
  GFR-binding peptide
  MOD_RES (2), (4): Xaa is C or S
HXGXARVVMNVTAKKIVNSSDDIKRVQVPRLQTPA

SEQ ID NO: 49889 - protein, 38 aa, Artificial Sequence; identical to SEQ ID NO: 17709
  GFR-binding peptide
  MOD_RES (2), (2): Xaa is C or S

SEQ ID NO: 49890 - protein, 38 aa, Artificial Sequence
  GFR-binding peptide
  MOD_RES (34), (35): Xaa is C or S
  MOD_RES (12), (13), (14), (15), (16): Xaa is A or G
  MOD_RES (17), (18), (19), (20): Xaa is A or G or is absent
ARVVMNVTAKKXXXXXXXXXIKRVQVPRLQTPAXXPKP

SEQ ID NO: 49891 - protein, 37 aa, Artificial Sequence; identical to SEQ ID NO: 17711
  GFR-binding peptide
  MOD_RES (36), (36): Xaa is C or S
  MOD_RES (12), (13), (14), (15), (16): Xaa is A or G
  MOD_RES (17), (18), (19), (20): Xaa is A or G or is absent

SEQ ID NO: 49892 - protein, 37 aa, Artificial Sequence; identical to SEQ ID NO: 12452
  GFR-binding peptide
  MOD_RES (2), (35), (36): Xaa is C or S
  MOD_RES (13), (14), (15), (16), (17): Xaa is A or G
  MOD_RES (18), (19), (20), (21): Xaa is A or G or is absent

SEQ ID NO: 49893 - protein, 35 aa, Artificial Sequence
  GFR-binding peptide
  MOD_RES (31), (32): Xaa is C or S
SKVVMVQVEKVKPTRGVVKAIKVSRLDQPVXXPSA

SEQ ID NO: 49894 - protein, 35 aa, Artificial Sequence
  GFR-binding peptide
ELHEELRNSLQELKPKKRVYEYYVVPLPEHHVRSP

SEQ ID NO: 49895 - protein, 33 aa, Artificial Sequence
  GFR-binding peptide
  MOD_RES (12), (13), (14), (15), (16): Xaa is A or G
  MOD_RES (17), (18), (19), (20): Xaa is A or G or is absent
GEVVMDVQVEKXXXXXXXXXVKAMKVSRLETPV

SEQ ID NO: 49896 - protein, 38 aa, Artificial Sequence
  GFR-binding peptide
  MOD_RES (34), (35): Xaa is C or S
  MOD_RES (12), (13), (14), (15), (16): Xaa is A or G
  MOD_RES (17), (18), (19), (20): Xaa is A or G or is absent
GEVVMDSMEGIXXXXXXXXXMIQMTINSLETPVXXAKP

SEQ ID NO: 49897 - protein, 38 aa, Artificial Sequence
  GFR-binding peptide
  MOD_RES (33), (34): Xaa is C or S
  MOD_RES (11), (12), (13), (14), (15): Xaa is A or G
  MOD_RES (16), (17), (18), (19): Xaa is A or G or is absent
SKVVMVQVEKXXXXXXXXXVKAIKVSRLDQPVXXPSAS

SEQ ID NO: 49898 - protein, 38 aa, Artificial Sequence; identical to SEQ ID NO: 12454
  GFR-binding peptide
  MOD_RES (2), (4), (36), (37): Xaa is C or S

SEQ ID NO: 49899 - protein, 44 aa, Artificial Sequence
  GFR-binding peptide
  MOD_RES (2), (4), (38), (39): Xaa is C or S
  MOD_RES (16), (17), (18), (19), (20): Xaa is A or G
  MOD_RES (21), (22), (23), (24): Xaa is A or G or is absent
HXGXARVVMNVQVEKXXXXXXXXXVKAVKVSRLQTPAXXPKPVT

SEQ ID NO: 49900 - protein, 41 aa, Artificial Sequence
  GFR-binding peptide
  MOD_RES (2), (4), (35), (36): Xaa is C or S
SXKXSKVVMVTAKKVKPTRGVIKRIQVPRLDQPVXXPSASA

SEQ ID NO: 49901 - protein, 35 aa, Artificial Sequence; identical to SEQ ID NO: 12455
  GFR-binding peptide
  MOD_RES (2), (2): Xaa is C or S
  MOD_RES (14), (15), (16), (17), (18): Xaa is A or G
  MOD_RES (19), (20), (21), (22): Xaa is A or G or is absent

SEQ ID NO: 49902 - protein, 34 aa, Artificial Sequence; identical to SEQ ID NO: 17721
  GFR-binding peptide
  MOD_RES (11), (12), (13), (14), (15): Xaa is A or G
  MOD_RES (16), (17), (18), (19): Xaa is A or G or is absent

SEQ ID NO: 49903 - protein, 40 aa, Artificial Sequence; identical to SEQ ID NO: 12459
  GFR-binding peptide
  MOD_RES (2), (4), (38), (39): Xaa is C or S
  MOD_RES (16), (17), (18), (19), (20): Xaa is A or G
  MOD_RES (21), (22), (23), (24): Xaa is A or G or is absent

SEQ ID NO: 49904 - protein, 38 aa, Artificial Sequence
  GFR-binding peptide
  MOD_RES (32), (33): Xaa is C or S
GEVVMESMEGIVVKDYEDMIQMTINSLETPVXXAKPIS

SEQ ID NO: 49905 - protein, 40 aa, Artificial Sequence
  GFR-binding peptide
  MOD_RES (1), (35), (36): Xaa is C or S
  MOD_RES (13), (14), (15), (16), (17): Xaa is A or G
  MOD_RES (18), (19), (20), (21): Xaa is A or G or is absent
XARVVMNVTAKKXXXXXXXXXIKRVQVPRLQTPAXXPKPV

SEQ ID NO: 49906 - protein, 35 aa, Artificial Sequence
  GFR-binding peptide
  MOD_RES (1), (33), (34): Xaa is C or S
XGEVVMEVQVEKVVKDYEDVKAMKVSRLETPVXXA

SEQ ID NO: 49907 - protein, 41 aa, Artificial Sequence
  GFR-binding peptide
  MOD_RES (1), (3), (35): Xaa is C or S
XGXSRVVMNVQVEKIVNSSDDVKAVKVSRLKTPAXTPKTVH

SEQ ID NO: 49908 - protein, 38 aa, Artificial Sequence; identical to SEQ ID NO: 17725
  GFR-binding peptide
  MOD_RES (35), (35): Xaa is C or S

SEQ ID NO: 49909 - protein, 38 aa, Artificial Sequence; identical to SEQ ID NO: 12463
  GFR-binding peptide
  MOD_RES (2), (34): Xaa is C or S

SEQ ID NO: 49910 - protein, 31 aa, Artificial Sequence
  GFR-binding peptide
  MOD_RES (31), (31): Xaa is C or S
SKVIMSMEGIIKPTKGIMIQITINSLDQSVX

SEQ ID NO: 49911 - protein, 34 aa, Artificial Sequence
  GFR-binding peptide
  MOD_RES (34), (34): Xaa is C or S
  MOD_RES (12), (13), (14), (15), (16): Xaa is A or G
  MOD_RES (17), (18), (19), (20): Xaa is A or G or is absent
ARVVMNVQVEKXXXXXXXXXVKAVKVSRLQTPAX

SEQ ID NO: 49912 - protein, 39 aa, Artificial Sequence
  GFR-binding peptide
  MOD_RES (2), (33), (34): Xaa is C or S
KXSRVIMVQVEKVKPKRGVVKAIKVSRLAQPVXXPAASA

SEQ ID NO: 49913 - protein, 36 aa, Artificial Sequence
  GFR-binding peptide
  MOD_RES (2), (4), (35), (36): Xaa is C or S
SXKXSKVIMVQVEKIKPTKGIVKAIKVSRLDQSVXX

SEQ ID NO: 49914 - protein, 40 aa, Artificial Sequence
  GFR-binding peptide
  MOD_RES (1), (3), (35), (36): Xaa is C or S
XGXSRVVMNVQVEKIVNSSDDVKAVKVSRLKTPAXXPKPV

SEQ ID NO: 49915 - protein, 34 aa, Artificial Sequence
  GFR-binding peptide
  MOD_RES (2), (34): Xaa is C or S
GXSRVVMNVQVEKIVNSSDDVKAVKVSRLKTPAX

SEQ ID NO: 49916 - protein, 35 aa, Artificial Sequence; identical to SEQ ID NO: 17729
  GFR-binding peptide
  MOD_RES (35), (35): Xaa is C or S

SEQ ID NO: 49917 - protein, 37 aa, Artificial Sequence
  GFR-binding peptide
  MOD_RES (2), (4), (35), (36): Xaa is C or S
SXKXSRVIMVQVEKVKPKRGVVKAIKVSRLAQPVXXP

SEQ ID NO: 49918 - protein, 40 aa, Artificial Sequence
  GFR-binding peptide
  MOD_RES (1), (3), (36), (37): Xaa is C or S
  MOD_RES (14), (15), (16), (17), (18): Xaa is A or G
  MOD_RES (19), (20), (21), (22): Xaa is A or G or is absent
XKXSKVVMVQVEKXXXXXXXXXVKAIKVSRLDQPVXXPSA

SEQ ID NO: 49919 - protein, 38 aa, Artificial Sequence; identical to SEQ ID NO: 12470
  GFR-binding peptide
  MOD_RES (2), (34), (35): Xaa is C or S

SEQ ID NO: 49920 - protein, 35 aa, Artificial Sequence; identical to SEQ ID NO: 36770
  GFR-binding peptide
  MOD_RES (1), (34), (35): Xaa is C or S
  MOD_RES (12), (13), (14), (15), (16): Xaa is A or G
  MOD_RES (17), (18), (19), (20): Xaa is A or G or is absent

SEQ ID NO: 49921 - protein, 36 aa, Artificial Sequence
  GFR-binding peptide
  MOD_RES (31), (32): Xaa is C or S
SKVIMSMEGIIKPTKGIMIQITINSLDQSVXXPSAS

SEQ ID NO: 49922 - protein, 38 aa, Artificial Sequence; identical to SEQ ID NO: 12471
  GFR-binding peptide
  MOD_RES (2), (36): Xaa is C or S
  MOD_RES (14), (15), (16), (17), (18): Xaa is A or G
  MOD_RES (19), (20), (21), (22): Xaa is A or G or is absent

SEQ ID NO: 49923 - protein, 35 aa, Artificial Sequence; identical to SEQ ID NO: 12472
  GFR-binding peptide
  MOD_RES (1), (33): Xaa is C or S

SEQ ID NO: 49924 - protein, 37 aa, Artificial Sequence
  GFR-binding peptide
  MOD_RES (31), (32): Xaa is C or S
EVVMEVQVEKVVKDYEDVKAMKVSRLETPVXXAKPIS

SEQ ID NO: 49925 - protein, 33 aa, Artificial Sequence
  GFR-binding peptide
  MOD_RES (12), (13), (14), (15), (16): Xaa is A or G
  MOD_RES (17), (18), (19), (20): Xaa is A or G or is absent
ARVVMNVTAKKXXXXXXXXXIKRVQVPRLQTPA

SEQ ID NO: 49926 - protein, 35 aa, Artificial Sequence
  GFR-binding peptide
  MOD_RES (33), (34): Xaa is C or S
  MOD_RES (11), (12), (13), (14), (15): Xaa is A or G
  MOD_RES (16), (17), (18), (19): Xaa is A or G or is absent
SKVIMVQVEKXXXXXXXXXVKAIKVSRLDQSVXXP

SEQ ID NO: 49927 - protein, 32 aa, Artificial Sequence; identical to SEQ ID NO: 12475
  GFR-binding peptide
  MOD_RES (11), (12), (13), (14), (15): Xaa is A or G
  MOD_RES (16), (17), (18), (19): Xaa is A or G or is absent

SEQ ID NO: 49928 - protein, 35 aa, Artificial Sequence
  GFR-binding peptide
  MOD_RES (1), (3), (35): Xaa is C or S
XGXGEVVMEVQVEKVVKDYEDVKAMKVSRLETPVX

SEQ ID NO: 49929 - protein, 38 aa, Artificial Sequence; identical to SEQ ID NO: 12476
  GFR-binding peptide
  MOD_RES (32), (32): Xaa is C or S

SEQ ID NO: 49930 - protein, 34 aa, Artificial Sequence
  GFR-binding peptide
  MOD_RES (32), (33): Xaa is C or S
GEVVMDSMEGIVVKENEDMIQMTINSLETPVXXA

SEQ ID NO: 49931 - protein, 38 aa, Artificial Sequence
  GFR-binding peptide
  MOD_RES (1), (33), (34): Xaa is C or S
XGEVVMDSMEGIVVKENEDMIQMTINSLETPVXXAKPI

SEQ ID NO: 49932 - protein, 35 aa, Artificial Sequence; identical to SEQ ID NO: 12478
  GFR-binding peptide
  MOD_RES (32), (33): Xaa is C or S

SEQ ID NO: 49933 - protein, 37 aa, Artificial Sequence
  GFR-binding peptide
  MOD_RES (1), (3): Xaa is C or S
XKXALHDELTNSLQEFIPKKRVIEYYVVPLPELQVQT

SEQ ID NO: 49934 - protein, 36 aa, Artificial Sequence
  GFR-binding peptide
  MOD_RES (2), (36): Xaa is C or S
EXKNHQLFNSLQEHQGQHPKIRYYLMTLPEEETPVX

SEQ ID NO: 49935 - protein, 32 aa, Artificial Sequence
  GFR-binding peptide
  MOD_RES (32), (32): Xaa is C or S
GEVVMEVQVEKVVKDYEDVKAMKVSRLETPVX

SEQ ID NO: 49936 - protein, 44 aa, Artificial Sequence; identical to SEQ ID NO: 17748
  GFR-binding peptide
  MOD_RES (2), (4), (41): Xaa is C or S

SEQ ID NO: 49937 - protein, 33 aa, Artificial Sequence; identical to SEQ ID NO: 17749
  GFR-binding peptide
  MOD_RES (33), (33): Xaa is C or S
  MOD_RES (11), (12), (13), (14), (15): Xaa is A or G
  MOD_RES (16), (17), (18), (19): Xaa is A or G or is absent

SEQ ID NO: 49938 - protein, 35 aa, Artificial Sequence; identical to SEQ ID NO: 12481
  GFR-binding peptide
  MOD_RES (31), (32): Xaa is C or S

SEQ ID NO: 49939 - protein, 39 aa, Artificial Sequence
  GFR-binding peptide
  MOD_RES (1), (35), (36): Xaa is C or S
  MOD_RES (13), (14), (15), (16), (17): Xaa is A or G
  MOD_RES (18), (19), (20), (21): Xaa is A or G or is absent
XGEVVMDVQVEKXXXXXXXXXVKAMKVSRLETPVXXAKP

SEQ ID NO: 49940 - protein, 36 aa, Artificial Sequence
  GFR-binding peptide
  MOD_RES (1), (3), (34), (35): Xaa is C or S
XKXSKVVMVQVEKVKPTRGVVKAIKVSRLDQPVXXP

SEQ ID NO: 49941 - protein, 34 aa, Artificial Sequence
  GFR-binding peptide
  MOD_RES (1), (3): Xaa is C or S
XGXGEVVMEVTAKKVVKDYEDIKRMQVPRLETPV

SEQ ID NO: 49942 - protein, 35 aa, Artificial Sequence; identical to SEQ ID NO: 12483
  GFR-binding peptide
  MOD_RES (2), (33), (34): Xaa is C or S

SEQ ID NO: 49943 - protein, 44 aa, Artificial Sequence; identical to SEQ ID NO: 12486
  GFR-binding peptide
  MOD_RES (2), (4), (38): Xaa is C or S
  MOD_RES (16), (17), (18), (19), (20): Xaa is A or G
  MOD_RES (21), (22), (23), (24): Xaa is A or G or is absent

SEQ ID NO: 49944 - protein, 38 aa, Artificial Sequence
  GFR-binding peptide
  MOD_RES (2), (36), (37): Xaa is C or S
  MOD_RES (14), (15), (16), (17), (18): Xaa is A or G
  MOD_RES (19), (20), (21), (22): Xaa is A or G or is absent
GXSRVVMNSMEGIXXXXXXXXXMIQVTINSLKTPAXXP

SEQ ID NO: 49945 - protein, 39 aa, Artificial Sequence; identical to SEQ ID NO: 17750
  GFR-binding peptide
  MOD_RES (35), (35): Xaa is C or S
  MOD_RES (11), (12), (13), (14), (15): Xaa is A or G
  MOD_RES (16), (17), (18), (19): Xaa is A or G or is absent

SEQ ID NO: 49946 - protein, 33 aa, Artificial Sequence
  GFR-binding peptide
  MOD_RES (1), (33): Xaa is C or S
XSRVVMNVQVEKIVNSSDDVKAVKVSRLKTPAX

SEQ ID NO: 49947 - protein, 35 aa, Artificial Sequence
  GFR-binding peptide
  MOD_RES (1), (3): Xaa is C or S
  MOD_RES (14), (15), (16), (17), (18): Xaa is A or G
  MOD_RES (19), (20), (21), (22): Xaa is A or G or is absent
XKXSKVVMVQVEKXXXXXXXXXVKAIKVSRLDQPV

SEQ ID NO: 49948 - protein, 34 aa, Artificial Sequence
  GFR-binding peptide
  MOD_RES (2), (34): Xaa is C or S
GXARVVMNVTAKKIVNSSDDIKRVQVPRLQTPAX

SEQ ID NO: 49949 - protein, 38 aa, Artificial Sequence; identical to SEQ ID NO: 17757
  GFR-binding peptide
  MOD_RES (1), (3): Xaa is C or S

SEQ ID NO: 49950 - protein, 35 aa, Artificial Sequence
  GFR-binding peptide
  MOD_RES (1), (33), (34): Xaa is C or S
XGEVVMDVQVEKVVKENEDVKAMKVSRLETPVXXA

SEQ ID NO: 49951 - protein, 35 aa, Artificial Sequence
  GFR-binding peptide
  MOD_RES (1), (32), (33): Xaa is C or S
XSKVVMVTAKKVKPTRGVIKRIQVPRLDQPVXXPS

SEQ ID NO: 49952 - protein, 37 aa, Artificial Sequence
  GFR-binding peptide
  MOD_RES (2), (36): Xaa is C or S
  MOD_RES (14), (15), (16), (17), (18): Xaa is A or G
  MOD_RES (19), (20), (21), (22): Xaa is A or G or is absent
GXSRVVMNVQVEKXXXXXXXXXVKAVKVSRLKTPAXT

SEQ ID NO: 49953 - protein, 40 aa, Artificial Sequence
  GFR-binding peptide
  MOD_RES (2), (4), (36), (37): Xaa is C or S
HXGXSRVVMNVTAKKIVNSSDDIKRVQVPRLKTPAXXPKP

SEQ ID NO: 49954 - protein, 35 aa, Artificial Sequence; identical to SEQ ID NO: 12494
  GFR-binding peptide
  MOD_RES (2), (33), (34): Xaa is C or S

SEQ ID NO: 49955 - protein, 36 aa, Artificial Sequence; identical to SEQ ID NO: 12496
  GFR-binding peptide
  MOD_RES (31), (31): Xaa is C or S

SEQ ID NO: 49956 - protein, 39 aa, Artificial Sequence
  GFR-binding peptide
  MOD_RES (2), (4), (37), (38): Xaa is C or S
  MOD_RES (15), (16), (17), (18), (19): Xaa is A or G
  MOD_RES (20), (21), (22), (23): Xaa is A or G or is absent
SXKXSKVIMVTAKKXXXXXXXXXIKRIQVPRLDQSVXXP

SEQ ID NO: 49957 - protein, 37 aa, Artificial Sequence; identical to SEQ ID NO: 17759
  GFR-binding peptide
  MOD_RES (36), (36): Xaa is C or S

SEQ ID NO: 49958 - protein, 37 aa, Artificial Sequence; identical to SEQ ID NO: 12500
  GFR-binding peptide
  MOD_RES (31), (32): Xaa is C or S

SEQ ID NO: 49959 - protein, 36 aa, Artificial Sequence
  GFR-binding peptide
  MOD_RES (1), (1): Xaa is C or S
XELHEELRNSLQELKPKKRVYEYYLVTLPEHHVRSP

SEQ ID NO: 49960 - protein, 42 aa, Artificial Sequence; identical to SEQ ID NO: 12501
  GFR-binding peptide
  MOD_RES (2), (36), (37): Xaa is C or S
  MOD_RES (14), (15), (16), (17), (18): Xaa is A or G
  MOD_RES (19), (20), (21), (22): Xaa is A or G or is absent

SEQ ID NO: 49961 - protein, 35 aa, Artificial Sequence; identical to SEQ ID NO: 12503
  GFR-binding peptide
  MOD_RES (33), (34): Xaa is C or S
  MOD_RES (11), (12), (13), (14), (15): Xaa is A or G
  MOD_RES (16), (17), (18), (19): Xaa is A or G or is absent

SEQ ID NO: 49962 - protein, 35 aa, Artificial Sequence; identical to SEQ ID NO: 17766
  GFR-binding peptide
  MOD_RES (2), (2): Xaa is C or S
  MOD_RES (14), (15), (16), (17), (18): Xaa is A or G
  MOD_RES (19), (20), (21), (22): Xaa is A or G or is absent

SEQ ID NO: 49963 - protein, 39 aa, Artificial Sequence
  GFR-binding peptide
  MOD_RES (1), (34), (35): Xaa is C or S
  MOD_RES (12), (13), (14), (15), (16): Xaa is A or G
  MOD_RES (17), (18), (19), (20): Xaa is A or G or is absent
XSRVIMSMEGIXXXXXXXXXMIQITINSLAQPVXXPAAS

SEQ ID NO: 49964 - protein, 39 aa, Artificial Sequence; identical to SEQ ID NO: 12506
  GFR-binding peptide
  MOD_RES (2), (36), (37): Xaa is C or S
  MOD_RES (14), (15), (16), (17), (18): Xaa is A or G
  MOD_RES (19), (20), (21), (22): Xaa is A or G or is absent

SEQ ID NO: 49965 - protein, 41 aa, Artificial Sequence; identical to SEQ ID NO: 12508
  GFR-binding peptide
  MOD_RES (1), (3), (36), (37): Xaa is C or S
  MOD_RES (14), (15), (16), (17), (18): Xaa is A or G
  MOD_RES (19), (20), (21), (22): Xaa is A or G or is absent

SEQ ID NO: 49966 - protein, 35 aa, Artificial Sequence; identical to SEQ ID NO: 12509
  GFR-binding peptide
  MOD_RES (33), (33): Xaa is C or S
  MOD_RES (11), (12), (13), (14), (15): Xaa is A or G
  MOD_RES (16), (17), (18), (19): Xaa is A or G or is absent

SEQ ID NO: 49967 - protein, 40 aa, Artificial Sequence; identical to SEQ ID NO: 12510
  GFR-binding peptide
  MOD_RES (2), (36), (37): Xaa is C or S
  MOD_RES (14), (15), (16), (17), (18): Xaa is A or G
  MOD_RES (19), (20), (21), (22): Xaa is A or G or is absent

SEQ ID NO: 49968 - protein, 36 aa, Artificial Sequence
  GFR-binding peptide
  MOD_RES (31), (32): Xaa is C or S
EVVMDVQVEKVVKENEDVKAMKVSRLETPVXXAKPI

SEQ ID NO: 49969 - protein, 42 aa, Artificial Sequence
  GFR-binding peptide
  MOD_RES (2), (36): Xaa is C or S
EXKNHQLFNSLQEHQGQHPKIRYYVMPLPEEETPVXELGEDN

SEQ ID NO: 49970 - protein, 39 aa, Artificial Sequence
  GFR-binding peptide
  MOD_RES (1), (38): Xaa is C or S
XELHEELRNSLQELKPKKRVYEYYLVTLPEHHVRSPQXK

SEQ ID NO: 49971 - protein, 38 aa, Artificial Sequence
  GFR-binding peptide
  MOD_RES (1), (3), (36), (37): Xaa is C or S
  MOD_RES (14), (15), (16), (17), (18): Xaa is A or G
  MOD_RES (19), (20), (21), (22): Xaa is A or G or is absent
XKXSRVIMVTAKKXXXXXXXXXIKRIQVPRLAQPVXXP

SEQ ID NO: 49972 - protein, 35 aa, Artificial Sequence
  GFR-binding peptide
  MOD_RES (2), (35): Xaa is C or S
  MOD_RES (13), (14), (15), (16), (17): Xaa is A or G
  MOD_RES (18), (19), (20), (21): Xaa is A or G or is absent
KXSKVIMSMEGIXXXXXXXXXMIQITINSLDQSVX

SEQ ID NO: 49973 - protein, 33 aa, Artificial Sequence; identical to SEQ ID NO: 12513
  GFR-binding peptide
  MOD_RES (33), (33): Xaa is C or S
  MOD_RES (11), (12), (13), (14), (15): Xaa is A or G
  MOD_RES (16), (17), (18), (19): Xaa is A or G or is absent

SEQ ID NO: 49974 - protein, 36 aa, Artificial Sequence; identical to SEQ ID NO: 12515
  GFR-binding peptide
  MOD_RES (31), (32): Xaa is C or S

SEQ ID NO: 49975 - protein, 38 aa, Artificial Sequence; identical to SEQ ID NO: 17770
  GFR-binding peptide
  MOD_RES (37), (37): Xaa is C or S
  MOD_RES (13), (14), (15), (16), (17): Xaa is A or G
  MOD_RES (18), (19), (20), (21): Xaa is A or G or is absent

SEQ ID NO: 49976 - protein, 39 aa, Artificial Sequence
  GFR-binding peptide
  MOD_RES (33), (34): Xaa is C or S
  MOD_RES (11), (12), (13), (14), (15): Xaa is A or G
  MOD_RES (16), (17), (18), (19): Xaa is A or G or is absent
SKVVMVQVEKXXXXXXXXXVKAIKVSRLDQPVXXPSASA

SEQ ID NO: 49977 - protein, 36 aa, Artificial Sequence
  GFR-binding peptide
  MOD_RES (2), (33), (34): Xaa is C or S
KXSRVIMVQVEKVKPKRGVVKAIKVSRLAQPVXXPA

SEQ ID NO: 49978 - protein, 42 aa, Artificial Sequence
  GFR-binding peptide
  MOD_RES (2), (4), (37), (38): Xaa is C or S
  MOD_RES (15), (16), (17), (18), (19): Xaa is A or G
  MOD_RES (20), (21), (22), (23): Xaa is A or G or is absent
SXKXSKVIMVTAKKXXXXXXXXXIKRIQVPRLDQSVXXPSAS

SEQ ID NO: 49979 - protein, 39 aa, Artificial Sequence
  GFR-binding peptide
  MOD_RES (33), (34): Xaa is C or S
  MOD_RES (11), (12), (13), (14), (15): Xaa is A or G
  MOD_RES (16), (17), (18), (19): Xaa is A or G or is absent
EVVMEVTAKKXXXXXXXXXIKRMQVPRLETPVXXAKPIS

SEQ ID NO: 49980 - protein, 34 aa, Artificial Sequence
  GFR-binding peptide
  MOD_RES (32), (33): Xaa is C or S
ARVVMNSMEGIIVNSSDDMIQVTINSLQTPAXXP

SEQ ID NO: 49981 - protein, 37 aa, Artificial Sequence
  GFR-binding peptide
  MOD_RES (1), (1): Xaa is C or S
  MOD_RES (14), (15), (16), (17), (18): Xaa is A or G
  MOD_RES (19), (20), (21), (22): Xaa is A or G or is absent
XALHDELTNSLQEXXXXXXXXXYYVVPLPELQVQTPR

SEQ ID NO: 49982 - protein, 41 aa, Artificial Sequence
  GFR-binding peptide
  MOD_RES (2), (39): Xaa is C or S
  MOD_RES (15), (16), (17), (18), (19): Xaa is A or G
  MOD_RES (20), (21), (22), (23): Xaa is A or G or is absent
KXALHDELTNSLQEXXXXXXXXXYYLVTLPELQVQTPRXQV

SEQ ID NO: 49983 - protein, 41 aa, Artificial Sequence
  GFR-binding peptide
  MOD_RES (2), (4), (37), (38): Xaa is C or S
  MOD_RES (15), (16), (17), (18), (19): Xaa is A or G
  MOD_RES (20), (21), (22), (23): Xaa is A or G or is absent
SXKXSKVIMVQVEKXXXXXXXXXVKAIKVSRLDQSVXXPSA

SEQ ID NO: 49984 - protein, 39 aa, Artificial Sequence; identical to SEQ ID NO: 12521
  GFR-binding peptide
  MOD_RES (1), (35): Xaa is C or S
  MOD_RES (13), (14), (15), (16), (17): Xaa is A or G
  MOD_RES (18), (19), (20), (21): Xaa is A or G or is absent

SEQ ID NO: 49985 - protein, 38 aa, Artificial Sequence; identical to SEQ ID NO: 12522
  GFR-binding peptide
  MOD_RES (1), (34), (35): Xaa is C or S
  MOD_RES (12), (13), (14), (15), (16): Xaa is A or G
  MOD_RES (17), (18), (19), (20): Xaa is A or G or is absent

SEQ ID NO: 49986 - protein, 34 aa, Artificial Sequence; identical to SEQ ID NO: 17777
  GFR-binding peptide
  MOD_RES (13), (14), (15), (16), (17): Xaa is A or G
  MOD_RES (18), (19), (20), (21): Xaa is A or G or is absent

SEQ ID NO: 49987 - protein, 35 aa, Artificial Sequence; identical to SEQ ID NO: 12528
  GFR-binding peptide
  MOD_RES (2), (2): Xaa is C or S
  MOD_RES (14), (15), (16), (17), (18): Xaa is A or G
  MOD_RES (19), (20), (21), (22): Xaa is A or G or is absent

SEQ ID NO: 49988 - protein, 37 aa, Artificial Sequence
  GFR-binding peptide
  MOD_RES (1), (35), (36): Xaa is C or S
  MOD_RES (13), (14), (15), (16), (17): Xaa is A or G
  MOD_RES (18), (19), (20), (21): Xaa is A or G or is absent
XGEVVMDSMEGIXXXXXXXXXMIQMTINSLETPVXXA

SEQ ID NO: 49989 - protein, 43 aa, Artificial Sequence
  GFR-binding peptide
  MOD_RES (2), (4), (38): Xaa is C or S
  MOD_RES (16), (17), (18), (19), (20): Xaa is A or G
  MOD_RES (21), (22), (23), (24): Xaa is A or G or is absent
RXEXKNHQLFNSLQEXXXXXXXXXYYVMPLPEEETPVXELGED

SEQ ID NO: 49990 - protein, 36 aa, Artificial Sequence
  GFR-binding peptide
  MOD_RES (1), (33), (34): Xaa is C or S
XSRVVMNSMEGIIVNSSDDMIQVTINSLKTPAXXPK

SEQ ID NO: 49991 - protein, 36 aa, Artificial Sequence
  GFR-binding peptide
  MOD_RES (1), (32), (33): Xaa is C or S
XSKVVMVTAKKVKPTRGVIKRIQVPRLDQPVXXPSA

SEQ ID NO: 49992 - protein, 41 aa, Artificial Sequence
  GFR-binding peptide
  MOD_RES (2), (35), (36): Xaa is C or S
  MOD_RES (13), (14), (15), (16), (17): Xaa is A or G
  MOD_RES (18), (19), (20), (21): Xaa is A or G or is absent
KXSRVIMVQVEKXXXXXXXXXVKAIKVSRLAQPVXXPAASA

SEQ ID NO: 49993 - protein, 36 aa, Artificial Sequence; identical to SEQ ID NO: 17781
  GFR-binding peptide

SEQ ID NO: 49994 - protein, 38 aa, Artificial Sequence
  GFR-binding peptide
  MOD_RES (2), (4), (36), (37): Xaa is C or S
RXGXGEVVMDVTAKKVVKENEDIKRMQVPRLETPVXXA

SEQ ID NO: 49995 - protein, 36 aa, Artificial Sequence; identical to SEQ ID NO: 12530
  GFR-binding peptide
  MOD_RES (1), (3): Xaa is C or S
  MOD_RES (15), (16), (17), (18), (19): Xaa is A or G
  MOD_RES (20), (21), (22), (23): Xaa is A or G or is absent

SEQ ID NO: 49996 - protein, 35 aa, Artificial Sequence; identical to SEQ ID NO: 17782
  GFR-binding peptide
  MOD_RES (1), (1): Xaa is C or S
  MOD_RES (14), (15), (16), (17), (18): Xaa is A or G
  MOD_RES (19), (20), (21), (22): Xaa is A or G or is absent

SEQ ID NO: 49997 - protein, 40 aa, Artificial Sequence
  GFR-binding peptide
  MOD_RES (2), (4), (38), (39): Xaa is C or S
  MOD_RES (16), (17), (18), (19), (20): Xaa is A or G
  MOD_RES (21), (22), (23), (24): Xaa is A or G or is absent
RXGXGEVVMEVQVEKXXXXXXXXXVKAMKVSRLETPVXXA

SEQ ID NO: 49998 - protein, 36 aa, Artificial Sequence
  GFR-binding peptide
  MOD_RES (1), (35), (36): Xaa is C or S
  MOD_RES (13), (14), (15), (16), (17): Xaa is A or G
  MOD_RES (18), (19), (20), (21): Xaa is A or G or is absent
XSRVVMNSMEGIXXXXXXXXXMIQVTINSLKTPAXX

SEQ ID NO: 49999 - protein, 44 aa, Artificial Sequence
  GFR-binding peptide
  MOD_RES (2), (4), (38), (39): Xaa is C or S
  MOD_RES (16), (17), (18), (19), (20): Xaa is A or G
  MOD_RES (21), (22), (23), (24): Xaa is A or G or is absent
RXGXGEVVMESMEGIXXXXXXXXXMIQMTINSLETPVXXAKPIS

SEQ ID NO: 50000 - protein, 40 aa, Artificial Sequence; identical to SEQ ID NO: 17785
  GFR-binding peptide
  MOD_RES (2), (4), (38): Xaa is C or S

SEQ ID NO: 50001 - protein, 39 aa, Artificial Sequence
  GFR-binding peptide
  MOD_RES (2), (33), (34): Xaa is C or S
KXSKVVMVTAKKVKPTRGVIKRIQVPRLDQPVXXPSASA

SEQ ID NO: 50002 - protein, 39 aa, Artificial Sequence
  GFR-binding peptide
  MOD_RES (33), (34): Xaa is C or S
  MOD_RES (11), (12), (13), (14), (15): Xaa is A or G
  MOD_RES (16), (17), (18), (19): Xaa is A or G or is absent
EVVMEVQVEKXXXXXXXXXVKAMKVSRLETPVXXAKPIS

SEQ ID NO: 50003 - protein, 39 aa, Artificial Sequence
  GFR-binding peptide
  MOD_RES (1), (3), (37), (38): Xaa is C or S
  MOD_RES (15), (16), (17), (18), (19): Xaa is A or G
  MOD_RES (20), (21), (22), (23): Xaa is A or G or is absent
XGXGEVVMDSMEGIXXXXXXXXXMIQMTINSLETPVXXA

SEQ ID NO: 50004 - protein, 36 aa, Artificial Sequence
  GFR-binding peptide
  MOD_RES (35), (35): Xaa is C or S
  MOD_RES (11), (12), (13), (14), (15): Xaa is A or G
  MOD_RES (16), (17), (18), (19): Xaa is A or G or is absent
HEELRNSLQEXXXXXXXXXYYVVPLPEHHVRSPQXK

SEQ ID NO: 50005 - protein, 36 aa, Artificial Sequence
  GFR-binding peptide
  MOD_RES (2), (4), (36): Xaa is C or S
HXGXARVVMNVTAKKIVNSSDDIKRVQVPRLQTPAX

SEQ ID NO: 50006 - protein, 33 aa, Artificial Sequence; identical to SEQ ID NO: 12543
  GFR-binding peptide
  MOD_RES (1), (33): Xaa is C or S

SEQ ID NO: 50007 - protein, 37 aa, Artificial Sequence; identical to SEQ ID NO: 17788
  GFR-binding peptide
  MOD_RES (36), (36): Xaa is C or S

SEQ ID NO: 50008 - protein, 37 aa, Artificial Sequence; identical to SEQ ID NO: 17789
  GFR-binding peptide
  MOD_RES (2), (2): Xaa is C or S

SEQ ID NO: 50009 - protein, 35 aa, Artificial Sequence; identical to SEQ ID NO: 12549
  GFR-binding peptide
  MOD_RES (33), (34): Xaa is C or S
  MOD_RES (11), (12), (13), (14), (15): Xaa is A or G
  MOD_RES (16), (17), (18), (19): Xaa is A or G or is absent

SEQ ID NO: 50010 - protein, 38 aa, Artificial Sequence
  GFR-binding peptide
  MOD_RES (1), (3), (37), (38): Xaa is C or S
  MOD_RES (15), (16), (17), (18), (19): Xaa is A or G
  MOD_RES (20), (21), (22), (23): Xaa is A or G or is absent
XGXGEVVMEVQVEKXXXXXXXXXVKAMKVSRLETPVXX

SEQ ID NO: 50011 - protein, 30 aa, Artificial Sequence
  GFR-binding peptide
RVVMNSMEGIIVNSSDDMIQVTINSLQTPA

SEQ ID NO: 50012 - protein, 38 aa, Artificial Sequence; identical to SEQ ID NO: 12550
  GFR-binding peptide
  MOD_RES (2), (34), (35): Xaa is C or S

SEQ ID NO: 50013 - protein, 34 aa, Artificial Sequence; identical to SEQ ID NO: 12552
  GFR-binding peptide
  MOD_RES (2), (2): Xaa is C or S
  MOD_RES (13), (14), (15), (16), (17): Xaa is A or G
  MOD_RES (18), (19), (20), (21): Xaa is A or G or is absent

SEQ ID NO: 50014 - protein, 35 aa, Artificial Sequence; identical to SEQ ID NO: 12553
  GFR-binding peptide
  MOD_RES (33), (33): Xaa is C or S
  MOD_RES (11), (12), (13), (14), (15): Xaa is A or G
  MOD_RES (16), (17), (18), (19): Xaa is A or G or is absent

SEQ ID NO: 50015 - protein, 38 aa, Artificial Sequence
  GFR-binding peptide
  MOD_RES (2), (4), (37), (38): Xaa is C or S
  MOD_RES (15), (16), (17), (18), (19): Xaa is A or G
  MOD_RES (20), (21), (22), (23): Xaa is A or G or is absent
SXKXSKVIMSMEGIXXXXXXXXXMIQITINSLDQSVXX

SEQ ID NO: 50016 - protein, 35 aa, Artificial Sequence; identical to SEQ ID NO: 17795
  GFR-binding peptide
  MOD_RES (2), (2): Xaa is C or S
  MOD_RES (14), (15), (16), (17), (18): Xaa is A or G
  MOD_RES (19), (20), (21), (22): Xaa is A or G or is absent

SEQ ID NO: 50017 - protein, 44 aa, Artificial Sequence; identical to SEQ ID NO: 12554
  GFR-binding peptide
  MOD_RES (2), (4), (38), (39): Xaa is C or S
  MOD_RES (16), (17), (18), (19), (20): Xaa is A or G
  MOD_RES (21), (22), (23), (24): Xaa is A or G or is absent

SEQ ID NO: 50018 - protein, 42 aa, Artificial Sequence
  GFR-binding peptide
  MOD_RES (1), (3), (40): Xaa is C or S
XKXALHDELTNSLQEFIPKKRVIEYYLVTLPELQVQTPRXQV

SEQ ID NO: 50019 - protein, 38 aa, Artificial Sequence
  GFR-binding peptide
  MOD_RES (33), (34): Xaa is C or S
  MOD_RES (11), (12), (13), (14), (15): Xaa is A or G
  MOD_RES (16), (17), (18), (19): Xaa is A or G or is absent
SKVVMVTAKKXXXXXXXXXIKRIQVPRLDQPVXXPSAS

SEQ ID NO: 50020 - protein, 39 aa, Artificial Sequence
  GFR-binding peptide
  MOD_RES (1), (33), (34): Xaa is C or S
XSRVVMNVTAKKIVNSSDDIKRVQVPRLKTPAXXPKPVY

SEQ ID NO: 50021 - protein, 39 aa, Artificial Sequence; identical to SEQ ID NO: 12557
  GFR-binding peptide
  MOD_RES (1), (35), (36): Xaa is C or S
  MOD_RES (13), (14), (15), (16), (17): Xaa is A or G
  MOD_RES (18), (19), (20), (21): Xaa is A or G or is absent

SEQ ID NO: 50022 - protein, 35 aa, Artificial Sequence; identical to SEQ ID NO: 12558
  GFR-binding peptide
  MOD_RES (1), (3), (35): Xaa is C or S

SEQ ID NO: 50023 - protein, 38 aa, Artificial Sequence
  GFR-binding peptide
  MOD_RES (2), (4), (38): Xaa is C or S
  MOD_RES (16), (17), (18), (19), (20): Xaa is A or G
  MOD_RES (21), (22), (23), (24): Xaa is A or G or is absent
RXGXGEVVMDVTAKKXXXXXXXXXIKRMQVPRLETPVX

SEQ ID NO: 50024 - protein, 43 aa, Artificial Sequence
  GFR-binding peptide
  MOD_RES (1), (3), (37), (38): Xaa is C or S
  MOD_RES (15), (16), (17), (18), (19): Xaa is A or G
  MOD_RES (20), (21), (22), (23): Xaa is A or G or is absent
XGXSRVVMNSMEGIXXXXXXXXXMIQVTINSLKTPAXXPKPVY

SEQ ID NO: 50025 - protein, 38 aa, Artificial Sequence; identical to SEQ ID NO: 12561
  GFR-binding peptide
  MOD_RES (1), (33), (34): Xaa is C or S

SEQ ID NO: 50026 - protein, 40 aa, Artificial Sequence; identical to SEQ ID NO: 12562
  GFR-binding peptide
  MOD_RES (1), (35): Xaa is C or S
  MOD_RES (13), (14), (15), (16), (17): Xaa is A or G
  MOD_RES (18), (19), (20), (21): Xaa is A or G or is absent

SEQ ID NO: 50027 - protein, 37 aa, Artificial Sequence; identical to SEQ ID NO: 12563
  GFR-binding peptide
  MOD_RES (2), (4), (36), (37): Xaa is C or S

SEQ ID NO: 50028 - protein, 35 aa, Artificial Sequence
  GFR-binding peptide
  MOD_RES (2), (4): Xaa is C or S
RXGXGEVVMESMEGIVVKDYEDMIQMTINSLETPV

SEQ ID NO: 50029 - protein, 38 aa, Artificial Sequence
  GFR-binding peptide
  MOD_RES (1), (32), (33): Xaa is C or S
XSRVIMVTAKKVKPKRGVIKRIQVPRLAQPVXXPAASA

SEQ ID NO: 50030 - protein, 35 aa, Artificial Sequence
  GFR-binding peptide
  MOD_RES (1), (3), (34), (35): Xaa is C or S
XKXSKVVMVQVEKVKPTRGVVKAIKVSRLDQPVXX

SEQ ID NO: 50031 - protein, 36 aa, Artificial Sequence
  GFR-binding peptide
  MOD_RES (1), (1): Xaa is C or S
XELHEELRNSLQELKPKKRVYEYYVVPLPEHHVRSP

SEQ ID NO: 50032 - protein, 41 aa, Artificial Sequence
  GFR-binding peptide
  MOD_RES (2), (36): Xaa is C or S
EXKNHQLFNSLQEHQGQHPKIRYYLMTLPEEETPVXELGED

SEQ ID NO: 50033 - protein, 39 aa, Artificial Sequence; identical to SEQ ID NO: 12571
  GFR-binding peptide
  MOD_RES (2), (36), (37): Xaa is C or S
  MOD_RES (14), (15), (16), (17), (18): Xaa is A or G
  MOD_RES (19), (20), (21), (22): Xaa is A or G or is absent

SEQ ID NO: 50034 - protein, 43 aa, Artificial Sequence
  GFR-binding peptide
  MOD_RES (2), (39): Xaa is C or S
  MOD_RES (15), (16), (17), (18), (19): Xaa is A or G
  MOD_RES (20), (21), (22), (23): Xaa is A or G or is absent
KXALHDELTNSLQEXXXXXXXXXYYVVPLPELQVQTPRXQVNR

SEQ ID NO: 50035 - protein, 37 aa, Artificial Sequence; identical to SEQ ID NO: 17799
  GFR-binding peptide
  MOD_RES (1), (1): Xaa is C or S

SEQ ID NO: 50036 - protein, 39 aa, Artificial Sequence
  GFR-binding peptide
  MOD_RES (2), (36): Xaa is C or S
EXKNHQLFNSLQEHQGQHPKIRYYLMTLPEEETPVXELG

SEQ ID NO: 50037 - protein, 35 aa, Artificial Sequence; identical to SEQ ID NO: 12580
  GFR-binding peptide
  MOD_RES (1), (33), (34): Xaa is C or S

SEQ ID NO: 50038 - protein, 38 aa, Artificial Sequence
  GFR-binding peptide
  MOD_RES (37), (37): Xaa is C or S
ALHDELTNSLQEFIPKKRVIEYYVVPLPELQVQTPRXQ

SEQ ID NO: 50039 - protein, 35 aa, Artificial Sequence
  GFR-binding peptide
  MOD_RES (33), (34): Xaa is C or S
  MOD_RES (11), (12), (13), (14), (15): Xaa is A or G
  MOD_RES (16), (17), (18), (19): Xaa is A or G or is absent
SRVIMSMEGIXXXXXXXXXMIQITINSLAQPVXXP

SEQ ID NO: 50040 - protein, 41 aa, Artificial Sequence
  GFR-binding peptide
  MOD_RES (2), (4), (41): Xaa is C or S
  MOD_RES (17), (18), (19), (20), (21): Xaa is A or G
  MOD_RES (22), (23), (24), (25): Xaa is A or G or is absent
AXAXELHEELRNSLQEXXXXXXXXXYYVVPLPEHHVRSPQX

SEQ ID NO: 50041 - protein, 41 aa, Artificial Sequence
  GFR-binding peptide
  MOD_RES (2), (35), (36): Xaa is C or S
  MOD_RES (13), (14), (15), (16), (17): Xaa is A or G
  MOD_RES (18), (19), (20), (21): Xaa is A or G or is absent
KXSKVIMVQVEKXXXXXXXXXVKAIKVSRLDQSVXXPSASA

SEQ ID NO: 50042 - protein, 35 aa, Artificial Sequence
  GFR-binding peptide
  MOD_RES (13), (14), (15), (16), (17): Xaa is A or G
  MOD_RES (18), (19), (20), (21): Xaa is A or G or is absent
ALHDELTNSLQEXXXXXXXXXYYLVTLPELQVQTP

SEQ ID NO: 50043 - protein, 44 aa, Artificial Sequence
  GFR-binding peptide
  MOD_RES (1), (3), (40): Xaa is C or S
XKXALHDELTNSLQEFIPKKRVIEYYVVPLPELQVQTPRXQVNR

SEQ ID NO: 50044 - protein, 40 aa, Artificial Sequence
  GFR-binding peptide
  MOD_RES (2), (35), (36): Xaa is C or S
  MOD_RES (13), (14), (15), (16), (17): Xaa is A or G
  MOD_RES (18), (19), (20), (21): Xaa is A or G or is absent
KXSRVIMVQVEKXXXXXXXXXVKAIKVSRLAQPVXXPAAS

SEQ ID NO: 50045 - protein, 38 aa, Artificial Sequence
  GFR-binding peptide
  MOD_RES (1), (33), (34): Xaa is C or S
XGEVVMDVQVEKVVKENEDVKAMKVSRLETPVXXAKPI

SEQ ID NO: 50046 - protein, 39 aa, Artificial Sequence
  GFR-binding peptide
  MOD_RES (1), (3), (36), (37): Xaa is C or S
  MOD_RES (14), (15), (16), (17), (18): Xaa is A or G
  MOD_RES (19), (20), (21), (22): Xaa is A or G or is absent
XKXSKVVMVQVEKXXXXXXXXXVKAIKVSRLDQPVXXPS

SEQ ID NO: 50047 - protein, 37 aa, Artificial Sequence
  GFR-binding peptide
  MOD_RES (36), (36): Xaa is C or S
  MOD_RES (12), (13), (14), (15), (16): Xaa is A or G
  MOD_RES (17), (18), (19), (20): Xaa is A or G or is absent
LHEELRNSLQEXXXXXXXXXYYVVPLPEHHVRSPQXK

SEQ ID NO: 50048 - protein, 38 aa, Artificial Sequence; identical to SEQ ID NO: 12588
  GFR-binding peptide
  MOD_RES (1), (33), (34): Xaa is C or S

SEQ ID NO: 50049 - protein, 38 aa, Artificial Sequence
  GFR-binding peptide
  MOD_RES (1), (38): Xaa is C or S
  MOD_RES (14), (15), (16), (17), (18): Xaa is A or G
  MOD_RES (19), (20), (21), (22): Xaa is A or G or is absent
XELHEELRNSLQEXXXXXXXXXYYLVTLPEHHVRSPQX

SEQ ID NO: 50050 - protein, 43 aa, Artificial Sequence
  GFR-binding peptide
  MOD_RES (2), (4), (41): Xaa is C or S
  MOD_RES (17), (18), (19), (20), (21): Xaa is A or G
  MOD_RES (22), (23), (24), (25): Xaa is A or G or is absent
EXKXALHDELTNSLQEXXXXXXXXXYYVVPLPELQVQTPRXQV

SEQ ID NO: 50051 - protein, 36 aa, Artificial Sequence
  GFR-binding peptide
  MOD_RES (2), (2): Xaa is C or S
  MOD_RES (15), (16), (17), (18), (19): Xaa is A or G
  MOD_RES (20), (21), (22), (23): Xaa is A or G or is absent
AXELHEELRNSLQEXXXXXXXXXYYVVPLPEHHVRS

SEQ ID NO: 50052 - protein, 39 aa, Artificial Sequence
  GFR-binding peptide
  MOD_RES (2), (4), (37), (38): Xaa is C or S
  MOD_RES (15), (16), (17), (18), (19): Xaa is A or G
  MOD_RES (20), (21), (22), (23): Xaa is A or G or is absent
SXKXSKVIMSMEGIXXXXXXXXXMIQITINSLDQSVXXP

SEQ ID NO: 50053 - protein, 34 aa, Artificial Sequence
  GFR-binding peptide
  MOD_RES (31), (32): Xaa is C or S
RVVMNSMEGIIVNSSDDMIQVTINSLKTPAXXPK

SEQ ID NO: 50054 - protein, 34 aa, Artificial Sequence; identical to SEQ ID NO: 17812
  GFR-binding peptide
  MOD_RES (11), (12), (13), (14), (15): Xaa is A or G
  MOD_RES (16), (17), (18), (19): Xaa is A or G or is absent

SEQ ID NO: 50055 - protein, 33 aa, Artificial Sequence
  GFR-binding peptide
HEELRNSLQELKPKKRVYEYYLVTLPEHHVRSP

SEQ ID NO: 50056 - protein, 38 aa, Artificial Sequence; identical to SEQ ID NO: 12595
  GFR-binding peptide
  MOD_RES (34), (35): Xaa is C or S
  MOD_RES (12), (13), (14), (15), (16): Xaa is A or G
  MOD_RES (17), (18), (19), (20): Xaa is A or G or is absent

SEQ ID NO: 50057 - protein, 37 aa, Artificial Sequence
  GFR-binding peptide
  MOD_RES (34), (34): Xaa is C or S
  MOD_RES (12), (13), (14), (15), (16): Xaa is A or G
  MOD_RES (17), (18), (19), (20): Xaa is A or G or is absent
KNHQLFNSLQEXXXXXXXXXYYLMTLPEEETPVXELG

SEQ ID NO: 50058 - protein, 38 aa, Artificial Sequence; identical to SEQ ID NO: 12598
  GFR-binding peptide
  MOD_RES (1), (3), (35): Xaa is C or S

SEQ ID NO: 50059 - protein, 42 aa, Artificial Sequence; identical to SEQ ID NO: 17816
  GFR-binding peptide
  MOD_RES (2), (4), (41): Xaa is C or S
  MOD_RES (17), (18), (19), (20), (21): Xaa is A or G
  MOD_RES (22), (23), (24), (25): Xaa is A or G or is absent

SEQ ID NO: 50060 - protein, 40 aa, Artificial Sequence
  GFR-binding peptide
  MOD_RES (1), (34), (35): Xaa is C or S
  MOD_RES (12), (13), (14), (15), (16): Xaa is A or G
  MOD_RES (17), (18), (19), (20): Xaa is A or G or is absent
XSRVIMVTAKKXXXXXXXXXIKRIQVPRLAQPVXXPAASA

SEQ ID NO: 50061 - protein, 39 aa, Artificial Sequence; identical to SEQ ID NO: 12604
  GFR-binding peptide
  MOD_RES (34), (35): Xaa is C or S
  MOD_RES (12), (13), (14), (15), (16): Xaa is A or G
  MOD_RES (17), (18), (19), (20): Xaa is A or G or is absent

SEQ ID NO: 50062 - protein, 36 aa, Artificial Sequence
  GFR-binding peptide
  MOD_RES (1), (3), (34), (35): Xaa is C or S
XKXSRVIMVTAKKVKPKRGVIKRIQVPRLAQPVXXP

SEQ ID NO: 50063 - protein, 37 aa, Artificial Sequence
  GFR-binding peptide
  MOD_RES (1), (3), (37): Xaa is C or S
  MOD_RES (15), (16), (17), (18), (19): Xaa is A or G
  MOD_RES (20), (21), (22), (23): Xaa is A or G or is absent
XGXGEVVMEVTAKKXXXXXXXXXIKRMQVPRLETPVX

SEQ ID NO: 50064 - protein, 41 aa, Artificial Sequence; identical to SEQ ID NO: 17825
  GFR-binding peptide
  MOD_RES (2), (4), (41): Xaa is C or S

SEQ ID NO: 50065 - protein, 44 aa, Artificial Sequence; identical to SEQ ID NO: 17826
  GFR-binding peptide
  MOD_RES (2), (4), (41): Xaa is C or S
  MOD_RES (17), (18), (19), (20), (21): Xaa is A or G
  MOD_RES (22), (23), (24), (25): Xaa is A or G or is absent

SEQ ID NO: 50066 - protein, 36 aa, Artificial Sequence
  GFR-binding peptide
  MOD_RES (1), (34), (35): Xaa is C or S
  MOD_RES (12), (13), (14), (15), (16): Xaa is A or G
  MOD_RES (17), (18), (19), (20): Xaa is A or G or is absent
XSRVIMVQVEKXXXXXXXXXVKAIKVSRLAQPVXXP

SEQ ID NO: 50067 - protein, 37 aa, Artificial Sequence
  GFR-binding peptide
  MOD_RES (34), (34): Xaa is C or S
  MOD_RES (12), (13), (14), (15), (16): Xaa is A or G
  MOD_RES (17), (18), (19), (20): Xaa is A or G or is absent
SRVVMNSMEGIXXXXXXXXXMIQVTINSLKTPAXTPK

SEQ ID NO: 50068 - protein, 35 aa, Artificial Sequence; identical to SEQ ID NO: 12607
  GFR-binding peptide
  MOD_RES (32), (33): Xaa is C or S

SEQ ID NO: 50069 - protein, 39 aa, Artificial Sequence; identical to SEQ ID NO: 12608
  GFR-binding peptide
  MOD_RES (33), (34): Xaa is C or S
  MOD_RES (11), (12), (13), (14), (15): Xaa is A or G
  MOD_RES (16), (17), (18), (19): Xaa is A or G or is absent

SEQ ID NO: 50070 - protein, 39 aa, Artificial Sequence
  GFR-binding peptide
  MOD_RES (2), (4), (38), (39): Xaa is C or S
  MOD_RES (16), (17), (18), (19), (20): Xaa is A or G
  MOD_RES (21), (22), (23), (24): Xaa is A or G or is absent
RXGXGEVVMESMEGIXXXXXXXXXMIQMTINSLETPVXX

SEQ ID NO: 50071 - protein, 36 aa, Artificial Sequence; identical to SEQ ID NO: 12609
  GFR-binding peptide
  MOD_RES (2), (33), (34): Xaa is C or S

SEQ ID NO: 50072 - protein, 40 aa, Artificial Sequence; identical to SEQ ID NO: 12610
  GFR-binding peptide
  MOD_RES (1), (35), (36): Xaa is C or S
  MOD_RES (13), (14), (15), (16), (17): Xaa is A or G
  MOD_RES (18), (19), (20), (21): Xaa is A or G or is absent

SEQ ID NO: 50073 - protein, 34 aa, Artificial Sequence; identical to SEQ ID NO: 12613
  GFR-binding peptide
  MOD_RES (33), (34): Xaa is C or S
  MOD_RES (11), (12), (13), (14), (15): Xaa is A or G
  MOD_RES (16), (17), (18), (19): Xaa is A or G or is absent

SEQ ID NO: 50074 - protein, 33 aa, Artificial Sequence
  GFR-binding peptide
  MOD_RES (12), (13), (14), (15), (16): Xaa is A or G
  MOD_RES (17), (18), (19), (20): Xaa is A or G or is absent
LHEELRNSLQEXXXXXXXXXYYVVPLPEHHVRS

SEQ ID NO: 50075 - protein, 35 aa, Artificial Sequence
  GFR-binding peptide
  MOD_RES (33), (34): Xaa is C or S
  MOD_RES (11), (12), (13), (14), (15): Xaa is A or G
  MOD_RES (16), (17), (18), (19): Xaa is A or G or is absent
RVVMNVQVEKXXXXXXXXXVKAVKVSRLQTPAXXP

SEQ ID NO: 50076 - protein, 42 aa, Artificial Sequence; identical to SEQ ID NO: 17830
  GFR-binding peptide
  MOD_RES (2), (39): Xaa is C or S

SEQ ID NO: 50077 - protein, 34 aa, Artificial Sequence
  GFR-binding peptide
  MOD_RES (33), (33): Xaa is C or S
  MOD_RES (11), (12), (13), (14), (15): Xaa is A or G
  MOD_RES (16), (17), (18), (19): Xaa is A or G or is absent
RVVMNSMEGIXXXXXXXXXMIQVTINSLKTPAXT

SEQ ID NO: 50078 - protein, 36 aa, Artificial Sequence; identical to SEQ ID NO: 36963
  GFR-binding peptide
  MOD_RES (2), (35), (36): Xaa is C or S
  MOD_RES (13), (14), (15), (16), (17): Xaa is A or G
  MOD_RES (18), (19), (20), (21): Xaa is A or G or is absent

SEQ ID NO: 50079 - protein, 42 aa, Artificial Sequence; identical to SEQ ID NO: 17832
  GFR-binding peptide
  MOD_RES (2), (4), (38): Xaa is C or S

SEQ ID NO: 50080 - protein, 35 aa, Artificial Sequence
  GFR-binding peptide
  MOD_RES (35), (35): Xaa is C or S
  MOD_RES (11), (12), (13), (14), (15): Xaa is A or G
  MOD_RES (16), (17), (18), (19): Xaa is A or G or is absent
HDELTNSLQEXXXXXXXXXYYLVTLPELQVQTPRX

SEQ ID NO: 50081 - protein, 38 aa, Artificial Sequence
  GFR-binding peptide
  MOD_RES (1), (3), (37), (38): Xaa is C or S
  MOD_RES (15), (16), (17), (18), (19): Xaa is A or G
  MOD_RES (20), (21), (22), (23): Xaa is A or G or is absent
XGXARVVMNVQVEKXXXXXXXXXVKAVKVSRLQTPAXX

SEQ ID NO: 50082 - protein, 35 aa, Artificial Sequence
  GFR-binding peptide
  MOD_RES (1), (34), (35): Xaa is C or S
  MOD_RES (12), (13), (14), (15), (16): Xaa is A or G
  MOD_RES (17), (18), (19), (20): Xaa is A or G or is absent
XSKVVMVTAKKXXXXXXXXXIKRIQVPRLDQPVXX

SEQ ID NO: 50083 - protein, 40 aa, Artificial Sequence
  GFR-binding peptide
  MOD_RES (2), (34), (35): Xaa is C or S
GXSRVVMNVQVEKIVNSSDDVKAVKVSRLKTPAXXPKPVY

SEQ ID NO: 50084 - protein, 40 aa, Artificial Sequence
  GFR-binding peptide
  MOD_RES (2), (4), (38): Xaa is C or S
  MOD_RES (16), (17), (18), (19), (20): Xaa is A or G
  MOD_RES (21), (22), (23), (24): Xaa is A or G or is absent
HXGXSRVVMNSMEGIXXXXXXXXXMIQVTINSLKTPAXTP

SEQ ID NO: 50085 - protein, 35 aa, Artificial Sequence
  GFR-binding peptide
  MOD_RES (2), (34), (35): Xaa is C or S
GXGEVVMDSMEGIVVKENEDMIQMTINSLETPVXX

SEQ ID NO: 50086 - protein, 40 aa, Artificial Sequence
  GFR-binding peptide
  MOD_RES (1), (3), (37), (38): Xaa is C or S
  MOD_RES (15), (16), (17), (18), (19): Xaa is A or G
  MOD_RES (20), (21), (22), (23): Xaa is A or G or is absent
XGXSRVVMNVTAKKXXXXXXXXXIKRVQVPRLKTPAXXPK

SEQ ID NO: 50087 - protein, 35 aa, Artificial Sequence
  GFR-binding peptide
  MOD_RES (2), (2): Xaa is C or S
  MOD_RES (14), (15), (16), (17), (18): Xaa is A or G
  MOD_RES (19), (20), (21), (22): Xaa is A or G or is absent
GXSRVVMNVQVEKXXXXXXXXXVKAVKVSRLKTPA

SEQ ID NO: 50088 - protein, 42 aa, Artificial Sequence
  GFR-binding peptide
  MOD_RES (2), (4), (37), (38): Xaa is C or S
  MOD_RES (15), (16), (17), (18), (19): Xaa is A or G
  MOD_RES (20), (21), (22), (23): Xaa is A or G or is absent
SXKXSKVVMVTAKKXXXXXXXXXIKRIQVPRLDQPVXXPSAS

SEQ ID NO: 50089 - protein, 37 aa, Artificial Sequence
  GFR-binding peptide
  MOD_RES (1), (35): Xaa is C or S
XKNHQLFNSLQEHQGQHPKIRYYLMTLPEEETPVXEL

SEQ ID NO: 50090 - protein, 40 aa, Artificial Sequence; identical to SEQ ID NO: 36988
  GFR-binding peptide
  MOD_RES (1), (34), (35): Xaa is C or S
  MOD_RES (12), (13), (14), (15), (16): Xaa is A or G
  MOD_RES (17), (18), (19), (20): Xaa is A or G or is absent

SEQ ID NO: 50091 - protein, 39 aa, Artificial Sequence; identical to SEQ ID NO: 12626
  GFR-binding peptide
  MOD_RES (1), (3), (37), (38): Xaa is C or S
  MOD_RES (15), (16), (17), (18), (19): Xaa is A or G
  MOD_RES (20), (21), (22), (23): Xaa is A or G or is absent

SEQ ID NO: 50092 - protein, 35 aa, Artificial Sequence
  GFR-binding peptide
  MOD_RES (33), (34): Xaa is C or S
  MOD_RES (11), (12), (13), (14), (15): Xaa is A or G
  MOD_RES (16), (17), (18), (19): Xaa is A or G or is absent
RVVMNVTAKKXXXXXXXXXIKRVQVPRLQTPAXXP

SEQ ID NO: 50093 - protein, 35 aa, Artificial Sequence; identical to SEQ ID NO: 36991
  GFR-binding peptide
  MOD_RES (2), (4), (35): Xaa is C or S

SEQ ID NO: 50094 - protein, 36 aa, Artificial Sequence
  GFR-binding peptide
  MOD_RES (34), (34): Xaa is C or S
  MOD_RES (12), (13), (14), (15), (16): Xaa is A or G
  MOD_RES (17), (18), (19), (20): Xaa is A or G or is absent
KNHQLFNSLQEXXXXXXXXXYYVMPLPEEETPVXEL

SEQ ID NO: 50095 - protein, 40 aa, Artificial Sequence
  GFR-binding peptide
  MOD_RES (1), (3), (34), (35): Xaa is C or S
XKXSRVIMSMEGIVKPKRGVMIQITINSLAQPVXXPAASA

SEQ ID NO: 50096 - protein, 38 aa, Artificial Sequence
  GFR-binding peptide
  MOD_RES (1), (33), (34): Xaa is C or S
XGEVVMEVQVEKVVKDYEDVKAMKVSRLETPVXXAKPI

SEQ ID NO: 50097 - protein, 33 aa, Artificial Sequence
  GFR-binding peptide
  MOD_RES (31), (32): Xaa is C or S
EVVMDSMEGIVVKENEDMIQMTINSLETPVXXA

SEQ ID NO: 50098 - protein, 38 aa, Artificial Sequence; identical to SEQ ID NO: 12631
  GFR-binding peptide
  MOD_RES (33), (34): Xaa is C or S
  MOD_RES (11), (12), (13), (14), (15): Xaa is A or G
  MOD_RES (16), (17), (18), (19): Xaa is A or G or is absent

SEQ ID NO: 50099 - protein, 39 aa, Artificial Sequence; identical to SEQ ID NO: 12633
  GFR-binding peptide
  MOD_RES (33), (34): Xaa is C or S
  MOD_RES (11), (12), (13), (14), (15): Xaa is A or G
  MOD_RES (16), (17), (18), (19): Xaa is A or G or is absent

SEQ ID NO: 50100 - protein, 40 aa, Artificial Sequence
  GFR-binding peptide
  MOD_RES (2), (36), (37): Xaa is C or S
  MOD_RES (14), (15), (16), (17), (18): Xaa is A or G
  MOD_RES (19), (20), (21), (22): Xaa is A or G or is absent
GXGEVVMEVQVEKXXXXXXXXXVKAMKVSRLETPVXXAKP

SEQ ID NO: 50101 - protein, 34 aa, Artificial Sequence; identical to SEQ ID NO: 17846
  GFR-binding peptide
  MOD_RES (13), (14), (15), (16), (17): Xaa is A or G
  MOD_RES (18), (19), (20), (21): Xaa is A or G or is absent

SEQ ID NO: 50102 - protein, 41 aa, Artificial Sequence
  GFR-binding peptide
  MOD_RES (2), (4), (35), (36): Xaa is C or S
SXKXSKVVMVQVEKVKPTRGVVKAIKVSRLDQPVXXPSASA

SEQ ID NO: 50103 - protein, 39 aa, Artificial Sequence
  GFR-binding peptide
  MOD_RES (1), (33): Xaa is C or S
XSRVVMNVTAKKIVNSSDDIKRVQVPRLKTPAXTPKTVH

SEQ ID NO: 50104 - protein, 37 aa, Artificial Sequence
  GFR-binding peptide
  MOD_RES (1), (34), (35): Xaa is C or S
  MOD_RES (12), (13), (14), (15), (16): Xaa is A or G
  MOD_RES (17), (18), (19), (20): Xaa is A or G or is absent
XSKVVMSMEGIXXXXXXXXXMIQITINSLDQPVXXPS

SEQ ID NO: 50105 - protein, 36 aa, Artificial Sequence; identical to SEQ ID NO: 17847
  GFR-binding peptide
  MOD_RES (13), (14), (15), (16), (17): Xaa is A or G
  MOD_RES (18), (19), (20), (21): Xaa is A or G or is absent

SEQ ID NO: 50106 - protein, 34 aa, Artificial Sequence; identical to SEQ ID NO: 17848
  GFR-binding peptide
  MOD_RES (34), (34): Xaa is C or S
  MOD_RES (12), (13), (14), (15), (16): Xaa is A or G
  MOD_RES (17), (18), (19), (20): Xaa is A or G or is absent

SEQ ID NO: 50107 - protein, 41 aa, Artificial Sequence
  GFR-binding peptide
  MOD_RES (2), (4), (36), (37): Xaa is C or S
RXGXGEVVMEVQVEKVVKDYEDVKAMKVSRLETPVXXAKPI

SEQ ID NO: 50108 - protein, 40 aa, Artificial Sequence; identical to SEQ ID NO: 17849
  GFR-binding peptide
  MOD_RES (1), (3), (40): Xaa is C or S
  MOD_RES (16), (17), (18), (19), (20): Xaa is A or G
  MOD_RES (21), (22), (23), (24): Xaa is A or G or is absent

SEQ ID NO: 50109 - protein, 35 aa, Artificial Sequence
  GFR-binding peptide
  MOD_RES (33), (34): Xaa is C or S
  MOD_RES (11), (12), (13), (14), (15): Xaa is A or G
  MOD_RES (16), (17), (18), (19): Xaa is A or G or is absent
EVVMEVTAKKXXXXXXXXXIKRMQVPRLETPVXXA

SEQ ID NO: 50110 - protein, 39 aa, Artificial Sequence; identical to SEQ ID NO: 12636
  GFR-binding peptide
  MOD_RES (1), (33), (34): Xaa is C or S

SEQ ID NO: 50111 - protein, 38 aa, Artificial Sequence
  GFR-binding peptide
  MOD_RES (2), (34), (35): Xaa is C or S
GXGEVVMDSMEGIVVKENEDMIQMTINSLETPVXXAKP

SEQ ID NO: 50112 - protein, 43 aa, Artificial Sequence; identical to SEQ ID NO: 12638
  GFR-binding peptide
  MOD_RES (1), (3), (37), (38): Xaa is C or S
  MOD_RES (15), (16), (17), (18), (19): Xaa is A or G
  MOD_RES (20), (21), (22), (23): Xaa is A or G or is absent

SEQ ID NO: 50113 - protein, 34 aa, Artificial Sequence
  GFR-binding peptide
  MOD_RES (32), (33): Xaa is C or S
GEVVMESMEGIVVKDYEDMIQMTINSLETPVXXA

SEQ ID NO: 50114 - protein, 36 aa, Artificial Sequence
  GFR-binding peptide
  MOD_RES (2), (34), (35): Xaa is C or S
GXGEVVMEVTAKKVVKDYEDIKRMQVPRLETPVXXA

SEQ ID NO: 50115 - protein, 37 aa, Artificial Sequence
  GFR-binding peptide
  MOD_RES (34), (35): Xaa is C or S
  MOD_RES (12), (13), (14), (15), (16): Xaa is A or G
  MOD_RES (17), (18), (19), (20): Xaa is A or G or is absent
GEVVMESMEGIXXXXXXXXXMIQMTINSLETPVXXAK

SEQ ID NO: 50116 - protein, 36 aa, Artificial Sequence
  GFR-binding peptide
  MOD_RES (2), (35), (36): Xaa is C or S
  MOD_RES (13), (14), (15), (16), (17): Xaa is A or G
  MOD_RES (18), (19), (20), (21): Xaa is A or G or is absent
KXSKVIMVQVEKXXXXXXXXXVKAIKVSRLDQSVXX

SEQ ID NO: 50117 - protein, 39 aa, Artificial Sequence
  GFR-binding peptide
  MOD_RES (2), (4), (36), (37): Xaa is C or S
RXGXGEVVMESMEGIVVKDYEDMIQMTINSLETPVXXAK

SEQ ID NO: 50118 - protein, 41 aa, Artificial Sequence
  GFR-binding peptide
  MOD_RES (2), (4), (41): Xaa is C or S
EXKXALHDELTNSLQEFIPKKRVIEYYLVTLPELQVQTPRX

SEQ ID NO: 50119 - protein, 40 aa, Artificial Sequence; identical to SEQ ID NO: 12644
  GFR-binding peptide
  MOD_RES (2), (4), (36), (37): Xaa is C or S

SEQ ID NO: 50120 - protein, 36 aa, Artificial Sequence
  GFR-binding peptide
  MOD_RES (1), (35), (36): Xaa is C or S
  MOD_RES (13), (14), (15), (16), (17): Xaa is A or G
  MOD_RES (18), (19), (20), (21): Xaa is A or G or is absent
XGEVVMEVTAKKXXXXXXXXXIKRMQVPRLETPVXX

SEQ ID NO: 50121 - protein, 34 aa, Artificial Sequence
  GFR-binding peptide
  MOD_RES (1), (3): Xaa is C or S
XGXARVVMNSMEGIIVNSSDDMIQVTINSLQTPA

SEQ ID NO: 50122 - protein, 35 aa, Artificial Sequence; identical to SEQ ID NO: 12646
  GFR-binding peptide
  MOD_RES (2), (35): Xaa is C or S
  MOD_RES (13), (14), (15), (16), (17): Xaa is A or G
  MOD_RES (18), (19), (20), (21): Xaa is A or G or is absent

SEQ ID NO: 50123 - protein, 32 aa, Artificial Sequence
  GFR-binding peptide
  MOD_RES (32), (32): Xaa is C or S
SRVVMNVTAKKIVNSSDDIKRVQVPRLKTPAX

SEQ ID NO: 50124 - protein, 40 aa, Artificial Sequence; identical to SEQ ID NO: 12648
  GFR-binding peptide
  MOD_RES (2), (4), (38), (39): Xaa is C or S
  MOD_RES (16), (17), (18), (19), (20): Xaa is A or G
  MOD_RES (21), (22), (23), (24): Xaa is A or G or is absent

SEQ ID NO: 50125 - protein, 41 aa, Artificial Sequence
  GFR-binding peptide
  MOD_RES (1), (3), (36), (37): Xaa is C or S
  MOD_RES (14), (15), (16), (17), (18): Xaa is A or G
  MOD_RES (19), (20), (21), (22): Xaa is A or G or is absent
XKXSKVVMVTAKKXXXXXXXXXIKRIQVPRLDQPVXXPSAS

SEQ ID NO: 50126 - protein, 40 aa, Artificial Sequence; identical to SEQ ID NO: 12649
  GFR-binding peptide
  MOD_RES (1), (3), (37): Xaa is C or S
  MOD_RES (15), (16), (17), (18), (19): Xaa is A or G
  MOD_RES (20), (21), (22), (23): Xaa is A or G or is absent

SEQ ID NO: 50127 - protein, 37 aa, Artificial Sequence
  GFR-binding peptide
  MOD_RES (2), (4): Xaa is C or S
  MOD_RES (16), (17), (18), (19), (20): Xaa is A or G
  MOD_RES (21), (22), (23), (24): Xaa is A or G or is absent
HXGXSRVVMNVTAKKXXXXXXXXXIKRVQVPRLKTPA

SEQ ID NO: 50128 - protein, 36 aa, Artificial Sequence; identical to SEQ ID NO: 17860
  GFR-binding peptide
  MOD_RES (2), (36): Xaa is C or S
  MOD_RES (14), (15), (16), (17), (18): Xaa is A or G
  MOD_RES (19), (20), (21), (22): Xaa is A or G or is absent

SEQ ID NO: 50129 - protein, 32 aa, Artificial Sequence
  GFR-binding peptide
  MOD_RES (31), (32): Xaa is C or S
EVVMESMEGIVVKDYEDMIQMTINSLETPVXX

SEQ ID NO: 50130 - protein, 34 aa, Artificial Sequence; identical to SEQ ID NO: 12652
  GFR-binding peptide
  MOD_RES (33), (34): Xaa is C or S
  MOD_RES (11), (12), (13), (14), (15): Xaa is A or G
  MOD_RES (16), (17), (18), (19): Xaa is A or G or is absent

SEQ ID NO: 50131 - protein, 33 aa, Artificial Sequence; identical to SEQ ID NO: 12653
  GFR-binding peptide
  MOD_RES (33), (33): Xaa is C or S
  MOD_RES (11), (12), (13), (14), (15): Xaa is A or G
  MOD_RES (16), (17), (18), (19): Xaa is A or G or is absent

SEQ ID NO: 50132 - protein, 37 aa, Artificial Sequence; identical to SEQ ID NO: 12654
  GFR-binding peptide
  MOD_RES (1), (35), (36): Xaa is C or S
  MOD_RES (13), (14), (15), (16), (17): Xaa is A or G
  MOD_RES (18), (19), (20), (21): Xaa is A or G or is absent

SEQ ID NO: 50133 - protein, 37 aa, Artificial Sequence
  GFR-binding peptide
  MOD_RES (37), (37): Xaa is C or S
ELHEELRNSLQELKPKKRVYEYYLVTLPEHHVRSPQX

SEQ ID NO: 50134 - protein, 36 aa, Artificial Sequence; identical to SEQ ID NO: 12656
  GFR-binding peptide
  MOD_RES (1), (32), (33): Xaa is C or S

SEQ ID NO: 50135 - protein, 37 aa, Artificial Sequence; identical to SEQ ID NO: 12658
  GFR-binding peptide
  MOD_RES (2), (36): Xaa is C or S
  MOD_RES (14), (15), (16), (17), (18): Xaa is A or G
  MOD_RES (19), (20), (21), (22): Xaa is A or G or is absent

SEQ ID NO: 50136 - protein, 36 aa, Artificial Sequence
  GFR-binding peptide
  MOD_RES (2), (36): Xaa is C or S
  MOD_RES (14), (15), (16), (17), (18): Xaa is A or G
  MOD_RES (19), (20), (21), (22): Xaa is A or G or is absent
GXGEVVMDVQVEKXXXXXXXXXVKAMKVSRLETPVX

SEQ ID NO: 50137 - protein, 40 aa, Artificial Sequence
  GFR-binding peptide
  MOD_RES (1), (3), (34), (35): Xaa is C or S
XKXSKVIMSMEGIIKPTKGIMIQITINSLDQSVXXPSASA

SEQ ID NO: 50138 - protein, 32 aa, Artificial Sequence; identical to SEQ ID NO: 12662
  GFR-binding peptide
  MOD_RES (11), (12), (13), (14), (15): Xaa is A or G
  MOD_RES (16), (17), (18), (19): Xaa is A or G or is absent

SEQ ID NO: 50139 - protein, 40 aa, Artificial Sequence
  GFR-binding peptide
  MOD_RES (2), (36): Xaa is C or S
EXKNHQLFNSLQEHQGQHPKIRYYVMPLPEEETPVXELGE

SEQ ID NO: 50140 - protein, 40 aa, Artificial Sequence; identical to SEQ ID NO: 17868
  GFR-binding peptide
  MOD_RES (1), (3), (40): Xaa is C or S
  MOD_RES (16), (17), (18), (19), (20): Xaa is A or G
  MOD_RES (21), (22), (23), (24): Xaa is A or G or is absent

SEQ ID NO: 50141 - protein, 38 aa, Artificial Sequence
  GFR-binding peptide
  MOD_RES (1), (3), (35), (36): Xaa is C or S
XGXGEVVMDVTAKKVVKENEDIKRMQVPRLETPVXXAK

SEQ ID NO: 50142 - protein, 31 aa, Artificial Sequence; identical to SEQ ID NO: 12667
  GFR-binding peptide

SEQ ID NO: 50143 - protein, 37 aa, Artificial Sequence
  GFR-binding peptide
  MOD_RES (2), (4): Xaa is C or S
  MOD_RES (16), (17), (18), (19), (20): Xaa is A or G
  MOD_RES (21), (22), (23), (24): Xaa is A or G or is absent
HXGXSRVVMNVQVEKXXXXXXXXXVKAVKVSRLKTPA

SEQ ID NO: 50144 - protein, 42 aa, Artificial Sequence; identical to SEQ ID NO: 17874
  GFR-binding peptide
  MOD_RES (1), (38): Xaa is C or S

SEQ ID NO: 50145 - protein, 35 aa, Artificial Sequence
  GFR-binding peptide
  MOD_RES (34), (34): Xaa is C or S
KNHQLFNSLQEHQGQHPKIRYYVMPLPEEETPVXE

SEQ ID NO: 50146 - protein, 33 aa, Artificial Sequence
  GFR-binding peptide
  MOD_RES (1), (33): Xaa is C or S
XGEVVMESMEGIVVKDYEDMIQMTINSLETPVX

SEQ ID NO: 50147 - protein, 36 aa, Artificial Sequence
  GFR-binding peptide
  MOD_RES (2), (4): Xaa is C or S
  MOD_RES (15), (16), (17), (18), (19): Xaa is A or G
  MOD_RES (20), (21), (22), (23): Xaa is A or G or is absent
SXKXSRVIMVQVEKXXXXXXXXXVKAIKVSRLAQPV

SEQ ID NO: 50148 - protein, 38 aa, Artificial Sequence; identical to SEQ ID NO: 17876
  GFR-binding peptide
  MOD_RES (2), (4), (38): Xaa is C or S
  MOD_RES (16), (17), (18), (19), (20): Xaa is A or G
  MOD_RES (21), (22), (23), (24): Xaa is A or G or is absent

SEQ ID NO: 50149 - protein, 34 aa, Artificial Sequence; identical to SEQ ID NO: 12668
  GFR-binding peptide
  MOD_RES (1), (3): Xaa is C or S

SEQ ID NO: 50150 - protein, 34 aa, Artificial Sequence
  GFR-binding peptide
  MOD_RES (34), (34): Xaa is C or S
KNHQLFNSLQEHQGQHPKIRYYLMTLPEEETPVX

SEQ ID NO: 50151 - protein, 34 aa, Artificial Sequence
  GFR-binding peptide
  MOD_RES (2), (33), (34): Xaa is C or S
KXSKVVMVQVEKVKPTRGVVKAIKVSRLDQPVXX

SEQ ID NO: 50152 - protein, 39 aa, Artificial Sequence
  GFR-binding peptide
  MOD_RES (1), (33): Xaa is C or S
XSRVVMNVQVEKIVNSSDDVKAVKVSRLKTPAXTPKTVH

SEQ ID NO: 50153 - protein, 36 aa, Artificial Sequence; identical to SEQ ID NO: 17878
  GFR-binding peptide
  MOD_RES (35), (35): Xaa is C or S

SEQ ID NO: 50154 - protein, 36 aa, Artificial Sequence
  GFR-binding peptide
  MOD_RES (2), (4): Xaa is C or S
  MOD_RES (15), (16), (17), (18), (19): Xaa is A or G
  MOD_RES (20), (21), (22), (23): Xaa is A or G or is absent
SXKXSKVIMSMEGIXXXXXXXXXMIQITINSLDQSV

SEQ ID NO: 50155 - protein, 35 aa, Artificial Sequence
  GFR-binding peptide
  MOD_RES (1), (32), (33): Xaa is C or S
XSKVVMVQVEKVKPTRGVVKAIKVSRLDQPVXXPS

SEQ ID NO: 50156 - protein, 36 aa, Artificial Sequence
  GFR-binding peptide
  MOD_RES (35), (35): Xaa is C or S
  MOD_RES (11), (12), (13), (14), (15): Xaa is A or G
  MOD_RES (16), (17), (18), (19): Xaa is A or G or is absent
HEELRNSLQEXXXXXXXXXYYLVTLPEHHVRSPQXK

SEQ ID NO: 50157 - protein, 37 aa, Artificial Sequence; identical to SEQ ID NO: 37062
  GFR-binding peptide
  MOD_RES (1), (34), (35): Xaa is C or S
  MOD_RES (12), (13), (14), (15), (16): Xaa is A or G
  MOD_RES (17), (18), (19), (20): Xaa is A or G or is absent

SEQ ID NO: 50158 - protein, 35 aa, Artificial Sequence; identical to SEQ ID NO: 17882
  GFR-binding peptide

SEQ ID NO: 50159 - protein, 37 aa, Artificial Sequence
  GFR-binding peptide
  MOD_RES (2), (2): Xaa is C or S
AXELHEELRNSLQELKPKKRVYEYYLVTLPEHHVRSP

SEQ ID NO: 50160 - protein, 33 aa, Artificial Sequence
  GFR-binding peptide
  MOD_RES (1), (32), (33): Xaa is C or S
XSRVIMVTAKKVKPKRGVIKRIQVPRLAQPVXX

SEQ ID NO: 50161 - protein, 40 aa, Artificial Sequence; identical to SEQ ID NO: 12673
  GFR-binding peptide
  MOD_RES (2), (4), (37), (38): Xaa is C or S
  MOD_RES (15), (16), (17), (18), (19): Xaa is A or G
  MOD_RES (20), (21), (22), (23): Xaa is A or G or is absent

SEQ ID NO: 50162 - protein, 35 aa, Artificial Sequence
  GFR-binding peptide
  MOD_RES (1), (35): Xaa is C or S
  MOD_RES (13), (14), (15), (16), (17): Xaa is A or G
  MOD_RES (18), (19), (20), (21): Xaa is A or G or is absent
XGEVVMEVTAKKXXXXXXXXXIKRMQVPRLETPVX

SEQ ID NO: 50163 - protein, 37 aa, Artificial Sequence; identical to SEQ ID NO: 17886
  GFR-binding peptide
  MOD_RES (1), (3): Xaa is C or S

SEQ ID NO: 50164 - protein, 39 aa, Artificial Sequence; identical to SEQ ID NO: 17888
  GFR-binding peptide
  MOD_RES (2), (39): Xaa is C or S
  MOD_RES (15), (16), (17), (18), (19): Xaa is A or G
  MOD_RES (20), (21), (22), (23): Xaa is A or G or is absent

SEQ ID NO: 50165 - protein, 37 aa, Artificial Sequence; identical to SEQ ID NO: 17889
  GFR-binding peptide
  MOD_RES (2), (2): Xaa is C or S
  MOD_RES (15), (16), (17), (18), (19): Xaa is A or G
  MOD_RES (20), (21), (22), (23): Xaa is A or G or is absent

SEQ ID NO: 50166 - protein, 39 aa, Artificial Sequence; identical to SEQ ID NO: 12675
  GFR-binding peptide
  MOD_RES (33), (34): Xaa is C or S
  MOD_RES (11), (12), (13), (14), (15): Xaa is A or G
  MOD_RES (16), (17), (18), (19): Xaa is A or G or is absent

SEQ ID NO: 50167 - protein, 41 aa, Artificial Sequence
  GFR-binding peptide
  MOD_RES (37), (37): Xaa is C or S
ELHEELRNSLQELKPKKRVYEYYLVTLPEHHVRSPQXKVSS

SEQ ID NO: 50168 - protein, 39 aa, Artificial Sequence; identical to SEQ ID NO: 17890
  GFR-binding peptide
  MOD_RES (1), (38): Xaa is C or S

SEQ ID NO: 50169 - protein, 41 aa, Artificial Sequence
  GFR-binding peptide
  MOD_RES (1), (35): Xaa is C or S
  MOD_RES (13), (14), (15), (16), (17): Xaa is A or G
  MOD_RES (18), (19), (20), (21): Xaa is A or G or is absent
XSRVVMNSMEGIXXXXXXXXXMIQVTINSLKTPAXTPKTVH

SEQ ID NO: 50170 - protein, 37 aa, Artificial Sequence; identical to SEQ ID NO: 17893
  GFR-binding peptide
  MOD_RES (1), (3): Xaa is C or S

SEQ ID NO: 50171 - protein, 34 aa, Artificial Sequence
  GFR-binding peptide
  MOD_RES (1), (3), (34): Xaa is C or S
XKXSKVIMVQVEKIKPTKGIVKAIKVSRLDQSVX

SEQ ID NO: 50172 - protein, 42 aa, Artificial Sequence
  GFR-binding peptide
  MOD_RES (2), (4), (38), (39): Xaa is C or S
  MOD_RES (16), (17), (18), (19), (20): Xaa is A or G
  MOD_RES (21), (22), (23), (24): Xaa is A or G or is absent
HXGXSRVVMNSMEGIXXXXXXXXXMIQVTINSLKTPAXXPKP

SEQ ID NO: 50173 - protein, 32 aa, Artificial Sequence
  GFR-binding peptide
  MOD_RES (1), (32): Xaa is C or S
XSRVIMVTAKKVKPKRGVIKRIQVPRLAQPVX

SEQ ID NO: 50174 - protein, 42 aa, Artificial Sequence; identical to SEQ ID NO: 17898
  GFR-binding peptide
  MOD_RES (1), (38): Xaa is C or S
  MOD_RES (14), (15), (16), (17), (18): Xaa is A or G
  MOD_RES (19), (20), (21), (22): Xaa is A or G or is absent

SEQ ID NO: 50175 - protein, 39 aa, Artificial Sequence
  GFR-binding peptide
  MOD_RES (1), (3), (34), (35): Xaa is C or S
XKXSKVVMSMEGIVKPTRGVMIQITINSLDQPVXXPSAS

SEQ ID NO: 50176 - protein, 38 aa, Artificial Sequence; identical to SEQ ID NO: 37078
  GFR-binding peptide
  MOD_RES (1), (3), (34), (35): Xaa is C or S

SEQ ID NO: 50177 - protein, 36 aa, Artificial Sequence
  GFR-binding peptide
  MOD_RES (2), (35), (36): Xaa is C or S
  MOD_RES (13), (14), (15), (16), (17): Xaa is A or G
  MOD_RES (18), (19), (20), (21): Xaa is A or G or is absent
KXSKVVMVTAKKXXXXXXXXXIKRIQVPRLDQPVXX

SEQ ID NO: 50178 - protein, 38 aa, Artificial Sequence; identical to SEQ ID NO: 12683
  GFR-binding peptide
  MOD_RES (34), (35): Xaa is C or S
  MOD_RES (12), (13), (14), (15), (16): Xaa is A or G
  MOD_RES (17), (18), (19), (20): Xaa is A or G or is absent

SEQ ID NO: 50179 - protein, 33 aa, Artificial Sequence
  GFR-binding peptide
  MOD_RES (1), (3): Xaa is C or S
XKXSKVIMVTAKKIKPTKGIIKRIQVPRLDQSV

SEQ ID NO: 50180 - protein, 38 aa, Artificial Sequence
  GFR-binding peptide
  MOD_RES (1), (35): Xaa is C or S
  MOD_RES (13), (14), (15), (16), (17): Xaa is A or G
  MOD_RES (18), (19), (20), (21): Xaa is A or G or is absent
XSRVVMNSMEGIXXXXXXXXXMIQVTINSLKTPAXTPK

SEQ ID NO: 50181 - protein, 41 aa, Artificial Sequence
  GFR-binding peptide
  MOD_RES (2), (4), (38), (39): Xaa is C or S
  MOD_RES (16), (17), (18), (19), (20): Xaa is A or G
  MOD_RES (21), (22), (23), (24): Xaa is A or G or is absent
RXGXGEVVMDVQVEKXXXXXXXXXVKAMKVSRLETPVXXAK

SEQ ID NO: 50182 - protein, 33 aa, Artificial Sequence; identical to SEQ ID NO: 12685
  GFR-binding peptide
  MOD_RES (1), (33): Xaa is C or S

SEQ ID NO: 50183 - protein, 33 aa, Artificial Sequence; identical to SEQ ID NO: 12688
  GFR-binding peptide
  MOD_RES (1), (3): Xaa is C or S

SEQ ID NO: 50184 - protein, 33 aa, Artificial Sequence; identical to SEQ ID NO: 12690
  GFR-binding peptide
  MOD_RES (31), (32): Xaa is C or S

SEQ ID NO: 50185 - protein, 39 aa, Artificial Sequence
  GFR-binding peptide
  MOD_RES (2), (34), (35): Xaa is C or S
GXSRVVMNVQVEKIVNSSDDVKAVKVSRLKTPAXXPKPV

SEQ ID NO: 50186 - protein, 43 aa, Artificial Sequence; identical to SEQ ID NO: 17905
  GFR-binding peptide
  MOD_RES (2), (39): Xaa is C or S

SEQ ID NO: 50187 - protein, 40 aa, Artificial Sequence
  GFR-binding peptide
  MOD_RES (2), (34): Xaa is C or S
GXSRVVMNSMEGIIVNSSDDMIQVTINSLKTPAXTPKTVH

SEQ ID NO: 50188 - protein, 33 aa, Artificial Sequence; identical to SEQ ID NO: 12693
  GFR-binding peptide
  MOD_RES (31), (32): Xaa is C or S

SEQ ID NO: 50189 - protein, 34 aa, Artificial Sequence; identical to SEQ ID NO: 12694
  GFR-binding peptide
  MOD_RES (33), (34): Xaa is C or S
  MOD_RES (11), (12), (13), (14), (15): Xaa is A or G
  MOD_RES (16), (17), (18), (19): Xaa is A or G or is absent

SEQ ID NO: 50190 - protein, 38 aa, Artificial Sequence; identical to SEQ ID NO: 17906
  GFR-binding peptide
  MOD_RES (36), (36): Xaa is C or S

SEQ ID NO: 50191 - protein, 43 aa, Artificial Sequence; identical to SEQ ID NO: 12695
  GFR-binding peptide
  MOD_RES (2), (4), (38), (39): Xaa is C or S
  MOD_RES (16), (17), (18), (19), (20): Xaa is A or G
  MOD_RES (21), (22), (23), (24): Xaa is A or G or is absent

SEQ ID NO: 50192 - protein, 33 aa, Artificial Sequence
  GFR-binding peptide
  MOD_RES (2), (2): Xaa is C or S
GXARVVMNVQVEKIVNSSDDVKAVKVSRLQTPA

SEQ ID NO: 50193 - protein, 38 aa, Artificial Sequence
  GFR-binding peptide
  MOD_RES (2), (4), (35), (36): Xaa is C or S
SXKXSKVVMVQVEKVKPTRGVVKAIKVSRLDQPVXXPS

SEQ ID NO: 50194 - protein, 39 aa, Artificial Sequence; identical to SEQ ID NO: 12698
  GFR-binding peptide
  MOD_RES (1), (35), (36): Xaa is C or S
  MOD_RES (13), (14), (15), (16), (17): Xaa is A or G
  MOD_RES (18), (19), (20), (21): Xaa is A or G or is absent

SEQ ID NO: 50195 - protein, 44 aa, Artificial Sequence; identical to SEQ ID NO: 17911
  GFR-binding peptide
  MOD_RES (2), (4), (41): Xaa is C or S
  MOD_RES (17), (18), (19), (20), (21): Xaa is A or G
  MOD_RES (22), (23), (24), (25): Xaa is A or G or is absent

SEQ ID NO: 50196 - protein, 38 aa, Artificial Sequence; identical to SEQ ID NO: 12699
  GFR-binding peptide
  MOD_RES (2), (4), (38): Xaa is C or S
  MOD_RES (16), (17), (18), (19), (20): Xaa is A or G
  MOD_RES (21), (22), (23), (24): Xaa is A or G or is absent

SEQ ID NO: 50197 - protein, 40 aa, Artificial Sequence; identical to SEQ ID NO: 17913
  GFR-binding peptide
  MOD_RES (34), (34): Xaa is C or S
  MOD_RES (12), (13), (14), (15), (16): Xaa is A or G
  MOD_RES (17), (18), (19), (20): Xaa is A or G or is absent

SEQ ID NO: 50198 - protein, 37 aa, Artificial Sequence
  GFR-binding peptide
  MOD_RES (33), (34): Xaa is C or S
  MOD_RES (11), (12), (13), (14), (15): Xaa is A or G
  MOD_RES (16), (17), (18), (19): Xaa is A or G or is absent
RVVMNVQVEKXXXXXXXXXVKAVKVSRLKTPAXXPKP

SEQ ID NO: 50199 - protein, 36 aa, Artificial Sequence; identical to SEQ ID NO: 12701
  GFR-binding peptide
  MOD_RES (32), (33): Xaa is C or S

SEQ ID NO: 50200 - protein, 34 aa, Artificial Sequence; identical to SEQ ID NO: 17914
  GFR-binding peptide
  MOD_RES (12), (13), (14), (15), (16): Xaa is A or G
  MOD_RES (17), (18), (19), (20): Xaa is A or G or is absent

SEQ ID NO: 50201 - protein, 40 aa, Artificial Sequence
  GFR-binding peptide
  MOD_RES (2), (4), (37), (38): Xaa is C or S
  MOD_RES (15), (16), (17), (18), (19): Xaa is A or G
  MOD_RES (20), (21), (22), (23): Xaa is A or G or is absent
SXKXSRVIMSMEGIXXXXXXXXXMIQITINSLAQPVXXPA

SEQ ID NO: 50202 - protein, 42 aa, Artificial Sequence; identical to SEQ ID NO: 17916
  GFR-binding peptide
  MOD_RES (2), (39): Xaa is C or S
  MOD_RES (15), (16), (17), (18), (19): Xaa is A or G
  MOD_RES (20), (21), (22), (23): Xaa is A or G or is absent

SEQ ID NO: 50203 - protein, 35 aa, Artificial Sequence; identical to SEQ ID NO: 12704
  GFR-binding peptide
  MOD_RES (1), (33): Xaa is C or S

SEQ ID NO: 50204 - protein, 41 aa, Artificial Sequence
  GFR-binding peptide
  MOD_RES (1), (38): Xaa is C or S
XELHEELRNSLQELKPKKRVYEYYVVPLPEHHVRSPQXKVS

SEQ ID NO: 50205 - protein, 37 aa, Artificial Sequence
  GFR-binding peptide
  MOD_RES (2), (4), (35), (36): Xaa is C or S
SXKXSKVIMVQVEKIKPTKGIVKAIKVSRLDQSVXXP

SEQ ID NO: 50206 - protein, 42 aa, Artificial Sequence; identical to SEQ ID NO: 12706
  GFR-binding peptide
  MOD_RES (2), (4), (36), (37): Xaa is C or S

SEQ ID NO: 50207 - protein, 33 aa, Artificial Sequence
  GFR-binding peptide
  MOD_RES (12), (13), (14), (15), (16): Xaa is A or G
  MOD_RES (17), (18), (19), (20): Xaa is A or G or is absent
SRVVMNVTAKKXXXXXXXXXIKRVQVPRLKTPA

SEQ ID NO: 50208 - protein, 34 aa, Artificial Sequence
  GFR-binding peptide
  MOD_RES (31), (32): Xaa is C or S
EVVMEVTAKKVVKDYEDIKRMQVPRLETPVXXAK

SEQ ID NO: 50209 - protein, 38 aa, Artificial Sequence; identical to SEQ ID NO: 17926
  GFR-binding peptide
  MOD_RES (2), (2): Xaa is C or S
  MOD_RES (15), (16), (17), (18), (19): Xaa is A or G
  MOD_RES (20), (21), (22), (23): Xaa is A or G or is absent

SEQ ID NO: 50210 - protein, 38 aa, Artificial Sequence; identical to SEQ ID NO: 17927
  GFR-binding peptide
  MOD_RES (1), (3): Xaa is C or S
  MOD_RES (16), (17), (18), (19), (20): Xaa is A or G
  MOD_RES (21), (22), (23), (24): Xaa is A or G or is absent

SEQ ID NO: 50211 - protein, 36 aa, Artificial Sequence
  GFR-binding peptide
  MOD_RES (2), (34): Xaa is C or S
GXSRVVMNSMEGIIVNSSDDMIQVTINSLKTPAXTP

SEQ ID NO: 50212 - protein, 37 aa, Artificial Sequence; identical to SEQ ID NO: 17930
  GFR-binding peptide
  MOD_RES (34), (34): Xaa is C or S
  MOD_RES (12), (13), (14), (15), (16): Xaa is A or G
  MOD_RES (17), (18), (19), (20): Xaa is A or G or is absent

SEQ ID NO: 50213 - protein, 36 aa, Artificial Sequence
  GFR-binding peptide
  MOD_RES (33), (34): Xaa is C or S
  MOD_RES (11), (12), (13), (14), (15): Xaa is A or G
  MOD_RES (16), (17), (18), (19): Xaa is A or G or is absent
EVVMEVTAKKXXXXXXXXXIKRMQVPRLETPVXXAK

SEQ ID NO: 50214 - protein, 36 aa, Artificial Sequence; identical to SEQ ID NO: 17932
  GFR-binding peptide
  MOD_RES (1), (1): Xaa is C or S

SEQ ID NO: 50215 - protein, 36 aa, Artificial Sequence
  GFR-binding peptide
  MOD_RES (1), (32), (33): Xaa is C or S
XSRVIMVTAKKVKPKRGVIKRIQVPRLAQPVXXPAA

SEQ ID NO: 50216 - protein, 41 aa, Artificial Sequence
  GFR-binding peptide
  MOD_RES (2), (4), (35), (36): Xaa is C or S
SXKXSRVIMSMEGIVKPKRGVMIQITINSLAQPVXXPAASA

SEQ ID NO: 50217 - protein, 39 aa, Artificial Sequence; identical to SEQ ID NO: 12714
  GFR-binding peptide
  MOD_RES (2), (4), (36), (37): Xaa is C or S

SEQ ID NO: 50218 - protein, 38 aa, Artificial Sequence; identical to SEQ ID NO: 17936
  GFR-binding peptide
  MOD_RES (33), (33): Xaa is C or S

SEQ ID NO: 50219 - protein, 36 aa, Artificial Sequence
  GFR-binding peptide
  MOD_RES (1), (34), (35): Xaa is C or S
  MOD_RES (12), (13), (14), (15), (16): Xaa is A or G
  MOD_RES (17), (18), (19), (20): Xaa is A or G or is absent
XSKVVMVTAKKXXXXXXXXXIKRIQVPRLDQPVXXP

SEQ ID NO: 50220 - protein, 38 aa, Artificial Sequence; identical to SEQ ID NO: 12721
  GFR-binding peptide
  MOD_RES (1), (32), (33): Xaa is C or S

SEQ ID NO: 50221 - protein, 41 aa, Artificial Sequence; identical to SEQ ID NO: 17941
  GFR-binding peptide
  MOD_RES (2), (4), (41): Xaa is C or S
  MOD_RES (17), (18), (19), (20), (21): Xaa is A or G
  MOD_RES (22), (23), (24), (25): Xaa is A or G or is absent

SEQ ID NO: 50222 - protein, 40 aa, Artificial Sequence; identical to SEQ ID NO: 17944
  GFR-binding peptide
  MOD_RES (1), (38): Xaa is C or S
  MOD_RES (14), (15), (16), (17), (18): Xaa is A or G
  MOD_RES (19), (20), (21), (22): Xaa is A or G or is absent

SEQ ID NO: 50223 - protein, 38 aa, Artificial Sequence
  GFR-binding peptide
  MOD_RES (2), (36): Xaa is C or S
EXKNHQLFNSLQEHQGQHPKIRYYVMPLPEEETPVXEL

SEQ ID NO: 50224 - protein, 35 aa, Artificial Sequence
  GFR-binding peptide
  MOD_RES (2), (4), (35): Xaa is C or S
SXKXSRVIMSMEGIVKPKRGVMIQITINSLAQPVX

SEQ ID NO: 50225 - protein, 34 aa, Artificial Sequence
  GFR-binding peptide
  MOD_RES (1), (3), (34): Xaa is C or S
XKXSKVVMVTAKKVKPTRGVIKRIQVPRLDQPVX

SEQ ID NO: 50226 - protein, 35 aa, Artificial Sequence
  GFR-binding peptide
  MOD_RES (2), (2): Xaa is C or S
  MOD_RES (14), (15), (16), (17), (18): Xaa is A or G
  MOD_RES (19), (20), (21), (22): Xaa is A or G or is absent
GXSRVVMNSMEGIXXXXXXXXXMIQVTINSLKTPA

SEQ ID NO: 50227 - protein, 43 aa, Artificial Sequence
  GFR-binding peptide
  MOD_RES (2), (4), (41): Xaa is C or S
AXAXELHEELRNSLQELKPKKRVYEYYVVPLPEHHVRSPQXKV

SEQ ID NO: 50228 - protein, 40 aa, Artificial Sequence
  GFR-binding peptide
  MOD_RES (2), (4), (36), (37): Xaa is C or S
RXGXGEVVMDVQVEKVVKENEDVKAMKVSRLETPVXXAKP

SEQ ID NO: 50229 - protein, 36 aa, Artificial Sequence
  GFR-binding peptide
  MOD_RES (2), (4): Xaa is C or S
  MOD_RES (15), (16), (17), (18), (19): Xaa is A or G
  MOD_RES (20), (21), (22), (23): Xaa is A or G or is absent
SXKXSRVIMVTAKKXXXXXXXXXIKRIQVPRLAQPV

SEQ ID NO: 50230 - protein, 34 aa, Artificial Sequence; identical to SEQ ID NO: 37139
  GFR-binding peptide
  MOD_RES (1), (32), (33): Xaa is C or S

SEQ ID NO: 50231 - protein, 35 aa, Artificial Sequence
  GFR-binding peptide
  MOD_RES (32), (33): Xaa is C or S
ARVVMNVQVEKIVNSSDDVKAVKVSRLQTPAXXPK

SEQ ID NO: 50232 - protein, 39 aa, Artificial Sequence; identical to SEQ ID NO: 17945
  GFR-binding peptide
  MOD_RES (36), (36): Xaa is C or S
  MOD_RES (12), (13), (14), (15), (16): Xaa is A or G
  MOD_RES (17), (18), (19), (20): Xaa is A or G or is absent

SEQ ID NO: 50233 - protein, 40 aa, Artificial Sequence; identical to SEQ ID NO: 12726
  GFR-binding peptide
  MOD_RES (2), (4), (36): Xaa is C or S

SEQ ID NO: 50234 - protein, 41 aa, Artificial Sequence; identical to SEQ ID NO: 12727
  GFR-binding peptide
  MOD_RES (2), (4), (37), (38): Xaa is C or S
  MOD_RES (15), (16), (17), (18), (19): Xaa is A or G
  MOD_RES (20), (21), (22), (23): Xaa is A or G or is absent

SEQ ID NO: 50235 - protein, 34 aa, Artificial Sequence; identical to SEQ ID NO: 12728
  GFR-binding peptide
  MOD_RES (2), (4): Xaa is C or S

SEQ ID NO: 50236 - protein, 35 aa, Artificial Sequence
  GFR-binding peptide
  MOD_RES (34), (34): Xaa is C or S
  MOD_RES (12), (13), (14), (15), (16): Xaa is A or G
  MOD_RES (17), (18), (19), (20): Xaa is A or G or is absent
SRVVMNVTAKKXXXXXXXXXIKRVQVPRLKTPAXT

SEQ ID NO: 50237 - protein, 32 aa, Artificial Sequence; identical to SEQ ID NO: 17946
  GFR-binding peptide
  MOD_RES (11), (12), (13), (14), (15): Xaa is A or G
  MOD_RES (16), (17), (18), (19): Xaa is A or G or is absent

SEQ ID NO: 50238 - protein, 33 aa, Artificial Sequence
  GFR-binding peptide
  MOD_RES (32), (33): Xaa is C or S
GEVVMEVQVEKVVKDYEDVKAMKVSRLETPVXX

SEQ ID NO: 50239 - protein, 37 aa, Artificial Sequence; identical to SEQ ID NO: 17947
  GFR-binding peptide
  MOD_RES (36), (36): Xaa is C or S

SEQ ID NO: 50240 - protein, 41 aa, Artificial Sequence; identical to SEQ ID NO: 12733
  GFR-binding peptide
  MOD_RES (1), (3), (35), (36): Xaa is C or S

SEQ ID NO: 50241 - protein, 33 aa, Artificial Sequence
  GFR-binding peptide
  MOD_RES (31), (32): Xaa is C or S
SKVVMSMEGIVKPTRGVMIQITINSLDQPVXXP

SEQ ID NO: 50242 - protein, 42 aa, Artificial Sequence; identical to SEQ ID NO: 17951
  GFR-binding peptide
  MOD_RES (2), (39): Xaa is C or S

SEQ ID NO: 50243 - protein, 44 aa, Artificial Sequence
  GFR-binding peptide
  MOD_RES (2), (4), (41): Xaa is C or S
AXAXELHEELRNSLQELKPKKRVYEYYVVPLPEHHVRSPQXKVS

SEQ ID NO: 50244 - protein, 40 aa, Artificial Sequence; identical to SEQ ID NO: 17952
  GFR-binding peptide
  MOD_RES (2), (36): Xaa is C or S

SEQ ID NO: 50245 - protein, 36 aa, Artificial Sequence
  GFR-binding peptide
  MOD_RES (2), (33), (34): Xaa is C or S
KXSRVIMVTAKKVKPKRGVIKRIQVPRLAQPVXXPA

SEQ ID NO: 50246 - protein, 42 aa, Artificial Sequence; identical to SEQ ID NO: 17954
  GFR-binding peptide
  MOD_RES (2), (4), (41): Xaa is C or S

SEQ ID NO: 50247 - protein, 44 aa, Artificial Sequence
  GFR-binding peptide
  MOD_RES (2), (4), (38), (39): Xaa is C or S
  MOD_RES (16), (17), (18), (19), (20): Xaa is A or G
  MOD_RES (21), (22), (23), (24): Xaa is A or G or is absent
RXGXGEVVMDSMEGIXXXXXXXXXMIQMTINSLETPVXXAKPIK

SEQ ID NO: 50248 - protein, 41 aa, Artificial Sequence
  GFR-binding peptide
  MOD_RES (2), (4), (37), (38): Xaa is C or S
  MOD_RES (15), (16), (17), (18), (19): Xaa is A or G
  MOD_RES (20), (21), (22), (23): Xaa is A or G or is absent
SXKXSRVIMSMEGIXXXXXXXXXMIQITINSLAQPVXXPAA

SEQ ID NO: 50249 - protein, 37 aa, Artificial Sequence
  GFR-binding peptide
  MOD_RES (32), (32): Xaa is C or S
SRVVMNSMEGIIVNSSDDMIQVTINSLKTPAXTPKTV

SEQ ID NO: 50250 - protein, 38 aa, Artificial Sequence; identical to SEQ ID NO: 12740
  GFR-binding peptide
  MOD_RES (1), (3), (36), (37): Xaa is C or S
  MOD_RES (14), (15), (16), (17), (18): Xaa is A or G
  MOD_RES (19), (20), (21), (22): Xaa is A or G or is absent

SEQ ID NO: 50251 - protein, 39 aa, Artificial Sequence
  GFR-binding peptide
  MOD_RES (2), (36), (37): Xaa is C or S
  MOD_RES (14), (15), (16), (17), (18): Xaa is A or G
  MOD_RES (19), (20), (21), (22): Xaa is A or G or is absent
GXARVVMNVQVEKXXXXXXXXXVKAVKVSRLQTPAXXPK

SEQ ID NO: 50252 - protein, 36 aa, Artificial Sequence
  GFR-binding peptide
  MOD_RES (34), (34): Xaa is C or S
KNHQLFNSLQEHQGQHPKIRYYLMTLPEEETPVXEL

SEQ ID NO: 50253 - protein, 40 aa, Artificial Sequence
  GFR-binding peptide
  MOD_RES (1), (3), (35), (36): Xaa is C or S
XGXSRVVMNVTAKKIVNSSDDIKRVQVPRLKTPAXXPKPV

SEQ ID NO: 50254 - protein, 37 aa, Artificial Sequence; identical to SEQ ID NO: 12741
  GFR-binding peptide
  MOD_RES (2), (4), (37): Xaa is C or S
  MOD_RES (15), (16), (17), (18), (19): Xaa is A or G
  MOD_RES (20), (21), (22), (23): Xaa is A or G or is absent

SEQ ID NO: 50255 - protein, 37 aa, Artificial Sequence
  GFR-binding peptide
  MOD_RES (1), (34), (35): Xaa is C or S
  MOD_RES (12), (13), (14), (15), (16): Xaa is A or G
  MOD_RES (17), (18), (19), (20): Xaa is A or G or is absent
XSKVIMSMEGIXXXXXXXXXMIQITINSLDQSVXXPS

SEQ ID NO: 50256 - protein, 39 aa, Artificial Sequence; identical to SEQ ID NO: 17957
  GFR-binding peptide
  MOD_RES (2), (4): Xaa is C or S
  MOD_RES (17), (18), (19), (20), (21): Xaa is A or G
  MOD_RES (22), (23), (24), (25): Xaa is A or G or is absent

SEQ ID NO: 50257 - protein, 44 aa, Artificial Sequence; identical to SEQ ID NO: 17960
  GFR-binding peptide
  MOD_RES (1), (3), (40): Xaa is C or S
  MOD_RES (16), (17), (18), (19), (20): Xaa is A or G
  MOD_RES (21), (22), (23), (24): Xaa is A or G or is absent

SEQ ID NO: 50258 - protein, 34 aa, Artificial Sequence
  GFR-binding peptide
  MOD_RES (34), (34): Xaa is C or S
  MOD_RES (12), (13), (14), (15), (16): Xaa is A or G
  MOD_RES (17), (18), (19), (20): Xaa is A or G or is absent
SRVVMNVQVEKXXXXXXXXXVKAVKVSRLKTPAX

SEQ ID NO: 50259 - protein, 34 aa, Artificial Sequence
  GFR-binding peptide
  MOD_RES (1), (1): Xaa is C or S
  MOD_RES (13), (14), (15), (16), (17): Xaa is A or G
  MOD_RES (18), (19), (20), (21): Xaa is A or G or is absent
XARVVMNVTAKKXXXXXXXXXIKRVQVPRLQTPA

SEQ ID NO: 50260 - protein, 39 aa, Artificial Sequence
  GFR-binding peptide
  MOD_RES (2), (4), (38): Xaa is C or S
  MOD_RES (16), (17), (18), (19), (20): Xaa is A or G
  MOD_RES (21), (22), (23), (24): Xaa is A or G or is absent
HXGXSRVVMNVTAKKXXXXXXXXXIKRVQVPRLKTPAXT

SEQ ID NO: 50261 - protein, 34 aa, Artificial Sequence
  GFR-binding peptide
  MOD_RES (33), (34): Xaa is C or S
  MOD_RES (11), (12), (13), (14), (15): Xaa is A or G
  MOD_RES (16), (17), (18), (19): Xaa is A or G or is absent
EVVMDSMEGIXXXXXXXXXMIQMTINSLETPVXX

SEQ ID NO: 50262 - protein, 44 aa, Artificial Sequence
  GFR-binding peptide
  MOD_RES (2), (4), (38), (39): Xaa is C or S
  MOD_RES (16), (17), (18), (19), (20): Xaa is A or G
  MOD_RES (21), (22), (23), (24): Xaa is A or G or is absent
HXGXARVVMNSMEGIXXXXXXXXXMIQVTINSLQTPAXXPKPVT

SEQ ID NO: 50263 - protein, 44 aa, Artificial Sequence; identical to SEQ ID NO: 17961
  GFR-binding peptide
  MOD_RES (1), (3), (40): Xaa is C or S

SEQ ID NO: 50264 - protein, 34 aa, Artificial Sequence
  GFR-binding peptide
LHDELTNSLQEFIPKKRVIEYYLVTLPELQVQTP

SEQ ID NO: 50265 - protein, 39 aa, Artificial Sequence; identical to SEQ ID NO: 12747
  GFR-binding peptide
  MOD_RES (1), (3), (34), (35): Xaa is C or S

SEQ ID NO: 50266 - protein, 41 aa, Artificial Sequence; identical to SEQ ID NO: 17965
  GFR-binding peptide
  MOD_RES (37), (37): Xaa is C or S

SEQ ID NO: 50267 - protein, 39 aa, Artificial Sequence; identical to SEQ ID NO: 12749
  GFR-binding peptide
  MOD_RES (2), (4), (37), (38): Xaa is C or S
  MOD_RES (15), (16), (17), (18), (19): Xaa is A or G
  MOD_RES (20), (21), (22), (23): Xaa is A or G or is absent

SEQ ID NO: 50268 - protein, 37 aa, Artificial Sequence
  GFR-binding peptide
  MOD_RES (1), (3), (37): Xaa is C or S
  MOD_RES (15), (16), (17), (18), (19): Xaa is A or G
  MOD_RES (20), (21), (22), (23): Xaa is A or G or is absent
XGXSRVVMNVTAKKXXXXXXXXXIKRVQVPRLKTPAX

SEQ ID NO: 50269 - protein, 37 aa, Artificial Sequence; identical to SEQ ID NO: 17967
  GFR-binding peptide
  MOD_RES (36), (36): Xaa is C or S
  MOD_RES (12), (13), (14), (15), (16): Xaa is A or G
  MOD_RES (17), (18), (19), (20): Xaa is A or G or is absent

SEQ ID NO: 50270 - protein, 38 aa, Artificial Sequence; identical to SEQ ID NO: 12751
  GFR-binding peptide
  MOD_RES (1), (35), (36): Xaa is C or S
  MOD_RES (13), (14), (15), (16), (17): Xaa is A or G
  MOD_RES (18), (19), (20), (21): Xaa is A or G or is absent

SEQ ID NO: 50271 - protein, 37 aa, Artificial Sequence
  GFR-binding peptide
  MOD_RES (1), (3): Xaa is C or S
  MOD_RES (16), (17), (18), (19), (20): Xaa is A or G
  MOD_RES (21), (22), (23), (24): Xaa is A or G or is absent
XKXALHDELTNSLQEXXXXXXXXXYYVVPLPELQVQT

SEQ ID NO: 50272 - protein, 34 aa, Artificial Sequence
  GFR-binding peptide
  MOD_RES (1), (1): Xaa is C or S
  MOD_RES (13), (14), (15), (16), (17): Xaa is A or G
  MOD_RES (18), (19), (20), (21): Xaa is A or G or is absent
XSRVVMNSMEGIXXXXXXXXXMIQVTINSLKTPA

SEQ ID NO: 50273 - protein, 35 aa, Artificial Sequence; identical to SEQ ID NO: 12753
  GFR-binding peptide
  MOD_RES (1), (3), (34), (35): Xaa is C or S

SEQ ID NO: 50274 - protein, 36 aa, Artificial Sequence; identical to SEQ ID NO: 17970
  GFR-binding peptide
  MOD_RES (1), (3): Xaa is C or S
  MOD_RES (15), (16), (17), (18), (19): Xaa is A or G
  MOD_RES (20), (21), (22), (23): Xaa is A or G or is absent

SEQ ID NO: 50275 - protein, 34 aa, Artificial Sequence
  GFR-binding peptide
  MOD_RES (1), (1): Xaa is C or S
  MOD_RES (13), (14), (15), (16), (17): Xaa is A or G
  MOD_RES (18), (19), (20), (21): Xaa is A or G or is absent
XGEVVMEVQVEKXXXXXXXXXVKAMKVSRLETPV

SEQ ID NO: 50276 - protein, 35 aa, Artificial Sequence; identical to SEQ ID NO: 17971
  GFR-binding peptide
  MOD_RES (2), (2): Xaa is C or S

SEQ ID NO: 50277 - protein, 36 aa, Artificial Sequence; identical to SEQ ID NO: 17972
  GFR-binding peptide
  MOD_RES (34), (34): Xaa is C or S
  MOD_RES (12), (13), (14), (15), (16): Xaa is A or G
  MOD_RES (17), (18), (19), (20): Xaa is A or G or is absent

SEQ ID NO: 50278 - protein, 38 aa, Artificial Sequence; identical to SEQ ID NO: 17973
  GFR-binding peptide
  MOD_RES (35), (35): Xaa is C or S

SEQ ID NO: 50279 - protein, 38 aa, Artificial Sequence
  GFR-binding peptide
  MOD_RES (1), (38): Xaa is C or S
XALHDELTNSLQEFIPKKRVIEYYVVPLPELQVQTPRX

SEQ ID NO: 50280 - protein, 35 aa, Artificial Sequence
  GFR-binding peptide
  MOD_RES (34), (35): Xaa is C or S
  MOD_RES (12), (13), (14), (15), (16): Xaa is A or G
  MOD_RES (17), (18), (19), (20): Xaa is A or G or is absent
GEVVMEVTAKKXXXXXXXXXIKRMQVPRLETPVXX

SEQ ID NO: 50281 - protein, 41 aa, Artificial Sequence
  GFR-binding peptide
  MOD_RES (1), (3), (36), (37): Xaa is C or S
  MOD_RES (14), (15), (16), (17), (18): Xaa is A or G
  MOD_RES (19), (20), (21), (22): Xaa is A or G or is absent
XKXSKVIMVTAKKXXXXXXXXXIKRIQVPRLDQSVXXPSAS

SEQ ID NO: 50282 - protein, 35 aa, Artificial Sequence
  GFR-binding peptide
  MOD_RES (2), (34), (35): Xaa is C or S
GXSRVVMNVTAKKIVNSSDDIKRVQVPRLKTPAXX

SEQ ID NO: 50283 - protein, 38 aa, Artificial Sequence
  GFR-binding peptide
  MOD_RES (34), (34): Xaa is C or S
  MOD_RES (12), (13), (14), (15), (16): Xaa is A or G
  MOD_RES (17), (18), (19), (20): Xaa is A or G or is absent
SRVVMNVTAKKXXXXXXXXXIKRVQVPRLKTPAXTPKT

SEQ ID NO: 50284 - protein, 33 aa, Artificial Sequence
  GFR-binding peptide
  MOD_RES (1), (32), (33): Xaa is C or S
XSKVIMVTAKKIKPTKGIIKRIQVPRLDQSVXX

SEQ ID NO: 50285 - protein, 34 aa, Artificial Sequence; identical to SEQ ID NO: 12758
  GFR-binding peptide
  MOD_RES (2), (2): Xaa is C or S
  MOD_RES (13), (14), (15), (16), (17): Xaa is A or G
  MOD_RES (18), (19), (20), (21): Xaa is A or G or is absent

SEQ ID NO: 50286 - protein, 35 aa, Artificial Sequence
  GFR-binding peptide
  MOD_RES (32), (32): Xaa is C or S
SRVVMNSMEGIIVNSSDDMIQVTINSLKTPAXTPK

SEQ ID NO: 50287 - protein, 43 aa, Artificial Sequence; identical to SEQ ID NO: 17977
  GFR-binding peptide
  MOD_RES (1), (3), (40): Xaa is C or S

SEQ ID NO: 50288 - protein, 41 aa, Artificial Sequence; identical to SEQ ID NO: 17978
  GFR-binding peptide
  MOD_RES (1), (3), (40): Xaa is C or S
  MOD_RES (16), (17), (18), (19), (20): Xaa is A or G
  MOD_RES (21), (22), (23), (24): Xaa is A or G or is absent

SEQ ID NO: 50289 - protein, 40 aa, Artificial Sequence
  GFR-binding peptide
  MOD_RES (1), (35), (36): Xaa is C or S
  MOD_RES (13), (14), (15), (16), (17): Xaa is A or G
  MOD_RES (18), (19), (20), (21): Xaa is A or G or is absent
XSRVVMNVTAKKXXXXXXXXXIKRVQVPRLKTPAXXPKPV

SEQ ID NO: 50290 - protein, 41 aa, Artificial Sequence; identical to SEQ ID NO: 17980
  GFR-binding peptide
  MOD_RES (2), (36): Xaa is C or S
  MOD_RES (14), (15), (16), (17), (18): Xaa is A or G
  MOD_RES (19), (20), (21), (22): Xaa is A or G or is absent

SEQ ID NO: 50291 - protein, 41 aa, Artificial Sequence; identical to SEQ ID NO: 17983
  GFR-binding peptide
  MOD_RES (1), (38): Xaa is C or S

SEQ ID NO: 50292 - protein, 36 aa, Artificial Sequence
  GFR-binding peptide
  MOD_RES (33), (34): Xaa is C or S
  MOD_RES (11), (12), (13), (14), (15): Xaa is A or G
  MOD_RES (16), (17), (18), (19): Xaa is A or G or is absent
SKVVMSMEGIXXXXXXXXXMIQITINSLDQPVXXPS

SEQ ID NO: 50293 - protein, 38 aa, Artificial Sequence
  GFR-binding peptide
  MOD_RES (32), (33): Xaa is C or S
GEVVMEVTAKKVVKDYEDIKRMQVPRLETPVXXAKPIS

SEQ ID NO: 50294 - protein, 37 aa, Artificial Sequence; identical to SEQ ID NO: 12760
  GFR-binding peptide
  MOD_RES (31), (32): Xaa is C or S

SEQ ID NO: 50295 - protein, 38 aa, Artificial Sequence
  GFR-binding peptide
  MOD_RES (1), (38): Xaa is C or S
  MOD_RES (14), (15), (16), (17), (18): Xaa is A or G
  MOD_RES (19), (20), (21), (22): Xaa is A or G or is absent
XALHDELTNSLQEXXXXXXXXXYYLVTLPELQVQTPRX

SEQ ID NO: 50296 - protein, 33 aa, Artificial Sequence; identical to SEQ ID NO: 12761
  GFR-binding peptide
  MOD_RES (32), (33): Xaa is C or S

SEQ ID NO: 50297 - protein, 38 aa, Artificial Sequence
  GFR-binding peptide
  MOD_RES (1), (3), (35), (36): Xaa is C or S
XGXGEVVMEVTAKKVVKDYEDIKRMQVPRLETPVXXAK

SEQ ID NO: 50298 - protein, 38 aa, Artificial Sequence; identical to SEQ ID NO: 12762
  GFR-binding peptide
  MOD_RES (34), (34): Xaa is C or S
  MOD_RES (12), (13), (14), (15), (16): Xaa is A or G
  MOD_RES (17), (18), (19), (20): Xaa is A or G or is absent

SEQ ID NO: 50299 - protein, 39 aa, Artificial Sequence; identical to SEQ ID NO: 17990
  GFR-binding peptide
  MOD_RES (2), (39): Xaa is C or S
  MOD_RES (15), (16), (17), (18), (19): Xaa is A or G
  MOD_RES (20), (21), (22), (23): Xaa is A or G or is absent

SEQ ID NO: 50300 - protein, 40 aa, Artificial Sequence; identical to SEQ ID NO: 17991
  GFR-binding peptide
  MOD_RES (1), (35): Xaa is C or S
  MOD_RES (13), (14), (15), (16), (17): Xaa is A or G
  MOD_RES (18), (19), (20), (21): Xaa is A or G or is absent

SEQ ID NO: 50301 - protein, 37 aa, Artificial Sequence
  GFR-binding peptide
  MOD_RES (2), (35), (36): Xaa is C or S
  MOD_RES (13), (14), (15), (16), (17): Xaa is A or G
  MOD_RES (18), (19), (20), (21): Xaa is A or G or is absent
KXSRVIMSMEGIXXXXXXXXXMIQITINSLAQPVXXP

SEQ ID NO: 50302 - protein, 39 aa, Artificial Sequence; identical to SEQ ID NO: 17992
  GFR-binding peptide
  MOD_RES (36), (36): Xaa is C or S

SEQ ID NO: 50303 - protein, 40 aa, Artificial Sequence
  GFR-binding peptide
  MOD_RES (1), (3), (37), (38): Xaa is C or S
  MOD_RES (15), (16), (17), (18), (19): Xaa is A or G
  MOD_RES (20), (21), (22), (23): Xaa is A or G or is absent
XGXGEVVMESMEGIXXXXXXXXXMIQMTINSLETPVXXAK

SEQ ID NO: 50304 - protein, 41 aa, Artificial Sequence; identical to SEQ ID NO: 12771
  GFR-binding peptide
  MOD_RES (1), (35), (36): Xaa is C or S
  MOD_RES (13), (14), (15), (16), (17): Xaa is A or G
  MOD_RES (18), (19), (20), (21): Xaa is A or G or is absent

SEQ ID NO: 50305 - protein, 36 aa, Artificial Sequence
  GFR-binding peptide
  MOD_RES (1), (35): Xaa is C or S
  MOD_RES (13), (14), (15), (16), (17): Xaa is A or G
  MOD_RES (18), (19), (20), (21): Xaa is A or G or is absent
XSRVVMNSMEGIXXXXXXXXXMIQVTINSLKTPAXT

SEQ ID NO: 50306 - protein, 37 aa, Artificial Sequence
  GFR-binding peptide
  MOD_RES (2), (4), (36), (37): Xaa is C or S
HXGXSRVVMNVTAKKIVNSSDDIKRVQVPRLKTPAXX

SEQ ID NO: 50307 - protein, 37 aa, Artificial Sequence
  GFR-binding peptide
  MOD_RES (33), (34): Xaa is C or S
  MOD_RES (11), (12), (13), (14), (15): Xaa is A or G
  MOD_RES (16), (17), (18), (19): Xaa is A or G or is absent
RVVMNSMEGIXXXXXXXXXMIQVTINSLQTPAXXPKP

SEQ ID NO: 50308 - protein, 36 aa, Artificial Sequence; identical to SEQ ID NO: 12774
  GFR-binding peptide
  MOD_RES (2), (4), (35), (36): Xaa is C or S

SEQ ID NO: 50309 - protein, 38 aa, Artificial Sequence
  GFR-binding peptide
  MOD_RES (2), (4): Xaa is C or S
  MOD_RES (17), (18), (19), (20), (21): Xaa is A or G
  MOD_RES (22), (23), (24), (25): Xaa is A or G or is absent
AXAXELHEELRNSLQEXXXXXXXXXYYVVPLPEHHVRS

SEQ ID NO: 50310 - protein, 43 aa, Artificial Sequence; identical to SEQ ID NO: 17993
  GFR-binding peptide
  MOD_RES (2), (4), (41): Xaa is C or S
  MOD_RES (17), (18), (19), (20), (21): Xaa is A or G
  MOD_RES (22), (23), (24), (25): Xaa is A or G or is absent

SEQ ID NO: 50311 - protein, 33 aa, Artificial Sequence; identical to SEQ ID NO: 12779
  GFR-binding peptide
  MOD_RES (1), (33): Xaa is C or S

SEQ ID NO: 50312 - protein, 39 aa, Artificial Sequence; identical to SEQ ID NO: 12780
  GFR-binding peptide
  MOD_RES (1), (33): Xaa is C or S

SEQ ID NO: 50313 - protein, 36 aa, Artificial Sequence
  GFR-binding peptide
  MOD_RES (2), (4), (35), (36): Xaa is C or S
SXKXSKVIMVTAKKIKPTKGIIKRIQVPRLDQSVXX

SEQ ID NO: 50314 - protein, 36 aa, Artificial Sequence; identical to SEQ ID NO: 12787
  GFR-binding peptide
  MOD_RES (31), (32): Xaa is C or S

SEQ ID NO: 50315 - protein, 38 aa, Artificial Sequence; identical to SEQ ID NO: 12790
  GFR-binding peptide
  MOD_RES (32), (33): Xaa is C or S

SEQ ID NO: 50316 - protein, 37 aa, Artificial Sequence; identical to SEQ ID NO: 12792
  GFR-binding peptide
  MOD_RES (1), (33), (34): Xaa is C or S

SEQ ID NO: 50317 - protein, 37 aa, Artificial Sequence
  GFR-binding peptide
  MOD_RES (1), (33), (34): Xaa is C or S
XARVVMNVQVEKIVNSSDDVKAVKVSRLQTPAXXPKP

SEQ ID NO: 50318 - protein, 40 aa, Artificial Sequence; identical to SEQ ID NO: 12794
  GFR-binding peptide
  MOD_RES (2), (4), (35), (36): Xaa is C or S

SEQ ID NO: 50319 - protein, 41 aa, Artificial Sequence
  GFR-binding peptide
  MOD_RES (1), (3), (37): Xaa is C or S
  MOD_RES (15), (16), (17), (18), (19): Xaa is A or G
  MOD_RES (20), (21), (22), (23): Xaa is A or G or is absent
XEXKNHQLFNSLQEXXXXXXXXXYYVMPLPEEETPVXELGE

SEQ ID NO: 50320 - protein, 37 aa, Artificial Sequence; identical to SEQ ID NO: 12796
  GFR-binding peptide
  MOD_RES (1), (3), (34), (35): Xaa is C or S

SEQ ID NO: 50321 - protein, 44 aa, Artificial Sequence; identical to SEQ ID NO: 17997
  GFR-binding peptide
  MOD_RES (1), (3), (40): Xaa is C or S

SEQ ID NO: 50322 - protein, 36 aa, Artificial Sequence
  GFR-binding peptide
  MOD_RES (33), (34): Xaa is C or S
  MOD_RES (11), (12), (13), (14), (15): Xaa is A or G
  MOD_RES (16), (17), (18), (19): Xaa is A or G or is absent
EVVMEVQVEKXXXXXXXXXVKAMKVSRLETPVXXAK

SEQ ID NO: 50323 - protein, 42 aa, Artificial Sequence; identical to SEQ ID NO: 17998
  GFR-binding peptide
  MOD_RES (1), (38): Xaa is C or S
  MOD_RES (14), (15), (16), (17), (18): Xaa is A or G
  MOD_RES (19), (20), (21), (22): Xaa is A or G or is absent

SEQ ID NO: 50324 - protein, 38 aa, Artificial Sequence; identical to SEQ ID NO: 17999
  GFR-binding peptide
  MOD_RES (36), (36): Xaa is C or S

SEQ ID NO: 50325 - protein, 38 aa, Artificial Sequence; identical to SEQ ID NO: 18000
  GFR-binding peptide
  MOD_RES (2), (4): Xaa is C or S
  MOD_RES (17), (18), (19), (20), (21): Xaa is A or G
  MOD_RES (22), (23), (24), (25): Xaa is A or G or is absent

SEQ ID NO: 50326 - protein, 41 aa, Artificial Sequence
  GFR-binding peptide
  MOD_RES (2), (4), (41): Xaa is C or S
  MOD_RES (17), (18), (19), (20), (21): Xaa is A or G
  MOD_RES (22), (23), (24), (25): Xaa is A or G or is absent
AXAXELHEELRNSLQEXXXXXXXXXYYLVTLPEHHVRSPQX

SEQ ID NO: 50327 - protein, 38 aa, Artificial Sequence; identical to SEQ ID NO: 12797
  GFR-binding peptide
  MOD_RES (2), (4), (37), (38): Xaa is C or S
  MOD_RES (15), (16), (17), (18), (19): Xaa is A or G
  MOD_RES (20), (21), (22), (23): Xaa is A or G or is absent

SEQ ID NO: 50328 - protein, 41 aa, Artificial Sequence; identical to SEQ ID NO: 12798
  GFR-binding peptide
  MOD_RES (2), (4), (38), (39): Xaa is C or S
  MOD_RES (16), (17), (18), (19), (20): Xaa is A or G
  MOD_RES (21), (22), (23), (24): Xaa is A or G or is absent

SEQ ID NO: 50329 - protein, 33 aa, Artificial Sequence; identical to SEQ ID NO: 12799
  GFR-binding peptide
  MOD_RES (12), (13), (14), (15), (16): Xaa is A or G
  MOD_RES (17), (18), (19), (20): Xaa is A or G or is absent

SEQ ID NO: 50330 - protein, 42 aa, Artificial Sequence
  GFR-binding peptide
  MOD_RES (1), (3), (37), (38): Xaa is C or S
  MOD_RES (15), (16), (17), (18), (19): Xaa is A or G
  MOD_RES (20), (21), (22), (23): Xaa is A or G or is absent
XGXSRVVMNVQVEKXXXXXXXXXVKAVKVSRLKTPAXXPKPV

SEQ ID NO: 50331 - protein, 30 aa, Artificial Sequence
  GFR-binding peptide
SRVIMVQVEKVKPKRGVVKAIKVSRLAQPV

SEQ ID NO: 50332 - protein, 34 aa, Artificial Sequence; identical to SEQ ID NO: 18002
  GFR-binding peptide

SEQ ID NO: 50333 - protein, 37 aa, Artificial Sequence
  GFR-binding peptide
  MOD_RES (34), (34): Xaa is C or S
  MOD_RES (12), (13), (14), (15), (16): Xaa is A or G
  MOD_RES (17), (18), (19), (20): Xaa is A or G or is absent
SRVVMNVQVEKXXXXXXXXXVKAVKVSRLKTPAXTPK

SEQ ID NO: 50334 - protein, 33 aa, Artificial Sequence
  GFR-binding peptide
  MOD_RES (32), (33): Xaa is C or S
ARVVMNVQVEKIVNSSDDVKAVKVSRLQTPAXX

SEQ ID NO: 50335 - protein, 39 aa, Artificial Sequence
  GFR-binding peptide
  MOD_RES (34), (35): Xaa is C or S
  MOD_RES (12), (13), (14), (15), (16): Xaa is A or G
  MOD_RES (17), (18), (19), (20): Xaa is A or G or is absent
GEVVMDSMEGIXXXXXXXXXMIQMTINSLETPVXXAKPI

SEQ ID NO: 50336 - protein, 35 aa, Artificial Sequence
  GFR-binding peptide
  MOD_RES (2), (2): Xaa is C or S
  MOD_RES (14), (15), (16), (17), (18): Xaa is A or G
  MOD_RES (19), (20), (21), (22): Xaa is A or G or is absent
GXARVVMNVTAKKXXXXXXXXXIKRVQVPRLQTPA

SEQ ID NO: 50337 - protein, 37 aa, Artificial Sequence
  GFR-binding peptide
  MOD_RES (1), (33), (34): Xaa is C or S
XSRVVMNVTAKKIVNSSDDIKRVQVPRLKTPAXXPKP

SEQ ID NO: 50338 - protein, 35 aa, Artificial Sequence; identical to SEQ ID NO: 18006
  GFR-binding peptide
  MOD_RES (35), (35): Xaa is C or S
  MOD_RES (11), (12), (13), (14), (15): Xaa is A or G
  MOD_RES (16), (17), (18), (19): Xaa is A or G or is absent

SEQ ID NO: 50339 - protein, 41 aa, Artificial Sequence
  GFR-binding peptide
  MOD_RES (1), (38): Xaa is C or S
  MOD_RES (14), (15), (16), (17), (18): Xaa is A or G
  MOD_RES (19), (20), (21), (22): Xaa is A or G or is absent
XALHDELTNSLQEXXXXXXXXXYYVVPLPELQVQTPRXQVN

SEQ ID NO: 50340 - protein, 36 aa, Artificial Sequence; identical to SEQ ID NO: 18007
  GFR-binding peptide
  MOD_RES (2), (2): Xaa is C or S
  MOD_RES (15), (16), (17), (18), (19): Xaa is A or G
  MOD_RES (20), (21), (22), (23): Xaa is A or G or is absent

SEQ ID NO: 50341 - protein, 31 aa, Artificial Sequence; identical to SEQ ID NO: 37253
  GFR-binding peptide
  MOD_RES (1), (1): Xaa is C or S

SEQ ID NO: 50342 - protein, 39 aa, Artificial Sequence; identical to SEQ ID NO: 12803
  GFR-binding peptide
  MOD_RES (2), (4), (36): Xaa is C or S

SEQ ID NO: 50343 - protein, 41 aa, Artificial Sequence; identical to SEQ ID NO: 18009
  GFR-binding peptide
  MOD_RES (1), (3), (40): Xaa is C or S

SEQ ID NO: 50344 - protein, 38 aa, Artificial Sequence
  GFR-binding peptide
  MOD_RES (33), (33): Xaa is C or S
  MOD_RES (11), (12), (13), (14), (15): Xaa is A or G
  MOD_RES (16), (17), (18), (19): Xaa is A or G or is absent
NHQLFNSLQEXXXXXXXXXYYVMPLPEEETPVXELGED

SEQ ID NO: 50345 - protein, 33 aa, Artificial Sequence
  GFR-binding peptide
  MOD_RES (31), (32): Xaa is C or S
SKVVMVQVEKVKPTRGVVKAIKVSRLDQPVXXP

SEQ ID NO: 50346 - protein, 37 aa, Artificial Sequence
  GFR-binding peptide
  MOD_RES (2), (33), (34): Xaa is C or S
KXSKVVMVQVEKVKPTRGVVKAIKVSRLDQPVXXPSA

SEQ ID NO: 50347 - protein, 41 aa, Artificial Sequence
  GFR-binding peptide
  MOD_RES (1), (3), (36), (37): Xaa is C or S
  MOD_RES (14), (15), (16), (17), (18): Xaa is A or G
  MOD_RES (19), (20), (21), (22): Xaa is A or G or is absent
XKXSRVIMVTAKKXXXXXXXXXIKRIQVPRLAQPVXXPAAS

SEQ ID NO: 50348 - protein, 36 aa, Artificial Sequence; identical to SEQ ID NO: 12806
  GFR-binding peptide
  MOD_RES (31), (32): Xaa is C or S

SEQ ID NO: 50349 - protein, 34 aa, Artificial Sequence; identical to SEQ ID NO: 18010
  GFR-binding peptide
  MOD_RES (12), (13), (14), (15), (16): Xaa is A or G
  MOD_RES (17), (18), (19), (20): Xaa is A or G or is absent

SEQ ID NO: 50350 - protein, 35 aa, Artificial Sequence; identical to SEQ ID NO: 18011
  GFR-binding peptide
  MOD_RES (35), (35): Xaa is C or S
  MOD_RES (11), (12), (13), (14), (15): Xaa is A or G
  MOD_RES (16), (17), (18), (19): Xaa is A or G or is absent

SEQ ID NO: 50351 - protein, 35 aa, Artificial Sequence; identical to SEQ ID NO: 12807
  GFR-binding peptide
  MOD_RES (34), (35): Xaa is C or S
  MOD_RES (12), (13), (14), (15), (16): Xaa is A or G
  MOD_RES (17), (18), (19), (20): Xaa is A or G or is absent

SEQ ID NO: 50352 - protein, 41 aa, Artificial Sequence
  GFR-binding peptide
  MOD_RES (2), (39): Xaa is C or S
  MOD_RES (15), (16), (17), (18), (19): Xaa is A or G
  MOD_RES (20), (21), (22), (23): Xaa is A or G or is absent
AXELHEELRNSLQEXXXXXXXXXYYLVTLPEHHVRSPQXKV

SEQ ID NO: 50353 - protein, 31 aa, Artificial Sequence
  GFR-binding peptide
ARVVMNVTAKKIVNSSDDIKRVQVPRLQTPA

SEQ ID NO: 50354 - protein, 38 aa, Artificial Sequence; identical to SEQ ID NO: 18013
  GFR-binding peptide
  MOD_RES (1), (35): Xaa is C or S

SEQ ID NO: 50355 - protein, 33 aa, Artificial Sequence; identical to SEQ ID NO: 18014
  GFR-binding peptide

SEQ ID NO: 50356 - protein, 42 aa, Artificial Sequence; identical to SEQ ID NO: 18015
  GFR-binding peptide
  MOD_RES (1), (3), (40): Xaa is C or S
  MOD_RES (16), (17), (18), (19), (20): Xaa is A or G
  MOD_RES (21), (22), (23), (24): Xaa is A or G or is absent

SEQ ID NO: 50357 - protein, 39 aa, Artificial Sequence
  GFR-binding peptide
  MOD_RES (2), (4), (38), (39): Xaa is C or S
  MOD_RES (16), (17), (18), (19), (20): Xaa is A or G
  MOD_RES (21), (22), (23), (24): Xaa is A or G or is absent
HXGXSRVVMNSMEGIXXXXXXXXXMIQVTINSLKTPAXX

SEQ ID NO: 50358 - protein, 41 aa, Artificial Sequence
  GFR-binding peptide
  MOD_RES (2), (36): Xaa is C or S
  MOD_RES (14), (15), (16), (17), (18): Xaa is A or G
  MOD_RES (19), (20), (21), (22): Xaa is A or G or is absent
EXKNHQLFNSLQEXXXXXXXXXYYLMTLPEEETPVXELGED

SEQ ID NO: 50359 - protein, 39 aa, Artificial Sequence
  GFR-binding peptide
  MOD_RES (33), (34): Xaa is C or S
  MOD_RES (11), (12), (13), (14), (15): Xaa is A or G
  MOD_RES (16), (17), (18), (19): Xaa is A or G or is absent
SKVIMVTAKKXXXXXXXXXIKRIQVPRLDQSVXXPSASA

SEQ ID NO: 50360 - protein, 40 aa, Artificial Sequence; identical to SEQ ID NO: 12813
  GFR-binding peptide
  MOD_RES (1), (3), (37), (38): Xaa is C or S
  MOD_RES (15), (16), (17), (18), (19): Xaa is A or G
  MOD_RES (20), (21), (22), (23): Xaa is A or G or is absent

SEQ ID NO: 50361 - protein, 38 aa, Artificial Sequence; identical to SEQ ID NO: 18018
  GFR-binding peptide
  MOD_RES (1), (38): Xaa is C or S
  MOD_RES (14), (15), (16), (17), (18): Xaa is A or G
  MOD_RES (19), (20), (21), (22): Xaa is A or G or is absent

SEQ ID NO: 50362 - protein, 38 aa, Artificial Sequence
  GFR-binding peptide
  MOD_RES (2), (2): Xaa is C or S
KXALHDELTNSLQEFIPKKRVIEYYLVTLPELQVQTPR

SEQ ID NO: 50363 - protein, 35 aa, Artificial Sequence
  GFR-binding peptide
  MOD_RES (32), (33): Xaa is C or S
GEVVMEVQVEKVVKDYEDVKAMKVSRLETPVXXAK

SEQ ID NO: 50364 - protein, 32 aa, Artificial Sequence; identical to SEQ ID NO: 12814
  GFR-binding peptide
  MOD_RES (31), (32): Xaa is C or S

SEQ ID NO: 50365 - protein, 36 aa, Artificial Sequence; identical to SEQ ID NO: 18020
  GFR-binding peptide
  MOD_RES (33), (33): Xaa is C or S
  MOD_RES (11), (12), (13), (14), (15): Xaa is A or G
  MOD_RES (16), (17), (18), (19): Xaa is A or G or is absent

SEQ ID NO: 50366 - protein, 39 aa, Artificial Sequence; identical to SEQ ID NO: 18022
  GFR-binding peptide
  MOD_RES (2), (4), (38): Xaa is C or S
  MOD_RES (16), (17), (18), (19), (20): Xaa is A or G
  MOD_RES (21), (22), (23), (24): Xaa is A or G or is absent

SEQ ID NO: 50367 - protein, 37 aa, Artificial Sequence
  GFR-binding peptide
  MOD_RES (1), (3), (34), (35): Xaa is C or S
XKXSRVIMSMEGIVKPKRGVMIQITINSLAQPVXXPA

SEQ ID NO: 50368 - protein, 39 aa, Artificial Sequence; identical to SEQ ID NO: 12817
  GFR-binding peptide
  MOD_RES (2), (4), (36), (37): Xaa is C or S

SEQ ID NO: 50369 - protein, 40 aa, Artificial Sequence
  GFR-binding peptide
  MOD_RES (2), (4), (35), (36): Xaa is C or S
SXKXSKVVMVTAKKVKPTRGVIKRIQVPRLDQPVXXPSAS

SEQ ID NO: 50370 - protein, 41 aa, Artificial Sequence; identical to SEQ ID NO: 18026
  GFR-binding peptide
  MOD_RES (2), (4), (38): Xaa is C or S
  MOD_RES (16), (17), (18), (19), (20): Xaa is A or G
  MOD_RES (21), (22), (23), (24): Xaa is A or G or is absent

SEQ ID NO: 50371 - protein, 35 aa, Artificial Sequence; identical to SEQ ID NO: 12820
  GFR-binding peptide
  MOD_RES (2), (4): Xaa is C or S

SEQ ID NO: 50372 - protein, 36 aa, Artificial Sequence
  GFR-binding peptide
  MOD_RES (33), (34): Xaa is C or S
  MOD_RES (11), (12), (13), (14), (15): Xaa is A or G
  MOD_RES (16), (17), (18), (19): Xaa is A or G or is absent
RVVMNVQVEKXXXXXXXXXVKAVKVSRLQTPAXXPK

SEQ ID NO: 50373 - protein, 38 aa, Artificial Sequence; identical to SEQ ID NO: 18029
  GFR-binding peptide
  MOD_RES (2), (4), (38): Xaa is C or S

SEQ ID NO: 50374 - protein, 38 aa, Artificial Sequence; identical to SEQ ID NO: 12822
  GFR-binding peptide
  MOD_RES (1), (34), (35): Xaa is C or S
  MOD_RES (12), (13), (14), (15), (16): Xaa is A or G
  MOD_RES (17), (18), (19), (20): Xaa is A or G or is absent

SEQ ID NO: 50375 - protein, 45 aa, Artificial Sequence
  GFR-binding peptide
  MOD_RES (2), (4), (41): Xaa is C or S
AXAXELHEELRNSLQELKPKKRVYEYYLVTLPEHHVRSPQXKVSS

SEQ ID NO: 50376 - protein, 37 aa, Artificial Sequence; identical to SEQ ID NO: 18030
  GFR-binding peptide
  MOD_RES (2), (2): Xaa is C or S

SEQ ID NO: 50377 - protein, 36 aa, Artificial Sequence; identical to SEQ ID NO: 12823
  GFR-binding peptide
  MOD_RES (2), (36): Xaa is C or S
  MOD_RES (14), (15), (16), (17), (18): Xaa is A or G
  MOD_RES (19), (20), (21), (22): Xaa is A or G or is absent

SEQ ID NO: 50378 - protein, 34 aa, Artificial Sequence
  GFR-binding peptide
  MOD_RES (2), (33), (34): Xaa is C or S
KXSKVIMVQVEKIKPTKGIVKAIKVSRLDQSVXX

SEQ ID NO: 50379 - protein, 37 aa, Artificial Sequence
  GFR-binding peptide
  MOD_RES (1), (32), (33): Xaa is C or S
XSRVIMVQVEKVKPKRGVVKAIKVSRLAQPVXXPAAS

SEQ ID NO: 50380 - protein, 39 aa, Artificial Sequence
  GFR-binding peptide
  MOD_RES (1), (3), (37): Xaa is C or S
  MOD_RES (15), (16), (17), (18), (19): Xaa is A or G
  MOD_RES (20), (21), (22), (23): Xaa is A or G or is absent
XEXKNHQLFNSLQEXXXXXXXXXYYVMPLPEEETPVXEL

SEQ ID NO: 50381 - protein, 36 aa, Artificial Sequence; identical to SEQ ID NO: 12829
  GFR-binding peptide
  MOD_RES (2), (33), (34): Xaa is C or S

SEQ ID NO: 50382 - protein, 36 aa, Artificial Sequence; identical to SEQ ID NO: 12831
  GFR-binding peptide
  MOD_RES (2), (4), (36): Xaa is C or S

SEQ ID NO: 50383 - protein, 40 aa, Artificial Sequence; identical to SEQ ID NO: 18032
  GFR-binding peptide
  MOD_RES (2), (4): Xaa is C or S
  MOD_RES (17), (18), (19), (20), (21): Xaa is A or G
  MOD_RES (22), (23), (24), (25): Xaa is A or G or is absent

SEQ ID NO: 50384 - protein, 41 aa, Artificial Sequence
  GFR-binding peptide
  MOD_RES (1), (3), (35), (36): Xaa is C or S
XGXGEVVMDVQVEKVVKENEDVKAMKVSRLETPVXXAKPIK

SEQ ID NO: 50385 - protein, 43 aa, Artificial Sequence
  GFR-binding peptide
  MOD_RES (1), (3), (40): Xaa is C or S
  MOD_RES (16), (17), (18), (19), (20): Xaa is A or G
  MOD_RES (21), (22), (23), (24): Xaa is A or G or is absent
XKXALHDELTNSLQEXXXXXXXXXYYVVPLPELQVQTPRXQVN

SEQ ID NO: 50386 - protein, 40 aa, Artificial Sequence
  GFR-binding peptide
  MOD_RES (2), (4), (35), (36): Xaa is C or S
SXKXSRVIMSMEGIVKPKRGVMIQITINSLAQPVXXPAAS

SEQ ID NO: 50387 - protein, 37 aa, Artificial Sequence; identical to SEQ ID NO: 12833
  GFR-binding peptide
  MOD_RES (1), (32), (33): Xaa is C or S

SEQ ID NO: 50388 - protein, 31 aa, Artificial Sequence
  GFR-binding peptide
  MOD_RES (31), (31): Xaa is C or S
EVVMDVQVEKVVKENEDVKAMKVSRLETPVX

SEQ ID NO: 50389 - protein, 31 aa, Artificial Sequence; identical to SEQ ID NO: 12834
  GFR-binding peptide
  MOD_RES (31), (31): Xaa is C or S

SEQ ID NO: 50390 - protein, 37 aa, Artificial Sequence; identical to SEQ ID NO: 12835
  GFR-binding peptide
  MOD_RES (2), (36), (37): Xaa is C or S
  MOD_RES (14), (15), (16), (17), (18): Xaa is A or G
  MOD_RES (19), (20), (21), (22): Xaa is A or G or is absent

SEQ ID NO: 50391 - protein, 34 aa, Artificial Sequence
  GFR-binding peptide
  MOD_RES (1), (3): Xaa is C or S
XGXGEVVMDSMEGIVVKENEDMIQMTINSLETPV

SEQ ID NO: 50392 - protein, 38 aa, Artificial Sequence; identical to SEQ ID NO: 12837
  GFR-binding peptide
  MOD_RES (33), (34): Xaa is C or S
  MOD_RES (11), (12), (13), (14), (15): Xaa is A or G
  MOD_RES (16), (17), (18), (19): Xaa is A or G or is absent

SEQ ID NO: 50393 - protein, 35 aa, Artificial Sequence; identical to SEQ ID NO: 12838
  GFR-binding peptide
  MOD_RES (2), (4): Xaa is C or S

SEQ ID NO: 50394 - protein, 42 aa, Artificial Sequence
  GFR-binding peptide
  MOD_RES (2), (4), (41): Xaa is C or S
  MOD_RES (17), (18), (19), (20), (21): Xaa is A or G
  MOD_RES (22), (23), (24), (25): Xaa is A or G or is absent
AXAXELHEELRNSLQEXXXXXXXXXYYLVTLPEHHVRSPQXK

SEQ ID NO: 50395 - protein, 39 aa, Artificial Sequence
  GFR-binding peptide
  MOD_RES (33), (34): Xaa is C or S
  MOD_RES (11), (12), (13), (14), (15): Xaa is A or G
  MOD_RES (16), (17), (18), (19): Xaa is A or G or is absent
RVVMNVTAKKXXXXXXXXXIKRVQVPRLQTPAXXPKPVT

SEQ ID NO: 50396 - protein, 32 aa, Artificial Sequence; identical to SEQ ID NO: 12840
  GFR-binding peptide
  MOD_RES (31), (32): Xaa is C or S

SEQ ID NO: 50397 - protein, 37 aa, Artificial Sequence
  GFR-binding peptide
  MOD_RES (33), (34): Xaa is C or S
  MOD_RES (11), (12), (13), (14), (15): Xaa is A or G
  MOD_RES (16), (17), (18), (19): Xaa is A or G or is absent
EVVMESMEGIXXXXXXXXXMIQMTINSLETPVXXAKP

SEQ ID NO: 50398 - protein, 37 aa, Artificial Sequence; identical to SEQ ID NO: 37312
  GFR-binding peptide
  MOD_RES (2), (4), (37): Xaa is C or S
  MOD_RES (15), (16), (17), (18), (19): Xaa is A or G
  MOD_RES (20), (21), (22), (23): Xaa is A or G or is absent

SEQ ID NO: 50399 - protein, 34 aa, Artificial Sequence
  GFR-binding peptide
  MOD_RES (1), (34): Xaa is C or S
  MOD_RES (12), (13), (14), (15), (16): Xaa is A or G
  MOD_RES (17), (18), (19), (20): Xaa is A or G or is absent
XSKVVMVTAKKXXXXXXXXXIKRIQVPRLDQPVX

SEQ ID NO: 50400 - protein, 38 aa, Artificial Sequence
  GFR-binding peptide
  MOD_RES (2), (2): Xaa is C or S
  MOD_RES (15), (16), (17), (18), (19): Xaa is A or G
  MOD_RES (20), (21), (22), (23): Xaa is A or G or is absent
KXALHDELTNSLQEXXXXXXXXXYYLVTLPELQVQTPR

SEQ ID NO: 50401 - protein, 39 aa, Artificial Sequence; identical to SEQ ID NO: 18041
  GFR-binding peptide
  MOD_RES (37), (37): Xaa is C or S
  MOD_RES (13), (14), (15), (16), (17): Xaa is A or G
  MOD_RES (18), (19), (20), (21): Xaa is A or G or is absent

SEQ ID NO: 50402 - protein, 35 aa, Artificial Sequence
  GFR-binding peptide
  MOD_RES (33), (33): Xaa is C or S
NHQLFNSLQEHQGQHPKIRYYVMPLPEEETPVXEL

SEQ ID NO: 50403 - protein, 43 aa, Artificial Sequence
  GFR-binding peptide
  MOD_RES (2), (4), (38): Xaa is C or S
  MOD_RES (16), (17), (18), (19), (20): Xaa is A or G
  MOD_RES (21), (22), (23), (24): Xaa is A or G or is absent
RXEXKNHQLFNSLQEXXXXXXXXXYYLMTLPEEETPVXELGED

SEQ ID NO: 50404 - protein, 40 aa, Artificial Sequence; identical to SEQ ID NO: 18044
  GFR-binding peptide
  MOD_RES (2), (39): Xaa is C or S

SEQ ID NO: 50405 - protein, 41 aa, Artificial Sequence
  GFR-binding peptide
  MOD_RES (2), (36), (37): Xaa is C or S
  MOD_RES (14), (15), (16), (17), (18): Xaa is A or G
  MOD_RES (19), (20), (21), (22): Xaa is A or G or is absent
GXGEVVMDVQVEKXXXXXXXXXVKAMKVSRLETPVXXAKPI

SEQ ID NO: 50406 - protein, 39 aa, Artificial Sequence; identical to SEQ ID NO: 12847
  GFR-binding peptide
  MOD_RES (1), (3), (35), (36): Xaa is C or S

SEQ ID NO: 50407 - protein, 36 aa, Artificial Sequence
  GFR-binding peptide
  MOD_RES (1), (3): Xaa is C or S
  MOD_RES (15), (16), (17), (18), (19): Xaa is A or G
  MOD_RES (20), (21), (22), (23): Xaa is A or G or is absent
XGXGEVVMDVQVEKXXXXXXXXXVKAMKVSRLETPV

SEQ ID NO: 50408 - protein, 38 aa, Artificial Sequence; identical to SEQ ID NO: 18048
  GFR-binding peptide
  MOD_RES (35), (35): Xaa is C or S
  MOD_RES (11), (12), (13), (14), (15): Xaa is A or G
  MOD_RES (16), (17), (18), (19): Xaa is A or G or is absent

SEQ ID NO: 50409 - protein, 36 aa, Artificial Sequence; identical to SEQ ID NO: 12849
  GFR-binding peptide
  MOD_RES (32), (32): Xaa is C or S

SEQ ID NO: 50410 - protein, 36 aa, Artificial Sequence
  GFR-binding peptide
  MOD_RES (1), (3), (35): Xaa is C or S
XGXSRVVMNSMEGIIVNSSDDMIQVTINSLKTPAXT

SEQ ID NO: 50411 - protein, 34 aa, Artificial Sequence
  GFR-binding peptide
  MOD_RES (1), (32), (33): Xaa is C or S
XSKVVMVTAKKVKPTRGVIKRIQVPRLDQPVXXP

SEQ ID NO: 50412 - protein, 39 aa, Artificial Sequence; identical to SEQ ID NO: 18055
  GFR-binding peptide
  MOD_RES (1), (38): Xaa is C or S
  MOD_RES (14), (15), (16), (17), (18): Xaa is A or G
  MOD_RES (19), (20), (21), (22): Xaa is A or G or is absent

SEQ ID NO: 50413 - protein, 34 aa, Artificial Sequence
  GFR-binding peptide
  MOD_RES (2), (2): Xaa is C or S
  MOD_RES (13), (14), (15), (16), (17): Xaa is A or G
  MOD_RES (18), (19), (20), (21): Xaa is A or G or is absent
KXSKVVMVQVEKXXXXXXXXXVKAIKVSRLDQPV

SEQ ID NO: 50414 - protein, 44 aa, Artificial Sequence; identical to SEQ ID NO: 18057
  GFR-binding peptide
  MOD_RES (2), (4), (41): Xaa is C or S

SEQ ID NO: 50415 - protein, 43 aa, Artificial Sequence
  GFR-binding peptide
  MOD_RES (2), (4), (37), (38): Xaa is C or S
  MOD_RES (15), (16), (17), (18), (19): Xaa is A or G
  MOD_RES (20), (21), (22), (23): Xaa is A or G or is absent
SXKXSKVVMSMEGIXXXXXXXXXMIQITINSLDQPVXXPSASA

SEQ ID NO: 50416 - protein, 42 aa, Artificial Sequence
  GFR-binding peptide
  MOD_RES (2), (39): Xaa is C or S
KXALHDELTNSLQEFIPKKRVIEYYLVTLPELQVQTPRXQVN

SEQ ID NO: 50417 - protein, 39 aa, Artificial Sequence
  GFR-binding peptide
  MOD_RES (33), (34): Xaa is C or S
  MOD_RES (11), (12), (13), (14), (15): Xaa is A or G
  MOD_RES (16), (17), (18), (19): Xaa is A or G or is absent
RVVMNVQVEKXXXXXXXXXVKAVKVSRLQTPAXXPKPVT

SEQ ID NO: 50418 - protein, 33 aa, Artificial Sequence; identical to SEQ ID NO: 18059
  GFR-binding peptide
  MOD_RES (12), (13), (14), (15), (16): Xaa is A or G
  MOD_RES (17), (18), (19), (20): Xaa is A or G or is absent

SEQ ID NO: 50419 - protein, 36 aa, Artificial Sequence; identical to SEQ ID NO: 18061
  GFR-binding peptide
  MOD_RES (13), (14), (15), (16), (17): Xaa is A or G
  MOD_RES (18), (19), (20), (21): Xaa is A or G or is absent

SEQ ID NO: 50420 - protein, 34 aa, Artificial Sequence; identical to SEQ ID NO: 12853
  GFR-binding peptide
  MOD_RES (1), (33): Xaa is C or S

SEQ ID NO: 50421 - protein, 35 aa, Artificial Sequence; identical to SEQ ID NO: 12854
  GFR-binding peptide
  MOD_RES (31), (32): Xaa is C or S

SEQ ID NO: 50422 - protein, 37 aa, Artificial Sequence
  GFR-binding peptide
  MOD_RES (34), (34): Xaa is C or S
  MOD_RES (12), (13), (14), (15), (16): Xaa is A or G
  MOD_RES (17), (18), (19), (20): Xaa is A or G or is absent
KNHQLFNSLQEXXXXXXXXXYYVMPLPEEETPVXELG

SEQ ID NO: 50423 - protein, 39 aa, Artificial Sequence
  GFR-binding peptide
  MOD_RES (2), (35), (36): Xaa is C or S
  MOD_RES (13), (14), (15), (16), (17): Xaa is A or G
  MOD_RES (18), (19), (20), (21): Xaa is A or G or is absent
KXSKVVMVQVEKXXXXXXXXXVKAIKVSRLDQPVXXPSA

SEQ ID NO: 50424 - protein, 36 aa, Artificial Sequence; identical to SEQ ID NO: 18067
  GFR-binding peptide
  MOD_RES (2), (2): Xaa is C or S

SEQ ID NO: 50425 - protein, 37 aa, Artificial Sequence
  GFR-binding peptide
  MOD_RES (33), (34): Xaa is C or S
  MOD_RES (11), (12), (13), (14), (15): Xaa is A or G
  MOD_RES (16), (17), (18), (19): Xaa is A or G or is absent
SKVIMSMEGIXXXXXXXXXMIQITINSLDQSVXXPSA

SEQ ID NO: 50426 - protein, 42 aa, Artificial Sequence; identical to SEQ ID NO: 18068
  GFR-binding peptide
  MOD_RES (2), (4), (41): Xaa is C or S
  MOD_RES (17), (18), (19), (20), (21): Xaa is A or G
  MOD_RES (22), (23), (24), (25): Xaa is A or G or is absent

SEQ ID NO: 50427 - protein, 31 aa, Artificial Sequence
  GFR-binding peptide
SRVVMNSMEGIIVNSSDDMIQVTINSLKTPA

SEQ ID NO: 50428 - protein, 33 aa, Artificial Sequence; identical to SEQ ID NO: 12858
  GFR-binding peptide
  MOD_RES (12), (13), (14), (15), (16): Xaa is A or G
  MOD_RES (17), (18), (19), (20): Xaa is A or G or is absent

SEQ ID NO: 50429 - protein, 40 aa, Artificial Sequence
  GFR-binding peptide
  MOD_RES (2), (4), (38), (39): Xaa is C or S
  MOD_RES (16), (17), (18), (19), (20): Xaa is A or G
  MOD_RES (21), (22), (23), (24): Xaa is A or G or is absent
RXGXGEVVMDSMEGIXXXXXXXXXMIQMTINSLETPVXXA

SEQ ID NO: 50430 - protein, 37 aa, Artificial Sequence; identical to SEQ ID NO: 37348
  GFR-binding peptide
  MOD_RES (2), (33), (34): Xaa is C or S

SEQ ID NO: 50431 - protein, 37 aa, Artificial Sequence
  GFR-binding peptide
  MOD_RES (1), (3), (36), (37): Xaa is C or S
  MOD_RES (14), (15), (16), (17), (18): Xaa is A or G
  MOD_RES (19), (20), (21), (22): Xaa is A or G or is absent
XKXSRVIMSMEGIXXXXXXXXXMIQITINSLAQPVXX

SEQ ID NO: 50432 - protein, 37 aa, Artificial Sequence; identical to SEQ ID NO: 37350
  GFR-binding peptide
  MOD_RES (2), (4), (35), (36): Xaa is C or S

SEQ ID NO: 50433 - protein, 38 aa, Artificial Sequence
  GFR-binding peptide
  MOD_RES (1), (3), (37): Xaa is C or S
  MOD_RES (15), (16), (17), (18), (19): Xaa is A or G
  MOD_RES (20), (21), (22), (23): Xaa is A or G or is absent
XGXSRVVMNSMEGIXXXXXXXXXMIQVTINSLKTPAXT

SEQ ID NO: 50434 - protein, 38 aa, Artificial Sequence
  GFR-binding peptide
  MOD_RES (33), (34): Xaa is C or S
  MOD_RES (11), (12), (13), (14), (15): Xaa is A or G
  MOD_RES (16), (17), (18), (19): Xaa is A or G or is absent
SRVIMSMEGIXXXXXXXXXMIQITINSLAQPVXXPAAS

SEQ ID NO: 50435 - protein, 41 aa, Artificial Sequence
  GFR-binding peptide
  MOD_RES (2), (4), (36): Xaa is C or S
HXGXSRVVMNVTAKKIVNSSDDIKRVQVPRLKTPAXTPKTV

SEQ ID NO: 50436 - protein, 37 aa, Artificial Sequence
  GFR-binding peptide
  MOD_RES (2), (34), (35): Xaa is C or S
GXSRVVMNSMEGIIVNSSDDMIQVTINSLKTPAXXPK

SEQ ID NO: 50437 - protein, 38 aa, Artificial Sequence; identical to SEQ ID NO: 18069
  GFR-binding peptide
  MOD_RES (35), (35): Xaa is C or S
  MOD_RES (11), (12), (13), (14), (15): Xaa is A or G
  MOD_RES (16), (17), (18), (19): Xaa is A or G or is absent

SEQ ID NO: 50438 - protein, 39 aa, Artificial Sequence; identical to SEQ ID NO: 12865
  GFR-binding peptide
  MOD_RES (1), (3), (37), (38): Xaa is C or S
  MOD_RES (15), (16), (17), (18), (19): Xaa is A or G
  MOD_RES (20), (21), (22), (23): Xaa is A or G or is absent

SEQ ID NO: 50439 - protein, 35 aa, Artificial Sequence
  GFR-binding peptide
  MOD_RES (34), (35): Xaa is C or S
  MOD_RES (12), (13), (14), (15), (16): Xaa is A or G
  MOD_RES (17), (18), (19), (20): Xaa is A or G or is absent
GEVVMDSMEGIXXXXXXXXXMIQMTINSLETPVXX

SEQ ID NO: 50440 - protein, 39 aa, Artificial Sequence
  GFR-binding peptide
  MOD_RES (2), (4), (38), (39): Xaa is C or S
  MOD_RES (16), (17), (18), (19), (20): Xaa is A or G
  MOD_RES (21), (22), (23), (24): Xaa is A or G or is absent
RXGXGEVVMDVQVEKXXXXXXXXXVKAMKVSRLETPVXX

SEQ ID NO: 50441 - protein, 36 aa, Artificial Sequence
  GFR-binding peptide
  MOD_RES (2), (4), (35), (36): Xaa is C or S
SXKXSKVVMVQVEKVKPTRGVVKAIKVSRLDQPVXX

SEQ ID NO: 50442 - protein, 32 aa, Artificial Sequence
  GFR-binding peptide
  MOD_RES (31), (32): Xaa is C or S
EVVMDVQVEKVVKENEDVKAMKVSRLETPVXX

SEQ ID NO: 50443 - protein, 38 aa, Artificial Sequence
  GFR-binding peptide
  MOD_RES (1), (35), (36): Xaa is C or S
  MOD_RES (13), (14), (15), (16), (17): Xaa is A or G
  MOD_RES (18), (19), (20), (21): Xaa is A or G or is absent
XSRVVMNSMEGIXXXXXXXXXMIQVTINSLKTPAXXPK

SEQ ID NO: 50444 - protein, 32 aa, Artificial Sequence
  GFR-binding peptide
  MOD_RES (2), (2): Xaa is C or S
KXSKVIMVQVEKIKPTKGIVKAIKVSRLDQSV

SEQ ID NO: 50445 - protein, 39 aa, Artificial Sequence; identical to SEQ ID NO: 12876
  GFR-binding peptide
  MOD_RES (2), (4), (35), (36): Xaa is C or S

SEQ ID NO: 50446 - protein, 34 aa, Artificial Sequence
  GFR-binding peptide
  MOD_RES (32), (33): Xaa is C or S
GEVVMDVQVEKVVKENEDVKAMKVSRLETPVXXA

SEQ ID NO: 50447 - protein, 36 aa, Artificial Sequence; identical to SEQ ID NO: 12877
  GFR-binding peptide
  MOD_RES (1), (3): Xaa is C or S
  MOD_RES (15), (16), (17), (18), (19): Xaa is A or G
  MOD_RES (20), (21), (22), (23): Xaa is A or G or is absent

SEQ ID NO: 50448 - protein, 36 aa, Artificial Sequence; identical to SEQ ID NO: 12878
  GFR-binding peptide
  MOD_RES (31), (32): Xaa is C or S

SEQ ID NO: 50449 - protein, 39 aa, Artificial Sequence
  GFR-binding peptide
  MOD_RES (2), (4), (36), (37): Xaa is C or S
RXGXGEVVMDSMEGIVVKENEDMIQMTINSLETPVXXAK

SEQ ID NO: 50450 - protein, 35 aa, Artificial Sequence
  GFR-binding peptide
  MOD_RES (2), (35): Xaa is C or S
  MOD_RES (13), (14), (15), (16), (17): Xaa is A or G
  MOD_RES (18), (19), (20), (21): Xaa is A or G or is absent
KXSKVVMVQVEKXXXXXXXXXVKAIKVSRLDQPVX

SEQ ID NO: 50451 - protein, 39 aa, Artificial Sequence
  GFR-binding peptide
  MOD_RES (1), (3), (37), (38): Xaa is C or S
  MOD_RES (15), (16), (17), (18), (19): Xaa is A or G
  MOD_RES (20), (21), (22), (23): Xaa is A or G or is absent
XGXARVVMNSMEGIXXXXXXXXXMIQVTINSLQTPAXXP

SEQ ID NO: 50452 - protein, 33 aa, Artificial Sequence; identical to SEQ ID NO: 12881
  GFR-binding peptide
  MOD_RES (32), (32): Xaa is C or S

SEQ ID NO: 50453 - protein, 40 aa, Artificial Sequence
  GFR-binding peptide
  MOD_RES (2), (4), (38), (39): Xaa is C or S
  MOD_RES (16), (17), (18), (19), (20): Xaa is A or G
  MOD_RES (21), (22), (23), (24): Xaa is A or G or is absent
HXGXARVVMNVQVEKXXXXXXXXXVKAVKVSRLQTPAXXP

SEQ ID NO: 50454 - protein, 40 aa, Artificial Sequence
  GFR-binding peptide
  MOD_RES (2), (39): Xaa is C or S
  MOD_RES (15), (16), (17), (18), (19): Xaa is A or G
  MOD_RES (20), (21), (22), (23): Xaa is A or G or is absent
AXELHEELRNSLQEXXXXXXXXXYYVVPLPEHHVRSPQXK

SEQ ID NO: 50455 - protein, 40 aa, Artificial Sequence; identical to SEQ ID NO: 18077
  GFR-binding peptide
  MOD_RES (1), (3), (37): Xaa is C or S

SEQ ID NO: 50456 - protein, 44 aa, Artificial Sequence
  GFR-binding peptide
  MOD_RES (1), (3), (40): Xaa is C or S
  MOD_RES (16), (17), (18), (19), (20): Xaa is A or G
  MOD_RES (21), (22), (23), (24): Xaa is A or G or is absent
XKXALHDELTNSLQEXXXXXXXXXYYVVPLPELQVQTPRXQVNR

SEQ ID NO: 50457 - protein, 32 aa, Artificial Sequence
  GFR-binding peptide
  MOD_RES (31), (32): Xaa is C or S
EVVMEVQVEKVVKDYEDVKAMKVSRLETPVXX

SEQ ID NO: 50458 - protein, 37 aa, Artificial Sequence
  GFR-binding peptide
  MOD_RES (31), (31): Xaa is C or S
RVVMNSMEGIIVNSSDDMIQVTINSLKTPAXTPKTVH

SEQ ID NO: 50459 - protein, 36 aa, Artificial Sequence; identical to SEQ ID NO: 12882
  GFR-binding peptide
  MOD_RES (1), (33): Xaa is C or S

SEQ ID NO: 50460 - protein, 40 aa, Artificial Sequence
  GFR-binding peptide
  MOD_RES (2), (4), (36), (37): Xaa is C or S
RXGXGEVVMDSMEGIVVKENEDMIQMTINSLETPVXXAKP

SEQ ID NO: 50461 - protein, 37 aa, Artificial Sequence; identical to SEQ ID NO: 37381
  GFR-binding peptide
  MOD_RES (1), (32), (33): Xaa is C or S

SEQ ID NO: 50462 - protein, 35 aa, Artificial Sequence
  GFR-binding peptide
  MOD_RES (33), (34): Xaa is C or S
  MOD_RES (11), (12), (13), (14), (15): Xaa is A or G
  MOD_RES (16), (17), (18), (19): Xaa is A or G or is absent
EVVMEVQVEKXXXXXXXXXVKAMKVSRLETPVXXA

SEQ ID NO: 50463 - protein, 41 aa, Artificial Sequence
  GFR-binding peptide
  MOD_RES (2), (36), (37): Xaa is C or S
  MOD_RES (14), (15), (16), (17), (18): Xaa is A or G
  MOD_RES (19), (20), (21), (22): Xaa is A or G or is absent
GXSRVVMNVTAKKXXXXXXXXXIKRVQVPRLKTPAXXPKPV

SEQ ID NO: 50464 - protein, 34 aa, Artificial Sequence
  GFR-binding peptide
  MOD_RES (33), (33): Xaa is C or S
  MOD_RES (11), (12), (13), (14), (15): Xaa is A or G
  MOD_RES (16), (17), (18), (19): Xaa is A or G or is absent
NHQLFNSLQEXXXXXXXXXYYLMTLPEEETPVXE

SEQ ID NO: 50465 - protein, 38 aa, Artificial Sequence; identical to SEQ ID NO: 18082
  GFR-binding peptide
  MOD_RES (2), (2): Xaa is C or S

SEQ ID NO: 50466 - protein, 34 aa, Artificial Sequence
  GFR-binding peptide
  MOD_RES (31), (32): Xaa is C or S
SRVIMVTAKKVKPKRGVIKRIQVPRLAQPVXXPA

SEQ ID NO: 50467 - protein, 38 aa, Artificial Sequence; identical to SEQ ID NO: 12887
  GFR-binding peptide
  MOD_RES (2), (34): Xaa is C or S

SEQ ID NO: 50468 - protein, 36 aa, Artificial Sequence
  GFR-binding peptide
  MOD_RES (33), (34): Xaa is C or S
  MOD_RES (11), (12), (13), (14), (15): Xaa is A or G
  MOD_RES (16), (17), (18), (19): Xaa is A or G or is absent
SRVIMVQVEKXXXXXXXXXVKAIKVSRLAQPVXXPA

SEQ ID NO: 50469 - protein, 37 aa, Artificial Sequence
  GFR-binding peptide
  MOD_RES (1), (35), (36): Xaa is C or S
  MOD_RES (13), (14), (15), (16), (17): Xaa is A or G
  MOD_RES (18), (19), (20), (21): Xaa is A or G or is absent
XARVVMNSMEGIXXXXXXXXXMIQVTINSLQTPAXXP

SEQ ID NO: 50470 - protein, 33 aa, Artificial Sequence
  GFR-binding peptide
  MOD_RES (31), (32): Xaa is C or S
RVVMNVQVEKIVNSSDDVKAVKVSRLKTPAXXP

SEQ ID NO: 50471 - protein, 36 aa, Artificial Sequence
  GFR-binding peptide
  MOD_RES (1), (3), (36): Xaa is C or S
  MOD_RES (14), (15), (16), (17), (18): Xaa is A or G
  MOD_RES (19), (20), (21), (22): Xaa is A or G or is absent
XKXSRVIMSMEGIXXXXXXXXXMIQITINSLAQPVX

SEQ ID NO: 50472 - protein, 34 aa, Artificial Sequence; identical to SEQ ID NO: 18089
  GFR-binding peptide
  MOD_RES (33), (33): Xaa is C or S

SEQ ID NO: 50473 - protein, 33 aa, Artificial Sequence
  GFR-binding peptide
  MOD_RES (12), (13), (14), (15), (16): Xaa is A or G
  MOD_RES (17), (18), (19), (20): Xaa is A or G or is absent
LHEELRNSLQEXXXXXXXXXYYLVTLPEHHVRS

SEQ ID NO: 50474 - protein, 38 aa, Artificial Sequence; identical to SEQ ID NO: 18090
  GFR-binding peptide
  MOD_RES (1), (3): Xaa is C or S
  MOD_RES (16), (17), (18), (19), (20): Xaa is A or G
  MOD_RES (21), (22), (23), (24): Xaa is A or G or is absent

SEQ ID NO: 50475 - protein, 37 aa, Artificial Sequence
  GFR-binding peptide
  MOD_RES (31), (32): Xaa is C or S
EVVMDSMEGIVVKENEDMIQMTINSLETPVXXAKPIK

SEQ ID NO: 50476 - protein, 40 aa, Artificial Sequence; identical to SEQ ID NO: 12893
  GFR-binding peptide
  MOD_RES (1), (3), (35), (36): Xaa is C or S

SEQ ID NO: 50477 - protein, 33 aa, Artificial Sequence
  GFR-binding peptide
  MOD_RES (1), (1): Xaa is C or S
  MOD_RES (12), (13), (14), (15), (16): Xaa is A or G
  MOD_RES (17), (18), (19), (20): Xaa is A or G or is absent
XSKVIMVTAKKXXXXXXXXXIKRIQVPRLDQSV

SEQ ID NO: 50478 - protein, 33 aa, Artificial Sequence; identical to SEQ ID NO: 12896
  GFR-binding peptide
  MOD_RES (12), (13), (14), (15), (16): Xaa is A or G
  MOD_RES (17), (18), (19), (20): Xaa is A or G or is absent

SEQ ID NO: 50479 - protein, 33 aa, Artificial Sequence; identical to SEQ ID NO: 18095
  GFR-binding peptide

SEQ ID NO: 50480 - protein, 39 aa, Artificial Sequence; identical to SEQ ID NO: 18096
  GFR-binding peptide
  MOD_RES (34), (34): Xaa is C or S
  MOD_RES (12), (13), (14), (15), (16): Xaa is A or G
  MOD_RES (17), (18), (19), (20): Xaa is A or G or is absent

SEQ ID NO: 50481 - protein, 39 aa, Artificial Sequence
  GFR-binding peptide
  MOD_RES (36), (36): Xaa is C or S
  MOD_RES (12), (13), (14), (15), (16): Xaa is A or G
  MOD_RES (17), (18), (19), (20): Xaa is A or G or is absent
LHEELRNSLQEXXXXXXXXXYYVVPLPEHHVRSPQXKVS

SEQ ID NO: 50482 - protein, 39 aa, Artificial Sequence; identical to SEQ ID NO: 12899
  GFR-binding peptide
  MOD_RES (1), (34), (35): Xaa is C or S
  MOD_RES (12), (13), (14), (15), (16): Xaa is A or G
  MOD_RES (17), (18), (19), (20): Xaa is A or G or is absent

SEQ ID NO: 50483 - protein, 40 aa, Artificial Sequence
  GFR-binding peptide
  MOD_RES (1), (3), (35), (36): Xaa is C or S
XGXGEVVMDVTAKKVVKENEDIKRMQVPRLETPVXXAKPI

SEQ ID NO: 50484 - protein, 36 aa, Artificial Sequence; identical to SEQ ID NO: 18099
  GFR-binding peptide
  MOD_RES (35), (35): Xaa is C or S

SEQ ID NO: 50485 - protein, 38 aa, Artificial Sequence; identical to SEQ ID NO: 12902
  GFR-binding peptide
  MOD_RES (1), (3), (34), (35): Xaa is C or S

SEQ ID NO: 50486 - protein, 38 aa, Artificial Sequence
  GFR-binding peptide
  MOD_RES (1), (3), (34), (35): Xaa is C or S
XKXSKVIMVTAKKIKPTKGIIKRIQVPRLDQSVXXPSA

SEQ ID NO: 50487 - protein, 36 aa, Artificial Sequence
  GFR-binding peptide
  MOD_RES (33), (33): Xaa is C or S
  MOD_RES (11), (12), (13), (14), (15): Xaa is A or G
  MOD_RES (16), (17), (18), (19): Xaa is A or G or is absent
RVVMNVTAKKXXXXXXXXXIKRVQVPRLKTPAXTPK

SEQ ID NO: 50488 - protein, 39 aa, Artificial Sequence
  GFR-binding peptide
  MOD_RES (2), (35), (36): Xaa is C or S
  MOD_RES (13), (14), (15), (16), (17): Xaa is A or G
  MOD_RES (18), (19), (20), (21): Xaa is A or G or is absent
KXSKVVMVTAKKXXXXXXXXXIKRIQVPRLDQPVXXPSA

SEQ ID NO: 50489 - protein, 38 aa, Artificial Sequence
  GFR-binding peptide
  MOD_RES (1), (35), (36): Xaa is C or S
  MOD_RES (13), (14), (15), (16), (17): Xaa is A or G
  MOD_RES (18), (19), (20), (21): Xaa is A or G or is absent
XGEVVMEVQVEKXXXXXXXXXVKAMKVSRLETPVXXAK

SEQ ID NO: 50490 - protein, 40 aa, Artificial Sequence
  GFR-binding peptide
  MOD_RES (2), (36), (37): Xaa is C or S
  MOD_RES (14), (15), (16), (17), (18): Xaa is A or G
  MOD_RES (19), (20), (21), (22): Xaa is A or G or is absent
GXSRVVMNVQVEKXXXXXXXXXVKAVKVSRLKTPAXXPKP

SEQ ID NO: 50491 - protein, 37 aa, Artificial Sequence; identical to SEQ ID NO: 12907
  GFR-binding peptide
  MOD_RES (1), (33), (34): Xaa is C or S

SEQ ID NO: 50492 - protein, 36 aa, Artificial Sequence
  GFR-binding peptide
  MOD_RES (1), (1): Xaa is C or S
XALHDELTNSLQEFIPKKRVIEYYVVPLPELQVQTP

SEQ ID NO: 50493 - protein, 34 aa, Artificial Sequence
  GFR-binding peptide
  MOD_RES (2), (33), (34): Xaa is C or S
KXSKVIMVTAKKIKPTKGIIKRIQVPRLDQSVXX

SEQ ID NO: 50494 - protein, 35 aa, Artificial Sequence; identical to SEQ ID NO: 18101
  GFR-binding peptide
  MOD_RES (1), (1): Xaa is C or S
  MOD_RES (14), (15), (16), (17), (18): Xaa is A or G
  MOD_RES (19), (20), (21), (22): Xaa is A or G or is absent

SEQ ID NO: 50495 - protein, 39 aa, Artificial Sequence
  GFR-binding peptide
  MOD_RES (1), (34), (35): Xaa is C or S
  MOD_RES (12), (13), (14), (15), (16): Xaa is A or G
  MOD_RES (17), (18), (19), (20): Xaa is A or G or is absent
XSRVIMVTAKKXXXXXXXXXIKRIQVPRLAQPVXXPAAS

SEQ ID NO: 50496 - protein, 43 aa, Artificial Sequence
  GFR-binding peptide
  MOD_RES (2), (4), (41): Xaa is C or S
  MOD_RES (17), (18), (19), (20), (21): Xaa is A or G
  MOD_RES (22), (23), (24), (25): Xaa is A or G or is absent
EXKXALHDELTNSLQEXXXXXXXXXYYLVTLPELQVQTPRXQV

SEQ ID NO: 50497 - protein, 36 aa, Artificial Sequence; identical to SEQ ID NO: 12910
  GFR-binding peptide
  MOD_RES (34), (35): Xaa is C or S
  MOD_RES (12), (13), (14), (15), (16): Xaa is A or G
  MOD_RES (17), (18), (19), (20): Xaa is A or G or is absent

SEQ ID NO: 50498 - protein, 39 aa, Artificial Sequence
  GFR-binding peptide
  MOD_RES (1), (34), (35): Xaa is C or S
  MOD_RES (12), (13), (14), (15), (16): Xaa is A or G
  MOD_RES (17), (18), (19), (20): Xaa is A or G or is absent
XSKVIMVQVEKXXXXXXXXXVKAIKVSRLDQSVXXPSAS

SEQ ID NO: 50499 - protein, 32 aa, Artificial Sequence
  GFR-binding peptide
  MOD_RES (2), (2): Xaa is C or S
KXSKVIMVTAKKIKPTKGIIKRIQVPRLDQSV

SEQ ID NO: 50500 - protein, 35 aa, Artificial Sequence; identical to SEQ ID NO: 12912
  GFR-binding peptide
  MOD_RES (2), (2): Xaa is C or S
  MOD_RES (14), (15), (16), (17), (18): Xaa is A or G
  MOD_RES (19), (20), (21), (22): Xaa is A or G or is absent

SEQ ID NO: 50501 - protein, 36 aa, Artificial Sequence; identical to SEQ ID NO: 37428
  GFR-binding peptide
  MOD_RES (33), (34): Xaa is C or S
  MOD_RES (11), (12), (13), (14), (15): Xaa is A or G
  MOD_RES (16), (17), (18), (19): Xaa is A or G or is absent

SEQ ID NO: 50502 - protein, 42 aa, Artificial Sequence; identical to SEQ ID NO: 12914
  GFR-binding peptide
  MOD_RES (2), (36): Xaa is C or S
  MOD_RES (14), (15), (16), (17), (18): Xaa is A or G
  MOD_RES (19), (20), (21), (22): Xaa is A or G or is absent

SEQ ID NO: 50503 - protein, 38 aa, Artificial Sequence; identical to SEQ ID NO: 12916
  GFR-binding peptide
  MOD_RES (32), (33): Xaa is C or S

SEQ ID NO: 50504 - protein, 39 aa, Artificial Sequence; identical to SEQ ID NO: 12917
  GFR-binding peptide
  MOD_RES (33), (34): Xaa is C or S
  MOD_RES (11), (12), (13), (14), (15): Xaa is A or G
  MOD_RES (16), (17), (18), (19): Xaa is A or G or is absent

SEQ ID NO: 50505 - protein, 43 aa, Artificial Sequence; identical to SEQ ID NO: 18105
  GFR-binding peptide
  MOD_RES (2), (39): Xaa is C or S
  MOD_RES (15), (16), (17), (18), (19): Xaa is A or G
  MOD_RES (20), (21), (22), (23): Xaa is A or G or is absent

SEQ ID NO: 50506 - protein, 40 aa, Artificial Sequence; identical to SEQ ID NO: 12918
  GFR-binding peptide
  MOD_RES (1), (35), (36): Xaa is C or S
  MOD_RES (13), (14), (15), (16), (17): Xaa is A or G
  MOD_RES (18), (19), (20), (21): Xaa is A or G or is absent

SEQ ID NO: 50507 - protein, 35 aa, Artificial Sequence
  GFR-binding peptide
  MOD_RES (1), (35): Xaa is C or S
  MOD_RES (13), (14), (15), (16), (17): Xaa is A or G
  MOD_RES (18), (19), (20), (21): Xaa is A or G or is absent
XSRVVMNVTAKKXXXXXXXXXIKRVQVPRLKTPAX

SEQ ID NO: 50508 - protein, 37 aa, Artificial Sequence
  GFR-binding peptide
  MOD_RES (1), (3), (35), (36): Xaa is C or S
XGXARVVMNVTAKKIVNSSDDIKRVQVPRLQTPAXXP

SEQ ID NO: 50509 - protein, 35 aa, Artificial Sequence
  GFR-binding peptide
  MOD_RES (2), (33), (34): Xaa is C or S
KXSKVIMSMEGIIKPTKGIMIQITINSLDQSVXXP

SEQ ID NO: 50510 - protein, 39 aa, Artificial Sequence
  GFR-binding peptide
  MOD_RES (1), (35): Xaa is C or S
  MOD_RES (13), (14), (15), (16), (17): Xaa is A or G
  MOD_RES (18), (19), (20), (21): Xaa is A or G or is absent
XSRVVMNVTAKKXXXXXXXXXIKRVQVPRLKTPAXTPKT

SEQ ID NO: 50511 - protein, 36 aa, Artificial Sequence; identical to SEQ ID NO: 18112
  GFR-binding peptide
  MOD_RES (1), (3): Xaa is C or S
  MOD_RES (15), (16), (17), (18), (19): Xaa is A or G
  MOD_RES (20), (21), (22), (23): Xaa is A or G or is absent

SEQ ID NO: 50512 - protein, 37 aa, Artificial Sequence; identical to SEQ ID NO: 12923
  GFR-binding peptide
  MOD_RES (1), (33), (34): Xaa is C or S

SEQ ID NO: 50513 - protein, 38 aa, Artificial Sequence
  GFR-binding peptide
  MOD_RES (2), (35), (36): Xaa is C or S
  MOD_RES (13), (14), (15), (16), (17): Xaa is A or G
  MOD_RES (18), (19), (20), (21): Xaa is A or G or is absent
KXSKVIMSMEGIXXXXXXXXXMIQITINSLDQSVXXPS

SEQ ID NO: 50514 - protein, 38 aa, Artificial Sequence; identical to SEQ ID NO: 12926
  GFR-binding peptide
  MOD_RES (1), (33), (34): Xaa is C or S

SEQ ID NO: 50515 - protein, 38 aa, Artificial Sequence
  GFR-binding peptide
  MOD_RES (1), (35), (36): Xaa is C or S
  MOD_RES (13), (14), (15), (16), (17): Xaa is A or G
  MOD_RES (18), (19), (20), (21): Xaa is A or G or is absent
XARVVMNVTAKKXXXXXXXXXIKRVQVPRLQTPAXXPK

SEQ ID NO: 50516 - protein, 38 aa, Artificial Sequence; identical to SEQ ID NO: 12931
  GFR-binding peptide
  MOD_RES (1), (34), (35): Xaa is C or S
  MOD_RES (12), (13), (14), (15), (16): Xaa is A or G
  MOD_RES (17), (18), (19), (20): Xaa is A or G or is absent

SEQ ID NO: 50517 - protein, 42 aa, Artificial Sequence
  GFR-binding peptide
  MOD_RES (1), (3), (36), (37): Xaa is C or S
  MOD_RES (14), (15), (16), (17), (18): Xaa is A or G
  MOD_RES (19), (20), (21), (22): Xaa is A or G or is absent
XKXSKVVMSMEGIXXXXXXXXXMIQITINSLDQPVXXPSASA

SEQ ID NO: 50518 - protein, 38 aa, Artificial Sequence; identical to SEQ ID NO: 18119
  GFR-binding peptide
  MOD_RES (33), (33): Xaa is C or S

SEQ ID NO: 50519 - protein, 34 aa, Artificial Sequence
  GFR-binding peptide
  MOD_RES (33), (34): Xaa is C or S
  MOD_RES (11), (12), (13), (14), (15): Xaa is A or G
  MOD_RES (16), (17), (18), (19): Xaa is A or G or is absent
SKVIMSMEGIXXXXXXXXXMIQITINSLDQSVXX

SEQ ID NO: 50520 - protein, 39 aa, Artificial Sequence
  GFR-binding peptide
  MOD_RES (1), (3), (37), (38): Xaa is C or S
  MOD_RES (15), (16), (17), (18), (19): Xaa is A or G
  MOD_RES (20), (21), (22), (23): Xaa is A or G or is absent
XGXGEVVMEVQVEKXXXXXXXXXVKAMKVSRLETPVXXA

SEQ ID NO: 50521 - protein, 36 aa, Artificial Sequence; identical to SEQ ID NO: 12936
  GFR-binding peptide
  MOD_RES (2), (34), (35): Xaa is C or S

SEQ ID NO: 50522 - protein, 32 aa, Artificial Sequence
  GFR-binding peptide
  MOD_RES (31), (31): Xaa is C or S
RVVMNVTAKKIVNSSDDIKRVQVPRLKTPAXT

SEQ ID NO: 50523 - protein, 34 aa, Artificial Sequence
  GFR-binding peptide
  MOD_RES (1), (3): Xaa is C or S
XGXGEVVMESMEGIVVKDYEDMIQMTINSLETPV

SEQ ID NO: 50524 - protein, 38 aa, Artificial Sequence
  GFR-binding peptide
  MOD_RES (33), (34): Xaa is C or S
  MOD_RES (11), (12), (13), (14), (15): Xaa is A or G
  MOD_RES (16), (17), (18), (19): Xaa is A or G or is absent
RVVMNSMEGIXXXXXXXXXMIQVTINSLKTPAXXPKPV

SEQ ID NO: 50525 - protein, 37 aa, Artificial Sequence
  GFR-binding peptide
  MOD_RES (37), (37): Xaa is C or S
  MOD_RES (13), (14), (15), (16), (17): Xaa is A or G
  MOD_RES (18), (19), (20), (21): Xaa is A or G or is absent
ELHEELRNSLQEXXXXXXXXXYYLVTLPEHHVRSPQX

SEQ ID NO: 50526 - protein, 42 aa, Artificial Sequence
  GFR-binding peptide
  MOD_RES (1), (3), (37): Xaa is C or S
  MOD_RES (15), (16), (17), (18), (19): Xaa is A or G
  MOD_RES (20), (21), (22), (23): Xaa is A or G or is absent
XEXKNHQLFNSLQEXXXXXXXXXYYLMTLPEEETPVXELGED

SEQ ID NO: 50527 - protein, 38 aa, Artificial Sequence
  GFR-binding peptide
  MOD_RES (33), (33): Xaa is C or S
  MOD_RES (11), (12), (13), (14), (15): Xaa is A or G
  MOD_RES (16), (17), (18), (19): Xaa is A or G or is absent
NHQLFNSLQEXXXXXXXXXYYLMTLPEEETPVXELGED

SEQ ID NO: 50528 - protein, 40 aa, Artificial Sequence
  GFR-binding peptide
  MOD_RES (2), (4), (36), (37): Xaa is C or S
HXGXARVVMNVTAKKIVNSSDDIKRVQVPRLQTPAXXPKP

SEQ ID NO: 50529 - protein, 44 aa, Artificial Sequence; identical to SEQ ID NO: 18124
  GFR-binding peptide
  MOD_RES (2), (4), (41): Xaa is C or S
  MOD_RES (17), (18), (19), (20), (21): Xaa is A or G
  MOD_RES (22), (23), (24), (25): Xaa is A or G or is absent

SEQ ID NO: 50530 - protein, 37 aa, Artificial Sequence
  GFR-binding peptide
  MOD_RES (1), (35), (36): Xaa is C or S
  MOD_RES (13), (14), (15), (16), (17): Xaa is A or G
  MOD_RES (18), (19), (20), (21): Xaa is A or G or is absent
XGEVVMDVQVEKXXXXXXXXXVKAMKVSRLETPVXXA

SEQ ID NO: 50531 - protein, 34 aa, Artificial Sequence; identical to SEQ ID NO: 12941
  GFR-binding peptide
  MOD_RES (33), (34): Xaa is C or S
  MOD_RES (11), (12), (13), (14), (15): Xaa is A or G
  MOD_RES (16), (17), (18), (19): Xaa is A or G or is absent

SEQ ID NO: 50532 - protein, 38 aa, Artificial Sequence
  GFR-binding peptide
  MOD_RES (1), (3), (34), (35): Xaa is C or S
XKXSKVIMVQVEKIKPTKGIVKAIKVSRLDQSVXXPSA

SEQ ID NO: 50533 - protein, 38 aa, Artificial Sequence
  GFR-binding peptide
  MOD_RES (1), (3), (37), (38): Xaa is C or S
  MOD_RES (15), (16), (17), (18), (19): Xaa is A or G
  MOD_RES (20), (21), (22), (23): Xaa is A or G or is absent
XGXARVVMNVTAKKXXXXXXXXXIKRVQVPRLQTPAXX

SEQ ID NO: 50534 - protein, 39 aa, Artificial Sequence
  GFR-binding peptide
  MOD_RES (2), (34), (35): Xaa is C or S
GXARVVMNVTAKKIVNSSDDIKRVQVPRLQTPAXXPKPV

SEQ ID NO: 50535 - protein, 43 aa, Artificial Sequence
  GFR-binding peptide
  MOD_RES (2), (4), (38), (39): Xaa is C or S
  MOD_RES (16), (17), (18), (19), (20): Xaa is A or G
  MOD_RES (21), (22), (23), (24): Xaa is A or G or is absent
RXGXGEVVMEVTAKKXXXXXXXXXIKRMQVPRLETPVXXAKPI

SEQ ID NO: 50536 - protein, 36 aa, Artificial Sequence
  GFR-binding peptide
  MOD_RES (32), (33): Xaa is C or S
GEVVMDSMEGIVVKENEDMIQMTINSLETPVXXAKP

SEQ ID NO: 50537 - protein, 31 aa, Artificial Sequence; identical to SEQ ID NO: 12945
  GFR-binding peptide

SEQ ID NO: 50538 - protein, 43 aa, Artificial Sequence; identical to SEQ ID NO: 12946
  GFR-binding peptide
  MOD_RES (2), (4), (37), (38): Xaa is C or S
  MOD_RES (15), (16), (17), (18), (19): Xaa is A or G
  MOD_RES (20), (21), (22), (23): Xaa is A or G or is absent

SEQ ID NO: 50539 - protein, 36 aa, Artificial Sequence; identical to SEQ ID NO: 18129
  GFR-binding peptide
  MOD_RES (1), (1): Xaa is C or S
  MOD_RES (14), (15), (16), (17), (18): Xaa is A or G
  MOD_RES (19), (20), (21), (22): Xaa is A or G or is absent

SEQ ID NO: 50540 - protein, 36 aa, Artificial Sequence
  GFR-binding peptide
  MOD_RES (1), (3), (36): Xaa is C or S
  MOD_RES (14), (15), (16), (17), (18): Xaa is A or G
  MOD_RES (19), (20), (21), (22): Xaa is A or G or is absent
XKXSKVVMVTAKKXXXXXXXXXIKRIQVPRLDQPVX

SEQ ID NO: 50541 - protein, 39 aa, Artificial Sequence; identical to SEQ ID NO: 12947
  GFR-binding peptide
  MOD_RES (33), (34): Xaa is C or S
  MOD_RES (11), (12), (13), (14), (15): Xaa is A or G
  MOD_RES (16), (17), (18), (19): Xaa is A or G or is absent

SEQ ID NO: 50542 - protein, 37 aa, Artificial Sequence
  GFR-binding peptide
  MOD_RES (2), (33), (34): Xaa is C or S
KXSKVIMVTAKKIKPTKGIIKRIQVPRLDQSVXXPSA

SEQ ID NO: 50543 - protein, 38 aa, Artificial Sequence
  GFR-binding peptide
  MOD_RES (35), (35): Xaa is C or S
HDELTNSLQEFIPKKRVIEYYLVTLPELQVQTPRXQVN

SEQ ID NO: 50544 - protein, 36 aa, Artificial Sequence
  GFR-binding peptide
  MOD_RES (2), (2): Xaa is C or S
  MOD_RES (15), (16), (17), (18), (19): Xaa is A or G
  MOD_RES (20), (21), (22), (23): Xaa is A or G or is absent
AXELHEELRNSLQEXXXXXXXXXYYLVTLPEHHVRS

SEQ ID NO: 50545 - protein, 44 aa, Artificial Sequence
  GFR-binding peptide
  MOD_RES (2), (4), (38), (39): Xaa is C or S
  MOD_RES (16), (17), (18), (19), (20): Xaa is A or G
  MOD_RES (21), (22), (23), (24): Xaa is A or G or is absent
HXGXARVVMNVTAKKXXXXXXXXXIKRVQVPRLQTPAXXPKPVT

SEQ ID NO: 50546 - protein, 40 aa, Artificial Sequence; identical to SEQ ID NO: 18131
  GFR-binding peptide
  MOD_RES (2), (39): Xaa is C or S

SEQ ID NO: 50547 - protein, 36 aa, Artificial Sequence; identical to SEQ ID NO: 18132
  GFR-binding peptide
  MOD_RES (2), (36): Xaa is C or S
  MOD_RES (14), (15), (16), (17), (18): Xaa is A or G
  MOD_RES (19), (20), (21), (22): Xaa is A or G or is absent

SEQ ID NO: 50548 - protein, 35 aa, Artificial Sequence
  GFR-binding peptide
  MOD_RES (31), (32): Xaa is C or S
SKVVMVTAKKVKPTRGVIKRIQVPRLDQPVXXPSA

SEQ ID NO: 50549 - protein, 39 aa, Artificial Sequence
  GFR-binding peptide
  MOD_RES (2), (4), (36), (37): Xaa is C or S
RXGXGEVVMEVQVEKVVKDYEDVKAMKVSRLETPVXXAK

SEQ ID NO: 50550 - protein, 43 aa, Artificial Sequence; identical to SEQ ID NO: 18138
  GFR-binding peptide
  MOD_RES (1), (3), (40): Xaa is C or S
  MOD_RES (16), (17), (18), (19), (20): Xaa is A or G
  MOD_RES (21), (22), (23), (24): Xaa is A or G or is absent

SEQ ID NO: 50551 - protein, 31 aa, Artificial Sequence; identical to SEQ ID NO: 12954
  GFR-binding peptide
  MOD_RES (31), (31): Xaa is C or S

SEQ ID NO: 50552 - protein, 38 aa, Artificial Sequence; identical to SEQ ID NO: 12955
  GFR-binding peptide
  MOD_RES (1), (3), (37), (38): Xaa is C or S
  MOD_RES (15), (16), (17), (18), (19): Xaa is A or G
  MOD_RES (20), (21), (22), (23): Xaa is A or G or is absent

SEQ ID NO: 50553 - protein, 36 aa, Artificial Sequence; identical to SEQ ID NO: 12956
  GFR-binding peptide
  MOD_RES (1), (3), (35), (36): Xaa is C or S

SEQ ID NO: 50554 - protein, 41 aa, Artificial Sequence; identical to SEQ ID NO: 12957
  GFR-binding peptide
  MOD_RES (1), (3), (37): Xaa is C or S
  MOD_RES (15), (16), (17), (18), (19): Xaa is A or G
  MOD_RES (20), (21), (22), (23): Xaa is A or G or is absent

SEQ ID NO: 50555 - protein, 36 aa, Artificial Sequence; identical to SEQ ID NO: 18142
  GFR-binding peptide
  MOD_RES (36), (36): Xaa is C or S
  MOD_RES (12), (13), (14), (15), (16): Xaa is A or G
  MOD_RES (17), (18), (19), (20): Xaa is A or G or is absent

SEQ ID NO: 50556 - protein, 34 aa, Artificial Sequence; identical to SEQ ID NO: 12958
  GFR-binding peptide
  MOD_RES (2), (4): Xaa is C or S

SEQ ID NO: 50557 - protein, 39 aa, Artificial Sequence
  GFR-binding peptide
  MOD_RES (2), (39): Xaa is C or S
AXELHEELRNSLQELKPKKRVYEYYLVTLPEHHVRSPQX

SEQ ID NO: 50558 - protein, 42 aa, Artificial Sequence
  GFR-binding peptide
  MOD_RES (2), (4), (38), (39): Xaa is C or S
  MOD_RES (16), (17), (18), (19), (20): Xaa is A or G
  MOD_RES (21), (22), (23), (24): Xaa is A or G or is absent
HXGXSRVVMNVQVEKXXXXXXXXXVKAVKVSRLKTPAXXPKP

SEQ ID NO: 50559 - protein, 41 aa, Artificial Sequence
  GFR-binding peptide
  MOD_RES (1), (35): Xaa is C or S
XKNHQLFNSLQEHQGQHPKIRYYVMPLPEEETPVXELGEDN

SEQ ID NO: 50560 - protein, 44 aa, Artificial Sequence; identical to SEQ ID NO: 18145
  GFR-binding peptide
  MOD_RES (2), (4), (38): Xaa is C or S

SEQ ID NO: 50561 - protein, 33 aa, Artificial Sequence
  GFR-binding peptide
  MOD_RES (12), (13), (14), (15), (16): Xaa is A or G
  MOD_RES (17), (18), (19), (20): Xaa is A or G or is absent
LHDELTNSLQEXXXXXXXXXYYLVTLPELQVQT

SEQ ID NO: 50562 - protein, 45 aa, Artificial Sequence
  GFR-binding peptide
  MOD_RES (2), (4), (41): Xaa is C or S
AXAXELHEELRNSLQELKPKKRVYEYYVVPLPEHHVRSPQXKVSS

SEQ ID NO: 50563 - protein, 37 aa, Artificial Sequence
  GFR-binding peptide
  MOD_RES (2), (4): Xaa is C or S
  MOD_RES (16), (17), (18), (19), (20): Xaa is A or G
  MOD_RES (21), (22), (23), (24): Xaa is A or G or is absent
HXGXSRVVMNSMEGIXXXXXXXXXMIQVTINSLKTPA

SEQ ID NO: 50564 - protein, 40 aa, Artificial Sequence
  GFR-binding peptide
  MOD_RES (2), (4), (38), (39): Xaa is C or S
  MOD_RES (16), (17), (18), (19), (20): Xaa is A or G
  MOD_RES (21), (22), (23), (24): Xaa is A or G or is absent
RXGXGEVVMEVTAKKXXXXXXXXXIKRMQVPRLETPVXXA

SEQ ID NO: 50565 - protein, 38 aa, Artificial Sequence
  GFR-binding peptide
  MOD_RES (1), (32), (33): Xaa is C or S
XSKVVMSMEGIVKPTRGVMIQITINSLDQPVXXPSASA

SEQ ID NO: 50566 - protein, 32 aa, Artificial Sequence
  GFR-binding peptide
  MOD_RES (32), (32): Xaa is C or S
GEVVMESMEGIVVKDYEDMIQMTINSLETPVX

SEQ ID NO: 50567 - protein, 35 aa, Artificial Sequence
  GFR-binding peptide
  MOD_RES (2), (2): Xaa is C or S
  MOD_RES (14), (15), (16), (17), (18): Xaa is A or G
  MOD_RES (19), (20), (21), (22): Xaa is A or G or is absent
GXGEVVMEVTAKKXXXXXXXXXIKRMQVPRLETPV

SEQ ID NO: 50568 - protein, 34 aa, Artificial Sequence; identical to SEQ ID NO: 12964
  GFR-binding peptide
  MOD_RES (1), (32), (33): Xaa is C or S

SEQ ID NO: 50569 - protein, 37 aa, Artificial Sequence
  GFR-binding peptide
  MOD_RES (37), (37): Xaa is C or S
  MOD_RES (13), (14), (15), (16), (17): Xaa is A or G
  MOD_RES (18), (19), (20), (21): Xaa is A or G or is absent
ALHDELTNSLQEXXXXXXXXXYYLVTLPELQVQTPRX

SEQ ID NO: 50570 - protein, 37 aa, Artificial Sequence
  GFR-binding peptide
  MOD_RES (1), (3), (34), (35): Xaa is C or S
XKXSKVIMVTAKKIKPTKGIIKRIQVPRLDQSVXXPS

SEQ ID NO: 50571 - protein, 40 aa, Artificial Sequence; identical to SEQ ID NO: 18154
  GFR-binding peptide
  MOD_RES (1), (3), (40): Xaa is C or S
  MOD_RES (16), (17), (18), (19), (20): Xaa is A or G
  MOD_RES (21), (22), (23), (24): Xaa is A or G or is absent

SEQ ID NO: 50572 - protein, 39 aa, Artificial Sequence; identical to SEQ ID NO: 12968
  GFR-binding peptide
  MOD_RES (1), (34), (35): Xaa is C or S
  MOD_RES (12), (13), (14), (15), (16): Xaa is A or G
  MOD_RES (17), (18), (19), (20): Xaa is A or G or is absent

SEQ ID NO: 50573 - protein, 44 aa, Artificial Sequence; identical to SEQ ID NO: 18155
  GFR-binding peptide
  MOD_RES (1), (3), (40): Xaa is C or S
  MOD_RES (16), (17), (18), (19), (20): Xaa is A or G
  MOD_RES (21), (22), (23), (24): Xaa is A or G or is absent

SEQ ID NO: 50574 - protein, 37 aa, Artificial Sequence
  GFR-binding peptide
  MOD_RES (1), (33): Xaa is C or S
XSRVVMNVQVEKIVNSSDDVKAVKVSRLKTPAXTPKT

SEQ ID NO: 50575 - protein, 41 aa, Artificial Sequence
  GFR-binding peptide
  MOD_RES (2), (4), (38), (39): Xaa is C or S
  MOD_RES (16), (17), (18), (19), (20): Xaa is A or G
  MOD_RES (21), (22), (23), (24): Xaa is A or G or is absent
RXGXGEVVMDSMEGIXXXXXXXXXMIQMTINSLETPVXXAK

SEQ ID NO: 50576 - protein, 36 aa, Artificial Sequence; identical to SEQ ID NO: 12969
  GFR-binding peptide
  MOD_RES (2), (36): Xaa is C or S
  MOD_RES (14), (15), (16), (17), (18): Xaa is A or G
  MOD_RES (19), (20), (21), (22): Xaa is A or G or is absent

SEQ ID NO: 50577 - protein, 33 aa, Artificial Sequence; identical to SEQ ID NO: 12971
  GFR-binding peptide
  MOD_RES (31), (32): Xaa is C or S

SEQ ID NO: 50578 - protein, 37 aa, Artificial Sequence; identical to SEQ ID NO: 12972
  GFR-binding peptide
  MOD_RES (2), (4), (36), (37): Xaa is C or S

SEQ ID NO: 50579 - protein, 34 aa, Artificial Sequence
  GFR-binding peptide
  MOD_RES (2), (2): Xaa is C or S
  MOD_RES (13), (14), (15), (16), (17): Xaa is A or G
  MOD_RES (18), (19), (20), (21): Xaa is A or G or is absent
KXSRVIMVTAKKXXXXXXXXXIKRIQVPRLAQPV

SEQ ID NO: 50580 - protein, 30 aa, Artificial Sequence
  GFR-binding peptide
RVVMNSMEGIIVNSSDDMIQVTINSLKTPA

SEQ ID NO: 50581 - protein, 42 aa, Artificial Sequence
  GFR-binding peptide
  MOD_RES (2), (4), (38): Xaa is C or S
  MOD_RES (16), (17), (18), (19), (20): Xaa is A or G
  MOD_RES (21), (22), (23), (24): Xaa is A or G or is absent
HXGXSRVVMNVTAKKXXXXXXXXXIKRVQVPRLKTPAXTPKT

SEQ ID NO: 50582 - protein, 37 aa, Artificial Sequence; identical to SEQ ID NO: 12976
  GFR-binding peptide
  MOD_RES (2), (36), (37): Xaa is C or S
  MOD_RES (14), (15), (16), (17), (18): Xaa is A or G
  MOD_RES (19), (20), (21), (22): Xaa is A or G or is absent

SEQ ID NO: 50583 - protein, 36 aa, Artificial Sequence
  GFR-binding peptide
  MOD_RES (31), (32): Xaa is C or S
RVVMNVQVEKIVNSSDDVKAVKVSRLKTPAXXPKPV

SEQ ID NO: 50584 - protein, 38 aa, Artificial Sequence
  GFR-binding peptide
  MOD_RES (1), (3), (34), (35): Xaa is C or S
XKXSKVVMVTAKKVKPTRGVIKRIQVPRLDQPVXXPSA

SEQ ID NO: 50585 - protein, 38 aa, Artificial Sequence; identical to SEQ ID NO: 12978
  GFR-binding peptide
  MOD_RES (1), (33), (34): Xaa is C or S

SEQ ID NO: 50586 - protein, 35 aa, Artificial Sequence
  GFR-binding peptide
  MOD_RES (1), (34), (35): Xaa is C or S
  MOD_RES (12), (13), (14), (15), (16): Xaa is A or G
  MOD_RES (17), (18), (19), (20): Xaa is A or G or is absent
XSRVIMSMEGIXXXXXXXXXMIQITINSLAQPVXX

SEQ ID NO: 50587 - protein, 42 aa, Artificial Sequence
  GFR-binding peptide
  MOD_RES (1), (3), (40): Xaa is C or S
XAXELHEELRNSLQELKPKKRVYEYYVVPLPEHHVRSPQXKV

SEQ ID NO: 50588 - protein, 41 aa, Artificial Sequence
  GFR-binding peptide
  MOD_RES (1), (3), (35), (36): Xaa is C or S
XGXGEVVMDVTAKKVVKENEDIKRMQVPRLETPVXXAKPIK

SEQ ID NO: 50589 - protein, 34 aa, Artificial Sequence
  GFR-binding peptide
  MOD_RES (34), (34): Xaa is C or S
  MOD_RES (12), (13), (14), (15), (16): Xaa is A or G
  MOD_RES (17), (18), (19), (20): Xaa is A or G or is absent
GEVVMEVQVEKXXXXXXXXXVKAMKVSRLETPVX

SEQ ID NO: 50590 - protein, 39 aa, Artificial Sequence
  GFR-binding peptide
  MOD_RES (2), (4): Xaa is C or S
  MOD_RES (17), (18), (19), (20), (21): Xaa is A or G
  MOD_RES (22), (23), (24), (25): Xaa is A or G or is absent
AXAXELHEELRNSLQEXXXXXXXXXYYVVPLPEHHVRSP

SEQ ID NO: 50591 - protein, 44 aa, Artificial Sequence
  GFR-binding peptide
  MOD_RES (2), (4), (38), (39): Xaa is C or S
  MOD_RES (16), (17), (18), (19), (20): Xaa is A or G
  MOD_RES (21), (22), (23), (24): Xaa is A or G or is absent
RXGXGEVVMEVTAKKXXXXXXXXXIKRMQVPRLETPVXXAKPIS

SEQ ID NO: 50592 - protein, 32 aa, Artificial Sequence
  GFR-binding peptide
  MOD_RES (2), (2): Xaa is C or S
KXSKVIMSMEGIIKPTKGIMIQITINSLDQSV

SEQ ID NO: 50593 - protein, 39 aa, Artificial Sequence; identical to SEQ ID NO: 12980
  GFR-binding peptide
  MOD_RES (2), (4), (37), (38): Xaa is C or S
  MOD_RES (15), (16), (17), (18), (19): Xaa is A or G
  MOD_RES (20), (21), (22), (23): Xaa is A or G or is absent

SEQ ID NO: 50594 - protein, 34 aa, Artificial Sequence; identical to SEQ ID NO: 12981
  GFR-binding peptide
  MOD_RES (2), (34): Xaa is C or S

SEQ ID NO: 50595 - protein, 40 aa, Artificial Sequence
  GFR-binding peptide
  MOD_RES (2), (35), (36): Xaa is C or S
  MOD_RES (13), (14), (15), (16), (17): Xaa is A or G
  MOD_RES (18), (19), (20), (21): Xaa is A or G or is absent
KXSKVIMSMEGIXXXXXXXXXMIQITINSLDQSVXXPSAS

SEQ ID NO: 50596 - protein, 36 aa, Artificial Sequence
  GFR-binding peptide
  MOD_RES (1), (3): Xaa is C or S
  MOD_RES (15), (16), (17), (18), (19): Xaa is A or G
  MOD_RES (20), (21), (22), (23): Xaa is A or G or is absent
XGXARVVMNSMEGIXXXXXXXXXMIQVTINSLQTPA

SEQ ID NO: 50597 - protein, 37 aa, Artificial Sequence
  GFR-binding peptide
  MOD_RES (1), (35): Xaa is C or S
XKNHQLFNSLQEHQGQHPKIRYYVMPLPEEETPVXEL

SEQ ID NO: 50598 - protein, 37 aa, Artificial Sequence; identical to SEQ ID NO: 18164
  GFR-binding peptide
  MOD_RES (2), (36): Xaa is C or S
  MOD_RES (14), (15), (16), (17), (18): Xaa is A or G
  MOD_RES (19), (20), (21), (22): Xaa is A or G or is absent

SEQ ID NO: 50599 - protein, 37 aa, Artificial Sequence
  GFR-binding peptide
  MOD_RES (2), (4), (35), (36): Xaa is C or S
SXKXSKVIMVTAKKIKPTKGIIKRIQVPRLDQSVXXP

SEQ ID NO: 50600 - protein, 35 aa, Artificial Sequence
  GFR-binding peptide
  MOD_RES (2), (35): Xaa is C or S
  MOD_RES (13), (14), (15), (16), (17): Xaa is A or G
  MOD_RES (18), (19), (20), (21): Xaa is A or G or is absent
KXSKVIMVTAKKXXXXXXXXXIKRIQVPRLDQSVX

SEQ ID NO: 50601 - protein, 36 aa, Artificial Sequence; identical to SEQ ID NO: 37560
  GFR-binding peptide
  MOD_RES (2), (4), (35), (36): Xaa is C or S

SEQ ID NO: 50602 - protein, 36 aa, Artificial Sequence
  GFR-binding peptide
  MOD_RES (31), (32): Xaa is C or S
RVVMNSMEGIIVNSSDDMIQVTINSLKTPAXXPKPV

SEQ ID NO: 50603 - protein, 34 aa, Artificial Sequence
  GFR-binding peptide
  MOD_RES (2), (34): Xaa is C or S
GXGEVVMDVQVEKVVKENEDVKAMKVSRLETPVX

SEQ ID NO: 50604 - protein, 38 aa, Artificial Sequence
  GFR-binding peptide
  MOD_RES (2), (36), (37): Xaa is C or S
  MOD_RES (14), (15), (16), (17), (18): Xaa is A or G
  MOD_RES (19), (20), (21), (22): Xaa is A or G or is absent
GXGEVVMESMEGIXXXXXXXXXMIQMTINSLETPVXXA

SEQ ID NO: 50605 - protein, 39 aa, Artificial Sequence
  GFR-binding peptide
  MOD_RES (1), (3), (35): Xaa is C or S
XGXSRVVMNSMEGIIVNSSDDMIQVTINSLKTPAXTPKT

SEQ ID NO: 50606 - protein, 37 aa, Artificial Sequence; identical to SEQ ID NO: 18168
  GFR-binding peptide
  MOD_RES (1), (1): Xaa is C or S
  MOD_RES (14), (15), (16), (17), (18): Xaa is A or G
  MOD_RES (19), (20), (21), (22): Xaa is A or G or is absent

SEQ ID NO: 50607 - protein, 37 aa, Artificial Sequence
  GFR-binding peptide
  MOD_RES (1), (33), (34): Xaa is C or S
XARVVMNVTAKKIVNSSDDIKRVQVPRLQTPAXXPKP

SEQ ID NO: 50608 - protein, 36 aa, Artificial Sequence; identical to SEQ ID NO: 12991
  GFR-binding peptide
  MOD_RES (34), (35): Xaa is C or S
  MOD_RES (12), (13), (14), (15), (16): Xaa is A or G
  MOD_RES (17), (18), (19), (20): Xaa is A or G or is absent

SEQ ID NO: 50609 - protein, 40 aa, Artificial Sequence
  GFR-binding peptide
  MOD_RES (2), (4), (38), (39): Xaa is C or S
  MOD_RES (16), (17), (18), (19), (20): Xaa is A or G
  MOD_RES (21), (22), (23), (24): Xaa is A or G or is absent
RXGXGEVVMDVQVEKXXXXXXXXXVKAMKVSRLETPVXXA

SEQ ID NO: 50610 - protein, 39 aa, Artificial Sequence; identical to SEQ ID NO: 12993
  GFR-binding peptide
  MOD_RES (2), (36), (37): Xaa is C or S
  MOD_RES (14), (15), (16), (17), (18): Xaa is A or G
  MOD_RES (19), (20), (21), (22): Xaa is A or G or is absent

SEQ ID NO: 50611 - protein, 40 aa, Artificial Sequence; identical to SEQ ID NO: 18172
  GFR-binding peptide
  MOD_RES (2), (4), (38): Xaa is C or S

SEQ ID NO: 50612 - protein, 43 aa, Artificial Sequence; identical to SEQ ID NO: 12994
  GFR-binding peptide
  MOD_RES (2), (4), (38): Xaa is C or S
  MOD_RES (16), (17), (18), (19), (20): Xaa is A or G
  MOD_RES (21), (22), (23), (24): Xaa is A or G or is absent

SEQ ID NO: 50613 - protein, 37 aa, Artificial Sequence
  GFR-binding peptide
  MOD_RES (1), (32), (33): Xaa is C or S
XSKVIMSMEGIIKPTKGIMIQITINSLDQSVXXPSAS

SEQ ID NO: 50614 - protein, 40 aa, Artificial Sequence
  GFR-binding peptide
  MOD_RES (37), (37): Xaa is C or S
ELHEELRNSLQELKPKKRVYEYYLVTLPEHHVRSPQXKVS

SEQ ID NO: 50615 - protein, 39 aa, Artificial Sequence; identical to SEQ ID NO: 18175
  GFR-binding peptide
  MOD_RES (35), (35): Xaa is C or S

SEQ ID NO: 50616 - protein, 38 aa, Artificial Sequence; identical to SEQ ID NO: 18177
  GFR-binding peptide
  MOD_RES (2), (2): Xaa is C or S

SEQ ID NO: 50617 - protein, 39 aa, Artificial Sequence; identical to SEQ ID NO: 13000
  GFR-binding peptide
  MOD_RES (2), (34), (35): Xaa is C or S

SEQ ID NO: 50618 - protein, 38 aa, Artificial Sequence; identical to SEQ ID NO: 13001
  GFR-binding peptide
  MOD_RES (34), (35): Xaa is C or S
  MOD_RES (12), (13), (14), (15), (16): Xaa is A or G
  MOD_RES (17), (18), (19), (20): Xaa is A or G or is absent

SEQ ID NO: 50619 - protein, 39 aa, Artificial Sequence; identical to SEQ ID NO: 18179
  GFR-binding peptide
  MOD_RES (1), (38): Xaa is C or S
  MOD_RES (14), (15), (16), (17), (18): Xaa is A or G
  MOD_RES (19), (20), (21), (22): Xaa is A or G or is absent

SEQ ID NO: 50620 - protein, 35 aa, Artificial Sequence; identical to SEQ ID NO: 18181
  GFR-binding peptide
  MOD_RES (1), (35): Xaa is C or S
  MOD_RES (13), (14), (15), (16), (17): Xaa is A or G
  MOD_RES (18), (19), (20), (21): Xaa is A or G or is absent

SEQ ID NO: 50621 - protein, 40 aa, Artificial Sequence; identical to SEQ ID NO: 18182
  GFR-binding peptide
  MOD_RES (37), (37): Xaa is C or S

SEQ ID NO: 50622 - protein, 34 aa, Artificial Sequence
  GFR-binding peptide
  MOD_RES (12), (13), (14), (15), (16): Xaa is A or G
  MOD_RES (17), (18), (19), (20): Xaa is A or G or is absent
LHDELTNSLQEXXXXXXXXXYYVVPLPELQVQTP

SEQ ID NO: 50623 - protein, 39 aa, Artificial Sequence; identical to SEQ ID NO: 18183
  GFR-binding peptide
  MOD_RES (35), (35): Xaa is C or S

SEQ ID NO: 50624 - protein, 41 aa, Artificial Sequence
  GFR-binding peptide
  MOD_RES (1), (35), (36): Xaa is C or S
  MOD_RES (13), (14), (15), (16), (17): Xaa is A or G
  MOD_RES (18), (19), (20), (21): Xaa is A or G or is absent
XARVVMNSMEGIXXXXXXXXXMIQVTINSLQTPAXXPKPVT

SEQ ID NO: 50625 - protein, 34 aa, Artificial Sequence
  GFR-binding peptide
  MOD_RES (2), (4): Xaa is C or S
SXKXSKVIMVQVEKIKPTKGIVKAIKVSRLDQSV

SEQ ID NO: 50626 - protein, 38 aa, Artificial Sequence; identical to SEQ ID NO: 13006
  GFR-binding peptide
  MOD_RES (1), (3), (37), (38): Xaa is C or S
  MOD_RES (15), (16), (17), (18), (19): Xaa is A or G
  MOD_RES (20), (21), (22), (23): Xaa is A or G or is absent

SEQ ID NO: 50627 - protein, 30 aa, Artificial Sequence
  GFR-binding peptide
SKVVMSMEGIVKPTRGVMIQITINSLDQPV

SEQ ID NO: 50628 - protein, 40 aa, Artificial Sequence
  GFR-binding peptide
  MOD_RES (2), (4), (38): Xaa is C or S
  MOD_RES (16), (17), (18), (19), (20): Xaa is A or G
  MOD_RES (21), (22), (23), (24): Xaa is A or G or is absent
RXEXKNHQLFNSLQEXXXXXXXXXYYLMTLPEEETPVXEL

SEQ ID NO: 50629 - protein, 35 aa, Artificial Sequence; identical to SEQ ID NO: 13012
  GFR-binding peptide
  MOD_RES (2), (35): Xaa is C or S
  MOD_RES (13), (14), (15), (16), (17): Xaa is A or G
  MOD_RES (18), (19), (20), (21): Xaa is A or G or is absent

SEQ ID NO: 50630 - protein, 39 aa, Artificial Sequence; identical to SEQ ID NO: 13014
  GFR-binding peptide
  MOD_RES (33), (34): Xaa is C or S
  MOD_RES (11), (12), (13), (14), (15): Xaa is A or G
  MOD_RES (16), (17), (18), (19): Xaa is A or G or is absent

SEQ ID NO: 50631 - protein, 41 aa, Artificial Sequence
  GFR-binding peptide
  MOD_RES (1), (38): Xaa is C or S
XALHDELTNSLQEFIPKKRVIEYYVVPLPELQVQTPRXQVN

SEQ ID NO: 50632 - protein, 42 aa, Artificial Sequence; identical to SEQ ID NO: 18194
  GFR-binding peptide
  MOD_RES (2), (36): Xaa is C or S

SEQ ID NO: 50633 - protein, 36 aa, Artificial Sequence
  GFR-binding peptide
  MOD_RES (2), (36): Xaa is C or S
  MOD_RES (14), (15), (16), (17), (18): Xaa is A or G
  MOD_RES (19), (20), (21), (22): Xaa is A or G or is absent
GXGEVVMDVTAKKXXXXXXXXXIKRMQVPRLETPVX

SEQ ID NO: 50634 - protein, 34 aa, Artificial Sequence
  GFR-binding peptide
  MOD_RES (34), (34): Xaa is C or S
  MOD_RES (12), (13), (14), (15), (16): Xaa is A or G
  MOD_RES (17), (18), (19), (20): Xaa is A or G or is absent
GEVVMDSMEGIXXXXXXXXXMIQMTINSLETPVX

SEQ ID NO: 50635 - protein, 41 aa, Artificial Sequence
  GFR-binding peptide
  MOD_RES (1), (3), (35), (36): Xaa is C or S
XGXGEVVMEVQVEKVVKDYEDVKAMKVSRLETPVXXAKPIS

SEQ ID NO: 50636 - protein, 35 aa, Artificial Sequence; identical to SEQ ID NO: 13017
  GFR-binding peptide
  MOD_RES (1), (35): Xaa is C or S
  MOD_RES (13), (14), (15), (16), (17): Xaa is A or G
  MOD_RES (18), (19), (20), (21): Xaa is A or G or is absent

SEQ ID NO: 50637 - protein, 34 aa, Artificial Sequence; identical to SEQ ID NO: 13020
  GFR-binding peptide
  MOD_RES (1), (33), (34): Xaa is C or S

SEQ ID NO: 50638 - protein, 36 aa, Artificial Sequence
  GFR-binding peptide
  MOD_RES (1), (3): Xaa is C or S
  MOD_RES (15), (16), (17), (18), (19): Xaa is A or G
  MOD_RES (20), (21), (22), (23): Xaa is A or G or is absent
XGXGEVVMDVTAKKXXXXXXXXXIKRMQVPRLETPV

SEQ ID NO: 50639 - protein, 35 aa, Artificial Sequence
  GFR-binding peptide
  MOD_RES (1), (34), (35): Xaa is C or S
  MOD_RES (12), (13), (14), (15), (16): Xaa is A or G
  MOD_RES (17), (18), (19), (20): Xaa is A or G or is absent
XSRVIMVQVEKXXXXXXXXXVKAIKVSRLAQPVXX

SEQ ID NO: 50640 - protein, 41 aa, Artificial Sequence
  GFR-binding peptide
  MOD_RES (2), (4), (41): Xaa is C or S
  MOD_RES (17), (18), (19), (20), (21): Xaa is A or G
  MOD_RES (22), (23), (24), (25): Xaa is A or G or is absent
EXKXALHDELTNSLQEXXXXXXXXXYYLVTLPELQVQTPRX

SEQ ID NO: 50641 - protein, 41 aa, Artificial Sequence
  GFR-binding peptide
  MOD_RES (2), (4), (41): Xaa is C or S
EXKXALHDELTNSLQEFIPKKRVIEYYVVPLPELQVQTPRX

SEQ ID NO: 50642 - protein, 38 aa, Artificial Sequence
  GFR-binding peptide
  MOD_RES (2), (33), (34): Xaa is C or S
KXSKVVMSMEGIVKPTRGVMIQITINSLDQPVXXPSAS

SEQ ID NO: 50643 - protein, 35 aa, Artificial Sequence
  GFR-binding peptide
  MOD_RES (32), (33): Xaa is C or S
GEVVMEVTAKKVVKDYEDIKRMQVPRLETPVXXAK

SEQ ID NO: 50644 - protein, 43 aa, Artificial Sequence; identical to SEQ ID NO: 13026
  GFR-binding peptide
  MOD_RES (1), (3), (37), (38): Xaa is C or S
  MOD_RES (15), (16), (17), (18), (19): Xaa is A or G
  MOD_RES (20), (21), (22), (23): Xaa is A or G or is absent

SEQ ID NO: 50645 - protein, 36 aa, Artificial Sequence
  GFR-binding peptide
  MOD_RES (1), (33), (34): Xaa is C or S
XARVVMNVTAKKIVNSSDDIKRVQVPRLQTPAXXPK

SEQ ID NO: 50646 - protein, 41 aa, Artificial Sequence; identical to SEQ ID NO: 13030
  GFR-binding peptide
  MOD_RES (1), (3), (35), (36): Xaa is C or S

SEQ ID NO: 50647 - protein, 41 aa, Artificial Sequence; identical to SEQ ID NO: 18203
  GFR-binding peptide
  MOD_RES (2), (4), (41): Xaa is C or S

SEQ ID NO: 50648 - protein, 37 aa, Artificial Sequence
  GFR-binding peptide
  MOD_RES (1), (33), (34): Xaa is C or S
XGEVVMDVQVEKVVKENEDVKAMKVSRLETPVXXAKP

SEQ ID NO: 50649 - protein, 41 aa, Artificial Sequence; identical to SEQ ID NO: 18204
  GFR-binding peptide
  MOD_RES (1), (3), (40): Xaa is C or S

SEQ ID NO: 50650 - protein, 39 aa, Artificial Sequence; identical to SEQ ID NO: 18205
  GFR-binding peptide
  MOD_RES (1), (38): Xaa is C or S
  MOD_RES (14), (15), (16), (17), (18): Xaa is A or G
  MOD_RES (19), (20), (21), (22): Xaa is A or G or is absent

SEQ ID NO: 50651 - protein, 37 aa, Artificial Sequence
  GFR-binding peptide
  MOD_RES (1), (3), (35), (36): Xaa is C or S
XGXARVVMNVQVEKIVNSSDDVKAVKVSRLQTPAXXP

SEQ ID NO: 50652 - protein, 33 aa, Artificial Sequence; identical to SEQ ID NO: 18208
  GFR-binding peptide

SEQ ID NO: 50653 - protein, 37 aa, Artificial Sequence
  GFR-binding peptide
  MOD_RES (2), (35), (36): Xaa is C or S
  MOD_RES (13), (14), (15), (16), (17): Xaa is A or G
  MOD_RES (18), (19), (20), (21): Xaa is A or G or is absent
KXSKVVMVTAKKXXXXXXXXXIKRIQVPRLDQPVXXP

SEQ ID NO: 50654 - protein, 34 aa, Artificial Sequence; identical to SEQ ID NO: 18211
  GFR-binding peptide

SEQ ID NO: 50655 - protein, 32 aa, Artificial Sequence; identical to SEQ ID NO: 13035
  GFR-binding peptide
  MOD_RES (31), (32): Xaa is C or S

SEQ ID NO: 50656 - protein, 42 aa, Artificial Sequence; identical to SEQ ID NO: 18213
  GFR-binding peptide
  MOD_RES (2), (4), (41): Xaa is C or S
  MOD_RES (17), (18), (19), (20), (21): Xaa is A or G
  MOD_RES (22), (23), (24), (25): Xaa is A or G or is absent

SEQ ID NO: 50657 - protein, 38 aa, Artificial Sequence; identical to SEQ ID NO: 13036
  GFR-binding peptide
  MOD_RES (1), (33): Xaa is C or S

SEQ ID NO: 50658 - protein, 36 aa, Artificial Sequence
  GFR-binding peptide
  MOD_RES (1), (35): Xaa is C or S
  MOD_RES (13), (14), (15), (16), (17): Xaa is A or G
  MOD_RES (18), (19), (20), (21): Xaa is A or G or is absent
XKNHQLFNSLQEXXXXXXXXXYYLMTLPEEETPVXE

SEQ ID NO: 50659 - protein, 33 aa, Artificial Sequence
  GFR-binding peptide
  MOD_RES (1), (1): Xaa is C or S
  MOD_RES (12), (13), (14), (15), (16): Xaa is A or G
  MOD_RES (17), (18), (19), (20): Xaa is A or G or is absent
XSKVVMVTAKKXXXXXXXXXIKRIQVPRLDQPV

SEQ ID NO: 50660 - protein, 40 aa, Artificial Sequence; identical to SEQ ID NO: 18215
  GFR-binding peptide
  MOD_RES (1), (3), (40): Xaa is C or S

SEQ ID NO: 50661 - protein, 36 aa, Artificial Sequence
  GFR-binding peptide
  MOD_RES (2), (36): Xaa is C or S
  MOD_RES (14), (15), (16), (17), (18): Xaa is A or G
  MOD_RES (19), (20), (21), (22): Xaa is A or G or is absent
EXKNHQLFNSLQEXXXXXXXXXYYLMTLPEEETPVX

SEQ ID NO: 50662 - protein, 40 aa, Artificial Sequence
  GFR-binding peptide
  MOD_RES (1), (3), (35), (36): Xaa is C or S
XGXGEVVMEVTAKKVVKDYEDIKRMQVPRLETPVXXAKPI

SEQ ID NO: 50663 - protein, 33 aa, Artificial Sequence
  GFR-binding peptide
  MOD_RES (2), (2): Xaa is C or S
GXGEVVMDVTAKKVVKENEDIKRMQVPRLETPV

SEQ ID NO: 50664 - protein, 34 aa, Artificial Sequence
  GFR-binding peptide
  MOD_RES (12), (13), (14), (15), (16): Xaa is A or G
  MOD_RES (17), (18), (19), (20): Xaa is A or G or is absent
LHEELRNSLQEXXXXXXXXXYYVVPLPEHHVRSP

SEQ ID NO: 50665 - protein, 40 aa, Artificial Sequence
  GFR-binding peptide
  MOD_RES (1), (35): Xaa is C or S
  MOD_RES (13), (14), (15), (16), (17): Xaa is A or G
  MOD_RES (18), (19), (20), (21): Xaa is A or G or is absent
XKNHQLFNSLQEXXXXXXXXXYYVMPLPEEETPVXELGED

SEQ ID NO: 50666 - protein, 40 aa, Artificial Sequence; identical to SEQ ID NO: 13039
  GFR-binding peptide
  MOD_RES (2), (36), (37): Xaa is C or S
  MOD_RES (14), (15), (16), (17), (18): Xaa is A or G
  MOD_RES (19), (20), (21), (22): Xaa is A or G or is absent

SEQ ID NO: 50667 - protein, 38 aa, Artificial Sequence; identical to SEQ ID NO: 18218
  GFR-binding peptide
  MOD_RES (1), (38): Xaa is C or S

SEQ ID NO: 50668 - protein, 39 aa, Artificial Sequence
  GFR-binding peptide
  MOD_RES (1), (38): Xaa is C or S
  MOD_RES (14), (15), (16), (17), (18): Xaa is A or G
  MOD_RES (19), (20), (21), (22): Xaa is A or G or is absent
XELHEELRNSLQEXXXXXXXXXYYLVTLPEHHVRSPQXK

SEQ ID NO: 50669 - protein, 32 aa, Artificial Sequence
  GFR-binding peptide
  MOD_RES (32), (32): Xaa is C or S
ARVVMNSMEGIIVNSSDDMIQVTINSLQTPAX

SEQ ID NO: 50670 - protein, 36 aa, Artificial Sequence; identical to SEQ ID NO: 13043
  GFR-binding peptide
  MOD_RES (1), (33), (34): Xaa is C or S

SEQ ID NO: 50671 - protein, 39 aa, Artificial Sequence; identical to SEQ ID NO: 18222
  GFR-binding peptide
  MOD_RES (2), (39): Xaa is C or S

SEQ ID NO: 50672 - protein, 30 aa, Artificial Sequence; identical to SEQ ID NO: 13044
  GFR-binding peptide

SEQ ID NO: 50673 - protein, 34 aa, Artificial Sequence
  GFR-binding peptide
HEELRNSLQELKPKKRVYEYYVVPLPEHHVRSPQ

SEQ ID NO: 50674 - protein, 42 aa, Artificial Sequence; identical to SEQ ID NO: 18225
  GFR-binding peptide
  MOD_RES (2), (4), (38): Xaa is C or S

SEQ ID NO: 50675 - protein, 44 aa, Artificial Sequence; identical to SEQ ID NO: 13046
  GFR-binding peptide
  MOD_RES (2), (4), (38), (39): Xaa is C or S
  MOD_RES (16), (17), (18), (19), (20): Xaa is A or G
  MOD_RES (21), (22), (23), (24): Xaa is A or G or is absent

SEQ ID NO: 50676 - protein, 38 aa, Artificial Sequence
  GFR-binding peptide
  MOD_RES (1), (32), (33): Xaa is C or S
XSKVIMSMEGIIKPTKGIMIQITINSLDQSVXXPSASA

SEQ ID NO: 50677 - protein, 31 aa, Artificial Sequence
  GFR-binding peptide
  MOD_RES (31), (31): Xaa is C or S
EVVMESMEGIVVKDYEDMIQMTINSLETPVX

SEQ ID NO: 50678 - protein, 36 aa, Artificial Sequence; identical to SEQ ID NO: 18227
  GFR-binding peptide
  MOD_RES (35), (35): Xaa is C or S
  MOD_RES (11), (12), (13), (14), (15): Xaa is A or G
  MOD_RES (16), (17), (18), (19): Xaa is A or G or is absent

SEQ ID NO: 50679 - protein, 40 aa, Artificial Sequence; identical to SEQ ID NO: 13051
  GFR-binding peptide
  MOD_RES (2), (35), (36): Xaa is C or S
  MOD_RES (13), (14), (15), (16), (17): Xaa is A or G
  MOD_RES (18), (19), (20), (21): Xaa is A or G or is absent

SEQ ID NO: 50680 - protein, 40 aa, Artificial Sequence; identical to SEQ ID NO: 18229
  GFR-binding peptide
  MOD_RES (36), (36): Xaa is C or S
  MOD_RES (12), (13), (14), (15), (16): Xaa is A or G
  MOD_RES (17), (18), (19), (20): Xaa is A or G or is absent

SEQ ID NO: 50681 - protein, 41 aa, Artificial Sequence; identical to SEQ ID NO: 18231
  GFR-binding peptide
  MOD_RES (1), (3), (40): Xaa is C or S

SEQ ID NO: 50682 - protein, 33 aa, Artificial Sequence; identical to SEQ ID NO: 13053
  GFR-binding peptide
  MOD_RES (1), (33): Xaa is C or S

SEQ ID NO: 50683 - protein, 33 aa, Artificial Sequence; identical to SEQ ID NO: 13056
  GFR-binding peptide
  MOD_RES (1), (3): Xaa is C or S

SEQ ID NO: 50684 - protein, 31 aa, Artificial Sequence; identical to SEQ ID NO: 13058
  GFR-binding peptide

SEQ ID NO: 50685 - protein, 34 aa, Artificial Sequence; identical to SEQ ID NO: 18237
  GFR-binding peptide
  MOD_RES (1), (1): Xaa is C or S
  MOD_RES (13), (14), (15), (16), (17): Xaa is A or G
  MOD_RES (18), (19), (20), (21): Xaa is A or G or is absent

SEQ ID NO: 50686 - protein, 38 aa, Artificial Sequence
  GFR-binding peptide
  MOD_RES (2), (35), (36): Xaa is C or S
  MOD_RES (13), (14), (15), (16), (17): Xaa is A or G
  MOD_RES (18), (19), (20), (21): Xaa is A or G or is absent
KXSKVVMVQVEKXXXXXXXXXVKAIKVSRLDQPVXXPS

SEQ ID NO: 50687 - protein, 34 aa, Artificial Sequence; identical to SEQ ID NO: 13060
  GFR-binding peptide
  MOD_RES (1), (1): Xaa is C or S
  MOD_RES (13), (14), (15), (16), (17): Xaa is A or G
  MOD_RES (18), (19), (20), (21): Xaa is A or G or is absent

SEQ ID NO: 50688 - protein, 37 aa, Artificial Sequence; identical to SEQ ID NO: 13061
  GFR-binding peptide
  MOD_RES (2), (4), (35), (36): Xaa is C or S

SEQ ID NO: 50689 - protein, 35 aa, Artificial Sequence
  GFR-binding peptide
  MOD_RES (1), (34), (35): Xaa is C or S
  MOD_RES (12), (13), (14), (15), (16): Xaa is A or G
  MOD_RES (17), (18), (19), (20): Xaa is A or G or is absent
XSKVVMSMEGIXXXXXXXXXMIQITINSLDQPVXX

SEQ ID NO: 50690 - protein, 38 aa, Artificial Sequence; identical to SEQ ID NO: 18240
  GFR-binding peptide
  MOD_RES (1), (3), (37): Xaa is C or S

SEQ ID NO: 50691 - protein, 41 aa, Artificial Sequence; identical to SEQ ID NO: 13062
  GFR-binding peptide
  MOD_RES (1), (3), (37): Xaa is C or S
  MOD_RES (15), (16), (17), (18), (19): Xaa is A or G
  MOD_RES (20), (21), (22), (23): Xaa is A or G or is absent

SEQ ID NO: 50692 - protein, 43 aa, Artificial Sequence; identical to SEQ ID NO: 18241
  GFR-binding peptide
  MOD_RES (2), (39): Xaa is C or S
  MOD_RES (15), (16), (17), (18), (19): Xaa is A or G
  MOD_RES (20), (21), (22), (23): Xaa is A or G or is absent

SEQ ID NO: 50693 - protein, 35 aa, Artificial Sequence
  GFR-binding peptide
  MOD_RES (1), (1): Xaa is C or S
XELHEELRNSLQELKPKKRVYEYYVVPLPEHHVRS

SEQ ID NO: 50694 - protein, 41 aa, Artificial Sequence
  GFR-binding peptide
  MOD_RES (1), (3), (40): Xaa is C or S
XKXALHDELTNSLQEFIPKKRVIEYYVVPLPELQVQTPRXQ

SEQ ID NO: 50695 - protein, 42 aa, Artificial Sequence; identical to SEQ ID NO: 18244
  GFR-binding peptide
  MOD_RES (1), (38): Xaa is C or S

SEQ ID NO: 50696 - protein, 34 aa, Artificial Sequence; identical to SEQ ID NO: 13070
  GFR-binding peptide
  MOD_RES (1), (1): Xaa is C or S
  MOD_RES (13), (14), (15), (16), (17): Xaa is A or G
  MOD_RES (18), (19), (20), (21): Xaa is A or G or is absent

SEQ ID NO: 50697 - protein, 37 aa, Artificial Sequence; identical to SEQ ID NO: 13071
  GFR-binding peptide
  MOD_RES (2), (33), (34): Xaa is C or S

SEQ ID NO: 50698 - protein, 37 aa, Artificial Sequence
  GFR-binding peptide
  MOD_RES (31), (32): Xaa is C or S
EVVMDVQVEKVVKENEDVKAMKVSRLETPVXXAKPIK

SEQ ID NO: 50699 - protein, 45 aa, Artificial Sequence; identical to SEQ ID NO: 18245
  GFR-binding peptide
  MOD_RES (2), (4), (41): Xaa is C or S
  MOD_RES (17), (18), (19), (20), (21): Xaa is A or G
  MOD_RES (22), (23), (24), (25): Xaa is A or G or is absent

SEQ ID NO: 50700 - protein, 37 aa, Artificial Sequence
  GFR-binding peptide
  MOD_RES (1), (3), (34), (35): Xaa is C or S
XKXSKVIMSMEGIIKPTKGIMIQITINSLDQSVXXPS

SEQ ID NO: 50701 - protein, 37 aa, Artificial Sequence
  GFR-binding peptide
  MOD_RES (36), (36): Xaa is C or S
LHEELRNSLQELKPKKRVYEYYLVTLPEHHVRSPQXK

SEQ ID NO: 50702 - protein, 37 aa, Artificial Sequence; identical to SEQ ID NO: 18246
  GFR-binding peptide
  MOD_RES (1), (1): Xaa is C or S
  MOD_RES (14), (15), (16), (17), (18): Xaa is A or G
  MOD_RES (19), (20), (21), (22): Xaa is A or G or is absent

SEQ ID NO: 50703 - protein, 40 aa, Artificial Sequence; identical to SEQ ID NO: 13080
  GFR-binding peptide
  MOD_RES (1), (3), (35), (36): Xaa is C or S

SEQ ID NO: 50704 - protein, 41 aa, Artificial Sequence
  GFR-binding peptide
  MOD_RES (2), (4), (38), (39): Xaa is C or S
  MOD_RES (16), (17), (18), (19), (20): Xaa is A or G
  MOD_RES (21), (22), (23), (24): Xaa is A or G or is absent
RXGXGEVVMEVTAKKXXXXXXXXXIKRMQVPRLETPVXXAK

SEQ ID NO: 50705 - protein, 38 aa, Artificial Sequence
  GFR-binding peptide
  MOD_RES (2), (2): Xaa is C or S
AXELHEELRNSLQELKPKKRVYEYYLVTLPEHHVRSPQ

SEQ ID NO: 50706 - protein, 38 aa, Artificial Sequence
  GFR-binding peptide
  MOD_RES (33), (33): Xaa is C or S
  MOD_RES (11), (12), (13), (14), (15): Xaa is A or G
  MOD_RES (16), (17), (18), (19): Xaa is A or G or is absent
RVVMNSMEGIXXXXXXXXXMIQVTINSLKTPAXTPKTV

SEQ ID NO: 50707 - protein, 42 aa, Artificial Sequence
  GFR-binding peptide
  MOD_RES (2), (36): Xaa is C or S
  MOD_RES (14), (15), (16), (17), (18): Xaa is A or G
  MOD_RES (19), (20), (21), (22): Xaa is A or G or is absent
GXSRVVMNVQVEKXXXXXXXXXVKAVKVSRLKTPAXTPKTVH

SEQ ID NO: 50708 - protein, 40 aa, Artificial Sequence
  GFR-binding peptide
  MOD_RES (2), (4), (36), (37): Xaa is C or S
RXGXGEVVMEVTAKKVVKDYEDIKRMQVPRLETPVXXAKP

SEQ ID NO: 50709 - protein, 37 aa, Artificial Sequence
  GFR-binding peptide
  MOD_RES (1), (3), (34), (35): Xaa is C or S
XKXSKVVMSMEGIVKPTRGVMIQITINSLDQPVXXPS

SEQ ID NO: 50710 - protein, 38 aa, Artificial Sequence
  GFR-binding peptide
  MOD_RES (2), (4), (35), (36): Xaa is C or S
SXKXSKVIMVTAKKIKPTKGIIKRIQVPRLDQSVXXPS

SEQ ID NO: 50711 - protein, 41 aa, Artificial Sequence; identical to SEQ ID NO: 18249
  GFR-binding peptide
  MOD_RES (1), (3), (37): Xaa is C or S
  MOD_RES (15), (16), (17), (18), (19): Xaa is A or G
  MOD_RES (20), (21), (22), (23): Xaa is A or G or is absent

SEQ ID NO: 50712 - protein, 37 aa, Artificial Sequence; identical to SEQ ID NO: 13089
  GFR-binding peptide
  MOD_RES (1), (35): Xaa is C or S
  MOD_RES (13), (14), (15), (16), (17): Xaa is A or G
  MOD_RES (18), (19), (20), (21): Xaa is A or G or is absent

SEQ ID NO: 50713 - protein, 36 aa, Artificial Sequence
  GFR-binding peptide
  MOD_RES (31), (32): Xaa is C or S
SKVIMVTAKKIKPTKGIIKRIQVPRLDQSVXXPSAS

SEQ ID NO: 50714 - protein, 38 aa, Artificial Sequence; identical to SEQ ID NO: 13091
  GFR-binding peptide
  MOD_RES (33), (34): Xaa is C or S
  MOD_RES (11), (12), (13), (14), (15): Xaa is A or G
  MOD_RES (16), (17), (18), (19): Xaa is A or G or is absent

SEQ ID NO: 50715 - protein, 41 aa, Artificial Sequence; identical to SEQ ID NO: 18250
  GFR-binding peptide
  MOD_RES (2), (39): Xaa is C or S
  MOD_RES (15), (16), (17), (18), (19): Xaa is A or G
  MOD_RES (20), (21), (22), (23): Xaa is A or G or is absent

SEQ ID NO: 50716 - protein, 35 aa, Artificial Sequence; identical to SEQ ID NO: 18252
  GFR-binding peptide
  MOD_RES (13), (14), (15), (16), (17): Xaa is A or G
  MOD_RES (18), (19), (20), (21): Xaa is A or G or is absent

SEQ ID NO: 50717 - protein, 41 aa, Artificial Sequence; identical to SEQ ID NO: 18253
  GFR-binding peptide
  MOD_RES (2), (4), (38): Xaa is C or S
  MOD_RES (16), (17), (18), (19), (20): Xaa is A or G
  MOD_RES (21), (22), (23), (24): Xaa is A or G or is absent

SEQ ID NO: 50718 - protein, 36 aa, Artificial Sequence
  GFR-binding peptide
  MOD_RES (2), (4), (36): Xaa is C or S
HXGXSRVVMNVQVEKIVNSSDDVKAVKVSRLKTPAX

SEQ ID NO: 50719 - protein, 34 aa, Artificial Sequence; identical to SEQ ID NO: 13093
  GFR-binding peptide
  MOD_RES (1), (33), (34): Xaa is C or S

SEQ ID NO: 50720 - protein, 35 aa, Artificial Sequence
  GFR-binding peptide
  MOD_RES (31), (32): Xaa is C or S
EVVMDVTAKKVVKENEDIKRMQVPRLETPVXXAKP

SEQ ID NO: 50721 - protein, 32 aa, Artificial Sequence
  GFR-binding peptide
HEELRNSLQELKPKKRVYEYYVVPLPEHHVRS

SEQ ID NO: 50722 - protein, 39 aa, Artificial Sequence; identical to SEQ ID NO: 13098
  GFR-binding peptide
  MOD_RES (2), (34), (35): Xaa is C or S

SEQ ID NO: 50723 - protein, 38 aa, Artificial Sequence; identical to SEQ ID NO: 13099
  GFR-binding peptide
  MOD_RES (2), (4), (36), (37): Xaa is C or S

SEQ ID NO: 50724 - protein, 36 aa, Artificial Sequence
  GFR-binding peptide
  MOD_RES (34), (35): Xaa is C or S
  MOD_RES (12), (13), (14), (15), (16): Xaa is A or G
  MOD_RES (17), (18), (19), (20): Xaa is A or G or is absent
GEVVMDVQVEKXXXXXXXXXVKAMKVSRLETPVXXA

SEQ ID NO: 50725 - protein, 38 aa, Artificial Sequence
  GFR-binding peptide
  MOD_RES (1), (3), (36), (37): Xaa is C or S
  MOD_RES (14), (15), (16), (17), (18): Xaa is A or G
  MOD_RES (19), (20), (21), (22): Xaa is A or G or is absent
XKXSKVIMSMEGIXXXXXXXXXMIQITINSLDQSVXXP

SEQ ID NO: 50726 - protein, 38 aa, Artificial Sequence; identical to SEQ ID NO: 13102
  GFR-binding peptide
  MOD_RES (33), (34): Xaa is C or S
  MOD_RES (11), (12), (13), (14), (15): Xaa is A or G
  MOD_RES (16), (17), (18), (19): Xaa is A or G or is absent

SEQ ID NO: 50727 - protein, 36 aa, Artificial Sequence; identical to SEQ ID NO: 18256
  GFR-binding peptide
  MOD_RES (34), (34): Xaa is C or S

SEQ ID NO: 50728 - protein, 40 aa, Artificial Sequence
  GFR-binding peptide
  MOD_RES (2), (36), (37): Xaa is C or S
  MOD_RES (14), (15), (16), (17), (18): Xaa is A or G
  MOD_RES (19), (20), (21), (22): Xaa is A or G or is absent
GXGEVVMDSMEGIXXXXXXXXXMIQMTINSLETPVXXAKP

SEQ ID NO: 50729 - protein, 42 aa, Artificial Sequence
  GFR-binding peptide
  MOD_RES (2), (4), (41): Xaa is C or S
  MOD_RES (17), (18), (19), (20), (21): Xaa is A or G
  MOD_RES (22), (23), (24), (25): Xaa is A or G or is absent
EXKXALHDELTNSLQEXXXXXXXXXYYLVTLPELQVQTPRXQ

SEQ ID NO: 50730 - protein, 40 aa, Artificial Sequence
  GFR-binding peptide
  MOD_RES (2), (4), (38): Xaa is C or S
RXEXKNHQLFNSLQEHQGQHPKIRYYVMPLPEEETPVXEL

SEQ ID NO: 50731 - protein, 35 aa, Artificial Sequence; identical to SEQ ID NO: 18262
  GFR-binding peptide
  MOD_RES (1), (1): Xaa is C or S

SEQ ID NO: 50732 - protein, 38 aa, Artificial Sequence; identical to SEQ ID NO: 18263
  GFR-binding peptide
  MOD_RES (34), (34): Xaa is C or S

SEQ ID NO: 50733 - protein, 36 aa, Artificial Sequence
  GFR-binding peptide
  MOD_RES (1), (32), (33): Xaa is C or S
XSKVVMSMEGIVKPTRGVMIQITINSLDQPVXXPSA

SEQ ID NO: 50734 - protein, 41 aa, Artificial Sequence; identical to SEQ ID NO: 18264
  GFR-binding peptide
  MOD_RES (2), (39): Xaa is C or S

SEQ ID NO: 50735 - protein, 40 aa, Artificial Sequence; identical to SEQ ID NO: 13107
  GFR-binding peptide
  MOD_RES (1), (3), (36), (37): Xaa is C or S
  MOD_RES (14), (15), (16), (17), (18): Xaa is A or G
  MOD_RES (19), (20), (21), (22): Xaa is A or G or is absent

SEQ ID NO: 50736 - protein, 36 aa, Artificial Sequence
  GFR-binding peptide
  MOD_RES (1), (35), (36): Xaa is C or S
  MOD_RES (13), (14), (15), (16), (17): Xaa is A or G
  MOD_RES (18), (19), (20), (21): Xaa is A or G or is absent
XSRVVMNVQVEKXXXXXXXXXVKAVKVSRLKTPAXX

SEQ ID NO: 50737 - protein, 33 aa, Artificial Sequence
  GFR-binding peptide
  MOD_RES (12), (13), (14), (15), (16): Xaa is A or G
  MOD_RES (17), (18), (19), (20): Xaa is A or G or is absent
GEVVMEVTAKKXXXXXXXXXIKRMQVPRLETPV

SEQ ID NO: 50738 - protein, 39 aa, Artificial Sequence; identical to SEQ ID NO: 18266
  GFR-binding peptide
  MOD_RES (2), (4): Xaa is C or S
  MOD_RES (17), (18), (19), (20), (21): Xaa is A or G
  MOD_RES (22), (23), (24), (25): Xaa is A or G or is absent

SEQ ID NO: 50739 - protein, 39 aa, Artificial Sequence; identical to SEQ ID NO: 13112
  GFR-binding peptide
  MOD_RES (2), (36): Xaa is C or S
  MOD_RES (14), (15), (16), (17), (18): Xaa is A or G
  MOD_RES (19), (20), (21), (22): Xaa is A or G or is absent

SEQ ID NO: 50740 - protein, 42 aa, Artificial Sequence
  GFR-binding peptide
  MOD_RES (1), (3), (37), (38): Xaa is C or S
  MOD_RES (15), (16), (17), (18), (19): Xaa is A or G
  MOD_RES (20), (21), (22), (23): Xaa is A or G or is absent
XGXSRVVMNVTAKKXXXXXXXXXIKRVQVPRLKTPAXXPKPV

SEQ ID NO: 50741 - protein, 42 aa, Artificial Sequence
  GFR-binding peptide
  MOD_RES (1), (38): Xaa is C or S
XALHDELTNSLQEFIPKKRVIEYYLVTLPELQVQTPRXQVNR

SEQ ID NO: 50742 - protein, 41 aa, Artificial Sequence; identical to SEQ ID NO: 13114
  GFR-binding peptide
  MOD_RES (1), (3), (37), (38): Xaa is C or S
  MOD_RES (15), (16), (17), (18), (19): Xaa is A or G
  MOD_RES (20), (21), (22), (23): Xaa is A or G or is absent

SEQ ID NO: 50743 - protein, 39 aa, Artificial Sequence; identical to SEQ ID NO: 18270
  GFR-binding peptide
  MOD_RES (2), (4), (38): Xaa is C or S
  MOD_RES (16), (17), (18), (19), (20): Xaa is A or G
  MOD_RES (21), (22), (23), (24): Xaa is A or G or is absent

SEQ ID NO: 50744 - protein, 38 aa, Artificial Sequence
  GFR-binding peptide
  MOD_RES (1), (3), (34), (35): Xaa is C or S
XKXSRVIMSMEGIVKPKRGVMIQITINSLAQPVXXPAA

SEQ ID NO: 50745 - protein, 39 aa, Artificial Sequence
  GFR-binding peptide
  MOD_RES (2), (36), (37): Xaa is C or S
  MOD_RES (14), (15), (16), (17), (18): Xaa is A or G
  MOD_RES (19), (20), (21), (22): Xaa is A or G or is absent
GXGEVVMDVQVEKXXXXXXXXXVKAMKVSRLETPVXXAK

SEQ ID NO: 50746 - protein, 35 aa, Artificial Sequence; identical to SEQ ID NO: 18273
  GFR-binding peptide
  MOD_RES (34), (34): Xaa is C or S

SEQ ID NO: 50747 - protein, 39 aa, Artificial Sequence
  GFR-binding peptide
  MOD_RES (1), (3), (37): Xaa is C or S
  MOD_RES (15), (16), (17), (18), (19): Xaa is A or G
  MOD_RES (20), (21), (22), (23): Xaa is A or G or is absent
XGXSRVVMNVTAKKXXXXXXXXXIKRVQVPRLKTPAXTP

SEQ ID NO: 50748 - protein, 44 aa, Artificial Sequence
  GFR-binding peptide
  MOD_RES (2), (4), (38): Xaa is C or S
RXEXKNHQLFNSLQEHQGQHPKIRYYVMPLPEEETPVXELGEDN

SEQ ID NO: 50749 - protein, 32 aa, Artificial Sequence
  GFR-binding peptide
HEELRNSLQELKPKKRVYEYYLVTLPEHHVRS

SEQ ID NO: 50750 - protein, 33 aa, Artificial Sequence
  GFR-binding peptide
  MOD_RES (32), (32): Xaa is C or S
SRVVMNSMEGIIVNSSDDMIQVTINSLKTPAXT

SEQ ID NO: 50751 - protein, 41 aa, Artificial Sequence
  GFR-binding peptide
  MOD_RES (2), (4), (38), (39): Xaa is C or S
  MOD_RES (16), (17), (18), (19), (20): Xaa is A or G
  MOD_RES (21), (22), (23), (24): Xaa is A or G or is absent
HXGXSRVVMNSMEGIXXXXXXXXXMIQVTINSLKTPAXXPK

SEQ ID NO: 50752 - protein, 35 aa, Artificial Sequence; identical to SEQ ID NO: 13121
  GFR-binding peptide
  MOD_RES (1), (3): Xaa is C or S
  MOD_RES (14), (15), (16), (17), (18): Xaa is A or G
  MOD_RES (19), (20), (21), (22): Xaa is A or G or is absent

SEQ ID NO: 50753 - protein, 35 aa, Artificial Sequence; identical to SEQ ID NO: 18278
  GFR-binding peptide
  MOD_RES (35), (35): Xaa is C or S

SEQ ID NO: 50754 - protein, 35 aa, Artificial Sequence; identical to SEQ ID NO: 13123
  GFR-binding peptide
  MOD_RES (33), (34): Xaa is C or S
  MOD_RES (11), (12), (13), (14), (15): Xaa is A or G
  MOD_RES (16), (17), (18), (19): Xaa is A or G or is absent

SEQ ID NO: 50755 - protein, 37 aa, Artificial Sequence; identical to SEQ ID NO: 18279
  GFR-binding peptide
  MOD_RES (2), (2): Xaa is C or S
  MOD_RES (15), (16), (17), (18), (19): Xaa is A or G
  MOD_RES (20), (21), (22), (23): Xaa is A or G or is absent

SEQ ID NO: 50756 - protein, 44 aa, Artificial Sequence
  GFR-binding peptide
  MOD_RES (2), (4), (41): Xaa is C or S
  MOD_RES (17), (18), (19), (20), (21): Xaa is A or G
  MOD_RES (22), (23), (24), (25): Xaa is A or G or is absent
AXAXELHEELRNSLQEXXXXXXXXXYYVVPLPEHHVRSPQXKVS

SEQ ID NO: 50757 - protein, 36 aa, Artificial Sequence
  GFR-binding peptide
  MOD_RES (31), (32): Xaa is C or S
EVVMEVTAKKVVKDYEDIKRMQVPRLETPVXXAKPI

SEQ ID NO: 50758 - protein, 38 aa, Artificial Sequence
  GFR-binding peptide
  MOD_RES (1), (3), (37), (38): Xaa is C or S
  MOD_RES (15), (16), (17), (18), (19): Xaa is A or G
  MOD_RES (20), (21), (22), (23): Xaa is A or G or is absent
XGXGEVVMDSMEGIXXXXXXXXXMIQMTINSLETPVXX

SEQ ID NO: 50759 - protein, 40 aa, Artificial Sequence
  GFR-binding peptide
  MOD_RES (1), (38): Xaa is C or S
XELHEELRNSLQELKPKKRVYEYYVVPLPEHHVRSPQXKV

SEQ ID NO: 50760 - protein, 37 aa, Artificial Sequence
  GFR-binding peptide
  MOD_RES (2), (34): Xaa is C or S
GXSRVVMNVTAKKIVNSSDDIKRVQVPRLKTPAXTPK

SEQ ID NO: 50761 - protein, 33 aa, Artificial Sequence
  GFR-binding peptide
  MOD_RES (33), (33): Xaa is C or S
  MOD_RES (11), (12), (13), (14), (15): Xaa is A or G
  MOD_RES (16), (17), (18), (19): Xaa is A or G or is absent
RVVMNVQVEKXXXXXXXXXVKAVKVSRLQTPAX

SEQ ID NO: 50762 - protein, 35 aa, Artificial Sequence
  GFR-binding peptide
  MOD_RES (1), (34), (35): Xaa is C or S
  MOD_RES (12), (13), (14), (15), (16): Xaa is A or G
  MOD_RES (17), (18), (19), (20): Xaa is A or G or is absent
XSKVIMVTAKKXXXXXXXXXIKRIQVPRLDQSVXX

SEQ ID NO: 50763 - protein, 33 aa, Artificial Sequence; identical to SEQ ID NO: 13135
  GFR-binding peptide
  MOD_RES (33), (33): Xaa is C or S
  MOD_RES (11), (12), (13), (14), (15): Xaa is A or G
  MOD_RES (16), (17), (18), (19): Xaa is A or G or is absent

SEQ ID NO: 50764 - protein, 43 aa, Artificial Sequence
  GFR-binding peptide
  MOD_RES (2), (4), (37), (38): Xaa is C or S
  MOD_RES (15), (16), (17), (18), (19): Xaa is A or G
  MOD_RES (20), (21), (22), (23): Xaa is A or G or is absent
SXKXSRVIMVTAKKXXXXXXXXXIKRIQVPRLAQPVXXPAASA

SEQ ID NO: 50765 - protein, 39 aa, Artificial Sequence
  GFR-binding peptide
  MOD_RES (2), (4), (38), (39): Xaa is C or S
  MOD_RES (16), (17), (18), (19), (20): Xaa is A or G
  MOD_RES (21), (22), (23), (24): Xaa is A or G or is absent
HXGXSRVVMNVQVEKXXXXXXXXXVKAVKVSRLKTPAXX

SEQ ID NO: 50766 - protein, 33 aa, Artificial Sequence; identical to SEQ ID NO: 37801
  GFR-binding peptide
  MOD_RES (31), (32): Xaa is C or S

SEQ ID NO: 50767 - protein, 38 aa, Artificial Sequence; identical to SEQ ID NO: 13139
  GFR-binding peptide
  MOD_RES (2), (36), (37): Xaa is C or S
  MOD_RES (14), (15), (16), (17), (18): Xaa is A or G
  MOD_RES (19), (20), (21), (22): Xaa is A or G or is absent

SEQ ID NO: 50768 - protein, 36 aa, Artificial Sequence
  GFR-binding peptide
  MOD_RES (1), (3): Xaa is C or S
  MOD_RES (15), (16), (17), (18), (19): Xaa is A or G
  MOD_RES (20), (21), (22), (23): Xaa is A or G or is absent
XEXKNHQLFNSLQEXXXXXXXXXYYLMTLPEEETPV

SEQ ID NO: 50769 - protein, 36 aa, Artificial Sequence; identical to SEQ ID NO: 18296
  GFR-binding peptide
  MOD_RES (2), (2): Xaa is C or S
  MOD_RES (15), (16), (17), (18), (19): Xaa is A or G
  MOD_RES (20), (21), (22), (23): Xaa is A or G or is absent

SEQ ID NO: 50770 - protein, 44 aa, Artificial Sequence; identical to SEQ ID NO: 18297
  GFR-binding peptide
  MOD_RES (2), (4), (41): Xaa is C or S
  MOD_RES (17), (18), (19), (20), (21): Xaa is A or G
  MOD_RES (22), (23), (24), (25): Xaa is A or G or is absent

SEQ ID NO: 50771 - protein, 41 aa, Artificial Sequence; identical to SEQ ID NO: 13140
  GFR-binding peptide
  MOD_RES (1), (3), (35), (36): Xaa is C or S

SEQ ID NO: 50772 - protein, 40 aa, Artificial Sequence; identical to SEQ ID NO: 13141
  GFR-binding peptide
  MOD_RES (1), (35), (36): Xaa is C or S
  MOD_RES (13), (14), (15), (16), (17): Xaa is A or G
  MOD_RES (18), (19), (20), (21): Xaa is A or G or is absent

SEQ ID NO: 50773 - protein, 39 aa, Artificial Sequence; identical to SEQ ID NO: 13143
  GFR-binding peptide
  MOD_RES (2), (4), (36), (37): Xaa is C or S

SEQ ID NO: 50774 - protein, 37 aa, Artificial Sequence
  GFR-binding peptide
  MOD_RES (31), (32): Xaa is C or S
EVVMESMEGIVVKDYEDMIQMTINSLETPVXXAKPIS

SEQ ID NO: 50775 - protein, 36 aa, Artificial Sequence
  GFR-binding peptide
  MOD_RES (34), (34): Xaa is C or S
KNHQLFNSLQEHQGQHPKIRYYVMPLPEEETPVXEL

SEQ ID NO: 50776 - protein, 36 aa, Artificial Sequence
  GFR-binding peptide
  MOD_RES (33), (34): Xaa is C or S
  MOD_RES (11), (12), (13), (14), (15): Xaa is A or G
  MOD_RES (16), (17), (18), (19): Xaa is A or G or is absent
SRVIMVTAKKXXXXXXXXXIKRIQVPRLAQPVXXPA

SEQ ID NO: 50777 - protein, 38 aa, Artificial Sequence
  GFR-binding peptide
  MOD_RES (2), (36): Xaa is C or S
  MOD_RES (14), (15), (16), (17), (18): Xaa is A or G
  MOD_RES (19), (20), (21), (22): Xaa is A or G or is absent
EXKNHQLFNSLQEXXXXXXXXXYYVMPLPEEETPVXEL

SEQ ID NO: 50778 - protein, 41 aa, Artificial Sequence
  GFR-binding peptide
  MOD_RES (2), (36), (37): Xaa is C or S
  MOD_RES (14), (15), (16), (17), (18): Xaa is A or G
  MOD_RES (19), (20), (21), (22): Xaa is A or G or is absent
GXARVVMNSMEGIXXXXXXXXXMIQVTINSLQTPAXXPKPV

SEQ ID NO: 50779 - protein, 35 aa, Artificial Sequence
  GFR-binding peptide
  MOD_RES (13), (14), (15), (16), (17): Xaa is A or G
  MOD_RES (18), (19), (20), (21): Xaa is A or G or is absent
ALHDELTNSLQEXXXXXXXXXYYVVPLPELQVQTP

SEQ ID NO: 50780 - protein, 39 aa, Artificial Sequence
  GFR-binding peptide
  MOD_RES (2), (35), (36): Xaa is C or S
  MOD_RES (13), (14), (15), (16), (17): Xaa is A or G
  MOD_RES (18), (19), (20), (21): Xaa is A or G or is absent
KXSRVIMSMEGIXXXXXXXXXMIQITINSLAQPVXXPAA

SEQ ID NO: 50781 - protein, 33 aa, Artificial Sequence
  GFR-binding peptide
  MOD_RES (33), (33): Xaa is C or S
  MOD_RES (11), (12), (13), (14), (15): Xaa is A or G
  MOD_RES (16), (17), (18), (19): Xaa is A or G or is absent
SKVVMVTAKKXXXXXXXXXIKRIQVPRLDQPVX

SEQ ID NO: 50782 - protein, 33 aa, Artificial Sequence; identical to SEQ ID NO: 13147
  GFR-binding peptide
  MOD_RES (31), (32): Xaa is C or S

SEQ ID NO: 50783 - protein, 41 aa, Artificial Sequence
  GFR-binding peptide
  MOD_RES (2), (4), (38): Xaa is C or S
  MOD_RES (16), (17), (18), (19), (20): Xaa is A or G
  MOD_RES (21), (22), (23), (24): Xaa is A or G or is absent
HXGXSRVVMNVQVEKXXXXXXXXXVKAVKVSRLKTPAXTPK

SEQ ID NO: 50784 - protein, 36 aa, Artificial Sequence
  GFR-binding peptide
  MOD_RES (33), (34): Xaa is C or S
  MOD_RES (11), (12), (13), (14), (15): Xaa is A or G
  MOD_RES (16), (17), (18), (19): Xaa is A or G or is absent
SKVIMVQVEKXXXXXXXXXVKAIKVSRLDQSVXXPS

SEQ ID NO: 50785 - protein, 39 aa, Artificial Sequence; identical to SEQ ID NO: 18301
  GFR-binding peptide
  MOD_RES (36), (36): Xaa is C or S
  MOD_RES (12), (13), (14), (15), (16): Xaa is A or G
  MOD_RES (17), (18), (19), (20): Xaa is A or G or is absent

SEQ ID NO: 50786 - protein, 37 aa, Artificial Sequence
  GFR-binding peptide
  MOD_RES (33), (34): Xaa is C or S
  MOD_RES (11), (12), (13), (14), (15): Xaa is A or G
  MOD_RES (16), (17), (18), (19): Xaa is A or G or is absent
EVVMDVTAKKXXXXXXXXXIKRMQVPRLETPVXXAKP

SEQ ID NO: 50787 - protein, 38 aa, Artificial Sequence
  GFR-binding peptide
  MOD_RES (2), (36), (37): Xaa is C or S
  MOD_RES (14), (15), (16), (17), (18): Xaa is A or G
  MOD_RES (19), (20), (21), (22): Xaa is A or G or is absent
GXARVVMNSMEGIXXXXXXXXXMIQVTINSLQTPAXXP

SEQ ID NO: 50788 - protein, 40 aa, Artificial Sequence; identical to SEQ ID NO: 13150
  GFR-binding peptide
  MOD_RES (1), (3), (35), (36): Xaa is C or S

SEQ ID NO: 50789 - protein, 37 aa, Artificial Sequence
  GFR-binding peptide
  MOD_RES (2), (34), (35): Xaa is C or S
GXARVVMNSMEGIIVNSSDDMIQVTINSLQTPAXXPK

SEQ ID NO: 50790 - protein, 39 aa, Artificial Sequence; identical to SEQ ID NO: 13151
  GFR-binding peptide
  MOD_RES (1), (33), (34): Xaa is C or S

SEQ ID NO: 50791 - protein, 34 aa, Artificial Sequence; identical to SEQ ID NO: 18302
  GFR-binding peptide
  MOD_RES (33), (33): Xaa is C or S
  MOD_RES (11), (12), (13), (14), (15): Xaa is A or G
  MOD_RES (16), (17), (18), (19): Xaa is A or G or is absent

SEQ ID NO: 50792 - protein, 35 aa, Artificial Sequence
  GFR-binding peptide
  MOD_RES (31), (32): Xaa is C or S
EVVMESMEGIVVKDYEDMIQMTINSLETPVXXAKP

SEQ ID NO: 50793 - protein, 36 aa, Artificial Sequence; identical to SEQ ID NO: 13155
  GFR-binding peptide
  MOD_RES (2), (4), (35), (36): Xaa is C or S

SEQ ID NO: 50794 - protein, 44 aa, Artificial Sequence
  GFR-binding peptide
  MOD_RES (2), (4), (38): Xaa is C or S
  MOD_RES (16), (17), (18), (19), (20): Xaa is A or G
  MOD_RES (21), (22), (23), (24): Xaa is A or G or is absent
HXGXSRVVMNSMEGIXXXXXXXXXMIQVTINSLKTPAXTPKTVH

SEQ ID NO: 50795 - protein, 38 aa, Artificial Sequence
  GFR-binding peptide
  MOD_RES (1), (3), (37), (38): Xaa is C or S
  MOD_RES (15), (16), (17), (18), (19): Xaa is A or G
  MOD_RES (20), (21), (22), (23): Xaa is A or G or is absent
XGXGEVVMDVTAKKXXXXXXXXXIKRMQVPRLETPVXX

SEQ ID NO: 50796 - protein, 36 aa, Artificial Sequence; identical to SEQ ID NO: 13157
  GFR-binding peptide
  MOD_RES (2), (4), (36): Xaa is C or S

SEQ ID NO: 50797 - protein, 43 aa, Artificial Sequence
  GFR-binding peptide
  MOD_RES (2), (39): Xaa is C or S
  MOD_RES (15), (16), (17), (18), (19): Xaa is A or G
  MOD_RES (20), (21), (22), (23): Xaa is A or G or is absent
AXELHEELRNSLQEXXXXXXXXXYYVVPLPEHHVRSPQXKVSS

SEQ ID NO: 50798 - protein, 43 aa, Artificial Sequence; identical to SEQ ID NO: 18304
  GFR-binding peptide
  MOD_RES (2), (4), (41): Xaa is C or S
  MOD_RES (17), (18), (19), (20), (21): Xaa is A or G
  MOD_RES (22), (23), (24), (25): Xaa is A or G or is absent

SEQ ID NO: 50799 - protein, 38 aa, Artificial Sequence
  GFR-binding peptide
  MOD_RES (1), (3): Xaa is C or S
XKXALHDELTNSLQEFIPKKRVIEYYLVTLPELQVQTP

SEQ ID NO: 50800 - protein, 38 aa, Artificial Sequence
  GFR-binding peptide
  MOD_RES (2), (4), (35), (36): Xaa is C or S
SXKXSRVIMVTAKKVKPKRGVIKRIQVPRLAQPVXXPA

SEQ ID NO: 50801 - protein, 40 aa, Artificial Sequence
  GFR-binding peptide
  MOD_RES (1), (3), (35): Xaa is C or S
XGXSRVVMNSMEGIIVNSSDDMIQVTINSLKTPAXTPKTV

SEQ ID NO: 50802 - protein, 42 aa, Artificial Sequence; identical to SEQ ID NO: 13159
  GFR-binding peptide
  MOD_RES (2), (4), (38), (39): Xaa is C or S
  MOD_RES (16), (17), (18), (19), (20): Xaa is A or G
  MOD_RES (21), (22), (23), (24): Xaa is A or G or is absent

SEQ ID NO: 50803 - protein, 34 aa, Artificial Sequence
  GFR-binding peptide
  MOD_RES (2), (2): Xaa is C or S
  MOD_RES (13), (14), (15), (16), (17): Xaa is A or G
  MOD_RES (18), (19), (20), (21): Xaa is A or G or is absent
KXSRVIMVQVEKXXXXXXXXXVKAIKVSRLAQPV

SEQ ID NO: 50804 - protein, 40 aa, Artificial Sequence; identical to SEQ ID NO: 18305
  GFR-binding peptide
  MOD_RES (2), (36): Xaa is C or S
  MOD_RES (14), (15), (16), (17), (18): Xaa is A or G
  MOD_RES (19), (20), (21), (22): Xaa is A or G or is absent

SEQ ID NO: 50805 - protein, 38 aa, Artificial Sequence
  GFR-binding peptide
  MOD_RES (2), (36), (37): Xaa is C or S
  MOD_RES (14), (15), (16), (17), (18): Xaa is A or G
  MOD_RES (19), (20), (21), (22): Xaa is A or G or is absent
GXGEVVMDSMEGIXXXXXXXXXMIQMTINSLETPVXXA

SEQ ID NO: 50806 - protein, 36 aa, Artificial Sequence
  GFR-binding peptide
  MOD_RES (1), (1): Xaa is C or S
  MOD_RES (14), (15), (16), (17), (18): Xaa is A or G
  MOD_RES (19), (20), (21), (22): Xaa is A or G or is absent
XALHDELTNSLQEXXXXXXXXXYYLVTLPELQVQTP

SEQ ID NO: 50807 - protein, 38 aa, Artificial Sequence; identical to SEQ ID NO: 13163
  GFR-binding peptide
  MOD_RES (33), (34): Xaa is C or S
  MOD_RES (11), (12), (13), (14), (15): Xaa is A or G
  MOD_RES (16), (17), (18), (19): Xaa is A or G or is absent

SEQ ID NO: 50808 - protein, 31 aa, Artificial Sequence
  GFR-binding peptide
  MOD_RES (31), (31): Xaa is C or S
SRVIMVTAKKVKPKRGVIKRIQVPRLAQPVX

SEQ ID NO: 50809 - protein, 33 aa, Artificial Sequence
  GFR-binding peptide
  MOD_RES (2), (2): Xaa is C or S
GXGEVVMDVQVEKVVKENEDVKAMKVSRLETPV

SEQ ID NO: 50810 - protein, 39 aa, Artificial Sequence
  GFR-binding peptide
  MOD_RES (34), (34): Xaa is C or S
  MOD_RES (12), (13), (14), (15), (16): Xaa is A or G
  MOD_RES (17), (18), (19), (20): Xaa is A or G or is absent
SRVVMNSMEGIXXXXXXXXXMIQVTINSLKTPAXTPKTV

SEQ ID NO: 50811 - protein, 41 aa, Artificial Sequence
  GFR-binding peptide
  MOD_RES (1), (3), (36), (37): Xaa is C or S
  MOD_RES (14), (15), (16), (17), (18): Xaa is A or G
  MOD_RES (19), (20), (21), (22): Xaa is A or G or is absent
XKXSRVIMVQVEKXXXXXXXXXVKAIKVSRLAQPVXXPAAS

SEQ ID NO: 50812 - protein, 41 aa, Artificial Sequence; identical to SEQ ID NO: 18311
  GFR-binding peptide
  MOD_RES (37), (37): Xaa is C or S

SEQ ID NO: 50813 - protein, 40 aa, Artificial Sequence
  GFR-binding peptide
  MOD_RES (2), (4), (38), (39): Xaa is C or S
  MOD_RES (16), (17), (18), (19), (20): Xaa is A or G
  MOD_RES (21), (22), (23), (24): Xaa is A or G or is absent
HXGXARVVMNSMEGIXXXXXXXXXMIQVTINSLQTPAXXP

SEQ ID NO: 50814 - protein, 33 aa, Artificial Sequence; identical to SEQ ID NO: 13167
  GFR-binding peptide
  MOD_RES (2), (2): Xaa is C or S

SEQ ID NO: 50815 - protein, 33 aa, Artificial Sequence; identical to SEQ ID NO: 37851
  GFR-binding peptide
  MOD_RES (1), (32), (33): Xaa is C or S

SEQ ID NO: 50816 - protein, 36 aa, Artificial Sequence; identical to SEQ ID NO: 18312
  GFR-binding peptide
  MOD_RES (13), (14), (15), (16), (17): Xaa is A or G
  MOD_RES (18), (19), (20), (21): Xaa is A or G or is absent

SEQ ID NO: 50817 - protein, 45 aa, Artificial Sequence
  GFR-binding peptide
  MOD_RES (2), (4), (41): Xaa is C or S
  MOD_RES (17), (18), (19), (20), (21): Xaa is A or G
  MOD_RES (22), (23), (24), (25): Xaa is A or G or is absent
AXAXELHEELRNSLQEXXXXXXXXXYYLVTLPEHHVRSPQXKVSS

SEQ ID NO: 50818 - protein, 41 aa, Artificial Sequence
  GFR-binding peptide
  MOD_RES (2), (4), (36), (37): Xaa is C or S
HXGXSRVVMNVTAKKIVNSSDDIKRVQVPRLKTPAXXPKPV

SEQ ID NO: 50819 - protein, 36 aa, Artificial Sequence; identical to SEQ ID NO: 18313
  GFR-binding peptide
  MOD_RES (1), (35): Xaa is C or S
  MOD_RES (13), (14), (15), (16), (17): Xaa is A or G
  MOD_RES (18), (19), (20), (21): Xaa is A or G or is absent

SEQ ID NO: 50820 - protein, 42 aa, Artificial Sequence; identical to SEQ ID NO: 13171
  GFR-binding peptide
  MOD_RES (2), (4), (38), (39): Xaa is C or S
  MOD_RES (16), (17), (18), (19), (20): Xaa is A or G
  MOD_RES (21), (22), (23), (24): Xaa is A or G or is absent

SEQ ID NO: 50821 - protein, 36 aa, Artificial Sequence; identical to SEQ ID NO: 13173
  GFR-binding peptide
  MOD_RES (2), (4): Xaa is C or S
  MOD_RES (15), (16), (17), (18), (19): Xaa is A or G
  MOD_RES (20), (21), (22), (23): Xaa is A or G or is absent

SEQ ID NO: 50822 - protein, 33 aa, Artificial Sequence; identical to SEQ ID NO: 13175
  GFR-binding peptide
  MOD_RES (1), (32), (33): Xaa is C or S

SEQ ID NO: 50823 - protein, 35 aa, Artificial Sequence; identical to SEQ ID NO: 18317
  GFR-binding peptide
  MOD_RES (12), (13), (14), (15), (16): Xaa is A or G
  MOD_RES (17), (18), (19), (20): Xaa is A or G or is absent

SEQ ID NO: 50824 - protein, 34 aa, Artificial Sequence
  GFR-binding peptide
LHEELRNSLQELKPKKRVYEYYLVTLPEHHVRSP

SEQ ID NO: 50825 - protein, 41 aa, Artificial Sequence; identical to SEQ ID NO: 13177
  GFR-binding peptide
  MOD_RES (2), (4), (36), (37): Xaa is C or S

SEQ ID NO: 50826 - protein, 44 aa, Artificial Sequence; identical to SEQ ID NO: 18319
  GFR-binding peptide
  MOD_RES (2), (4), (38): Xaa is C or S

SEQ ID NO: 50827 - protein, 39 aa, Artificial Sequence; identical to SEQ ID NO: 18321
  GFR-binding peptide
  MOD_RES (1), (3): Xaa is C or S
  MOD_RES (16), (17), (18), (19), (20): Xaa is A or G
  MOD_RES (21), (22), (23), (24): Xaa is A or G or is absent

SEQ ID NO: 50828 - protein, 39 aa, Artificial Sequence
  GFR-binding peptide
  MOD_RES (2), (36), (37): Xaa is C or S
  MOD_RES (14), (15), (16), (17), (18): Xaa is A or G
  MOD_RES (19), (20), (21), (22): Xaa is A or G or is absent
GXSRVVMNVTAKKXXXXXXXXXIKRVQVPRLKTPAXXPK

SEQ ID NO: 50829 - protein, 37 aa, Artificial Sequence
  GFR-binding peptide
  MOD_RES (34), (35): Xaa is C or S
  MOD_RES (12), (13), (14), (15), (16): Xaa is A or G
  MOD_RES (17), (18), (19), (20): Xaa is A or G or is absent
SRVVMNSMEGIXXXXXXXXXMIQVTINSLKTPAXXPK

SEQ ID NO: 50830 - protein, 39 aa, Artificial Sequence
  GFR-binding peptide
  MOD_RES (1), (3), (36), (37): Xaa is C or S
  MOD_RES (14), (15), (16), (17), (18): Xaa is A or G
  MOD_RES (19), (20), (21), (22): Xaa is A or G or is absent
XKXSKVIMSMEGIXXXXXXXXXMIQITINSLDQSVXXPS

SEQ ID NO: 50831 - protein, 30 aa, Artificial Sequence
  GFR-binding peptide
EVVMEVQVEKVVKDYEDVKAMKVSRLETPV

SEQ ID NO: 50832 - protein, 36 aa, Artificial Sequence
  GFR-binding peptide
  MOD_RES (2), (2): Xaa is C or S
  MOD_RES (15), (16), (17), (18), (19): Xaa is A or G
  MOD_RES (20), (21), (22), (23): Xaa is A or G or is absent
KXALHDELTNSLQEXXXXXXXXXYYVVPLPELQVQT

SEQ ID NO: 50833 - protein, 40 aa, Artificial Sequence
  GFR-binding peptide
  MOD_RES (37), (37): Xaa is C or S
ELHEELRNSLQELKPKKRVYEYYVVPLPEHHVRSPQXKVS

SEQ ID NO: 50834 - protein, 43 aa, Artificial Sequence
  GFR-binding peptide
  MOD_RES (2), (4), (41): Xaa is C or S
  MOD_RES (17), (18), (19), (20), (21): Xaa is A or G
  MOD_RES (22), (23), (24), (25): Xaa is A or G or is absent
AXAXELHEELRNSLQEXXXXXXXXXYYVVPLPEHHVRSPQXKV

SEQ ID NO: 50835 - protein, 39 aa, Artificial Sequence; identical to SEQ ID NO: 18332
  GFR-binding peptide
  MOD_RES (2), (39): Xaa is C or S
  MOD_RES (15), (16), (17), (18), (19): Xaa is A or G
  MOD_RES (20), (21), (22), (23): Xaa is A or G or is absent

SEQ ID NO: 50836 - protein, 32 aa, Artificial Sequence
  GFR-binding peptide
  MOD_RES (31), (32): Xaa is C or S
SRVIMVQVEKVKPKRGVVKAIKVSRLAQPVXX

SEQ ID NO: 50837 - protein, 40 aa, Artificial Sequence; identical to SEQ ID NO: 13186
  GFR-binding peptide
  MOD_RES (2), (36): Xaa is C or S
  MOD_RES (14), (15), (16), (17), (18): Xaa is A or G
  MOD_RES (19), (20), (21), (22): Xaa is A or G or is absent

SEQ ID NO: 50838 - protein, 34 aa, Artificial Sequence
  GFR-binding peptide
  MOD_RES (2), (4): Xaa is C or S
SXKXSRVIMVQVEKVKPKRGVVKAIKVSRLAQPV

SEQ ID NO: 50839 - protein, 42 aa, Artificial Sequence
  GFR-binding peptide
  MOD_RES (1), (38): Xaa is C or S
  MOD_RES (14), (15), (16), (17), (18): Xaa is A or G
  MOD_RES (19), (20), (21), (22): Xaa is A or G or is absent
XELHEELRNSLQEXXXXXXXXXYYVVPLPEHHVRSPQXKVSS

SEQ ID NO: 50840 - protein, 36 aa, Artificial Sequence
  GFR-binding peptide
  MOD_RES (1), (33), (34): Xaa is C or S
XGEVVMDSMEGIVVKENEDMIQMTINSLETPVXXAK

SEQ ID NO: 50841 - protein, 33 aa, Artificial Sequence; identical to SEQ ID NO: 13191
  GFR-binding peptide
  MOD_RES (31), (32): Xaa is C or S

SEQ ID NO: 50842 - protein, 40 aa, Artificial Sequence
  GFR-binding peptide
  MOD_RES (2), (36), (37): Xaa is C or S
  MOD_RES (14), (15), (16), (17), (18): Xaa is A or G
  MOD_RES (19), (20), (21), (22): Xaa is A or G or is absent
GXGEVVMESMEGIXXXXXXXXXMIQMTINSLETPVXXAKP

SEQ ID NO: 50843 - protein, 43 aa, Artificial Sequence; identical to SEQ ID NO: 18336
  GFR-binding peptide
  MOD_RES (1), (3), (40): Xaa is C or S
  MOD_RES (16), (17), (18), (19), (20): Xaa is A or G
  MOD_RES (21), (22), (23), (24): Xaa is A or G or is absent

SEQ ID NO: 50844 - protein, 35 aa, Artificial Sequence
  GFR-binding peptide
  MOD_RES (2), (34), (35): Xaa is C or S
GXARVVMNVTAKKIVNSSDDIKRVQVPRLQTPAXX

SEQ ID NO: 50845 - protein, 39 aa, Artificial Sequence; identical to SEQ ID NO: 13194
  GFR-binding peptide
  MOD_RES (33), (34): Xaa is C or S
  MOD_RES (11), (12), (13), (14), (15): Xaa is A or G
  MOD_RES (16), (17), (18), (19): Xaa is A or G or is absent

SEQ ID NO: 50846 - protein, 41 aa, Artificial Sequence
  GFR-binding peptide
  MOD_RES (2), (4), (38), (39): Xaa is C or S
  MOD_RES (16), (17), (18), (19), (20): Xaa is A or G
  MOD_RES (21), (22), (23), (24): Xaa is A or G or is absent
HXGXARVVMNVTAKKXXXXXXXXXIKRVQVPRLQTPAXXPK

SEQ ID NO: 50847 - protein, 41 aa, Artificial Sequence
  GFR-binding peptide
  MOD_RES (2), (36), (37): Xaa is C or S
  MOD_RES (14), (15), (16), (17), (18): Xaa is A or G
  MOD_RES (19), (20), (21), (22): Xaa is A or G or is absent
GXSRVVMNVQVEKXXXXXXXXXVKAVKVSRLKTPAXXPKPV

SEQ ID NO: 50848 - protein, 38 aa, Artificial Sequence; identical to SEQ ID NO: 18338
  GFR-binding peptide
  MOD_RES (2), (36): Xaa is C or S
  MOD_RES (14), (15), (16), (17), (18): Xaa is A or G
  MOD_RES (19), (20), (21), (22): Xaa is A or G or is absent

SEQ ID NO: 50849 - protein, 32 aa, Artificial Sequence
  GFR-binding peptide
  MOD_RES (11), (12), (13), (14), (15): Xaa is A or G
  MOD_RES (16), (17), (18), (19): Xaa is A or G or is absent
RVVMNVTAKKXXXXXXXXXIKRVQVPRLQTPA

SEQ ID NO: 50850 - protein, 41 aa, Artificial Sequence
  GFR-binding peptide
  MOD_RES (1), (35), (36): Xaa is C or S
  MOD_RES (13), (14), (15), (16), (17): Xaa is A or G
  MOD_RES (18), (19), (20), (21): Xaa is A or G or is absent
XGEVVMEVQVEKXXXXXXXXXVKAMKVSRLETPVXXAKPIS

SEQ ID NO: 50851 - protein, 37 aa, Artificial Sequence; identical to SEQ ID NO: 13198
  GFR-binding peptide
  MOD_RES (1), (3), (35), (36): Xaa is C or S

SEQ ID NO: 50852 - protein, 36 aa, Artificial Sequence
  GFR-binding peptide
  MOD_RES (33), (33): Xaa is C or S
  MOD_RES (11), (12), (13), (14), (15): Xaa is A or G
  MOD_RES (16), (17), (18), (19): Xaa is A or G or is absent
RVVMNVQVEKXXXXXXXXXVKAVKVSRLKTPAXTPK

SEQ ID NO: 50853 - protein, 34 aa, Artificial Sequence
  GFR-binding peptide
  MOD_RES (1), (32), (33): Xaa is C or S
XSKVIMSMEGIIKPTKGIMIQITINSLDQSVXXP

SEQ ID NO: 50854 - protein, 36 aa, Artificial Sequence; identical to SEQ ID NO: 18343
  GFR-binding peptide
  MOD_RES (35), (35): Xaa is C or S
  MOD_RES (11), (12), (13), (14), (15): Xaa is A or G
  MOD_RES (16), (17), (18), (19): Xaa is A or G or is absent

SEQ ID NO: 50855 - protein, 42 aa, Artificial Sequence; identical to SEQ ID NO: 18345
  GFR-binding peptide
  MOD_RES (1), (3), (37): Xaa is C or S
  MOD_RES (15), (16), (17), (18), (19): Xaa is A or G
  MOD_RES (20), (21), (22), (23): Xaa is A or G or is absent

SEQ ID NO: 50856 - protein, 39 aa, Artificial Sequence; identical to SEQ ID NO: 13201
  GFR-binding peptide
  MOD_RES (1), (34), (35): Xaa is C or S
  MOD_RES (12), (13), (14), (15), (16): Xaa is A or G
  MOD_RES (17), (18), (19), (20): Xaa is A or G or is absent

SEQ ID NO: 50857 - protein, 37 aa, Artificial Sequence; identical to SEQ ID NO: 18348
  GFR-binding peptide
  MOD_RES (1), (1): Xaa is C or S

SEQ ID NO: 50858 - protein, 40 aa, Artificial Sequence; identical to SEQ ID NO: 18349
  GFR-binding peptide
  MOD_RES (2), (39): Xaa is C or S
  MOD_RES (15), (16), (17), (18), (19): Xaa is A or G
  MOD_RES (20), (21), (22), (23): Xaa is A or G or is absent

SEQ ID NO: 50859 - protein, 35 aa, Artificial Sequence; identical to SEQ ID NO: 13204
  GFR-binding peptide
  MOD_RES (32), (33): Xaa is C or S

SEQ ID NO: 50860 - protein, 42 aa, Artificial Sequence; identical to SEQ ID NO: 18350
  GFR-binding peptide
  MOD_RES (1), (3), (40): Xaa is C or S
  MOD_RES (16), (17), (18), (19), (20): Xaa is A or G
  MOD_RES (21), (22), (23), (24): Xaa is A or G or is absent

SEQ ID NO: 50861 - protein, 39 aa, Artificial Sequence
  GFR-binding peptide
  MOD_RES (1), (3), (37): Xaa is C or S
  MOD_RES (15), (16), (17), (18), (19): Xaa is A or G
  MOD_RES (20), (21), (22), (23): Xaa is A or G or is absent
XEXKNHQLFNSLQEXXXXXXXXXYYLMTLPEEETPVXEL

SEQ ID NO: 50862 - protein, 33 aa, Artificial Sequence; identical to SEQ ID NO: 13206
  GFR-binding peptide
  MOD_RES (2), (2): Xaa is C or S

SEQ ID NO: 50863 - protein, 33 aa, Artificial Sequence
  GFR-binding peptide
  MOD_RES (2), (2): Xaa is C or S
GXSRVVMNVTAKKIVNSSDDIKRVQVPRLKTPA

SEQ ID NO: 50864 - protein, 38 aa, Artificial Sequence
  GFR-binding peptide
  MOD_RES (1), (3), (37), (38): Xaa is C or S
  MOD_RES (15), (16), (17), (18), (19): Xaa is A or G
  MOD_RES (20), (21), (22), (23): Xaa is A or G or is absent
XGXGEVVMDVQVEKXXXXXXXXXVKAMKVSRLETPVXX

SEQ ID NO: 50865 - protein, 38 aa, Artificial Sequence; identical to SEQ ID NO: 13211
  GFR-binding peptide
  MOD_RES (33), (34): Xaa is C or S
  MOD_RES (11), (12), (13), (14), (15): Xaa is A or G
  MOD_RES (16), (17), (18), (19): Xaa is A or G or is absent

SEQ ID NO: 50866 - protein, 34 aa, Artificial Sequence
  GFR-binding peptide
  MOD_RES (1), (3), (34): Xaa is C or S
XKXSKVIMVTAKKIKPTKGIIKRIQVPRLDQSVX

SEQ ID NO: 50867 - protein, 39 aa, Artificial Sequence
  GFR-binding peptide
  MOD_RES (1), (3), (37), (38): Xaa is C or S
  MOD_RES (15), (16), (17), (18), (19): Xaa is A or G
  MOD_RES (20), (21), (22), (23): Xaa is A or G or is absent
XGXGEVVMESMEGIXXXXXXXXXMIQMTINSLETPVXXA

SEQ ID NO: 50868 - protein, 37 aa, Artificial Sequence; identical to SEQ ID NO: 18353
  GFR-binding peptide
  MOD_RES (1), (3): Xaa is C or S
  MOD_RES (16), (17), (18), (19), (20): Xaa is A or G
  MOD_RES (21), (22), (23), (24): Xaa is A or G or is absent

SEQ ID NO: 50869 - protein, 34 aa, Artificial Sequence
  GFR-binding peptide
  MOD_RES (1), (34): Xaa is C or S
  MOD_RES (12), (13), (14), (15), (16): Xaa is A or G
  MOD_RES (17), (18), (19), (20): Xaa is A or G or is absent
XSRVIMVTAKKXXXXXXXXXIKRIQVPRLAQPVX

SEQ ID NO: 50870 - protein, 39 aa, Artificial Sequence; identical to SEQ ID NO: 18360
  GFR-binding peptide
  MOD_RES (37), (37): Xaa is C or S

SEQ ID NO: 50871 - protein, 35 aa, Artificial Sequence
  GFR-binding peptide
  MOD_RES (34), (34): Xaa is C or S
KNHQLFNSLQEHQGQHPKIRYYLMTLPEEETPVXE

SEQ ID NO: 50872 - protein, 35 aa, Artificial Sequence
  GFR-binding peptide
  MOD_RES (34), (34): Xaa is C or S
  MOD_RES (12), (13), (14), (15), (16): Xaa is A or G
  MOD_RES (17), (18), (19), (20): Xaa is A or G or is absent
SRVVMNVQVEKXXXXXXXXXVKAVKVSRLKTPAXT

SEQ ID NO: 50873 - protein, 37 aa, Artificial Sequence; identical to SEQ ID NO: 18366
  GFR-binding peptide
  MOD_RES (1), (1): Xaa is C or S

SEQ ID NO: 50874 - protein, 38 aa, Artificial Sequence
  GFR-binding peptide
  MOD_RES (34), (35): Xaa is C or S
  MOD_RES (12), (13), (14), (15), (16): Xaa is A or G
  MOD_RES (17), (18), (19), (20): Xaa is A or G or is absent
GEVVMESMEGIXXXXXXXXXMIQMTINSLETPVXXAKP

SEQ ID NO: 50875 - protein, 39 aa, Artificial Sequence; identical to SEQ ID NO: 37927
  GFR-binding peptide
  MOD_RES (33), (34): Xaa is C or S
  MOD_RES (11), (12), (13), (14), (15): Xaa is A or G
  MOD_RES (16), (17), (18), (19): Xaa is A or G or is absent

SEQ ID NO: 50876 - protein, 36 aa, Artificial Sequence; identical to SEQ ID NO: 18367
  GFR-binding peptide
  MOD_RES (2), (36): Xaa is C or S

SEQ ID NO: 50877 - protein, 38 aa, Artificial Sequence
  GFR-binding peptide
  MOD_RES (35), (35): Xaa is C or S
  MOD_RES (11), (12), (13), (14), (15): Xaa is A or G
  MOD_RES (16), (17), (18), (19): Xaa is A or G or is absent
HDELTNSLQEXXXXXXXXXYYLVTLPELQVQTPRXQVN

SEQ ID NO: 50878 - protein, 36 aa, Artificial Sequence
  GFR-binding peptide
  MOD_RES (1), (3), (35), (36): Xaa is C or S
XGXARVVMNVTAKKIVNSSDDIKRVQVPRLQTPAXX

SEQ ID NO: 50879 - protein, 43 aa, Artificial Sequence; identical to SEQ ID NO: 13222
  GFR-binding peptide
  MOD_RES (2), (4), (38), (39): Xaa is C or S
  MOD_RES (16), (17), (18), (19), (20): Xaa is A or G
  MOD_RES (21), (22), (23), (24): Xaa is A or G or is absent

SEQ ID NO: 50880 - protein, 37 aa, Artificial Sequence; identical to SEQ ID NO: 13223
  GFR-binding peptide
  MOD_RES (1), (3), (35): Xaa is C or S

SEQ ID NO: 50881 - protein, 33 aa, Artificial Sequence
  GFR-binding peptide
  MOD_RES (1), (1): Xaa is C or S
  MOD_RES (12), (13), (14), (15), (16): Xaa is A or G
  MOD_RES (17), (18), (19), (20): Xaa is A or G or is absent
XSKVVMVQVEKXXXXXXXXXVKAIKVSRLDQPV

SEQ ID NO: 50882 - protein, 34 aa, Artificial Sequence; identical to SEQ ID NO: 13224
  GFR-binding peptide
  MOD_RES (1), (33), (34): Xaa is C or S

SEQ ID NO: 50883 - protein, 37 aa, Artificial Sequence
  GFR-binding peptide
  MOD_RES (1), (3), (35): Xaa is C or S
XGXSRVVMNSMEGIIVNSSDDMIQVTINSLKTPAXTP

SEQ ID NO: 50884 - protein, 35 aa, Artificial Sequence; identical to SEQ ID NO: 18374
  GFR-binding peptide

SEQ ID NO: 50885 - protein, 35 aa, Artificial Sequence
  GFR-binding peptide
  MOD_RES (34), (35): Xaa is C or S
  MOD_RES (12), (13), (14), (15), (16): Xaa is A or G
  MOD_RES (17), (18), (19), (20): Xaa is A or G or is absent
SRVVMNVTAKKXXXXXXXXXIKRVQVPRLKTPAXX

SEQ ID NO: 50886 - protein, 37 aa, Artificial Sequence
  GFR-binding peptide
  MOD_RES (35), (35): Xaa is C or S
HEELRNSLQELKPKKRVYEYYLVTLPEHHVRSPQXKV

SEQ ID NO: 50887 - protein, 33 aa, Artificial Sequence
  GFR-binding peptide
  MOD_RES (1), (3): Xaa is C or S
XKXSKVVMVTAKKVKPTRGVIKRIQVPRLDQPV

SEQ ID NO: 50888 - protein, 37 aa, Artificial Sequence; identical to SEQ ID NO: 13227
  GFR-binding peptide
  MOD_RES (2), (36), (37): Xaa is C or S
  MOD_RES (14), (15), (16), (17), (18): Xaa is A or G
  MOD_RES (19), (20), (21), (22): Xaa is A or G or is absent

SEQ ID NO: 50889 - protein, 40 aa, Artificial Sequence; identical to SEQ ID NO: 18379
  GFR-binding peptide
  MOD_RES (1), (3), (40): Xaa is C or S

SEQ ID NO: 50890 - protein, 44 aa, Artificial Sequence; identical to SEQ ID NO: 18380
  GFR-binding peptide
  MOD_RES (2), (4), (38): Xaa is C or S
  MOD_RES (16), (17), (18), (19), (20): Xaa is A or G
  MOD_RES (21), (22), (23), (24): Xaa is A or G or is absent

SEQ ID NO: 50891 - protein, 41 aa, Artificial Sequence
  GFR-binding peptide
  MOD_RES (1), (3), (37): Xaa is C or S
  MOD_RES (15), (16), (17), (18), (19): Xaa is A or G
  MOD_RES (20), (21), (22), (23): Xaa is A or G or is absent
XEXKNHQLFNSLQEXXXXXXXXXYYLMTLPEEETPVXELGE

SEQ ID NO: 50892 - protein, 37 aa, Artificial Sequence; identical to SEQ ID NO: 18381
  GFR-binding peptide
  MOD_RES (1), (3), (37): Xaa is C or S

SEQ ID NO: 50893 - protein, 37 aa, Artificial Sequence; identical to SEQ ID NO: 18382
  GFR-binding peptide
  MOD_RES (37), (37): Xaa is C or S

SEQ ID NO: 50894 - protein, 33 aa, Artificial Sequence; identical to SEQ ID NO: 18383
  GFR-binding peptide

SEQ ID NO: 50895 - protein, 33 aa, Artificial Sequence
  GFR-binding peptide
  MOD_RES (33), (33): Xaa is C or S
  MOD_RES (11), (12), (13), (14), (15): Xaa is A or G
  MOD_RES (16), (17), (18), (19): Xaa is A or G or is absent
RVVMNSMEGIXXXXXXXXXMIQVTINSLKTPAX

SEQ ID NO: 50896 - protein, 36 aa, Artificial Sequence; identical to SEQ ID NO: 18385
  GFR-binding peptide
  MOD_RES (36), (36): Xaa is C or S

SEQ ID NO: 50897 - protein, 31 aa, Artificial Sequence; identical to SEQ ID NO: 13232
  GFR-binding peptide

SEQ ID NO: 50898 - protein, 37 aa, Artificial Sequence; identical to SEQ ID NO: 18386
  GFR-binding peptide
  MOD_RES (2), (36): Xaa is C or S

SEQ ID NO: 50899 - protein, 38 aa, Artificial Sequence; identical to SEQ ID NO: 13233
  GFR-binding peptide
  MOD_RES (32), (33): Xaa is C or S

SEQ ID NO: 50900 - protein, 39 aa, Artificial Sequence; identical to SEQ ID NO: 13234
  GFR-binding peptide
  MOD_RES (1), (35), (36): Xaa is C or S
  MOD_RES (13), (14), (15), (16), (17): Xaa is A or G
  MOD_RES (18), (19), (20), (21): Xaa is A or G or is absent

SEQ ID NO: 50901 - protein, 38 aa, Artificial Sequence; identical to SEQ ID NO: 13237
  GFR-binding peptide
  MOD_RES (2), (35), (36): Xaa is C or S
  MOD_RES (13), (14), (15), (16), (17): Xaa is A or G
  MOD_RES (18), (19), (20), (21): Xaa is A or G or is absent

SEQ ID NO: 50902 - protein, 34 aa, Artificial Sequence
  GFR-binding peptide
  MOD_RES (1), (33), (34): Xaa is C or S
XGEVVMESMEGIVVKDYEDMIQMTINSLETPVXX

SEQ ID NO: 50903 - protein, 34 aa, Artificial Sequence
  GFR-binding peptide
  MOD_RES (1), (3): Xaa is C or S
XGXSRVVMNVQVEKIVNSSDDVKAVKVSRLKTPA

SEQ ID NO: 50904 - protein, 37 aa, Artificial Sequence
  GFR-binding peptide
  MOD_RES (1), (33), (34): Xaa is C or S
XGEVVMDVTAKKVVKENEDIKRMQVPRLETPVXXAKP

SEQ ID NO: 50905 - protein, 40 aa, Artificial Sequence; identical to SEQ ID NO: 18391
  GFR-binding peptide
  MOD_RES (37), (37): Xaa is C or S

SEQ ID NO: 50906 - protein, 36 aa, Artificial Sequence
  GFR-binding peptide
  MOD_RES (1), (3), (35): Xaa is C or S
XGXSRVVMNVQVEKIVNSSDDVKAVKVSRLKTPAXT

SEQ ID NO: 50907 - protein, 35 aa, Artificial Sequence; identical to SEQ ID NO: 18392
  GFR-binding peptide
  MOD_RES (13), (14), (15), (16), (17): Xaa is A or G
  MOD_RES (18), (19), (20), (21): Xaa is A or G or is absent

SEQ ID NO: 50908 - protein, 39 aa, Artificial Sequence
  GFR-binding peptide
  MOD_RES (1), (3), (34), (35): Xaa is C or S
XKXSKVIMSMEGIIKPTKGIMIQITINSLDQSVXXPSAS

SEQ ID NO: 50909 - protein, 43 aa, Artificial Sequence; identical to SEQ ID NO: 18394
  GFR-binding peptide
  MOD_RES (1), (3), (40): Xaa is C or S
  MOD_RES (16), (17), (18), (19), (20): Xaa is A or G
  MOD_RES (21), (22), (23), (24): Xaa is A or G or is absent

SEQ ID NO: 50910 - protein, 36 aa, Artificial Sequence; identical to SEQ ID NO: 13244
  GFR-binding peptide
  MOD_RES (2), (33), (34): Xaa is C or S

SEQ ID NO: 50911 - protein, 40 aa, Artificial Sequence
  GFR-binding peptide
  MOD_RES (1), (3), (34), (35): Xaa is C or S
XKXSKVVMSMEGIVKPTRGVMIQITINSLDQPVXXPSASA

SEQ ID NO: 50912 - protein, 41 aa, Artificial Sequence; identical to SEQ ID NO: 18395
  GFR-binding peptide
  MOD_RES (1), (3), (37): Xaa is C or S
  MOD_RES (15), (16), (17), (18), (19): Xaa is A or G
  MOD_RES (20), (21), (22), (23): Xaa is A or G or is absent

SEQ ID NO: 50913 - protein, 38 aa, Artificial Sequence
  GFR-binding peptide
  MOD_RES (35), (35): Xaa is C or S
HDELTNSLQEFIPKKRVIEYYVVPLPELQVQTPRXQVN

SEQ ID NO: 50914 - protein, 36 aa, Artificial Sequence; identical to SEQ ID NO: 18397
  GFR-binding peptide
  MOD_RES (35), (35): Xaa is C or S

SEQ ID NO: 50915 - protein, 37 aa, Artificial Sequence; identical to SEQ ID NO: 18398
  GFR-binding peptide
  MOD_RES (2), (4): Xaa is C or S

SEQ ID NO: 50916 - protein, 42 aa, Artificial Sequence
  GFR-binding peptide
  MOD_RES (2), (36): Xaa is C or S
  MOD_RES (14), (15), (16), (17), (18): Xaa is A or G
  MOD_RES (19), (20), (21), (22): Xaa is A or G or is absent
GXSRVVMNVTAKKXXXXXXXXXIKRVQVPRLKTPAXTPKTVH

SEQ ID NO: 50917 - protein, 31 aa, Artificial Sequence; identical to SEQ ID NO: 13255
  GFR-binding peptide
  MOD_RES (31), (31): Xaa is C or S

SEQ ID NO: 50918 - protein, 42 aa, Artificial Sequence; identical to SEQ ID NO: 18402
  GFR-binding peptide
  MOD_RES (1), (3), (40): Xaa is C or S

SEQ ID NO: 50919 - protein, 42 aa, Artificial Sequence; identical to SEQ ID NO: 13256
  GFR-binding peptide
  MOD_RES (1), (3), (37), (38): Xaa is C or S
  MOD_RES (15), (16), (17), (18), (19): Xaa is A or G
  MOD_RES (20), (21), (22), (23): Xaa is A or G or is absent

SEQ ID NO: 50920 - protein, 36 aa, Artificial Sequence
  GFR-binding peptide
  MOD_RES (32), (32): Xaa is C or S
SRVVMNVTAKKIVNSSDDIKRVQVPRLKTPAXTPKT

SEQ ID NO: 50921 - protein, 39 aa, Artificial Sequence
  GFR-binding peptide
  MOD_RES (34), (34): Xaa is C or S
KNHQLFNSLQEHQGQHPKIRYYVMPLPEEETPVXELGED

SEQ ID NO: 50922 - protein, 35 aa, Artificial Sequence; identical to SEQ ID NO: 18408
  GFR-binding peptide
  MOD_RES (33), (33): Xaa is C or S
  MOD_RES (11), (12), (13), (14), (15): Xaa is A or G
  MOD_RES (16), (17), (18), (19): Xaa is A or G or is absent

SEQ ID NO: 50923 - protein, 38 aa, Artificial Sequence; identical to SEQ ID NO: 13258
  GFR-binding peptide
  MOD_RES (2), (4), (35), (36): Xaa is C or S

SEQ ID NO: 50924 - protein, 34 aa, Artificial Sequence; identical to SEQ ID NO: 18410
  GFR-binding peptide
  MOD_RES (13), (14), (15), (16), (17): Xaa is A or G
  MOD_RES (18), (19), (20), (21): Xaa is A or G or is absent

SEQ ID NO: 50925 - protein, 41 aa, Artificial Sequence; identical to SEQ ID NO: 13262
  GFR-binding peptide
  MOD_RES (2), (4), (36), (37): Xaa is C or S

SEQ ID NO: 50926 - protein, 37 aa, Artificial Sequence
  GFR-binding peptide
  MOD_RES (1), (35): Xaa is C or S
  MOD_RES (13), (14), (15), (16), (17): Xaa is A or G
  MOD_RES (18), (19), (20), (21): Xaa is A or G or is absent
XSRVVMNVTAKKXXXXXXXXXIKRVQVPRLKTPAXTP

SEQ ID NO: 50927 - protein, 38 aa, Artificial Sequence
  GFR-binding peptide
  MOD_RES (2), (4), (37), (38): Xaa is C or S
  MOD_RES (15), (16), (17), (18), (19): Xaa is A or G
  MOD_RES (20), (21), (22), (23): Xaa is A or G or is absent
SXKXSRVIMVQVEKXXXXXXXXXVKAIKVSRLAQPVXX

SEQ ID NO: 50928 - protein, 40 aa, Artificial Sequence
  GFR-binding peptide
  MOD_RES (1), (34), (35): Xaa is C or S
  MOD_RES (12), (13), (14), (15), (16): Xaa is A or G
  MOD_RES (17), (18), (19), (20): Xaa is A or G or is absent
XSKVIMVTAKKXXXXXXXXXIKRIQVPRLDQSVXXPSASA

SEQ ID NO: 50929 - protein, 44 aa, Artificial Sequence; identical to SEQ ID NO: 18414
  GFR-binding peptide
  MOD_RES (1), (3), (40): Xaa is C or S
  MOD_RES (16), (17), (18), (19), (20): Xaa is A or G
  MOD_RES (21), (22), (23), (24): Xaa is A or G or is absent

SEQ ID NO: 50930 - protein, 35 aa, Artificial Sequence; identical to SEQ ID NO: 13267
  GFR-binding peptide
  MOD_RES (1), (34), (35): Xaa is C or S
  MOD_RES (12), (13), (14), (15), (16): Xaa is A or G
  MOD_RES (17), (18), (19), (20): Xaa is A or G or is absent

SEQ ID NO: 50931 - protein, 34 aa, Artificial Sequence
  GFR-binding peptide
  MOD_RES (1), (1): Xaa is C or S
  MOD_RES (13), (14), (15), (16), (17): Xaa is A or G
  MOD_RES (18), (19), (20), (21): Xaa is A or G or is absent
XARVVMNVQVEKXXXXXXXXXVKAVKVSRLQTPA

SEQ ID NO: 50932 - protein, 38 aa, Artificial Sequence
  GFR-binding peptide
  MOD_RES (33), (34): Xaa is C or S
  MOD_RES (11), (12), (13), (14), (15): Xaa is A or G
  MOD_RES (16), (17), (18), (19): Xaa is A or G or is absent
EVVMEVQVEKXXXXXXXXXVKAMKVSRLETPVXXAKPI

SEQ ID NO: 50933 - protein, 38 aa, Artificial Sequence
  GFR-binding peptide
  MOD_RES (1), (33), (34): Xaa is C or S
XGEVVMDVTAKKVVKENEDIKRMQVPRLETPVXXAKPI

SEQ ID NO: 50934 - protein, 34 aa, Artificial Sequence; identical to SEQ ID NO: 13269
  GFR-binding peptide
  MOD_RES (31), (32): Xaa is C or S

SEQ ID NO: 50935 - protein, 35 aa, Artificial Sequence
  GFR-binding peptide
  MOD_RES (12), (13), (14), (15), (16): Xaa is A or G
  MOD_RES (17), (18), (19), (20): Xaa is A or G or is absent
LHDELTNSLQEXXXXXXXXXYYVVPLPELQVQTPR

SEQ ID NO: 50936 - protein, 34 aa, Artificial Sequence
  GFR-binding peptide
  MOD_RES (33), (34): Xaa is C or S
  MOD_RES (11), (12), (13), (14), (15): Xaa is A or G
  MOD_RES (16), (17), (18), (19): Xaa is A or G or is absent
SKVVMVTAKKXXXXXXXXXIKRIQVPRLDQPVXX

SEQ ID NO: 50937 - protein, 34 aa, Artificial Sequence
  GFR-binding peptide
  MOD_RES (2), (34): Xaa is C or S
GXGEVVMEVQVEKVVKDYEDVKAMKVSRLETPVX

SEQ ID NO: 50938 - protein, 37 aa, Artificial Sequence
  GFR-binding peptide
  MOD_RES (32), (33): Xaa is C or S
ARVVMNSMEGIIVNSSDDMIQVTINSLQTPAXXPKPV

SEQ ID NO: 50939 - protein, 39 aa, Artificial Sequence
  GFR-binding peptide
  MOD_RES (34), (35): Xaa is C or S
  MOD_RES (12), (13), (14), (15), (16): Xaa is A or G
  MOD_RES (17), (18), (19), (20): Xaa is A or G or is absent
SRVVMNVQVEKXXXXXXXXXVKAVKVSRLKTPAXXPKPV

SEQ ID NO: 50940 - protein, 40 aa, Artificial Sequence
  GFR-binding peptide
  MOD_RES (1), (35), (36): Xaa is C or S
  MOD_RES (13), (14), (15), (16), (17): Xaa is A or G
  MOD_RES (18), (19), (20), (21): Xaa is A or G or is absent
XGEVVMEVQVEKXXXXXXXXXVKAMKVSRLETPVXXAKPI

SEQ ID NO: 50941 - protein, 40 aa, Artificial Sequence
  GFR-binding peptide
  MOD_RES (2), (36), (37): Xaa is C or S
  MOD_RES (14), (15), (16), (17), (18): Xaa is A or G
  MOD_RES (19), (20), (21), (22): Xaa is A or G or is absent
GXSRVVMNVTAKKXXXXXXXXXIKRVQVPRLKTPAXXPKP

SEQ ID NO: 50942 - protein, 34 aa, Artificial Sequence
  GFR-binding peptide
  MOD_RES (2), (34): Xaa is C or S
GXGEVVMDVTAKKVVKENEDIKRMQVPRLETPVX

SEQ ID NO: 50943 - protein, 44 aa, Artificial Sequence
  GFR-binding peptide
  MOD_RES (2), (4), (38), (39): Xaa is C or S
  MOD_RES (16), (17), (18), (19), (20): Xaa is A or G
  MOD_RES (21), (22), (23), (24): Xaa is A or G or is absent
RXGXGEVVMDVQVEKXXXXXXXXXVKAMKVSRLETPVXXAKPIK

SEQ ID NO: 50944 - protein, 39 aa, Artificial Sequence
  GFR-binding peptide
  MOD_RES (37), (37): Xaa is C or S
ALHDELTNSLQEFIPKKRVIEYYLVTLPELQVQTPRXQV

SEQ ID NO: 50945 - protein, 43 aa, Artificial Sequence; identical to SEQ ID NO: 18422
  GFR-binding peptide
  MOD_RES (2), (4), (41): Xaa is C or S

SEQ ID NO: 50946 - protein, 33 aa, Artificial Sequence
  GFR-binding peptide
  MOD_RES (33), (33): Xaa is C or S
  MOD_RES (11), (12), (13), (14), (15): Xaa is A or G
  MOD_RES (16), (17), (18), (19): Xaa is A or G or is absent
SKVIMSMEGIXXXXXXXXXMIQITINSLDQSVX

SEQ ID NO: 50947 - protein, 35 aa, Artificial Sequence; identical to SEQ ID NO: 13276
  GFR-binding peptide
  MOD_RES (33), (34): Xaa is C or S
  MOD_RES (11), (12), (13), (14), (15): Xaa is A or G
  MOD_RES (16), (17), (18), (19): Xaa is A or G or is absent

SEQ ID NO: 50948 - protein, 40 aa, Artificial Sequence; identical to SEQ ID NO: 13277
  GFR-binding peptide
  MOD_RES (1), (3), (35): Xaa is C or S

SEQ ID NO: 50949 - protein, 32 aa, Artificial Sequence
  GFR-binding peptide
  MOD_RES (1), (1): Xaa is C or S
XGEVVMEVTAKKVVKDYEDIKRMQVPRLETPV

SEQ ID NO: 50950 - protein, 35 aa, Artificial Sequence
  GFR-binding peptide
  MOD_RES (1), (32), (33): Xaa is C or S
XSKVIMVQVEKIKPTKGIVKAIKVSRLDQSVXXPS

SEQ ID NO: 50951 - protein, 37 aa, Artificial Sequence
  GFR-binding peptide
  MOD_RES (1), (3), (34), (35): Xaa is C or S
XKXSKVVMVTAKKVKPTRGVIKRIQVPRLDQPVXXPS

SEQ ID NO: 50952 - protein, 38 aa, Artificial Sequence; identical to SEQ ID NO: 18423
  GFR-binding peptide
  MOD_RES (33), (33): Xaa is C or S
  MOD_RES (11), (12), (13), (14), (15): Xaa is A or G
  MOD_RES (16), (17), (18), (19): Xaa is A or G or is absent

SEQ ID NO: 50953 - protein, 34 aa, Artificial Sequence; identical to SEQ ID NO: 13281
  GFR-binding peptide
  MOD_RES (2), (34): Xaa is C or S

SEQ ID NO: 50954 - protein, 37 aa, Artificial Sequence; identical to SEQ ID NO: 13282
  GFR-binding peptide
  MOD_RES (1), (34), (35): Xaa is C or S
  MOD_RES (12), (13), (14), (15), (16): Xaa is A or G
  MOD_RES (17), (18), (19), (20): Xaa is A or G or is absent

SEQ ID NO: 50955 - protein, 37 aa, Artificial Sequence
  GFR-binding peptide
  MOD_RES (1), (3), (35), (36): Xaa is C or S
XGXGEVVMEVTAKKVVKDYEDIKRMQVPRLETPVXXA

SEQ ID NO: 50956 - protein, 38 aa, Artificial Sequence
  GFR-binding peptide
  MOD_RES (33), (34): Xaa is C or S
  MOD_RES (11), (12), (13), (14), (15): Xaa is A or G
  MOD_RES (16), (17), (18), (19): Xaa is A or G or is absent
EVVMEVTAKKXXXXXXXXXIKRMQVPRLETPVXXAKPI

SEQ ID NO: 50957 - protein, 41 aa, Artificial Sequence; identical to SEQ ID NO: 18427
  GFR-binding peptide
  MOD_RES (2), (4), (38): Xaa is C or S

SEQ ID NO: 50958 - protein, 42 aa, Artificial Sequence
  GFR-binding peptide
  MOD_RES (1), (3), (36), (37): Xaa is C or S
  MOD_RES (14), (15), (16), (17), (18): Xaa is A or G
  MOD_RES (19), (20), (21), (22): Xaa is A or G or is absent
XKXSKVIMSMEGIXXXXXXXXXMIQITINSLDQSVXXPSASA

SEQ ID NO: 50959 - protein, 42 aa, Artificial Sequence
  GFR-binding peptide
  MOD_RES (2), (4), (36): Xaa is C or S
HXGXSRVVMNSMEGIIVNSSDDMIQVTINSLKTPAXTPKTVH

SEQ ID NO: 50960 - protein, 42 aa, Artificial Sequence; identical to SEQ ID NO: 13283
  GFR-binding peptide
  MOD_RES (1), (3), (37), (38): Xaa is C or S
  MOD_RES (15), (16), (17), (18), (19): Xaa is A or G
  MOD_RES (20), (21), (22), (23): Xaa is A or G or is absent

SEQ ID NO: 50961 - protein, 36 aa, Artificial Sequence
  GFR-binding peptide
  MOD_RES (1), (3), (34), (35): Xaa is C or S
XKXSRVIMSMEGIVKPKRGVMIQITINSLAQPVXXP

SEQ ID NO: 50962 - protein, 37 aa, Artificial Sequence; identical to SEQ ID NO: 18430
  GFR-binding peptide
  MOD_RES (2), (2): Xaa is C or S
  MOD_RES (15), (16), (17), (18), (19): Xaa is A or G
  MOD_RES (20), (21), (22), (23): Xaa is A or G or is absent

SEQ ID NO: 50963 - protein, 34 aa, Artificial Sequence
  GFR-binding peptide
  MOD_RES (33), (34): Xaa is C or S
  MOD_RES (11), (12), (13), (14), (15): Xaa is A or G
  MOD_RES (16), (17), (18), (19): Xaa is A or G or is absent
SKVVMVQVEKXXXXXXXXXVKAIKVSRLDQPVXX

SEQ ID NO: 50964 - protein, 36 aa, Artificial Sequence
  GFR-binding peptide
  MOD_RES (1), (3), (35), (36): Xaa is C or S
XGXGEVVMEVTAKKVVKDYEDIKRMQVPRLETPVXX

SEQ ID NO: 50965 - protein, 39 aa, Artificial Sequence; identical to SEQ ID NO: 18433
  GFR-binding peptide
  MOD_RES (2), (36): Xaa is C or S

SEQ ID NO: 50966 - protein, 35 aa, Artificial Sequence
  GFR-binding peptide
  MOD_RES (2), (2): Xaa is C or S
  MOD_RES (14), (15), (16), (17), (18): Xaa is A or G
  MOD_RES (19), (20), (21), (22): Xaa is A or G or is absent
EXKNHQLFNSLQEXXXXXXXXXYYVMPLPEEETPV

SEQ ID NO: 50967 - protein, 41 aa, Artificial Sequence
  GFR-binding peptide
  MOD_RES (1), (3), (37), (38): Xaa is C or S
  MOD_RES (15), (16), (17), (18), (19): Xaa is A or G
  MOD_RES (20), (21), (22), (23): Xaa is A or G or is absent
XGXSRVVMNVTAKKXXXXXXXXXIKRVQVPRLKTPAXXPKP

SEQ ID NO: 50968 - protein, 35 aa, Artificial Sequence
  GFR-binding peptide
  MOD_RES (2), (33), (34): Xaa is C or S
KXSKVVMSMEGIVKPTRGVMIQITINSLDQPVXXP

SEQ ID NO: 50969 - protein, 35 aa, Artificial Sequence; identical to SEQ ID NO: 18435
  GFR-binding peptide
  MOD_RES (33), (33): Xaa is C or S
  MOD_RES (11), (12), (13), (14), (15): Xaa is A or G
  MOD_RES (16), (17), (18), (19): Xaa is A or G or is absent

SEQ ID NO: 50970 - protein, 37 aa, Artificial Sequence; identical to SEQ ID NO: 13287
  GFR-binding peptide
  MOD_RES (33), (34): Xaa is C or S
  MOD_RES (11), (12), (13), (14), (15): Xaa is A or G
  MOD_RES (16), (17), (18), (19): Xaa is A or G or is absent

SEQ ID NO: 50971 - protein, 30 aa, Artificial Sequence
  GFR-binding peptide
SKVIMSMEGIIKPTKGIMIQITINSLDQSV

SEQ ID NO: 50972 - protein, 39 aa, Artificial Sequence
  GFR-binding peptide
  MOD_RES (2), (33), (34): Xaa is C or S
KXSKVVMSMEGIVKPTRGVMIQITINSLDQPVXXPSASA

SEQ ID NO: 50973 - protein, 39 aa, Artificial Sequence
  GFR-binding peptide
  MOD_RES (2), (36), (37): Xaa is C or S
  MOD_RES (14), (15), (16), (17), (18): Xaa is A or G
  MOD_RES (19), (20), (21), (22): Xaa is A or G or is absent
GXGEVVMESMEGIXXXXXXXXXMIQMTINSLETPVXXAK

SEQ ID NO: 50974 - protein, 36 aa, Artificial Sequence; identical to SEQ ID NO: 13292
  GFR-binding peptide
  MOD_RES (1), (35), (36): Xaa is C or S
  MOD_RES (13), (14), (15), (16), (17): Xaa is A or G
  MOD_RES (18), (19), (20), (21): Xaa is A or G or is absent

SEQ ID NO: 50975 - protein, 39 aa, Artificial Sequence; identical to SEQ ID NO: 13296
  GFR-binding peptide
  MOD_RES (1), (3), (37): Xaa is C or S
  MOD_RES (15), (16), (17), (18), (19): Xaa is A or G
  MOD_RES (20), (21), (22), (23): Xaa is A or G or is absent

SEQ ID NO: 50976 - protein, 39 aa, Artificial Sequence
  GFR-binding peptide
  MOD_RES (1), (35), (36): Xaa is C or S
  MOD_RES (13), (14), (15), (16), (17): Xaa is A or G
  MOD_RES (18), (19), (20), (21): Xaa is A or G or is absent
XGEVVMESMEGIXXXXXXXXXMIQMTINSLETPVXXAKP

SEQ ID NO: 50977 - protein, 40 aa, Artificial Sequence
  GFR-binding peptide
  MOD_RES (1), (38): Xaa is C or S
  MOD_RES (14), (15), (16), (17), (18): Xaa is A or G
  MOD_RES (19), (20), (21), (22): Xaa is A or G or is absent
XALHDELTNSLQEXXXXXXXXXYYVVPLPELQVQTPRXQV

SEQ ID NO: 50978 - protein, 37 aa, Artificial Sequence; identical to SEQ ID NO: 13297
  GFR-binding peptide
  MOD_RES (34), (35): Xaa is C or S
  MOD_RES (12), (13), (14), (15), (16): Xaa is A or G
  MOD_RES (17), (18), (19), (20): Xaa is A or G or is absent

SEQ ID NO: 50979 - protein, 42 aa, Artificial Sequence
  GFR-binding peptide
  MOD_RES (1), (3), (36), (37): Xaa is C or S
  MOD_RES (14), (15), (16), (17), (18): Xaa is A or G
  MOD_RES (19), (20), (21), (22): Xaa is A or G or is absent
XKXSRVIMSMEGIXXXXXXXXXMIQITINSLAQPVXXPAASA

SEQ ID NO: 50980 - protein, 33 aa, Artificial Sequence
  GFR-binding peptide
  MOD_RES (31), (32): Xaa is C or S
SKVIMVTAKKIKPTKGIIKRIQVPRLDQSVXXP

SEQ ID NO: 50981 - protein, 37 aa, Artificial Sequence
  GFR-binding peptide
  MOD_RES (35), (35): Xaa is C or S
HEELRNSLQELKPKKRVYEYYVVPLPEHHVRSPQXKV

SEQ ID NO: 50982 - protein, 36 aa, Artificial Sequence
  GFR-binding peptide
  MOD_RES (34), (34): Xaa is C or S
  MOD_RES (12), (13), (14), (15), (16): Xaa is A or G
  MOD_RES (17), (18), (19), (20): Xaa is A or G or is absent
SRVVMNVTAKKXXXXXXXXXIKRVQVPRLKTPAXTP

SEQ ID NO: 50983 - protein, 34 aa, Artificial Sequence
  GFR-binding peptide
HDELTNSLQEFIPKKRVIEYYVVPLPELQVQTPR

SEQ ID NO: 50984 - protein, 38 aa, Artificial Sequence; identical to SEQ ID NO: 18444
  GFR-binding peptide
  MOD_RES (1), (38): Xaa is C or S
  MOD_RES (14), (15), (16), (17), (18): Xaa is A or G
  MOD_RES (19), (20), (21), (22): Xaa is A or G or is absent

SEQ ID NO: 50985 - protein, 34 aa, Artificial Sequence
  GFR-binding peptide
  MOD_RES (31), (32): Xaa is C or S
SKVVMSMEGIVKPTRGVMIQITINSLDQPVXXPS

SEQ ID NO: 50986 - protein, 43 aa, Artificial Sequence
  GFR-binding peptide
  MOD_RES (2), (4), (38), (39): Xaa is C or S
  MOD_RES (16), (17), (18), (19), (20): Xaa is A or G
  MOD_RES (21), (22), (23), (24): Xaa is A or G or is absent
RXGXGEVVMDSMEGIXXXXXXXXXMIQMTINSLETPVXXAKPI

SEQ ID NO: 50987 - protein, 41 aa, Artificial Sequence
  GFR-binding peptide
  MOD_RES (1), (3), (37), (38): Xaa is C or S
  MOD_RES (15), (16), (17), (18), (19): Xaa is A or G
  MOD_RES (20), (21), (22), (23): Xaa is A or G or is absent
XGXSRVVMNSMEGIXXXXXXXXXMIQVTINSLKTPAXXPKP

SEQ ID NO: 50988 - protein, 36 aa, Artificial Sequence; identical to SEQ ID NO: 18445
  GFR-binding peptide
  MOD_RES (1), (35): Xaa is C or S

SEQ ID NO: 50989 - protein, 33 aa, Artificial Sequence
  GFR-binding peptide
  MOD_RES (2), (33): Xaa is C or S
KXSKVVMVQVEKVKPTRGVVKAIKVSRLDQPVX

SEQ ID NO: 50990 - protein, 39 aa, Artificial Sequence
  GFR-binding peptide
  MOD_RES (2), (4), (36): Xaa is C or S
HXGXSRVVMNSMEGIIVNSSDDMIQVTINSLKTPAXTPK

SEQ ID NO: 50991 - protein, 35 aa, Artificial Sequence; identical to SEQ ID NO: 18446
  GFR-binding peptide
  MOD_RES (13), (14), (15), (16), (17): Xaa is A or G
  MOD_RES (18), (19), (20), (21): Xaa is A or G or is absent

SEQ ID NO: 50992 - protein, 37 aa, Artificial Sequence; identical to SEQ ID NO: 18447
  GFR-binding peptide
  MOD_RES (37), (37): Xaa is C or S
  MOD_RES (13), (14), (15), (16), (17): Xaa is A or G
  MOD_RES (18), (19), (20), (21): Xaa is A or G or is absent

SEQ ID NO: 50993 - protein, 36 aa, Artificial Sequence
  GFR-binding peptide
  MOD_RES (1), (33), (34): Xaa is C or S
XSRVVMNVTAKKIVNSSDDIKRVQVPRLKTPAXXPK

SEQ ID NO: 50994 - protein, 40 aa, Artificial Sequence; identical to SEQ ID NO: 18448
  GFR-binding peptide
  MOD_RES (1), (3), (40): Xaa is C or S

SEQ ID NO: 50995 - protein, 36 aa, Artificial Sequence; identical to SEQ ID NO: 13303
  GFR-binding peptide
  MOD_RES (1), (32), (33): Xaa is C or S

SEQ ID NO: 50996 - protein, 34 aa, Artificial Sequence
  GFR-binding peptide
  MOD_RES (1), (32), (33): Xaa is C or S
XSKVVMSMEGIVKPTRGVMIQITINSLDQPVXXP

SEQ ID NO: 50997 - protein, 40 aa, Artificial Sequence; identical to SEQ ID NO: 18449
  GFR-binding peptide
  MOD_RES (36), (36): Xaa is C or S

SEQ ID NO: 50998 - protein, 36 aa, Artificial Sequence
  GFR-binding peptide
  MOD_RES (1), (33), (34): Xaa is C or S
XARVVMNVQVEKIVNSSDDVKAVKVSRLQTPAXXPK

SEQ ID NO: 50999 - protein, 35 aa, Artificial Sequence; identical to SEQ ID NO: 13307
  GFR-binding peptide
  MOD_RES (33), (34): Xaa is C or S
  MOD_RES (11), (12), (13), (14), (15): Xaa is A or G
  MOD_RES (16), (17), (18), (19): Xaa is A or G or is absent

SEQ ID NO: 51000 - protein, 39 aa, Artificial Sequence
  GFR-binding peptide
  MOD_RES (2), (4), (37), (38): Xaa is C or S
  MOD_RES (15), (16), (17), (18), (19): Xaa is A or G
  MOD_RES (20), (21), (22), (23): Xaa is A or G or is absent
SXKXSRVIMVQVEKXXXXXXXXXVKAIKVSRLAQPVXXP

SEQ ID NO: 51001 - protein, 41 aa, Artificial Sequence; identical to SEQ ID NO: 13310
  GFR-binding peptide
  MOD_RES (1), (3), (35): Xaa is C or S

SEQ ID NO: 51002 - protein, 37 aa, Artificial Sequence; identical to SEQ ID NO: 13311
  GFR-binding peptide
  MOD_RES (1), (3), (37): Xaa is C or S
  MOD_RES (15), (16), (17), (18), (19): Xaa is A or G
  MOD_RES (20), (21), (22), (23): Xaa is A or G or is absent

SEQ ID NO: 51003 - protein, 38 aa, Artificial Sequence; identical to SEQ ID NO: 13312
  GFR-binding peptide
  MOD_RES (1), (35), (36): Xaa is C or S
  MOD_RES (13), (14), (15), (16), (17): Xaa is A or G
  MOD_RES (18), (19), (20), (21): Xaa is A or G or is absent

SEQ ID NO: 51004 - protein, 39 aa, Artificial Sequence
  GFR-binding peptide
  MOD_RES (1), (34), (35): Xaa is C or S
  MOD_RES (12), (13), (14), (15), (16): Xaa is A or G
  MOD_RES (17), (18), (19), (20): Xaa is A or G or is absent
XSKVIMSMEGIXXXXXXXXXMIQITINSLDQSVXXPSAS

SEQ ID NO: 51005 - protein, 35 aa, Artificial Sequence
  GFR-binding peptide
  MOD_RES (31), (31): Xaa is C or S
RVVMNVQVEKIVNSSDDVKAVKVSRLKTPAXTPKT

SEQ ID NO: 51006 - protein, 37 aa, Artificial Sequence; identical to SEQ ID NO: 18452
  GFR-binding peptide
  MOD_RES (1), (3), (37): Xaa is C or S

SEQ ID NO: 51007 - protein, 41 aa, Artificial Sequence
  GFR-binding peptide
  MOD_RES (2), (36): Xaa is C or S
  MOD_RES (14), (15), (16), (17), (18): Xaa is A or G
  MOD_RES (19), (20), (21), (22): Xaa is A or G or is absent
GXSRVVMNSMEGIXXXXXXXXXMIQVTINSLKTPAXTPKTV

SEQ ID NO: 51008 - protein, 37 aa, Artificial Sequence
  GFR-binding peptide
  MOD_RES (1), (3), (35), (36): Xaa is C or S
XGXGEVVMDVTAKKVVKENEDIKRMQVPRLETPVXXA

SEQ ID NO: 51009 - protein, 43 aa, Artificial Sequence
  GFR-binding peptide
  MOD_RES (2), (4), (38), (39): Xaa is C or S
  MOD_RES (16), (17), (18), (19), (20): Xaa is A or G
  MOD_RES (21), (22), (23), (24): Xaa is A or G or is absent
HXGXSRVVMNVTAKKXXXXXXXXXIKRVQVPRLKTPAXXPKPV

SEQ ID NO: 51010 - protein, 34 aa, Artificial Sequence; identical to SEQ ID NO: 13315
  GFR-binding peptide
  MOD_RES (2), (2): Xaa is C or S
  MOD_RES (13), (14), (15), (16), (17): Xaa is A or G
  MOD_RES (18), (19), (20), (21): Xaa is A or G or is absent

SEQ ID NO: 51011 - protein, 34 aa, Artificial Sequence; identical to SEQ ID NO: 18454
  GFR-binding peptide
  MOD_RES (33), (33): Xaa is C or S

SEQ ID NO: 51012 - protein, 36 aa, Artificial Sequence
  GFR-binding peptide
  MOD_RES (33), (34): Xaa is C or S
  MOD_RES (11), (12), (13), (14), (15): Xaa is A or G
  MOD_RES (16), (17), (18), (19): Xaa is A or G or is absent
RVVMNVTAKKXXXXXXXXXIKRVQVPRLQTPAXXPK

SEQ ID NO: 51013 - protein, 36 aa, Artificial Sequence
  GFR-binding peptide
  MOD_RES (31), (32): Xaa is C or S
SKVIMVQVEKIKPTKGIVKAIKVSRLDQSVXXPSAS

SEQ ID NO: 51014 - protein, 38 aa, Artificial Sequence
  GFR-binding peptide
  MOD_RES (1), (3), (34), (35): Xaa is C or S
XKXSKVVMSMEGIVKPTRGVMIQITINSLDQPVXXPSA

SEQ ID NO: 51015 - protein, 38 aa, Artificial Sequence
  GFR-binding peptide
  MOD_RES (1), (3), (34), (35): Xaa is C or S
XKXSKVVMVQVEKVKPTRGVVKAIKVSRLDQPVXXPSA

SEQ ID NO: 51016 - protein, 42 aa, Artificial Sequence; identical to SEQ ID NO: 18457
  GFR-binding peptide
  MOD_RES (2), (4), (41): Xaa is C or S

SEQ ID NO: 51017 - protein, 38 aa, Artificial Sequence
  GFR-binding peptide
  MOD_RES (2), (36): Xaa is C or S
  MOD_RES (14), (15), (16), (17), (18): Xaa is A or G
  MOD_RES (19), (20), (21), (22): Xaa is A or G or is absent
GXSRVVMNSMEGIXXXXXXXXXMIQVTINSLKTPAXTP

SEQ ID NO: 51018 - protein, 41 aa, Artificial Sequence; identical to SEQ ID NO: 18459
  GFR-binding peptide
  MOD_RES (2), (4), (41): Xaa is C or S

SEQ ID NO: 51019 - protein, 36 aa, Artificial Sequence
  GFR-binding peptide
  MOD_RES (1), (3), (35), (36): Xaa is C or S
XGXGEVVMDVTAKKVVKENEDIKRMQVPRLETPVXX

SEQ ID NO: 51020 - protein, 40 aa, Artificial Sequence; identical to SEQ ID NO: 13320
  GFR-binding peptide
  MOD_RES (1), (3), (35), (36): Xaa is C or S

SEQ ID NO: 51021 - protein, 33 aa, Artificial Sequence
  GFR-binding peptide
  MOD_RES (1), (33): Xaa is C or S
XGEVVMEVQVEKVVKDYEDVKAMKVSRLETPVX

SEQ ID NO: 51022 - protein, 38 aa, Artificial Sequence; identical to SEQ ID NO: 13322
  GFR-binding peptide
  MOD_RES (34), (35): Xaa is C or S
  MOD_RES (12), (13), (14), (15), (16): Xaa is A or G
  MOD_RES (17), (18), (19), (20): Xaa is A or G or is absent

SEQ ID NO: 51023 - protein, 34 aa, Artificial Sequence
  GFR-binding peptide
  MOD_RES (12), (13), (14), (15), (16): Xaa is A or G
  MOD_RES (17), (18), (19), (20): Xaa is A or G or is absent
LHEELRNSLQEXXXXXXXXXYYLVTLPEHHVRSP

SEQ ID NO: 51024 - protein, 35 aa, Artificial Sequence; identical to SEQ ID NO: 13323
  GFR-binding peptide
  MOD_RES (2), (4): Xaa is C or S

SEQ ID NO: 51025 - protein, 33 aa, Artificial Sequence
  GFR-binding peptide
  MOD_RES (2), (33): Xaa is C or S
KXSKVIMVQVEKIKPTKGIVKAIKVSRLDQSVX

SEQ ID NO: 51026 - protein, 33 aa, Artificial Sequence; identical to SEQ ID NO: 13326
  GFR-binding peptide
  MOD_RES (1), (33): Xaa is C or S

SEQ ID NO: 51027 - protein, 34 aa, Artificial Sequence; identical to SEQ ID NO: 13328
  GFR-binding peptide
  MOD_RES (32), (33): Xaa is C or S

SEQ ID NO: 51028 - protein, 36 aa, Artificial Sequence; identical to SEQ ID NO: 13329
  GFR-binding peptide
  MOD_RES (1), (3): Xaa is C or S
  MOD_RES (15), (16), (17), (18), (19): Xaa is A or G
  MOD_RES (20), (21), (22), (23): Xaa is A or G or is absent

SEQ ID NO: 51029 - protein, 38 aa, Artificial Sequence; identical to SEQ ID NO: 18468
  GFR-binding peptide
  MOD_RES (2), (4): Xaa is C or S
  MOD_RES (17), (18), (19), (20), (21): Xaa is A or G
  MOD_RES (22), (23), (24), (25): Xaa is A or G or is absent

SEQ ID NO: 51030 - protein, 37 aa, Artificial Sequence
  GFR-binding peptide
  MOD_RES (2), (4), (37): Xaa is C or S
  MOD_RES (15), (16), (17), (18), (19): Xaa is A or G
  MOD_RES (20), (21), (22), (23): Xaa is A or G or is absent
SXKXSKVIMVQVEKXXXXXXXXXVKAIKVSRLDQSVX

SEQ ID NO: 51031 - protein, 35 aa, Artificial Sequence; identical to SEQ ID NO: 13335
  GFR-binding peptide
  MOD_RES (32), (33): Xaa is C or S

SEQ ID NO: 51032 - protein, 35 aa, Artificial Sequence
  GFR-binding peptide
  MOD_RES (2), (4): Xaa is C or S
RXGXGEVVMDVTAKKVVKENEDIKRMQVPRLETPV

SEQ ID NO: 51033 - protein, 39 aa, Artificial Sequence
  GFR-binding peptide
  MOD_RES (2), (33), (34): Xaa is C or S
KXSKVIMSMEGIIKPTKGIMIQITINSLDQSVXXPSASA

SEQ ID NO: 51034 - protein, 36 aa, Artificial Sequence
  GFR-binding peptide
  MOD_RES (1), (3), (35), (36): Xaa is C or S
XGXSRVVMNVTAKKIVNSSDDIKRVQVPRLKTPAXX

SEQ ID NO: 51035 - protein, 38 aa, Artificial Sequence
  GFR-binding peptide
  MOD_RES (1), (3), (36), (37): Xaa is C or S
  MOD_RES (14), (15), (16), (17), (18): Xaa is A or G
  MOD_RES (19), (20), (21), (22): Xaa is A or G or is absent
XKXSRVIMVQVEKXXXXXXXXXVKAIKVSRLAQPVXXP

SEQ ID NO: 51036 - protein, 33 aa, Artificial Sequence; identical to SEQ ID NO: 13344
  GFR-binding peptide
  MOD_RES (32), (33): Xaa is C or S

SEQ ID NO: 51037 - protein, 34 aa, Artificial Sequence
  GFR-binding peptide
  MOD_RES (11), (12), (13), (14), (15): Xaa is A or G
  MOD_RES (16), (17), (18), (19): Xaa is A or G or is absent
HDELTNSLQEXXXXXXXXXYYLVTLPELQVQTPR

SEQ ID NO: 51038 - protein, 37 aa, Artificial Sequence
  GFR-binding peptide
  MOD_RES (1), (33), (34): Xaa is C or S
XARVVMNSMEGIIVNSSDDMIQVTINSLQTPAXXPKP

SEQ ID NO: 51039 - protein, 40 aa, Artificial Sequence
  GFR-binding peptide
  MOD_RES (1), (3), (37): Xaa is C or S
  MOD_RES (15), (16), (17), (18), (19): Xaa is A or G
  MOD_RES (20), (21), (22), (23): Xaa is A or G or is absent
XGXSRVVMNVQVEKXXXXXXXXXVKAVKVSRLKTPAXTPK

SEQ ID NO: 51040 - protein, 34 aa, Artificial Sequence
  GFR-binding peptide
  MOD_RES (11), (12), (13), (14), (15): Xaa is A or G
  MOD_RES (16), (17), (18), (19): Xaa is A or G or is absent
HDELTNSLQEXXXXXXXXXYYVVPLPELQVQTPR

SEQ ID NO: 51041 - protein, 38 aa, Artificial Sequence
  GFR-binding peptide
  MOD_RES (2), (34): Xaa is C or S
GXSRVVMNVQVEKIVNSSDDVKAVKVSRLKTPAXTPKT

SEQ ID NO: 51042 - protein, 39 aa, Artificial Sequence; identical to SEQ ID NO: 18480
  GFR-binding peptide
  MOD_RES (2), (39): Xaa is C or S

SEQ ID NO: 51043 - protein, 40 aa, Artificial Sequence
  GFR-binding peptide
  MOD_RES (1), (35), (36): Xaa is C or S
  MOD_RES (13), (14), (15), (16), (17): Xaa is A or G
  MOD_RES (18), (19), (20), (21): Xaa is A or G or is absent
XGEVVMDSMEGIXXXXXXXXXMIQMTINSLETPVXXAKPI

SEQ ID NO: 51044 - protein, 41 aa, Artificial Sequence
  GFR-binding peptide
  MOD_RES (2), (4), (41): Xaa is C or S
AXAXELHEELRNSLQELKPKKRVYEYYLVTLPEHHVRSPQX

SEQ ID NO: 51045 - protein, 36 aa, Artificial Sequence
  GFR-binding peptide
  MOD_RES (2), (4), (36): Xaa is C or S
RXGXGEVVMDSMEGIVVKENEDMIQMTINSLETPVX

SEQ ID NO: 51046 - protein, 41 aa, Artificial Sequence; identical to SEQ ID NO: 13350
  GFR-binding peptide
  MOD_RES (2), (4), (38), (39): Xaa is C or S
  MOD_RES (16), (17), (18), (19), (20): Xaa is A or G
  MOD_RES (21), (22), (23), (24): Xaa is A or G or is absent

SEQ ID NO: 51047 - protein, 36 aa, Artificial Sequence; identical to SEQ ID NO: 13352
  GFR-binding peptide
  MOD_RES (33), (33): Xaa is C or S
  MOD_RES (11), (12), (13), (14), (15): Xaa is A or G
  MOD_RES (16), (17), (18), (19): Xaa is A or G or is absent

SEQ ID NO: 51048 - protein, 37 aa, Artificial Sequence
  GFR-binding peptide
  MOD_RES (37), (37): Xaa is C or S
  MOD_RES (13), (14), (15), (16), (17): Xaa is A or G
  MOD_RES (18), (19), (20), (21): Xaa is A or G or is absent
ELHEELRNSLQEXXXXXXXXXYYVVPLPEHHVRSPQX

SEQ ID NO: 51049 - protein, 37 aa, Artificial Sequence
  GFR-binding peptide
  MOD_RES (2), (36), (37): Xaa is C or S
  MOD_RES (14), (15), (16), (17), (18): Xaa is A or G
  MOD_RES (19), (20), (21), (22): Xaa is A or G or is absent
GXARVVMNSMEGIXXXXXXXXXMIQVTINSLQTPAXX

SEQ ID NO: 51050 - protein, 36 aa, Artificial Sequence; identical to SEQ ID NO: 18485
  GFR-binding peptide
  MOD_RES (1), (1): Xaa is C or S

SEQ ID NO: 51051 - protein, 39 aa, Artificial Sequence
  GFR-binding peptide
  MOD_RES (34), (35): Xaa is C or S
  MOD_RES (12), (13), (14), (15), (16): Xaa is A or G
  MOD_RES (17), (18), (19), (20): Xaa is A or G or is absent
GEVVMESMEGIXXXXXXXXXMIQMTINSLETPVXXAKPI

SEQ ID NO: 51052 - protein, 37 aa, Artificial Sequence
  GFR-binding peptide
  MOD_RES (1), (35), (36): Xaa is C or S
  MOD_RES (13), (14), (15), (16), (17): Xaa is A or G
  MOD_RES (18), (19), (20), (21): Xaa is A or G or is absent
XGEVVMEVTAKKXXXXXXXXXIKRMQVPRLETPVXXA

SEQ ID NO: 51053 - protein, 35 aa, Artificial Sequence; identical to SEQ ID NO: 13355
  GFR-binding peptide
  MOD_RES (31), (31): Xaa is C or S

SEQ ID NO: 51054 - protein, 39 aa, Artificial Sequence
  GFR-binding peptide
  MOD_RES (1), (35), (36): Xaa is C or S
  MOD_RES (13), (14), (15), (16), (17): Xaa is A or G
  MOD_RES (18), (19), (20), (21): Xaa is A or G or is absent
XSRVVMNVTAKKXXXXXXXXXIKRVQVPRLKTPAXXPKP

SEQ ID NO: 51055 - protein, 38 aa, Artificial Sequence; identical to SEQ ID NO: 13358
  GFR-binding peptide
  MOD_RES (2), (4), (38): Xaa is C or S
  MOD_RES (16), (17), (18), (19), (20): Xaa is A or G
  MOD_RES (21), (22), (23), (24): Xaa is A or G or is absent

SEQ ID NO: 51056 - protein, 37 aa, Artificial Sequence; identical to SEQ ID NO: 18490
  GFR-binding peptide
  MOD_RES (2), (2): Xaa is C or S

SEQ ID NO: 51057 - protein, 38 aa, Artificial Sequence; identical to SEQ ID NO: 18491
  GFR-binding peptide
  MOD_RES (35), (35): Xaa is C or S
  MOD_RES (11), (12), (13), (14), (15): Xaa is A or G
  MOD_RES (16), (17), (18), (19): Xaa is A or G or is absent

SEQ ID NO: 51058 - protein, 37 aa, Artificial Sequence; identical to SEQ ID NO: 18492
  GFR-binding peptide
  MOD_RES (34), (34): Xaa is C or S
  MOD_RES (12), (13), (14), (15), (16): Xaa is A or G
  MOD_RES (17), (18), (19), (20): Xaa is A or G or is absent

SEQ ID NO: 51059 - protein, 36 aa, Artificial Sequence
  GFR-binding peptide
  MOD_RES (33), (34): Xaa is C or S
  MOD_RES (11), (12), (13), (14), (15): Xaa is A or G
  MOD_RES (16), (17), (18), (19): Xaa is A or G or is absent
SKVIMVTAKKXXXXXXXXXIKRIQVPRLDQSVXXPS

SEQ ID NO: 51060 - protein, 35 aa, Artificial Sequence
  GFR-binding peptide
  MOD_RES (2), (34), (35): Xaa is C or S
GXGEVVMESMEGIVVKDYEDMIQMTINSLETPVXX

SEQ ID NO: 51061 - protein, 37 aa, Artificial Sequence; identical to SEQ ID NO: 18494
  GFR-binding peptide
  MOD_RES (1), (3): Xaa is C or S
  MOD_RES (16), (17), (18), (19), (20): Xaa is A or G
  MOD_RES (21), (22), (23), (24): Xaa is A or G or is absent

SEQ ID NO: 51062 - protein, 34 aa, Artificial Sequence; identical to SEQ ID NO: 13363
  GFR-binding peptide
  MOD_RES (1), (1): Xaa is C or S
  MOD_RES (13), (14), (15), (16), (17): Xaa is A or G
  MOD_RES (18), (19), (20), (21): Xaa is A or G or is absent

SEQ ID NO: 51063 - protein, 36 aa, Artificial Sequence; identical to SEQ ID NO: 38147
  GFR-binding peptide
  MOD_RES (31), (32): Xaa is C or S

SEQ ID NO: 51064 - protein, 36 aa, Artificial Sequence; identical to SEQ ID NO: 13366
  GFR-binding peptide
  MOD_RES (1), (3): Xaa is C or S
  MOD_RES (15), (16), (17), (18), (19): Xaa is A or G
  MOD_RES (20), (21), (22), (23): Xaa is A or G or is absent

SEQ ID NO: 51065 - protein, 37 aa, Artificial Sequence; identical to SEQ ID NO: 13368
  GFR-binding peptide
  MOD_RES (31), (32): Xaa is C or S

SEQ ID NO: 51066 - protein, 32 aa, Artificial Sequence; identical to SEQ ID NO: 18496
  GFR-binding peptide
  MOD_RES (11), (12), (13), (14), (15): Xaa is A or G
  MOD_RES (16), (17), (18), (19): Xaa is A or G or is absent

SEQ ID NO: 51067 - protein, 33 aa, Artificial Sequence; identical to SEQ ID NO: 13371
  GFR-binding peptide
  MOD_RES (1), (32), (33): Xaa is C or S

SEQ ID NO: 51068 - protein, 41 aa, Artificial Sequence; identical to SEQ ID NO: 13373
  GFR-binding peptide
  MOD_RES (1), (3), (35), (36): Xaa is C or S

SEQ ID NO: 51069 - protein, 33 aa, Artificial Sequence
  GFR-binding peptide
  MOD_RES (33), (33): Xaa is C or S
  MOD_RES (11), (12), (13), (14), (15): Xaa is A or G
  MOD_RES (16), (17), (18), (19): Xaa is A or G or is absent
RVVMNVTAKKXXXXXXXXXIKRVQVPRLQTPAX

SEQ ID NO: 51070 - protein, 39 aa, Artificial Sequence
  GFR-binding peptide
  MOD_RES (2), (4), (38), (39): Xaa is C or S
  MOD_RES (16), (17), (18), (19), (20): Xaa is A or G
  MOD_RES (21), (22), (23), (24): Xaa is A or G or is absent
HXGXARVVMNVTAKKXXXXXXXXXIKRVQVPRLQTPAXX

SEQ ID NO: 51071 - protein, 40 aa, Artificial Sequence; identical to SEQ ID NO: 13374
  GFR-binding peptide
  MOD_RES (2), (4), (37), (38): Xaa is C or S
  MOD_RES (15), (16), (17), (18), (19): Xaa is A or G
  MOD_RES (20), (21), (22), (23): Xaa is A or G or is absent

SEQ ID NO: 51072 - protein, 34 aa, Artificial Sequence; identical to SEQ ID NO: 13375
  GFR-binding peptide
  MOD_RES (1), (3), (34): Xaa is C or S

SEQ ID NO: 51073 - protein, 37 aa, Artificial Sequence; identical to SEQ ID NO: 18498
  GFR-binding peptide
  MOD_RES (1), (3): Xaa is C or S
  MOD_RES (16), (17), (18), (19), (20): Xaa is A or G
  MOD_RES (21), (22), (23), (24): Xaa is A or G or is absent

SEQ ID NO: 51074 - protein, 40 aa, Artificial Sequence
  GFR-binding peptide
  MOD_RES (1), (3), (40): Xaa is C or S
XKXALHDELTNSLQEFIPKKRVIEYYVVPLPELQVQTPRX

SEQ ID NO: 51075 - protein, 41 aa, Artificial Sequence
  GFR-binding peptide
  MOD_RES (1), (3), (37), (38): Xaa is C or S
  MOD_RES (15), (16), (17), (18), (19): Xaa is A or G
  MOD_RES (20), (21), (22), (23): Xaa is A or G or is absent
XGXSRVVMNVQVEKXXXXXXXXXVKAVKVSRLKTPAXXPKP

SEQ ID NO: 51076 - protein, 35 aa, Artificial Sequence
  GFR-binding peptide
  MOD_RES (2), (4): Xaa is C or S
HXGXSRVVMNVTAKKIVNSSDDIKRVQVPRLKTPA

SEQ ID NO: 51077 - protein, 36 aa, Artificial Sequence
  GFR-binding peptide
  MOD_RES (34), (35): Xaa is C or S
  MOD_RES (12), (13), (14), (15), (16): Xaa is A or G
  MOD_RES (17), (18), (19), (20): Xaa is A or G or is absent
GEVVMEVQVEKXXXXXXXXXVKAMKVSRLETPVXXA

SEQ ID NO: 51078 - protein, 36 aa, Artificial Sequence; identical to SEQ ID NO: 13376
  GFR-binding peptide
  MOD_RES (1), (3), (35), (36): Xaa is C or S

SEQ ID NO: 51079 - protein, 32 aa, Artificial Sequence
  GFR-binding peptide
  MOD_RES (2), (2): Xaa is C or S
KXSKVVMSMEGIVKPTRGVMIQITINSLDQPV

SEQ ID NO: 51080 - protein, 33 aa, Artificial Sequence
  GFR-binding peptide
  MOD_RES (2), (2): Xaa is C or S
GXARVVMNVTAKKIVNSSDDIKRVQVPRLQTPA

SEQ ID NO: 51081 - protein, 38 aa, Artificial Sequence; identical to SEQ ID NO: 18500
  GFR-binding peptide
  MOD_RES (36), (36): Xaa is C or S

SEQ ID NO: 51082 - protein, 41 aa, Artificial Sequence
  GFR-binding peptide
  MOD_RES (1), (3), (35), (36): Xaa is C or S
XGXSRVVMNVTAKKIVNSSDDIKRVQVPRLKTPAXXPKPVY

SEQ ID NO: 51083 - protein, 35 aa, Artificial Sequence; identical to SEQ ID NO: 13380
  GFR-binding peptide
  MOD_RES (1), (34), (35): Xaa is C or S
  MOD_RES (12), (13), (14), (15), (16): Xaa is A or G
  MOD_RES (17), (18), (19), (20): Xaa is A or G or is absent

SEQ ID NO: 51084 - protein, 34 aa, Artificial Sequence; identical to SEQ ID NO: 18508
  GFR-binding peptide
  MOD_RES (12), (13), (14), (15), (16): Xaa is A or G
  MOD_RES (17), (18), (19), (20): Xaa is A or G or is absent

SEQ ID NO: 51085 - protein, 42 aa, Artificial Sequence
  GFR-binding peptide
  MOD_RES (2), (4), (38): Xaa is C or S
  MOD_RES (16), (17), (18), (19), (20): Xaa is A or G
  MOD_RES (21), (22), (23), (24): Xaa is A or G or is absent
RXEXKNHQLFNSLQEXXXXXXXXXYYLMTLPEEETPVXELGE

SEQ ID NO: 51086 - protein, 38 aa, Artificial Sequence; identical to SEQ ID NO: 13384
  GFR-binding peptide
  MOD_RES (1), (33): Xaa is C or S

SEQ ID NO: 51087 - protein, 34 aa, Artificial Sequence; identical to SEQ ID NO: 13385
  GFR-binding peptide
  MOD_RES (1), (1): Xaa is C or S
  MOD_RES (13), (14), (15), (16), (17): Xaa is A or G
  MOD_RES (18), (19), (20), (21): Xaa is A or G or is absent

SEQ ID NO: 51088 - protein, 36 aa, Artificial Sequence; identical to SEQ ID NO: 13386
  GFR-binding peptide
  MOD_RES (33), (34): Xaa is C or S
  MOD_RES (11), (12), (13), (14), (15): Xaa is A or G
  MOD_RES (16), (17), (18), (19): Xaa is A or G or is absent

SEQ ID NO: 51089 - protein, 37 aa, Artificial Sequence
  GFR-binding peptide
  MOD_RES (2), (4), (36): Xaa is C or S
HXGXSRVVMNSMEGIIVNSSDDMIQVTINSLKTPAXT

SEQ ID NO: 51090 - protein, 35 aa, Artificial Sequence; identical to SEQ ID NO: 18509
  GFR-binding peptide
  MOD_RES (12), (13), (14), (15), (16): Xaa is A or G
  MOD_RES (17), (18), (19), (20): Xaa is A or G or is absent

SEQ ID NO: 51091 - protein, 40 aa, Artificial Sequence; identical to SEQ ID NO: 13387
  GFR-binding peptide
  MOD_RES (1), (3), (37), (38): Xaa is C or S
  MOD_RES (15), (16), (17), (18), (19): Xaa is A or G
  MOD_RES (20), (21), (22), (23): Xaa is A or G or is absent

SEQ ID NO: 51092 - protein, 37 aa, Artificial Sequence
  GFR-binding peptide
  MOD_RES (2), (36), (37): Xaa is C or S
  MOD_RES (14), (15), (16), (17), (18): Xaa is A or G
  MOD_RES (19), (20), (21), (22): Xaa is A or G or is absent
GXGEVVMDSMEGIXXXXXXXXXMIQMTINSLETPVXX

SEQ ID NO: 51093 - protein, 37 aa, Artificial Sequence; identical to SEQ ID NO: 13390
  GFR-binding peptide
  MOD_RES (32), (33): Xaa is C or S

SEQ ID NO: 51094 - protein, 35 aa, Artificial Sequence; identical to SEQ ID NO: 18512
  GFR-binding peptide
  MOD_RES (1), (1): Xaa is C or S

SEQ ID NO: 51095 - protein, 32 aa, Artificial Sequence; identical to SEQ ID NO: 13393
  GFR-binding peptide
  MOD_RES (11), (12), (13), (14), (15): Xaa is A or G
  MOD_RES (16), (17), (18), (19): Xaa is A or G or is absent

SEQ ID NO: 51096 - protein, 39 aa, Artificial Sequence
  GFR-binding peptide
  MOD_RES (1), (3), (37): Xaa is C or S
  MOD_RES (15), (16), (17), (18), (19): Xaa is A or G
  MOD_RES (20), (21), (22), (23): Xaa is A or G or is absent
XGXSRVVMNVQVEKXXXXXXXXXVKAVKVSRLKTPAXTP

SEQ ID NO: 51097 - protein, 37 aa, Artificial Sequence
  GFR-binding peptide
  MOD_RES (33), (34): Xaa is C or S
  MOD_RES (11), (12), (13), (14), (15): Xaa is A or G
  MOD_RES (16), (17), (18), (19): Xaa is A or G or is absent
EVVMDVQVEKXXXXXXXXXVKAMKVSRLETPVXXAKP

SEQ ID NO: 51098 - protein, 35 aa, Artificial Sequence
  GFR-binding peptide
  MOD_RES (34), (35): Xaa is C or S
  MOD_RES (12), (13), (14), (15), (16): Xaa is A or G
  MOD_RES (17), (18), (19), (20): Xaa is A or G or is absent
SRVVMNVQVEKXXXXXXXXXVKAVKVSRLKTPAXX

SEQ ID NO: 51099 - protein, 34 aa, Artificial Sequence; identical to SEQ ID NO: 18514
  GFR-binding peptide
  MOD_RES (33), (33): Xaa is C or S
  MOD_RES (11), (12), (13), (14), (15): Xaa is A or G
  MOD_RES (16), (17), (18), (19): Xaa is A or G or is absent

SEQ ID NO: 51100 - protein, 42 aa, Artificial Sequence; identical to SEQ ID NO: 38199
  GFR-binding peptide
  MOD_RES (2), (4), (37), (38): Xaa is C or S
  MOD_RES (15), (16), (17), (18), (19): Xaa is A or G
  MOD_RES (20), (21), (22), (23): Xaa is A or G or is absent

SEQ ID NO: 51101 - protein, 42 aa, Artificial Sequence; identical to SEQ ID NO: 18516
  GFR-binding peptide
  MOD_RES (1), (3), (37): Xaa is C or S
  MOD_RES (15), (16), (17), (18), (19): Xaa is A or G
  MOD_RES (20), (21), (22), (23): Xaa is A or G or is absent

SEQ ID NO: 51102 - protein, 41 aa, Artificial Sequence
  GFR-binding peptide
  MOD_RES (2), (35), (36): Xaa is C or S
  MOD_RES (13), (14), (15), (16), (17): Xaa is A or G
  MOD_RES (18), (19), (20), (21): Xaa is A or G or is absent
KXSKVVMVTAKKXXXXXXXXXIKRIQVPRLDQPVXXPSASA

SEQ ID NO: 51103 - protein, 43 aa, Artificial Sequence; identical to SEQ ID NO: 13396
  GFR-binding peptide
  MOD_RES (1), (3), (37), (38): Xaa is C or S
  MOD_RES (15), (16), (17), (18), (19): Xaa is A or G
  MOD_RES (20), (21), (22), (23): Xaa is A or G or is absent

SEQ ID NO: 51104 - protein, 33 aa, Artificial Sequence
  GFR-binding peptide
  MOD_RES (2), (33): Xaa is C or S
KXSKVIMSMEGIIKPTKGIMIQITINSLDQSVX

SEQ ID NO: 51105 - protein, 39 aa, Artificial Sequence; identical to SEQ ID NO: 13399
  GFR-binding peptide
  MOD_RES (1), (35), (36): Xaa is C or S
  MOD_RES (13), (14), (15), (16), (17): Xaa is A or G
  MOD_RES (18), (19), (20), (21): Xaa is A or G or is absent

SEQ ID NO: 51106 - protein, 38 aa, Artificial Sequence; identical to SEQ ID NO: 13400
  GFR-binding peptide
  MOD_RES (2), (4), (35), (36): Xaa is C or S

SEQ ID NO: 51107 - protein, 36 aa, Artificial Sequence; identical to SEQ ID NO: 18520
  GFR-binding peptide
  MOD_RES (1), (1): Xaa is C or S

SEQ ID NO: 51108 - protein, 39 aa, Artificial Sequence
  GFR-binding peptide
  MOD_RES (37), (37): Xaa is C or S
  MOD_RES (13), (14), (15), (16), (17): Xaa is A or G
  MOD_RES (18), (19), (20), (21): Xaa is A or G or is absent
ELHEELRNSLQEXXXXXXXXXYYVVPLPEHHVRSPQXKV

SEQ ID NO: 51109 - protein, 38 aa, Artificial Sequence
  GFR-binding peptide
  MOD_RES (34), (34): Xaa is C or S
KNHQLFNSLQEHQGQHPKIRYYVMPLPEEETPVXELGE

SEQ ID NO: 51110 - protein, 39 aa, Artificial Sequence
  GFR-binding peptide
  MOD_RES (2), (4), (38): Xaa is C or S
  MOD_RES (16), (17), (18), (19), (20): Xaa is A or G
  MOD_RES (21), (22), (23), (24): Xaa is A or G or is absent
RXEXKNHQLFNSLQEXXXXXXXXXYYVMPLPEEETPVXE

SEQ ID NO: 51111 - protein, 33 aa, Artificial Sequence; identical to SEQ ID NO: 18526
  GFR-binding peptide

SEQ ID NO: 51112 - protein, 36 aa, Artificial Sequence
  GFR-binding peptide
  MOD_RES (35), (35): Xaa is C or S
HDELTNSLQEFIPKKRVIEYYLVTLPELQVQTPRXQ

SEQ ID NO: 51113 - protein, 40 aa, Artificial Sequence
  GFR-binding peptide
  MOD_RES (2), (34), (35): Xaa is C or S
GXGEVVMDSMEGIVVKENEDMIQMTINSLETPVXXAKPIK

SEQ ID NO: 51114 - protein, 33 aa, Artificial Sequence; identical to SEQ ID NO: 38213
  GFR-binding peptide
  MOD_RES (1), (3): Xaa is C or S

SEQ ID NO: 51115 - protein, 33 aa, Artificial Sequence; identical to SEQ ID NO: 13406
  GFR-binding peptide
  MOD_RES (33), (33): Xaa is C or S
  MOD_RES (11), (12), (13), (14), (15): Xaa is A or G
  MOD_RES (16), (17), (18), (19): Xaa is A or G or is absent

SEQ ID NO: 51116 - protein, 37 aa, Artificial Sequence; identical to SEQ ID NO: 18528
  GFR-binding peptide
  MOD_RES (1), (35): Xaa is C or S

SEQ ID NO: 51117 - protein, 37 aa, Artificial Sequence
  GFR-binding peptide
  MOD_RES (2), (33), (34): Xaa is C or S
KXSRVIMSMEGIVKPKRGVMIQITINSLAQPVXXPAA

SEQ ID NO: 51118 - protein, 34 aa, Artificial Sequence
  GFR-binding peptide
  MOD_RES (1), (3): Xaa is C or S
XGXGEVVMDVQVEKVVKENEDVKAMKVSRLETPV

SEQ ID NO: 51119 - protein, 37 aa, Artificial Sequence; identical to SEQ ID NO: 18530
  GFR-binding peptide
  MOD_RES (1), (35): Xaa is C or S
  MOD_RES (13), (14), (15), (16), (17): Xaa is A or G
  MOD_RES (18), (19), (20), (21): Xaa is A or G or is absent

SEQ ID NO: 51120 - protein, 37 aa, Artificial Sequence; identical to SEQ ID NO: 13409
  GFR-binding peptide
  MOD_RES (1), (3), (35), (36): Xaa is C or S

SEQ ID NO: 51121 - protein, 35 aa, Artificial Sequence; identical to SEQ ID NO: 18531
  GFR-binding peptide
  MOD_RES (35), (35): Xaa is C or S

SEQ ID NO: 51122 - protein, 36 aa, Artificial Sequence
  GFR-binding peptide
  MOD_RES (2), (2): Xaa is C or S
KXALHDELTNSLQEFIPKKRVIEYYVVPLPELQVQT

SEQ ID NO: 51123 - protein, 37 aa, Artificial Sequence
  GFR-binding peptide
  MOD_RES (2), (4): Xaa is C or S
  MOD_RES (16), (17), (18), (19), (20): Xaa is A or G
  MOD_RES (21), (22), (23), (24): Xaa is A or G or is absent
RXGXGEVVMDVQVEKXXXXXXXXXVKAMKVSRLETPV

SEQ ID NO: 51124 - protein, 33 aa, Artificial Sequence; identical to SEQ ID NO: 13410
  GFR-binding peptide
  MOD_RES (2), (2): Xaa is C or S

SEQ ID NO: 51125 - protein, 35 aa, Artificial Sequence
  GFR-binding peptide
  MOD_RES (31), (32): Xaa is C or S
EVVMDVQVEKVVKENEDVKAMKVSRLETPVXXAKP

SEQ ID NO: 51126 - protein, 30 aa, Artificial Sequence
  GFR-binding peptide
EVVMEVTAKKVVKDYEDIKRMQVPRLETPV

SEQ ID NO: 51127 - protein, 32 aa, Artificial Sequence; identical to SEQ ID NO: 13412
  GFR-binding peptide
  MOD_RES (11), (12), (13), (14), (15): Xaa is A or G
  MOD_RES (16), (17), (18), (19): Xaa is A or G or is absent

SEQ ID NO: 51128 - protein, 32 aa, Artificial Sequence
  GFR-binding peptide
  MOD_RES (11), (12), (13), (14), (15): Xaa is A or G
  MOD_RES (16), (17), (18), (19): Xaa is A or G or is absent
SKVIMSMEGIXXXXXXXXXMIQITINSLDQSV

SEQ ID NO: 51129 - protein, 36 aa, Artificial Sequence; identical to SEQ ID NO: 18535
  GFR-binding peptide
  MOD_RES (36), (36): Xaa is C or S
  MOD_RES (12), (13), (14), (15), (16): Xaa is A or G
  MOD_RES (17), (18), (19), (20): Xaa is A or G or is absent

SEQ ID NO: 51130 - protein, 37 aa, Artificial Sequence
  GFR-binding peptide
  MOD_RES (33), (34): Xaa is C or S
  MOD_RES (11), (12), (13), (14), (15): Xaa is A or G
  MOD_RES (16), (17), (18), (19): Xaa is A or G or is absent
RVVMNVTAKKXXXXXXXXXIKRVQVPRLKTPAXXPKP

SEQ ID NO: 51131 - protein, 42 aa, Artificial Sequence
  GFR-binding peptide
  MOD_RES (2), (4), (36), (37): Xaa is C or S
RXGXGEVVMEVTAKKVVKDYEDIKRMQVPRLETPVXXAKPIS

SEQ ID NO: 51132 - protein, 38 aa, Artificial Sequence
  GFR-binding peptide
  MOD_RES (2), (4), (37), (38): Xaa is C or S
  MOD_RES (15), (16), (17), (18), (19): Xaa is A or G
  MOD_RES (20), (21), (22), (23): Xaa is A or G or is absent
SXKXSRVIMSMEGIXXXXXXXXXMIQITINSLAQPVXX

SEQ ID NO: 51133 - protein, 40 aa, Artificial Sequence; identical to SEQ ID NO: 18536
  GFR-binding peptide
  MOD_RES (1), (35): Xaa is C or S

SEQ ID NO: 51134 - protein, 37 aa, Artificial Sequence; identical to SEQ ID NO: 13415
  GFR-binding peptide
  MOD_RES (2), (34): Xaa is C or S

SEQ ID NO: 51135 - protein, 37 aa, Artificial Sequence; identical to SEQ ID NO: 18540
  GFR-binding peptide
  MOD_RES (35), (35): Xaa is C or S

SEQ ID NO: 51136 - protein, 36 aa, Artificial Sequence; identical to SEQ ID NO: 18541
  GFR-binding peptide
  MOD_RES (35), (35): Xaa is C or S
  MOD_RES (11), (12), (13), (14), (15): Xaa is A or G
  MOD_RES (16), (17), (18), (19): Xaa is A or G or is absent

SEQ ID NO: 51137 - protein, 35 aa, Artificial Sequence
  GFR-binding peptide
  MOD_RES (1), (35): Xaa is C or S
  MOD_RES (13), (14), (15), (16), (17): Xaa is A or G
  MOD_RES (18), (19), (20), (21): Xaa is A or G or is absent
XGEVVMDSMEGIXXXXXXXXXMIQMTINSLETPVX

SEQ ID NO: 51138 - protein, 34 aa, Artificial Sequence; identical to SEQ ID NO: 18545
  GFR-binding peptide
  MOD_RES (11), (12), (13), (14), (15): Xaa is A or G
  MOD_RES (16), (17), (18), (19): Xaa is A or G or is absent

SEQ ID NO: 51139 - protein, 35 aa, Artificial Sequence
  GFR-binding peptide
  MOD_RES (1), (35): Xaa is C or S
  MOD_RES (13), (14), (15), (16), (17): Xaa is A or G
  MOD_RES (18), (19), (20), (21): Xaa is A or G or is absent
XARVVMNVQVEKXXXXXXXXXVKAVKVSRLQTPAX

SEQ ID NO: 51140 - protein, 39 aa, Artificial Sequence
  GFR-binding peptide
  MOD_RES (2), (33), (34): Xaa is C or S
KXSKVVMVQVEKVKPTRGVVKAIKVSRLDQPVXXPSASA

SEQ ID NO: 51141 - protein, 38 aa, Artificial Sequence
  GFR-binding peptide
  MOD_RES (2), (34), (35): Xaa is C or S
GXARVVMNSMEGIIVNSSDDMIQVTINSLQTPAXXPKP

SEQ ID NO: 51142 - protein, 39 aa, Artificial Sequence
  GFR-binding peptide
  MOD_RES (1), (35), (36): Xaa is C or S
  MOD_RES (13), (14), (15), (16), (17): Xaa is A or G
  MOD_RES (18), (19), (20), (21): Xaa is A or G or is absent
XGEVVMDVTAKKXXXXXXXXXIKRMQVPRLETPVXXAKP

SEQ ID NO: 51143 - protein, 42 aa, Artificial Sequence; identical to SEQ ID NO: 13421
  GFR-binding peptide
  MOD_RES (2), (4), (36): Xaa is C or S

SEQ ID NO: 51144 - protein, 39 aa, Artificial Sequence; identical to SEQ ID NO: 13422
  GFR-binding peptide
  MOD_RES (2), (4), (38), (39): Xaa is C or S
  MOD_RES (16), (17), (18), (19), (20): Xaa is A or G
  MOD_RES (21), (22), (23), (24): Xaa is A or G or is absent

SEQ ID NO: 51145 - protein, 41 aa, Artificial Sequence; identical to SEQ ID NO: 13423
  GFR-binding peptide
  MOD_RES (1), (35), (36): Xaa is C or S
  MOD_RES (13), (14), (15), (16), (17): Xaa is A or G
  MOD_RES (18), (19), (20), (21): Xaa is A or G or is absent

SEQ ID NO: 51146 - protein, 33 aa, Artificial Sequence
  GFR-binding peptide
  MOD_RES (11), (12), (13), (14), (15): Xaa is A or G
  MOD_RES (16), (17), (18), (19): Xaa is A or G or is absent
HEELRNSLQEXXXXXXXXXYYVVPLPEHHVRSP

SEQ ID NO: 51147 - protein, 40 aa, Artificial Sequence
  GFR-binding peptide
  MOD_RES (2), (36), (37): Xaa is C or S
  MOD_RES (14), (15), (16), (17), (18): Xaa is A or G
  MOD_RES (19), (20), (21), (22): Xaa is A or G or is absent
GXARVVMNSMEGIXXXXXXXXXMIQVTINSLQTPAXXPKP

SEQ ID NO: 51148 - protein, 36 aa, Artificial Sequence; identical to SEQ ID NO: 18548
  GFR-binding peptide
  MOD_RES (2), (2): Xaa is C or S

SEQ ID NO: 51149 - protein, 34 aa, Artificial Sequence; identical to SEQ ID NO: 18552
  GFR-binding peptide

SEQ ID NO: 51150 - protein, 38 aa, Artificial Sequence
  GFR-binding peptide
  MOD_RES (1), (34), (35): Xaa is C or S
  MOD_RES (12), (13), (14), (15), (16): Xaa is A or G
  MOD_RES (17), (18), (19), (20): Xaa is A or G or is absent
XSRVIMVQVEKXXXXXXXXXVKAIKVSRLAQPVXXPAA

SEQ ID NO: 51151 - protein, 36 aa, Artificial Sequence
  GFR-binding peptide
  MOD_RES (2), (4), (35), (36): Xaa is C or S
SXKXSRVIMVTAKKVKPKRGVIKRIQVPRLAQPVXX

SEQ ID NO: 51152 - protein, 40 aa, Artificial Sequence
  GFR-binding peptide
  MOD_RES (2), (4), (36): Xaa is C or S
HXGXSRVVMNVTAKKIVNSSDDIKRVQVPRLKTPAXTPKT

SEQ ID NO: 51153 - protein, 45 aa, Artificial Sequence; identical to SEQ ID NO: 18554
  GFR-binding peptide
  MOD_RES (2), (4), (41): Xaa is C or S

SEQ ID NO: 51154 - protein, 38 aa, Artificial Sequence; identical to SEQ ID NO: 13429
  GFR-binding peptide
  MOD_RES (1), (3), (35), (36): Xaa is C or S

SEQ ID NO: 51155 - protein, 36 aa, Artificial Sequence; identical to SEQ ID NO: 18556
  GFR-binding peptide
  MOD_RES (1), (1): Xaa is C or S
  MOD_RES (14), (15), (16), (17), (18): Xaa is A or G
  MOD_RES (19), (20), (21), (22): Xaa is A or G or is absent

SEQ ID NO: 51156 - protein, 32 aa, Artificial Sequence
  GFR-binding peptide
  MOD_RES (11), (12), (13), (14), (15): Xaa is A or G
  MOD_RES (16), (17), (18), (19): Xaa is A or G or is absent
RVVMNVQVEKXXXXXXXXXVKAVKVSRLQTPA

SEQ ID NO: 51157 - protein, 38 aa, Artificial Sequence
  GFR-binding peptide
  MOD_RES (33), (34): Xaa is C or S
  MOD_RES (11), (12), (13), (14), (15): Xaa is A or G
  MOD_RES (16), (17), (18), (19): Xaa is A or G or is absent
RVVMNVQVEKXXXXXXXXXVKAVKVSRLQTPAXXPKPV

SEQ ID NO: 51158 - protein, 40 aa, Artificial Sequence
  GFR-binding peptide
  MOD_RES (2), (35), (36): Xaa is C or S
  MOD_RES (13), (14), (15), (16), (17): Xaa is A or G
  MOD_RES (18), (19), (20), (21): Xaa is A or G or is absent
KXSKVVMVTAKKXXXXXXXXXIKRIQVPRLDQPVXXPSAS

SEQ ID NO: 51159 - protein, 40 aa, Artificial Sequence
  GFR-binding peptide
  MOD_RES (1), (35): Xaa is C or S
XKNHQLFNSLQEHQGQHPKIRYYLMTLPEEETPVXELGED

SEQ ID NO: 51160 - protein, 33 aa, Artificial Sequence; identical to SEQ ID NO: 13431
  GFR-binding peptide
  MOD_RES (33), (33): Xaa is C or S
  MOD_RES (11), (12), (13), (14), (15): Xaa is A or G
  MOD_RES (16), (17), (18), (19): Xaa is A or G or is absent

SEQ ID NO: 51161 - protein, 41 aa, Artificial Sequence; identical to SEQ ID NO: 13433
  GFR-binding peptide
  MOD_RES (2), (4), (38): Xaa is C or S
  MOD_RES (16), (17), (18), (19), (20): Xaa is A or G
  MOD_RES (21), (22), (23), (24): Xaa is A or G or is absent

SEQ ID NO: 51162 - protein, 37 aa, Artificial Sequence
  GFR-binding peptide
  MOD_RES (1), (3), (36), (37): Xaa is C or S
  MOD_RES (14), (15), (16), (17), (18): Xaa is A or G
  MOD_RES (19), (20), (21), (22): Xaa is A or G or is absent
XKXSKVVMSMEGIXXXXXXXXXMIQITINSLDQPVXX

SEQ ID NO: 51163 - protein, 42 aa, Artificial Sequence; identical to SEQ ID NO: 18563
  GFR-binding peptide
  MOD_RES (1), (3), (37): Xaa is C or S
  MOD_RES (15), (16), (17), (18), (19): Xaa is A or G
  MOD_RES (20), (21), (22), (23): Xaa is A or G or is absent

SEQ ID NO: 51164 - protein, 36 aa, Artificial Sequence; identical to SEQ ID NO: 38270
  GFR-binding peptide
  MOD_RES (2), (33), (34): Xaa is C or S

SEQ ID NO: 51165 - protein, 32 aa, Artificial Sequence
  GFR-binding peptide
  MOD_RES (11), (12), (13), (14), (15): Xaa is A or G
  MOD_RES (16), (17), (18), (19): Xaa is A or G or is absent
SRVIMSMEGIXXXXXXXXXMIQITINSLAQPV

SEQ ID NO: 51166 - protein, 34 aa, Artificial Sequence
  GFR-binding peptide
  MOD_RES (34), (34): Xaa is C or S
  MOD_RES (12), (13), (14), (15), (16): Xaa is A or G
  MOD_RES (17), (18), (19), (20): Xaa is A or G or is absent
SRVVMNVTAKKXXXXXXXXXIKRVQVPRLKTPAX

SEQ ID NO: 51167 - protein, 40 aa, Artificial Sequence
  GFR-binding peptide
  MOD_RES (34), (35): Xaa is C or S
  MOD_RES (12), (13), (14), (15), (16): Xaa is A or G
  MOD_RES (17), (18), (19), (20): Xaa is A or G or is absent
GEVVMESMEGIXXXXXXXXXMIQMTINSLETPVXXAKPIS

SEQ ID NO: 51168 - protein, 40 aa, Artificial Sequence; identical to SEQ ID NO: 18567
  GFR-binding peptide
  MOD_RES (1), (38): Xaa is C or S

SEQ ID NO: 51169 - protein, 39 aa, Artificial Sequence
  GFR-binding peptide
  MOD_RES (37), (37): Xaa is C or S
  MOD_RES (13), (14), (15), (16), (17): Xaa is A or G
  MOD_RES (18), (19), (20), (21): Xaa is A or G or is absent
ALHDELTNSLQEXXXXXXXXXYYLVTLPELQVQTPRXQV

SEQ ID NO: 51170 - protein, 37 aa, Artificial Sequence
  GFR-binding peptide
  MOD_RES (2), (33), (34): Xaa is C or S
KXSKVVMVTAKKVKPTRGVIKRIQVPRLDQPVXXPSA

SEQ ID NO: 51171 - protein, 36 aa, Artificial Sequence; identical to SEQ ID NO: 13437
  GFR-binding peptide
  MOD_RES (1), (33): Xaa is C or S

SEQ ID NO: 51172 - protein, 42 aa, Artificial Sequence
  GFR-binding peptide
  MOD_RES (2), (4), (36), (37): Xaa is C or S
RXGXGEVVMDVQVEKVVKENEDVKAMKVSRLETPVXXAKPIK

SEQ ID NO: 51173 - protein, 36 aa, Artificial Sequence; identical to SEQ ID NO: 13441
  GFR-binding peptide
  MOD_RES (2), (36): Xaa is C or S
  MOD_RES (14), (15), (16), (17), (18): Xaa is A or G
  MOD_RES (19), (20), (21), (22): Xaa is A or G or is absent

SEQ ID NO: 51174 - protein, 35 aa, Artificial Sequence
  GFR-binding peptide
  MOD_RES (1), (33), (34): Xaa is C or S
XGEVVMEVTAKKVVKDYEDIKRMQVPRLETPVXXA

SEQ ID NO: 51175 - protein, 37 aa, Artificial Sequence
  GFR-binding peptide
  MOD_RES (1), (3), (35): Xaa is C or S
XGXSRVVMNVQVEKIVNSSDDVKAVKVSRLKTPAXTP

SEQ ID NO: 51176 - protein, 35 aa, Artificial Sequence
  GFR-binding peptide
  MOD_RES (31), (32): Xaa is C or S
SRVIMSMEGIVKPKRGVMIQITINSLAQPVXXPAA

SEQ ID NO: 51177 - protein, 34 aa, Artificial Sequence
  GFR-binding peptide
  MOD_RES (2), (4): Xaa is C or S
SXKXSKVIMSMEGIIKPTKGIMIQITINSLDQSV

SEQ ID NO: 51178 - protein, 42 aa, Artificial Sequence; identical to SEQ ID NO: 18569
  GFR-binding peptide
  MOD_RES (2), (36): Xaa is C or S
  MOD_RES (14), (15), (16), (17), (18): Xaa is A or G
  MOD_RES (19), (20), (21), (22): Xaa is A or G or is absent

SEQ ID NO: 51179 - protein, 37 aa, Artificial Sequence; identical to SEQ ID NO: 13442
  GFR-binding peptide
  MOD_RES (31), (32): Xaa is C or S

SEQ ID NO: 51180 - protein, 39 aa, Artificial Sequence
  GFR-binding peptide
  MOD_RES (2), (4), (37), (38): Xaa is C or S
  MOD_RES (15), (16), (17), (18), (19): Xaa is A or G
  MOD_RES (20), (21), (22), (23): Xaa is A or G or is absent
SXKXSRVIMVTAKKXXXXXXXXXIKRIQVPRLAQPVXXP

SEQ ID NO: 51181 - protein, 37 aa, Artificial Sequence
  GFR-binding peptide
  MOD_RES (1), (1): Xaa is C or S
XALHDELTNSLQEFIPKKRVIEYYLVTLPELQVQTPR

SEQ ID NO: 51182 - protein, 40 aa, Artificial Sequence
  GFR-binding peptide
  MOD_RES (1), (35): Xaa is C or S
  MOD_RES (13), (14), (15), (16), (17): Xaa is A or G
  MOD_RES (18), (19), (20), (21): Xaa is A or G or is absent
XKNHQLFNSLQEXXXXXXXXXYYLMTLPEEETPVXELGED

SEQ ID NO: 51183 - protein, 41 aa, Artificial Sequence
  GFR-binding peptide
  MOD_RES (2), (4), (36), (37): Xaa is C or S
RXGXGEVVMESMEGIVVKDYEDMIQMTINSLETPVXXAKPI

SEQ ID NO: 51184 - protein, 33 aa, Artificial Sequence
  GFR-binding peptide
  MOD_RES (32), (33): Xaa is C or S
GEVVMDVTAKKVVKENEDIKRMQVPRLETPVXX

SEQ ID NO: 51185 - protein, 36 aa, Artificial Sequence; identical to SEQ ID NO: 13444
  GFR-binding peptide
  MOD_RES (31), (32): Xaa is C or S

SEQ ID NO: 51186 - protein, 35 aa, Artificial Sequence
  GFR-binding peptide
  MOD_RES (2), (34), (35): Xaa is C or S
GXARVVMNVQVEKIVNSSDDVKAVKVSRLQTPAXX

SEQ ID NO: 51187 - protein, 33 aa, Artificial Sequence
  GFR-binding peptide
  MOD_RES (1), (32), (33): Xaa is C or S
XSKVVMSMEGIVKPTRGVMIQITINSLDQPVXX

SEQ ID NO: 51188 - protein, 38 aa, Artificial Sequence
  GFR-binding peptide
  MOD_RES (34), (34): Xaa is C or S
KNHQLFNSLQEHQGQHPKIRYYLMTLPEEETPVXELGE

SEQ ID NO: 51189 - protein, 41 aa, Artificial Sequence; identical to SEQ ID NO: 13449
  GFR-binding peptide
  MOD_RES (2), (4), (37), (38): Xaa is C or S
  MOD_RES (15), (16), (17), (18), (19): Xaa is A or G
  MOD_RES (20), (21), (22), (23): Xaa is A or G or is absent

SEQ ID NO: 51190 - protein, 37 aa, Artificial Sequence; identical to SEQ ID NO: 13450
  GFR-binding peptide
  MOD_RES (1), (3), (34), (35): Xaa is C or S

SEQ ID NO: 51191 - protein, 34 aa, Artificial Sequence; identical to SEQ ID NO: 13451
  GFR-binding peptide
  MOD_RES (2), (4): Xaa is C or S

SEQ ID NO: 51192 - protein, 44 aa, Artificial Sequence
  GFR-binding peptide
  MOD_RES (2), (4), (38): Xaa is C or S
  MOD_RES (16), (17), (18), (19), (20): Xaa is A or G
  MOD_RES (21), (22), (23), (24): Xaa is A or G or is absent
HXGXSRVVMNVQVEKXXXXXXXXXVKAVKVSRLKTPAXTPKTVH

SEQ ID NO: 51193 - protein, 37 aa, Artificial Sequence; identical to SEQ ID NO: 13455
  GFR-binding peptide
  MOD_RES (1), (3), (37): Xaa is C or S
  MOD_RES (15), (16), (17), (18), (19): Xaa is A or G
  MOD_RES (20), (21), (22), (23): Xaa is A or G or is absent

SEQ ID NO: 51194 - protein, 37 aa, Artificial Sequence
  GFR-binding peptide
  MOD_RES (1), (1): Xaa is C or S
XELHEELRNSLQELKPKKRVYEYYLVTLPEHHVRSPQ

SEQ ID NO: 51195 - protein, 39 aa, Artificial Sequence
  GFR-binding peptide
  MOD_RES (1), (3), (35), (36): Xaa is C or S
XGXARVVMNVTAKKIVNSSDDIKRVQVPRLQTPAXXPKP

SEQ ID NO: 51196 - protein, 33 aa, Artificial Sequence; identical to SEQ ID NO: 13456
  GFR-binding peptide
  MOD_RES (1), (1): Xaa is C or S
  MOD_RES (12), (13), (14), (15), (16): Xaa is A or G
  MOD_RES (17), (18), (19), (20): Xaa is A or G or is absent

SEQ ID NO: 51197 - protein, 41 aa, Artificial Sequence
  GFR-binding peptide
  MOD_RES (2), (4), (41): Xaa is C or S
  MOD_RES (17), (18), (19), (20), (21): Xaa is A or G
  MOD_RES (22), (23), (24), (25): Xaa is A or G or is absent
EXKXALHDELTNSLQEXXXXXXXXXYYVVPLPELQVQTPRX

SEQ ID NO: 51198 - protein, 33 aa, Artificial Sequence
  GFR-binding peptide
  MOD_RES (11), (12), (13), (14), (15): Xaa is A or G
  MOD_RES (16), (17), (18), (19): Xaa is A or G or is absent
HEELRNSLQEXXXXXXXXXYYLVTLPEHHVRSP

SEQ ID NO: 51199 - protein, 41 aa, Artificial Sequence; identical to SEQ ID NO: 18575
  GFR-binding peptide
  MOD_RES (2), (39): Xaa is C or S

SEQ ID NO: 51200 - protein, 35 aa, Artificial Sequence; identical to SEQ ID NO: 13459
  GFR-binding peptide
  MOD_RES (1), (35): Xaa is C or S
  MOD_RES (13), (14), (15), (16), (17): Xaa is A or G
  MOD_RES (18), (19), (20), (21): Xaa is A or G or is absent

SEQ ID NO: 51201 - protein, 37 aa, Artificial Sequence
  GFR-binding peptide
  MOD_RES (2), (34): Xaa is C or S
GXSRVVMNVQVEKIVNSSDDVKAVKVSRLKTPAXTPK

SEQ ID NO: 51202 - protein, 34 aa, Artificial Sequence
  GFR-binding peptide
  MOD_RES (2), (33), (34): Xaa is C or S
KXSKVIMSMEGIIKPTKGIMIQITINSLDQSVXX

SEQ ID NO: 51203 - protein, 35 aa, Artificial Sequence
  GFR-binding peptide
ALHDELTNSLQEFIPKKRVIEYYVVPLPELQVQTP

SEQ ID NO: 51204 - protein, 38 aa, Artificial Sequence
  GFR-binding peptide
  MOD_RES (1), (3), (35), (36): Xaa is C or S
XGXSRVVMNVTAKKIVNSSDDIKRVQVPRLKTPAXXPK

SEQ ID NO: 51205 - protein, 42 aa, Artificial Sequence
  GFR-binding peptide
  MOD_RES (2), (4), (41): Xaa is C or S
  MOD_RES (17), (18), (19), (20), (21): Xaa is A or G
  MOD_RES (22), (23), (24), (25): Xaa is A or G or is absent
AXAXELHEELRNSLQEXXXXXXXXXYYVVPLPEHHVRSPQXK

SEQ ID NO: 51206 - protein, 35 aa, Artificial Sequence; identical to SEQ ID NO: 13461
  GFR-binding peptide
  MOD_RES (2), (34), (35): Xaa is C or S

SEQ ID NO: 51207 - protein, 35 aa, Artificial Sequence; identical to SEQ ID NO: 13462
  GFR-binding peptide
  MOD_RES (2), (35): Xaa is C or S
  MOD_RES (13), (14), (15), (16), (17): Xaa is A or G
  MOD_RES (18), (19), (20), (21): Xaa is A or G or is absent

SEQ ID NO: 51208 - protein, 35 aa, Artificial Sequence; identical to SEQ ID NO: 13463
  GFR-binding peptide
  MOD_RES (1), (35): Xaa is C or S
  MOD_RES (13), (14), (15), (16), (17): Xaa is A or G
  MOD_RES (18), (19), (20), (21): Xaa is A or G or is absent

SEQ ID NO: 51209 - protein, 36 aa, Artificial Sequence
  GFR-binding peptide
  MOD_RES (2), (36): Xaa is C or S
  MOD_RES (14), (15), (16), (17), (18): Xaa is A or G
  MOD_RES (19), (20), (21), (22): Xaa is A or G or is absent
GXGEVVMEVQVEKXXXXXXXXXVKAMKVSRLETPVX

SEQ ID NO: 51210 - protein, 35 aa, Artificial Sequence
  GFR-binding peptide
  MOD_RES (1), (35): Xaa is C or S
  MOD_RES (13), (14), (15), (16), (17): Xaa is A or G
  MOD_RES (18), (19), (20), (21): Xaa is A or G or is absent
XGEVVMEVQVEKXXXXXXXXXVKAMKVSRLETPVX

SEQ ID NO: 51211 - protein, 40 aa, Artificial Sequence; identical to SEQ ID NO: 18587
  GFR-binding peptide
  MOD_RES (1), (3), (37): Xaa is C or S

SEQ ID NO: 51212 - protein, 34 aa, Artificial Sequence; identical to SEQ ID NO: 18588
  GFR-binding peptide

SEQ ID NO: 51213 - protein, 34 aa, Artificial Sequence
  GFR-binding peptide
  MOD_RES (1), (3): Xaa is C or S
XGXGEVVMEVQVEKVVKDYEDVKAMKVSRLETPV

SEQ ID NO: 51214 - protein, 34 aa, Artificial Sequence; identical to SEQ ID NO: 13466
  GFR-binding peptide
  MOD_RES (32), (33): Xaa is C or S

SEQ ID NO: 51215 - protein, 41 aa, Artificial Sequence; identical to SEQ ID NO: 18595
  GFR-binding peptide
  MOD_RES (1), (35): Xaa is C or S

SEQ ID NO: 51216 - protein, 39 aa, Artificial Sequence; identical to SEQ ID NO: 18597
  GFR-binding peptide
  MOD_RES (36), (36): Xaa is C or S
  MOD_RES (12), (13), (14), (15), (16): Xaa is A or G
  MOD_RES (17), (18), (19), (20): Xaa is A or G or is absent

SEQ ID NO: 51217 - protein, 38 aa, Artificial Sequence
  GFR-binding peptide
  MOD_RES (1), (3), (35), (36): Xaa is C or S
XGXARVVMNVTAKKIVNSSDDIKRVQVPRLQTPAXXPK

SEQ ID NO: 51218 - protein, 41 aa, Artificial Sequence
  GFR-binding peptide
  MOD_RES (2), (36), (37): Xaa is C or S
  MOD_RES (14), (15), (16), (17), (18): Xaa is A or G
  MOD_RES (19), (20), (21), (22): Xaa is A or G or is absent
GXGEVVMESMEGIXXXXXXXXXMIQMTINSLETPVXXAKPI

SEQ ID NO: 51219 - protein, 38 aa, Artificial Sequence; identical to SEQ ID NO: 13472
  GFR-binding peptide
  MOD_RES (1), (3), (36), (37): Xaa is C or S
  MOD_RES (14), (15), (16), (17), (18): Xaa is A or G
  MOD_RES (19), (20), (21), (22): Xaa is A or G or is absent

SEQ ID NO: 51220 - protein, 37 aa, Artificial Sequence
  GFR-binding peptide
  MOD_RES (33), (34): Xaa is C or S
  MOD_RES (11), (12), (13), (14), (15): Xaa is A or G
  MOD_RES (16), (17), (18), (19): Xaa is A or G or is absent
SKVVMVQVEKXXXXXXXXXVKAIKVSRLDQPVXXPSA

SEQ ID NO: 51221 - protein, 38 aa, Artificial Sequence
  GFR-binding peptide
  MOD_RES (2), (34), (35): Xaa is C or S
GXSRVVMNSMEGIIVNSSDDMIQVTINSLKTPAXXPKP

SEQ ID NO: 51222 - protein, 38 aa, Artificial Sequence
  GFR-binding peptide
  MOD_RES (2), (36), (37): Xaa is C or S
  MOD_RES (14), (15), (16), (17), (18): Xaa is A or G
  MOD_RES (19), (20), (21), (22): Xaa is A or G or is absent
GXSRVVMNVQVEKXXXXXXXXXVKAVKVSRLKTPAXXP

SEQ ID NO: 51223 - protein, 32 aa, Artificial Sequence
  GFR-binding peptide
  MOD_RES (2), (2): Xaa is C or S
KXSKVVMVQVEKVKPTRGVVKAIKVSRLDQPV

SEQ ID NO: 51224 - protein, 32 aa, Artificial Sequence
  GFR-binding peptide
  MOD_RES (11), (12), (13), (14), (15): Xaa is A or G
  MOD_RES (16), (17), (18), (19): Xaa is A or G or is absent
EVVMESMEGIXXXXXXXXXMIQMTINSLETPV

SEQ ID NO: 51225 - protein, 33 aa, Artificial Sequence; identical to SEQ ID NO: 13477
  GFR-binding peptide
  MOD_RES (1), (3): Xaa is C or S

SEQ ID NO: 51226 - protein, 38 aa, Artificial Sequence; identical to SEQ ID NO: 13479
  GFR-binding peptide
  MOD_RES (32), (32): Xaa is C or S

SEQ ID NO: 51227 - protein, 35 aa, Artificial Sequence; identical to SEQ ID NO: 18603
  GFR-binding peptide
  MOD_RES (12), (13), (14), (15), (16): Xaa is A or G
  MOD_RES (17), (18), (19), (20): Xaa is A or G or is absent

SEQ ID NO: 51228 - protein, 43 aa, Artificial Sequence; identical to SEQ ID NO: 18604
  GFR-binding peptide
  MOD_RES (2), (4), (41): Xaa is C or S
  MOD_RES (17), (18), (19), (20), (21): Xaa is A or G
  MOD_RES (22), (23), (24), (25): Xaa is A or G or is absent

SEQ ID NO: 51229 - protein, 35 aa, Artificial Sequence; identical to SEQ ID NO: 13480
  GFR-binding peptide
  MOD_RES (2), (34), (35): Xaa is C or S

SEQ ID NO: 51230 - protein, 37 aa, Artificial Sequence
  GFR-binding peptide
  MOD_RES (1), (32), (33): Xaa is C or S
XSKVVMVTAKKVKPTRGVIKRIQVPRLDQPVXXPSAS

SEQ ID NO: 51231 - protein, 32 aa, Artificial Sequence; identical to SEQ ID NO: 13481
  GFR-binding peptide
  MOD_RES (32), (32): Xaa is C or S

SEQ ID NO: 51232 - protein, 36 aa, Artificial Sequence; identical to SEQ ID NO: 13482
  GFR-binding peptide
  MOD_RES (1), (3), (36): Xaa is C or S
  MOD_RES (14), (15), (16), (17), (18): Xaa is A or G
  MOD_RES (19), (20), (21), (22): Xaa is A or G or is absent

SEQ ID NO: 51233 - protein, 39 aa, Artificial Sequence; identical to SEQ ID NO: 13483
  GFR-binding peptide
  MOD_RES (2), (35), (36): Xaa is C or S
  MOD_RES (13), (14), (15), (16), (17): Xaa is A or G
  MOD_RES (18), (19), (20), (21): Xaa is A or G or is absent

SEQ ID NO: 51234 - protein, 39 aa, Artificial Sequence; identical to SEQ ID NO: 13485
  GFR-binding peptide
  MOD_RES (33), (34): Xaa is C or S
  MOD_RES (11), (12), (13), (14), (15): Xaa is A or G
  MOD_RES (16), (17), (18), (19): Xaa is A or G or is absent

SEQ ID NO: 51235 - protein, 37 aa, Artificial Sequence; identical to SEQ ID NO: 18610
  GFR-binding peptide
  MOD_RES (2), (4): Xaa is C or S

SEQ ID NO: 51236 - protein, 39 aa, Artificial Sequence; identical to SEQ ID NO: 13489
  GFR-binding peptide
  MOD_RES (1), (33), (34): Xaa is C or S

SEQ ID NO: 51237 - protein, 31 aa, Artificial Sequence
  GFR-binding peptide
  MOD_RES (31), (31): Xaa is C or S
SRVIMVQVEKVKPKRGVVKAIKVSRLAQPVX

SEQ ID NO: 51238 - protein, 42 aa, Artificial Sequence; identical to SEQ ID NO: 13492
  GFR-binding peptide
  MOD_RES (2), (36), (37): Xaa is C or S
  MOD_RES (14), (15), (16), (17), (18): Xaa is A or G
  MOD_RES (19), (20), (21), (22): Xaa is A or G or is absent

SEQ ID NO: 51239 - protein, 40 aa, Artificial Sequence; identical to SEQ ID NO: 18613
  GFR-binding peptide
  MOD_RES (1), (3), (40): Xaa is C or S

SEQ ID NO: 51240 - protein, 40 aa, Artificial Sequence; identical to SEQ ID NO: 13493
  GFR-binding peptide
  MOD_RES (1), (34), (35): Xaa is C or S
  MOD_RES (12), (13), (14), (15), (16): Xaa is A or G
  MOD_RES (17), (18), (19), (20): Xaa is A or G or is absent

SEQ ID NO: 51241 - protein, 34 aa, Artificial Sequence; identical to SEQ ID NO: 38365
  GFR-binding peptide
  MOD_RES (1), (3), (34): Xaa is C or S

SEQ ID NO: 51242 - protein, 35 aa, Artificial Sequence
  GFR-binding peptide
  MOD_RES (2), (34), (35): Xaa is C or S
GXSRVVMNVQVEKIVNSSDDVKAVKVSRLKTPAXX

SEQ ID NO: 51243 - protein, 42 aa, Artificial Sequence
  GFR-binding peptide
  MOD_RES (2), (39): Xaa is C or S
AXELHEELRNSLQELKPKKRVYEYYVVPLPEHHVRSPQXKVS

SEQ ID NO: 51244 - protein, 39 aa, Artificial Sequence
  GFR-binding peptide
  MOD_RES (1), (3): Xaa is C or S
  MOD_RES (16), (17), (18), (19), (20): Xaa is A or G
  MOD_RES (21), (22), (23), (24): Xaa is A or G or is absent
XAXELHEELRNSLQEXXXXXXXXXYYLVTLPEHHVRSPQ

SEQ ID NO: 51245 - protein, 43 aa, Artificial Sequence
  GFR-binding peptide
  MOD_RES (1), (3), (40): Xaa is C or S
XKXALHDELTNSLQEFIPKKRVIEYYLVTLPELQVQTPRXQVN

SEQ ID NO: 51246 - protein, 40 aa, Artificial Sequence
  GFR-binding peptide
  MOD_RES (1), (3), (37): Xaa is C or S
  MOD_RES (15), (16), (17), (18), (19): Xaa is A or G
  MOD_RES (20), (21), (22), (23): Xaa is A or G or is absent
XGXSRVVMNVTAKKXXXXXXXXXIKRVQVPRLKTPAXTPK

SEQ ID NO: 51247 - protein, 37 aa, Artificial Sequence; identical to SEQ ID NO: 13500
  GFR-binding peptide
  MOD_RES (1), (3), (36), (37): Xaa is C or S
  MOD_RES (14), (15), (16), (17), (18): Xaa is A or G
  MOD_RES (19), (20), (21), (22): Xaa is A or G or is absent

SEQ ID NO: 51248 - protein, 36 aa, Artificial Sequence
  GFR-binding peptide
  MOD_RES (34), (34): Xaa is C or S
  MOD_RES (12), (13), (14), (15), (16): Xaa is A or G
  MOD_RES (17), (18), (19), (20): Xaa is A or G or is absent
SRVVMNVQVEKXXXXXXXXXVKAVKVSRLKTPAXTP

SEQ ID NO: 51249 - protein, 36 aa, Artificial Sequence; identical to SEQ ID NO: 13502
  GFR-binding peptide
  MOD_RES (1), (3), (35), (36): Xaa is C or S

SEQ ID NO: 51250 - protein, 36 aa, Artificial Sequence; identical to SEQ ID NO: 13503
  GFR-binding peptide
  MOD_RES (33), (34): Xaa is C or S
  MOD_RES (11), (12), (13), (14), (15): Xaa is A or G
  MOD_RES (16), (17), (18), (19): Xaa is A or G or is absent

SEQ ID NO: 51251 - protein, 35 aa, Artificial Sequence
  GFR-binding peptide
  MOD_RES (35), (35): Xaa is C or S
  MOD_RES (11), (12), (13), (14), (15): Xaa is A or G
  MOD_RES (16), (17), (18), (19): Xaa is A or G or is absent
HEELRNSLQEXXXXXXXXXYYVVPLPEHHVRSPQX

SEQ ID NO: 51252 - protein, 39 aa, Artificial Sequence
  GFR-binding peptide
  MOD_RES (2), (4), (36), (37): Xaa is C or S
HXGXSRVVMNVTAKKIVNSSDDIKRVQVPRLKTPAXXPK

SEQ ID NO: 51253 - protein, 39 aa, Artificial Sequence
  GFR-binding peptide
  MOD_RES (2), (39): Xaa is C or S
  MOD_RES (15), (16), (17), (18), (19): Xaa is A or G
  MOD_RES (20), (21), (22), (23): Xaa is A or G or is absent
AXELHEELRNSLQEXXXXXXXXXYYVVPLPEHHVRSPQX

SEQ ID NO: 51254 - protein, 34 aa, Artificial Sequence
  GFR-binding peptide
  MOD_RES (31), (32): Xaa is C or S
EVVMDVTAKKVVKENEDIKRMQVPRLETPVXXAK

SEQ ID NO: 51255 - protein, 37 aa, Artificial Sequence
  GFR-binding peptide
  MOD_RES (1), (34), (35): Xaa is C or S
  MOD_RES (12), (13), (14), (15), (16): Xaa is A or G
  MOD_RES (17), (18), (19), (20): Xaa is A or G or is absent
XSRVIMVQVEKXXXXXXXXXVKAIKVSRLAQPVXXPA

SEQ ID NO: 51256 - protein, 40 aa, Artificial Sequence; identical to SEQ ID NO: 18624
  GFR-binding peptide
  MOD_RES (1), (3), (37): Xaa is C or S

SEQ ID NO: 51257 - protein, 35 aa, Artificial Sequence
  GFR-binding peptide
  MOD_RES (35), (35): Xaa is C or S
  MOD_RES (11), (12), (13), (14), (15): Xaa is A or G
  MOD_RES (16), (17), (18), (19): Xaa is A or G or is absent
HEELRNSLQEXXXXXXXXXYYLVTLPEHHVRSPQX

SEQ ID NO: 51258 - protein, 34 aa, Artificial Sequence; identical to SEQ ID NO: 13510
  GFR-binding peptide
  MOD_RES (1), (3): Xaa is C or S

SEQ ID NO: 51259 - protein, 41 aa, Artificial Sequence
  GFR-binding peptide
  MOD_RES (1), (3), (35), (36): Xaa is C or S
XGXGEVVMESMEGIVVKDYEDMIQMTINSLETPVXXAKPIS

SEQ ID NO: 51260 - protein, 37 aa, Artificial Sequence; identical to SEQ ID NO: 13512
  GFR-binding peptide
  MOD_RES (2), (4), (36): Xaa is C or S

SEQ ID NO: 51261 - protein, 33 aa, Artificial Sequence; identical to SEQ ID NO: 13514
  GFR-binding peptide
  MOD_RES (1), (32), (33): Xaa is C or S

SEQ ID NO: 51262 - protein, 37 aa, Artificial Sequence
  GFR-binding peptide
  MOD_RES (33), (34): Xaa is C or S
  MOD_RES (11), (12), (13), (14), (15): Xaa is A or G
  MOD_RES (16), (17), (18), (19): Xaa is A or G or is absent
SKVVMVTAKKXXXXXXXXXIKRIQVPRLDQPVXXPSA

SEQ ID NO: 51263 - protein, 39 aa, Artificial Sequence; identical to SEQ ID NO: 18629
  GFR-binding peptide
  MOD_RES (1), (3): Xaa is C or S

SEQ ID NO: 51264 - protein, 39 aa, Artificial Sequence; identical to SEQ ID NO: 18631
  GFR-binding peptide
  MOD_RES (37), (37): Xaa is C or S

SEQ ID NO: 51265 - protein, 33 aa, Artificial Sequence
  GFR-binding peptide
  MOD_RES (12), (13), (14), (15), (16): Xaa is A or G
  MOD_RES (17), (18), (19), (20): Xaa is A or G or is absent
LHDELTNSLQEXXXXXXXXXYYVVPLPELQVQT

SEQ ID NO: 51266 - protein, 34 aa, Artificial Sequence; identical to SEQ ID NO: 18633
  GFR-binding peptide

SEQ ID NO: 51267 - protein, 41 aa, Artificial Sequence; identical to SEQ ID NO: 18639
  GFR-binding peptide
  MOD_RES (2), (39): Xaa is C or S
  MOD_RES (15), (16), (17), (18), (19): Xaa is A or G
  MOD_RES (20), (21), (22), (23): Xaa is A or G or is absent

SEQ ID NO: 51268 - protein, 39 aa, Artificial Sequence; identical to SEQ ID NO: 18641
  GFR-binding peptide
  MOD_RES (2), (4): Xaa is C or S
  MOD_RES (17), (18), (19), (20), (21): Xaa is A or G
  MOD_RES (22), (23), (24), (25): Xaa is A or G or is absent

SEQ ID NO: 51269 - protein, 35 aa, Artificial Sequence; identical to SEQ ID NO: 13524
  GFR-binding peptide
  MOD_RES (31), (32): Xaa is C or S

SEQ ID NO: 51270 - protein, 31 aa, Artificial Sequence
  GFR-binding peptide
  MOD_RES (1), (1): Xaa is C or S
XSRVIMVTAKKVKPKRGVIKRIQVPRLAQPV

SEQ ID NO: 51271 - protein, 35 aa, Artificial Sequence; identical to SEQ ID NO: 18642
  GFR-binding peptide

SEQ ID NO: 51272 - protein, 40 aa, Artificial Sequence; identical to SEQ ID NO: 18643
  GFR-binding peptide
  MOD_RES (36), (36): Xaa is C or S
  MOD_RES (12), (13), (14), (15), (16): Xaa is A or G
  MOD_RES (17), (18), (19), (20): Xaa is A or G or is absent

SEQ ID NO: 51273 - protein, 35 aa, Artificial Sequence
  GFR-binding peptide
  MOD_RES (1), (3), (34), (35): Xaa is C or S
XKXSRVIMSMEGIVKPKRGVMIQITINSLAQPVXX

SEQ ID NO: 51274 - protein, 37 aa, Artificial Sequence; identical to SEQ ID NO: 13526
  GFR-binding peptide
  MOD_RES (2), (4), (36), (37): Xaa is C or S

SEQ ID NO: 51275 - protein, 39 aa, Artificial Sequence
  GFR-binding peptide
  MOD_RES (34), (35): Xaa is C or S
  MOD_RES (12), (13), (14), (15), (16): Xaa is A or G
  MOD_RES (17), (18), (19), (20): Xaa is A or G or is absent
SRVVMNVTAKKXXXXXXXXXIKRVQVPRLKTPAXXPKPV

SEQ ID NO: 51276 - protein, 41 aa, Artificial Sequence; identical to SEQ ID NO: 18646
  GFR-binding peptide
  MOD_RES (1), (38): Xaa is C or S
  MOD_RES (14), (15), (16), (17), (18): Xaa is A or G
  MOD_RES (19), (20), (21), (22): Xaa is A or G or is absent

SEQ ID NO: 51277 - protein, 36 aa, Artificial Sequence
  GFR-binding peptide
  MOD_RES (34), (35): Xaa is C or S
  MOD_RES (12), (13), (14), (15), (16): Xaa is A or G
  MOD_RES (17), (18), (19), (20): Xaa is A or G or is absent
GEVVMEVTAKKXXXXXXXXXIKRMQVPRLETPVXXA

SEQ ID NO: 51278 - protein, 40 aa, Artificial Sequence
  GFR-binding peptide
  MOD_RES (34), (35): Xaa is C or S
  MOD_RES (12), (13), (14), (15), (16): Xaa is A or G
  MOD_RES (17), (18), (19), (20): Xaa is A or G or is absent
GEVVMDSMEGIXXXXXXXXXMIQMTINSLETPVXXAKPIK

SEQ ID NO: 51279 - protein, 35 aa, Artificial Sequence; identical to SEQ ID NO: 13529
  GFR-binding peptide
  MOD_RES (2), (34), (35): Xaa is C or S

SEQ ID NO: 51280 - protein, 41 aa, Artificial Sequence; identical to SEQ ID NO: 18647
  GFR-binding peptide
  MOD_RES (2), (4), (41): Xaa is C or S
  MOD_RES (17), (18), (19), (20), (21): Xaa is A or G
  MOD_RES (22), (23), (24), (25): Xaa is A or G or is absent

SEQ ID NO: 51281 - protein, 36 aa, Artificial Sequence; identical to SEQ ID NO: 13532
  GFR-binding peptide
  MOD_RES (33), (33): Xaa is C or S
  MOD_RES (11), (12), (13), (14), (15): Xaa is A or G
  MOD_RES (16), (17), (18), (19): Xaa is A or G or is absent

SEQ ID NO: 51282 - protein, 33 aa, Artificial Sequence
  GFR-binding peptide
  MOD_RES (31), (32): Xaa is C or S
SKVIMVQVEKIKPTKGIVKAIKVSRLDQSVXXP

SEQ ID NO: 51283 - protein, 38 aa, Artificial Sequence
  GFR-binding peptide
  MOD_RES (2), (33), (34): Xaa is C or S
KXSKVIMSMEGIIKPTKGIMIQITINSLDQSVXXPSAS

SEQ ID NO: 51284 - protein, 39 aa, Artificial Sequence
  GFR-binding peptide
  MOD_RES (1), (3), (37), (38): Xaa is C or S
  MOD_RES (15), (16), (17), (18), (19): Xaa is A or G
  MOD_RES (20), (21), (22), (23): Xaa is A or G or is absent
XGXGEVVMEVTAKKXXXXXXXXXIKRMQVPRLETPVXXA

SEQ ID NO: 51285 - protein, 33 aa, Artificial Sequence
  GFR-binding peptide
  MOD_RES (1), (1): Xaa is C or S
  MOD_RES (12), (13), (14), (15), (16): Xaa is A or G
  MOD_RES (17), (18), (19), (20): Xaa is A or G or is absent
XSRVIMVQVEKXXXXXXXXXVKAIKVSRLAQPV

SEQ ID NO: 51286 - protein, 31 aa, Artificial Sequence
  GFR-binding peptide
  MOD_RES (31), (31): Xaa is C or S
EVVMDVTAKKVVKENEDIKRMQVPRLETPVX

SEQ ID NO: 51287 - protein, 39 aa, Artificial Sequence
  GFR-binding peptide
  MOD_RES (36), (36): Xaa is C or S
  MOD_RES (12), (13), (14), (15), (16): Xaa is A or G
  MOD_RES (17), (18), (19), (20): Xaa is A or G or is absent
LHDELTNSLQEXXXXXXXXXYYVVPLPELQVQTPRXQVN

SEQ ID NO: 51288 - protein, 36 aa, Artificial Sequence
  GFR-binding peptide
  MOD_RES (1), (3), (36): Xaa is C or S
  MOD_RES (14), (15), (16), (17), (18): Xaa is A or G
  MOD_RES (19), (20), (21), (22): Xaa is A or G or is absent
XKXSKVIMVTAKKXXXXXXXXXIKRIQVPRLDQSVX

SEQ ID NO: 51289 - protein, 39 aa, Artificial Sequence; identical to SEQ ID NO: 18653
  GFR-binding peptide
  MOD_RES (36), (36): Xaa is C or S

SEQ ID NO: 51290 - protein, 34 aa, Artificial Sequence
  GFR-binding peptide
  MOD_RES (32), (32): Xaa is C or S
SRVVMNVQVEKIVNSSDDVKAVKVSRLKTPAXTP

SEQ ID NO: 51291 - protein, 37 aa, Artificial Sequence
  GFR-binding peptide
  MOD_RES (2), (4), (36), (37): Xaa is C or S
RXGXGEVVMESMEGIVVKDYEDMIQMTINSLETPVXX

SEQ ID NO: 51292 - protein, 40 aa, Artificial Sequence; identical to SEQ ID NO: 18655
  GFR-binding peptide
  MOD_RES (36), (36): Xaa is C or S

SEQ ID NO: 51293 - protein, 36 aa, Artificial Sequence; identical to SEQ ID NO: 13538
  GFR-binding peptide
  MOD_RES (34), (35): Xaa is C or S
  MOD_RES (12), (13), (14), (15), (16): Xaa is A or G
  MOD_RES (17), (18), (19), (20): Xaa is A or G or is absent

SEQ ID NO: 51294 - protein, 38 aa, Artificial Sequence
  GFR-binding peptide
  MOD_RES (2), (4), (38): Xaa is C or S
  MOD_RES (16), (17), (18), (19), (20): Xaa is A or G
  MOD_RES (21), (22), (23), (24): Xaa is A or G or is absent
HXGXSRVVMNVTAKKXXXXXXXXXIKRVQVPRLKTPAX

SEQ ID NO: 51295 - protein, 37 aa, Artificial Sequence; identical to SEQ ID NO: 13541
  GFR-binding peptide
  MOD_RES (1), (35): Xaa is C or S
  MOD_RES (13), (14), (15), (16), (17): Xaa is A or G
  MOD_RES (18), (19), (20), (21): Xaa is A or G or is absent

SEQ ID NO: 51296 - protein, 36 aa, Artificial Sequence
  GFR-binding peptide
  MOD_RES (1), (3): Xaa is C or S
  MOD_RES (15), (16), (17), (18), (19): Xaa is A or G
  MOD_RES (20), (21), (22), (23): Xaa is A or G or is absent
XEXKNHQLFNSLQEXXXXXXXXXYYVMPLPEEETPV

SEQ ID NO: 51297 - protein, 41 aa, Artificial Sequence; identical to SEQ ID NO: 13542
  GFR-binding peptide
  MOD_RES (2), (4), (37), (38): Xaa is C or S
  MOD_RES (15), (16), (17), (18), (19): Xaa is A or G
  MOD_RES (20), (21), (22), (23): Xaa is A or G or is absent

SEQ ID NO: 51298 - protein, 40 aa, Artificial Sequence
  GFR-binding peptide
  MOD_RES (1), (3), (36), (37): Xaa is C or S
  MOD_RES (14), (15), (16), (17), (18): Xaa is A or G
  MOD_RES (19), (20), (21), (22): Xaa is A or G or is absent
XKXSKVIMSMEGIXXXXXXXXXMIQITINSLDQSVXXPSA

SEQ ID NO: 51299 - protein, 34 aa, Artificial Sequence
  GFR-binding peptide
ELHEELRNSLQELKPKKRVYEYYLVTLPEHHVRS

SEQ ID NO: 51300 - protein, 36 aa, Artificial Sequence
  GFR-binding peptide
  MOD_RES (32), (33): Xaa is C or S
ARVVMNVQVEKIVNSSDDVKAVKVSRLQTPAXXPKP

SEQ ID NO: 51301 - protein, 39 aa, Artificial Sequence
  GFR-binding peptide
  MOD_RES (2), (4), (37), (38): Xaa is C or S
  MOD_RES (15), (16), (17), (18), (19): Xaa is A or G
  MOD_RES (20), (21), (22), (23): Xaa is A or G or is absent
SXKXSRVIMSMEGIXXXXXXXXXMIQITINSLAQPVXXP

SEQ ID NO: 51302 - protein, 35 aa, Artificial Sequence
  GFR-binding peptide
  MOD_RES (32), (33): Xaa is C or S
SRVVMNSMEGIIVNSSDDMIQVTINSLKTPAXXPK

SEQ ID NO: 51303 - protein, 37 aa, Artificial Sequence
  GFR-binding peptide
  MOD_RES (1), (32), (33): Xaa is C or S
XSKVIMVTAKKIKPTKGIIKRIQVPRLDQSVXXPSAS

SEQ ID NO: 51304 - protein, 36 aa, Artificial Sequence; identical to SEQ ID NO: 13546
  GFR-binding peptide
  MOD_RES (33), (34): Xaa is C or S
  MOD_RES (11), (12), (13), (14), (15): Xaa is A or G
  MOD_RES (16), (17), (18), (19): Xaa is A or G or is absent

SEQ ID NO: 51305 - protein, 37 aa, Artificial Sequence; identical to SEQ ID NO: 18660
  GFR-binding peptide
  MOD_RES (37), (37): Xaa is C or S
  MOD_RES (13), (14), (15), (16), (17): Xaa is A or G
  MOD_RES (18), (19), (20), (21): Xaa is A or G or is absent

SEQ ID NO: 51306 - protein, 39 aa, Artificial Sequence
  GFR-binding peptide
  MOD_RES (1), (3), (35), (36): Xaa is C or S
XGXSRVVMNVTAKKIVNSSDDIKRVQVPRLKTPAXXPKP

SEQ ID NO: 51307 - protein, 40 aa, Artificial Sequence; identical to SEQ ID NO: 18665
  GFR-binding peptide
  MOD_RES (1), (3), (40): Xaa is C or S
  MOD_RES (16), (17), (18), (19), (20): Xaa is A or G
  MOD_RES (21), (22), (23), (24): Xaa is A or G or is absent

SEQ ID NO: 51308 - protein, 39 aa, Artificial Sequence; identical to SEQ ID NO: 13550
  GFR-binding peptide
  MOD_RES (1), (33), (34): Xaa is C or S

SEQ ID NO: 51309 - protein, 33 aa, Artificial Sequence
  GFR-binding peptide
  MOD_RES (32), (33): Xaa is C or S
SRVVMNVTAKKIVNSSDDIKRVQVPRLKTPAXX

SEQ ID NO: 51310 - protein, 37 aa, Artificial Sequence; identical to SEQ ID NO: 18667
  GFR-binding peptide
  MOD_RES (2), (4): Xaa is C or S
  MOD_RES (16), (17), (18), (19), (20): Xaa is A or G
  MOD_RES (21), (22), (23), (24): Xaa is A or G or is absent

SEQ ID NO: 51311 - protein, 38 aa, Artificial Sequence
  GFR-binding peptide
  MOD_RES (2), (33), (34): Xaa is C or S
KXSKVIMVQVEKIKPTKGIVKAIKVSRLDQSVXXPSAS

SEQ ID NO: 51312 - protein, 34 aa, Artificial Sequence
  GFR-binding peptide
  MOD_RES (1), (32), (33): Xaa is C or S
XSRVIMVQVEKVKPKRGVVKAIKVSRLAQPVXXP

SEQ ID NO: 51313 - protein, 37 aa, Artificial Sequence; identical to SEQ ID NO: 18670
  GFR-binding peptide
  MOD_RES (1), (3): Xaa is C or S
  MOD_RES (16), (17), (18), (19), (20): Xaa is A or G
  MOD_RES (21), (22), (23), (24): Xaa is A or G or is absent

SEQ ID NO: 51314 - protein, 37 aa, Artificial Sequence
  GFR-binding peptide
  MOD_RES (32), (33): Xaa is C or S
GEVVMESMEGIVVKDYEDMIQMTINSLETPVXXAKPI

SEQ ID NO: 51315 - protein, 37 aa, Artificial Sequence
  GFR-binding peptide
  MOD_RES (1), (3), (34), (35): Xaa is C or S
XKXSKVVMVQVEKVKPTRGVVKAIKVSRLDQPVXXPS

SEQ ID NO: 51316 - protein, 39 aa, Artificial Sequence; identical to SEQ ID NO: 18672
  GFR-binding peptide
  MOD_RES (35), (35): Xaa is C or S
  MOD_RES (11), (12), (13), (14), (15): Xaa is A or G
  MOD_RES (16), (17), (18), (19): Xaa is A or G or is absent

SEQ ID NO: 51317 - protein, 38 aa, Artificial Sequence; identical to SEQ ID NO: 13555
  GFR-binding peptide
  MOD_RES (2), (36), (37): Xaa is C or S
  MOD_RES (14), (15), (16), (17), (18): Xaa is A or G
  MOD_RES (19), (20), (21), (22): Xaa is A or G or is absent

SEQ ID NO: 51318 - protein, 37 aa, Artificial Sequence
  GFR-binding peptide
  MOD_RES (2), (34), (35): Xaa is C or S
GXGEVVMDSMEGIVVKENEDMIQMTINSLETPVXXAK

SEQ ID NO: 51319 - protein, 39 aa, Artificial Sequence
  GFR-binding peptide
  MOD_RES (2), (34): Xaa is C or S
GXSRVVMNSMEGIIVNSSDDMIQVTINSLKTPAXTPKTV

SEQ ID NO: 51320 - protein, 37 aa, Artificial Sequence
  GFR-binding peptide
  MOD_RES (1), (3), (34), (35): Xaa is C or S
XKXSKVIMVQVEKIKPTKGIVKAIKVSRLDQSVXXPS

SEQ ID NO: 51321 - protein, 39 aa, Artificial Sequence; identical to SEQ ID NO: 18679
  GFR-binding peptide
  MOD_RES (1), (35): Xaa is C or S

SEQ ID NO: 51322 - protein, 32 aa, Artificial Sequence; identical to SEQ ID NO: 13558
  GFR-binding peptide
  MOD_RES (32), (32): Xaa is C or S

SEQ ID NO: 51323 - protein, 35 aa, Artificial Sequence
  GFR-binding peptide
  MOD_RES (2), (2): Xaa is C or S
EXKNHQLFNSLQEHQGQHPKIRYYVMPLPEEETPV

SEQ ID NO: 51324 - protein, 39 aa, Artificial Sequence; identical to SEQ ID NO: 18681
  GFR-binding peptide
  MOD_RES (2), (36): Xaa is C or S
  MOD_RES (14), (15), (16), (17), (18): Xaa is A or G
  MOD_RES (19), (20), (21), (22): Xaa is A or G or is absent

SEQ ID NO: 51325 - protein, 35 aa, Artificial Sequence
  GFR-binding peptide
  MOD_RES (2), (33), (34): Xaa is C or S
KXSKVIMVTAKKIKPTKGIIKRIQVPRLDQSVXXP

SEQ ID NO: 51326 - protein, 41 aa, Artificial Sequence
  GFR-binding peptide
  MOD_RES (1), (35), (36): Xaa is C or S
  MOD_RES (13), (14), (15), (16), (17): Xaa is A or G
  MOD_RES (18), (19), (20), (21): Xaa is A or G or is absent
XSRVVMNVTAKKXXXXXXXXXIKRVQVPRLKTPAXXPKPVY

SEQ ID NO: 51327 - protein, 34 aa, Artificial Sequence
  GFR-binding peptide
  MOD_RES (31), (32): Xaa is C or S
SKVIMSMEGIIKPTKGIMIQITINSLDQSVXXPS

SEQ ID NO: 51328 - protein, 38 aa, Artificial Sequence
  GFR-binding peptide
  MOD_RES (1), (32), (33): Xaa is C or S
XSKVIMVTAKKIKPTKGIIKRIQVPRLDQSVXXPSASA

SEQ ID NO: 51329 - protein, 43 aa, Artificial Sequence
  GFR-binding peptide
  MOD_RES (2), (4), (37), (38): Xaa is C or S
  MOD_RES (15), (16), (17), (18), (19): Xaa is A or G
  MOD_RES (20), (21), (22), (23): Xaa is A or G or is absent
SXKXSKVVMVQVEKXXXXXXXXXVKAIKVSRLDQPVXXPSASA

SEQ ID NO: 51330 - protein, 41 aa, Artificial Sequence; identical to SEQ ID NO: 18684
  GFR-binding peptide
  MOD_RES (2), (36): Xaa is C or S
  MOD_RES (14), (15), (16), (17), (18): Xaa is A or G
  MOD_RES (19), (20), (21), (22): Xaa is A or G or is absent

SEQ ID NO: 51331 - protein, 34 aa, Artificial Sequence; identical to SEQ ID NO: 13562
  GFR-binding peptide
  MOD_RES (31), (32): Xaa is C or S

SEQ ID NO: 51332 - protein, 38 aa, Artificial Sequence
  GFR-binding peptide
  MOD_RES (2), (4), (36), (37): Xaa is C or S
RXGXGEVVMEVQVEKVVKDYEDVKAMKVSRLETPVXXA

SEQ ID NO: 51333 - protein, 36 aa, Artificial Sequence; identical to SEQ ID NO: 18687
  GFR-binding peptide
  MOD_RES (36), (36): Xaa is C or S
  MOD_RES (12), (13), (14), (15), (16): Xaa is A or G
  MOD_RES (17), (18), (19), (20): Xaa is A or G or is absent

SEQ ID NO: 51334 - protein, 39 aa, Artificial Sequence
  GFR-binding peptide
  MOD_RES (2), (4), (36): Xaa is C or S
HXGXSRVVMNVQVEKIVNSSDDVKAVKVSRLKTPAXTPK

SEQ ID NO: 51335 - protein, 39 aa, Artificial Sequence
  GFR-binding peptide
  MOD_RES (1), (3), (36), (37): Xaa is C or S
  MOD_RES (14), (15), (16), (17), (18): Xaa is A or G
  MOD_RES (19), (20), (21), (22): Xaa is A or G or is absent
XKXSRVIMSMEGIXXXXXXXXXMIQITINSLAQPVXXPA

SEQ ID NO: 51336 - protein, 37 aa, Artificial Sequence; identical to SEQ ID NO: 13563
  GFR-binding peptide
  MOD_RES (2), (4), (36), (37): Xaa is C or S

SEQ ID NO: 51337 - protein, 37 aa, Artificial Sequence
  GFR-binding peptide
  MOD_RES (2), (33), (34): Xaa is C or S
KXSRVIMVQVEKVKPKRGVVKAIKVSRLAQPVXXPAA

SEQ ID NO: 51338 - protein, 31 aa, Artificial Sequence
  GFR-binding peptide
GEVVMEVTAKKVVKDYEDIKRMQVPRLETPV

SEQ ID NO: 51339 - protein, 38 aa, Artificial Sequence
  GFR-binding peptide
  MOD_RES (2), (34): Xaa is C or S
GXSRVVMNVTAKKIVNSSDDIKRVQVPRLKTPAXTPKT

SEQ ID NO: 51340 - protein, 36 aa, Artificial Sequence
  GFR-binding peptide
  MOD_RES (31), (32): Xaa is C or S
RVVMNSMEGIIVNSSDDMIQVTINSLQTPAXXPKPV

SEQ ID NO: 51341 - protein, 38 aa, Artificial Sequence
  GFR-binding peptide
  MOD_RES (2), (4), (37), (38): Xaa is C or S
  MOD_RES (15), (16), (17), (18), (19): Xaa is A or G
  MOD_RES (20), (21), (22), (23): Xaa is A or G or is absent
SXKXSRVIMVTAKKXXXXXXXXXIKRIQVPRLAQPVXX

SEQ ID NO: 51342 - protein, 39 aa, Artificial Sequence
  GFR-binding peptide
  MOD_RES (2), (35), (36): Xaa is C or S
  MOD_RES (13), (14), (15), (16), (17): Xaa is A or G
  MOD_RES (18), (19), (20), (21): Xaa is A or G or is absent
KXSKVIMSMEGIXXXXXXXXXMIQITINSLDQSVXXPSA

SEQ ID NO: 51343 - protein, 39 aa, Artificial Sequence
  GFR-binding peptide
  MOD_RES (34), (34): Xaa is C or S
KNHQLFNSLQEHQGQHPKIRYYLMTLPEEETPVXELGED

SEQ ID NO: 51344 - protein, 40 aa, Artificial Sequence
  GFR-binding peptide
  MOD_RES (1), (3), (37): Xaa is C or S
  MOD_RES (15), (16), (17), (18), (19): Xaa is A or G
  MOD_RES (20), (21), (22), (23): Xaa is A or G or is absent
XGXSRVVMNSMEGIXXXXXXXXXMIQVTINSLKTPAXTPK

SEQ ID NO: 51345 - protein, 38 aa, Artificial Sequence; identical to SEQ ID NO: 13569
  GFR-binding peptide
  MOD_RES (34), (34): Xaa is C or S
  MOD_RES (12), (13), (14), (15), (16): Xaa is A or G
  MOD_RES (17), (18), (19), (20): Xaa is A or G or is absent

SEQ ID NO: 51346 - protein, 41 aa, Artificial Sequence; identical to SEQ ID NO: 18695
  GFR-binding peptide
  MOD_RES (1), (35): Xaa is C or S
  MOD_RES (13), (14), (15), (16), (17): Xaa is A or G
  MOD_RES (18), (19), (20), (21): Xaa is A or G or is absent

SEQ ID NO: 51347 - protein, 32 aa, Artificial Sequence
  GFR-binding peptide
  MOD_RES (31), (32): Xaa is C or S
EVVMDVTAKKVVKENEDIKRMQVPRLETPVXX

SEQ ID NO: 51348 - protein, 43 aa, Artificial Sequence; identical to SEQ ID NO: 18696
  GFR-binding peptide
  MOD_RES (2), (39): Xaa is C or S

SEQ ID NO: 51349 - protein, 40 aa, Artificial Sequence
  GFR-binding peptide
  MOD_RES (2), (4), (37), (38): Xaa is C or S
  MOD_RES (15), (16), (17), (18), (19): Xaa is A or G
  MOD_RES (20), (21), (22), (23): Xaa is A or G or is absent
SXKXSRVIMVTAKKXXXXXXXXXIKRIQVPRLAQPVXXPA

SEQ ID NO: 51350 - protein, 38 aa, Artificial Sequence; identical to SEQ ID NO: 13570
  GFR-binding peptide
  MOD_RES (1), (3), (35), (36): Xaa is C or S

SEQ ID NO: 51351 - protein, 39 aa, Artificial Sequence; identical to SEQ ID NO: 18699
  GFR-binding peptide
  MOD_RES (1), (35): Xaa is C or S
  MOD_RES (13), (14), (15), (16), (17): Xaa is A or G
  MOD_RES (18), (19), (20), (21): Xaa is A or G or is absent

SEQ ID NO: 51352 - protein, 38 aa, Artificial Sequence; identical to SEQ ID NO: 18700
  GFR-binding peptide
  MOD_RES (35), (35): Xaa is C or S
  MOD_RES (11), (12), (13), (14), (15): Xaa is A or G
  MOD_RES (16), (17), (18), (19): Xaa is A or G or is absent

SEQ ID NO: 51353 - protein, 38 aa, Artificial Sequence; identical to SEQ ID NO: 18702
  GFR-binding peptide
  MOD_RES (2), (2): Xaa is C or S
  MOD_RES (15), (16), (17), (18), (19): Xaa is A or G
  MOD_RES (20), (21), (22), (23): Xaa is A or G or is absent

SEQ ID NO: 51354 - protein, 41 aa, Artificial Sequence
  GFR-binding peptide
  MOD_RES (3), (40): Xaa is C or S
VKXQPSRVHHEPLTVLYYEYVRKKPKLEQLSNRLEEHLEXA

SEQ ID NO: 51355 - protein, 34 aa, Artificial Sequence
  GFR-binding peptide
  MOD_RES (1), (2), (34): Xaa is C or S
XXVPTELRSVKMAKVDEYDKVVKEVQVEMVVEGX

SEQ ID NO: 51356 - protein, 36 aa, Artificial Sequence; identical to SEQ ID NO: 13576
  GFR-binding peptide
  MOD_RES (1), (33), (35): Xaa is C or S

SEQ ID NO: 51357 - protein, 35 aa, Artificial Sequence
  GFR-binding peptide
  MOD_RES (1), (2), (34): Xaa is C or S
XXVPTELRSVKMAKVDEYDKVVKEVQVEMVVEGXG

SEQ ID NO: 51358 - protein, 36 aa, Artificial Sequence
  GFR-binding peptide
  MOD_RES (2), (2): Xaa is C or S
  MOD_RES (18), (19), (20), (21), (22): Xaa is A or G
  MOD_RES (23), (24), (25), (26): Xaa is A or G or is absent
QXRPTQVQLEPLTVLYYXXXXXXXXXEQLSNTLEDH

SEQ ID NO: 51359 - protein, 39 aa, Artificial Sequence
  GFR-binding peptide
  MOD_RES (4), (5), (37), (39): Xaa is C or S
PKPXXAPTKLRSVKVAKVDDSSNVIKEVQVNMVVRSXGX

SEQ ID NO: 51360 - protein, 34 aa, Artificial Sequence
  GFR-binding peptide
  MOD_RES (1), (32), (34): Xaa is C or S
XVPQALRSVKIAKVVGRKPKVKEVQVMIVRSXKX

SEQ ID NO: 51361 - protein, 35 aa, Artificial Sequence; identical to SEQ ID NO: 13580
  GFR-binding peptide
  MOD_RES (2), (3), (35): Xaa is C or S

SEQ ID NO: 51362 - protein, 34 aa, Artificial Sequence; identical to SEQ ID NO: 13581
  GFR-binding peptide
  MOD_RES (1), (33): Xaa is C or S

SEQ ID NO: 51363 - protein, 38 aa, Artificial Sequence
  GFR-binding peptide
  MOD_RES (1), (35), (37): Xaa is C or S
  MOD_RES (15), (16), (17), (18), (19): Xaa is A or G
  MOD_RES (20), (21), (22), (23): Xaa is A or G or is absent
XVPTEEEPLTMLYYXXXXXXXXXEQLSNFLQHNKXEXR

SEQ ID NO: 51364 - protein, 38 aa, Artificial Sequence
  GFR-binding peptide
  MOD_RES (3), (35), (37): Xaa is C or S
PTXAPTKLSNITVQIMDDSSNVIIGEMSNMVVRSXGXH

SEQ ID NO: 51365 - protein, 40 aa, Artificial Sequence; identical to SEQ ID NO: 13582
  GFR-binding peptide
  MOD_RES (6), (7), (39): Xaa is C or S

SEQ ID NO: 51366 - protein, 38 aa, Artificial Sequence; identical to SEQ ID NO: 18710
  GFR-binding peptide
  MOD_RES (36), (38): Xaa is C or S
  MOD_RES (15), (16), (17), (18), (19): Xaa is A or G
  MOD_RES (20), (21), (22), (23): Xaa is A or G or is absent

SEQ ID NO: 51367 - protein, 41 aa, Artificial Sequence
  GFR-binding peptide
  MOD_RES (4), (38), (40): Xaa is C or S
GLEXVPTEEEPLPMVYYRIKPHQGQHEQLSNFLQHNKXEXR

SEQ ID NO: 51368 - protein, 42 aa, Artificial Sequence
  GFR-binding peptide
  MOD_RES (5), (6), (40), (42): Xaa is C or S
  MOD_RES (20), (21), (22), (23), (24): Xaa is A or G
  MOD_RES (25), (26), (27), (28): Xaa is A or G or is absent
VPKPXXAPTQLRSVKVAKVXXXXXXXXXKEVQVNMVVRAXGX

SEQ ID NO: 51369 - protein, 36 aa, Artificial Sequence; identical to SEQ ID NO: 13586
  GFR-binding peptide
  MOD_RES (1), (2), (36): Xaa is C or S
  MOD_RES (16), (17), (18), (19), (20): Xaa is A or G
  MOD_RES (21), (22), (23), (24): Xaa is A or G or is absent

SEQ ID NO: 51370 - protein, 36 aa, Artificial Sequence
  GFR-binding peptide
  MOD_RES (33), (35): Xaa is C or S
  MOD_RES (14), (15), (16), (17), (18): Xaa is A or G
  MOD_RES (19), (20), (21), (22): Xaa is A or G or is absent
VSQDLRPVQIRKIXXXXXXXXXKKATVMIVKSXKXS

SEQ ID NO: 51371 - protein, 39 aa, Artificial Sequence; identical to SEQ ID NO: 18712
  GFR-binding peptide
  MOD_RES (4), (38): Xaa is C or S
  MOD_RES (18), (19), (20), (21), (22): Xaa is A or G
  MOD_RES (23), (24), (25), (26): Xaa is A or G or is absent

SEQ ID NO: 51372 - protein, 38 aa, Artificial Sequence
  GFR-binding peptide
  MOD_RES (2), (36), (38): Xaa is C or S
EXVPTEEEPLPMVYYRIKPHQGQHEQLSNFLQHNKXEX

SEQ ID NO: 51373 - protein, 41 aa, Artificial Sequence; identical to SEQ ID NO: 13587
  GFR-binding peptide
  MOD_RES (4), (5), (39), (41): Xaa is C or S
  MOD_RES (19), (20), (21), (22), (23): Xaa is A or G
  MOD_RES (24), (25), (26), (27): Xaa is A or G or is absent

SEQ ID NO: 51374 - protein, 39 aa, Artificial Sequence
  GFR-binding peptide
  MOD_RES (5), (39): Xaa is C or S
  MOD_RES (19), (20), (21), (22), (23): Xaa is A or G
  MOD_RES (24), (25), (26), (27): Xaa is A or G or is absent
TKPTXAPTKLSNITVQIMXXXXXXXXXIGEMSNMVVRSX

SEQ ID NO: 51375 - protein, 40 aa, Artificial Sequence
  GFR-binding peptide
  MOD_RES (6), (7), (39): Xaa is C or S
SIPKAXXVPTELRPVQMRKIDEYDKVVKKATVEMVVEGXG

SEQ ID NO: 51376 - protein, 33 aa, Artificial Sequence
  GFR-binding peptide
  MOD_RES (1), (1): Xaa is C or S
  MOD_RES (15), (16), (17), (18), (19): Xaa is A or G
  MOD_RES (20), (21), (22), (23): Xaa is A or G or is absent
XAPTQLSNITVQIMXXXXXXXXXIGEMSNMVVR

SEQ ID NO: 51377 - protein, 36 aa, Artificial Sequence
  GFR-binding peptide
  MOD_RES (3), (4), (35): Xaa is C or S
SPXXVSQDLRSVKIAKVIGKTPKIKEVQVMIVKSXK

SEQ ID NO: 51378 - protein, 43 aa, Artificial Sequence
  GFR-binding peptide
  MOD_RES (4), (41), (43): Xaa is C or S
  MOD_RES (20), (21), (22), (23), (24): Xaa is A or G
  MOD_RES (25), (26), (27), (28): Xaa is A or G or is absent
SVKXQPSRVHHEPLPVVYYXXXXXXXXXEQLSNRLEEHLEXAX

SEQ ID NO: 51379 - protein, 32 aa, Artificial Sequence; identical to SEQ ID NO: 18713
  GFR-binding peptide

SEQ ID NO: 51380 - protein, 42 aa, Artificial Sequence; identical to SEQ ID NO: 13589
  GFR-binding peptide
  MOD_RES (6), (7), (40), (42): Xaa is C or S
  MOD_RES (21), (22), (23), (24), (25): Xaa is A or G
  MOD_RES (26), (27), (28), (29): Xaa is A or G or is absent

SEQ ID NO: 51381 - protein, 42 aa, Artificial Sequence; identical to SEQ ID NO: 18714
  GFR-binding peptide
  MOD_RES (5), (42): Xaa is C or S

SEQ ID NO: 51382 - protein, 35 aa, Artificial Sequence; identical to SEQ ID NO: 18716
  GFR-binding peptide
  MOD_RES (1), (1): Xaa is C or S
  MOD_RES (17), (18), (19), (20), (21): Xaa is A or G
  MOD_RES (22), (23), (24), (25): Xaa is A or G or is absent

SEQ ID NO: 51383 - protein, 35 aa, Artificial Sequence; identical to SEQ ID NO: 13591
  GFR-binding peptide
  MOD_RES (1), (2), (34): Xaa is C or S

SEQ ID NO: 51384 - protein, 35 aa, Artificial Sequence
  GFR-binding peptide
  MOD_RES (16), (17), (18), (19), (20): Xaa is A or G
  MOD_RES (21), (22), (23), (24): Xaa is A or G or is absent
RPTQVQLEPLTVLYYXXXXXXXXXEQLSNTLEDHL

SEQ ID NO: 51385 - protein, 42 aa, Artificial Sequence
  GFR-binding peptide
  MOD_RES (3), (40), (42): Xaa is C or S
  MOD_RES (19), (20), (21), (22), (23): Xaa is A or G
  MOD_RES (24), (25), (26), (27): Xaa is A or G or is absent
VQXRPTQVQLEPLTVLYYXXXXXXXXXEQLSNTLEDHLAXKX

SEQ ID NO: 51386 - protein, 34 aa, Artificial Sequence
  GFR-binding peptide
  MOD_RES (1), (2): Xaa is C or S
  MOD_RES (16), (17), (18), (19), (20): Xaa is A or G
  MOD_RES (21), (22), (23), (24): Xaa is A or G or is absent
XXAPTKLRSVKVAKVXXXXXXXXXKEVQVNMVVR

SEQ ID NO: 51387 - protein, 35 aa, Artificial Sequence
  GFR-binding peptide
  MOD_RES (32), (34): Xaa is C or S
VPTELRSVKMAKVDENEKVVKEVQVDMVVEGXGXR

SEQ ID NO: 51388 - protein, 33 aa, Artificial Sequence; identical to SEQ ID NO: 13594
  GFR-binding peptide
  MOD_RES (14), (15), (16), (17), (18): Xaa is A or G
  MOD_RES (19), (20), (21), (22): Xaa is A or G or is absent

SEQ ID NO: 51389 - protein, 30 aa, Artificial Sequence
  GFR-binding peptide
VPQDLRPVQIRKIVGRTPKVKKATVMVVKS

SEQ ID NO: 51390 - protein, 38 aa, Artificial Sequence
  GFR-binding peptide
  MOD_RES (5), (5): Xaa is C or S
  MOD_RES (19), (20), (21), (22), (23): Xaa is A or G
  MOD_RES (24), (25), (26), (27): Xaa is A or G or is absent
EGLEXVPTEEEPLPMVYYXXXXXXXXXEQLSNFLQHNK

SEQ ID NO: 51391 - protein, 39 aa, Artificial Sequence; identical to SEQ ID NO: 13598
  GFR-binding peptide
  MOD_RES (3), (37), (39): Xaa is C or S
  MOD_RES (17), (18), (19), (20), (21): Xaa is A or G
  MOD_RES (22), (23), (24), (25): Xaa is A or G or is absent

SEQ ID NO: 51392 - protein, 39 aa, Artificial Sequence
  GFR-binding peptide
  MOD_RES (7), (7): Xaa is C or S
  MOD_RES (21), (22), (23), (24), (25): Xaa is A or G
  MOD_RES (26), (27), (28), (29): Xaa is A or G or is absent
NDEGLEXVPTEEEPLPMVYYXXXXXXXXXEQLSNFLQHN

SEQ ID NO: 51393 - protein, 40 aa, Artificial Sequence
  GFR-binding peptide
  MOD_RES (6), (38), (40): Xaa is C or S
VTKPTXAPTKLRPVQVRKIDDSSNVIKKATVNMVVRSXGX

SEQ ID NO: 51394 - protein, 37 aa, Artificial Sequence; identical to SEQ ID NO: 13602
  GFR-binding peptide
  MOD_RES (5), (6): Xaa is C or S

SEQ ID NO: 51395 - protein, 33 aa, Artificial Sequence
  GFR-binding peptide
  MOD_RES (1), (2), (33): Xaa is C or S
XXVSQDLRSVKIAKVIGKTPKIKEVQVMIVKSX

SEQ ID NO: 51396 - protein, 39 aa, Artificial Sequence; identical to SEQ ID NO: 18725
  GFR-binding peptide
  MOD_RES (2), (39): Xaa is C or S

SEQ ID NO: 51397 - protein, 36 aa, Artificial Sequence; identical to SEQ ID NO: 13605
  GFR-binding peptide
  MOD_RES (3), (4): Xaa is C or S
  MOD_RES (18), (19), (20), (21), (22): Xaa is A or G
  MOD_RES (23), (24), (25), (26): Xaa is A or G or is absent

SEQ ID NO: 51398 - protein, 39 aa, Artificial Sequence
  GFR-binding peptide
  MOD_RES (6), (7), (38): Xaa is C or S
ASASPXXVSQDLRSVKIAKVIGKTPKIKEVQVMIVKSXK

SEQ ID NO: 51399 - protein, 38 aa, Artificial Sequence
  GFR-binding peptide
  MOD_RES (4), (5): Xaa is C or S
  MOD_RES (19), (20), (21), (22), (23): Xaa is A or G
  MOD_RES (24), (25), (26), (27): Xaa is A or G or is absent
PKPXXAPTKLSNITVQIMXXXXXXXXXIGEMSNMVVRS

SEQ ID NO: 51400 - protein, 41 aa, Artificial Sequence; identical to SEQ ID NO: 13607
  GFR-binding peptide
  MOD_RES (5), (6), (39), (41): Xaa is C or S
  MOD_RES (20), (21), (22), (23), (24): Xaa is A or G
  MOD_RES (25), (26), (27), (28): Xaa is A or G or is absent

SEQ ID NO: 51401 - protein, 40 aa, Artificial Sequence; identical to SEQ ID NO: 18728
  GFR-binding peptide
  MOD_RES (2), (39): Xaa is C or S
  MOD_RES (18), (19), (20), (21), (22): Xaa is A or G
  MOD_RES (23), (24), (25), (26): Xaa is A or G or is absent

SEQ ID NO: 51402 - protein, 39 aa, Artificial Sequence; identical to SEQ ID NO: 13609
  GFR-binding peptide
  MOD_RES (3), (4), (37), (39): Xaa is C or S
  MOD_RES (18), (19), (20), (21), (22): Xaa is A or G
  MOD_RES (23), (24), (25), (26): Xaa is A or G or is absent

SEQ ID NO: 51403 - protein, 37 aa, Artificial Sequence; identical to SEQ ID NO: 18730
  GFR-binding peptide
  MOD_RES (2), (2): Xaa is C or S
  MOD_RES (18), (19), (20), (21), (22): Xaa is A or G
  MOD_RES (23), (24), (25), (26): Xaa is A or G or is absent

SEQ ID NO: 51404 - protein, 39 aa, Artificial Sequence
  GFR-binding peptide
  MOD_RES (3), (4), (36), (38): Xaa is C or S
KPXXAPTKLSNITVQIMDDSSNVIIGEMSNMVVRSXGXH

SEQ ID NO: 51405 - protein, 40 aa, Artificial Sequence
  GFR-binding peptide
  MOD_RES (5), (6), (40): Xaa is C or S
  MOD_RES (20), (21), (22), (23), (24): Xaa is A or G
  MOD_RES (25), (26), (27), (28): Xaa is A or G or is absent
IPKAXXVPTELRSVKMAKVXXXXXXXXXKEVQVDMVVEGX

SEQ ID NO: 51406 - protein, 31 aa, Artificial Sequence
  GFR-binding peptide
  MOD_RES (1), (1): Xaa is C or S
XAPTKLRSVKVAKVDDSSNVIKEVQVNMVVR

SEQ ID NO: 51407 - protein, 40 aa, Artificial Sequence
  GFR-binding peptide
  MOD_RES (3), (4), (38), (40): Xaa is C or S
  MOD_RES (18), (19), (20), (21), (22): Xaa is A or G
  MOD_RES (23), (24), (25), (26): Xaa is A or G or is absent
KAXXVPTELRSVKMAKVXXXXXXXXXKEVQVDMVVEGXGX

SEQ ID NO: 51408 - protein, 41 aa, Artificial Sequence
  GFR-binding peptide
  MOD_RES (5), (6), (40): Xaa is C or S
  MOD_RES (20), (21), (22), (23), (24): Xaa is A or G
  MOD_RES (25), (26), (27), (28): Xaa is A or G or is absent
IPKAXXVPTELSNITMQIMXXXXXXXXXIGEMSDMVVEGXG

SEQ ID NO: 51409 - protein, 33 aa, Artificial Sequence
  GFR-binding peptide
  MOD_RES (1), (33): Xaa is C or S
XAPTKLSNITVQIMDDSSNVIIGEMSNMVVRSX

SEQ ID NO: 51410 - protein, 36 aa, Artificial Sequence
  GFR-binding peptide
  MOD_RES (16), (17), (18), (19), (20): Xaa is A or G
  MOD_RES (21), (22), (23), (24): Xaa is A or G or is absent
QPSRVHHEPLTVLYYXXXXXXXXXEQLSNRLEEHLE

SEQ ID NO: 51411 - protein, 37 aa, Artificial Sequence
  GFR-binding peptide
  MOD_RES (2), (2): Xaa is C or S
  MOD_RES (18), (19), (20), (21), (22): Xaa is A or G
  MOD_RES (23), (24), (25), (26): Xaa is A or G or is absent
QXRPTQVQLEPLTVLYYXXXXXXXXXEQLSNTLEDHL

SEQ ID NO: 51412 - protein, 37 aa, Artificial Sequence
  GFR-binding peptide
  MOD_RES (3), (4): Xaa is C or S
  MOD_RES (18), (19), (20), (21), (22): Xaa is A or G
  MOD_RES (23), (24), (25), (26): Xaa is A or G or is absent
KPXXAPTKLRPVQVRKIXXXXXXXXXKKATVNMVVRS

SEQ ID NO: 51413 - protein, 36 aa, Artificial Sequence
  GFR-binding peptide
  MOD_RES (2), (3), (35): Xaa is C or S
PXXAPTQLRPVQVRKIDDSSNVIKKATVNMVVRAXG

SEQ ID NO: 51414 - protein, 32 aa, Artificial Sequence
  GFR-binding peptide
  MOD_RES (32), (32): Xaa is C or S
VPTELRSVKMAKVDENEKVVKEVQVDMVVEGX

SEQ ID NO: 51415 - protein, 36 aa, Artificial Sequence
  GFR-binding peptide
  MOD_RES (4), (5): Xaa is C or S
PKAXXVPTELRSVKMAKVDEYDKVVKEVQVEMVVEG

SEQ ID NO: 51416 - protein, 35 aa, Artificial Sequence; identical to SEQ ID NO: 18739
  GFR-binding peptide
  MOD_RES (1), (1): Xaa is C or S

SEQ ID NO: 51417 - protein, 40 aa, Artificial Sequence
  GFR-binding peptide
  MOD_RES (6), (40): Xaa is C or S
  MOD_RES (20), (21), (22), (23), (24): Xaa is A or G
  MOD_RES (25), (26), (27), (28): Xaa is A or G or is absent
VTKPTXAPTKLRSVKVAKVXXXXXXXXXKEVQVNMVVRSX

SEQ ID NO: 51418 - protein, 42 aa, Artificial Sequence
  GFR-binding peptide
  MOD_RES (6), (40), (42): Xaa is C or S
  MOD_RES (20), (21), (22), (23), (24): Xaa is A or G
  MOD_RES (25), (26), (27), (28): Xaa is A or G or is absent
DEGLEXVPTEEEPLPMVYYXXXXXXXXXEQLSNFLQHNKXEX

SEQ ID NO: 51419 - protein, 42 aa, Artificial Sequence
  GFR-binding peptide
  MOD_RES (5), (6), (40), (42): Xaa is C or S
  MOD_RES (20), (21), (22), (23), (24): Xaa is A or G
  MOD_RES (25), (26), (27), (28): Xaa is A or G or is absent
VPKPXXAPTKLSNITVQIMXXXXXXXXXIGEMSNMVVRSXGX

SEQ ID NO: 51420 - protein, 33 aa, Artificial Sequence
  GFR-binding peptide
  MOD_RES (32), (32): Xaa is C or S
VPTELSNITMQIMDEYDKVVIGEMSEMVVEGXG

SEQ ID NO: 51421 - protein, 38 aa, Artificial Sequence
  GFR-binding peptide
  MOD_RES (3), (4), (37): Xaa is C or S
  MOD_RES (18), (19), (20), (21), (22): Xaa is A or G
  MOD_RES (23), (24), (25), (26): Xaa is A or G or is absent
SPXXVSQDLRPVQIRKIXXXXXXXXXKKATVMIVKSXK

SEQ ID NO: 51422 - protein, 43 aa, Artificial Sequence
  GFR-binding peptide
  MOD_RES (6), (7), (41), (43): Xaa is C or S
  MOD_RES (21), (22), (23), (24), (25): Xaa is A or G
  MOD_RES (26), (27), (28), (29): Xaa is A or G or is absent
KIPKAXXVPTELRSVKMAKVXXXXXXXXXKEVQVDMVVEGXGX

SEQ ID NO: 51423 - protein, 37 aa, Artificial Sequence
  GFR-binding peptide
  MOD_RES (2), (3), (37): Xaa is C or S
  MOD_RES (17), (18), (19), (20), (21): Xaa is A or G
  MOD_RES (22), (23), (24), (25): Xaa is A or G or is absent
PXXAPTKLSNITVQIMXXXXXXXXXIGEMSNMVVRSX

SEQ ID NO: 51424 - protein, 33 aa, Artificial Sequence
  GFR-binding peptide
  MOD_RES (31), (33): Xaa is C or S
VPQALRPVQIRKIVGRKPKVKKATVMIVRSXKX

SEQ ID NO: 51425 - protein, 36 aa, Artificial Sequence; identical to SEQ ID NO: 13614
  GFR-binding peptide
  MOD_RES (34), (36): Xaa is C or S
  MOD_RES (14), (15), (16), (17), (18): Xaa is A or G
  MOD_RES (19), (20), (21), (22): Xaa is A or G or is absent

SEQ ID NO: 51426 - protein, 41 aa, Artificial Sequence
  GFR-binding peptide
  MOD_RES (5), (5): Xaa is C or S
SSVKXQPSRVHHEPLPVVYYEYVRKKPKLEQLSNRLEEHLE

SEQ ID NO: 51427 - protein, 40 aa, Artificial Sequence; identical to SEQ ID NO: 18744
  GFR-binding peptide
  MOD_RES (4), (38), (40): Xaa is C or S
  MOD_RES (18), (19), (20), (21), (22): Xaa is A or G
  MOD_RES (23), (24), (25), (26): Xaa is A or G or is absent

SEQ ID NO: 51428 - protein, 43 aa, Artificial Sequence
  GFR-binding peptide
  MOD_RES (7), (41), (43): Xaa is C or S
  MOD_RES (21), (22), (23), (24), (25): Xaa is A or G
  MOD_RES (26), (27), (28), (29): Xaa is A or G or is absent
HVTKPTXAPTKLRSVKVAKVXXXXXXXXXKEVQVNMVVRSXGX

SEQ ID NO: 51429 - protein, 38 aa, Artificial Sequence
  GFR-binding peptide
  MOD_RES (3), (3): Xaa is C or S
  MOD_RES (19), (20), (21), (22), (23): Xaa is A or G
  MOD_RES (24), (25), (26), (27): Xaa is A or G or is absent
VKXQPSRVHHEPLPVVYYXXXXXXXXXEQLSNRLEEHL

SEQ ID NO: 51430 - protein, 40 aa, Artificial Sequence
  GFR-binding peptide
  MOD_RES (4), (38), (40): Xaa is C or S
GLEXVPTEEEPLTMLYYRIKPHQGQHEQLSNFLQHNKXEX

SEQ ID NO: 51431 - protein, 38 aa, Artificial Sequence; identical to SEQ ID NO: 13615
  GFR-binding peptide
  MOD_RES (1), (35), (37): Xaa is C or S
  MOD_RES (15), (16), (17), (18), (19): Xaa is A or G
  MOD_RES (20), (21), (22), (23): Xaa is A or G or is absent

SEQ ID NO: 51432 - protein, 34 aa, Artificial Sequence
  GFR-binding peptide
  MOD_RES (1), (2): Xaa is C or S
  MOD_RES (16), (17), (18), (19), (20): Xaa is A or G
  MOD_RES (21), (22), (23), (24): Xaa is A or G or is absent
XXVPTELSNITMQIMXXXXXXXXXIGEMSEMVVE

SEQ ID NO: 51433 - protein, 35 aa, Artificial Sequence; identical to SEQ ID NO: 13618
  GFR-binding peptide
  MOD_RES (32), (34): Xaa is C or S

SEQ ID NO: 51434 - protein, 35 aa, Artificial Sequence
  GFR-binding peptide
  MOD_RES (1), (2), (33), (35): Xaa is C or S
XXVPQALRSVKIAKVVGRKPKVKEVQVMIVRSXKX

SEQ ID NO: 51435 - protein, 38 aa, Artificial Sequence; identical to SEQ ID NO: 13621
  GFR-binding peptide
  MOD_RES (5), (6): Xaa is C or S
  MOD_RES (20), (21), (22), (23), (24): Xaa is A or G
  MOD_RES (25), (26), (27), (28): Xaa is A or G or is absent

SEQ ID NO: 51436 - protein, 38 aa, Artificial Sequence; identical to SEQ ID NO: 18751
  GFR-binding peptide
  MOD_RES (37), (37): Xaa is C or S

SEQ ID NO: 51437 - protein, 38 aa, Artificial Sequence
  GFR-binding peptide
  MOD_RES (4), (5), (36), (38): Xaa is C or S
ASPXXVSQDLSNITIQIMIGKTPKIIGEMSMIVKSXKX

SEQ ID NO: 51438 - protein, 31 aa, Artificial Sequence; identical to SEQ ID NO: 13622
  GFR-binding peptide

SEQ ID NO: 51439 - protein, 32 aa, Artificial Sequence; identical to SEQ ID NO: 13625
  GFR-binding peptide
  MOD_RES (32), (32): Xaa is C or S

SEQ ID NO: 51440 - protein, 37 aa, Artificial Sequence; identical to SEQ ID NO: 18755
  GFR-binding peptide
  MOD_RES (3), (3): Xaa is C or S

SEQ ID NO: 51441 - protein, 41 aa, Artificial Sequence; identical to SEQ ID NO: 13626
  GFR-binding peptide
  MOD_RES (3), (4), (38), (40): Xaa is C or S
  MOD_RES (18), (19), (20), (21), (22): Xaa is A or G
  MOD_RES (23), (24), (25), (26): Xaa is A or G or is absent

SEQ ID NO: 51442 - protein, 33 aa, Artificial Sequence; identical to SEQ ID NO: 38587
  GFR-binding peptide
  MOD_RES (33), (33): Xaa is C or S
  MOD_RES (14), (15), (16), (17), (18): Xaa is A or G
  MOD_RES (19), (20), (21), (22): Xaa is A or G or is absent

SEQ ID NO: 51443 - protein, 34 aa, Artificial Sequence
  GFR-binding peptide
  MOD_RES (33), (33): Xaa is C or S
  MOD_RES (14), (15), (16), (17), (18): Xaa is A or G
  MOD_RES (19), (20), (21), (22): Xaa is A or G or is absent
VPQALSNITIQIMXXXXXXXXXIGEMSMIVRSXK

SEQ ID NO: 51444 - protein, 37 aa, Artificial Sequence
  GFR-binding peptide
  MOD_RES (6), (6): Xaa is C or S
VTKPTXAPTKLRPVQVRKIDDSSNVIKKATVNMVVRS

SEQ ID NO: 51445 - protein, 43 aa, Artificial Sequence; identical to SEQ ID NO: 18756
  GFR-binding peptide
  MOD_RES (5), (42): Xaa is C or S
  MOD_RES (21), (22), (23), (24), (25): Xaa is A or G
  MOD_RES (26), (27), (28), (29): Xaa is A or G or is absent

SEQ ID NO: 51446 - protein, 35 aa, Artificial Sequence; identical to SEQ ID NO: 13627
  GFR-binding peptide
  MOD_RES (4), (5): Xaa is C or S

SEQ ID NO: 51447 - protein, 42 aa, Artificial Sequence; identical to SEQ ID NO: 18757
  GFR-binding peptide
  MOD_RES (6), (40), (42): Xaa is C or S

SEQ ID NO: 51448 - protein, 34 aa, Artificial Sequence
  GFR-binding peptide
  MOD_RES (2), (3): Xaa is C or S
AXXVPTELRPVQMRKIDEYDKVVKKATVEMVVEG

SEQ ID NO: 51449 - protein, 42 aa, Artificial Sequence; identical to SEQ ID NO: 13629
  GFR-binding peptide
  MOD_RES (5), (6), (39), (41): Xaa is C or S
  MOD_RES (20), (21), (22), (23), (24): Xaa is A or G
  MOD_RES (25), (26), (27), (28): Xaa is A or G or is absent

SEQ ID NO: 51450 - protein, 35 aa, Artificial Sequence
  GFR-binding peptide
  MOD_RES (1), (2): Xaa is C or S
  MOD_RES (16), (17), (18), (19), (20): Xaa is A or G
  MOD_RES (21), (22), (23), (24): Xaa is A or G or is absent
XXAPTQLSNITVQIMXXXXXXXXXIGEMSNMVVRA

SEQ ID NO: 51451 - protein, 35 aa, Artificial Sequence; identical to SEQ ID NO: 18759
  GFR-binding peptide
  MOD_RES (15), (16), (17), (18), (19): Xaa is A or G
  MOD_RES (20), (21), (22), (23): Xaa is A or G or is absent

SEQ ID NO: 51452 - protein, 35 aa, Artificial Sequence
  GFR-binding peptide
  MOD_RES (1), (34): Xaa is C or S
  MOD_RES (15), (16), (17), (18), (19): Xaa is A or G
  MOD_RES (20), (21), (22), (23): Xaa is A or G or is absent
XVPQALRSVKIAKVXXXXXXXXXKEVQVMIVRSXK

SEQ ID NO: 51453 - protein, 37 aa, Artificial Sequence
  GFR-binding peptide
  MOD_RES (2), (36): Xaa is C or S
EXVPTEEEPLTMLYYRIKPHQGQHEQLSNFLQHNKXE

SEQ ID NO: 51454 - protein, 37 aa, Artificial Sequence; identical to SEQ ID NO: 13634
  GFR-binding peptide
  MOD_RES (1), (2), (36): Xaa is C or S
  MOD_RES (16), (17), (18), (19), (20): Xaa is A or G
  MOD_RES (21), (22), (23), (24): Xaa is A or G or is absent

SEQ ID NO: 51455 - protein, 40 aa, Artificial Sequence
  GFR-binding peptide
  MOD_RES (2), (3), (37), (39): Xaa is C or S
  MOD_RES (17), (18), (19), (20), (21): Xaa is A or G
  MOD_RES (22), (23), (24), (25): Xaa is A or G or is absent
PXXAPTKLRPVQVRKIXXXXXXXXXKKATVNMVVRSXGXH

SEQ ID NO: 51456 - protein, 39 aa, Artificial Sequence; identical to SEQ ID NO: 13636
  GFR-binding peptide
  MOD_RES (2), (36), (38): Xaa is C or S
  MOD_RES (16), (17), (18), (19), (20): Xaa is A or G
  MOD_RES (21), (22), (23), (24): Xaa is A or G or is absent

SEQ ID NO: 51457 - protein, 41 aa, Artificial Sequence
  GFR-binding peptide
  MOD_RES (3), (40): Xaa is C or S
VQXRPTQVQLEPLTVLYYEIVRKKPIFEQLSNTLEDHLAXK

SEQ ID NO: 51458 - protein, 39 aa, Artificial Sequence
  GFR-binding peptide
  MOD_RES (4), (5), (37), (39): Xaa is C or S
PKAXXVPTELRPVQMRKIDENEKVVKKATVDMVVEGXGX

SEQ ID NO: 51459 - protein, 37 aa, Artificial Sequence; identical to SEQ ID NO: 13639
  GFR-binding peptide
  MOD_RES (34), (36): Xaa is C or S
  MOD_RES (14), (15), (16), (17), (18): Xaa is A or G
  MOD_RES (19), (20), (21), (22): Xaa is A or G or is absent

SEQ ID NO: 51460 - protein, 35 aa, Artificial Sequence; identical to SEQ ID NO: 18767
  GFR-binding peptide
  MOD_RES (3), (3): Xaa is C or S

SEQ ID NO: 51461 - protein, 40 aa, Artificial Sequence; identical to SEQ ID NO: 18768
  GFR-binding peptide
  MOD_RES (4), (4): Xaa is C or S
  MOD_RES (20), (21), (22), (23), (24): Xaa is A or G
  MOD_RES (25), (26), (27), (28): Xaa is A or G or is absent

SEQ ID NO: 51462 - protein, 38 aa, Artificial Sequence
  GFR-binding peptide
  MOD_RES (6), (7), (38): Xaa is C or S
ASASPXXVPQDLRPVQIRKIVGRTPKVKKATVMVVKSX

SEQ ID NO: 51463 - protein, 40 aa, Artificial Sequence
  GFR-binding peptide
  MOD_RES (2), (3), (37), (39): Xaa is C or S
  MOD_RES (17), (18), (19), (20), (21): Xaa is A or G
  MOD_RES (22), (23), (24), (25): Xaa is A or G or is absent
PXXAPTKLRSVKVAKVXXXXXXXXXKEVQVNMVVRSXGXH

SEQ ID NO: 51464 - protein, 40 aa, Artificial Sequence
  GFR-binding peptide
  MOD_RES (5), (37), (39): Xaa is C or S
TKPTXAPTKLRSVKVAKVDDSSNVIKEVQVNMVVRSXGXH

SEQ ID NO: 51465 - protein, 37 aa, Artificial Sequence
  GFR-binding peptide
  MOD_RES (4), (5): Xaa is C or S
  MOD_RES (19), (20), (21), (22), (23): Xaa is A or G
  MOD_RES (24), (25), (26), (27): Xaa is A or G or is absent
AAPXXVPQALSNITIQIMXXXXXXXXXIGEMSMIVRS

SEQ ID NO: 51466 - protein, 34 aa, Artificial Sequence
  GFR-binding peptide
  MOD_RES (4), (4): Xaa is C or S
KPTXAPTKLSNITVQIMDDSSNVIIGEMSNMVVR

SEQ ID NO: 51467 - protein, 32 aa, Artificial Sequence; identical to SEQ ID NO: 13653
  GFR-binding peptide
  MOD_RES (1), (1): Xaa is C or S

SEQ ID NO: 51468 - protein, 39 aa, Artificial Sequence; identical to SEQ ID NO: 13654
  GFR-binding peptide
  MOD_RES (4), (5), (37), (39): Xaa is C or S

SEQ ID NO: 51469 - protein, 44 aa, Artificial Sequence
  GFR-binding peptide
  MOD_RES (5), (42), (44): Xaa is C or S
SSVKXQPSRVHHEPLTVLYYEYVRKKPKLEQLSNRLEEHLEXAX

SEQ ID NO: 51470 - protein, 40 aa, Artificial Sequence
  GFR-binding peptide
  MOD_RES (6), (7), (38), (40): Xaa is C or S
ASASPXXVPQDLRPVQIRKIVGRTPKVKKATVMVVKSXKX

SEQ ID NO: 51471 - protein, 38 aa, Artificial Sequence
  GFR-binding peptide
  MOD_RES (4), (4): Xaa is C or S
  MOD_RES (20), (21), (22), (23), (24): Xaa is A or G
  MOD_RES (25), (26), (27), (28): Xaa is A or G or is absent
SVKXQPSRVHHEPLPVVYYXXXXXXXXXEQLSNRLEEH

SEQ ID NO: 51472 - protein, 38 aa, Artificial Sequence; identical to SEQ ID NO: 13657
  GFR-binding peptide
  MOD_RES (4), (38): Xaa is C or S
  MOD_RES (18), (19), (20), (21), (22): Xaa is A or G
  MOD_RES (23), (24), (25), (26): Xaa is A or G or is absent

SEQ ID NO: 51473 - protein, 36 aa, Artificial Sequence
  GFR-binding peptide
  MOD_RES (1), (2), (35): Xaa is C or S
  MOD_RES (16), (17), (18), (19), (20): Xaa is A or G
  MOD_RES (21), (22), (23), (24): Xaa is A or G or is absent
XXVPQALRSVKIAKVXXXXXXXXXKEVQVMIVRSXK

SEQ ID NO: 51474 - protein, 39 aa, Artificial Sequence; identical to SEQ ID NO: 18783
  GFR-binding peptide
  MOD_RES (36), (38): Xaa is C or S
  MOD_RES (15), (16), (17), (18), (19): Xaa is A or G
  MOD_RES (20), (21), (22), (23): Xaa is A or G or is absent

SEQ ID NO: 51475 - protein, 40 aa, Artificial Sequence
  GFR-binding peptide
  MOD_RES (6), (7), (39): Xaa is C or S
KIPKAXXVPTELRSVKMAKVDENEKVVKEVQVDMVVEGXG

SEQ ID NO: 51476 - protein, 37 aa, Artificial Sequence
  GFR-binding peptide
  MOD_RES (1), (35), (37): Xaa is C or S
  MOD_RES (15), (16), (17), (18), (19): Xaa is A or G
  MOD_RES (20), (21), (22), (23): Xaa is A or G or is absent
XAPTKLSNITVQIMXXXXXXXXXIGEMSNMVVRSXGX

SEQ ID NO: 51477 - protein, 39 aa, Artificial Sequence
  GFR-binding peptide
  MOD_RES (4), (5), (36), (38): Xaa is C or S
ASPXXVPQDLRPVQIRKIVGRTPKVKKATVMVVKSXKXS

SEQ ID NO: 51478 - protein, 37 aa, Artificial Sequence
  GFR-binding peptide
  MOD_RES (2), (34), (36): Xaa is C or S
TXAPTKLRSVKVAKVDDSSNVIKEVQVNMVVRSXGXH

SEQ ID NO: 51479 - protein, 35 aa, Artificial Sequence
  GFR-binding peptide
  MOD_RES (4), (5): Xaa is C or S
PKAXXVPTELSNITMQIMDENEKVVIGEMSDMVVE

SEQ ID NO: 51480 - protein, 34 aa, Artificial Sequence
  GFR-binding peptide
  MOD_RES (1), (2): Xaa is C or S
  MOD_RES (16), (17), (18), (19), (20): Xaa is A or G
  MOD_RES (21), (22), (23), (24): Xaa is A or G or is absent
XXVPQALSNITIQIMXXXXXXXXXIGEMSMIVRS

SEQ ID NO: 51481 - protein, 36 aa, Artificial Sequence; identical to SEQ ID NO: 18785
  GFR-binding peptide
  MOD_RES (3), (3): Xaa is C or S
  MOD_RES (17), (18), (19), (20), (21): Xaa is A or G
  MOD_RES (22), (23), (24), (25): Xaa is A or G or is absent

SEQ ID NO: 51482 - protein, 35 aa, Artificial Sequence
  GFR-binding peptide
  MOD_RES (1), (32), (34): Xaa is C or S
XVSQDLSNITIQIMIGKTPKIIGEMSMIVKSXKXS

SEQ ID NO: 51483 - protein, 38 aa, Artificial Sequence; identical to SEQ ID NO: 13666
  GFR-binding peptide
  MOD_RES (1), (2), (35), (37): Xaa is C or S
  MOD_RES (16), (17), (18), (19), (20): Xaa is A or G
  MOD_RES (21), (22), (23), (24): Xaa is A or G or is absent

SEQ ID NO: 51484 - protein, 41 aa, Artificial Sequence; identical to SEQ ID NO: 18789
  GFR-binding peptide
  MOD_RES (5), (5): Xaa is C or S

SEQ ID NO: 51485 - protein, 39 aa, Artificial Sequence; identical to SEQ ID NO: 13667
  GFR-binding peptide
  MOD_RES (7), (7): Xaa is C or S
  MOD_RES (21), (22), (23), (24), (25): Xaa is A or G
  MOD_RES (26), (27), (28), (29): Xaa is A or G or is absent

SEQ ID NO: 51486 - protein, 37 aa, Artificial Sequence
  GFR-binding peptide
  MOD_RES (4), (5), (36): Xaa is C or S
ASPXXVSQDLSNITIQIMIGKTPKIIGEMSMIVKSXK

SEQ ID NO: 51487 - protein, 39 aa, Artificial Sequence; identical to SEQ ID NO: 13668
  GFR-binding peptide
  MOD_RES (3), (4), (37), (39): Xaa is C or S
  MOD_RES (18), (19), (20), (21), (22): Xaa is A or G
  MOD_RES (23), (24), (25), (26): Xaa is A or G or is absent

SEQ ID NO: 51488 - protein, 35 aa, Artificial Sequence; identical to SEQ ID NO: 18790
  GFR-binding peptide
  MOD_RES (34), (34): Xaa is C or S

SEQ ID NO: 51489 - protein, 37 aa, Artificial Sequence
  GFR-binding peptide
  MOD_RES (5), (5): Xaa is C or S
  MOD_RES (19), (20), (21), (22), (23): Xaa is A or G
  MOD_RES (24), (25), (26), (27): Xaa is A or G or is absent
EGLEXVPTEEEPLTMLYYXXXXXXXXXEQLSNFLQHN

SEQ ID NO: 51490 - protein, 35 aa, Artificial Sequence; identical to SEQ ID NO: 13669
  GFR-binding peptide
  MOD_RES (2), (3): Xaa is C or S
  MOD_RES (17), (18), (19), (20), (21): Xaa is A or G
  MOD_RES (22), (23), (24), (25): Xaa is A or G or is absent

SEQ ID NO: 51491 - protein, 32 aa, Artificial Sequence
  GFR-binding peptide
  MOD_RES (1), (1): Xaa is C or S
XAPTQLRPVQVRKIDDSSNVIKKATVNMVVRA

SEQ ID NO: 51492 - protein, 37 aa, Artificial Sequence; identical to SEQ ID NO: 13670
  GFR-binding peptide
  MOD_RES (3), (4): Xaa is C or S
  MOD_RES (18), (19), (20), (21), (22): Xaa is A or G
  MOD_RES (23), (24), (25), (26): Xaa is A or G or is absent

SEQ ID NO: 51493 - protein, 34 aa, Artificial Sequence; identical to SEQ ID NO: 13671
  GFR-binding peptide
  MOD_RES (4), (4): Xaa is C or S

SEQ ID NO: 51494 - protein, 40 aa, Artificial Sequence
  GFR-binding peptide
  MOD_RES (1), (38), (40): Xaa is C or S
XQPSRVHHEPLPVVYYEYVRKKPKLEQLSNRLEEHLEXAX

SEQ ID NO: 51495 - protein, 36 aa, Artificial Sequence
  GFR-binding peptide
  MOD_RES (35), (35): Xaa is C or S
TQVQLEPLTVLYYEIVRKKPIFEQLSNTLEDHLAXK

SEQ ID NO: 51496 - protein, 37 aa, Artificial Sequence
  GFR-binding peptide
  MOD_RES (1), (1): Xaa is C or S
XQPSRVHHEPLPVVYYEYVRKKPKLEQLSNRLEEHLE

SEQ ID NO: 51497 - protein, 37 aa, Artificial Sequence; identical to SEQ ID NO: 18791
  GFR-binding peptide
  MOD_RES (2), (36): Xaa is C or S
  MOD_RES (16), (17), (18), (19), (20): Xaa is A or G
  MOD_RES (21), (22), (23), (24): Xaa is A or G or is absent

SEQ ID NO: 51498 - protein, 38 aa, Artificial Sequence; identical to SEQ ID NO: 18792
  GFR-binding peptide
  MOD_RES (2), (2): Xaa is C or S
  MOD_RES (18), (19), (20), (21), (22): Xaa is A or G
  MOD_RES (23), (24), (25), (26): Xaa is A or G or is absent

SEQ ID NO: 51499 - protein, 35 aa, Artificial Sequence
  GFR-binding peptide
  MOD_RES (2), (3), (35): Xaa is C or S
PXXAPTKLRPVQVRKIDDSSNVIKKATVNMVVRSX

SEQ ID NO: 51500 - protein, 42 aa, Artificial Sequence; identical to SEQ ID NO: 13676
  GFR-binding peptide
  MOD_RES (6), (40), (42): Xaa is C or S
  MOD_RES (20), (21), (22), (23), (24): Xaa is A or G
  MOD_RES (25), (26), (27), (28): Xaa is A or G or is absent

SEQ ID NO: 51501 - protein, 38 aa, Artificial Sequence
  GFR-binding peptide
  MOD_RES (4), (4): Xaa is C or S
  MOD_RES (20), (21), (22), (23), (24): Xaa is A or G
  MOD_RES (25), (26), (27), (28): Xaa is A or G or is absent
NVQXRPTQVQLEPLPVVYYXXXXXXXXXEQLSNTLEDH

SEQ ID NO: 51502 - protein, 39 aa, Artificial Sequence; identical to SEQ ID NO: 13677
  GFR-binding peptide
  MOD_RES (2), (3), (36), (38): Xaa is C or S
  MOD_RES (17), (18), (19), (20), (21): Xaa is A or G
  MOD_RES (22), (23), (24), (25): Xaa is A or G or is absent

SEQ ID NO: 51503 - protein, 40 aa, Artificial Sequence
  GFR-binding peptide
  MOD_RES (5), (5): Xaa is C or S
  MOD_RES (21), (22), (23), (24), (25): Xaa is A or G
  MOD_RES (26), (27), (28), (29): Xaa is A or G or is absent
SSVKXQPSRVHHEPLTVLYYXXXXXXXXXEQLSNRLEEHL

SEQ ID NO: 51504 - protein, 31 aa, Artificial Sequence
  GFR-binding peptide
APTQLSNITVQIMDDSSNVIIGEMSNMVVRA

SEQ ID NO: 51505 - protein, 42 aa, Artificial Sequence
  GFR-binding peptide
  MOD_RES (5), (39), (41): Xaa is C or S
EGLEXVPTEEEPLPMVYYRIKPHQGQHEQLSNFLQHNKXEXR

SEQ ID NO: 51506 - protein, 40 aa, Artificial Sequence
  GFR-binding peptide
  MOD_RES (37), (39): Xaa is C or S
  MOD_RES (16), (17), (18), (19), (20): Xaa is A or G
  MOD_RES (21), (22), (23), (24): Xaa is A or G or is absent
QPSRVHHEPLTVLYYXXXXXXXXXEQLSNRLEEHLEXAXA

SEQ ID NO: 51507 - protein, 37 aa, Artificial Sequence; identical to SEQ ID NO: 13679
  GFR-binding peptide
  MOD_RES (1), (34), (36): Xaa is C or S
  MOD_RES (15), (16), (17), (18), (19): Xaa is A or G
  MOD_RES (20), (21), (22), (23): Xaa is A or G or is absent

SEQ ID NO: 51508 - protein, 40 aa, Artificial Sequence
  GFR-binding peptide
  MOD_RES (6), (7), (40): Xaa is C or S
  MOD_RES (21), (22), (23), (24), (25): Xaa is A or G
  MOD_RES (26), (27), (28), (29): Xaa is A or G or is absent
ASASPXXVSQDLRSVKIAKVXXXXXXXXXKEVQVMIVKSX

SEQ ID NO: 51509 - protein, 39 aa, Artificial Sequence; identical to SEQ ID NO: 13681
  GFR-binding peptide
  MOD_RES (4), (5), (39): Xaa is C or S
  MOD_RES (19), (20), (21), (22), (23): Xaa is A or G
  MOD_RES (24), (25), (26), (27): Xaa is A or G or is absent

SEQ ID NO: 51510 - protein, 39 aa, Artificial Sequence
  GFR-binding peptide
  MOD_RES (1), (2), (36), (38): Xaa is C or S
  MOD_RES (16), (17), (18), (19), (20): Xaa is A or G
  MOD_RES (21), (22), (23), (24): Xaa is A or G or is absent
XXAPTQLSNITVQIMXXXXXXXXXIGEMSNMVVRAXGXH

SEQ ID NO: 51511 - protein, 36 aa, Artificial Sequence; identical to SEQ ID NO: 13682
  GFR-binding peptide
  MOD_RES (3), (4): Xaa is C or S
  MOD_RES (18), (19), (20), (21), (22): Xaa is A or G
  MOD_RES (23), (24), (25), (26): Xaa is A or G or is absent

SEQ ID NO: 51512 - protein, 38 aa, Artificial Sequence; identical to SEQ ID NO: 13683
  GFR-binding peptide
  MOD_RES (1), (2), (36), (38): Xaa is C or S
  MOD_RES (16), (17), (18), (19), (20): Xaa is A or G
  MOD_RES (21), (22), (23), (24): Xaa is A or G or is absent

SEQ ID NO: 51513 - protein, 41 aa, Artificial Sequence; identical to SEQ ID NO: 18797
  GFR-binding peptide
  MOD_RES (4), (41): Xaa is C or S

SEQ ID NO: 51514 - protein, 40 aa, Artificial Sequence
  GFR-binding peptide
  MOD_RES (4), (4): Xaa is C or S
  MOD_RES (20), (21), (22), (23), (24): Xaa is A or G
  MOD_RES (25), (26), (27), (28): Xaa is A or G or is absent
SVKXQPSRVHHEPLPVVYYXXXXXXXXXEQLSNRLEEHLE

SEQ ID NO: 51515 - protein, 38 aa, Artificial Sequence; identical to SEQ ID NO: 18798
  GFR-binding peptide
  MOD_RES (6), (6): Xaa is C or S
  MOD_RES (20), (21), (22), (23), (24): Xaa is A or G
  MOD_RES (25), (26), (27), (28): Xaa is A or G or is absent

SEQ ID NO: 51516 - protein, 42 aa, Artificial Sequence
  GFR-binding peptide
  MOD_RES (5), (42): Xaa is C or S
  MOD_RES (21), (22), (23), (24), (25): Xaa is A or G
  MOD_RES (26), (27), (28), (29): Xaa is A or G or is absent
SSVKXQPSRVHHEPLTVLYYXXXXXXXXXEQLSNRLEEHLEX

SEQ ID NO: 51517 - protein, 34 aa, Artificial Sequence
  GFR-binding peptide
  MOD_RES (1), (32), (34): Xaa is C or S
XVSQDLSNITIQIMIGKTPKIIGEMSMIVKSXKX

SEQ ID NO: 51518 - protein, 39 aa, Artificial Sequence
  GFR-binding peptide
  MOD_RES (4), (38): Xaa is C or S
  MOD_RES (18), (19), (20), (21), (22): Xaa is A or G
  MOD_RES (23), (24), (25), (26): Xaa is A or G or is absent
GLEXVPTEEEPLPMVYYXXXXXXXXXEQLSNFLQHNKXE

SEQ ID NO: 51519 - protein, 35 aa, Artificial Sequence
  GFR-binding peptide
  MOD_RES (34), (34): Xaa is C or S
  MOD_RES (14), (15), (16), (17), (18): Xaa is A or G
  MOD_RES (19), (20), (21), (22): Xaa is A or G or is absent
VPTELSNITMQIMXXXXXXXXXIGEMSEMVVEGXG

SEQ ID NO: 51520 - protein, 36 aa, Artificial Sequence; identical to SEQ ID NO: 18800
  GFR-binding peptide
  MOD_RES (16), (17), (18), (19), (20): Xaa is A or G
  MOD_RES (21), (22), (23), (24): Xaa is A or G or is absent

SEQ ID NO: 51521 - protein, 37 aa, Artificial Sequence; identical to SEQ ID NO: 13686
  GFR-binding peptide
  MOD_RES (4), (5): Xaa is C or S
  MOD_RES (19), (20), (21), (22), (23): Xaa is A or G
  MOD_RES (24), (25), (26), (27): Xaa is A or G or is absent

SEQ ID NO: 51522 - protein, 41 aa, Artificial Sequence; identical to SEQ ID NO: 13689
  GFR-binding peptide
  MOD_RES (6), (7), (40): Xaa is C or S
  MOD_RES (21), (22), (23), (24), (25): Xaa is A or G
  MOD_RES (26), (27), (28), (29): Xaa is A or G or is absent

SEQ ID NO: 51523 - protein, 36 aa, Artificial Sequence; identical to SEQ ID NO: 18801
  GFR-binding peptide
  MOD_RES (2), (36): Xaa is C or S

SEQ ID NO: 51524 - protein, 35 aa, Artificial Sequence; identical to SEQ ID NO: 13691
  GFR-binding peptide
  MOD_RES (1), (2), (33), (35): Xaa is C or S

SEQ ID NO: 51525 - protein, 37 aa, Artificial Sequence; identical to SEQ ID NO: 18802
  GFR-binding peptide
  MOD_RES (1), (1): Xaa is C or S

SEQ ID NO: 51526 - protein, 35 aa, Artificial Sequence
  GFR-binding peptide
  MOD_RES (2), (3): Xaa is C or S
  MOD_RES (17), (18), (19), (20), (21): Xaa is A or G
  MOD_RES (22), (23), (24), (25): Xaa is A or G or is absent
PXXVPQDLRPVQIRKIXXXXXXXXXKKATVMVVKS

SEQ ID NO: 51527 - protein, 38 aa, Artificial Sequence; identical to SEQ ID NO: 13692
  GFR-binding peptide
  MOD_RES (2), (3), (35), (37): Xaa is C or S

SEQ ID NO: 51528 - protein, 40 aa, Artificial Sequence; identical to SEQ ID NO: 18803
  GFR-binding peptide
  MOD_RES (3), (40): Xaa is C or S

SEQ ID NO: 51529 - protein, 34 aa, Artificial Sequence; identical to SEQ ID NO: 13694
  GFR-binding peptide
  MOD_RES (2), (3): Xaa is C or S

SEQ ID NO: 51530 - protein, 39 aa, Artificial Sequence; identical to SEQ ID NO: 18806
  GFR-binding peptide
  MOD_RES (37), (39): Xaa is C or S
  MOD_RES (16), (17), (18), (19), (20): Xaa is A or G
  MOD_RES (21), (22), (23), (24): Xaa is A or G or is absent

SEQ ID NO: 51531 - protein, 40 aa, Artificial Sequence
  GFR-binding peptide
  MOD_RES (6), (7), (39): Xaa is C or S
YVPKPXXAPTKLSNITVQIMDDSSNVIIGEMSNMVVRSXG

SEQ ID NO: 51532 - protein, 33 aa, Artificial Sequence; identical to SEQ ID NO: 18807
  GFR-binding peptide
  MOD_RES (15), (16), (17), (18), (19): Xaa is A or G
  MOD_RES (20), (21), (22), (23): Xaa is A or G or is absent

SEQ ID NO: 51533 - protein, 35 aa, Artificial Sequence; identical to SEQ ID NO: 18809
  GFR-binding peptide
  MOD_RES (2), (2): Xaa is C or S

SEQ ID NO: 51534 - protein, 40 aa, Artificial Sequence
  GFR-binding peptide
  MOD_RES (6), (7), (38), (40): Xaa is C or S
ASASPXXVSQDLRSVKIAKVIGKTPKIKEVQVMIVKSXKX

SEQ ID NO: 51535 - protein, 35 aa, Artificial Sequence
  GFR-binding peptide
  MOD_RES (1), (2): Xaa is C or S
  MOD_RES (16), (17), (18), (19), (20): Xaa is A or G
  MOD_RES (21), (22), (23), (24): Xaa is A or G or is absent
XXAPTKLSNITVQIMXXXXXXXXXIGEMSNMVVRS

SEQ ID NO: 51536 - protein, 41 aa, Artificial Sequence; identical to SEQ ID NO: 13700
  GFR-binding peptide
  MOD_RES (7), (41): Xaa is C or S
  MOD_RES (21), (22), (23), (24), (25): Xaa is A or G
  MOD_RES (26), (27), (28), (29): Xaa is A or G or is absent

SEQ ID NO: 51537 - protein, 35 aa, Artificial Sequence; identical to SEQ ID NO: 18812
  GFR-binding peptide

SEQ ID NO: 51538 - protein, 30 aa, Artificial Sequence; identical to SEQ ID NO: 13703
  GFR-binding peptide

SEQ ID NO: 51539 - protein, 40 aa, Artificial Sequence; identical to SEQ ID NO: 13704
  GFR-binding peptide
  MOD_RES (6), (7): Xaa is C or S
  MOD_RES (21), (22), (23), (24), (25): Xaa is A or G
  MOD_RES (26), (27), (28), (29): Xaa is A or G or is absent

SEQ ID NO: 51540 - protein, 34 aa, Artificial Sequence
  GFR-binding peptide
  MOD_RES (3), (4): Xaa is C or S
APXXVPQALSNITIQIMVGRKPKVIGEMSMIVRS

SEQ ID NO: 51541 - protein, 39 aa, Artificial Sequence
  GFR-binding peptide
  MOD_RES (2), (3), (37), (39): Xaa is C or S
  MOD_RES (17), (18), (19), (20), (21): Xaa is A or G
  MOD_RES (22), (23), (24), (25): Xaa is A or G or is absent
PXXAPTKLSNITVQIMXXXXXXXXXIGEMSNMVVRSXGX

SEQ ID NO: 51542 - protein, 38 aa, Artificial Sequence; identical to SEQ ID NO: 18814
  GFR-binding peptide
  MOD_RES (3), (3): Xaa is C or S
  MOD_RES (19), (20), (21), (22), (23): Xaa is A or G
  MOD_RES (24), (25), (26), (27): Xaa is A or G or is absent

SEQ ID NO: 51543 - protein, 40 aa, Artificial Sequence
  GFR-binding peptide
  MOD_RES (5), (6), (40): Xaa is C or S
  MOD_RES (20), (21), (22), (23), (24): Xaa is A or G
  MOD_RES (25), (26), (27), (28): Xaa is A or G or is absent
VPKPXXAPTKLSNITVQIMXXXXXXXXXIGEMSNMVVRSX

SEQ ID NO: 51544 - protein, 35 aa, Artificial Sequence
  GFR-binding peptide
  MOD_RES (2), (3): Xaa is C or S
  MOD_RES (17), (18), (19), (20), (21): Xaa is A or G
  MOD_RES (22), (23), (24), (25): Xaa is A or G or is absent
PXXVPQDLRSVKIAKVXXXXXXXXXKEVQVMVVKS

SEQ ID NO: 51545 - protein, 40 aa, Artificial Sequence; identical to SEQ ID NO: 18815
  GFR-binding peptide
  MOD_RES (37), (39): Xaa is C or S
  MOD_RES (16), (17), (18), (19), (20): Xaa is A or G
  MOD_RES (21), (22), (23), (24): Xaa is A or G or is absent

SEQ ID NO: 51546 - protein, 40 aa, Artificial Sequence; identical to SEQ ID NO: 38709
  GFR-binding peptide
  MOD_RES (3), (4), (37), (39): Xaa is C or S
  MOD_RES (18), (19), (20), (21), (22): Xaa is A or G
  MOD_RES (23), (24), (25), (26): Xaa is A or G or is absent

SEQ ID NO: 51547 - protein, 32 aa, Artificial Sequence; identical to SEQ ID NO: 13706
  GFR-binding peptide
  MOD_RES (14), (15), (16), (17), (18): Xaa is A or G
  MOD_RES (19), (20), (21), (22): Xaa is A or G or is absent

SEQ ID NO: 51548 - protein, 42 aa, Artificial Sequence
  GFR-binding peptide
  MOD_RES (5), (6), (40), (42): Xaa is C or S
  MOD_RES (20), (21), (22), (23), (24): Xaa is A or G
  MOD_RES (25), (26), (27), (28): Xaa is A or G or is absent
VPKPXXAPTQLRPVQVRKIXXXXXXXXXKKATVNMVVRAXGX

SEQ ID NO: 51549 - protein, 32 aa, Artificial Sequence
  GFR-binding peptide
  MOD_RES (1), (2): Xaa is C or S
XXAPTQLRPVQVRKIDDSSNVIKKATVNMVVR

SEQ ID NO: 51550 - protein, 42 aa, Artificial Sequence
  GFR-binding peptide
  MOD_RES (4), (5), (39), (41): Xaa is C or S
  MOD_RES (19), (20), (21), (22), (23): Xaa is A or G
  MOD_RES (24), (25), (26), (27): Xaa is A or G or is absent
PKPXXAPTQLRPVQVRKIXXXXXXXXXKKATVNMVVRAXGXH

SEQ ID NO: 51551 - protein, 37 aa, Artificial Sequence
  GFR-binding peptide
  MOD_RES (2), (3), (36): Xaa is C or S
  MOD_RES (17), (18), (19), (20), (21): Xaa is A or G
  MOD_RES (22), (23), (24), (25): Xaa is A or G or is absent
PXXVSQDLSNITIQIMXXXXXXXXXIGEMSMIVKSXK

SEQ ID NO: 51552 - protein, 38 aa, Artificial Sequence; identical to SEQ ID NO: 13708
  GFR-binding peptide
  MOD_RES (2), (3), (35), (37): Xaa is C or S

SEQ ID NO: 51553 - protein, 37 aa, Artificial Sequence; identical to SEQ ID NO: 13709
  GFR-binding peptide
  MOD_RES (1), (35), (37): Xaa is C or S
  MOD_RES (15), (16), (17), (18), (19): Xaa is A or G
  MOD_RES (20), (21), (22), (23): Xaa is A or G or is absent

SEQ ID NO: 51554 - protein, 36 aa, Artificial Sequence; identical to SEQ ID NO: 38718
  GFR-binding peptide
  MOD_RES (2), (3), (36): Xaa is C or S
  MOD_RES (17), (18), (19), (20), (21): Xaa is A or G
  MOD_RES (22), (23), (24), (25): Xaa is A or G or is absent

SEQ ID NO: 51555 - protein, 31 aa, Artificial Sequence; identical to SEQ ID NO: 13711
  GFR-binding peptide
  MOD_RES (1), (1): Xaa is C or S

SEQ ID NO: 51556 - protein, 34 aa, Artificial Sequence
  GFR-binding peptide
  MOD_RES (1), (2), (33): Xaa is C or S
XXVPQALRPVQIRKIVGRKPKVKKATVMIVRSXK

SEQ ID NO: 51557 - protein, 38 aa, Artificial Sequence
  GFR-binding peptide
  MOD_RES (5), (6): Xaa is C or S
  MOD_RES (20), (21), (22), (23), (24): Xaa is A or G
  MOD_RES (25), (26), (27), (28): Xaa is A or G or is absent
SASPXXVPQDLSNITIQIMXXXXXXXXXIGEMSMVVKS

SEQ ID NO: 51558 - protein, 40 aa, Artificial Sequence
  GFR-binding peptide
  MOD_RES (3), (4), (38), (40): Xaa is C or S
  MOD_RES (18), (19), (20), (21), (22): Xaa is A or G
  MOD_RES (23), (24), (25), (26): Xaa is A or G or is absent
KAXXVPTELRPVQMRKIXXXXXXXXXKKATVDMVVEGXGX

SEQ ID NO: 51559 - protein, 35 aa, Artificial Sequence
  GFR-binding peptide
  MOD_RES (3), (4), (35): Xaa is C or S
APXXVPQALRSVKIAKVVGRKPKVKEVQVMIVRSX

SEQ ID NO: 51560 - protein, 36 aa, Artificial Sequence; identical to SEQ ID NO: 13715
  GFR-binding peptide
  MOD_RES (1), (35): Xaa is C or S
  MOD_RES (15), (16), (17), (18), (19): Xaa is A or G
  MOD_RES (20), (21), (22), (23): Xaa is A or G or is absent

SEQ ID NO: 51561 - protein, 32 aa, Artificial Sequence
  GFR-binding peptide
  MOD_RES (14), (15), (16), (17), (18): Xaa is A or G
  MOD_RES (19), (20), (21), (22): Xaa is A or G or is absent
APTKLRPVQVRKIXXXXXXXXXKKATVNMVVR

SEQ ID NO: 51562 - protein, 38 aa, Artificial Sequence
  GFR-binding peptide
  MOD_RES (2), (36), (38): Xaa is C or S
  MOD_RES (16), (17), (18), (19), (20): Xaa is A or G
  MOD_RES (21), (22), (23), (24): Xaa is A or G or is absent
TXAPTKLRPVQVRKIXXXXXXXXXKKATVNMVVRSXGX

SEQ ID NO: 51563 - protein, 38 aa, Artificial Sequence
  GFR-binding peptide
  MOD_RES (1), (38): Xaa is C or S
XQPSRVHHEPLPVVYYEYVRKKPKLEQLSNRLEEHLEX

SEQ ID NO: 51564 - protein, 37 aa, Artificial Sequence
  GFR-binding peptide
  MOD_RES (34), (36): Xaa is C or S
  MOD_RES (14), (15), (16), (17), (18): Xaa is A or G
  MOD_RES (19), (20), (21), (22): Xaa is A or G or is absent
VPTEEEPLTMLYYXXXXXXXXXEQLSNFLQHNKXEXR

SEQ ID NO: 51565 - protein, 39 aa, Artificial Sequence
  GFR-binding peptide
  MOD_RES (5), (6), (37), (39): Xaa is C or S
SASPXXVPQDLRSVKIAKVVGRTPKVKEVQVMVVKSXKX

SEQ ID NO: 51566 - protein, 38 aa, Artificial Sequence
  GFR-binding peptide
  MOD_RES (2), (2): Xaa is C or S
  MOD_RES (18), (19), (20), (21), (22): Xaa is A or G
  MOD_RES (23), (24), (25), (26): Xaa is A or G or is absent
KXQPSRVHHEPLPVVYYXXXXXXXXXEQLSNRLEEHLE

SEQ ID NO: 51567 - protein, 36 aa, Artificial Sequence; identical to SEQ ID NO: 13719
  GFR-binding peptide
  MOD_RES (4), (5): Xaa is C or S

SEQ ID NO: 51568 - protein, 38 aa, Artificial Sequence; identical to SEQ ID NO: 18820
  GFR-binding peptide
  MOD_RES (5), (5): Xaa is C or S

SEQ ID NO: 51569 - protein, 34 aa, Artificial Sequence
  GFR-binding peptide
  MOD_RES (4), (4): Xaa is C or S
KPTXAPTKLRSVKVAKVDDSSNVIKEVQVNMVVR

SEQ ID NO: 51570 - protein, 37 aa, Artificial Sequence; identical to SEQ ID NO: 13720
  GFR-binding peptide
  MOD_RES (1), (35), (37): Xaa is C or S
  MOD_RES (15), (16), (17), (18), (19): Xaa is A or G
  MOD_RES (20), (21), (22), (23): Xaa is A or G or is absent

SEQ ID NO: 51571 - protein, 39 aa, Artificial Sequence
  GFR-binding peptide
  MOD_RES (5), (39): Xaa is C or S
EGLEXVPTEEEPLTMLYYRIKPHQGQHEQLSNFLQHNKX

SEQ ID NO: 51572 - protein, 31 aa, Artificial Sequence; identical to SEQ ID NO: 13722
  GFR-binding peptide
  MOD_RES (31), (31): Xaa is C or S

SEQ ID NO: 51573 - protein, 32 aa, Artificial Sequence; identical to SEQ ID NO: 13723
  GFR-binding peptide
  MOD_RES (14), (15), (16), (17), (18): Xaa is A or G
  MOD_RES (19), (20), (21), (22): Xaa is A or G or is absent

SEQ ID NO: 51574 - protein, 34 aa, Artificial Sequence; identical to SEQ ID NO: 13724
  GFR-binding peptide
  MOD_RES (32), (34): Xaa is C or S

SEQ ID NO: 51575 - protein, 35 aa, Artificial Sequence; identical to SEQ ID NO: 18821
  GFR-binding peptide

SEQ ID NO: 51576 - protein, 38 aa, Artificial Sequence
  GFR-binding peptide
  MOD_RES (3), (4), (36), (38): Xaa is C or S
KPXXAPTQLRSVKVAKVDDSSNVIKEVQVNMVVRAXGX

SEQ ID NO: 51577 - protein, 40 aa, Artificial Sequence; identical to SEQ ID NO: 13726
  GFR-binding peptide
  MOD_RES (6), (7): Xaa is C or S
  MOD_RES (21), (22), (23), (24), (25): Xaa is A or G
  MOD_RES (26), (27), (28), (29): Xaa is A or G or is absent

SEQ ID NO: 51578 - protein, 34 aa, Artificial Sequence; identical to SEQ ID NO: 13728
  GFR-binding peptide
  MOD_RES (1), (1): Xaa is C or S
  MOD_RES (15), (16), (17), (18), (19): Xaa is A or G
  MOD_RES (20), (21), (22), (23): Xaa is A or G or is absent

SEQ ID NO: 51579 - protein, 41 aa, Artificial Sequence
  GFR-binding peptide
  MOD_RES (2), (39), (41): Xaa is C or S
KXQPSRVHHEPLTVLYYEYVRKKPKLEQLSNRLEEHLEXAX

SEQ ID NO: 51580 - protein, 40 aa, Artificial Sequence
  GFR-binding peptide
  MOD_RES (6), (38), (40): Xaa is C or S
VTKPTXAPTKLRSVKVAKVDDSSNVIKEVQVNMVVRSXGX

SEQ ID NO: 51581 - protein, 36 aa, Artificial Sequence; identical to SEQ ID NO: 18822
  GFR-binding peptide
  MOD_RES (34), (36): Xaa is C or S
  MOD_RES (14), (15), (16), (17), (18): Xaa is A or G
  MOD_RES (19), (20), (21), (22): Xaa is A or G or is absent

SEQ ID NO: 51582 - protein, 38 aa, Artificial Sequence; identical to SEQ ID NO: 18823
  GFR-binding peptide
  MOD_RES (4), (38): Xaa is C or S

SEQ ID NO: 51583 - protein, 36 aa, Artificial Sequence
  GFR-binding peptide
  MOD_RES (33), (35): Xaa is C or S
  MOD_RES (14), (15), (16), (17), (18): Xaa is A or G
  MOD_RES (19), (20), (21), (22): Xaa is A or G or is absent
VSQDLRSVKIAKVXXXXXXXXXKEVQVMIVKSXKXS

SEQ ID NO: 51584 - protein, 37 aa, Artificial Sequence
  GFR-binding peptide
  MOD_RES (3), (4): Xaa is C or S
  MOD_RES (18), (19), (20), (21), (22): Xaa is A or G
  MOD_RES (23), (24), (25), (26): Xaa is A or G or is absent
KAXXVPTELSNITMQIMXXXXXXXXXIGEMSDMVVEG

SEQ ID NO: 51585 - protein, 39 aa, Artificial Sequence; identical to SEQ ID NO: 13733
  GFR-binding peptide
  MOD_RES (5), (6): Xaa is C or S
  MOD_RES (20), (21), (22), (23), (24): Xaa is A or G
  MOD_RES (25), (26), (27), (28): Xaa is A or G or is absent

SEQ ID NO: 51586 - protein, 37 aa, Artificial Sequence
  GFR-binding peptide
  MOD_RES (3), (4): Xaa is C or S
  MOD_RES (18), (19), (20), (21), (22): Xaa is A or G
  MOD_RES (23), (24), (25), (26): Xaa is A or G or is absent
KAXXVPTELRSVKMAKVXXXXXXXXXKEVQVEMVVEG

SEQ ID NO: 51587 - protein, 33 aa, Artificial Sequence
  GFR-binding peptide
SRVHHEPLPVVYYEYVRKKPKLEQLSNRLEEHL

SEQ ID NO: 51588 - protein, 37 aa, Artificial Sequence; identical to SEQ ID NO: 18825
  GFR-binding peptide
  MOD_RES (37), (37): Xaa is C or S
  MOD_RES (16), (17), (18), (19), (20): Xaa is A or G
  MOD_RES (21), (22), (23), (24): Xaa is A or G or is absent

SEQ ID NO: 51589 - protein, 42 aa, Artificial Sequence
  GFR-binding peptide
  MOD_RES (6), (7), (41): Xaa is C or S
  MOD_RES (21), (22), (23), (24), (25): Xaa is A or G
  MOD_RES (26), (27), (28), (29): Xaa is A or G or is absent
SIPKAXXVPTELRPVQMRKIXXXXXXXXXKKATVEMVVEGXG

SEQ ID NO: 51590 - protein, 38 aa, Artificial Sequence
  GFR-binding peptide
  MOD_RES (2), (3), (37): Xaa is C or S
  MOD_RES (17), (18), (19), (20), (21): Xaa is A or G
  MOD_RES (22), (23), (24), (25): Xaa is A or G or is absent
AXXVPTELRPVQMRKIXXXXXXXXXKKATVEMVVEGXG

SEQ ID NO: 51591 - protein, 42 aa, Artificial Sequence
  GFR-binding peptide
  MOD_RES (4), (5), (39), (41): Xaa is C or S
  MOD_RES (19), (20), (21), (22), (23): Xaa is A or G
  MOD_RES (24), (25), (26), (27): Xaa is A or G or is absent
PKPXXAPTQLSNITVQIMXXXXXXXXXIGEMSNMVVRAXGXH

SEQ ID NO: 51592 - protein, 35 aa, Artificial Sequence
  GFR-binding peptide
  MOD_RES (4), (5): Xaa is C or S
ASPXXVSQDLRPVQIRKIIGKTPKIKKATVMIVKS

SEQ ID NO: 51593 - protein, 42 aa, Artificial Sequence; identical to SEQ ID NO: 13737
  GFR-binding peptide
  MOD_RES (5), (6), (39), (41): Xaa is C or S
  MOD_RES (20), (21), (22), (23), (24): Xaa is A or G
  MOD_RES (25), (26), (27), (28): Xaa is A or G or is absent

SEQ ID NO: 51594 - protein, 37 aa, Artificial Sequence
  GFR-binding peptide
  MOD_RES (1), (2), (36): Xaa is C or S
  MOD_RES (16), (17), (18), (19), (20): Xaa is A or G
  MOD_RES (21), (22), (23), (24): Xaa is A or G or is absent
XXAPTKLRSVKVAKVXXXXXXXXXKEVQVNMVVRSXG

SEQ ID NO: 51595 - protein, 33 aa, Artificial Sequence; identical to SEQ ID NO: 13739
  GFR-binding peptide
  MOD_RES (1), (33): Xaa is C or S

SEQ ID NO: 51596 - protein, 37 aa, Artificial Sequence; identical to SEQ ID NO: 13742
  GFR-binding peptide
  MOD_RES (5), (6): Xaa is C or S

SEQ ID NO: 51597 - protein, 32 aa, Artificial Sequence
  GFR-binding peptide
  MOD_RES (1), (2): Xaa is C or S
XXVPQDLRSVKIAKVVGRTPKVKEVQVMVVKS

SEQ ID NO: 51598 - protein, 38 aa, Artificial Sequence; identical to SEQ ID NO: 13744
  GFR-binding peptide
  MOD_RES (1), (2), (35), (37): Xaa is C or S
  MOD_RES (16), (17), (18), (19), (20): Xaa is A or G
  MOD_RES (21), (22), (23), (24): Xaa is A or G or is absent

SEQ ID NO: 51599 - protein, 35 aa, Artificial Sequence
  GFR-binding peptide
  MOD_RES (32), (34): Xaa is C or S
VPTELRPVQMRKIDEYDKVVKKATVEMVVEGXGXR

SEQ ID NO: 51600 - protein, 37 aa, Artificial Sequence; identical to SEQ ID NO: 13747
  GFR-binding peptide
  MOD_RES (3), (4), (35), (37): Xaa is C or S

SEQ ID NO: 51601 - protein, 35 aa, Artificial Sequence; identical to SEQ ID NO: 13748
  GFR-binding peptide
  MOD_RES (3), (4), (35): Xaa is C or S

SEQ ID NO: 51602 - protein, 40 aa, Artificial Sequence; identical to SEQ ID NO: 18837
  GFR-binding peptide
  MOD_RES (2), (39): Xaa is C or S
  MOD_RES (18), (19), (20), (21), (22): Xaa is A or G
  MOD_RES (23), (24), (25), (26): Xaa is A or G or is absent

SEQ ID NO: 51603 - protein, 43 aa, Artificial Sequence; identical to SEQ ID NO: 18838
  GFR-binding peptide
  MOD_RES (5), (42): Xaa is C or S

SEQ ID NO: 51604 - protein, 42 aa, Artificial Sequence
  GFR-binding peptide
  MOD_RES (6), (7), (40), (42): Xaa is C or S
  MOD_RES (21), (22), (23), (24), (25): Xaa is A or G
  MOD_RES (26), (27), (28), (29): Xaa is A or G or is absent
ASASPXXVPQDLRSVKIAKVXXXXXXXXXKEVQVMVVKSXKX

SEQ ID NO: 51605 - protein, 37 aa, Artificial Sequence
  GFR-binding peptide
  MOD_RES (34), (36): Xaa is C or S
  MOD_RES (14), (15), (16), (17), (18): Xaa is A or G
  MOD_RES (19), (20), (21), (22): Xaa is A or G or is absent
APTQLRPVQVRKIXXXXXXXXXKKATVNMVVRAXGXH

SEQ ID NO: 51606 - protein, 40 aa, Artificial Sequence; identical to SEQ ID NO: 13751
  GFR-binding peptide
  MOD_RES (2), (3), (37), (39): Xaa is C or S
  MOD_RES (17), (18), (19), (20), (21): Xaa is A or G
  MOD_RES (22), (23), (24), (25): Xaa is A or G or is absent

SEQ ID NO: 51607 - protein, 35 aa, Artificial Sequence; identical to SEQ ID NO: 18840
  GFR-binding peptide
  MOD_RES (35), (35): Xaa is C or S
  MOD_RES (14), (15), (16), (17), (18): Xaa is A or G
  MOD_RES (19), (20), (21), (22): Xaa is A or G or is absent

SEQ ID NO: 51608 - protein, 34 aa, Artificial Sequence
  GFR-binding peptide
  MOD_RES (32), (34): Xaa is C or S
APTKLSNITVQIMDDSSNVIIGEMSNMVVRSXGX

SEQ ID NO: 51609 - protein, 39 aa, Artificial Sequence
  GFR-binding peptide
  MOD_RES (4), (5), (39): Xaa is C or S
  MOD_RES (19), (20), (21), (22), (23): Xaa is A or G
  MOD_RES (24), (25), (26), (27): Xaa is A or G or is absent
PKPXXAPTQLRPVQVRKIXXXXXXXXXKKATVNMVVRAX

SEQ ID NO: 51610 - protein, 31 aa, Artificial Sequence
  GFR-binding peptide
  MOD_RES (31), (31): Xaa is C or S
VPQALRSVKIAKVVGRKPKVKEVQVMIVRSX

SEQ ID NO: 51611 - protein, 37 aa, Artificial Sequence
  GFR-binding peptide
  MOD_RES (1), (2), (34), (36): Xaa is C or S
XXVPTELRPVQMRKIDEYDKVVKKATVEMVVEGXGXR

SEQ ID NO: 51612 - protein, 32 aa, Artificial Sequence
  GFR-binding peptide
  MOD_RES (14), (15), (16), (17), (18): Xaa is A or G
  MOD_RES (19), (20), (21), (22): Xaa is A or G or is absent
VSQDLRPVQIRKIXXXXXXXXXKKATVMIVKS

SEQ ID NO: 51613 - protein, 35 aa, Artificial Sequence
  GFR-binding peptide
  MOD_RES (2), (34): Xaa is C or S
TXAPTKLRPVQVRKIDDSSNVIKKATVNMVVRSXG

SEQ ID NO: 51614 - protein, 35 aa, Artificial Sequence
  GFR-binding peptide
  MOD_RES (34), (34): Xaa is C or S
  MOD_RES (14), (15), (16), (17), (18): Xaa is A or G
  MOD_RES (19), (20), (21), (22): Xaa is A or G or is absent
VPTELRPVQMRKIXXXXXXXXXKKATVDMVVEGXG

SEQ ID NO: 51615 - protein, 36 aa, Artificial Sequence; identical to SEQ ID NO: 18845
  GFR-binding peptide
  MOD_RES (1), (1): Xaa is C or S
  MOD_RES (17), (18), (19), (20), (21): Xaa is A or G
  MOD_RES (22), (23), (24), (25): Xaa is A or G or is absent

SEQ ID NO: 51616 - protein, 36 aa, Artificial Sequence
  GFR-binding peptide
  MOD_RES (2), (3): Xaa is C or S
  MOD_RES (17), (18), (19), (20), (21): Xaa is A or G
  MOD_RES (22), (23), (24), (25): Xaa is A or G or is absent
AXXVPTELRPVQMRKIXXXXXXXXXKKATVDMVVEG

SEQ ID NO: 51617 - protein, 35 aa, Artificial Sequence; identical to SEQ ID NO: 13758
  GFR-binding peptide
  MOD_RES (2), (3): Xaa is C or S
  MOD_RES (17), (18), (19), (20), (21): Xaa is A or G
  MOD_RES (22), (23), (24), (25): Xaa is A or G or is absent

SEQ ID NO: 51618 - protein, 34 aa, Artificial Sequence; identical to SEQ ID NO: 13759
  GFR-binding peptide
  MOD_RES (1), (2), (34): Xaa is C or S

SEQ ID NO: 51619 - protein, 34 aa, Artificial Sequence; identical to SEQ ID NO: 13760
  GFR-binding peptide
  MOD_RES (1), (34): Xaa is C or S
  MOD_RES (15), (16), (17), (18), (19): Xaa is A or G
  MOD_RES (20), (21), (22), (23): Xaa is A or G or is absent

SEQ ID NO: 51620 - protein, 39 aa, Artificial Sequence
  GFR-binding peptide
  MOD_RES (5), (6), (39): Xaa is C or S
  MOD_RES (20), (21), (22), (23), (24): Xaa is A or G
  MOD_RES (25), (26), (27), (28): Xaa is A or G or is absent
SAAPXXVPQALRSVKIAKVXXXXXXXXXKEVQVMIVRSX

SEQ ID NO: 51621 - protein, 34 aa, Artificial Sequence
  GFR-binding peptide
  MOD_RES (3), (4): Xaa is C or S
SPXXVPQDLRSVKIAKVVGRTPKVKEVQVMVVKS

SEQ ID NO: 51622 - protein, 40 aa, Artificial Sequence
  GFR-binding peptide
  MOD_RES (5), (39): Xaa is C or S
  MOD_RES (19), (20), (21), (22), (23): Xaa is A or G
  MOD_RES (24), (25), (26), (27): Xaa is A or G or is absent
EGLEXVPTEEEPLTMLYYXXXXXXXXXEQLSNFLQHNKXE

SEQ ID NO: 51623 - protein, 38 aa, Artificial Sequence
  GFR-binding peptide
  MOD_RES (2), (36), (38): Xaa is C or S
  MOD_RES (16), (17), (18), (19), (20): Xaa is A or G
  MOD_RES (21), (22), (23), (24): Xaa is A or G or is absent
EXVPTEEEPLTMLYYXXXXXXXXXEQLSNFLQHNKXEX

SEQ ID NO: 51624 - protein, 34 aa, Artificial Sequence; identical to SEQ ID NO: 13764
  GFR-binding peptide
  MOD_RES (3), (3): Xaa is C or S

SEQ ID NO: 51625 - protein, 36 aa, Artificial Sequence
  GFR-binding peptide
  MOD_RES (3), (4): Xaa is C or S
  MOD_RES (18), (19), (20), (21), (22): Xaa is A or G
  MOD_RES (23), (24), (25), (26): Xaa is A or G or is absent
KPXXAPTKLSNITVQIMXXXXXXXXXIGEMSNMVVR

SEQ ID NO: 51626 - protein, 33 aa, Artificial Sequence
  GFR-binding peptide
  MOD_RES (14), (15), (16), (17), (18): Xaa is A or G
  MOD_RES (19), (20), (21), (22): Xaa is A or G or is absent
VPTELRSVKMAKVXXXXXXXXXKEVQVEMVVEG

SEQ ID NO: 51627 - protein, 32 aa, Artificial Sequence
  GFR-binding peptide
  MOD_RES (14), (15), (16), (17), (18): Xaa is A or G
  MOD_RES (19), (20), (21), (22): Xaa is A or G or is absent
VSQDLRSVKIAKVXXXXXXXXXKEVQVMIVKS

SEQ ID NO: 51628 - protein, 37 aa, Artificial Sequence; identical to SEQ ID NO: 13766
  GFR-binding peptide
  MOD_RES (3), (4), (37): Xaa is C or S
  MOD_RES (18), (19), (20), (21), (22): Xaa is A or G
  MOD_RES (23), (24), (25), (26): Xaa is A or G or is absent

SEQ ID NO: 51629 - protein, 37 aa, Artificial Sequence
  GFR-binding peptide
  MOD_RES (36), (36): Xaa is C or S
  MOD_RES (15), (16), (17), (18), (19): Xaa is A or G
  MOD_RES (20), (21), (22), (23): Xaa is A or G or is absent
PSRVHHEPLTVLYYXXXXXXXXXEQLSNRLEEHLEXA

SEQ ID NO: 51630 - protein, 38 aa, Artificial Sequence
  GFR-binding peptide
  MOD_RES (6), (6): Xaa is C or S
DEGLEXVPTEEEPLPMVYYRIKPHQGQHEQLSNFLQHN

SEQ ID NO: 51631 - protein, 34 aa, Artificial Sequence
  GFR-binding peptide
  MOD_RES (1), (34): Xaa is C or S
  MOD_RES (15), (16), (17), (18), (19): Xaa is A or G
  MOD_RES (20), (21), (22), (23): Xaa is A or G or is absent
XVPQDLSNITIQIMXXXXXXXXXIGEMSMVVKSX

SEQ ID NO: 51632 - protein, 39 aa, Artificial Sequence
  GFR-binding peptide
  MOD_RES (2), (36), (38): Xaa is C or S
EXVPTEEEPLTMLYYRIKPHQGQHEQLSNFLQHNKXEXR

SEQ ID NO: 51633 - protein, 38 aa, Artificial Sequence
  GFR-binding peptide
  MOD_RES (5), (6), (38): Xaa is C or S
IPKAXXVPTELRPVQMRKIDEYDKVVKKATVEMVVEGX

SEQ ID NO: 51634 - protein, 40 aa, Artificial Sequence
  GFR-binding peptide
  MOD_RES (5), (6), (38), (40): Xaa is C or S
VPKPXXAPTQLRPVQVRKIDDSSNVIKKATVNMVVRAXGX

SEQ ID NO: 51635 - protein, 43 aa, Artificial Sequence; identical to SEQ ID NO: 18856
  GFR-binding peptide
  MOD_RES (6), (40), (42): Xaa is C or S
  MOD_RES (20), (21), (22), (23), (24): Xaa is A or G
  MOD_RES (25), (26), (27), (28): Xaa is A or G or is absent

SEQ ID NO: 51636 - protein, 39 aa, Artificial Sequence; identical to SEQ ID NO: 13772
  GFR-binding peptide
  MOD_RES (5), (6): Xaa is C or S
  MOD_RES (20), (21), (22), (23), (24): Xaa is A or G
  MOD_RES (25), (26), (27), (28): Xaa is A or G or is absent

SEQ ID NO: 51637 - protein, 34 aa, Artificial Sequence
  GFR-binding peptide
  MOD_RES (14), (15), (16), (17), (18): Xaa is A or G
  MOD_RES (19), (20), (21), (22): Xaa is A or G or is absent
SRVHHEPLPVVYYXXXXXXXXXEQLSNRLEEHLE

SEQ ID NO: 51638 - protein, 37 aa, Artificial Sequence
  GFR-binding peptide
  MOD_RES (3), (4): Xaa is C or S
  MOD_RES (18), (19), (20), (21), (22): Xaa is A or G
  MOD_RES (23), (24), (25), (26): Xaa is A or G or is absent
KPXXAPTQLRPVQVRKIXXXXXXXXXKKATVNMVVRA

SEQ ID NO: 51639 - protein, 33 aa, Artificial Sequence
  GFR-binding peptide
  MOD_RES (2), (3): Xaa is C or S
PXXAPTQLSNITVQIMDDSSNVIIGEMSNMVVR

SEQ ID NO: 51640 - protein, 32 aa, Artificial Sequence
  GFR-binding peptide
  MOD_RES (14), (15), (16), (17), (18): Xaa is A or G
  MOD_RES (19), (20), (21), (22): Xaa is A or G or is absent
VPTELRSVKMAKVXXXXXXXXXKEVQVDMVVE

SEQ ID NO: 51641 - protein, 38 aa, Artificial Sequence; identical to SEQ ID NO: 18859
  GFR-binding peptide
  MOD_RES (2), (2): Xaa is C or S

SEQ ID NO: 51642 - protein, 38 aa, Artificial Sequence
  GFR-binding peptide
  MOD_RES (3), (4), (37): Xaa is C or S
  MOD_RES (18), (19), (20), (21), (22): Xaa is A or G
  MOD_RES (23), (24), (25), (26): Xaa is A or G or is absent
APXXVPQALSNITIQIMXXXXXXXXXIGEMSMIVRSXK

SEQ ID NO: 51643 - protein, 39 aa, Artificial Sequence; identical to SEQ ID NO: 13779
  GFR-binding peptide
  MOD_RES (1), (2), (36), (38): Xaa is C or S
  MOD_RES (16), (17), (18), (19), (20): Xaa is A or G
  MOD_RES (21), (22), (23), (24): Xaa is A or G or is absent

SEQ ID NO: 51644 - protein, 35 aa, Artificial Sequence
  GFR-binding peptide
  MOD_RES (3), (4): Xaa is C or S
KAXXVPTELSNITMQIMDENEKVVIGEMSDMVVEG

SEQ ID NO: 51645 - protein, 34 aa, Artificial Sequence; identical to SEQ ID NO: 13781
  GFR-binding peptide
  MOD_RES (1), (2), (34): Xaa is C or S

SEQ ID NO: 51646 - protein, 37 aa, Artificial Sequence; identical to SEQ ID NO: 18865
  GFR-binding peptide
  MOD_RES (3), (3): Xaa is C or S
  MOD_RES (19), (20), (21), (22), (23): Xaa is A or G
  MOD_RES (24), (25), (26), (27): Xaa is A or G or is absent

SEQ ID NO: 51647 - protein, 39 aa, Artificial Sequence
  GFR-binding peptide
  MOD_RES (3), (4), (38): Xaa is C or S
  MOD_RES (18), (19), (20), (21), (22): Xaa is A or G
  MOD_RES (23), (24), (25), (26): Xaa is A or G or is absent
KPXXAPTQLSNITVQIMXXXXXXXXXIGEMSNMVVRAXG

SEQ ID NO: 51648 - protein, 30 aa, Artificial Sequence; identical to SEQ ID NO: 13783
  GFR-binding peptide

SEQ ID NO: 51649 - protein, 35 aa, Artificial Sequence
  GFR-binding peptide
  MOD_RES (2), (3), (34): Xaa is C or S
PXXVPQDLRSVKIAKVVGRTPKVKEVQVMVVKSXK

SEQ ID NO: 51650 - protein, 37 aa, Artificial Sequence; identical to SEQ ID NO: 18867
  GFR-binding peptide
  MOD_RES (3), (3): Xaa is C or S
  MOD_RES (19), (20), (21), (22), (23): Xaa is A or G
  MOD_RES (24), (25), (26), (27): Xaa is A or G or is absent

SEQ ID NO: 51651 - protein, 34 aa, Artificial Sequence
  GFR-binding peptide
  MOD_RES (1), (1): Xaa is C or S
  MOD_RES (15), (16), (17), (18), (19): Xaa is A or G
  MOD_RES (20), (21), (22), (23): Xaa is A or G or is absent
XVPTELSNITMQIMXXXXXXXXXIGEMSEMVVEG

SEQ ID NO: 51652 - protein, 36 aa, Artificial Sequence
  GFR-binding peptide
  MOD_RES (4), (4): Xaa is C or S
GLEXVPTEEEPLTMLYYRIKPHQGQHEQLSNFLQHN

SEQ ID NO: 51653 - protein, 33 aa, Artificial Sequence; identical to SEQ ID NO: 18869
  GFR-binding peptide
  MOD_RES (1), (1): Xaa is C or S
  MOD_RES (15), (16), (17), (18), (19): Xaa is A or G
  MOD_RES (20), (21), (22), (23): Xaa is A or G or is absent

SEQ ID NO: 51654 - protein, 35 aa, Artificial Sequence
  GFR-binding peptide
  MOD_RES (2), (3), (34): Xaa is C or S
PXXVSQDLRSVKIAKVIGKTPKIKEVQVMIVKSXK

SEQ ID NO: 51655 - protein, 41 aa, Artificial Sequence; identical to SEQ ID NO: 18870
  GFR-binding peptide
  MOD_RES (3), (40): Xaa is C or S

SEQ ID NO: 51656 - protein, 30 aa, Artificial Sequence
  GFR-binding peptide
VSQDLRSVKIAKVIGKTPKIKEVQVMIVKS

SEQ ID NO: 51657 - protein, 36 aa, Artificial Sequence; identical to SEQ ID NO: 18873
  GFR-binding peptide
  MOD_RES (16), (17), (18), (19), (20): Xaa is A or G
  MOD_RES (21), (22), (23), (24): Xaa is A or G or is absent

SEQ ID NO: 51658 - protein, 42 aa, Artificial Sequence; identical to SEQ ID NO: 18875
  GFR-binding peptide
  MOD_RES (3), (40), (42): Xaa is C or S

SEQ ID NO: 51659 - protein, 40 aa, Artificial Sequence
  GFR-binding peptide
  MOD_RES (3), (4), (38), (40): Xaa is C or S
  MOD_RES (18), (19), (20), (21), (22): Xaa is A or G
  MOD_RES (23), (24), (25), (26): Xaa is A or G or is absent
KAXXVPTELRPVQMRKIXXXXXXXXXKKATVEMVVEGXGX

SEQ ID NO: 51660 - protein, 39 aa, Artificial Sequence; identical to SEQ ID NO: 13788
  GFR-binding peptide
  MOD_RES (5), (6), (38): Xaa is C or S

SEQ ID NO: 51661 - protein, 35 aa, Artificial Sequence
  GFR-binding peptide
  MOD_RES (34), (34): Xaa is C or S
  MOD_RES (14), (15), (16), (17), (18): Xaa is A or G
  MOD_RES (19), (20), (21), (22): Xaa is A or G or is absent
APTKLRPVQVRKIXXXXXXXXXKKATVNMVVRSXG

SEQ ID NO: 51662 - protein, 39 aa, Artificial Sequence; identical to SEQ ID NO: 18877
  GFR-binding peptide
  MOD_RES (6), (6): Xaa is C or S
  MOD_RES (20), (21), (22), (23), (24): Xaa is A or G
  MOD_RES (25), (26), (27), (28): Xaa is A or G or is absent

SEQ ID NO: 51663 - protein, 43 aa, Artificial Sequence
  GFR-binding peptide
  MOD_RES (6), (7), (41), (43): Xaa is C or S
  MOD_RES (21), (22), (23), (24), (25): Xaa is A or G
  MOD_RES (26), (27), (28), (29): Xaa is A or G or is absent
KIPKAXXVPTELRPVQMRKIXXXXXXXXXKKATVDMVVEGXGX

SEQ ID NO: 51664 - protein, 35 aa, Artificial Sequence; identical to SEQ ID NO: 13790
  GFR-binding peptide
  MOD_RES (1), (2): Xaa is C or S
  MOD_RES (16), (17), (18), (19), (20): Xaa is A or G
  MOD_RES (21), (22), (23), (24): Xaa is A or G or is absent

SEQ ID NO: 51665 - protein, 35 aa, Artificial Sequence; identical to SEQ ID NO: 13791
  GFR-binding peptide
  MOD_RES (4), (5): Xaa is C or S

SEQ ID NO: 51666 - protein, 37 aa, Artificial Sequence
  GFR-binding peptide
  MOD_RES (6), (7): Xaa is C or S
YVPKPXXAPTKLRSVKVAKVDDSSNVIKEVQVNMVVR

SEQ ID NO: 51667 - protein, 35 aa, Artificial Sequence; identical to SEQ ID NO: 13792
  GFR-binding peptide
  MOD_RES (2), (3), (35): Xaa is C or S

SEQ ID NO: 51668 - protein, 36 aa, Artificial Sequence; identical to SEQ ID NO: 13793
  GFR-binding peptide
  MOD_RES (2), (3), (35): Xaa is C or S

SEQ ID NO: 51669 - protein, 34 aa, Artificial Sequence
  GFR-binding peptide
  MOD_RES (1), (32), (34): Xaa is C or S
XVPQDLSNITIQIMVGRTPKVIGEMSMVVKSXKX

SEQ ID NO: 51670 - protein, 36 aa, Artificial Sequence; identical to SEQ ID NO: 13794
  GFR-binding peptide
  MOD_RES (2), (3), (35): Xaa is C or S

SEQ ID NO: 51671 - protein, 33 aa, Artificial Sequence
  GFR-binding peptide
  MOD_RES (1), (2), (33): Xaa is C or S
XXVSQDLSNITIQIMIGKTPKIIGEMSMIVKSX

SEQ ID NO: 51672 - protein, 39 aa, Artificial Sequence
  GFR-binding peptide
  MOD_RES (5), (5): Xaa is C or S
  MOD_RES (21), (22), (23), (24), (25): Xaa is A or G
  MOD_RES (26), (27), (28), (29): Xaa is A or G or is absent
RNVQXRPTQVQLEPLPVVYYXXXXXXXXXEQLSNTLEDH

SEQ ID NO: 51673 - protein, 37 aa, Artificial Sequence
  GFR-binding peptide
  MOD_RES (3), (37): Xaa is C or S
  MOD_RES (17), (18), (19), (20), (21): Xaa is A or G
  MOD_RES (22), (23), (24), (25): Xaa is A or G or is absent
PTXAPTKLRSVKVAKVXXXXXXXXXKEVQVNMVVRSX

SEQ ID NO: 51674 - protein, 35 aa, Artificial Sequence
  GFR-binding peptide
  MOD_RES (1), (2), (35): Xaa is C or S
  MOD_RES (16), (17), (18), (19), (20): Xaa is A or G
  MOD_RES (21), (22), (23), (24): Xaa is A or G or is absent
XXVSQDLRSVKIAKVXXXXXXXXXKEVQVMIVKSX

SEQ ID NO: 51675 - protein, 40 aa, Artificial Sequence
  GFR-binding peptide
  MOD_RES (3), (40): Xaa is C or S
VQXRPTQVQLEPLPVVYYEIVRKKPIFEQLSNTLEDHLAX

SEQ ID NO: 51676 - protein, 36 aa, Artificial Sequence
  GFR-binding peptide
  MOD_RES (3), (4): Xaa is C or S
  MOD_RES (18), (19), (20), (21), (22): Xaa is A or G
  MOD_RES (23), (24), (25), (26): Xaa is A or G or is absent
APXXVPQALSNITIQIMXXXXXXXXXIGEMSMIVRS

SEQ ID NO: 51677 - protein, 39 aa, Artificial Sequence; identical to SEQ ID NO: 13799
  GFR-binding peptide
  MOD_RES (4), (5), (37), (39): Xaa is C or S

SEQ ID NO: 51678 - protein, 38 aa, Artificial Sequence
  GFR-binding peptide
  MOD_RES (3), (4), (37): Xaa is C or S
  MOD_RES (18), (19), (20), (21), (22): Xaa is A or G
  MOD_RES (23), (24), (25), (26): Xaa is A or G or is absent
SPXXVPQDLRPVQIRKIXXXXXXXXXKKATVMVVKSXK

SEQ ID NO: 51679 - protein, 32 aa, Artificial Sequence; identical to SEQ ID NO: 13804
  GFR-binding peptide
  MOD_RES (32), (32): Xaa is C or S

SEQ ID NO: 51680 - protein, 37 aa, Artificial Sequence
  GFR-binding peptide
  MOD_RES (4), (5), (36): Xaa is C or S
ASPXXVPQDLSNITIQIMVGRTPKVIGEMSMVVKSXK

SEQ ID NO: 51681 - protein, 38 aa, Artificial Sequence
  GFR-binding peptide
  MOD_RES (1), (2), (36), (38): Xaa is C or S
  MOD_RES (16), (17), (18), (19), (20): Xaa is A or G
  MOD_RES (21), (22), (23), (24): Xaa is A or G or is absent
XXAPTQLSNITVQIMXXXXXXXXXIGEMSNMVVRAXGX

SEQ ID NO: 51682 - protein, 39 aa, Artificial Sequence
  GFR-binding peptide
  MOD_RES (4), (5), (39): Xaa is C or S
  MOD_RES (19), (20), (21), (22), (23): Xaa is A or G
  MOD_RES (24), (25), (26), (27): Xaa is A or G or is absent
PKPXXAPTQLRSVKVAKVXXXXXXXXXKEVQVNMVVRAX

SEQ ID NO: 51683 - protein, 41 aa, Artificial Sequence
  GFR-binding peptide
  MOD_RES (3), (40): Xaa is C or S
VQXRPTQVQLEPLPVVYYEIVRKKPIFEQLSNTLEDHLAXK

SEQ ID NO: 51684 - protein, 42 aa, Artificial Sequence; identical to SEQ ID NO: 13809
  GFR-binding peptide
  MOD_RES (6), (7), (41): Xaa is C or S
  MOD_RES (21), (22), (23), (24), (25): Xaa is A or G
  MOD_RES (26), (27), (28), (29): Xaa is A or G or is absent

SEQ ID NO: 51685 - protein, 40 aa, Artificial Sequence; identical to SEQ ID NO: 18892
  GFR-binding peptide
  MOD_RES (7), (7): Xaa is C or S
  MOD_RES (21), (22), (23), (24), (25): Xaa is A or G
  MOD_RES (26), (27), (28), (29): Xaa is A or G or is absent

SEQ ID NO: 51686 - protein, 36 aa, Artificial Sequence
  GFR-binding peptide
  MOD_RES (3), (4): Xaa is C or S
  MOD_RES (18), (19), (20), (21), (22): Xaa is A or G
  MOD_RES (23), (24), (25), (26): Xaa is A or G or is absent
KAXXVPTELSNITMQIMXXXXXXXXXIGEMSDMVVE

SEQ ID NO: 51687 - protein, 39 aa, Artificial Sequence
  GFR-binding peptide
  MOD_RES (6), (7): Xaa is C or S
  MOD_RES (21), (22), (23), (24), (25): Xaa is A or G
  MOD_RES (26), (27), (28), (29): Xaa is A or G or is absent
YVPKPXXAPTKLRSVKVAKVXXXXXXXXXKEVQVNMVVR

SEQ ID NO: 51688 - protein, 35 aa, Artificial Sequence
  GFR-binding peptide
  MOD_RES (35), (35): Xaa is C or S
TQVQLEPLPVVYYEIVRKKPIFEQLSNTLEDHLAX

SEQ ID NO: 51689 - protein, 39 aa, Artificial Sequence
  GFR-binding peptide
  MOD_RES (5), (6), (38): Xaa is C or S
IPKAXXVPTELSNITMQIMDENEKVVIGEMSDMVVEGXG

SEQ ID NO: 51690 - protein, 37 aa, Artificial Sequence
  GFR-binding peptide
  MOD_RES (2), (3), (36): Xaa is C or S
  MOD_RES (17), (18), (19), (20), (21): Xaa is A or G
  MOD_RES (22), (23), (24), (25): Xaa is A or G or is absent
PXXVPQDLRSVKIAKVXXXXXXXXXKEVQVMVVKSXK

SEQ ID NO: 51691 - protein, 40 aa, Artificial Sequence; identical to SEQ ID NO: 13810
  GFR-binding peptide
  MOD_RES (4), (38), (40): Xaa is C or S
  MOD_RES (18), (19), (20), (21), (22): Xaa is A or G
  MOD_RES (23), (24), (25), (26): Xaa is A or G or is absent

SEQ ID NO: 51692 - protein, 43 aa, Artificial Sequence; identical to SEQ ID NO: 13811
  GFR-binding peptide
  MOD_RES (6), (7), (40), (42): Xaa is C or S
  MOD_RES (21), (22), (23), (24), (25): Xaa is A or G
  MOD_RES (26), (27), (28), (29): Xaa is A or G or is absent

SEQ ID NO: 51693 - protein, 40 aa, Artificial Sequence
  GFR-binding peptide
  MOD_RES (37), (39): Xaa is C or S
RPTQVQLEPLPVVYYEIVRKKPIFEQLSNTLEDHLAXKXE

SEQ ID NO: 51694 - protein, 36 aa, Artificial Sequence; identical to SEQ ID NO: 13816
  GFR-binding peptide
  MOD_RES (33), (35): Xaa is C or S
  MOD_RES (14), (15), (16), (17), (18): Xaa is A or G
  MOD_RES (19), (20), (21), (22): Xaa is A or G or is absent

SEQ ID NO: 51695 - protein, 31 aa, Artificial Sequence; identical to SEQ ID NO: 13818
  GFR-binding peptide
  MOD_RES (1), (1): Xaa is C or S

SEQ ID NO: 51696 - protein, 33 aa, Artificial Sequence
  GFR-binding peptide
  MOD_RES (1), (2): Xaa is C or S
XXVPTELSNITMQIMDENEKVVIGEMSDMVVEG

SEQ ID NO: 51697 - protein, 39 aa, Artificial Sequence
  GFR-binding peptide
  MOD_RES (4), (5), (38): Xaa is C or S
  MOD_RES (19), (20), (21), (22), (23): Xaa is A or G
  MOD_RES (24), (25), (26), (27): Xaa is A or G or is absent
AAPXXVPQALRPVQIRKIXXXXXXXXXKKATVMIVRSXK

SEQ ID NO: 51698 - protein, 34 aa, Artificial Sequence
  GFR-binding peptide
  MOD_RES (2), (3), (34): Xaa is C or S
PXXVPQDLRSVKIAKVVGRTPKVKEVQVMVVKSX

SEQ ID NO: 51699 - protein, 36 aa, Artificial Sequence
  GFR-binding peptide
  MOD_RES (1), (2), (36): Xaa is C or S
  MOD_RES (16), (17), (18), (19), (20): Xaa is A or G
  MOD_RES (21), (22), (23), (24): Xaa is A or G or is absent
XXAPTQLSNITVQIMXXXXXXXXXIGEMSNMVVRAX

SEQ ID NO: 51700 - protein, 41 aa, Artificial Sequence; identical to SEQ ID NO: 13823
  GFR-binding peptide
  MOD_RES (6), (38), (40): Xaa is C or S

SEQ ID NO: 51701 - protein, 39 aa, Artificial Sequence
  GFR-binding peptide
  MOD_RES (4), (4): Xaa is C or S
  MOD_RES (20), (21), (22), (23), (24): Xaa is A or G
  MOD_RES (25), (26), (27), (28): Xaa is A or G or is absent
NVQXRPTQVQLEPLTVLYYXXXXXXXXXEQLSNTLEDHL

SEQ ID NO: 51702 - protein, 34 aa, Artificial Sequence; identical to SEQ ID NO: 18902
  GFR-binding peptide
  MOD_RES (14), (15), (16), (17), (18): Xaa is A or G
  MOD_RES (19), (20), (21), (22): Xaa is A or G or is absent

SEQ ID NO: 51703 - protein, 39 aa, Artificial Sequence; identical to SEQ ID NO: 18903
  GFR-binding peptide
  MOD_RES (3), (37), (39): Xaa is C or S
  MOD_RES (17), (18), (19), (20), (21): Xaa is A or G
  MOD_RES (22), (23), (24), (25): Xaa is A or G or is absent

SEQ ID NO: 51704 - protein, 39 aa, Artificial Sequence
  GFR-binding peptide
  MOD_RES (5), (6): Xaa is C or S
  MOD_RES (20), (21), (22), (23), (24): Xaa is A or G
  MOD_RES (25), (26), (27), (28): Xaa is A or G or is absent
IPKAXXVPTELRSVKMAKVXXXXXXXXXKEVQVDMVVEG

SEQ ID NO: 51705 - protein, 31 aa, Artificial Sequence
  GFR-binding peptide
  MOD_RES (1), (1): Xaa is C or S
XAPTKLSNITVQIMDDSSNVIIGEMSNMVVR

SEQ ID NO: 51706 - protein, 35 aa, Artificial Sequence; identical to SEQ ID NO: 18906
  GFR-binding peptide
  MOD_RES (1), (1): Xaa is C or S
  MOD_RES (17), (18), (19), (20), (21): Xaa is A or G
  MOD_RES (22), (23), (24), (25): Xaa is A or G or is absent

SEQ ID NO: 51707 - protein, 37 aa, Artificial Sequence; identical to SEQ ID NO: 13827
  GFR-binding peptide
  MOD_RES (1), (35), (37): Xaa is C or S
  MOD_RES (15), (16), (17), (18), (19): Xaa is A or G
  MOD_RES (20), (21), (22), (23): Xaa is A or G or is absent

SEQ ID NO: 51708 - protein, 35 aa, Artificial Sequence
  GFR-binding peptide
  MOD_RES (1), (35): Xaa is C or S
  MOD_RES (15), (16), (17), (18), (19): Xaa is A or G
  MOD_RES (20), (21), (22), (23): Xaa is A or G or is absent
XAPTQLSNITVQIMXXXXXXXXXIGEMSNMVVRAX

SEQ ID NO: 51709 - protein, 37 aa, Artificial Sequence
  GFR-binding peptide
  MOD_RES (37), (37): Xaa is C or S
  MOD_RES (16), (17), (18), (19), (20): Xaa is A or G
  MOD_RES (21), (22), (23), (24): Xaa is A or G or is absent
QPSRVHHEPLTVLYYXXXXXXXXXEQLSNRLEEHLEX

SEQ ID NO: 51710 - protein, 39 aa, Artificial Sequence
  GFR-binding peptide
  MOD_RES (2), (3), (37), (39): Xaa is C or S
  MOD_RES (17), (18), (19), (20), (21): Xaa is A or G
  MOD_RES (22), (23), (24), (25): Xaa is A or G or is absent
PXXAPTQLRPVQVRKIXXXXXXXXXKKATVNMVVRAXGX

SEQ ID NO: 51711 - protein, 40 aa, Artificial Sequence
  GFR-binding peptide
  MOD_RES (4), (5), (39): Xaa is C or S
  MOD_RES (19), (20), (21), (22), (23): Xaa is A or G
  MOD_RES (24), (25), (26), (27): Xaa is A or G or is absent
PKAXXVPTELRPVQMRKIXXXXXXXXXKKATVDMVVEGXG

SEQ ID NO: 51712 - protein, 39 aa, Artificial Sequence
  GFR-binding peptide
  MOD_RES (1), (2), (36), (38): Xaa is C or S
  MOD_RES (16), (17), (18), (19), (20): Xaa is A or G
  MOD_RES (21), (22), (23), (24): Xaa is A or G or is absent
XXAPTQLRSVKVAKVXXXXXXXXXKEVQVNMVVRAXGXH

SEQ ID NO: 51713 - protein, 36 aa, Artificial Sequence; identical to SEQ ID NO: 18913
  GFR-binding peptide
  MOD_RES (2), (2): Xaa is C or S
  MOD_RES (18), (19), (20), (21), (22): Xaa is A or G
  MOD_RES (23), (24), (25), (26): Xaa is A or G or is absent

SEQ ID NO: 51714 - protein, 33 aa, Artificial Sequence
  GFR-binding peptide
  MOD_RES (1), (1): Xaa is C or S
  MOD_RES (15), (16), (17), (18), (19): Xaa is A or G
  MOD_RES (20), (21), (22), (23): Xaa is A or G or is absent
XVPQDLRSVKIAKVXXXXXXXXXKEVQVMVVKS

SEQ ID NO: 51715 - protein, 40 aa, Artificial Sequence
  GFR-binding peptide
  MOD_RES (6), (7): Xaa is C or S
  MOD_RES (21), (22), (23), (24), (25): Xaa is A or G
  MOD_RES (26), (27), (28), (29): Xaa is A or G or is absent
TVPKPXXAPTQLRSVKVAKVXXXXXXXXXKEVQVNMVVRA

SEQ ID NO: 51716 - protein, 39 aa, Artificial Sequence; identical to SEQ ID NO: 18916
  GFR-binding peptide
  MOD_RES (2), (39): Xaa is C or S
  MOD_RES (18), (19), (20), (21), (22): Xaa is A or G
  MOD_RES (23), (24), (25), (26): Xaa is A or G or is absent

SEQ ID NO: 51717 - protein, 33 aa, Artificial Sequence
  GFR-binding peptide
  MOD_RES (1), (1): Xaa is C or S
  MOD_RES (15), (16), (17), (18), (19): Xaa is A or G
  MOD_RES (20), (21), (22), (23): Xaa is A or G or is absent
XVPQALRPVQIRKIXXXXXXXXXKKATVMIVRS

SEQ ID NO: 51718 - protein, 39 aa, Artificial Sequence
  GFR-binding peptide
  MOD_RES (3), (4), (38): Xaa is C or S
  MOD_RES (18), (19), (20), (21), (22): Xaa is A or G
  MOD_RES (23), (24), (25), (26): Xaa is A or G or is absent
KPXXAPTKLRSVKVAKVXXXXXXXXXKEVQVNMVVRSXG

SEQ ID NO: 51719 - protein, 37 aa, Artificial Sequence; identical to SEQ ID NO: 13831
  GFR-binding peptide
  MOD_RES (3), (4): Xaa is C or S
  MOD_RES (18), (19), (20), (21), (22): Xaa is A or G
  MOD_RES (23), (24), (25), (26): Xaa is A or G or is absent

SEQ ID NO: 51720 - protein, 36 aa, Artificial Sequence; identical to SEQ ID NO: 13832
  GFR-binding peptide
  MOD_RES (34), (36): Xaa is C or S
  MOD_RES (14), (15), (16), (17), (18): Xaa is A or G
  MOD_RES (19), (20), (21), (22): Xaa is A or G or is absent

SEQ ID NO: 51721 - protein, 39 aa, Artificial Sequence; identical to SEQ ID NO: 18922
  GFR-binding peptide
  MOD_RES (2), (39): Xaa is C or S

SEQ ID NO: 51722 - protein, 40 aa, Artificial Sequence; identical to SEQ ID NO: 13836
  GFR-binding peptide
  MOD_RES (6), (38), (40): Xaa is C or S

SEQ ID NO: 51723 - protein, 39 aa, Artificial Sequence; identical to SEQ ID NO: 18924
  GFR-binding peptide
  MOD_RES (4), (4): Xaa is C or S

SEQ ID NO: 51724 - protein, 38 aa, Artificial Sequence; identical to SEQ ID NO: 18925
  GFR-binding peptide
  MOD_RES (36), (38): Xaa is C or S
  MOD_RES (15), (16), (17), (18), (19): Xaa is A or G
  MOD_RES (20), (21), (22), (23): Xaa is A or G or is absent

SEQ ID NO: 51725 - protein, 42 aa, Artificial Sequence; identical to SEQ ID NO: 13838
  GFR-binding peptide
  MOD_RES (6), (7), (39), (41): Xaa is C or S

SEQ ID NO: 51726 - protein, 37 aa, Artificial Sequence; identical to SEQ ID NO: 13839
  GFR-binding peptide
  MOD_RES (1), (2), (36): Xaa is C or S
  MOD_RES (16), (17), (18), (19), (20): Xaa is A or G
  MOD_RES (21), (22), (23), (24): Xaa is A or G or is absent

SEQ ID NO: 51727 - protein, 36 aa, Artificial Sequence; identical to SEQ ID NO: 13841
  GFR-binding peptide
  MOD_RES (1), (2), (33), (35): Xaa is C or S

SEQ ID NO: 51728 - protein, 35 aa, Artificial Sequence
  GFR-binding peptide
  MOD_RES (1), (1): Xaa is C or S
XRPTQVQLEPLTVLYYEIVRKKPIFEQLSNTLEDH

SEQ ID NO: 51729 - protein, 39 aa, Artificial Sequence; identical to SEQ ID NO: 38933
  GFR-binding peptide
  MOD_RES (5), (6), (39): Xaa is C or S
  MOD_RES (20), (21), (22), (23), (24): Xaa is A or G
  MOD_RES (25), (26), (27), (28): Xaa is A or G or is absent

SEQ ID NO: 51730 - protein, 42 aa, Artificial Sequence
  GFR-binding peptide
  MOD_RES (6), (7), (41): Xaa is C or S
  MOD_RES (21), (22), (23), (24), (25): Xaa is A or G
  MOD_RES (26), (27), (28), (29): Xaa is A or G or is absent
YVPKPXXAPTKLRSVKVAKVXXXXXXXXXKEVQVNMVVRSXG

SEQ ID NO: 51731 - protein, 41 aa, Artificial Sequence; identical to SEQ ID NO: 18929
  GFR-binding peptide
  MOD_RES (5), (39), (41): Xaa is C or S
  MOD_RES (19), (20), (21), (22), (23): Xaa is A or G
  MOD_RES (24), (25), (26), (27): Xaa is A or G or is absent

SEQ ID NO: 51732 - protein, 42 aa, Artificial Sequence; identical to SEQ ID NO: 18930
  GFR-binding peptide
  MOD_RES (4), (41): Xaa is C or S

SEQ ID NO: 51733 - protein, 40 aa, Artificial Sequence
  GFR-binding peptide
  MOD_RES (3), (4), (37), (39): Xaa is C or S
  MOD_RES (18), (19), (20), (21), (22): Xaa is A or G
  MOD_RES (23), (24), (25), (26): Xaa is A or G or is absent
SPXXVPQDLRSVKIAKVXXXXXXXXXKEVQVMVVKSXKXS

SEQ ID NO: 51734 - protein, 43 aa, Artificial Sequence; identical to SEQ ID NO: 18931
  GFR-binding peptide
  MOD_RES (7), (41), (43): Xaa is C or S

SEQ ID NO: 51735 - protein, 33 aa, Artificial Sequence; identical to SEQ ID NO: 13843
  GFR-binding peptide
  MOD_RES (31), (33): Xaa is C or S

SEQ ID NO: 51736 - protein, 38 aa, Artificial Sequence; identical to SEQ ID NO: 13844
  GFR-binding peptide
  MOD_RES (4), (5): Xaa is C or S
  MOD_RES (19), (20), (21), (22), (23): Xaa is A or G
  MOD_RES (24), (25), (26), (27): Xaa is A or G or is absent

SEQ ID NO: 51737 - protein, 40 aa, Artificial Sequence
  GFR-binding peptide
  MOD_RES (4), (4): Xaa is C or S
NVQXRPTQVQLEPLPVVYYEIVRKKPIFEQLSNTLEDHLA

SEQ ID NO: 51738 - protein, 39 aa, Artificial Sequence; identical to SEQ ID NO: 13845
  GFR-binding peptide
  MOD_RES (1), (2), (36), (38): Xaa is C or S
  MOD_RES (16), (17), (18), (19), (20): Xaa is A or G
  MOD_RES (21), (22), (23), (24): Xaa is A or G or is absent

SEQ ID NO: 51739 - protein, 34 aa, Artificial Sequence; identical to SEQ ID NO: 18933
  GFR-binding peptide

SEQ ID NO: 51740 - protein, 33 aa, Artificial Sequence
  GFR-binding peptide
  MOD_RES (1), (2), (33): Xaa is C or S
XXVPQALRSVKIAKVVGRKPKVKEVQVMIVRSX

SEQ ID NO: 51741 - protein, 38 aa, Artificial Sequence
  GFR-binding peptide
  MOD_RES (3), (4), (35), (37): Xaa is C or S
SPXXVPQDLSNITIQIMVGRTPKVIGEMSMVVKSXKXS

SEQ ID NO: 51742 - protein, 34 aa, Artificial Sequence
  GFR-binding peptide
  MOD_RES (34), (34): Xaa is C or S
  MOD_RES (14), (15), (16), (17), (18): Xaa is A or G
  MOD_RES (19), (20), (21), (22): Xaa is A or G or is absent
APTQLSNITVQIMXXXXXXXXXIGEMSNMVVRAX

SEQ ID NO: 51743 - protein, 39 aa, Artificial Sequence
  GFR-binding peptide
  MOD_RES (3), (37), (39): Xaa is C or S
  MOD_RES (17), (18), (19), (20), (21): Xaa is A or G
  MOD_RES (22), (23), (24), (25): Xaa is A or G or is absent
PTXAPTKLSNITVQIMXXXXXXXXXIGEMSNMVVRSXGX

SEQ ID NO: 51744 - protein, 38 aa, Artificial Sequence
  GFR-binding peptide
  MOD_RES (5), (6): Xaa is C or S
  MOD_RES (20), (21), (22), (23), (24): Xaa is A or G
  MOD_RES (25), (26), (27), (28): Xaa is A or G or is absent
IPKAXXVPTELSNITMQIMXXXXXXXXXIGEMSEMVVE

SEQ ID NO: 51745 - protein, 39 aa, Artificial Sequence
  GFR-binding peptide
  MOD_RES (3), (37), (39): Xaa is C or S
LEXVPTEEEPLTMLYYRIKPHQGQHEQLSNFLQHNKXEX

SEQ ID NO: 51746 - protein, 38 aa, Artificial Sequence; identical to SEQ ID NO: 18939
  GFR-binding peptide
  MOD_RES (5), (5): Xaa is C or S
  MOD_RES (19), (20), (21), (22), (23): Xaa is A or G
  MOD_RES (24), (25), (26), (27): Xaa is A or G or is absent

SEQ ID NO: 51747 - protein, 32 aa, Artificial Sequence
  GFR-binding peptide
  MOD_RES (31), (31): Xaa is C or S
VPQALSNITIQIMVGRKPKVIGEMSMIVRSXK

SEQ ID NO: 51748 - protein, 40 aa, Artificial Sequence
  GFR-binding peptide
  MOD_RES (1), (38), (40): Xaa is C or S
XQPSRVHHEPLTVLYYEYVRKKPKLEQLSNRLEEHLEXAX

SEQ ID NO: 51749 - protein, 37 aa, Artificial Sequence; identical to SEQ ID NO: 13858
  GFR-binding peptide
  MOD_RES (6), (7): Xaa is C or S

SEQ ID NO: 51750 - protein, 38 aa, Artificial Sequence
  GFR-binding peptide
  MOD_RES (6), (38): Xaa is C or S
VTKPTXAPTKLSNITVQIMDDSSNVIIGEMSNMVVRSX

SEQ ID NO: 51751 - protein, 43 aa, Artificial Sequence
  GFR-binding peptide
  MOD_RES (5), (6), (40), (42): Xaa is C or S
  MOD_RES (20), (21), (22), (23), (24): Xaa is A or G
  MOD_RES (25), (26), (27), (28): Xaa is A or G or is absent
VPKPXXAPTQLSNITVQIMXXXXXXXXXIGEMSNMVVRAXGXH

SEQ ID NO: 51752 - protein, 37 aa, Artificial Sequence
  GFR-binding peptide
  MOD_RES (4), (4): Xaa is C or S
GLEXVPTEEEPLPMVYYRIKPHQGQHEQLSNFLQHNK

SEQ ID NO: 51753 - protein, 37 aa, Artificial Sequence; identical to SEQ ID NO: 13861
  GFR-binding peptide
  MOD_RES (1), (2), (34), (36): Xaa is C or S

SEQ ID NO: 51754 - protein, 40 aa, Artificial Sequence
  GFR-binding peptide
  MOD_RES (5), (6), (38), (40): Xaa is C or S
IPKAXXVPTELSNITMQIMDENEKVVIGEMSDMVVEGXGX

SEQ ID NO: 51755 - protein, 43 aa, Artificial Sequence
  GFR-binding peptide
  MOD_RES (6), (7), (41), (43): Xaa is C or S
  MOD_RES (21), (22), (23), (24), (25): Xaa is A or G
  MOD_RES (26), (27), (28), (29): Xaa is A or G or is absent
TVPKPXXAPTQLRPVQVRKIXXXXXXXXXKKATVNMVVRAXGX

SEQ ID NO: 51756 - protein, 32 aa, Artificial Sequence
  GFR-binding peptide
  MOD_RES (32), (32): Xaa is C or S
APTQLRSVKVAKVDDSSNVIKEVQVNMVVRAX

SEQ ID NO: 51757 - protein, 38 aa, Artificial Sequence
  GFR-binding peptide
  MOD_RES (6), (7): Xaa is C or S
KIPKAXXVPTELRSVKMAKVDENEKVVKEVQVDMVVEG

SEQ ID NO: 51758 - protein, 42 aa, Artificial Sequence; identical to SEQ ID NO: 18948
  GFR-binding peptide
  MOD_RES (6), (40), (42): Xaa is C or S

SEQ ID NO: 51759 - protein, 38 aa, Artificial Sequence; identical to SEQ ID NO: 13863
  GFR-binding peptide
  MOD_RES (5), (6), (38): Xaa is C or S

SEQ ID NO: 51760 - protein, 33 aa, Artificial Sequence; identical to SEQ ID NO: 13865
  GFR-binding peptide
  MOD_RES (2), (3): Xaa is C or S

SEQ ID NO: 51761 - protein, 41 aa, Artificial Sequence
  GFR-binding peptide
  MOD_RES (7), (41): Xaa is C or S
  MOD_RES (21), (22), (23), (24), (25): Xaa is A or G
  MOD_RES (26), (27), (28), (29): Xaa is A or G or is absent
NDEGLEXVPTEEEPLPMVYYXXXXXXXXXEQLSNFLQHNKX

SEQ ID NO: 51762 - protein, 34 aa, Artificial Sequence
  GFR-binding peptide
  MOD_RES (1), (2): Xaa is C or S
  MOD_RES (16), (17), (18), (19), (20): Xaa is A or G
  MOD_RES (21), (22), (23), (24): Xaa is A or G or is absent
XXAPTQLRPVQVRKIXXXXXXXXXKKATVNMVVR

SEQ ID NO: 51763 - protein, 40 aa, Artificial Sequence
  GFR-binding peptide
  MOD_RES (7), (39): Xaa is C or S
HVTKPTXAPTKLRSVKVAKVDDSSNVIKEVQVNMVVRSXG

SEQ ID NO: 51764 - protein, 33 aa, Artificial Sequence; identical to SEQ ID NO: 18950
  GFR-binding peptide
  MOD_RES (14), (15), (16), (17), (18): Xaa is A or G
  MOD_RES (19), (20), (21), (22): Xaa is A or G or is absent

SEQ ID NO: 51765 - protein, 38 aa, Artificial Sequence; identical to SEQ ID NO: 13866
  GFR-binding peptide
  MOD_RES (4), (5), (38): Xaa is C or S
  MOD_RES (19), (20), (21), (22), (23): Xaa is A or G
  MOD_RES (24), (25), (26), (27): Xaa is A or G or is absent

SEQ ID NO: 51766 - protein, 36 aa, Artificial Sequence
  GFR-binding peptide
  MOD_RES (1), (2), (34), (36): Xaa is C or S
XXVPTELRSVKMAKVDEYDKVVKEVQVEMVVEGXGX

SEQ ID NO: 51767 - protein, 38 aa, Artificial Sequence; identical to SEQ ID NO: 13867
  GFR-binding peptide
  MOD_RES (4), (5), (36), (38): Xaa is C or S

SEQ ID NO: 51768 - protein, 36 aa, Artificial Sequence; identical to SEQ ID NO: 13868
  GFR-binding peptide
  MOD_RES (3), (4): Xaa is C or S
  MOD_RES (18), (19), (20), (21), (22): Xaa is A or G
  MOD_RES (23), (24), (25), (26): Xaa is A or G or is absent

SEQ ID NO: 51769 - protein, 38 aa, Artificial Sequence
  GFR-binding peptide
  MOD_RES (6), (7): Xaa is C or S
YVPKPXXAPTKLRPVQVRKIDDSSNVIKKATVNMVVRS

SEQ ID NO: 51770 - protein, 38 aa, Artificial Sequence
  GFR-binding peptide
  MOD_RES (3), (35), (37): Xaa is C or S
PTXAPTKLRSVKVAKVDDSSNVIKEVQVNMVVRSXGXH

SEQ ID NO: 51771 - protein, 34 aa, Artificial Sequence; identical to SEQ ID NO: 13871
  GFR-binding peptide
  MOD_RES (32), (34): Xaa is C or S

SEQ ID NO: 51772 - protein, 33 aa, Artificial Sequence
  GFR-binding peptide
  MOD_RES (14), (15), (16), (17), (18): Xaa is A or G
  MOD_RES (19), (20), (21), (22): Xaa is A or G or is absent
APTKLRSVKVAKVXXXXXXXXXKEVQVNMVVRS

SEQ ID NO: 51773 - protein, 36 aa, Artificial Sequence
  GFR-binding peptide
  MOD_RES (2), (3), (35): Xaa is C or S
PXXAPTKLRSVKVAKVDDSSNVIKEVQVNMVVRSXG

SEQ ID NO: 51774 - protein, 35 aa, Artificial Sequence; identical to SEQ ID NO: 18954
  GFR-binding peptide
  MOD_RES (3), (3): Xaa is C or S

SEQ ID NO: 51775 - protein, 38 aa, Artificial Sequence
  GFR-binding peptide
  MOD_RES (4), (4): Xaa is C or S
  MOD_RES (20), (21), (22), (23), (24): Xaa is A or G
  MOD_RES (25), (26), (27), (28): Xaa is A or G or is absent
SVKXQPSRVHHEPLTVLYYXXXXXXXXXEQLSNRLEEH

SEQ ID NO: 51776 - protein, 39 aa, Artificial Sequence; identical to SEQ ID NO: 13874
  GFR-binding peptide
  MOD_RES (2), (3), (36), (38): Xaa is C or S
  MOD_RES (17), (18), (19), (20), (21): Xaa is A or G
  MOD_RES (22), (23), (24), (25): Xaa is A or G or is absent

SEQ ID NO: 51777 - protein, 39 aa, Artificial Sequence
  GFR-binding peptide
  MOD_RES (4), (5), (36), (38): Xaa is C or S
AAPXXVPQALSNITIQIMVGRKPKVIGEMSMIVRSXKXS

SEQ ID NO: 51778 - protein, 36 aa, Artificial Sequence
  GFR-binding peptide
  MOD_RES (2), (3), (35): Xaa is C or S
AXXVPTELRSVKMAKVDEYDKVVKEVQVEMVVEGXG

SEQ ID NO: 51779 - protein, 40 aa, Artificial Sequence; identical to SEQ ID NO: 13875
  GFR-binding peptide
  MOD_RES (4), (5), (38), (40): Xaa is C or S
  MOD_RES (19), (20), (21), (22), (23): Xaa is A or G
  MOD_RES (24), (25), (26), (27): Xaa is A or G or is absent

SEQ ID NO: 51780 - protein, 36 aa, Artificial Sequence; identical to SEQ ID NO: 13876
  GFR-binding peptide
  MOD_RES (4), (5), (36): Xaa is C or S

SEQ ID NO: 51781 - protein, 38 aa, Artificial Sequence
  GFR-binding peptide
  MOD_RES (2), (3), (36), (38): Xaa is C or S
  MOD_RES (17), (18), (19), (20), (21): Xaa is A or G
  MOD_RES (22), (23), (24), (25): Xaa is A or G or is absent
PXXVPQDLRSVKIAKVXXXXXXXXXKEVQVMVVKSXKX

SEQ ID NO: 51782 - protein, 37 aa, Artificial Sequence; identical to SEQ ID NO: 18958
  GFR-binding peptide
  MOD_RES (36), (36): Xaa is C or S
  MOD_RES (15), (16), (17), (18), (19): Xaa is A or G
  MOD_RES (20), (21), (22), (23): Xaa is A or G or is absent

SEQ ID NO: 51783 - protein, 40 aa, Artificial Sequence; identical to SEQ ID NO: 13878
  GFR-binding peptide
  MOD_RES (5), (6), (38), (40): Xaa is C or S

SEQ ID NO: 51784 - protein, 36 aa, Artificial Sequence
  GFR-binding peptide
  MOD_RES (16), (17), (18), (19), (20): Xaa is A or G
  MOD_RES (21), (22), (23), (24): Xaa is A or G or is absent
RPTQVQLEPLTVLYYXXXXXXXXXEQLSNTLEDHLA

SEQ ID NO: 51785 - protein, 33 aa, Artificial Sequence; identical to SEQ ID NO: 18959
  GFR-binding peptide
  MOD_RES (15), (16), (17), (18), (19): Xaa is A or G
  MOD_RES (20), (21), (22), (23): Xaa is A or G or is absent

SEQ ID NO: 51786 - protein, 40 aa, Artificial Sequence; identical to SEQ ID NO: 13881
  GFR-binding peptide
  MOD_RES (4), (5), (37), (39): Xaa is C or S

SEQ ID NO: 51787 - protein, 36 aa, Artificial Sequence; identical to SEQ ID NO: 13882
  GFR-binding peptide
  MOD_RES (2), (3): Xaa is C or S
  MOD_RES (17), (18), (19), (20), (21): Xaa is A or G
  MOD_RES (22), (23), (24), (25): Xaa is A or G or is absent

SEQ ID NO: 51788 - protein, 39 aa, Artificial Sequence
  GFR-binding peptide
  MOD_RES (5), (6), (38): Xaa is C or S
VPKPXXAPTKLRPVQVRKIDDSSNVIKKATVNMVVRSXG

SEQ ID NO: 51789 - protein, 39 aa, Artificial Sequence
  GFR-binding peptide
  MOD_RES (6), (7): Xaa is C or S
  MOD_RES (21), (22), (23), (24), (25): Xaa is A or G
  MOD_RES (26), (27), (28), (29): Xaa is A or G or is absent
KIPKAXXVPTELRPVQMRKIXXXXXXXXXKKATVDMVVE

SEQ ID NO: 51790 - protein, 36 aa, Artificial Sequence
  GFR-binding peptide
  MOD_RES (1), (35): Xaa is C or S
  MOD_RES (15), (16), (17), (18), (19): Xaa is A or G
  MOD_RES (20), (21), (22), (23): Xaa is A or G or is absent
XVPTELSNITMQIMXXXXXXXXXIGEMSDMVVEGXG

SEQ ID NO: 51791 - protein, 35 aa, Artificial Sequence; identical to SEQ ID NO: 13886
  GFR-binding peptide
  MOD_RES (2), (3): Xaa is C or S
  MOD_RES (17), (18), (19), (20), (21): Xaa is A or G
  MOD_RES (22), (23), (24), (25): Xaa is A or G or is absent

SEQ ID NO: 51792 - protein, 43 aa, Artificial Sequence
  GFR-binding peptide
  MOD_RES (5), (42): Xaa is C or S
RNVQXRPTQVQLEPLTVLYYEIVRKKPIFEQLSNTLEDHLAXK

SEQ ID NO: 51793 - protein, 36 aa, Artificial Sequence
  GFR-binding peptide
  MOD_RES (4), (5), (36): Xaa is C or S
AAPXXVPQALSNITIQIMVGRKPKVIGEMSMIVRSX

SEQ ID NO: 51794 - protein, 37 aa, Artificial Sequence
  GFR-binding peptide
  MOD_RES (1), (2), (34), (36): Xaa is C or S
XXVPTELRSVKMAKVDENEKVVKEVQVDMVVEGXGXR

SEQ ID NO: 51795 - protein, 34 aa, Artificial Sequence
  GFR-binding peptide
  MOD_RES (3), (4): Xaa is C or S
APXXVPQALRSVKIAKVVGRKPKVKEVQVMIVRS

SEQ ID NO: 51796 - protein, 35 aa, Artificial Sequence; identical to SEQ ID NO: 13891
  GFR-binding peptide
  MOD_RES (1), (33), (35): Xaa is C or S

SEQ ID NO: 51797 - protein, 33 aa, Artificial Sequence
  GFR-binding peptide
  MOD_RES (1), (2), (33): Xaa is C or S
XXVPQALSNITIQIMVGRKPKVIGEMSMIVRSX

SEQ ID NO: 51798 - protein, 39 aa, Artificial Sequence
  GFR-binding peptide
  MOD_RES (6), (7): Xaa is C or S
  MOD_RES (21), (22), (23), (24), (25): Xaa is A or G
  MOD_RES (26), (27), (28), (29): Xaa is A or G or is absent
ASAAPXXVPQALRPVQIRKIXXXXXXXXXKKATVMIVRS

SEQ ID NO: 51799 - protein, 38 aa, Artificial Sequence; identical to SEQ ID NO: 13892
  GFR-binding peptide
  MOD_RES (1), (35), (37): Xaa is C or S
  MOD_RES (15), (16), (17), (18), (19): Xaa is A or G
  MOD_RES (20), (21), (22), (23): Xaa is A or G or is absent

SEQ ID NO: 51800 - protein, 37 aa, Artificial Sequence; identical to SEQ ID NO: 13893
  GFR-binding peptide
  MOD_RES (34), (36): Xaa is C or S
  MOD_RES (14), (15), (16), (17), (18): Xaa is A or G
  MOD_RES (19), (20), (21), (22): Xaa is A or G or is absent

SEQ ID NO: 51801 - protein, 36 aa, Artificial Sequence; identical to SEQ ID NO: 13895
  GFR-binding peptide
  MOD_RES (2), (34), (36): Xaa is C or S

SEQ ID NO: 51802 - protein, 39 aa, Artificial Sequence; identical to SEQ ID NO: 13898
  GFR-binding peptide
  MOD_RES (6), (7): Xaa is C or S
  MOD_RES (21), (22), (23), (24), (25): Xaa is A or G
  MOD_RES (26), (27), (28), (29): Xaa is A or G or is absent

SEQ ID NO: 51803 - protein, 33 aa, Artificial Sequence
  GFR-binding peptide
  MOD_RES (2), (3): Xaa is C or S
AXXVPTELRPVQMRKIDENEKVVKKATVDMVVE

SEQ ID NO: 51804 - protein, 40 aa, Artificial Sequence
  GFR-binding peptide
  MOD_RES (3), (4), (38), (40): Xaa is C or S
  MOD_RES (18), (19), (20), (21), (22): Xaa is A or G
  MOD_RES (23), (24), (25), (26): Xaa is A or G or is absent
KPXXAPTQLSNITVQIMXXXXXXXXXIGEMSNMVVRAXGX

SEQ ID NO: 51805 - protein, 37 aa, Artificial Sequence; identical to SEQ ID NO: 18975
  GFR-binding peptide
  MOD_RES (5), (5): Xaa is C or S
  MOD_RES (19), (20), (21), (22), (23): Xaa is A or G
  MOD_RES (24), (25), (26), (27): Xaa is A or G or is absent

SEQ ID NO: 51806 - protein, 38 aa, Artificial Sequence; identical to SEQ ID NO: 13900
  GFR-binding peptide
  MOD_RES (5), (6): Xaa is C or S
  MOD_RES (20), (21), (22), (23), (24): Xaa is A or G
  MOD_RES (25), (26), (27), (28): Xaa is A or G or is absent

SEQ ID NO: 51807 - protein, 41 aa, Artificial Sequence; identical to SEQ ID NO: 39020
  GFR-binding peptide
  MOD_RES (4), (5), (38), (40): Xaa is C or S
  MOD_RES (19), (20), (21), (22), (23): Xaa is A or G
  MOD_RES (24), (25), (26), (27): Xaa is A or G or is absent

SEQ ID NO: 51808 - protein, 41 aa, Artificial Sequence
  GFR-binding peptide
  MOD_RES (6), (7), (39), (41): Xaa is C or S
TVPKPXXAPTQLSNITVQIMDDSSNVIIGEMSNMVVRAXGX

SEQ ID NO: 51809 - protein, 37 aa, Artificial Sequence
  GFR-binding peptide
  MOD_RES (2), (3), (37): Xaa is C or S
  MOD_RES (17), (18), (19), (20), (21): Xaa is A or G
  MOD_RES (22), (23), (24), (25): Xaa is A or G or is absent
PXXAPTKLRSVKVAKVXXXXXXXXXKEVQVNMVVRSX

SEQ ID NO: 51810 - protein, 45 aa, Artificial Sequence
  GFR-binding peptide
  MOD_RES (5), (42), (44): Xaa is C or S
RNVQXRPTQVQLEPLPVVYYEIVRKKPIFEQLSNTLEDHLAXKXE

SEQ ID NO: 51811 - protein, 36 aa, Artificial Sequence
  GFR-binding peptide
  MOD_RES (4), (5), (36): Xaa is C or S
AAPXXVPQALRSVKIAKVVGRKPKVKEVQVMIVRSX

SEQ ID NO: 51812 - protein, 39 aa, Artificial Sequence; identical to SEQ ID NO: 18978
  GFR-binding peptide
  MOD_RES (3), (3): Xaa is C or S
  MOD_RES (19), (20), (21), (22), (23): Xaa is A or G
  MOD_RES (24), (25), (26), (27): Xaa is A or G or is absent

SEQ ID NO: 51813 - protein, 34 aa, Artificial Sequence
  GFR-binding peptide
  MOD_RES (31), (33): Xaa is C or S
VPQDLSNITIQIMVGRTPKVIGEMSMVVKSXKXS

SEQ ID NO: 51814 - protein, 37 aa, Artificial Sequence; identical to SEQ ID NO: 13903
  GFR-binding peptide
  MOD_RES (34), (36): Xaa is C or S
  MOD_RES (14), (15), (16), (17), (18): Xaa is A or G
  MOD_RES (19), (20), (21), (22): Xaa is A or G or is absent

SEQ ID NO: 51815 - protein, 33 aa, Artificial Sequence
  GFR-binding peptide
  MOD_RES (32), (32): Xaa is C or S
APTKLRSVKVAKVDDSSNVIKEVQVNMVVRSXG

SEQ ID NO: 51816 - protein, 40 aa, Artificial Sequence; identical to SEQ ID NO: 13907
  GFR-binding peptide
  MOD_RES (4), (5), (38), (40): Xaa is C or S
  MOD_RES (19), (20), (21), (22), (23): Xaa is A or G
  MOD_RES (24), (25), (26), (27): Xaa is A or G or is absent

SEQ ID NO: 51817 - protein, 39 aa, Artificial Sequence
  GFR-binding peptide
  MOD_RES (3), (4), (36), (38): Xaa is C or S
KAXXVPTELRPVQMRKIDEYDKVVKKATVEMVVEGXGXR

SEQ ID NO: 51818 - protein, 40 aa, Artificial Sequence
  GFR-binding peptide
  MOD_RES (6), (7): Xaa is C or S
  MOD_RES (21), (22), (23), (24), (25): Xaa is A or G
  MOD_RES (26), (27), (28), (29): Xaa is A or G or is absent
TVPKPXXAPTQLRPVQVRKIXXXXXXXXXKKATVNMVVRA

SEQ ID NO: 51819 - protein, 33 aa, Artificial Sequence
  GFR-binding peptide
  MOD_RES (1), (1): Xaa is C or S
  MOD_RES (15), (16), (17), (18), (19): Xaa is A or G
  MOD_RES (20), (21), (22), (23): Xaa is A or G or is absent
XVPTEEEPLPMVYYXXXXXXXXXEQLSNFLQHN

SEQ ID NO: 51820 - protein, 37 aa, Artificial Sequence
  GFR-binding peptide
  MOD_RES (1), (35), (37): Xaa is C or S
  MOD_RES (15), (16), (17), (18), (19): Xaa is A or G
  MOD_RES (20), (21), (22), (23): Xaa is A or G or is absent
XAPTQLRSVKVAKVXXXXXXXXXKEVQVNMVVRAXGX

SEQ ID NO: 51821 - protein, 40 aa, Artificial Sequence
  GFR-binding peptide
  MOD_RES (6), (40): Xaa is C or S
DEGLEXVPTEEEPLPMVYYRIKPHQGQHEQLSNFLQHNKX

SEQ ID NO: 51822 - protein, 37 aa, Artificial Sequence
  GFR-binding peptide
  MOD_RES (2), (3), (37): Xaa is C or S
  MOD_RES (17), (18), (19), (20), (21): Xaa is A or G
  MOD_RES (22), (23), (24), (25): Xaa is A or G or is absent
AXXVPTELRPVQMRKIXXXXXXXXXKKATVDMVVEGX

SEQ ID NO: 51823 - protein, 42 aa, Artificial Sequence
  GFR-binding peptide
  MOD_RES (4), (5), (39), (41): Xaa is C or S
  MOD_RES (19), (20), (21), (22), (23): Xaa is A or G
  MOD_RES (24), (25), (26), (27): Xaa is A or G or is absent
PKPXXAPTQLRSVKVAKVXXXXXXXXXKEVQVNMVVRAXGXH

SEQ ID NO: 51824 - protein, 35 aa, Artificial Sequence; identical to SEQ ID NO: 13914
  GFR-binding peptide
  MOD_RES (1), (32), (34): Xaa is C or S

SEQ ID NO: 51825 - protein, 38 aa, Artificial Sequence; identical to SEQ ID NO: 18980
  GFR-binding peptide
  MOD_RES (1), (38): Xaa is C or S

SEQ ID NO: 51826 - protein, 40 aa, Artificial Sequence; identical to SEQ ID NO: 13916
  GFR-binding peptide
  MOD_RES (4), (5), (39): Xaa is C or S
  MOD_RES (19), (20), (21), (22), (23): Xaa is A or G
  MOD_RES (24), (25), (26), (27): Xaa is A or G or is absent

SEQ ID NO: 51827 - protein, 42 aa, Artificial Sequence; identical to SEQ ID NO: 13919
  GFR-binding peptide
  MOD_RES (4), (5), (39), (41): Xaa is C or S
  MOD_RES (19), (20), (21), (22), (23): Xaa is A or G
  MOD_RES (24), (25), (26), (27): Xaa is A or G or is absent

SEQ ID NO: 51828 - protein, 41 aa, Artificial Sequence; identical to SEQ ID NO: 18984
  GFR-binding peptide
  MOD_RES (5), (5): Xaa is C or S
  MOD_RES (21), (22), (23), (24), (25): Xaa is A or G
  MOD_RES (26), (27), (28), (29): Xaa is A or G or is absent

SEQ ID NO: 51829 - protein, 41 aa, Artificial Sequence
  GFR-binding peptide
  MOD_RES (5), (6), (38), (40): Xaa is C or S
VPKPXXAPTQLSNITVQIMDDSSNVIIGEMSNMVVRAXGXH

SEQ ID NO: 51830 - protein, 38 aa, Artificial Sequence; identical to SEQ ID NO: 13924
  GFR-binding peptide
  MOD_RES (4), (5), (36), (38): Xaa is C or S

SEQ ID NO: 51831 - protein, 36 aa, Artificial Sequence; identical to SEQ ID NO: 18988
  GFR-binding peptide

SEQ ID NO: 51832 - protein, 33 aa, Artificial Sequence; identical to SEQ ID NO: 13926
  GFR-binding peptide
  MOD_RES (2), (3): Xaa is C or S

SEQ ID NO: 51833 - protein, 31 aa, Artificial Sequence
  GFR-binding peptide
  MOD_RES (31), (31): Xaa is C or S
VPQALSNITIQIMVGRKPKVIGEMSMIVRSX

SEQ ID NO: 51834 - protein, 38 aa, Artificial Sequence; identical to SEQ ID NO: 13927
  GFR-binding peptide
  MOD_RES (4), (5): Xaa is C or S
  MOD_RES (19), (20), (21), (22), (23): Xaa is A or G
  MOD_RES (24), (25), (26), (27): Xaa is A or G or is absent

SEQ ID NO: 51835 - protein, 36 aa, Artificial Sequence
  GFR-binding peptide
  MOD_RES (1), (2), (35): Xaa is C or S
  MOD_RES (16), (17), (18), (19), (20): Xaa is A or G
  MOD_RES (21), (22), (23), (24): Xaa is A or G or is absent
XXVPQALSNITIQIMXXXXXXXXXIGEMSMIVRSXK

SEQ ID NO: 51836 - protein, 39 aa, Artificial Sequence
  GFR-binding peptide
  MOD_RES (4), (5), (36), (38): Xaa is C or S
ASPXXVPQDLRSVKIAKVVGRTPKVKEVQVMVVKSXKXS

SEQ ID NO: 51837 - protein, 35 aa, Artificial Sequence
  GFR-binding peptide
  MOD_RES (1), (33), (35): Xaa is C or S
XVPTELSNITMQIMDENEKVVIGEMSDMVVEGXGX

SEQ ID NO: 51838 - protein, 38 aa, Artificial Sequence
  GFR-binding peptide
  MOD_RES (2), (3), (37): Xaa is C or S
  MOD_RES (17), (18), (19), (20), (21): Xaa is A or G
  MOD_RES (22), (23), (24), (25): Xaa is A or G or is absent
PXXAPTQLRSVKVAKVXXXXXXXXXKEVQVNMVVRAXG

SEQ ID NO: 51839 - protein, 41 aa, Artificial Sequence; identical to SEQ ID NO: 18989
  GFR-binding peptide
  MOD_RES (1), (38), (40): Xaa is C or S
  MOD_RES (17), (18), (19), (20), (21): Xaa is A or G
  MOD_RES (22), (23), (24), (25): Xaa is A or G or is absent

SEQ ID NO: 51840 - protein, 36 aa, Artificial Sequence
  GFR-binding peptide
  MOD_RES (3), (4), (35): Xaa is C or S
SPXXVPQDLRSVKIAKVVGRTPKVKEVQVMVVKSXK

SEQ ID NO: 51841 - protein, 34 aa, Artificial Sequence; identical to SEQ ID NO: 13929
  GFR-binding peptide
  MOD_RES (1), (32), (34): Xaa is C or S

SEQ ID NO: 51842 - protein, 35 aa, Artificial Sequence; identical to SEQ ID NO: 18990
  GFR-binding peptide
  MOD_RES (35), (35): Xaa is C or S

SEQ ID NO: 51843 - protein, 37 aa, Artificial Sequence
  GFR-binding peptide
  MOD_RES (36), (36): Xaa is C or S
  MOD_RES (15), (16), (17), (18), (19): Xaa is A or G
  MOD_RES (20), (21), (22), (23): Xaa is A or G or is absent
PSRVHHEPLPVVYYXXXXXXXXXEQLSNRLEEHLEXA

SEQ ID NO: 51844 - protein, 39 aa, Artificial Sequence; identical to SEQ ID NO: 13931
  GFR-binding peptide
  MOD_RES (3), (4), (38): Xaa is C or S
  MOD_RES (18), (19), (20), (21), (22): Xaa is A or G
  MOD_RES (23), (24), (25), (26): Xaa is A or G or is absent

SEQ ID NO: 51845 - protein, 44 aa, Artificial Sequence; identical to SEQ ID NO: 18993
  GFR-binding peptide
  MOD_RES (7), (41), (43): Xaa is C or S
  MOD_RES (21), (22), (23), (24), (25): Xaa is A or G
  MOD_RES (26), (27), (28), (29): Xaa is A or G or is absent

SEQ ID NO: 51846 - protein, 40 aa, Artificial Sequence; identical to SEQ ID NO: 18994
  GFR-binding peptide
  MOD_RES (3), (37), (39): Xaa is C or S
  MOD_RES (17), (18), (19), (20), (21): Xaa is A or G
  MOD_RES (22), (23), (24), (25): Xaa is A or G or is absent

SEQ ID NO: 51847 - protein, 37 aa, Artificial Sequence
  GFR-binding peptide
  MOD_RES (3), (4), (37): Xaa is C or S
  MOD_RES (18), (19), (20), (21), (22): Xaa is A or G
  MOD_RES (23), (24), (25), (26): Xaa is A or G or is absent
SPXXVPQDLRPVQIRKIXXXXXXXXXKKATVMVVKSX

SEQ ID NO: 51848 - protein, 37 aa, Artificial Sequence
  GFR-binding peptide
  MOD_RES (2), (3), (35), (37): Xaa is C or S
PXXAPTKLRPVQVRKIDDSSNVIKKATVNMVVRSXGX

SEQ ID NO: 51849 - protein, 41 aa, Artificial Sequence; identical to SEQ ID NO: 13934
  GFR-binding peptide
  MOD_RES (5), (6), (38), (40): Xaa is C or S

SEQ ID NO: 51850 - protein, 41 aa, Artificial Sequence
  GFR-binding peptide
  MOD_RES (1), (38), (40): Xaa is C or S
XQPSRVHHEPLPVVYYEYVRKKPKLEQLSNRLEEHLEXAXA

SEQ ID NO: 51851 - protein, 31 aa, Artificial Sequence; identical to SEQ ID NO: 13937
  GFR-binding peptide
  MOD_RES (1), (1): Xaa is C or S

SEQ ID NO: 51852 - protein, 38 aa, Artificial Sequence
  GFR-binding peptide
  MOD_RES (2), (3), (36), (38): Xaa is C or S
  MOD_RES (17), (18), (19), (20), (21): Xaa is A or G
  MOD_RES (22), (23), (24), (25): Xaa is A or G or is absent
PXXVPQALSNITIQIMXXXXXXXXXIGEMSMIVRSXKX

SEQ ID NO: 51853 - protein, 36 aa, Artificial Sequence
  GFR-binding peptide
  MOD_RES (3), (4): Xaa is C or S
  MOD_RES (18), (19), (20), (21), (22): Xaa is A or G
  MOD_RES (23), (24), (25), (26): Xaa is A or G or is absent
KPXXAPTQLSNITVQIMXXXXXXXXXIGEMSNMVVR

SEQ ID NO: 51854 - protein, 34 aa, Artificial Sequence
  GFR-binding peptide
  MOD_RES (2), (3): Xaa is C or S
AXXVPTELRPVQMRKIDENEKVVKKATVDMVVEG

SEQ ID NO: 51855 - protein, 40 aa, Artificial Sequence
  GFR-binding peptide
  MOD_RES (5), (5): Xaa is C or S
  MOD_RES (21), (22), (23), (24), (25): Xaa is A or G
  MOD_RES (26), (27), (28), (29): Xaa is A or G or is absent
RNVQXRPTQVQLEPLTVLYYXXXXXXXXXEQLSNTLEDHL

SEQ ID NO: 51856 - protein, 38 aa, Artificial Sequence; identical to SEQ ID NO: 13938
  GFR-binding peptide
  MOD_RES (5), (6): Xaa is C or S
  MOD_RES (20), (21), (22), (23), (24): Xaa is A or G
  MOD_RES (25), (26), (27), (28): Xaa is A or G or is absent

SEQ ID NO: 51857 - protein, 42 aa, Artificial Sequence; identical to SEQ ID NO: 13940
  GFR-binding peptide
  MOD_RES (5), (6), (40), (42): Xaa is C or S
  MOD_RES (20), (21), (22), (23), (24): Xaa is A or G
  MOD_RES (25), (26), (27), (28): Xaa is A or G or is absent

SEQ ID NO: 51858 - protein, 34 aa, Artificial Sequence; identical to SEQ ID NO: 13941
  GFR-binding peptide
  MOD_RES (1), (32), (34): Xaa is C or S

SEQ ID NO: 51859 - protein, 36 aa, Artificial Sequence; identical to SEQ ID NO: 13942
  GFR-binding peptide
  MOD_RES (3), (4): Xaa is C or S
  MOD_RES (18), (19), (20), (21), (22): Xaa is A or G
  MOD_RES (23), (24), (25), (26): Xaa is A or G or is absent

SEQ ID NO: 51860 - protein, 32 aa, Artificial Sequence
  GFR-binding peptide
  MOD_RES (1), (1): Xaa is C or S
XAPTKLSNITVQIMDDSSNVIIGEMSNMVVRS

SEQ ID NO: 51861 - protein, 40 aa, Artificial Sequence; identical to SEQ ID NO: 13944
  GFR-binding peptide
  MOD_RES (2), (3), (37), (39): Xaa is C or S
  MOD_RES (17), (18), (19), (20), (21): Xaa is A or G
  MOD_RES (22), (23), (24), (25): Xaa is A or G or is absent

SEQ ID NO: 51862 - protein, 39 aa, Artificial Sequence
  GFR-binding peptide
  MOD_RES (4), (5), (38): Xaa is C or S
  MOD_RES (19), (20), (21), (22), (23): Xaa is A or G
  MOD_RES (24), (25), (26), (27): Xaa is A or G or is absent
AAPXXVPQALRSVKIAKVXXXXXXXXXKEVQVMIVRSXK

SEQ ID NO: 51863 - protein, 39 aa, Artificial Sequence; identical to SEQ ID NO: 13947
  GFR-binding peptide
  MOD_RES (4), (5), (39): Xaa is C or S
  MOD_RES (19), (20), (21), (22), (23): Xaa is A or G
  MOD_RES (24), (25), (26), (27): Xaa is A or G or is absent

SEQ ID NO: 51864 - protein, 36 aa, Artificial Sequence
  GFR-binding peptide
  MOD_RES (1), (33), (35): Xaa is C or S
XVPTELRPVQMRKIDEYDKVVKKATVEMVVEGXGXR

SEQ ID NO: 51865 - protein, 39 aa, Artificial Sequence; identical to SEQ ID NO: 13951
  GFR-binding peptide
  MOD_RES (5), (6): Xaa is C or S
  MOD_RES (20), (21), (22), (23), (24): Xaa is A or G
  MOD_RES (25), (26), (27), (28): Xaa is A or G or is absent

SEQ ID NO: 51866 - protein, 34 aa, Artificial Sequence
  GFR-binding peptide
  MOD_RES (1), (33): Xaa is C or S
XVPTELRPVQMRKIDEYDKVVKKATVEMVVEGXG

SEQ ID NO: 51867 - protein, 35 aa, Artificial Sequence
  GFR-binding peptide
  MOD_RES (2), (3), (35): Xaa is C or S
PXXAPTQLSNITVQIMDDSSNVIIGEMSNMVVRAX

SEQ ID NO: 51868 - protein, 40 aa, Artificial Sequence
  GFR-binding peptide
  MOD_RES (5), (5): Xaa is C or S
RNVQXRPTQVQLEPLPVVYYEIVRKKPIFEQLSNTLEDHL

SEQ ID NO: 51869 - protein, 35 aa, Artificial Sequence
  GFR-binding peptide
  MOD_RES (4), (5): Xaa is C or S
PKPXXAPTKLSNITVQIMDDSSNVIIGEMSNMVVR

SEQ ID NO: 51870 - protein, 40 aa, Artificial Sequence
  GFR-binding peptide
  MOD_RES (4), (5), (38), (40): Xaa is C or S
  MOD_RES (19), (20), (21), (22), (23): Xaa is A or G
  MOD_RES (24), (25), (26), (27): Xaa is A or G or is absent
ASPXXVPQDLSNITIQIMXXXXXXXXXIGEMSMVVKSXKX

SEQ ID NO: 51871 - protein, 35 aa, Artificial Sequence
  GFR-binding peptide
  MOD_RES (1), (2), (33), (35): Xaa is C or S
XXVSQDLSNITIQIMIGKTPKIIGEMSMIVKSXKX

SEQ ID NO: 51872 - protein, 33 aa, Artificial Sequence; identical to SEQ ID NO: 19006
  GFR-binding peptide

SEQ ID NO: 51873 - protein, 39 aa, Artificial Sequence; identical to SEQ ID NO: 19007
  GFR-binding peptide
  MOD_RES (4), (4): Xaa is C or S
  MOD_RES (20), (21), (22), (23), (24): Xaa is A or G
  MOD_RES (25), (26), (27), (28): Xaa is A or G or is absent

SEQ ID NO: 51874 - protein, 34 aa, Artificial Sequence; identical to SEQ ID NO: 13957
  GFR-binding peptide
  MOD_RES (4), (4): Xaa is C or S

SEQ ID NO: 51875 - protein, 35 aa, Artificial Sequence; identical to SEQ ID NO: 13958
  GFR-binding peptide
  MOD_RES (1), (2): Xaa is C or S
  MOD_RES (16), (17), (18), (19), (20): Xaa is A or G
  MOD_RES (21), (22), (23), (24): Xaa is A or G or is absent

SEQ ID NO: 51876 - protein, 36 aa, Artificial Sequence
  GFR-binding peptide
  MOD_RES (1), (35): Xaa is C or S
  MOD_RES (15), (16), (17), (18), (19): Xaa is A or G
  MOD_RES (20), (21), (22), (23): Xaa is A or G or is absent
XAPTQLRPVQVRKIXXXXXXXXXKKATVNMVVRAXG

SEQ ID NO: 51877 - protein, 43 aa, Artificial Sequence
  GFR-binding peptide
  MOD_RES (5), (6), (40), (42): Xaa is C or S
  MOD_RES (20), (21), (22), (23), (24): Xaa is A or G
  MOD_RES (25), (26), (27), (28): Xaa is A or G or is absent
VPKPXXAPTKLRSVKVAKVXXXXXXXXXKEVQVNMVVRSXGXH

SEQ ID NO: 51878 - protein, 36 aa, Artificial Sequence
  GFR-binding peptide
  MOD_RES (2), (2): Xaa is C or S
  MOD_RES (18), (19), (20), (21), (22): Xaa is A or G
  MOD_RES (23), (24), (25), (26): Xaa is A or G or is absent
QXRPTQVQLEPLPVVYYXXXXXXXXXEQLSNTLEDH

SEQ ID NO: 51879 - protein, 40 aa, Artificial Sequence
  GFR-binding peptide
  MOD_RES (5), (6), (37), (39): Xaa is C or S
SASPXXVPQDLSNITIQIMVGRTPKVIGEMSMVVKSXKXS

SEQ ID NO: 51880 - protein, 38 aa, Artificial Sequence
  GFR-binding peptide
  MOD_RES (3), (4), (38): Xaa is C or S
  MOD_RES (18), (19), (20), (21), (22): Xaa is A or G
  MOD_RES (23), (24), (25), (26): Xaa is A or G or is absent
KAXXVPTELSNITMQIMXXXXXXXXXIGEMSDMVVEGX

SEQ ID NO: 51881 - protein, 37 aa, Artificial Sequence; identical to SEQ ID NO: 13960
  GFR-binding peptide
  MOD_RES (7), (7): Xaa is C or S

SEQ ID NO: 51882 - protein, 36 aa, Artificial Sequence; identical to SEQ ID NO: 19008
  GFR-binding peptide
  MOD_RES (35), (35): Xaa is C or S

SEQ ID NO: 51883 - protein, 38 aa, Artificial Sequence; identical to SEQ ID NO: 19009
  GFR-binding peptide
  MOD_RES (3), (3): Xaa is C or S
  MOD_RES (19), (20), (21), (22), (23): Xaa is A or G
  MOD_RES (24), (25), (26), (27): Xaa is A or G or is absent

SEQ ID NO: 51884 - protein, 41 aa, Artificial Sequence
  GFR-binding peptide
  MOD_RES (6), (7), (41): Xaa is C or S
  MOD_RES (21), (22), (23), (24), (25): Xaa is A or G
  MOD_RES (26), (27), (28), (29): Xaa is A or G or is absent
KIPKAXXVPTELSNITMQIMXXXXXXXXXIGEMSDMVVEGX

SEQ ID NO: 51885 - protein, 35 aa, Artificial Sequence
  GFR-binding peptide
  MOD_RES (35), (35): Xaa is C or S
  MOD_RES (14), (15), (16), (17), (18): Xaa is A or G
  MOD_RES (19), (20), (21), (22): Xaa is A or G or is absent
TQVQLEPLPVVYYXXXXXXXXXEQLSNTLEDHLAX

SEQ ID NO: 51886 - protein, 36 aa, Artificial Sequence
  GFR-binding peptide
  MOD_RES (3), (4), (36): Xaa is C or S
KAXXVPTELRSVKMAKVDENEKVVKEVQVDMVVEGX

SEQ ID NO: 51887 - protein, 32 aa, Artificial Sequence
  GFR-binding peptide
  MOD_RES (32), (32): Xaa is C or S
VPTELRSVKMAKVDEYDKVVKEVQVEMVVEGX

SEQ ID NO: 51888 - protein, 41 aa, Artificial Sequence; identical to SEQ ID NO: 13963
  GFR-binding peptide
  MOD_RES (6), (7), (40): Xaa is C or S
  MOD_RES (21), (22), (23), (24), (25): Xaa is A or G
  MOD_RES (26), (27), (28), (29): Xaa is A or G or is absent

SEQ ID NO: 51889 - protein, 35 aa, Artificial Sequence
  GFR-binding peptide
  MOD_RES (1), (2), (33), (35): Xaa is C or S
XXVPQDLSNITIQIMVGRTPKVIGEMSMVVKSXKX

SEQ ID NO: 51890 - protein, 39 aa, Artificial Sequence
  GFR-binding peptide
  MOD_RES (4), (5), (38): Xaa is C or S
  MOD_RES (19), (20), (21), (22), (23): Xaa is A or G
  MOD_RES (24), (25), (26), (27): Xaa is A or G or is absent
ASPXXVSQDLRPVQIRKIXXXXXXXXXKKATVMIVKSXK

SEQ ID NO: 51891 - protein, 37 aa, Artificial Sequence
  GFR-binding peptide
  MOD_RES (4), (5), (37): Xaa is C or S
PKAXXVPTELSNITMQIMDEYDKVVIGEMSEMVVEGX

SEQ ID NO: 51892 - protein, 34 aa, Artificial Sequence; identical to SEQ ID NO: 13966
  GFR-binding peptide
  MOD_RES (2), (34): Xaa is C or S

SEQ ID NO: 51893 - protein, 35 aa, Artificial Sequence
  GFR-binding peptide
  MOD_RES (3), (4), (35): Xaa is C or S
APXXVPQALSNITIQIMVGRKPKVIGEMSMIVRSX

SEQ ID NO: 51894 - protein, 36 aa, Artificial Sequence; identical to SEQ ID NO: 13969
  GFR-binding peptide
  MOD_RES (3), (4), (36): Xaa is C or S

SEQ ID NO: 51895 - protein, 36 aa, Artificial Sequence
  GFR-binding peptide
  MOD_RES (1), (33), (35): Xaa is C or S
XVPTELRSVKMAKVDENEKVVKEVQVDMVVEGXGXR

SEQ ID NO: 51896 - protein, 38 aa, Artificial Sequence
  GFR-binding peptide
  MOD_RES (5), (6), (37): Xaa is C or S
SASPXXVPQDLRSVKIAKVVGRTPKVKEVQVMVVKSXK

SEQ ID NO: 51897 - protein, 41 aa, Artificial Sequence
  GFR-binding peptide
  MOD_RES (4), (5), (38), (40): Xaa is C or S
  MOD_RES (19), (20), (21), (22), (23): Xaa is A or G
  MOD_RES (24), (25), (26), (27): Xaa is A or G or is absent
ASPXXVPQDLRPVQIRKIXXXXXXXXXKKATVMVVKSXKXS

SEQ ID NO: 51898 - protein, 35 aa, Artificial Sequence
  GFR-binding peptide
  MOD_RES (2), (3): Xaa is C or S
  MOD_RES (17), (18), (19), (20), (21): Xaa is A or G
  MOD_RES (22), (23), (24), (25): Xaa is A or G or is absent
AXXVPTELSNITMQIMXXXXXXXXXIGEMSDMVVE

SEQ ID NO: 51899 - protein, 38 aa, Artificial Sequence
  GFR-binding peptide
  MOD_RES (3), (37): Xaa is C or S
  MOD_RES (17), (18), (19), (20), (21): Xaa is A or G
  MOD_RES (22), (23), (24), (25): Xaa is A or G or is absent
LEXVPTEEEPLTMLYYXXXXXXXXXEQLSNFLQHNKXE

SEQ ID NO: 51900 - protein, 34 aa, Artificial Sequence
  GFR-binding peptide
  MOD_RES (1), (2): Xaa is C or S
  MOD_RES (16), (17), (18), (19), (20): Xaa is A or G
  MOD_RES (21), (22), (23), (24): Xaa is A or G or is absent
XXVSQDLRPVQIRKIXXXXXXXXXKKATVMIVKS

SEQ ID NO: 51901 - protein, 36 aa, Artificial Sequence
  GFR-binding peptide
  MOD_RES (1), (1): Xaa is C or S
XRPTQVQLEPLPVVYYEIVRKKPIFEQLSNTLEDHL

SEQ ID NO: 51902 - protein, 33 aa, Artificial Sequence
  GFR-binding peptide
  MOD_RES (1), (1): Xaa is C or S
  MOD_RES (15), (16), (17), (18), (19): Xaa is A or G
  MOD_RES (20), (21), (22), (23): Xaa is A or G or is absent
XVPTEEEPLTMLYYXXXXXXXXXEQLSNFLQHN

SEQ ID NO: 51903 - protein, 38 aa, Artificial Sequence; identical to SEQ ID NO: 13976
  GFR-binding peptide
  MOD_RES (1), (2), (36), (38): Xaa is C or S
  MOD_RES (16), (17), (18), (19), (20): Xaa is A or G
  MOD_RES (21), (22), (23), (24): Xaa is A or G or is absent

SEQ ID NO: 51904 - protein, 37 aa, Artificial Sequence
  GFR-binding peptide
  MOD_RES (3), (37): Xaa is C or S
  MOD_RES (17), (18), (19), (20), (21): Xaa is A or G
  MOD_RES (22), (23), (24), (25): Xaa is A or G or is absent
LEXVPTEEEPLPMVYYXXXXXXXXXEQLSNFLQHNKX

SEQ ID NO: 51905 - protein, 35 aa, Artificial Sequence
  GFR-binding peptide
  MOD_RES (3), (4): Xaa is C or S
KPXXAPTKLRSVKVAKVDDSSNVIKEVQVNMVVRS

SEQ ID NO: 51906 - protein, 37 aa, Artificial Sequence; identical to SEQ ID NO: 19026
  GFR-binding peptide
  MOD_RES (36), (36): Xaa is C or S

SEQ ID NO: 51907 - protein, 34 aa, Artificial Sequence; identical to SEQ ID NO: 13979
  GFR-binding peptide
  MOD_RES (1), (1): Xaa is C or S
  MOD_RES (15), (16), (17), (18), (19): Xaa is A or G
  MOD_RES (20), (21), (22), (23): Xaa is A or G or is absent

SEQ ID NO: 51908 - protein, 41 aa, Artificial Sequence
  GFR-binding peptide
  MOD_RES (5), (6), (40): Xaa is C or S
  MOD_RES (20), (21), (22), (23), (24): Xaa is A or G
  MOD_RES (25), (26), (27), (28): Xaa is A or G or is absent
VPKPXXAPTKLSNITVQIMXXXXXXXXXIGEMSNMVVRSXG

SEQ ID NO: 51909 - protein, 35 aa, Artificial Sequence
  GFR-binding peptide
  MOD_RES (4), (5): Xaa is C or S
PKPXXAPTKLRSVKVAKVDDSSNVIKEVQVNMVVR

SEQ ID NO: 51910 - protein, 40 aa, Artificial Sequence; identical to SEQ ID NO: 13981
  GFR-binding peptide
  MOD_RES (7), (39): Xaa is C or S

SEQ ID NO: 51911 - protein, 35 aa, Artificial Sequence
  GFR-binding peptide
  MOD_RES (4), (5): Xaa is C or S
AAPXXVPQALRPVQIRKIVGRKPKVKKATVMIVRS

SEQ ID NO: 51912 - protein, 34 aa, Artificial Sequence
  GFR-binding peptide
  MOD_RES (1), (2): Xaa is C or S
  MOD_RES (16), (17), (18), (19), (20): Xaa is A or G
  MOD_RES (21), (22), (23), (24): Xaa is A or G or is absent
XXVPTELRSVKMAKVXXXXXXXXXKEVQVDMVVE

SEQ ID NO: 51913 - protein, 37 aa, Artificial Sequence
  GFR-binding peptide
  MOD_RES (4), (5), (37): Xaa is C or S
PKAXXVPTELSNITMQIMDENEKVVIGEMSDMVVEGX

SEQ ID NO: 51914 - protein, 43 aa, Artificial Sequence; identical to SEQ ID NO: 19031
  GFR-binding peptide
  MOD_RES (3), (40), (42): Xaa is C or S

SEQ ID NO: 51915 - protein, 39 aa, Artificial Sequence
  GFR-binding peptide
  MOD_RES (4), (5), (37), (39): Xaa is C or S
PKAXXVPTELSNITMQIMDEYDKVVIGEMSEMVVEGXGX

SEQ ID NO: 51916 - protein, 40 aa, Artificial Sequence; identical to SEQ ID NO: 13983
  GFR-binding peptide
  MOD_RES (5), (6), (40): Xaa is C or S
  MOD_RES (20), (21), (22), (23), (24): Xaa is A or G
  MOD_RES (25), (26), (27), (28): Xaa is A or G or is absent

SEQ ID NO: 51917 - protein, 31 aa, Artificial Sequence; identical to SEQ ID NO: 13984
  GFR-binding peptide

SEQ ID NO: 51918 - protein, 38 aa, Artificial Sequence
  GFR-binding peptide
  MOD_RES (2), (3), (35), (37): Xaa is C or S
PXXAPTKLRPVQVRKIDDSSNVIKKATVNMVVRSXGXH

SEQ ID NO: 51919 - protein, 37 aa, Artificial Sequence; identical to SEQ ID NO: 13987
  GFR-binding peptide
  MOD_RES (3), (4): Xaa is C or S
  MOD_RES (18), (19), (20), (21), (22): Xaa is A or G
  MOD_RES (23), (24), (25), (26): Xaa is A or G or is absent

SEQ ID NO: 51920 - protein, 38 aa, Artificial Sequence; identical to SEQ ID NO: 13988
  GFR-binding peptide
  MOD_RES (1), (35), (37): Xaa is C or S
  MOD_RES (15), (16), (17), (18), (19): Xaa is A or G
  MOD_RES (20), (21), (22), (23): Xaa is A or G or is absent

SEQ ID NO: 51921 - protein, 43 aa, Artificial Sequence
  GFR-binding peptide
  MOD_RES (5), (6), (40), (42): Xaa is C or S
  MOD_RES (20), (21), (22), (23), (24): Xaa is A or G
  MOD_RES (25), (26), (27), (28): Xaa is A or G or is absent
IPKAXXVPTELRSVKMAKVXXXXXXXXXKEVQVDMVVEGXGXR

SEQ ID NO: 51922 - protein, 34 aa, Artificial Sequence
  GFR-binding peptide
  MOD_RES (1), (2): Xaa is C or S
  MOD_RES (16), (17), (18), (19), (20): Xaa is A or G
  MOD_RES (21), (22), (23), (24): Xaa is A or G or is absent
XXVSQDLRSVKIAKVXXXXXXXXXKEVQVMIVKS

SEQ ID NO: 51923 - protein, 37 aa, Artificial Sequence
  GFR-binding peptide
  MOD_RES (35), (37): Xaa is C or S
  MOD_RES (14), (15), (16), (17), (18): Xaa is A or G
  MOD_RES (19), (20), (21), (22): Xaa is A or G or is absent
SRVHHEPLPVVYYXXXXXXXXXEQLSNRLEEHLEXAX

SEQ ID NO: 51924 - protein, 43 aa, Artificial Sequence
  GFR-binding peptide
  MOD_RES (5), (42): Xaa is C or S
  MOD_RES (21), (22), (23), (24), (25): Xaa is A or G
  MOD_RES (26), (27), (28), (29): Xaa is A or G or is absent
SSVKXQPSRVHHEPLTVLYYXXXXXXXXXEQLSNRLEEHLEXA

SEQ ID NO: 51925 - protein, 40 aa, Artificial Sequence; identical to SEQ ID NO: 19033
  GFR-binding peptide
  MOD_RES (3), (40): Xaa is C or S

SEQ ID NO: 51926 - protein, 36 aa, Artificial Sequence; identical to SEQ ID NO: 13991
  GFR-binding peptide
  MOD_RES (1), (2), (34), (36): Xaa is C or S

SEQ ID NO: 51927 - protein, 40 aa, Artificial Sequence; identical to SEQ ID NO: 19036
  GFR-binding peptide
  MOD_RES (4), (38), (40): Xaa is C or S
  MOD_RES (18), (19), (20), (21), (22): Xaa is A or G
  MOD_RES (23), (24), (25), (26): Xaa is A or G or is absent

SEQ ID NO: 51928 - protein, 35 aa, Artificial Sequence
  GFR-binding peptide
  MOD_RES (1), (2): Xaa is C or S
  MOD_RES (16), (17), (18), (19), (20): Xaa is A or G
  MOD_RES (21), (22), (23), (24): Xaa is A or G or is absent
XXVPTELRSVKMAKVXXXXXXXXXKEVQVEMVVEG

SEQ ID NO: 51929 - protein, 36 aa, Artificial Sequence
  GFR-binding peptide
  MOD_RES (35), (35): Xaa is C or S
SRVHHEPLTVLYYEYVRKKPKLEQLSNRLEEHLEXA

SEQ ID NO: 51930 - protein, 43 aa, Artificial Sequence; identical to SEQ ID NO: 19037
  GFR-binding peptide
  MOD_RES (6), (40), (42): Xaa is C or S
  MOD_RES (20), (21), (22), (23), (24): Xaa is A or G
  MOD_RES (25), (26), (27), (28): Xaa is A or G or is absent

SEQ ID NO: 51931 - protein, 42 aa, Artificial Sequence; identical to SEQ ID NO: 13995
  GFR-binding peptide
  MOD_RES (5), (6), (40), (42): Xaa is C or S
  MOD_RES (20), (21), (22), (23), (24): Xaa is A or G
  MOD_RES (25), (26), (27), (28): Xaa is A or G or is absent

SEQ ID NO: 51932 - protein, 30 aa, Artificial Sequence; identical to SEQ ID NO: 13996
  GFR-binding peptide

SEQ ID NO: 51933 - protein, 41 aa, Artificial Sequence
  GFR-binding peptide
  MOD_RES (3), (40): Xaa is C or S
VKXQPSRVHHEPLPVVYYEYVRKKPKLEQLSNRLEEHLEXA

SEQ ID NO: 51934 - protein, 35 aa, Artificial Sequence
  GFR-binding peptide
  MOD_RES (5), (5): Xaa is C or S
TKPTXAPTKLRPVQVRKIDDSSNVIKKATVNMVVR

SEQ ID NO: 51935 - protein, 40 aa, Artificial Sequence; identical to SEQ ID NO: 19042
  GFR-binding peptide
  MOD_RES (5), (5): Xaa is C or S
  MOD_RES (21), (22), (23), (24), (25): Xaa is A or G
  MOD_RES (26), (27), (28), (29): Xaa is A or G or is absent

SEQ ID NO: 51936 - protein, 40 aa, Artificial Sequence; identical to SEQ ID NO: 19043
  GFR-binding peptide
  MOD_RES (1), (38), (40): Xaa is C or S
  MOD_RES (17), (18), (19), (20), (21): Xaa is A or G
  MOD_RES (22), (23), (24), (25): Xaa is A or G or is absent

SEQ ID NO: 51937 - protein, 36 aa, Artificial Sequence
  GFR-binding peptide
  MOD_RES (1), (1): Xaa is C or S
  MOD_RES (17), (18), (19), (20), (21): Xaa is A or G
  MOD_RES (22), (23), (24), (25): Xaa is A or G or is absent
XRPTQVQLEPLTVLYYXXXXXXXXXEQLSNTLEDHL

SEQ ID NO: 51938 - protein, 37 aa, Artificial Sequence; identical to SEQ ID NO: 13997
  GFR-binding peptide
  MOD_RES (6), (7): Xaa is C or S

SEQ ID NO: 51939 - protein, 34 aa, Artificial Sequence
  GFR-binding peptide
  MOD_RES (33), (33): Xaa is C or S
  MOD_RES (14), (15), (16), (17), (18): Xaa is A or G
  MOD_RES (19), (20), (21), (22): Xaa is A or G or is absent
VSQDLRPVQIRKIXXXXXXXXXKKATVMIVKSXK

SEQ ID NO: 51940 - protein, 36 aa, Artificial Sequence; identical to SEQ ID NO: 13998
  GFR-binding peptide
  MOD_RES (1), (33), (35): Xaa is C or S

SEQ ID NO: 51941 - protein, 35 aa, Artificial Sequence
  GFR-binding peptide
  MOD_RES (2), (3): Xaa is C or S
  MOD_RES (17), (18), (19), (20), (21): Xaa is A or G
  MOD_RES (22), (23), (24), (25): Xaa is A or G or is absent
PXXAPTKLSNITVQIMXXXXXXXXXIGEMSNMVVR

SEQ ID NO: 51942 - protein, 43 aa, Artificial Sequence; identical to SEQ ID NO: 14000
  GFR-binding peptide
  MOD_RES (6), (7), (40), (42): Xaa is C or S
  MOD_RES (21), (22), (23), (24), (25): Xaa is A or G
  MOD_RES (26), (27), (28), (29): Xaa is A or G or is absent

SEQ ID NO: 51943 - protein, 41 aa, Artificial Sequence
  GFR-binding peptide
  MOD_RES (6), (7), (41): Xaa is C or S
  MOD_RES (21), (22), (23), (24), (25): Xaa is A or G
  MOD_RES (26), (27), (28), (29): Xaa is A or G or is absent
YVPKPXXAPTKLSNITVQIMXXXXXXXXXIGEMSNMVVRSX

SEQ ID NO: 51944 - protein, 38 aa, Artificial Sequence
  GFR-binding peptide
  MOD_RES (7), (7): Xaa is C or S
HVTKPTXAPTKLRPVQVRKIDDSSNVIKKATVNMVVRS

SEQ ID NO: 51945 - protein, 37 aa, Artificial Sequence; identical to SEQ ID NO: 19047
  GFR-binding peptide
  MOD_RES (1), (1): Xaa is C or S

SEQ ID NO: 51946 - protein, 39 aa, Artificial Sequence
  GFR-binding peptide
  MOD_RES (2), (3), (36), (38): Xaa is C or S
  MOD_RES (17), (18), (19), (20), (21): Xaa is A or G
  MOD_RES (22), (23), (24), (25): Xaa is A or G or is absent
PXXVPQDLSNITIQIMXXXXXXXXXIGEMSMVVKSXKXS

SEQ ID NO: 51947 - protein, 40 aa, Artificial Sequence
  GFR-binding peptide
  MOD_RES (4), (5), (37), (39): Xaa is C or S
PKPXXAPTKLSNITVQIMDDSSNVIIGEMSNMVVRSXGXH

SEQ ID NO: 51948 - protein, 39 aa, Artificial Sequence; identical to SEQ ID NO: 19051
  GFR-binding peptide
  MOD_RES (7), (7): Xaa is C or S
  MOD_RES (21), (22), (23), (24), (25): Xaa is A or G
  MOD_RES (26), (27), (28), (29): Xaa is A or G or is absent

SEQ ID NO: 51949 - protein, 34 aa, Artificial Sequence
  GFR-binding peptide
  MOD_RES (14), (15), (16), (17), (18): Xaa is A or G
  MOD_RES (19), (20), (21), (22): Xaa is A or G or is absent
TQVQLEPLTVLYYXXXXXXXXXEQLSNTLEDHLA

SEQ ID NO: 51950 - protein, 40 aa, Artificial Sequence; identical to SEQ ID NO: 19053
  GFR-binding peptide
  MOD_RES (37), (39): Xaa is C or S

SEQ ID NO: 51951 - protein, 36 aa, Artificial Sequence; identical to SEQ ID NO: 14005
  GFR-binding peptide
  MOD_RES (5), (5): Xaa is C or S

SEQ ID NO: 51952 - protein, 36 aa, Artificial Sequence
  GFR-binding peptide
  MOD_RES (1), (1): Xaa is C or S
  MOD_RES (17), (18), (19), (20), (21): Xaa is A or G
  MOD_RES (22), (23), (24), (25): Xaa is A or G or is absent
XQPSRVHHEPLTVLYYXXXXXXXXXEQLSNRLEEHL

SEQ ID NO: 51953 - protein, 39 aa, Artificial Sequence; identical to SEQ ID NO: 19056
  GFR-binding peptide
  MOD_RES (3), (3): Xaa is C or S
  MOD_RES (19), (20), (21), (22), (23): Xaa is A or G
  MOD_RES (24), (25), (26), (27): Xaa is A or G or is absent

SEQ ID NO: 51954 - protein, 37 aa, Artificial Sequence
  GFR-binding peptide
  MOD_RES (3), (4), (37): Xaa is C or S
  MOD_RES (18), (19), (20), (21), (22): Xaa is A or G
  MOD_RES (23), (24), (25), (26): Xaa is A or G or is absent
APXXVPQALRPVQIRKIXXXXXXXXXKKATVMIVRSX

SEQ ID NO: 51955 - protein, 40 aa, Artificial Sequence
  GFR-binding peptide
  MOD_RES (2), (39): Xaa is C or S
  MOD_RES (18), (19), (20), (21), (22): Xaa is A or G
  MOD_RES (23), (24), (25), (26): Xaa is A or G or is absent
QXRPTQVQLEPLPVVYYXXXXXXXXXEQLSNTLEDHLAXK

SEQ ID NO: 51956 - protein, 38 aa, Artificial Sequence
  GFR-binding peptide
  MOD_RES (5), (6): Xaa is C or S
  MOD_RES (20), (21), (22), (23), (24): Xaa is A or G
  MOD_RES (25), (26), (27), (28): Xaa is A or G or is absent
IPKAXXVPTELRPVQMRKIXXXXXXXXXKKATVDMVVE

SEQ ID NO: 51957 - protein, 37 aa, Artificial Sequence
  GFR-binding peptide
  MOD_RES (3), (4): Xaa is C or S
  MOD_RES (18), (19), (20), (21), (22): Xaa is A or G
  MOD_RES (23), (24), (25), (26): Xaa is A or G or is absent
KPXXAPTQLRSVKVAKVXXXXXXXXXKEVQVNMVVRA

SEQ ID NO: 51958 - protein, 38 aa, Artificial Sequence
  GFR-binding peptide
  MOD_RES (3), (3): Xaa is C or S
VQXRPTQVQLEPLTVLYYEIVRKKPIFEQLSNTLEDHL

SEQ ID NO: 51959 - protein, 39 aa, Artificial Sequence; identical to SEQ ID NO: 14011
  GFR-binding peptide
  MOD_RES (1), (2), (36), (38): Xaa is C or S
  MOD_RES (16), (17), (18), (19), (20): Xaa is A or G
  MOD_RES (21), (22), (23), (24): Xaa is A or G or is absent

SEQ ID NO: 51960 - protein, 39 aa, Artificial Sequence
  GFR-binding peptide
  MOD_RES (5), (5): Xaa is C or S
  MOD_RES (21), (22), (23), (24), (25): Xaa is A or G
  MOD_RES (26), (27), (28), (29): Xaa is A or G or is absent
SSVKXQPSRVHHEPLTVLYYXXXXXXXXXEQLSNRLEEH

SEQ ID NO: 51961 - protein, 42 aa, Artificial Sequence; identical to SEQ ID NO: 19061
  GFR-binding peptide
  MOD_RES (3), (40), (42): Xaa is C or S

SEQ ID NO: 51962 - protein, 33 aa, Artificial Sequence
  GFR-binding peptide
  MOD_RES (14), (15), (16), (17), (18): Xaa is A or G
  MOD_RES (19), (20), (21), (22): Xaa is A or G or is absent
APTQLRSVKVAKVXXXXXXXXXKEVQVNMVVRA

SEQ ID NO: 51963 - protein, 40 aa, Artificial Sequence
  GFR-binding peptide
  MOD_RES (6), (7), (38), (40): Xaa is C or S
ASASPXXVPQDLRSVKIAKVVGRTPKVKEVQVMVVKSXKX

SEQ ID NO: 51964 - protein, 36 aa, Artificial Sequence
  GFR-binding peptide
  MOD_RES (1), (35): Xaa is C or S
  MOD_RES (15), (16), (17), (18), (19): Xaa is A or G
  MOD_RES (20), (21), (22), (23): Xaa is A or G or is absent
XVPTELSNITMQIMXXXXXXXXXIGEMSEMVVEGXG

SEQ ID NO: 51965 - protein, 40 aa, Artificial Sequence
  GFR-binding peptide
  MOD_RES (5), (39): Xaa is C or S
  MOD_RES (19), (20), (21), (22), (23): Xaa is A or G
  MOD_RES (24), (25), (26), (27): Xaa is A or G or is absent
TKPTXAPTKLRPVQVRKIXXXXXXXXXKKATVNMVVRSXG

SEQ ID NO: 51966 - protein, 38 aa, Artificial Sequence
  GFR-binding peptide
  MOD_RES (6), (6): Xaa is C or S
DEGLEXVPTEEEPLTMLYYRIKPHQGQHEQLSNFLQHN

SEQ ID NO: 51967 - protein, 35 aa, Artificial Sequence
  GFR-binding peptide
  MOD_RES (1), (32), (34): Xaa is C or S
XVPQDLSNITIQIMVGRTPKVIGEMSMVVKSXKXS

SEQ ID NO: 51968 - protein, 34 aa, Artificial Sequence
  GFR-binding peptide
  MOD_RES (33), (33): Xaa is C or S
  MOD_RES (14), (15), (16), (17), (18): Xaa is A or G
  MOD_RES (19), (20), (21), (22): Xaa is A or G or is absent
VPQDLRPVQIRKIXXXXXXXXXKKATVMVVKSXK

SEQ ID NO: 51969 - protein, 37 aa, Artificial Sequence
  GFR-binding peptide
  MOD_RES (4), (4): Xaa is C or S
  MOD_RES (18), (19), (20), (21), (22): Xaa is A or G
  MOD_RES (23), (24), (25), (26): Xaa is A or G or is absent
KPTXAPTKLRPVQVRKIXXXXXXXXXKKATVNMVVRS

SEQ ID NO: 51970 - protein, 41 aa, Artificial Sequence
  GFR-binding peptide
  MOD_RES (6), (7), (41): Xaa is C or S
  MOD_RES (21), (22), (23), (24), (25): Xaa is A or G
  MOD_RES (26), (27), (28), (29): Xaa is A or G or is absent
KIPKAXXVPTELRSVKMAKVXXXXXXXXXKEVQVDMVVEGX

SEQ ID NO: 51971 - protein, 36 aa, Artificial Sequence
  GFR-binding peptide
  MOD_RES (1), (2), (36): Xaa is C or S
  MOD_RES (16), (17), (18), (19), (20): Xaa is A or G
  MOD_RES (21), (22), (23), (24): Xaa is A or G or is absent
XXAPTQLRPVQVRKIXXXXXXXXXKKATVNMVVRAX

SEQ ID NO: 51972 - protein, 41 aa, Artificial Sequence; identical to SEQ ID NO: 14019
  GFR-binding peptide
  MOD_RES (4), (38), (40): Xaa is C or S
  MOD_RES (18), (19), (20), (21), (22): Xaa is A or G
  MOD_RES (23), (24), (25), (26): Xaa is A or G or is absent

SEQ ID NO: 51973 - protein, 35 aa, Artificial Sequence; identical to SEQ ID NO: 14020
  GFR-binding peptide
  MOD_RES (1), (2), (33), (35): Xaa is C or S

SEQ ID NO: 51974 - protein, 38 aa, Artificial Sequence
  GFR-binding peptide
  MOD_RES (6), (7), (38): Xaa is C or S
ASASPXXVSQDLRSVKIAKVIGKTPKIKEVQVMIVKSX

SEQ ID NO: 51975 - protein, 39 aa, Artificial Sequence
  GFR-binding peptide
  MOD_RES (6), (6): Xaa is C or S
  MOD_RES (20), (21), (22), (23), (24): Xaa is A or G
  MOD_RES (25), (26), (27), (28): Xaa is A or G or is absent
DEGLEXVPTEEEPLTMLYYXXXXXXXXXEQLSNFLQHNK

SEQ ID NO: 51976 - protein, 41 aa, Artificial Sequence
  GFR-binding peptide
  MOD_RES (4), (5), (38), (40): Xaa is C or S
  MOD_RES (19), (20), (21), (22), (23): Xaa is A or G
  MOD_RES (24), (25), (26), (27): Xaa is A or G or is absent
ASPXXVSQDLSNITIQIMXXXXXXXXXIGEMSMIVKSXKXS

SEQ ID NO: 51977 - protein, 38 aa, Artificial Sequence; identical to SEQ ID NO: 14023
  GFR-binding peptide
  MOD_RES (1), (2), (36), (38): Xaa is C or S
  MOD_RES (16), (17), (18), (19), (20): Xaa is A or G
  MOD_RES (21), (22), (23), (24): Xaa is A or G or is absent

SEQ ID NO: 51978 - protein, 33 aa, Artificial Sequence
  GFR-binding peptide
  MOD_RES (1), (2): Xaa is C or S
XXVPTELSNITMQIMDEYDKVVIGEMSEMVVEG

SEQ ID NO: 51979 - protein, 37 aa, Artificial Sequence
  GFR-binding peptide
  MOD_RES (1), (1): Xaa is C or S
XRPTQVQLEPLTVLYYEIVRKKPIFEQLSNTLEDHLA

SEQ ID NO: 51980 - protein, 38 aa, Artificial Sequence; identical to SEQ ID NO: 14025
  GFR-binding peptide
  MOD_RES (3), (37): Xaa is C or S
  MOD_RES (17), (18), (19), (20), (21): Xaa is A or G
  MOD_RES (22), (23), (24), (25): Xaa is A or G or is absent

SEQ ID NO: 51981 - protein, 31 aa, Artificial Sequence; identical to SEQ ID NO: 14026
  GFR-binding peptide

SEQ ID NO: 51982 - protein, 39 aa, Artificial Sequence; identical to SEQ ID NO: 14027
  GFR-binding peptide
  MOD_RES (5), (37), (39): Xaa is C or S

SEQ ID NO: 51983 - protein, 43 aa, Artificial Sequence
  GFR-binding peptide
  MOD_RES (6), (7), (41), (43): Xaa is C or S
  MOD_RES (21), (22), (23), (24), (25): Xaa is A or G
  MOD_RES (26), (27), (28), (29): Xaa is A or G or is absent
YVPKPXXAPTKLRSVKVAKVXXXXXXXXXKEVQVNMVVRSXGX

SEQ ID NO: 51984 - protein, 35 aa, Artificial Sequence
  GFR-binding peptide
  MOD_RES (4), (5): Xaa is C or S
PKPXXAPTKLRPVQVRKIDDSSNVIKKATVNMVVR

SEQ ID NO: 51985 - protein, 35 aa, Artificial Sequence
  GFR-binding peptide
  MOD_RES (32), (34): Xaa is C or S
APTQLRSVKVAKVDDSSNVIKEVQVNMVVRAXGXH

SEQ ID NO: 51986 - protein, 45 aa, Artificial Sequence
  GFR-binding peptide
  MOD_RES (5), (42), (44): Xaa is C or S
  MOD_RES (21), (22), (23), (24), (25): Xaa is A or G
  MOD_RES (26), (27), (28), (29): Xaa is A or G or is absent
RNVQXRPTQVQLEPLPVVYYXXXXXXXXXEQLSNTLEDHLAXKXE

SEQ ID NO: 51987 - protein, 39 aa, Artificial Sequence
  GFR-binding peptide
  MOD_RES (3), (4), (37), (39): Xaa is C or S
  MOD_RES (18), (19), (20), (21), (22): Xaa is A or G
  MOD_RES (23), (24), (25), (26): Xaa is A or G or is absent
SPXXVPQDLSNITIQIMXXXXXXXXXIGEMSMVVKSXKX

SEQ ID NO: 51988 - protein, 37 aa, Artificial Sequence; identical to SEQ ID NO: 14028
  GFR-binding peptide
  MOD_RES (5), (37): Xaa is C or S

SEQ ID NO: 51989 - protein, 34 aa, Artificial Sequence
  GFR-binding peptide
  MOD_RES (32), (34): Xaa is C or S
VPTELRPVQMRKIDENEKVVKKATVDMVVEGXGX

SEQ ID NO: 51990 - protein, 39 aa, Artificial Sequence; identical to SEQ ID NO: 19077
  GFR-binding peptide
  MOD_RES (2), (39): Xaa is C or S
  MOD_RES (18), (19), (20), (21), (22): Xaa is A or G
  MOD_RES (23), (24), (25), (26): Xaa is A or G or is absent

SEQ ID NO: 51991 - protein, 35 aa, Artificial Sequence
  GFR-binding peptide
  MOD_RES (1), (35): Xaa is C or S
  MOD_RES (15), (16), (17), (18), (19): Xaa is A or G
  MOD_RES (20), (21), (22), (23): Xaa is A or G or is absent
XAPTQLRPVQVRKIXXXXXXXXXKKATVNMVVRAX

SEQ ID NO: 51992 - protein, 40 aa, Artificial Sequence
  GFR-binding peptide
  MOD_RES (3), (4), (37), (39): Xaa is C or S
  MOD_RES (18), (19), (20), (21), (22): Xaa is A or G
  MOD_RES (23), (24), (25), (26): Xaa is A or G or is absent
SPXXVSQDLSNITIQIMXXXXXXXXXIGEMSMIVKSXKXS

SEQ ID NO: 51993 - protein, 39 aa, Artificial Sequence; identical to SEQ ID NO: 19079
  GFR-binding peptide
  MOD_RES (5), (39): Xaa is C or S
  MOD_RES (19), (20), (21), (22), (23): Xaa is A or G
  MOD_RES (24), (25), (26), (27): Xaa is A or G or is absent

SEQ ID NO: 51994 - protein, 43 aa, Artificial Sequence
  GFR-binding peptide
  MOD_RES (4), (41), (43): Xaa is C or S
  MOD_RES (20), (21), (22), (23), (24): Xaa is A or G
  MOD_RES (25), (26), (27), (28): Xaa is A or G or is absent
NVQXRPTQVQLEPLTVLYYXXXXXXXXXEQLSNTLEDHLAXKX

SEQ ID NO: 51995 - protein, 32 aa, Artificial Sequence; identical to SEQ ID NO: 14036
  GFR-binding peptide
  MOD_RES (1), (32): Xaa is C or S

SEQ ID NO: 51996 - protein, 40 aa, Artificial Sequence
  GFR-binding peptide
  MOD_RES (5), (39): Xaa is C or S
  MOD_RES (19), (20), (21), (22), (23): Xaa is A or G
  MOD_RES (24), (25), (26), (27): Xaa is A or G or is absent
TKPTXAPTKLSNITVQIMXXXXXXXXXIGEMSNMVVRSXG

SEQ ID NO: 51997 - protein, 32 aa, Artificial Sequence; identical to SEQ ID NO: 14038
  GFR-binding peptide
  MOD_RES (2), (2): Xaa is C or S

SEQ ID NO: 51998 - protein, 42 aa, Artificial Sequence
  GFR-binding peptide
  MOD_RES (5), (6), (39), (41): Xaa is C or S
  MOD_RES (20), (21), (22), (23), (24): Xaa is A or G
  MOD_RES (25), (26), (27), (28): Xaa is A or G or is absent
SASPXXVPQDLSNITIQIMXXXXXXXXXIGEMSMVVKSXKXS

SEQ ID NO: 51999 - protein, 35 aa, Artificial Sequence; identical to SEQ ID NO: 14042
  GFR-binding peptide
  MOD_RES (1), (2), (35): Xaa is C or S
  MOD_RES (16), (17), (18), (19), (20): Xaa is A or G
  MOD_RES (21), (22), (23), (24): Xaa is A or G or is absent

SEQ ID NO: 52000 - protein, 43 aa, Artificial Sequence
  GFR-binding peptide
  MOD_RES (7), (41), (43): Xaa is C or S
  MOD_RES (21), (22), (23), (24), (25): Xaa is A or G
  MOD_RES (26), (27), (28), (29): Xaa is A or G or is absent
NDEGLEXVPTEEEPLPMVYYXXXXXXXXXEQLSNFLQHNKXEX

SEQ ID NO: 52001 - protein, 35 aa, Artificial Sequence; identical to SEQ ID NO: 14045
  GFR-binding peptide
  MOD_RES (34), (34): Xaa is C or S
  MOD_RES (14), (15), (16), (17), (18): Xaa is A or G
  MOD_RES (19), (20), (21), (22): Xaa is A or G or is absent

SEQ ID NO: 52002 - protein, 39 aa, Artificial Sequence
  GFR-binding peptide
  MOD_RES (4), (5), (36), (38): Xaa is C or S
ASPXXVSQDLRPVQIRKIIGKTPKIKKATVMIVKSXKXS

SEQ ID NO: 52003 - protein, 33 aa, Artificial Sequence
  GFR-binding peptide
  MOD_RES (2), (2): Xaa is C or S
TXAPTKLRPVQVRKIDDSSNVIKKATVNMVVRS

SEQ ID NO: 52004 - protein, 31 aa, Artificial Sequence
  GFR-binding peptide
  MOD_RES (1), (1): Xaa is C or S
XVPTELRSVKMAKVDEYDKVVKEVQVEMVVE

SEQ ID NO: 52005 - protein, 38 aa, Artificial Sequence
  GFR-binding peptide
  MOD_RES (1), (2), (35), (37): Xaa is C or S
  MOD_RES (16), (17), (18), (19), (20): Xaa is A or G
  MOD_RES (21), (22), (23), (24): Xaa is A or G or is absent
XXVSQDLRSVKIAKVXXXXXXXXXKEVQVMIVKSXKXS

SEQ ID NO: 52006 - protein, 34 aa, Artificial Sequence; identical to SEQ ID NO: 14046
  GFR-binding peptide
  MOD_RES (1), (2): Xaa is C or S
  MOD_RES (16), (17), (18), (19), (20): Xaa is A or G
  MOD_RES (21), (22), (23), (24): Xaa is A or G or is absent

SEQ ID NO: 52007 - protein, 39 aa, Artificial Sequence
  GFR-binding peptide
  MOD_RES (6), (7): Xaa is C or S
  MOD_RES (21), (22), (23), (24), (25): Xaa is A or G
  MOD_RES (26), (27), (28), (29): Xaa is A or G or is absent
YVPKPXXAPTKLRPVQVRKIXXXXXXXXXKKATVNMVVR

SEQ ID NO: 52008 - protein, 44 aa, Artificial Sequence; identical to SEQ ID NO: 14048
  GFR-binding peptide
  MOD_RES (6), (7), (41), (43): Xaa is C or S
  MOD_RES (21), (22), (23), (24), (25): Xaa is A or G
  MOD_RES (26), (27), (28), (29): Xaa is A or G or is absent

SEQ ID NO: 52009 - protein, 38 aa, Artificial Sequence; identical to SEQ ID NO: 14049
  GFR-binding peptide
  MOD_RES (6), (7): Xaa is C or S

SEQ ID NO: 52010 - protein, 39 aa, Artificial Sequence; identical to SEQ ID NO: 19090
  GFR-binding peptide
  MOD_RES (2), (39): Xaa is C or S
  MOD_RES (18), (19), (20), (21), (22): Xaa is A or G
  MOD_RES (23), (24), (25), (26): Xaa is A or G or is absent

SEQ ID NO: 52011 - protein, 37 aa, Artificial Sequence; identical to SEQ ID NO: 14050
  GFR-binding peptide
  MOD_RES (4), (5), (37): Xaa is C or S

SEQ ID NO: 52012 - protein, 35 aa, Artificial Sequence
  GFR-binding peptide
  MOD_RES (1), (1): Xaa is C or S
XRPTQVQLEPLPVVYYEIVRKKPIFEQLSNTLEDH

SEQ ID NO: 52013 - protein, 37 aa, Artificial Sequence; identical to SEQ ID NO: 14051
  GFR-binding peptide
  MOD_RES (2), (3), (35), (37): Xaa is C or S

SEQ ID NO: 52014 - protein, 35 aa, Artificial Sequence; identical to SEQ ID NO: 14052
  GFR-binding peptide
  MOD_RES (1), (33), (35): Xaa is C or S

SEQ ID NO: 52015 - protein, 34 aa, Artificial Sequence
  GFR-binding peptide
  MOD_RES (3), (4): Xaa is C or S
SPXXVSQDLRSVKIAKVIGKTPKIKEVQVMIVKS

SEQ ID NO: 52016 - protein, 39 aa, Artificial Sequence; identical to SEQ ID NO: 19094
  GFR-binding peptide
  MOD_RES (4), (38): Xaa is C or S

SEQ ID NO: 52017 - protein, 44 aa, Artificial Sequence
  GFR-binding peptide
  MOD_RES (5), (42), (44): Xaa is C or S
  MOD_RES (21), (22), (23), (24), (25): Xaa is A or G
  MOD_RES (26), (27), (28), (29): Xaa is A or G or is absent
RNVQXRPTQVQLEPLTVLYYXXXXXXXXXEQLSNTLEDHLAXKX

SEQ ID NO: 52018 - protein, 40 aa, Artificial Sequence
  GFR-binding peptide
  MOD_RES (3), (4), (38), (40): Xaa is C or S
  MOD_RES (18), (19), (20), (21), (22): Xaa is A or G
  MOD_RES (23), (24), (25), (26): Xaa is A or G or is absent
KPXXAPTKLSNITVQIMXXXXXXXXXIGEMSNMVVRSXGX

SEQ ID NO: 52019 - protein, 41 aa, Artificial Sequence
  GFR-binding peptide
  MOD_RES (6), (40): Xaa is C or S
  MOD_RES (20), (21), (22), (23), (24): Xaa is A or G
  MOD_RES (25), (26), (27), (28): Xaa is A or G or is absent
VTKPTXAPTKLRSVKVAKVXXXXXXXXXKEVQVNMVVRSXG

SEQ ID NO: 52020 - protein, 38 aa, Artificial Sequence
  GFR-binding peptide
  MOD_RES (36), (38): Xaa is C or S
PSRVHHEPLTVLYYEYVRKKPKLEQLSNRLEEHLEXAX

SEQ ID NO: 52021 - protein, 37 aa, Artificial Sequence; identical to SEQ ID NO: 14054
  GFR-binding peptide
  MOD_RES (2), (3), (35), (37): Xaa is C or S

SEQ ID NO: 52022 - protein, 34 aa, Artificial Sequence; identical to SEQ ID NO: 14055
  GFR-binding peptide
  MOD_RES (3), (3): Xaa is C or S

SEQ ID NO: 52023 - protein, 35 aa, Artificial Sequence
  GFR-binding peptide
  MOD_RES (2), (2): Xaa is C or S
  MOD_RES (16), (17), (18), (19), (20): Xaa is A or G
  MOD_RES (21), (22), (23), (24): Xaa is A or G or is absent
TXAPTKLSNITVQIMXXXXXXXXXIGEMSNMVVRS

SEQ ID NO: 52024 - protein, 33 aa, Artificial Sequence; identical to SEQ ID NO: 14056
  GFR-binding peptide
  MOD_RES (2), (3): Xaa is C or S

SEQ ID NO: 52025 - protein, 41 aa, Artificial Sequence
  GFR-binding peptide
  MOD_RES (5), (6), (39), (41): Xaa is C or S
  MOD_RES (20), (21), (22), (23), (24): Xaa is A or G
  MOD_RES (25), (26), (27), (28): Xaa is A or G or is absent
SASPXXVPQDLRSVKIAKVXXXXXXXXXKEVQVMVVKSXKX

SEQ ID NO: 52026 - protein, 38 aa, Artificial Sequence
  GFR-binding peptide
  MOD_RES (1), (35), (37): Xaa is C or S
  MOD_RES (15), (16), (17), (18), (19): Xaa is A or G
  MOD_RES (20), (21), (22), (23): Xaa is A or G or is absent
XAPTQLSNITVQIMXXXXXXXXXIGEMSNMVVRAXGXH

SEQ ID NO: 52027 - protein, 33 aa, Artificial Sequence; identical to SEQ ID NO: 14058
  GFR-binding peptide
  MOD_RES (32), (32): Xaa is C or S

SEQ ID NO: 52028 - protein, 36 aa, Artificial Sequence
  GFR-binding peptide
  MOD_RES (1), (33), (35): Xaa is C or S
XAPTQLRSVKVAKVDDSSNVIKEVQVNMVVRAXGXH

SEQ ID NO: 52029 - protein, 39 aa, Artificial Sequence; identical to SEQ ID NO: 19098
  GFR-binding peptide
  MOD_RES (6), (6): Xaa is C or S

SEQ ID NO: 52030 - protein, 39 aa, Artificial Sequence
  GFR-binding peptide
  MOD_RES (4), (4): Xaa is C or S
SVKXQPSRVHHEPLTVLYYEYVRKKPKLEQLSNRLEEHL

SEQ ID NO: 52031 - protein, 35 aa, Artificial Sequence; identical to SEQ ID NO: 14061
  GFR-binding peptide
  MOD_RES (4), (5): Xaa is C or S

SEQ ID NO: 52032 - protein, 36 aa, Artificial Sequence; identical to SEQ ID NO: 14062
  GFR-binding peptide
  MOD_RES (33), (35): Xaa is C or S
  MOD_RES (14), (15), (16), (17), (18): Xaa is A or G
  MOD_RES (19), (20), (21), (22): Xaa is A or G or is absent

SEQ ID NO: 52033 - protein, 39 aa, Artificial Sequence
  GFR-binding peptide
  MOD_RES (7), (7): Xaa is C or S
  MOD_RES (21), (22), (23), (24), (25): Xaa is A or G
  MOD_RES (26), (27), (28), (29): Xaa is A or G or is absent
HVTKPTXAPTKLSNITVQIMXXXXXXXXXIGEMSNMVVR

SEQ ID NO: 52034 - protein, 34 aa, Artificial Sequence; identical to SEQ ID NO: 14064
  GFR-binding peptide
  MOD_RES (1), (2): Xaa is C or S
  MOD_RES (16), (17), (18), (19), (20): Xaa is A or G
  MOD_RES (21), (22), (23), (24): Xaa is A or G or is absent

SEQ ID NO: 52035 - protein, 36 aa, Artificial Sequence; identical to SEQ ID NO: 14065
  GFR-binding peptide
  MOD_RES (2), (36): Xaa is C or S
  MOD_RES (16), (17), (18), (19), (20): Xaa is A or G
  MOD_RES (21), (22), (23), (24): Xaa is A or G or is absent

SEQ ID NO: 52036 - protein, 35 aa, Artificial Sequence
  GFR-binding peptide
  MOD_RES (2), (3), (35): Xaa is C or S
PXXAPTKLSNITVQIMDDSSNVIIGEMSNMVVRSX

SEQ ID NO: 52037 - protein, 39 aa, Artificial Sequence
  GFR-binding peptide
  MOD_RES (3), (3): Xaa is C or S
VQXRPTQVQLEPLPVVYYEIVRKKPIFEQLSNTLEDHLA

SEQ ID NO: 52038 - protein, 40 aa, Artificial Sequence
  GFR-binding peptide
  MOD_RES (4), (5), (37), (39): Xaa is C or S
PKPXXAPTQLSNITVQIMDDSSNVIIGEMSNMVVRAXGXH

SEQ ID NO: 52039 - protein, 37 aa, Artificial Sequence
  GFR-binding peptide
  MOD_RES (2), (3), (36): Xaa is C or S
  MOD_RES (17), (18), (19), (20), (21): Xaa is A or G
  MOD_RES (22), (23), (24), (25): Xaa is A or G or is absent
PXXVSQDLRSVKIAKVXXXXXXXXXKEVQVMIVKSXK

SEQ ID NO: 52040 - protein, 42 aa, Artificial Sequence
  GFR-binding peptide
  MOD_RES (2), (39), (41): Xaa is C or S
  MOD_RES (18), (19), (20), (21), (22): Xaa is A or G
  MOD_RES (23), (24), (25), (26): Xaa is A or G or is absent
QXRPTQVQLEPLPVVYYXXXXXXXXXEQLSNTLEDHLAXKXE

SEQ ID NO: 52041 - protein, 43 aa, Artificial Sequence; identical to SEQ ID NO: 19104
  GFR-binding peptide
  MOD_RES (4), (41), (43): Xaa is C or S

SEQ ID NO: 52042 - protein, 35 aa, Artificial Sequence
  GFR-binding peptide
  MOD_RES (1), (2), (33), (35): Xaa is C or S
XXVSQDLRPVQIRKIIGKTPKIKKATVMIVKSXKX

SEQ ID NO: 52043 - protein, 44 aa, Artificial Sequence; identical to SEQ ID NO: 19107
  GFR-binding peptide
  MOD_RES (5), (42), (44): Xaa is C or S

SEQ ID NO: 52044 - protein, 35 aa, Artificial Sequence
  GFR-binding peptide
  MOD_RES (3), (4): Xaa is C or S
KPXXAPTQLRPVQVRKIDDSSNVIKKATVNMVVRA

SEQ ID NO: 52045 - protein, 38 aa, Artificial Sequence; identical to SEQ ID NO: 14068
  GFR-binding peptide
  MOD_RES (5), (6), (38): Xaa is C or S

SEQ ID NO: 52046 - protein, 36 aa, Artificial Sequence
  GFR-binding peptide
QPSRVHHEPLPVVYYEYVRKKPKLEQLSNRLEEHLE

SEQ ID NO: 52047 - protein, 35 aa, Artificial Sequence; identical to SEQ ID NO: 19111
  GFR-binding peptide
  MOD_RES (2), (2): Xaa is C or S
  MOD_RES (16), (17), (18), (19), (20): Xaa is A or G
  MOD_RES (21), (22), (23), (24): Xaa is A or G or is absent

SEQ ID NO: 52048 - protein, 37 aa, Artificial Sequence
  GFR-binding peptide
  MOD_RES (1), (2), (36): Xaa is C or S
  MOD_RES (16), (17), (18), (19), (20): Xaa is A or G
  MOD_RES (21), (22), (23), (24): Xaa is A or G or is absent
XXVPTELRSVKMAKVXXXXXXXXXKEVQVDMVVEGXG

SEQ ID NO: 52049 - protein, 41 aa, Artificial Sequence
  GFR-binding peptide
  MOD_RES (4), (41): Xaa is C or S
  MOD_RES (20), (21), (22), (23), (24): Xaa is A or G
  MOD_RES (25), (26), (27), (28): Xaa is A or G or is absent
SVKXQPSRVHHEPLPVVYYXXXXXXXXXEQLSNRLEEHLEX

SEQ ID NO: 52050 - protein, 37 aa, Artificial Sequence
  GFR-binding peptide
  MOD_RES (4), (5): Xaa is C or S
  MOD_RES (19), (20), (21), (22), (23): Xaa is A or G
  MOD_RES (24), (25), (26), (27): Xaa is A or G or is absent
PKAXXVPTELRPVQMRKIXXXXXXXXXKKATVEMVVE

SEQ ID NO: 52051 - protein, 39 aa, Artificial Sequence
  GFR-binding peptide
  MOD_RES (37), (39): Xaa is C or S
QPSRVHHEPLPVVYYEYVRKKPKLEQLSNRLEEHLEXAX

SEQ ID NO: 52052 - protein, 36 aa, Artificial Sequence; identical to SEQ ID NO: 39305
  GFR-binding peptide
  MOD_RES (1), (34), (36): Xaa is C or S
  MOD_RES (15), (16), (17), (18), (19): Xaa is A or G
  MOD_RES (20), (21), (22), (23): Xaa is A or G or is absent

SEQ ID NO: 52053 - protein, 35 aa, Artificial Sequence
  GFR-binding peptide
  MOD_RES (1), (2), (33), (35): Xaa is C or S
XXVPQALRPVQIRKIVGRKPKVKKATVMIVRSXKX

SEQ ID NO: 52054 - protein, 40 aa, Artificial Sequence
  GFR-binding peptide
  MOD_RES (6), (40): Xaa is C or S
  MOD_RES (20), (21), (22), (23), (24): Xaa is A or G
  MOD_RES (25), (26), (27), (28): Xaa is A or G or is absent
VTKPTXAPTKLSNITVQIMXXXXXXXXXIGEMSNMVVRSX

SEQ ID NO: 52055 - protein, 35 aa, Artificial Sequence; identical to SEQ ID NO: 19115
  GFR-binding peptide
  MOD_RES (1), (35): Xaa is C or S

SEQ ID NO: 52056 - protein, 35 aa, Artificial Sequence
  GFR-binding peptide
  MOD_RES (2), (3), (35): Xaa is C or S
AXXVPTELSNITMQIMDEYDKVVIGEMSEMVVEGX

SEQ ID NO: 52057 - protein, 38 aa, Artificial Sequence
  GFR-binding peptide
  MOD_RES (4), (5), (36), (38): Xaa is C or S
AAPXXVPQALRPVQIRKIVGRKPKVKKATVMIVRSXKX

SEQ ID NO: 52058 - protein, 39 aa, Artificial Sequence
  GFR-binding peptide
  MOD_RES (3), (4), (36), (38): Xaa is C or S
KAXXVPTELRSVKMAKVDENEKVVKEVQVDMVVEGXGXR

SEQ ID NO: 52059 - protein, 42 aa, Artificial Sequence
  GFR-binding peptide
  MOD_RES (2), (39), (41): Xaa is C or S
KXQPSRVHHEPLTVLYYEYVRKKPKLEQLSNRLEEHLEXAXA

SEQ ID NO: 52060 - protein, 34 aa, Artificial Sequence
  GFR-binding peptide
  MOD_RES (1), (1): Xaa is C or S
  MOD_RES (15), (16), (17), (18), (19): Xaa is A or G
  MOD_RES (20), (21), (22), (23): Xaa is A or G or is absent
XAPTQLSNITVQIMXXXXXXXXXIGEMSNMVVRA

SEQ ID NO: 52061 - protein, 34 aa, Artificial Sequence
  GFR-binding peptide
  MOD_RES (1), (32), (34): Xaa is C or S
XVPQALRPVQIRKIVGRKPKVKKATVMIVRSXKX

SEQ ID NO: 52062 - protein, 39 aa, Artificial Sequence
  GFR-binding peptide
  MOD_RES (5), (6): Xaa is C or S
  MOD_RES (20), (21), (22), (23), (24): Xaa is A or G
  MOD_RES (25), (26), (27), (28): Xaa is A or G or is absent
VPKPXXAPTQLRSVKVAKVXXXXXXXXXKEVQVNMVVRA

SEQ ID NO: 52063 - protein, 37 aa, Artificial Sequence
  GFR-binding peptide
  MOD_RES (6), (6): Xaa is C or S
VTKPTXAPTKLRSVKVAKVDDSSNVIKEVQVNMVVRS

SEQ ID NO: 52064 - protein, 34 aa, Artificial Sequence; identical to SEQ ID NO: 14078
  GFR-binding peptide
  MOD_RES (1), (32), (34): Xaa is C or S

SEQ ID NO: 52065 - protein, 38 aa, Artificial Sequence; identical to SEQ ID NO: 14079
  GFR-binding peptide
  MOD_RES (2), (3), (35), (37): Xaa is C or S

SEQ ID NO: 52066 - protein, 40 aa, Artificial Sequence; identical to SEQ ID NO: 14080
  GFR-binding peptide
  MOD_RES (2), (3), (37), (39): Xaa is C or S
  MOD_RES (17), (18), (19), (20), (21): Xaa is A or G
  MOD_RES (22), (23), (24), (25): Xaa is A or G or is absent

SEQ ID NO: 52067 - protein, 40 aa, Artificial Sequence; identical to SEQ ID NO: 19126
  GFR-binding peptide
  MOD_RES (3), (37), (39): Xaa is C or S
  MOD_RES (17), (18), (19), (20), (21): Xaa is A or G
  MOD_RES (22), (23), (24), (25): Xaa is A or G or is absent

SEQ ID NO: 52068 - protein, 38 aa, Artificial Sequence; identical to SEQ ID NO: 14081
  GFR-binding peptide
  MOD_RES (4), (38): Xaa is C or S
  MOD_RES (18), (19), (20), (21), (22): Xaa is A or G
  MOD_RES (23), (24), (25), (26): Xaa is A or G or is absent

SEQ ID NO: 52069 - protein, 38 aa, Artificial Sequence; identical to SEQ ID NO: 19127
  GFR-binding peptide
  MOD_RES (35), (37): Xaa is C or S

SEQ ID NO: 52070 - protein, 38 aa, Artificial Sequence
  GFR-binding peptide
  MOD_RES (37), (37): Xaa is C or S
  MOD_RES (16), (17), (18), (19), (20): Xaa is A or G
  MOD_RES (21), (22), (23), (24): Xaa is A or G or is absent
QPSRVHHEPLTVLYYXXXXXXXXXEQLSNRLEEHLEXA

SEQ ID NO: 52071 - protein, 39 aa, Artificial Sequence
  GFR-binding peptide
  MOD_RES (6), (7), (39): Xaa is C or S
TVPKPXXAPTQLRSVKVAKVDDSSNVIKEVQVNMVVRAX

SEQ ID NO: 52072 - protein, 40 aa, Artificial Sequence
  GFR-binding peptide
  MOD_RES (6), (7), (40): Xaa is C or S
  MOD_RES (21), (22), (23), (24), (25): Xaa is A or G
  MOD_RES (26), (27), (28), (29): Xaa is A or G or is absent
ASASPXXVPQDLSNITIQIMXXXXXXXXXIGEMSMVVKSX

SEQ ID NO: 52073 - protein, 32 aa, Artificial Sequence
  GFR-binding peptide
  MOD_RES (32), (32): Xaa is C or S
APTKLRSVKVAKVDDSSNVIKEVQVNMVVRSX

SEQ ID NO: 52074 - protein, 45 aa, Artificial Sequence; identical to SEQ ID NO: 19129
  GFR-binding peptide
  MOD_RES (5), (42), (44): Xaa is C or S
  MOD_RES (21), (22), (23), (24), (25): Xaa is A or G
  MOD_RES (26), (27), (28), (29): Xaa is A or G or is absent

SEQ ID NO: 52075 - protein, 43 aa, Artificial Sequence
  GFR-binding peptide
  MOD_RES (5), (6), (40), (42): Xaa is C or S
  MOD_RES (20), (21), (22), (23), (24): Xaa is A or G
  MOD_RES (25), (26), (27), (28): Xaa is A or G or is absent
VPKPXXAPTQLRPVQVRKIXXXXXXXXXKKATVNMVVRAXGXH

SEQ ID NO: 52076 - protein, 39 aa, Artificial Sequence
  GFR-binding peptide
  MOD_RES (6), (7), (39): Xaa is C or S
SIPKAXXVPTELRSVKMAKVDEYDKVVKEVQVEMVVEGX

SEQ ID NO: 52077 - protein, 39 aa, Artificial Sequence
  GFR-binding peptide
  MOD_RES (7), (7): Xaa is C or S
NDEGLEXVPTEEEPLTMLYYRIKPHQGQHEQLSNFLQHN

SEQ ID NO: 52078 - protein, 39 aa, Artificial Sequence
  GFR-binding peptide
  MOD_RES (6), (7): Xaa is C or S
  MOD_RES (21), (22), (23), (24), (25): Xaa is A or G
  MOD_RES (26), (27), (28), (29): Xaa is A or G or is absent
ASAAPXXVPQALRSVKIAKVXXXXXXXXXKEVQVMIVRS

SEQ ID NO: 52079 - protein, 33 aa, Artificial Sequence; identical to SEQ ID NO: 14085
  GFR-binding peptide
  MOD_RES (14), (15), (16), (17), (18): Xaa is A or G
  MOD_RES (19), (20), (21), (22): Xaa is A or G or is absent

SEQ ID NO: 52080 - protein, 34 aa, Artificial Sequence
  GFR-binding peptide
  MOD_RES (34), (34): Xaa is C or S
  MOD_RES (14), (15), (16), (17), (18): Xaa is A or G
  MOD_RES (19), (20), (21), (22): Xaa is A or G or is absent
VPTELRPVQMRKIXXXXXXXXXKKATVEMVVEGX

SEQ ID NO: 52081 - protein, 39 aa, Artificial Sequence; identical to SEQ ID NO: 19131
  GFR-binding peptide
  MOD_RES (3), (3): Xaa is C or S

SEQ ID NO: 52082 - protein, 31 aa, Artificial Sequence
  GFR-binding peptide
APTQLRSVKVAKVDDSSNVIKEVQVNMVVRA

SEQ ID NO: 52083 - protein, 34 aa, Artificial Sequence
  GFR-binding peptide
  MOD_RES (1), (2): Xaa is C or S
  MOD_RES (16), (17), (18), (19), (20): Xaa is A or G
  MOD_RES (21), (22), (23), (24): Xaa is A or G or is absent
XXAPTQLRSVKVAKVXXXXXXXXXKEVQVNMVVR

SEQ ID NO: 52084 - protein, 36 aa, Artificial Sequence
  GFR-binding peptide
  MOD_RES (2), (3), (35): Xaa is C or S
AXXVPTELRSVKMAKVDENEKVVKEVQVDMVVEGXG

SEQ ID NO: 52085 - protein, 42 aa, Artificial Sequence; identical to SEQ ID NO: 19132
  GFR-binding peptide
  MOD_RES (4), (41): Xaa is C or S
  MOD_RES (20), (21), (22), (23), (24): Xaa is A or G
  MOD_RES (25), (26), (27), (28): Xaa is A or G or is absent

SEQ ID NO: 52086 - protein, 38 aa, Artificial Sequence
  GFR-binding peptide
  MOD_RES (5), (5): Xaa is C or S
  MOD_RES (19), (20), (21), (22), (23): Xaa is A or G
  MOD_RES (24), (25), (26), (27): Xaa is A or G or is absent
TKPTXAPTKLRSVKVAKVXXXXXXXXXKEVQVNMVVRS

SEQ ID NO: 52087 - protein, 43 aa, Artificial Sequence
  GFR-binding peptide
  MOD_RES (5), (6), (40), (42): Xaa is C or S
  MOD_RES (20), (21), (22), (23), (24): Xaa is A or G
  MOD_RES (25), (26), (27), (28): Xaa is A or G or is absent
VPKPXXAPTQLRSVKVAKVXXXXXXXXXKEVQVNMVVRAXGXH

SEQ ID NO: 52088 - protein, 43 aa, Artificial Sequence
  GFR-binding peptide
  MOD_RES (6), (7), (41), (43): Xaa is C or S
  MOD_RES (21), (22), (23), (24), (25): Xaa is A or G
  MOD_RES (26), (27), (28), (29): Xaa is A or G or is absent
SIPKAXXVPTELSNITMQIMXXXXXXXXXIGEMSEMVVEGXGX

SEQ ID NO: 52089 - protein, 37 aa, Artificial Sequence; identical to SEQ ID NO: 14089
  GFR-binding peptide
  MOD_RES (2), (3), (34), (36): Xaa is C or S

SEQ ID NO: 52090 - protein, 43 aa, Artificial Sequence
  GFR-binding peptide
  MOD_RES (6), (7), (41), (43): Xaa is C or S
  MOD_RES (21), (22), (23), (24), (25): Xaa is A or G
  MOD_RES (26), (27), (28), (29): Xaa is A or G or is absent
SIPKAXXVPTELRSVKMAKVXXXXXXXXXKEVQVEMVVEGXGX

SEQ ID NO: 52091 - protein, 37 aa, Artificial Sequence
  GFR-binding peptide
  MOD_RES (34), (36): Xaa is C or S
  MOD_RES (14), (15), (16), (17), (18): Xaa is A or G
  MOD_RES (19), (20), (21), (22): Xaa is A or G or is absent
VPTEEEPLPMVYYXXXXXXXXXEQLSNFLQHNKXEXR

SEQ ID NO: 52092 - protein, 35 aa, Artificial Sequence
  GFR-binding peptide
  MOD_RES (2), (3): Xaa is C or S
  MOD_RES (17), (18), (19), (20), (21): Xaa is A or G
  MOD_RES (22), (23), (24), (25): Xaa is A or G or is absent
PXXAPTQLSNITVQIMXXXXXXXXXIGEMSNMVVR

SEQ ID NO: 52093 - protein, 34 aa, Artificial Sequence
  GFR-binding peptide
  MOD_RES (2), (2): Xaa is C or S
  MOD_RES (16), (17), (18), (19), (20): Xaa is A or G
  MOD_RES (21), (22), (23), (24): Xaa is A or G or is absent
TXAPTKLRPVQVRKIXXXXXXXXXKKATVNMVVR

SEQ ID NO: 52094 - protein, 40 aa, Artificial Sequence
  GFR-binding peptide
  MOD_RES (5), (6), (37), (39): Xaa is C or S
SASPXXVSQDLRSVKIAKVIGKTPKIKEVQVMIVKSXKXS

SEQ ID NO: 52095 - protein, 41 aa, Artificial Sequence
  GFR-binding peptide
  MOD_RES (4), (5), (38), (40): Xaa is C or S
  MOD_RES (19), (20), (21), (22), (23): Xaa is A or G
  MOD_RES (24), (25), (26), (27): Xaa is A or G or is absent
ASPXXVPQDLSNITIQIMXXXXXXXXXIGEMSMVVKSXKXS

SEQ ID NO: 52096 - protein, 36 aa, Artificial Sequence
  GFR-binding peptide
  MOD_RES (5), (6): Xaa is C or S
VPKPXXAPTQLRPVQVRKIDDSSNVIKKATVNMVVR

SEQ ID NO: 52097 - protein, 32 aa, Artificial Sequence
  GFR-binding peptide
  MOD_RES (1), (2): Xaa is C or S
XXVPTELSNITMQIMDENEKVVIGEMSDMVVE

SEQ ID NO: 52098 - protein, 37 aa, Artificial Sequence; identical to SEQ ID NO: 19136
  GFR-binding peptide
  MOD_RES (1), (35), (37): Xaa is C or S

SEQ ID NO: 52099 - protein, 41 aa, Artificial Sequence; identical to SEQ ID NO: 14092
  GFR-binding peptide
  MOD_RES (3), (4), (38), (40): Xaa is C or S
  MOD_RES (18), (19), (20), (21), (22): Xaa is A or G
  MOD_RES (23), (24), (25), (26): Xaa is A or G or is absent

SEQ ID NO: 52100 - protein, 36 aa, Artificial Sequence
  GFR-binding peptide
  MOD_RES (4), (4): Xaa is C or S
  MOD_RES (18), (19), (20), (21), (22): Xaa is A or G
  MOD_RES (23), (24), (25), (26): Xaa is A or G or is absent
GLEXVPTEEEPLTMLYYXXXXXXXXXEQLSNFLQHN

SEQ ID NO: 52101 - protein, 34 aa, Artificial Sequence; identical to SEQ ID NO: 19137
  GFR-binding peptide
  MOD_RES (15), (16), (17), (18), (19): Xaa is A or G
  MOD_RES (20), (21), (22), (23): Xaa is A or G or is absent

SEQ ID NO: 52102 - protein, 43 aa, Artificial Sequence
  GFR-binding peptide
  MOD_RES (5), (42): Xaa is C or S
SSVKXQPSRVHHEPLTVLYYEYVRKKPKLEQLSNRLEEHLEXA

SEQ ID NO: 52103 - protein, 32 aa, Artificial Sequence; identical to SEQ ID NO: 14095
  GFR-binding peptide
  MOD_RES (1), (2): Xaa is C or S

SEQ ID NO: 52104 - protein, 37 aa, Artificial Sequence
  GFR-binding peptide
  MOD_RES (1), (34), (36): Xaa is C or S
  MOD_RES (15), (16), (17), (18), (19): Xaa is A or G
  MOD_RES (20), (21), (22), (23): Xaa is A or G or is absent
XVPQDLSNITIQIMXXXXXXXXXIGEMSMVVKSXKXS

SEQ ID NO: 52105 - protein, 41 aa, Artificial Sequence
  GFR-binding peptide
  MOD_RES (2), (39), (41): Xaa is C or S
KXQPSRVHHEPLPVVYYEYVRKKPKLEQLSNRLEEHLEXAX

SEQ ID NO: 52106 - protein, 36 aa, Artificial Sequence
  GFR-binding peptide
  MOD_RES (4), (5): Xaa is C or S
PKPXXAPTKLRPVQVRKIDDSSNVIKKATVNMVVRS

SEQ ID NO: 52107 - protein, 33 aa, Artificial Sequence
  GFR-binding peptide
  MOD_RES (14), (15), (16), (17), (18): Xaa is A or G
  MOD_RES (19), (20), (21), (22): Xaa is A or G or is absent
APTQLSNITVQIMXXXXXXXXXIGEMSNMVVRA

SEQ ID NO: 52108 - protein, 36 aa, Artificial Sequence
  GFR-binding peptide
  MOD_RES (4), (5), (36): Xaa is C or S
ASPXXVSQDLRPVQIRKIIGKTPKIKKATVMIVKSX

SEQ ID NO: 52109 - protein, 37 aa, Artificial Sequence; identical to SEQ ID NO: 14099
  GFR-binding peptide
  MOD_RES (2), (3), (37): Xaa is C or S
  MOD_RES (17), (18), (19), (20), (21): Xaa is A or G
  MOD_RES (22), (23), (24), (25): Xaa is A or G or is absent

SEQ ID NO: 52110 - protein, 41 aa, Artificial Sequence
  GFR-binding peptide
  MOD_RES (7), (41): Xaa is C or S
  MOD_RES (21), (22), (23), (24), (25): Xaa is A or G
  MOD_RES (26), (27), (28), (29): Xaa is A or G or is absent
NDEGLEXVPTEEEPLTMLYYXXXXXXXXXEQLSNFLQHNKX

SEQ ID NO: 52111 - protein, 34 aa, Artificial Sequence; identical to SEQ ID NO: 14100
  GFR-binding peptide
  MOD_RES (2), (2): Xaa is C or S
  MOD_RES (16), (17), (18), (19), (20): Xaa is A or G
  MOD_RES (21), (22), (23), (24): Xaa is A or G or is absent

SEQ ID NO: 52112 - protein, 36 aa, Artificial Sequence
  GFR-binding peptide
  MOD_RES (1), (35): Xaa is C or S
  MOD_RES (15), (16), (17), (18), (19): Xaa is A or G
  MOD_RES (20), (21), (22), (23): Xaa is A or G or is absent
XAPTKLSNITVQIMXXXXXXXXXIGEMSNMVVRSXG

SEQ ID NO: 52113 - protein, 42 aa, Artificial Sequence
  GFR-binding peptide
  MOD_RES (5), (42): Xaa is C or S
SSVKXQPSRVHHEPLTVLYYEYVRKKPKLEQLSNRLEEHLEX

SEQ ID NO: 52114 - protein, 42 aa, Artificial Sequence; identical to SEQ ID NO: 19145
  GFR-binding peptide
  MOD_RES (4), (41): Xaa is C or S
  MOD_RES (20), (21), (22), (23), (24): Xaa is A or G
  MOD_RES (25), (26), (27), (28): Xaa is A or G or is absent

SEQ ID NO: 52115 - protein, 41 aa, Artificial Sequence; identical to SEQ ID NO: 19146
  GFR-binding peptide
  MOD_RES (5), (5): Xaa is C or S
  MOD_RES (21), (22), (23), (24), (25): Xaa is A or G
  MOD_RES (26), (27), (28), (29): Xaa is A or G or is absent

SEQ ID NO: 52116 - protein, 36 aa, Artificial Sequence; identical to SEQ ID NO: 14106
  GFR-binding peptide
  MOD_RES (1), (2), (36): Xaa is C or S
  MOD_RES (16), (17), (18), (19), (20): Xaa is A or G
  MOD_RES (21), (22), (23), (24): Xaa is A or G or is absent

SEQ ID NO: 52117 - protein, 44 aa, Artificial Sequence; identical to SEQ ID NO: 14107
  GFR-binding peptide
  MOD_RES (6), (7), (41), (43): Xaa is C or S
  MOD_RES (21), (22), (23), (24), (25): Xaa is A or G
  MOD_RES (26), (27), (28), (29): Xaa is A or G or is absent

SEQ ID NO: 52118 - protein, 43 aa, Artificial Sequence; identical to SEQ ID NO: 19148
  GFR-binding peptide
  MOD_RES (5), (42): Xaa is C or S

SEQ ID NO: 52119 - protein, 41 aa, Artificial Sequence; identical to SEQ ID NO: 14109
  GFR-binding peptide
  MOD_RES (5), (6), (40): Xaa is C or S
  MOD_RES (20), (21), (22), (23), (24): Xaa is A or G
  MOD_RES (25), (26), (27), (28): Xaa is A or G or is absent

SEQ ID NO: 52120 - protein, 37 aa, Artificial Sequence
  GFR-binding peptide
  MOD_RES (1), (2), (36): Xaa is C or S
  MOD_RES (16), (17), (18), (19), (20): Xaa is A or G
  MOD_RES (21), (22), (23), (24): Xaa is A or G or is absent
XXAPTQLRSVKVAKVXXXXXXXXXKEVQVNMVVRAXG

SEQ ID NO: 52121 - protein, 34 aa, Artificial Sequence
  GFR-binding peptide
  MOD_RES (3), (4): Xaa is C or S
KPXXAPTQLRPVQVRKIDDSSNVIKKATVNMVVR

SEQ ID NO: 52122 - protein, 35 aa, Artificial Sequence
  GFR-binding peptide
  MOD_RES (3), (3): Xaa is C or S
  MOD_RES (17), (18), (19), (20), (21): Xaa is A or G
  MOD_RES (22), (23), (24), (25): Xaa is A or G or is absent
PTXAPTKLRPVQVRKIXXXXXXXXXKKATVNMVVR

SEQ ID NO: 52123 - protein, 39 aa, Artificial Sequence
  GFR-binding peptide
  MOD_RES (6), (7): Xaa is C or S
  MOD_RES (21), (22), (23), (24), (25): Xaa is A or G
  MOD_RES (26), (27), (28), (29): Xaa is A or G or is absent
SIPKAXXVPTELSNITMQIMXXXXXXXXXIGEMSEMVVE

SEQ ID NO: 52124 - protein, 35 aa, Artificial Sequence
  GFR-binding peptide
  MOD_RES (3), (4): Xaa is C or S
KPXXAPTKLRPVQVRKIDDSSNVIKKATVNMVVRS

SEQ ID NO: 52125 - protein, 33 aa, Artificial Sequence
  GFR-binding peptide
  MOD_RES (2), (3): Xaa is C or S
PXXAPTKLRPVQVRKIDDSSNVIKKATVNMVVR

SEQ ID NO: 52126 - protein, 38 aa, Artificial Sequence; identical to SEQ ID NO: 19151
  GFR-binding peptide
  MOD_RES (37), (37): Xaa is C or S

SEQ ID NO: 52127 - protein, 35 aa, Artificial Sequence
  GFR-binding peptide
  MOD_RES (35), (35): Xaa is C or S
SRVHHEPLTVLYYEYVRKKPKLEQLSNRLEEHLEX

SEQ ID NO: 52128 - protein, 33 aa, Artificial Sequence
  GFR-binding peptide
  MOD_RES (33), (33): Xaa is C or S
  MOD_RES (14), (15), (16), (17), (18): Xaa is A or G
  MOD_RES (19), (20), (21), (22): Xaa is A or G or is absent
VPQALSNITIQIMXXXXXXXXXIGEMSMIVRSX

SEQ ID NO: 52129 - protein, 38 aa, Artificial Sequence; identical to SEQ ID NO: 14117
  GFR-binding peptide
  MOD_RES (4), (36), (38): Xaa is C or S

SEQ ID NO: 52130 - protein, 36 aa, Artificial Sequence; identical to SEQ ID NO: 19159
  GFR-binding peptide
  MOD_RES (35), (35): Xaa is C or S
  MOD_RES (14), (15), (16), (17), (18): Xaa is A or G
  MOD_RES (19), (20), (21), (22): Xaa is A or G or is absent

SEQ ID NO: 52131 - protein, 38 aa, Artificial Sequence
  GFR-binding peptide
  MOD_RES (1), (38): Xaa is C or S
  MOD_RES (17), (18), (19), (20), (21): Xaa is A or G
  MOD_RES (22), (23), (24), (25): Xaa is A or G or is absent
XQPSRVHHEPLPVVYYXXXXXXXXXEQLSNRLEEHLEX

SEQ ID NO: 52132 - protein, 38 aa, Artificial Sequence; identical to SEQ ID NO: 14121
  GFR-binding peptide
  MOD_RES (3), (4), (36), (38): Xaa is C or S

SEQ ID NO: 52133 - protein, 34 aa, Artificial Sequence
  GFR-binding peptide
  MOD_RES (34), (34): Xaa is C or S
  MOD_RES (14), (15), (16), (17), (18): Xaa is A or G
  MOD_RES (19), (20), (21), (22): Xaa is A or G or is absent
APTKLRPVQVRKIXXXXXXXXXKKATVNMVVRSX

SEQ ID NO: 52134 - protein, 43 aa, Artificial Sequence
  GFR-binding peptide
  MOD_RES (6), (7), (40), (42): Xaa is C or S
  MOD_RES (21), (22), (23), (24), (25): Xaa is A or G
  MOD_RES (26), (27), (28), (29): Xaa is A or G or is absent
ASAAPXXVPQALRSVKIAKVXXXXXXXXXKEVQVMIVRSXKXS

SEQ ID NO: 52135 - protein, 35 aa, Artificial Sequence
  GFR-binding peptide
  MOD_RES (1), (2): Xaa is C or S
  MOD_RES (16), (17), (18), (19), (20): Xaa is A or G
  MOD_RES (21), (22), (23), (24): Xaa is A or G or is absent
XXVPTELSNITMQIMXXXXXXXXXIGEMSEMVVEG

SEQ ID NO: 52136 - protein, 37 aa, Artificial Sequence; identical to SEQ ID NO: 19163
  GFR-binding peptide
  MOD_RES (37), (37): Xaa is C or S

SEQ ID NO: 52137 - protein, 36 aa, Artificial Sequence
  GFR-binding peptide
  MOD_RES (1), (2), (34), (36): Xaa is C or S
XXAPTQLRSVKVAKVDDSSNVIKEVQVNMVVRAXGX

SEQ ID NO: 52138 - protein, 31 aa, Artificial Sequence
  GFR-binding peptide
  MOD_RES (1), (1): Xaa is C or S
XAPTKLRPVQVRKIDDSSNVIKKATVNMVVR

SEQ ID NO: 52139 - protein, 33 aa, Artificial Sequence
  GFR-binding peptide
  MOD_RES (31), (33): Xaa is C or S
VPQALRSVKIAKVVGRKPKVKEVQVMIVRSXKX

SEQ ID NO: 52140 - protein, 39 aa, Artificial Sequence
  GFR-binding peptide
  MOD_RES (5), (6): Xaa is C or S
  MOD_RES (20), (21), (22), (23), (24): Xaa is A or G
  MOD_RES (25), (26), (27), (28): Xaa is A or G or is absent
IPKAXXVPTELRPVQMRKIXXXXXXXXXKKATVDMVVEG

SEQ ID NO: 52141 - protein, 37 aa, Artificial Sequence
  GFR-binding peptide
  MOD_RES (6), (7): Xaa is C or S
KIPKAXXVPTELRPVQMRKIDENEKVVKKATVDMVVE

SEQ ID NO: 52142 - protein, 37 aa, Artificial Sequence; identical to SEQ ID NO: 19167
  GFR-binding peptide
  MOD_RES (3), (3): Xaa is C or S
  MOD_RES (19), (20), (21), (22), (23): Xaa is A or G
  MOD_RES (24), (25), (26), (27): Xaa is A or G or is absent

SEQ ID NO: 52143 - protein, 39 aa, Artificial Sequence
  GFR-binding peptide
  MOD_RES (3), (4), (36), (38): Xaa is C or S
KPXXAPTQLRPVQVRKIDDSSNVIKKATVNMVVRAXGXH

SEQ ID NO: 52144 - protein, 37 aa, Artificial Sequence
  GFR-binding peptide
  MOD_RES (6), (7): Xaa is C or S
YVPKPXXAPTKLSNITVQIMDDSSNVIIGEMSNMVVR

SEQ ID NO: 52145 - protein, 31 aa, Artificial Sequence
  GFR-binding peptide
  MOD_RES (31), (31): Xaa is C or S
VSQDLRSVKIAKVIGKTPKIKEVQVMIVKSX

SEQ ID NO: 52146 - protein, 36 aa, Artificial Sequence; identical to SEQ ID NO: 19168
  GFR-binding peptide
  MOD_RES (3), (3): Xaa is C or S
  MOD_RES (17), (18), (19), (20), (21): Xaa is A or G
  MOD_RES (22), (23), (24), (25): Xaa is A or G or is absent

SEQ ID NO: 52147 - protein, 37 aa, Artificial Sequence
  GFR-binding peptide
  MOD_RES (5), (6), (37): Xaa is C or S
SASPXXVSQDLRSVKIAKVIGKTPKIKEVQVMIVKSX

SEQ ID NO: 52148 - protein, 38 aa, Artificial Sequence
  GFR-binding peptide
  MOD_RES (6), (38): Xaa is C or S
VTKPTXAPTKLRPVQVRKIDDSSNVIKKATVNMVVRSX

SEQ ID NO: 52149 - protein, 41 aa, Artificial Sequence
  GFR-binding peptide
  MOD_RES (6), (7), (38), (40): Xaa is C or S
ASASPXXVSQDLRPVQIRKIIGKTPKIKKATVMIVKSXKXS

SEQ ID NO: 52150 - protein, 37 aa, Artificial Sequence
  GFR-binding peptide
  MOD_RES (2), (3), (35), (37): Xaa is C or S
PXXAPTKLRSVKVAKVDDSSNVIKEVQVNMVVRSXGX

SEQ ID NO: 52151 - protein, 44 aa, Artificial Sequence; identical to SEQ ID NO: 19171
  GFR-binding peptide
  MOD_RES (5), (42), (44): Xaa is C or S
  MOD_RES (21), (22), (23), (24), (25): Xaa is A or G
  MOD_RES (26), (27), (28), (29): Xaa is A or G or is absent

SEQ ID NO: 52152 - protein, 33 aa, Artificial Sequence
  GFR-binding peptide
  MOD_RES (31), (33): Xaa is C or S
VPQDLSNITIQIMVGRTPKVIGEMSMVVKSXKX

SEQ ID NO: 52153 - protein, 33 aa, Artificial Sequence; identical to SEQ ID NO: 14131
  GFR-binding peptide
  MOD_RES (32), (32): Xaa is C or S

SEQ ID NO: 52154 - protein, 35 aa, Artificial Sequence
  GFR-binding peptide
  MOD_RES (1), (1): Xaa is C or S
XQPSRVHHEPLTVLYYEYVRKKPKLEQLSNRLEEH

SEQ ID NO: 52155 - protein, 43 aa, Artificial Sequence
  GFR-binding peptide
  MOD_RES (4), (41), (43): Xaa is C or S
  MOD_RES (20), (21), (22), (23), (24): Xaa is A or G
  MOD_RES (25), (26), (27), (28): Xaa is A or G or is absent
SVKXQPSRVHHEPLTVLYYXXXXXXXXXEQLSNRLEEHLEXAX

SEQ ID NO: 52156 - protein, 38 aa, Artificial Sequence; identical to SEQ ID NO: 19173
  GFR-binding peptide
  MOD_RES (37), (37): Xaa is C or S
  MOD_RES (16), (17), (18), (19), (20): Xaa is A or G
  MOD_RES (21), (22), (23), (24): Xaa is A or G or is absent

SEQ ID NO: 52157 - protein, 37 aa, Artificial Sequence
  GFR-binding peptide
  MOD_RES (5), (5): Xaa is C or S
  MOD_RES (19), (20), (21), (22), (23): Xaa is A or G
  MOD_RES (24), (25), (26), (27): Xaa is A or G or is absent
TKPTXAPTKLSNITVQIMXXXXXXXXXIGEMSNMVVR

SEQ ID NO: 52158 - protein, 37 aa, Artificial Sequence
  GFR-binding peptide
  MOD_RES (2), (2): Xaa is C or S
  MOD_RES (18), (19), (20), (21), (22): Xaa is A or G
  MOD_RES (23), (24), (25), (26): Xaa is A or G or is absent
KXQPSRVHHEPLTVLYYXXXXXXXXXEQLSNRLEEHL

SEQ ID NO: 52159 - protein, 39 aa, Artificial Sequence; identical to SEQ ID NO: 14133
  GFR-binding peptide
  MOD_RES (2), (36), (38): Xaa is C or S
  MOD_RES (16), (17), (18), (19), (20): Xaa is A or G
  MOD_RES (21), (22), (23), (24): Xaa is A or G or is absent

SEQ ID NO: 52160 - protein, 38 aa, Artificial Sequence; identical to SEQ ID NO: 14134
  GFR-binding peptide
  MOD_RES (1), (2), (36), (38): Xaa is C or S
  MOD_RES (16), (17), (18), (19), (20): Xaa is A or G
  MOD_RES (21), (22), (23), (24): Xaa is A or G or is absent

SEQ ID NO: 52161 - protein, 35 aa, Artificial Sequence
  GFR-binding peptide
  MOD_RES (1), (34): Xaa is C or S
  MOD_RES (15), (16), (17), (18), (19): Xaa is A or G
  MOD_RES (20), (21), (22), (23): Xaa is A or G or is absent
XVPQALRPVQIRKIXXXXXXXXXKKATVMIVRSXK

SEQ ID NO: 52162 - protein, 37 aa, Artificial Sequence; identical to SEQ ID NO: 19174
  GFR-binding peptide
  MOD_RES (2), (2): Xaa is C or S
  MOD_RES (18), (19), (20), (21), (22): Xaa is A or G
  MOD_RES (23), (24), (25), (26): Xaa is A or G or is absent

SEQ ID NO: 52163 - protein, 38 aa, Artificial Sequence; identical to SEQ ID NO: 19176
  GFR-binding peptide
  MOD_RES (2), (2): Xaa is C or S
  MOD_RES (18), (19), (20), (21), (22): Xaa is A or G
  MOD_RES (23), (24), (25), (26): Xaa is A or G or is absent

SEQ ID NO: 52164 - protein, 35 aa, Artificial Sequence; identical to SEQ ID NO: 39412
  GFR-binding peptide
  MOD_RES (33), (35): Xaa is C or S
  MOD_RES (14), (15), (16), (17), (18): Xaa is A or G
  MOD_RES (19), (20), (21), (22): Xaa is A or G or is absent

SEQ ID NO: 52165 - protein, 38 aa, Artificial Sequence
  GFR-binding peptide
  MOD_RES (3), (37): Xaa is C or S
  MOD_RES (17), (18), (19), (20), (21): Xaa is A or G
  MOD_RES (22), (23), (24), (25): Xaa is A or G or is absent
PTXAPTKLRSVKVAKVXXXXXXXXXKEVQVNMVVRSXG

SEQ ID NO: 52166 - protein, 40 aa, Artificial Sequence
  GFR-binding peptide
  MOD_RES (2), (3), (37), (39): Xaa is C or S
  MOD_RES (17), (18), (19), (20), (21): Xaa is A or G
  MOD_RES (22), (23), (24), (25): Xaa is A or G or is absent
PXXAPTKLSNITVQIMXXXXXXXXXIGEMSNMVVRSXGXH

SEQ ID NO: 52167 - protein, 31 aa, Artificial Sequence
  GFR-binding peptide
  MOD_RES (1), (1): Xaa is C or S
XVPQALSNITIQIMVGRKPKVIGEMSMIVRS

SEQ ID NO: 52168 - protein, 38 aa, Artificial Sequence; identical to SEQ ID NO: 14136
  GFR-binding peptide
  MOD_RES (3), (4), (36), (38): Xaa is C or S

SEQ ID NO: 52169 - protein, 43 aa, Artificial Sequence
  GFR-binding peptide
  MOD_RES (5), (6), (40), (42): Xaa is C or S
  MOD_RES (20), (21), (22), (23), (24): Xaa is A or G
  MOD_RES (25), (26), (27), (28): Xaa is A or G or is absent
VPKPXXAPTKLSNITVQIMXXXXXXXXXIGEMSNMVVRSXGXH

SEQ ID NO: 52170 - protein, 40 aa, Artificial Sequence
  GFR-binding peptide
  MOD_RES (3), (4), (37), (39): Xaa is C or S
  MOD_RES (18), (19), (20), (21), (22): Xaa is A or G
  MOD_RES (23), (24), (25), (26): Xaa is A or G or is absent
SPXXVPQDLSNITIQIMXXXXXXXXXIGEMSMVVKSXKXS

SEQ ID NO: 52171 - protein, 35 aa, Artificial Sequence; identical to SEQ ID NO: 14138
  GFR-binding peptide
  MOD_RES (4), (5): Xaa is C or S

SEQ ID NO: 52172 - protein, 34 aa, Artificial Sequence; identical to SEQ ID NO: 14139
  GFR-binding peptide
  MOD_RES (1), (33): Xaa is C or S

SEQ ID NO: 52173 - protein, 35 aa, Artificial Sequence; identical to SEQ ID NO: 19182
  GFR-binding peptide
  MOD_RES (35), (35): Xaa is C or S
  MOD_RES (14), (15), (16), (17), (18): Xaa is A or G
  MOD_RES (19), (20), (21), (22): Xaa is A or G or is absent

SEQ ID NO: 52174 - protein, 38 aa, Artificial Sequence
  GFR-binding peptide
  MOD_RES (4), (5), (38): Xaa is C or S
  MOD_RES (19), (20), (21), (22), (23): Xaa is A or G
  MOD_RES (24), (25), (26), (27): Xaa is A or G or is absent
ASPXXVSQDLRSVKIAKVXXXXXXXXXKEVQVMIVKSX

SEQ ID NO: 52175 - protein, 41 aa, Artificial Sequence; identical to SEQ ID NO: 19183
  GFR-binding peptide
  MOD_RES (4), (41): Xaa is C or S
  MOD_RES (20), (21), (22), (23), (24): Xaa is A or G
  MOD_RES (25), (26), (27), (28): Xaa is A or G or is absent

SEQ ID NO: 52176 - protein, 38 aa, Artificial Sequence; identical to SEQ ID NO: 14143
  GFR-binding peptide
  MOD_RES (3), (4), (38): Xaa is C or S
  MOD_RES (18), (19), (20), (21), (22): Xaa is A or G
  MOD_RES (23), (24), (25), (26): Xaa is A or G or is absent

SEQ ID NO: 52177 - protein, 33 aa, Artificial Sequence
  GFR-binding peptide
  MOD_RES (1), (2), (33): Xaa is C or S
XXVPQDLRPVQIRKIVGRTPKVKKATVMVVKSX

SEQ ID NO: 52178 - protein, 40 aa, Artificial Sequence; identical to SEQ ID NO: 39426
  GFR-binding peptide
  MOD_RES (5), (6), (39): Xaa is C or S
  MOD_RES (20), (21), (22), (23), (24): Xaa is A or G
  MOD_RES (25), (26), (27), (28): Xaa is A or G or is absent

SEQ ID NO: 52179 - protein, 32 aa, Artificial Sequence
  GFR-binding peptide
  MOD_RES (31), (31): Xaa is C or S
VPQDLRPVQIRKIVGRTPKVKKATVMVVKSXK

SEQ ID NO: 52180 - protein, 39 aa, Artificial Sequence
  GFR-binding peptide
  MOD_RES (2), (3), (37), (39): Xaa is C or S
  MOD_RES (17), (18), (19), (20), (21): Xaa is A or G
  MOD_RES (22), (23), (24), (25): Xaa is A or G or is absent
AXXVPTELRSVKMAKVXXXXXXXXXKEVQVDMVVEGXGX

SEQ ID NO: 52181 - protein, 39 aa, Artificial Sequence; identical to SEQ ID NO: 19189
  GFR-binding peptide
  MOD_RES (2), (39): Xaa is C or S

SEQ ID NO: 52182 - protein, 39 aa, Artificial Sequence
  GFR-binding peptide
  MOD_RES (3), (3): Xaa is C or S
VKXQPSRVHHEPLTVLYYEYVRKKPKLEQLSNRLEEHLE

SEQ ID NO: 52183 - protein, 40 aa, Artificial Sequence
  GFR-binding peptide
  MOD_RES (6), (7), (39): Xaa is C or S
TVPKPXXAPTQLRPVQVRKIDDSSNVIKKATVNMVVRAXG

SEQ ID NO: 52184 - protein, 37 aa, Artificial Sequence
  GFR-binding peptide
  MOD_RES (3), (4), (35), (37): Xaa is C or S
APXXVPQALRSVKIAKVVGRKPKVKEVQVMIVRSXKX

SEQ ID NO: 52185 - protein, 43 aa, Artificial Sequence; identical to SEQ ID NO: 19194
  GFR-binding peptide
  MOD_RES (7), (41), (43): Xaa is C or S

SEQ ID NO: 52186 - protein, 38 aa, Artificial Sequence; identical to SEQ ID NO: 19195
  GFR-binding peptide
  MOD_RES (4), (4): Xaa is C or S

SEQ ID NO: 52187 - protein, 37 aa, Artificial Sequence
  GFR-binding peptide
  MOD_RES (5), (37): Xaa is C or S
TKPTXAPTKLSNITVQIMDDSSNVIIGEMSNMVVRSX

SEQ ID NO: 52188 - protein, 33 aa, Artificial Sequence; identical to SEQ ID NO: 14154
  GFR-binding peptide
  MOD_RES (1), (33): Xaa is C or S

SEQ ID NO: 52189 - protein, 30 aa, Artificial Sequence
  GFR-binding peptide
VPTELRPVQMRKIDENEKVVKKATVDMVVE

SEQ ID NO: 52190 - protein, 40 aa, Artificial Sequence; identical to SEQ ID NO: 14156
  GFR-binding peptide
  MOD_RES (3), (4), (37), (39): Xaa is C or S
  MOD_RES (18), (19), (20), (21), (22): Xaa is A or G
  MOD_RES (23), (24), (25), (26): Xaa is A or G or is absent

SEQ ID NO: 52191 - protein, 38 aa, Artificial Sequence; identical to SEQ ID NO: 14157
  GFR-binding peptide
  MOD_RES (6), (6): Xaa is C or S
  MOD_RES (20), (21), (22), (23), (24): Xaa is A or G
  MOD_RES (25), (26), (27), (28): Xaa is A or G or is absent

SEQ ID NO: 52192 - protein, 38 aa, Artificial Sequence
  GFR-binding peptide
  MOD_RES (35), (37): Xaa is C or S
SRVHHEPLPVVYYEYVRKKPKLEQLSNRLEEHLEXAXA

SEQ ID NO: 52193 - protein, 39 aa, Artificial Sequence; identical to SEQ ID NO: 14158
  GFR-binding peptide
  MOD_RES (6), (7), (39): Xaa is C or S

SEQ ID NO: 52194 - protein, 42 aa, Artificial Sequence
  GFR-binding peptide
  MOD_RES (5), (42): Xaa is C or S
  MOD_RES (21), (22), (23), (24), (25): Xaa is A or G
  MOD_RES (26), (27), (28), (29): Xaa is A or G or is absent
RNVQXRPTQVQLEPLTVLYYXXXXXXXXXEQLSNTLEDHLAX

SEQ ID NO: 52195 - protein, 36 aa, Artificial Sequence; identical to SEQ ID NO: 14159
  GFR-binding peptide
  MOD_RES (4), (5): Xaa is C or S

SEQ ID NO: 52196 - protein, 42 aa, Artificial Sequence; identical to SEQ ID NO: 14160
  GFR-binding peptide
  MOD_RES (4), (5), (39), (41): Xaa is C or S
  MOD_RES (19), (20), (21), (22), (23): Xaa is A or G
  MOD_RES (24), (25), (26), (27): Xaa is A or G or is absent

SEQ ID NO: 52197 - protein, 40 aa, Artificial Sequence
  GFR-binding peptide
  MOD_RES (3), (4), (37), (39): Xaa is C or S
  MOD_RES (18), (19), (20), (21), (22): Xaa is A or G
  MOD_RES (23), (24), (25), (26): Xaa is A or G or is absent
SPXXVPQDLRPVQIRKIXXXXXXXXXKKATVMVVKSXKXS

SEQ ID NO: 52198 - protein, 34 aa, Artificial Sequence
  GFR-binding peptide
  MOD_RES (1), (2), (34): Xaa is C or S
XXAPTKLSNITVQIMDDSSNVIIGEMSNMVVRSX

SEQ ID NO: 52199 - protein, 42 aa, Artificial Sequence; identical to SEQ ID NO: 19200
  GFR-binding peptide
  MOD_RES (5), (39), (41): Xaa is C or S
  MOD_RES (19), (20), (21), (22), (23): Xaa is A or G
  MOD_RES (24), (25), (26), (27): Xaa is A or G or is absent

SEQ ID NO: 52200 - protein, 39 aa, Artificial Sequence
  GFR-binding peptide
  MOD_RES (4), (5), (39): Xaa is C or S
  MOD_RES (19), (20), (21), (22), (23): Xaa is A or G
  MOD_RES (24), (25), (26), (27): Xaa is A or G or is absent
PKPXXAPTQLSNITVQIMXXXXXXXXXIGEMSNMVVRAX

SEQ ID NO: 52201 - protein, 37 aa, Artificial Sequence; identical to SEQ ID NO: 19202
  GFR-binding peptide
  MOD_RES (2), (2): Xaa is C or S
  MOD_RES (18), (19), (20), (21), (22): Xaa is A or G
  MOD_RES (23), (24), (25), (26): Xaa is A or G or is absent

SEQ ID NO: 52202 - protein, 36 aa, Artificial Sequence; identical to SEQ ID NO: 19203
  GFR-binding peptide
  MOD_RES (4), (4): Xaa is C or S
  MOD_RES (18), (19), (20), (21), (22): Xaa is A or G
  MOD_RES (23), (24), (25), (26): Xaa is A or G or is absent

SEQ ID NO: 52203 - protein, 39 aa, Artificial Sequence
  GFR-binding peptide
  MOD_RES (5), (6), (39): Xaa is C or S
  MOD_RES (20), (21), (22), (23), (24): Xaa is A or G
  MOD_RES (25), (26), (27), (28): Xaa is A or G or is absent
SASPXXVSQDLRPVQIRKIXXXXXXXXXKKATVMIVKSX

SEQ ID NO: 52204 - protein, 40 aa, Artificial Sequence
  GFR-binding peptide
  MOD_RES (1), (38), (40): Xaa is C or S
XRPTQVQLEPLTVLYYEIVRKKPIFEQLSNTLEDHLAXKX

SEQ ID NO: 52205 - protein, 40 aa, Artificial Sequence; identical to SEQ ID NO: 14162
  GFR-binding peptide
  MOD_RES (4), (5), (37), (39): Xaa is C or S

SEQ ID NO: 52206 - protein, 37 aa, Artificial Sequence
  GFR-binding peptide
  MOD_RES (6), (7): Xaa is C or S
TVPKPXXAPTQLSNITVQIMDDSSNVIIGEMSNMVVR

SEQ ID NO: 52207 - protein, 39 aa, Artificial Sequence; identical to SEQ ID NO: 14163
  GFR-binding peptide
  MOD_RES (2), (3), (36), (38): Xaa is C or S
  MOD_RES (17), (18), (19), (20), (21): Xaa is A or G
  MOD_RES (22), (23), (24), (25): Xaa is A or G or is absent

SEQ ID NO: 52208 - protein, 40 aa, Artificial Sequence; identical to SEQ ID NO: 19204
  GFR-binding peptide
  MOD_RES (5), (5): Xaa is C or S
  MOD_RES (21), (22), (23), (24), (25): Xaa is A or G
  MOD_RES (26), (27), (28), (29): Xaa is A or G or is absent

SEQ ID NO: 52209 - protein, 35 aa, Artificial Sequence; identical to SEQ ID NO: 14164
  GFR-binding peptide
  MOD_RES (1), (32), (34): Xaa is C or S

SEQ ID NO: 52210 - protein, 36 aa, Artificial Sequence
  GFR-binding peptide
  MOD_RES (36), (36): Xaa is C or S
PTQVQLEPLTVLYYEIVRKKPIFEQLSNTLEDHLAX

SEQ ID NO: 52211 - protein, 32 aa, Artificial Sequence
  GFR-binding peptide
  MOD_RES (1), (32): Xaa is C or S
XVPQDLRSVKIAKVVGRTPKVKEVQVMVVKSX

SEQ ID NO: 52212 - protein, 33 aa, Artificial Sequence
  GFR-binding peptide
  MOD_RES (14), (15), (16), (17), (18): Xaa is A or G
  MOD_RES (19), (20), (21), (22): Xaa is A or G or is absent
VPTELSNITMQIMXXXXXXXXXIGEMSDMVVEG

SEQ ID NO: 52213 - protein, 37 aa, Artificial Sequence
  GFR-binding peptide
  MOD_RES (3), (4), (36): Xaa is C or S
KAXXVPTELRPVQMRKIDEYDKVVKKATVEMVVEGXG

SEQ ID NO: 52214 - protein, 40 aa, Artificial Sequence; identical to SEQ ID NO: 19205
  GFR-binding peptide
  MOD_RES (4), (4): Xaa is C or S
  MOD_RES (20), (21), (22), (23), (24): Xaa is A or G
  MOD_RES (25), (26), (27), (28): Xaa is A or G or is absent

SEQ ID NO: 52215 - protein, 36 aa, Artificial Sequence; identical to SEQ ID NO: 19206
  GFR-binding peptide
  MOD_RES (36), (36): Xaa is C or S
  MOD_RES (15), (16), (17), (18), (19): Xaa is A or G
  MOD_RES (20), (21), (22), (23): Xaa is A or G or is absent

SEQ ID NO: 52216 - protein, 41 aa, Artificial Sequence; identical to SEQ ID NO: 19207
  GFR-binding peptide
  MOD_RES (2), (39), (41): Xaa is C or S

SEQ ID NO: 52217 - protein, 34 aa, Artificial Sequence; identical to SEQ ID NO: 14168
  GFR-binding peptide
  MOD_RES (31), (33): Xaa is C or S

SEQ ID NO: 52218 - protein, 36 aa, Artificial Sequence
  GFR-binding peptide
  MOD_RES (3), (3): Xaa is C or S
  MOD_RES (17), (18), (19), (20), (21): Xaa is A or G
  MOD_RES (22), (23), (24), (25): Xaa is A or G or is absent
LEXVPTEEEPLTMLYYXXXXXXXXXEQLSNFLQHNK

SEQ ID NO: 52219 - protein, 38 aa, Artificial Sequence
  GFR-binding peptide
  MOD_RES (3), (4), (37): Xaa is C or S
  MOD_RES (18), (19), (20), (21), (22): Xaa is A or G
  MOD_RES (23), (24), (25), (26): Xaa is A or G or is absent
APXXVPQALRPVQIRKIXXXXXXXXXKKATVMIVRSXK

SEQ ID NO: 52220 - protein, 37 aa, Artificial Sequence; identical to SEQ ID NO: 14170
  GFR-binding peptide
  MOD_RES (1), (34), (36): Xaa is C or S
  MOD_RES (15), (16), (17), (18), (19): Xaa is A or G
  MOD_RES (20), (21), (22), (23): Xaa is A or G or is absent

SEQ ID NO: 52221 - protein, 37 aa, Artificial Sequence; identical to SEQ ID NO: 14171
  GFR-binding peptide
  MOD_RES (34), (36): Xaa is C or S
  MOD_RES (14), (15), (16), (17), (18): Xaa is A or G
  MOD_RES (19), (20), (21), (22): Xaa is A or G or is absent

SEQ ID NO: 52222 - protein, 39 aa, Artificial Sequence
  GFR-binding peptide
  MOD_RES (4), (38): Xaa is C or S
  MOD_RES (18), (19), (20), (21), (22): Xaa is A or G
  MOD_RES (23), (24), (25), (26): Xaa is A or G or is absent
KPTXAPTKLSNITVQIMXXXXXXXXXIGEMSNMVVRSXG

SEQ ID NO: 52223 - protein, 37 aa, Artificial Sequence; identical to SEQ ID NO: 19216
  GFR-binding peptide
  MOD_RES (35), (37): Xaa is C or S

SEQ ID NO: 52224 - protein, 38 aa, Artificial Sequence
  GFR-binding peptide
  MOD_RES (3), (37): Xaa is C or S
LEXVPTEEEPLTMLYYRIKPHQGQHEQLSNFLQHNKXE

SEQ ID NO: 52225 - protein, 35 aa, Artificial Sequence; identical to SEQ ID NO: 14175
  GFR-binding peptide
  MOD_RES (2), (3), (35): Xaa is C or S

SEQ ID NO: 52226 - protein, 36 aa, Artificial Sequence; identical to SEQ ID NO: 14178
  GFR-binding peptide
  MOD_RES (1), (2), (35): Xaa is C or S
  MOD_RES (16), (17), (18), (19), (20): Xaa is A or G
  MOD_RES (21), (22), (23), (24): Xaa is A or G or is absent

SEQ ID NO: 52227 - protein, 39 aa, Artificial Sequence
  GFR-binding peptide
  MOD_RES (1), (2), (36), (38): Xaa is C or S
  MOD_RES (16), (17), (18), (19), (20): Xaa is A or G
  MOD_RES (21), (22), (23), (24): Xaa is A or G or is absent
XXAPTKLRPVQVRKIXXXXXXXXXKKATVNMVVRSXGXH

SEQ ID NO: 52228 - protein, 35 aa, Artificial Sequence
  GFR-binding peptide
QPSRVHHEPLTVLYYEYVRKKPKLEQLSNRLEEHL

SEQ ID NO: 52229 - protein, 38 aa, Artificial Sequence; identical to SEQ ID NO: 19219
  GFR-binding peptide
  MOD_RES (37), (37): Xaa is C or S
  MOD_RES (16), (17), (18), (19), (20): Xaa is A or G
  MOD_RES (21), (22), (23), (24): Xaa is A or G or is absent

SEQ ID NO: 52230 - protein, 43 aa, Artificial Sequence
  GFR-binding peptide
  MOD_RES (5), (6), (40), (42): Xaa is C or S
  MOD_RES (20), (21), (22), (23), (24): Xaa is A or G
  MOD_RES (25), (26), (27), (28): Xaa is A or G or is absent
IPKAXXVPTELRPVQMRKIXXXXXXXXXKKATVDMVVEGXGXR

SEQ ID NO: 52231 - protein, 39 aa, Artificial Sequence
  GFR-binding peptide
  MOD_RES (5), (6), (37), (39): Xaa is C or S
SASPXXVSQDLRSVKIAKVIGKTPKIKEVQVMIVKSXKX

SEQ ID NO: 52232 - protein, 41 aa, Artificial Sequence
  GFR-binding peptide
  MOD_RES (5), (39), (41): Xaa is C or S
EGLEXVPTEEEPLTMLYYRIKPHQGQHEQLSNFLQHNKXEX

SEQ ID NO: 52233 - protein, 39 aa, Artificial Sequence; identical to SEQ ID NO: 14182
  GFR-binding peptide
  MOD_RES (5), (6), (39): Xaa is C or S
  MOD_RES (20), (21), (22), (23), (24): Xaa is A or G
  MOD_RES (25), (26), (27), (28): Xaa is A or G or is absent

SEQ ID NO: 52234 - protein, 35 aa, Artificial Sequence
  GFR-binding peptide
  MOD_RES (3), (4): Xaa is C or S
KAXXVPTELRSVKMAKVDENEKVVKEVQVDMVVEG

SEQ ID NO: 52235 - protein, 43 aa, Artificial Sequence
  GFR-binding peptide
  MOD_RES (3), (40), (42): Xaa is C or S
VQXRPTQVQLEPLTVLYYEIVRKKPIFEQLSNTLEDHLAXKXE

SEQ ID NO: 52236 - protein, 39 aa, Artificial Sequence; identical to SEQ ID NO: 19227
  GFR-binding peptide
  MOD_RES (37), (39): Xaa is C or S
  MOD_RES (16), (17), (18), (19), (20): Xaa is A or G
  MOD_RES (21), (22), (23), (24): Xaa is A or G or is absent

SEQ ID NO: 52237 - protein, 35 aa, Artificial Sequence; identical to SEQ ID NO: 39499
  GFR-binding peptide
  MOD_RES (2), (3): Xaa is C or S
  MOD_RES (17), (18), (19), (20), (21): Xaa is A or G
  MOD_RES (22), (23), (24), (25): Xaa is A or G or is absent

SEQ ID NO: 52238 - protein, 32 aa, Artificial Sequence
  GFR-binding peptide
  MOD_RES (14), (15), (16), (17), (18): Xaa is A or G
  MOD_RES (19), (20), (21), (22): Xaa is A or G or is absent
VPTELRPVQMRKIXXXXXXXXXKKATVDMVVE

SEQ ID NO: 52239 - protein, 41 aa, Artificial Sequence; identical to SEQ ID NO: 19230
  GFR-binding peptide
  MOD_RES (2), (39), (41): Xaa is C or S
  MOD_RES (18), (19), (20), (21), (22): Xaa is A or G
  MOD_RES (23), (24), (25), (26): Xaa is A or G or is absent

SEQ ID NO: 52240 - protein, 36 aa, Artificial Sequence
  GFR-binding peptide
  MOD_RES (1), (35): Xaa is C or S
XVPTEEEPLPMVYYRIKPHQGQHEQLSNFLQHNKXE

SEQ ID NO: 52241 - protein, 40 aa, Artificial Sequence
  GFR-binding peptide
  MOD_RES (5), (6), (40): Xaa is C or S
  MOD_RES (20), (21), (22), (23), (24): Xaa is A or G
  MOD_RES (25), (26), (27), (28): Xaa is A or G or is absent
IPKAXXVPTELRPVQMRKIXXXXXXXXXKKATVDMVVEGX

SEQ ID NO: 52242 - protein, 36 aa, Artificial Sequence
  GFR-binding peptide
  MOD_RES (4), (4): Xaa is C or S
GLEXVPTEEEPLPMVYYRIKPHQGQHEQLSNFLQHN

SEQ ID NO: 52243 - protein, 43 aa, Artificial Sequence; identical to SEQ ID NO: 19239
  GFR-binding peptide
  MOD_RES (3), (40), (42): Xaa is C or S
  MOD_RES (19), (20), (21), (22), (23): Xaa is A or G
  MOD_RES (24), (25), (26), (27): Xaa is A or G or is absent

SEQ ID NO: 52244 - protein, 39 aa, Artificial Sequence
  GFR-binding peptide
  MOD_RES (6), (7): Xaa is C or S
  MOD_RES (21), (22), (23), (24), (25): Xaa is A or G
  MOD_RES (26), (27), (28), (29): Xaa is A or G or is absent
ASASPXXVSQDLRSVKIAKVXXXXXXXXXKEVQVMIVKS

SEQ ID NO: 52245 - protein, 42 aa, Artificial Sequence; identical to SEQ ID NO: 19240
  GFR-binding peptide
  MOD_RES (5), (39), (41): Xaa is C or S
  MOD_RES (19), (20), (21), (22), (23): Xaa is A or G
  MOD_RES (24), (25), (26), (27): Xaa is A or G or is absent

SEQ ID NO: 52246 - protein, 39 aa, Artificial Sequence; identical to SEQ ID NO: 19241
  GFR-binding peptide
  MOD_RES (5), (5): Xaa is C or S
  MOD_RES (21), (22), (23), (24), (25): Xaa is A or G
  MOD_RES (26), (27), (28), (29): Xaa is A or G or is absent

SEQ ID NO: 52247 - protein, 39 aa, Artificial Sequence
  GFR-binding peptide
  MOD_RES (5), (6), (38): Xaa is C or S
IPKAXXVPTELSNITMQIMDEYDKVVIGEMSEMVVEGXG

SEQ ID NO: 52248 - protein, 38 aa, Artificial Sequence
  GFR-binding peptide
  MOD_RES (5), (6): Xaa is C or S
  MOD_RES (20), (21), (22), (23), (24): Xaa is A or G
  MOD_RES (25), (26), (27), (28): Xaa is A or G or is absent
SASPXXVSQDLRSVKIAKVXXXXXXXXXKEVQVMIVKS

SEQ ID NO: 52249 - protein, 37 aa, Artificial Sequence
  GFR-binding peptide
  MOD_RES (36), (36): Xaa is C or S
PTQVQLEPLPVVYYEIVRKKPIFEQLSNTLEDHLAXK

SEQ ID NO: 52250 - protein, 36 aa, Artificial Sequence; identical to SEQ ID NO: 19244
  GFR-binding peptide
  MOD_RES (35), (35): Xaa is C or S
  MOD_RES (14), (15), (16), (17), (18): Xaa is A or G
  MOD_RES (19), (20), (21), (22): Xaa is A or G or is absent

SEQ ID NO: 52251 - protein, 38 aa, Artificial Sequence
  GFR-binding peptide
  MOD_RES (3), (4), (35), (37): Xaa is C or S
SPXXVSQDLRSVKIAKVIGKTPKIKEVQVMIVKSXKXS

SEQ ID NO: 52252 - protein, 35 aa, Artificial Sequence; identical to SEQ ID NO: 14192
  GFR-binding peptide
  MOD_RES (2), (3): Xaa is C or S
  MOD_RES (17), (18), (19), (20), (21): Xaa is A or G
  MOD_RES (22), (23), (24), (25): Xaa is A or G or is absent

SEQ ID NO: 52253 - protein, 42 aa, Artificial Sequence; identical to SEQ ID NO: 14194
  GFR-binding peptide
  MOD_RES (6), (7), (39), (41): Xaa is C or S

SEQ ID NO: 52254 - protein, 39 aa, Artificial Sequence
  GFR-binding peptide
  MOD_RES (1), (38): Xaa is C or S
  MOD_RES (17), (18), (19), (20), (21): Xaa is A or G
  MOD_RES (22), (23), (24), (25): Xaa is A or G or is absent
XRPTQVQLEPLPVVYYXXXXXXXXXEQLSNTLEDHLAXK

SEQ ID NO: 52255 - protein, 42 aa, Artificial Sequence; identical to SEQ ID NO: 19246
  GFR-binding peptide
  MOD_RES (5), (39), (41): Xaa is C or S
  MOD_RES (19), (20), (21), (22), (23): Xaa is A or G
  MOD_RES (24), (25), (26), (27): Xaa is A or G or is absent

SEQ ID NO: 52256 - protein, 32 aa, Artificial Sequence; identical to SEQ ID NO: 19248
  GFR-binding peptide

SEQ ID NO: 52257 - protein, 38 aa, Artificial Sequence
  GFR-binding peptide
  MOD_RES (4), (36), (38): Xaa is C or S
KPTXAPTKLSNITVQIMDDSSNVIIGEMSNMVVRSXGX

SEQ ID NO: 52258 - protein, 39 aa, Artificial Sequence; identical to SEQ ID NO: 14197
  GFR-binding peptide
  MOD_RES (6), (38): Xaa is C or S

SEQ ID NO: 52259 - protein, 34 aa, Artificial Sequence; identical to SEQ ID NO: 14198
  GFR-binding peptide
  MOD_RES (1), (2): Xaa is C or S
  MOD_RES (16), (17), (18), (19), (20): Xaa is A or G
  MOD_RES (21), (22), (23), (24): Xaa is A or G or is absent

SEQ ID NO: 52260 - protein, 35 aa, Artificial Sequence; identical to SEQ ID NO: 14200
  GFR-binding peptide
  MOD_RES (32), (34): Xaa is C or S

SEQ ID NO: 52261 - protein, 36 aa, Artificial Sequence; identical to SEQ ID NO: 14202
  GFR-binding peptide
  MOD_RES (1), (33), (35): Xaa is C or S

SEQ ID NO: 52262 - protein, 36 aa, Artificial Sequence
  GFR-binding peptide
  MOD_RES (35), (35): Xaa is C or S
SRVHHEPLPVVYYEYVRKKPKLEQLSNRLEEHLEXA

SEQ ID NO: 52263 - protein, 36 aa, Artificial Sequence; identical to SEQ ID NO: 14204
  GFR-binding peptide
  MOD_RES (2), (3): Xaa is C or S
  MOD_RES (17), (18), (19), (20), (21): Xaa is A or G
  MOD_RES (22), (23), (24), (25): Xaa is A or G or is absent

SEQ ID NO: 52264 - protein, 41 aa, Artificial Sequence; identical to SEQ ID NO: 19251
  GFR-binding peptide
  MOD_RES (1), (38), (40): Xaa is C or S

SEQ ID NO: 52265 - protein, 38 aa, Artificial Sequence
  GFR-binding peptide
  MOD_RES (5), (6), (38): Xaa is C or S
IPKAXXVPTELSNITMQIMDEYDKVVIGEMSEMVVEGX

SEQ ID NO: 52266 - protein, 37 aa, Artificial Sequence; identical to SEQ ID NO: 14205
  GFR-binding peptide
  MOD_RES (6), (7): Xaa is C or S

SEQ ID NO: 52267 - protein, 40 aa, Artificial Sequence
  GFR-binding peptide
  MOD_RES (6), (7): Xaa is C or S
  MOD_RES (21), (22), (23), (24), (25): Xaa is A or G
  MOD_RES (26), (27), (28), (29): Xaa is A or G or is absent
YVPKPXXAPTKLSNITVQIMXXXXXXXXXIGEMSNMVVRS

SEQ ID NO: 52268 - protein, 40 aa, Artificial Sequence
  GFR-binding peptide
  MOD_RES (2), (3), (37), (39): Xaa is C or S
  MOD_RES (17), (18), (19), (20), (21): Xaa is A or G
  MOD_RES (22), (23), (24), (25): Xaa is A or G or is absent
PXXAPTQLRPVQVRKIXXXXXXXXXKKATVNMVVRAXGXH

SEQ ID NO: 52269 - protein, 32 aa, Artificial Sequence
  GFR-binding peptide
TQVQLEPLPVVYYEIVRKKPIFEQLSNTLEDH

SEQ ID NO: 52270 - protein, 36 aa, Artificial Sequence
  GFR-binding peptide
  MOD_RES (1), (34), (36): Xaa is C or S
  MOD_RES (15), (16), (17), (18), (19): Xaa is A or G
  MOD_RES (20), (21), (22), (23): Xaa is A or G or is absent
XVPQDLSNITIQIMXXXXXXXXXIGEMSMVVKSXKX

SEQ ID NO: 52271 - protein, 32 aa, Artificial Sequence; identical to SEQ ID NO: 19253
  GFR-binding peptide
  MOD_RES (14), (15), (16), (17), (18): Xaa is A or G
  MOD_RES (19), (20), (21), (22): Xaa is A or G or is absent

SEQ ID NO: 52272 - protein, 42 aa, Artificial Sequence; identical to SEQ ID NO: 19255
  GFR-binding peptide
  MOD_RES (2), (39), (41): Xaa is C or S

SEQ ID NO: 52273 - protein, 38 aa, Artificial Sequence
  GFR-binding peptide
  MOD_RES (5), (6): Xaa is C or S
  MOD_RES (20), (21), (22), (23), (24): Xaa is A or G
  MOD_RES (25), (26), (27), (28): Xaa is A or G or is absent
SASPXXVSQDLRPVQIRKIXXXXXXXXXKKATVMIVKS

SEQ ID NO: 52274 - protein, 32 aa, Artificial Sequence
  GFR-binding peptide
  MOD_RES (1), (2): Xaa is C or S
XXAPTQLRSVKVAKVDDSSNVIKEVQVNMVVR

SEQ ID NO: 52275 - protein, 41 aa, Artificial Sequence
  GFR-binding peptide
  MOD_RES (4), (41): Xaa is C or S
SVKXQPSRVHHEPLTVLYYEYVRKKPKLEQLSNRLEEHLEX

SEQ ID NO: 52276 - protein, 35 aa, Artificial Sequence
  GFR-binding peptide
  MOD_RES (4), (5): Xaa is C or S
ASPXXVSQDLRSVKIAKVIGKTPKIKEVQVMIVKS

SEQ ID NO: 52277 - protein, 33 aa, Artificial Sequence
  GFR-binding peptide
  MOD_RES (1), (2): Xaa is C or S
XXAPTKLRSVKVAKVDDSSNVIKEVQVNMVVRS

SEQ ID NO: 52278 - protein, 41 aa, Artificial Sequence
  GFR-binding peptide
  MOD_RES (6), (40): Xaa is C or S
DEGLEXVPTEEEPLPMVYYRIKPHQGQHEQLSNFLQHNKXE

SEQ ID NO: 52279 - protein, 39 aa, Artificial Sequence; identical to SEQ ID NO: 19259
  GFR-binding peptide
  MOD_RES (3), (3): Xaa is C or S
  MOD_RES (19), (20), (21), (22), (23): Xaa is A or G
  MOD_RES (24), (25), (26), (27): Xaa is A or G or is absent

SEQ ID NO: 52280 - protein, 33 aa, Artificial Sequence; identical to SEQ ID NO: 14211
  GFR-binding peptide
  MOD_RES (32), (32): Xaa is C or S

SEQ ID NO: 52281 - protein, 32 aa, Artificial Sequence; identical to SEQ ID NO: 19260
  GFR-binding peptide

SEQ ID NO: 52282 - protein, 34 aa, Artificial Sequence
  GFR-binding peptide
  MOD_RES (1), (33): Xaa is C or S
XAPTQLSNITVQIMDDSSNVIIGEMSNMVVRAXG

SEQ ID NO: 52283 - protein, 36 aa, Artificial Sequence
  GFR-binding peptide
  MOD_RES (2), (3), (36): Xaa is C or S
  MOD_RES (17), (18), (19), (20), (21): Xaa is A or G
  MOD_RES (22), (23), (24), (25): Xaa is A or G or is absent
PXXVPQDLRSVKIAKVXXXXXXXXXKEVQVMVVKSX

SEQ ID NO: 52284 - protein, 37 aa, Artificial Sequence; identical to SEQ ID NO: 19261
  GFR-binding peptide
  MOD_RES (1), (1): Xaa is C or S
  MOD_RES (17), (18), (19), (20), (21): Xaa is A or G
  MOD_RES (22), (23), (24), (25): Xaa is A or G or is absent

SEQ ID NO: 52285 - protein, 38 aa, Artificial Sequence
  GFR-binding peptide
  MOD_RES (6), (7), (38): Xaa is C or S
ASASPXXVPQDLRSVKIAKVVGRTPKVKEVQVMVVKSX

SEQ ID NO: 52286 - protein, 41 aa, Artificial Sequence
  GFR-binding peptide
  MOD_RES (6), (7), (41): Xaa is C or S
  MOD_RES (21), (22), (23), (24), (25): Xaa is A or G
  MOD_RES (26), (27), (28), (29): Xaa is A or G or is absent
YVPKPXXAPTKLRSVKVAKVXXXXXXXXXKEVQVNMVVRSX

SEQ ID NO: 52287 - protein, 35 aa, Artificial Sequence
  GFR-binding peptide
  MOD_RES (1), (2), (34): Xaa is C or S
XXVPTELRSVKMAKVDENEKVVKEVQVDMVVEGXG

SEQ ID NO: 52288 - protein, 39 aa, Artificial Sequence
  GFR-binding peptide
  MOD_RES (5), (6): Xaa is C or S
  MOD_RES (20), (21), (22), (23), (24): Xaa is A or G
  MOD_RES (25), (26), (27), (28): Xaa is A or G or is absent
VPKPXXAPTQLRPVQVRKIXXXXXXXXXKKATVNMVVRA

SEQ ID NO: 52289 - protein, 40 aa, Artificial Sequence
  GFR-binding peptide
  MOD_RES (5), (6), (40): Xaa is C or S
  MOD_RES (20), (21), (22), (23), (24): Xaa is A or G
  MOD_RES (25), (26), (27), (28): Xaa is A or G or is absent
IPKAXXVPTELSNITMQIMXXXXXXXXXIGEMSEMVVEGX

SEQ ID NO: 52290 - protein, 34 aa, Artificial Sequence; identical to SEQ ID NO: 14213
  GFR-binding peptide
  MOD_RES (1), (2), (34): Xaa is C or S

SEQ ID NO: 52291 - protein, 39 aa, Artificial Sequence; identical to SEQ ID NO: 39546
  GFR-binding peptide
  MOD_RES (3), (4), (37), (39): Xaa is C or S
  MOD_RES (18), (19), (20), (21), (22): Xaa is A or G
  MOD_RES (23), (24), (25), (26): Xaa is A or G or is absent

SEQ ID NO: 52292 - protein, 34 aa, Artificial Sequence
  GFR-binding peptide
  MOD_RES (31), (33): Xaa is C or S
VPQALRPVQIRKIVGRKPKVKKATVMIVRSXKXS

SEQ ID NO: 52293 - protein, 37 aa, Artificial Sequence; identical to SEQ ID NO: 14216
  GFR-binding peptide
  MOD_RES (4), (36): Xaa is C or S

SEQ ID NO: 52294 - protein, 43 aa, Artificial Sequence; identical to SEQ ID NO: 19266
  GFR-binding peptide
  MOD_RES (6), (40), (42): Xaa is C or S
  MOD_RES (20), (21), (22), (23), (24): Xaa is A or G
  MOD_RES (25), (26), (27), (28): Xaa is A or G or is absent

SEQ ID NO: 52295 - protein, 40 aa, Artificial Sequence; identical to SEQ ID NO: 19267
  GFR-binding peptide
  MOD_RES (2), (39): Xaa is C or S

SEQ ID NO: 52296 - protein, 38 aa, Artificial Sequence
  GFR-binding peptide
  MOD_RES (5), (6): Xaa is C or S
  MOD_RES (20), (21), (22), (23), (24): Xaa is A or G
  MOD_RES (25), (26), (27), (28): Xaa is A or G or is absent
IPKAXXVPTELRSVKMAKVXXXXXXXXXKEVQVDMVVE

SEQ ID NO: 52297 - protein, 42 aa, Artificial Sequence
  GFR-binding peptide
  MOD_RES (4), (41): Xaa is C or S
  MOD_RES (20), (21), (22), (23), (24): Xaa is A or G
  MOD_RES (25), (26), (27), (28): Xaa is A or G or is absent
NVQXRPTQVQLEPLTVLYYXXXXXXXXXEQLSNTLEDHLAXK

SEQ ID NO: 52298 - protein, 34 aa, Artificial Sequence
  GFR-binding peptide
  MOD_RES (1), (34): Xaa is C or S
  MOD_RES (15), (16), (17), (18), (19): Xaa is A or G
  MOD_RES (20), (21), (22), (23): Xaa is A or G or is absent
XVPQALRSVKIAKVXXXXXXXXXKEVQVMIVRSX

SEQ ID NO: 52299 - protein, 33 aa, Artificial Sequence
  GFR-binding peptide
  MOD_RES (2), (3): Xaa is C or S
AXXVPTELRPVQMRKIDEYDKVVKKATVEMVVE

SEQ ID NO: 52300 - protein, 35 aa, Artificial Sequence
  GFR-binding peptide
  MOD_RES (4), (5): Xaa is C or S
PKAXXVPTELRSVKMAKVDEYDKVVKEVQVEMVVE

SEQ ID NO: 52301 - protein, 33 aa, Artificial Sequence
  GFR-binding peptide
  MOD_RES (1), (2): Xaa is C or S
XXVPTELRSVKMAKVDENEKVVKEVQVDMVVEG

SEQ ID NO: 52302 - protein, 37 aa, Artificial Sequence; identical to SEQ ID NO: 14218
  GFR-binding peptide
  MOD_RES (5), (6): Xaa is C or S

SEQ ID NO: 52303 - protein, 40 aa, Artificial Sequence
  GFR-binding peptide
  MOD_RES (3), (4), (38), (40): Xaa is C or S
  MOD_RES (18), (19), (20), (21), (22): Xaa is A or G
  MOD_RES (23), (24), (25), (26): Xaa is A or G or is absent
KAXXVPTELRSVKMAKVXXXXXXXXXKEVQVEMVVEGXGX

SEQ ID NO: 52304 - protein, 36 aa, Artificial Sequence; identical to SEQ ID NO: 14219
  GFR-binding peptide
  MOD_RES (1), (34), (36): Xaa is C or S
  MOD_RES (15), (16), (17), (18), (19): Xaa is A or G
  MOD_RES (20), (21), (22), (23): Xaa is A or G or is absent

SEQ ID NO: 52305 - protein, 38 aa, Artificial Sequence; identical to SEQ ID NO: 14220
  GFR-binding peptide
  MOD_RES (6), (6): Xaa is C or S
  MOD_RES (20), (21), (22), (23), (24): Xaa is A or G
  MOD_RES (25), (26), (27), (28): Xaa is A or G or is absent

SEQ ID NO: 52306 - protein, 36 aa, Artificial Sequence; identical to SEQ ID NO: 14221
  GFR-binding peptide
  MOD_RES (1), (2), (36): Xaa is C or S
  MOD_RES (16), (17), (18), (19), (20): Xaa is A or G
  MOD_RES (21), (22), (23), (24): Xaa is A or G or is absent

SEQ ID NO: 52307 - protein, 33 aa, Artificial Sequence
  GFR-binding peptide
  MOD_RES (31), (33): Xaa is C or S
VSQDLSNITIQIMIGKTPKIIGEMSMIVKSXKX

SEQ ID NO: 52308 - protein, 36 aa, Artificial Sequence
  GFR-binding peptide
  MOD_RES (1), (34), (36): Xaa is C or S
  MOD_RES (15), (16), (17), (18), (19): Xaa is A or G
  MOD_RES (20), (21), (22), (23): Xaa is A or G or is absent
XVSQDLRSVKIAKVXXXXXXXXXKEVQVMIVKSXKX

SEQ ID NO: 52309 - protein, 40 aa, Artificial Sequence
  GFR-binding peptide
  MOD_RES (6), (7), (38), (40): Xaa is C or S
ASASPXXVSQDLRPVQIRKIIGKTPKIKKATVMIVKSXKX

SEQ ID NO: 52310 - protein, 34 aa, Artificial Sequence; identical to SEQ ID NO: 19273
  GFR-binding peptide
  MOD_RES (15), (16), (17), (18), (19): Xaa is A or G
  MOD_RES (20), (21), (22), (23): Xaa is A or G or is absent

SEQ ID NO: 52311 - protein, 41 aa, Artificial Sequence
  GFR-binding peptide
  MOD_RES (5), (6), (38), (40): Xaa is C or S
VPKPXXAPTQLRSVKVAKVDDSSNVIKEVQVNMVVRAXGXH

SEQ ID NO: 52312 - protein, 39 aa, Artificial Sequence
  GFR-binding peptide
  MOD_RES (37), (39): Xaa is C or S
RPTQVQLEPLPVVYYEIVRKKPIFEQLSNTLEDHLAXKX

SEQ ID NO: 52313 - protein, 39 aa, Artificial Sequence; identical to SEQ ID NO: 14227
  GFR-binding peptide
  MOD_RES (3), (4), (37), (39): Xaa is C or S
  MOD_RES (18), (19), (20), (21), (22): Xaa is A or G
  MOD_RES (23), (24), (25), (26): Xaa is A or G or is absent

SEQ ID NO: 52314 - protein, 37 aa, Artificial Sequence
  GFR-binding peptide
  MOD_RES (35), (37): Xaa is C or S
  MOD_RES (14), (15), (16), (17), (18): Xaa is A or G
  MOD_RES (19), (20), (21), (22): Xaa is A or G or is absent
SRVHHEPLTVLYYXXXXXXXXXEQLSNRLEEHLEXAX

SEQ ID NO: 52315 - protein, 34 aa, Artificial Sequence
  GFR-binding peptide
  MOD_RES (1), (2): Xaa is C or S
  MOD_RES (16), (17), (18), (19), (20): Xaa is A or G
  MOD_RES (21), (22), (23), (24): Xaa is A or G or is absent
XXAPTKLRPVQVRKIXXXXXXXXXKKATVNMVVR

SEQ ID NO: 52316 - protein, 35 aa, Artificial Sequence
  GFR-binding peptide
  MOD_RES (1), (33), (35): Xaa is C or S
XAPTKLSNITVQIMDDSSNVIIGEMSNMVVRSXGX

SEQ ID NO: 52317 - protein, 39 aa, Artificial Sequence
  GFR-binding peptide
  MOD_RES (7), (7): Xaa is C or S
  MOD_RES (21), (22), (23), (24), (25): Xaa is A or G
  MOD_RES (26), (27), (28), (29): Xaa is A or G or is absent
NDEGLEXVPTEEEPLTMLYYXXXXXXXXXEQLSNFLQHN

SEQ ID NO: 52318 - protein, 35 aa, Artificial Sequence
  GFR-binding peptide
  MOD_RES (1), (1): Xaa is C or S
XQPSRVHHEPLPVVYYEYVRKKPKLEQLSNRLEEH

SEQ ID NO: 52319 - protein, 39 aa, Artificial Sequence; identical to SEQ ID NO: 14232
  GFR-binding peptide
  MOD_RES (2), (3), (37), (39): Xaa is C or S
  MOD_RES (17), (18), (19), (20), (21): Xaa is A or G
  MOD_RES (22), (23), (24), (25): Xaa is A or G or is absent

SEQ ID NO: 52320 - protein, 38 aa, Artificial Sequence
  GFR-binding peptide
  MOD_RES (2), (3), (35), (37): Xaa is C or S
AXXVPTELSNITMQIMDENEKVVIGEMSDMVVEGXGXR

SEQ ID NO: 52321 - protein, 38 aa, Artificial Sequence; identical to SEQ ID NO: 14235
  GFR-binding peptide
  MOD_RES (2), (3), (37): Xaa is C or S
  MOD_RES (17), (18), (19), (20), (21): Xaa is A or G
  MOD_RES (22), (23), (24), (25): Xaa is A or G or is absent

SEQ ID NO: 52322 - protein, 39 aa, Artificial Sequence
  GFR-binding peptide
  MOD_RES (3), (3): Xaa is C or S
  MOD_RES (19), (20), (21), (22), (23): Xaa is A or G
  MOD_RES (24), (25), (26), (27): Xaa is A or G or is absent
VQXRPTQVQLEPLPVVYYXXXXXXXXXEQLSNTLEDHLA

SEQ ID NO: 52323 - protein, 38 aa, Artificial Sequence
  GFR-binding peptide
  MOD_RES (4), (5), (37): Xaa is C or S
PKAXXVPTELRPVQMRKIDEYDKVVKKATVEMVVEGXG

SEQ ID NO: 52324 - protein, 39 aa, Artificial Sequence; identical to SEQ ID NO: 14237
  GFR-binding peptide
  MOD_RES (3), (4), (38): Xaa is C or S
  MOD_RES (18), (19), (20), (21), (22): Xaa is A or G
  MOD_RES (23), (24), (25), (26): Xaa is A or G or is absent

SEQ ID NO: 52325 - protein, 42 aa, Artificial Sequence
  GFR-binding peptide
  MOD_RES (6), (7), (39), (41): Xaa is C or S
TVPKPXXAPTQLSNITVQIMDDSSNVIIGEMSNMVVRAXGXH

SEQ ID NO: 52326 - protein, 38 aa, Artificial Sequence
  GFR-binding peptide
  MOD_RES (1), (35), (37): Xaa is C or S
  MOD_RES (15), (16), (17), (18), (19): Xaa is A or G
  MOD_RES (20), (21), (22), (23): Xaa is A or G or is absent
XAPTQLRPVQVRKIXXXXXXXXXKKATVNMVVRAXGXH

SEQ ID NO: 52327 - protein, 39 aa, Artificial Sequence; identical to SEQ ID NO: 14239
  GFR-binding peptide
  MOD_RES (5), (6), (37), (39): Xaa is C or S

SEQ ID NO: 52328 - protein, 34 aa, Artificial Sequence; identical to SEQ ID NO: 14241
  GFR-binding peptide
  MOD_RES (1), (2): Xaa is C or S
  MOD_RES (16), (17), (18), (19), (20): Xaa is A or G
  MOD_RES (21), (22), (23), (24): Xaa is A or G or is absent

SEQ ID NO: 52329 - protein, 33 aa, Artificial Sequence; identical to SEQ ID NO: 14243
  GFR-binding peptide
  MOD_RES (2), (3): Xaa is C or S

SEQ ID NO: 52330 - protein, 36 aa, Artificial Sequence
  GFR-binding peptide
  MOD_RES (1), (33), (35): Xaa is C or S
XAPTQLSNITVQIMDDSSNVIIGEMSNMVVRAXGXH

SEQ ID NO: 52331 - protein, 37 aa, Artificial Sequence
  GFR-binding peptide
  MOD_RES (2), (3), (35), (37): Xaa is C or S
PXXAPTQLSNITVQIMDDSSNVIIGEMSNMVVRAXGX

SEQ ID NO: 52332 - protein, 38 aa, Artificial Sequence; identical to SEQ ID NO: 19280
  GFR-binding peptide
  MOD_RES (35), (37): Xaa is C or S
  MOD_RES (14), (15), (16), (17), (18): Xaa is A or G
  MOD_RES (19), (20), (21), (22): Xaa is A or G or is absent

SEQ ID NO: 52333 - protein, 40 aa, Artificial Sequence
  GFR-binding peptide
  MOD_RES (6), (7): Xaa is C or S
  MOD_RES (21), (22), (23), (24), (25): Xaa is A or G
  MOD_RES (26), (27), (28), (29): Xaa is A or G or is absent
YVPKPXXAPTKLRPVQVRKIXXXXXXXXXKKATVNMVVRS

SEQ ID NO: 52334 - protein, 34 aa, Artificial Sequence; identical to SEQ ID NO: 14249
  GFR-binding peptide
  MOD_RES (1), (1): Xaa is C or S
  MOD_RES (15), (16), (17), (18), (19): Xaa is A or G
  MOD_RES (20), (21), (22), (23): Xaa is A or G or is absent

SEQ ID NO: 52335 - protein, 38 aa, Artificial Sequence; identical to SEQ ID NO: 14251
  GFR-binding peptide
  MOD_RES (1), (2), (36), (38): Xaa is C or S
  MOD_RES (16), (17), (18), (19), (20): Xaa is A or G
  MOD_RES (21), (22), (23), (24): Xaa is A or G or is absent

SEQ ID NO: 52336 - protein, 34 aa, Artificial Sequence
  GFR-binding peptide
  MOD_RES (15), (16), (17), (18), (19): Xaa is A or G
  MOD_RES (20), (21), (22), (23): Xaa is A or G or is absent
PTQVQLEPLTVLYYXXXXXXXXXEQLSNTLEDHL

SEQ ID NO: 52337 - protein, 38 aa, Artificial Sequence
  GFR-binding peptide
  MOD_RES (1), (35), (37): Xaa is C or S
  MOD_RES (15), (16), (17), (18), (19): Xaa is A or G
  MOD_RES (20), (21), (22), (23): Xaa is A or G or is absent
XAPTQLRSVKVAKVXXXXXXXXXKEVQVNMVVRAXGXH

SEQ ID NO: 52338 - protein, 36 aa, Artificial Sequence
  GFR-binding peptide
  MOD_RES (1), (1): Xaa is C or S
XQPSRVHHEPLTVLYYEYVRKKPKLEQLSNRLEEHL

SEQ ID NO: 52339 - protein, 40 aa, Artificial Sequence; identical to SEQ ID NO: 14252
  GFR-binding peptide
  MOD_RES (3), (4), (37), (39): Xaa is C or S
  MOD_RES (18), (19), (20), (21), (22): Xaa is A or G
  MOD_RES (23), (24), (25), (26): Xaa is A or G or is absent

SEQ ID NO: 52340 - protein, 39 aa, Artificial Sequence; identical to SEQ ID NO: 19283
  GFR-binding peptide
  MOD_RES (36), (38): Xaa is C or S

SEQ ID NO: 52341 - protein, 32 aa, Artificial Sequence; identical to SEQ ID NO: 14253
  GFR-binding peptide
  MOD_RES (1), (2): Xaa is C or S

SEQ ID NO: 52342 - protein, 40 aa, Artificial Sequence; identical to SEQ ID NO: 19285
  GFR-binding peptide
  MOD_RES (37), (39): Xaa is C or S
  MOD_RES (16), (17), (18), (19), (20): Xaa is A or G
  MOD_RES (21), (22), (23), (24): Xaa is A or G or is absent

SEQ ID NO: 52343 - protein, 35 aa, Artificial Sequence
  GFR-binding peptide
  MOD_RES (33), (35): Xaa is C or S
  MOD_RES (14), (15), (16), (17), (18): Xaa is A or G
  MOD_RES (19), (20), (21), (22): Xaa is A or G or is absent
VPQDLSNITIQIMXXXXXXXXXIGEMSMVVKSXKX

SEQ ID NO: 52344 - protein, 34 aa, Artificial Sequence; identical to SEQ ID NO: 19286
  GFR-binding peptide
  MOD_RES (34), (34): Xaa is C or S
  MOD_RES (14), (15), (16), (17), (18): Xaa is A or G
  MOD_RES (19), (20), (21), (22): Xaa is A or G or is absent

SEQ ID NO: 52345 - protein, 35 aa, Artificial Sequence
  GFR-binding peptide
  MOD_RES (35), (35): Xaa is C or S
  MOD_RES (14), (15), (16), (17), (18): Xaa is A or G
  MOD_RES (19), (20), (21), (22): Xaa is A or G or is absent
SRVHHEPLPVVYYXXXXXXXXXEQLSNRLEEHLEX

SEQ ID NO: 52346 - protein, 37 aa, Artificial Sequence; identical to SEQ ID NO: 19287
  GFR-binding peptide
  MOD_RES (2), (2): Xaa is C or S
  MOD_RES (18), (19), (20), (21), (22): Xaa is A or G
  MOD_RES (23), (24), (25), (26): Xaa is A or G or is absent

SEQ ID NO: 52347 - protein, 37 aa, Artificial Sequence
  GFR-binding peptide
  MOD_RES (1), (35), (37): Xaa is C or S
  MOD_RES (15), (16), (17), (18), (19): Xaa is A or G
  MOD_RES (20), (21), (22), (23): Xaa is A or G or is absent
XAPTQLRPVQVRKIXXXXXXXXXKKATVNMVVRAXGX

SEQ ID NO: 52348 - protein, 41 aa, Artificial Sequence
  GFR-binding peptide
  MOD_RES (5), (6), (40): Xaa is C or S
  MOD_RES (20), (21), (22), (23), (24): Xaa is A or G
  MOD_RES (25), (26), (27), (28): Xaa is A or G or is absent
IPKAXXVPTELRSVKMAKVXXXXXXXXXKEVQVEMVVEGXG

SEQ ID NO: 52349 - protein, 38 aa, Artificial Sequence
  GFR-binding peptide
  MOD_RES (35), (37): Xaa is C or S
TQVQLEPLPVVYYEIVRKKPIFEQLSNTLEDHLAXKXE

SEQ ID NO: 52350 - protein, 38 aa, Artificial Sequence
  GFR-binding peptide
  MOD_RES (4), (5): Xaa is C or S
  MOD_RES (19), (20), (21), (22), (23): Xaa is A or G
  MOD_RES (24), (25), (26), (27): Xaa is A or G or is absent
PKAXXVPTELRPVQMRKIXXXXXXXXXKKATVDMVVEG

SEQ ID NO: 52351 - protein, 38 aa, Artificial Sequence
  GFR-binding peptide
  MOD_RES (5), (6), (37): Xaa is C or S
SAAPXXVPQALRSVKIAKVVGRKPKVKEVQVMIVRSXK

SEQ ID NO: 52352 - protein, 41 aa, Artificial Sequence; identical to SEQ ID NO: 14260
  GFR-binding peptide
  MOD_RES (6), (7), (41): Xaa is C or S
  MOD_RES (21), (22), (23), (24), (25): Xaa is A or G
  MOD_RES (26), (27), (28), (29): Xaa is A or G or is absent

SEQ ID NO: 52353 - protein, 31 aa, Artificial Sequence
  GFR-binding peptide
  MOD_RES (1), (1): Xaa is C or S
XVPTELRPVQMRKIDEYDKVVKKATVEMVVE

SEQ ID NO: 52354 - protein, 35 aa, Artificial Sequence
  GFR-binding peptide
  MOD_RES (2), (3): Xaa is C or S
  MOD_RES (17), (18), (19), (20), (21): Xaa is A or G
  MOD_RES (22), (23), (24), (25): Xaa is A or G or is absent
PXXVPQALRPVQIRKIXXXXXXXXXKKATVMIVRS

SEQ ID NO: 52355 - protein, 37 aa, Artificial Sequence
  GFR-binding peptide
  MOD_RES (1), (2), (34), (36): Xaa is C or S
XXVPTELSNITMQIMDENEKVVIGEMSDMVVEGXGXR

SEQ ID NO: 52356 - protein, 32 aa, Artificial Sequence
  GFR-binding peptide
  MOD_RES (1), (1): Xaa is C or S
XAPTQLRSVKVAKVDDSSNVIKEVQVNMVVRA

SEQ ID NO: 52357 - protein, 32 aa, Artificial Sequence; identical to SEQ ID NO: 14264
  GFR-binding peptide
  MOD_RES (1), (32): Xaa is C or S

SEQ ID NO: 52358 - protein, 37 aa, Artificial Sequence; identical to SEQ ID NO: 39626
  GFR-binding peptide
  MOD_RES (2), (3), (36): Xaa is C or S
  MOD_RES (17), (18), (19), (20), (21): Xaa is A or G
  MOD_RES (22), (23), (24), (25): Xaa is A or G or is absent

SEQ ID NO: 52359 - protein, 42 aa, Artificial Sequence; identical to SEQ ID NO: 19290
  GFR-binding peptide
  MOD_RES (4), (41): Xaa is C or S
  MOD_RES (20), (21), (22), (23), (24): Xaa is A or G
  MOD_RES (25), (26), (27), (28): Xaa is A or G or is absent

SEQ ID NO: 52360 - protein, 39 aa, Artificial Sequence
  GFR-binding peptide
  MOD_RES (1), (38): Xaa is C or S
  MOD_RES (17), (18), (19), (20), (21): Xaa is A or G
  MOD_RES (22), (23), (24), (25): Xaa is A or G or is absent
XRPTQVQLEPLTVLYYXXXXXXXXXEQLSNTLEDHLAXK

SEQ ID NO: 52361 - protein, 42 aa, Artificial Sequence; identical to SEQ ID NO: 14265
  GFR-binding peptide
  MOD_RES (4), (5), (39), (41): Xaa is C or S
  MOD_RES (19), (20), (21), (22), (23): Xaa is A or G
  MOD_RES (24), (25), (26), (27): Xaa is A or G or is absent

SEQ ID NO: 52362 - protein, 38 aa, Artificial Sequence
  GFR-binding peptide
  MOD_RES (37), (37): Xaa is C or S
  MOD_RES (16), (17), (18), (19), (20): Xaa is A or G
  MOD_RES (21), (22), (23), (24): Xaa is A or G or is absent
QPSRVHHEPLPVVYYXXXXXXXXXEQLSNRLEEHLEXA

SEQ ID NO: 52363 - protein, 42 aa, Artificial Sequence
  GFR-binding peptide
  MOD_RES (7), (41): Xaa is C or S
NDEGLEXVPTEEEPLTMLYYRIKPHQGQHEQLSNFLQHNKXE

SEQ ID NO: 52364 - protein, 32 aa, Artificial Sequence; identical to SEQ ID NO: 14269
  GFR-binding peptide
  MOD_RES (32), (32): Xaa is C or S

SEQ ID NO: 52365 - protein, 41 aa, Artificial Sequence
  GFR-binding peptide
  MOD_RES (6), (7), (38), (40): Xaa is C or S
ASASPXXVPQDLSNITIQIMVGRTPKVIGEMSMVVKSXKXS

SEQ ID NO: 52366 - protein, 35 aa, Artificial Sequence; identical to SEQ ID NO: 14271
  GFR-binding peptide
  MOD_RES (2), (34): Xaa is C or S

SEQ ID NO: 52367 - protein, 35 aa, Artificial Sequence
  GFR-binding peptide
  MOD_RES (4), (4): Xaa is C or S
KPTXAPTKLRPVQVRKIDDSSNVIKKATVNMVVRS

SEQ ID NO: 52368 - protein, 38 aa, Artificial Sequence
  GFR-binding peptide
  MOD_RES (2), (3), (35), (37): Xaa is C or S
PXXAPTQLRPVQVRKIDDSSNVIKKATVNMVVRAXGXH

SEQ ID NO: 52369 - protein, 32 aa, Artificial Sequence; identical to SEQ ID NO: 19293
  GFR-binding peptide
  MOD_RES (14), (15), (16), (17), (18): Xaa is A or G
  MOD_RES (19), (20), (21), (22): Xaa is A or G or is absent

SEQ ID NO: 52370 - protein, 36 aa, Artificial Sequence; identical to SEQ ID NO: 19295
  GFR-binding peptide
  MOD_RES (4), (4): Xaa is C or S
  MOD_RES (18), (19), (20), (21), (22): Xaa is A or G
  MOD_RES (23), (24), (25), (26): Xaa is A or G or is absent

SEQ ID NO: 52371 - protein, 35 aa, Artificial Sequence; identical to SEQ ID NO: 14274
  GFR-binding peptide
  MOD_RES (32), (34): Xaa is C or S

SEQ ID NO: 52372 - protein, 37 aa, Artificial Sequence; identical to SEQ ID NO: 14275
  GFR-binding peptide
  MOD_RES (3), (4): Xaa is C or S
  MOD_RES (18), (19), (20), (21), (22): Xaa is A or G
  MOD_RES (23), (24), (25), (26): Xaa is A or G or is absent

SEQ ID NO: 52373 - protein, 35 aa, Artificial Sequence
  GFR-binding peptide
  MOD_RES (1), (32), (34): Xaa is C or S
XVPQALRSVKIAKVVGRKPKVKEVQVMIVRSXKXS

SEQ ID NO: 52374 - protein, 41 aa, Artificial Sequence; identical to SEQ ID NO: 14276
  GFR-binding peptide
  MOD_RES (5), (6), (40): Xaa is C or S
  MOD_RES (20), (21), (22), (23), (24): Xaa is A or G
  MOD_RES (25), (26), (27), (28): Xaa is A or G or is absent

SEQ ID NO: 52375 - protein, 40 aa, Artificial Sequence; identical to SEQ ID NO: 14277
  GFR-binding peptide
  MOD_RES (4), (5), (39): Xaa is C or S
  MOD_RES (19), (20), (21), (22), (23): Xaa is A or G
  MOD_RES (24), (25), (26), (27): Xaa is A or G or is absent

SEQ ID NO: 52376 - protein, 40 aa, Artificial Sequence
  GFR-binding peptide
  MOD_RES (5), (39): Xaa is C or S
EGLEXVPTEEEPLTMLYYRIKPHQGQHEQLSNFLQHNKXE

SEQ ID NO: 52377 - protein, 37 aa, Artificial Sequence; identical to SEQ ID NO: 14280
  GFR-binding peptide
  MOD_RES (3), (4), (37): Xaa is C or S
  MOD_RES (18), (19), (20), (21), (22): Xaa is A or G
  MOD_RES (23), (24), (25), (26): Xaa is A or G or is absent

SEQ ID NO: 52378 - protein, 40 aa, Artificial Sequence; identical to SEQ ID NO: 14281
  GFR-binding peptide
  MOD_RES (4), (5), (38), (40): Xaa is C or S
  MOD_RES (19), (20), (21), (22), (23): Xaa is A or G
  MOD_RES (24), (25), (26), (27): Xaa is A or G or is absent

SEQ ID NO: 52379 - protein, 35 aa, Artificial Sequence
  GFR-binding peptide
  MOD_RES (33), (35): Xaa is C or S
  MOD_RES (14), (15), (16), (17), (18): Xaa is A or G
  MOD_RES (19), (20), (21), (22): Xaa is A or G or is absent
VPQALSNITIQIMXXXXXXXXXIGEMSMIVRSXKX

SEQ ID NO: 52380 - protein, 32 aa, Artificial Sequence
  GFR-binding peptide
  MOD_RES (1), (32): Xaa is C or S
XVPQDLSNITIQIMVGRTPKVIGEMSMVVKSX

SEQ ID NO: 52381 - protein, 41 aa, Artificial Sequence; identical to SEQ ID NO: 19302
  GFR-binding peptide
  MOD_RES (4), (41): Xaa is C or S
  MOD_RES (20), (21), (22), (23), (24): Xaa is A or G
  MOD_RES (25), (26), (27), (28): Xaa is A or G or is absent

SEQ ID NO: 52382 - protein, 38 aa, Artificial Sequence; identical to SEQ ID NO: 19303
  GFR-binding peptide
  MOD_RES (1), (38): Xaa is C or S
  MOD_RES (17), (18), (19), (20), (21): Xaa is A or G
  MOD_RES (22), (23), (24), (25): Xaa is A or G or is absent

SEQ ID NO: 52383 - protein, 35 aa, Artificial Sequence; identical to SEQ ID NO: 14282
  GFR-binding peptide
  MOD_RES (33), (35): Xaa is C or S
  MOD_RES (14), (15), (16), (17), (18): Xaa is A or G
  MOD_RES (19), (20), (21), (22): Xaa is A or G or is absent

SEQ ID NO: 52384 - protein, 37 aa, Artificial Sequence; identical to SEQ ID NO: 14283
  GFR-binding peptide
  MOD_RES (5), (6), (37): Xaa is C or S

SEQ ID NO: 52385 - protein, 35 aa, Artificial Sequence; identical to SEQ ID NO: 14284
  GFR-binding peptide
  MOD_RES (1), (2), (33), (35): Xaa is C or S

SEQ ID NO: 52386 - protein, 37 aa, Artificial Sequence
  GFR-binding peptide
  MOD_RES (1), (35), (37): Xaa is C or S
  MOD_RES (15), (16), (17), (18), (19): Xaa is A or G
  MOD_RES (20), (21), (22), (23): Xaa is A or G or is absent
XVPTELSNITMQIMXXXXXXXXXIGEMSEMVVEGXGX

SEQ ID NO: 52387 - protein, 35 aa, Artificial Sequence; identical to SEQ ID NO: 14285
  GFR-binding peptide
  MOD_RES (1), (2): Xaa is C or S
  MOD_RES (16), (17), (18), (19), (20): Xaa is A or G
  MOD_RES (21), (22), (23), (24): Xaa is A or G or is absent

SEQ ID NO: 52388 - protein, 38 aa, Artificial Sequence
  GFR-binding peptide
  MOD_RES (4), (5): Xaa is C or S
  MOD_RES (19), (20), (21), (22), (23): Xaa is A or G
  MOD_RES (24), (25), (26), (27): Xaa is A or G or is absent
PKPXXAPTQLSNITVQIMXXXXXXXXXIGEMSNMVVRA

SEQ ID NO: 52389 - protein, 38 aa, Artificial Sequence
  GFR-binding peptide
  MOD_RES (3), (4), (38): Xaa is C or S
  MOD_RES (18), (19), (20), (21), (22): Xaa is A or G
  MOD_RES (23), (24), (25), (26): Xaa is A or G or is absent
KAXXVPTELSNITMQIMXXXXXXXXXIGEMSEMVVEGX

SEQ ID NO: 52390 - protein, 36 aa, Artificial Sequence; identical to SEQ ID NO: 14286
  GFR-binding peptide
  MOD_RES (1), (33), (35): Xaa is C or S

SEQ ID NO: 52391 - protein, 38 aa, Artificial Sequence
  GFR-binding peptide
  MOD_RES (6), (7): Xaa is C or S
KIPKAXXVPTELSNITMQIMDENEKVVIGEMSDMVVEG

SEQ ID NO: 52392 - protein, 42 aa, Artificial Sequence; identical to SEQ ID NO: 14287
  GFR-binding peptide
  MOD_RES (6), (7), (41): Xaa is C or S
  MOD_RES (21), (22), (23), (24), (25): Xaa is A or G
  MOD_RES (26), (27), (28), (29): Xaa is A or G or is absent

SEQ ID NO: 52393 - protein, 42 aa, Artificial Sequence
  GFR-binding peptide
  MOD_RES (7), (41): Xaa is C or S
  MOD_RES (21), (22), (23), (24), (25): Xaa is A or G
  MOD_RES (26), (27), (28), (29): Xaa is A or G or is absent
NDEGLEXVPTEEEPLTMLYYXXXXXXXXXEQLSNFLQHNKXE

SEQ ID NO: 52394 - protein, 34 aa, Artificial Sequence; identical to SEQ ID NO: 14290
  GFR-binding peptide
  MOD_RES (1), (2): Xaa is C or S
  MOD_RES (16), (17), (18), (19), (20): Xaa is A or G
  MOD_RES (21), (22), (23), (24): Xaa is A or G or is absent

SEQ ID NO: 52395 - protein, 38 aa, Artificial Sequence
  GFR-binding peptide
  MOD_RES (4), (5), (38): Xaa is C or S
  MOD_RES (19), (20), (21), (22), (23): Xaa is A or G
  MOD_RES (24), (25), (26), (27): Xaa is A or G or is absent
AAPXXVPQALSNITIQIMXXXXXXXXXIGEMSMIVRSX

SEQ ID NO: 52396 - protein, 37 aa, Artificial Sequence
  GFR-binding peptide
  MOD_RES (37), (37): Xaa is C or S
  MOD_RES (16), (17), (18), (19), (20): Xaa is A or G
  MOD_RES (21), (22), (23), (24): Xaa is A or G or is absent
RPTQVQLEPLTVLYYXXXXXXXXXEQLSNTLEDHLAX

SEQ ID NO: 52397 - protein, 33 aa, Artificial Sequence; identical to SEQ ID NO: 19308
  GFR-binding peptide

SEQ ID NO: 52398 - protein, 37 aa, Artificial Sequence
  GFR-binding peptide
  MOD_RES (4), (5): Xaa is C or S
  MOD_RES (19), (20), (21), (22), (23): Xaa is A or G
  MOD_RES (24), (25), (26), (27): Xaa is A or G or is absent
PKAXXVPTELRSVKMAKVXXXXXXXXXKEVQVEMVVE

SEQ ID NO: 52399 - protein, 39 aa, Artificial Sequence
  GFR-binding peptide
  MOD_RES (7), (7): Xaa is C or S
NDEGLEXVPTEEEPLPMVYYRIKPHQGQHEQLSNFLQHN

SEQ ID NO: 52400 - protein, 37 aa, Artificial Sequence
  GFR-binding peptide
  MOD_RES (1), (35), (37): Xaa is C or S
XVPTEEEPLTMLYYRIKPHQGQHEQLSNFLQHNKXEX

SEQ ID NO: 52401 - protein, 41 aa, Artificial Sequence; identical to SEQ ID NO: 19311
  GFR-binding peptide
  MOD_RES (5), (5): Xaa is C or S
  MOD_RES (21), (22), (23), (24), (25): Xaa is A or G
  MOD_RES (26), (27), (28), (29): Xaa is A or G or is absent

SEQ ID NO: 52402 - protein, 36 aa, Artificial Sequence; identical to SEQ ID NO: 19313
  GFR-binding peptide
  MOD_RES (1), (35): Xaa is C or S

SEQ ID NO: 52403 - protein, 35 aa, Artificial Sequence; identical to SEQ ID NO: 19314
  GFR-binding peptide

SEQ ID NO: 52404 - protein, 40 aa, Artificial Sequence
  GFR-binding peptide
  MOD_RES (5), (6), (37), (39): Xaa is C or S
SASPXXVSQDLSNITIQIMIGKTPKIIGEMSMIVKSXKXS

SEQ ID NO: 52405 - protein, 33 aa, Artificial Sequence
  GFR-binding peptide
  MOD_RES (2), (3): Xaa is C or S
PXXAPTQLRSVKVAKVDDSSNVIKEVQVNMVVR

SEQ ID NO: 52406 - protein, 36 aa, Artificial Sequence; identical to SEQ ID NO: 14299
  GFR-binding peptide
  MOD_RES (3), (3): Xaa is C or S
  MOD_RES (17), (18), (19), (20), (21): Xaa is A or G
  MOD_RES (22), (23), (24), (25): Xaa is A or G or is absent

SEQ ID NO: 52407 - protein, 39 aa, Artificial Sequence
  GFR-binding peptide
  MOD_RES (2), (3), (37), (39): Xaa is C or S
  MOD_RES (17), (18), (19), (20), (21): Xaa is A or G
  MOD_RES (22), (23), (24), (25): Xaa is A or G or is absent
PXXAPTQLRSVKVAKVXXXXXXXXXKEVQVNMVVRAXGX

SEQ ID NO: 52408 - protein, 36 aa, Artificial Sequence
  GFR-binding peptide
  MOD_RES (4), (4): Xaa is C or S
  MOD_RES (18), (19), (20), (21), (22): Xaa is A or G
  MOD_RES (23), (24), (25), (26): Xaa is A or G or is absent
GLEXVPTEEEPLPMVYYXXXXXXXXXEQLSNFLQHN

SEQ ID NO: 52409 - protein, 37 aa, Artificial Sequence
  GFR-binding peptide
  MOD_RES (1), (35), (37): Xaa is C or S
  MOD_RES (15), (16), (17), (18), (19): Xaa is A or G
  MOD_RES (20), (21), (22), (23): Xaa is A or G or is absent
XAPTQLSNITVQIMXXXXXXXXXIGEMSNMVVRAXGX

SEQ ID NO: 52410 - protein, 36 aa, Artificial Sequence; identical to SEQ ID NO: 19319
  GFR-binding peptide
  MOD_RES (36), (36): Xaa is C or S
  MOD_RES (15), (16), (17), (18), (19): Xaa is A or G
  MOD_RES (20), (21), (22), (23): Xaa is A or G or is absent

SEQ ID NO: 52411 - protein, 41 aa, Artificial Sequence
  GFR-binding peptide
  MOD_RES (4), (5), (38), (40): Xaa is C or S
  MOD_RES (19), (20), (21), (22), (23): Xaa is A or G
  MOD_RES (24), (25), (26), (27): Xaa is A or G or is absent
ASPXXVPQDLRSVKIAKVXXXXXXXXXKEVQVMVVKSXKXS

SEQ ID NO: 52412 - protein, 39 aa, Artificial Sequence; identical to SEQ ID NO: 14302
  GFR-binding peptide
  MOD_RES (7), (7): Xaa is C or S
  MOD_RES (21), (22), (23), (24), (25): Xaa is A or G
  MOD_RES (26), (27), (28), (29): Xaa is A or G or is absent

SEQ ID NO: 52413 - protein, 34 aa, Artificial Sequence; identical to SEQ ID NO: 19321
  GFR-binding peptide

SEQ ID NO: 52414 - protein, 32 aa, Artificial Sequence; identical to SEQ ID NO: 14303
  GFR-binding peptide
  MOD_RES (1), (1): Xaa is C or S

SEQ ID NO: 52415 - protein, 41 aa, Artificial Sequence; identical to SEQ ID NO: 14306
  GFR-binding peptide
  MOD_RES (5), (6), (38), (40): Xaa is C or S

SEQ ID NO: 52416 - protein, 39 aa, Artificial Sequence; identical to SEQ ID NO: 14307
  GFR-binding peptide
  MOD_RES (1), (2), (36), (38): Xaa is C or S
  MOD_RES (16), (17), (18), (19), (20): Xaa is A or G
  MOD_RES (21), (22), (23), (24): Xaa is A or G or is absent

SEQ ID NO: 52417 - protein, 42 aa, Artificial Sequence; identical to SEQ ID NO: 14308
  GFR-binding peptide
  MOD_RES (4), (5), (39), (41): Xaa is C or S
  MOD_RES (19), (20), (21), (22), (23): Xaa is A or G
  MOD_RES (24), (25), (26), (27): Xaa is A or G or is absent

SEQ ID NO: 52418 - protein, 32 aa, Artificial Sequence
  GFR-binding peptide
  MOD_RES (1), (2): Xaa is C or S
XXVPQDLSNITIQIMVGRTPKVIGEMSMVVKS

SEQ ID NO: 52419 - protein, 43 aa, Artificial Sequence
  GFR-binding peptide
  MOD_RES (6), (40), (42): Xaa is C or S
DEGLEXVPTEEEPLPMVYYRIKPHQGQHEQLSNFLQHNKXEXR

SEQ ID NO: 52420 - protein, 33 aa, Artificial Sequence
  GFR-binding peptide
  MOD_RES (3), (3): Xaa is C or S
PTXAPTKLRPVQVRKIDDSSNVIKKATVNMVVR

SEQ ID NO: 52421 - protein, 35 aa, Artificial Sequence
  GFR-binding peptide
  MOD_RES (5), (5): Xaa is C or S
TKPTXAPTKLSNITVQIMDDSSNVIIGEMSNMVVR

SEQ ID NO: 52422 - protein, 37 aa, Artificial Sequence
  GFR-binding peptide
  MOD_RES (5), (5): Xaa is C or S
  MOD_RES (19), (20), (21), (22), (23): Xaa is A or G
  MOD_RES (24), (25), (26), (27): Xaa is A or G or is absent
EGLEXVPTEEEPLPMVYYXXXXXXXXXEQLSNFLQHN

SEQ ID NO: 52423 - protein, 43 aa, Artificial Sequence; identical to SEQ ID NO: 14311
  GFR-binding peptide
  MOD_RES (5), (6), (40), (42): Xaa is C or S
  MOD_RES (20), (21), (22), (23), (24): Xaa is A or G
  MOD_RES (25), (26), (27), (28): Xaa is A or G or is absent

SEQ ID NO: 52424 - protein, 37 aa, Artificial Sequence
  GFR-binding peptide
  MOD_RES (1), (2), (35), (37): Xaa is C or S
  MOD_RES (16), (17), (18), (19), (20): Xaa is A or G
  MOD_RES (21), (22), (23), (24): Xaa is A or G or is absent
XXVSQDLRPVQIRKIXXXXXXXXXKKATVMIVKSXKX

SEQ ID NO: 52425 - protein, 42 aa, Artificial Sequence; identical to SEQ ID NO: 19325
  GFR-binding peptide
  MOD_RES (3), (40), (42): Xaa is C or S

SEQ ID NO: 52426 - protein, 44 aa, Artificial Sequence
  GFR-binding peptide
  MOD_RES (6), (7), (41), (43): Xaa is C or S
  MOD_RES (21), (22), (23), (24), (25): Xaa is A or G
  MOD_RES (26), (27), (28), (29): Xaa is A or G or is absent
SIPKAXXVPTELRSVKMAKVXXXXXXXXXKEVQVEMVVEGXGXR

SEQ ID NO: 52427 - protein, 36 aa, Artificial Sequence
  GFR-binding peptide
  MOD_RES (2), (3), (35): Xaa is C or S
AXXVPTELRPVQMRKIDENEKVVKKATVDMVVEGXG

SEQ ID NO: 52428 - protein, 41 aa, Artificial Sequence; identical to SEQ ID NO: 19329
  GFR-binding peptide
  MOD_RES (5), (5): Xaa is C or S

SEQ ID NO: 52429 - protein, 41 aa, Artificial Sequence; identical to SEQ ID NO: 14317
  GFR-binding peptide
  MOD_RES (4), (5), (39), (41): Xaa is C or S
  MOD_RES (19), (20), (21), (22), (23): Xaa is A or G
  MOD_RES (24), (25), (26), (27): Xaa is A or G or is absent

SEQ ID NO: 52430 - protein, 35 aa, Artificial Sequence
  GFR-binding peptide
  MOD_RES (1), (2), (35): Xaa is C or S
  MOD_RES (16), (17), (18), (19), (20): Xaa is A or G
  MOD_RES (21), (22), (23), (24): Xaa is A or G or is absent
XXVPQALRPVQIRKIXXXXXXXXXKKATVMIVRSX

SEQ ID NO: 52431 - protein, 41 aa, Artificial Sequence
  GFR-binding peptide
  MOD_RES (6), (7), (41): Xaa is C or S
  MOD_RES (21), (22), (23), (24), (25): Xaa is A or G
  MOD_RES (26), (27), (28), (29): Xaa is A or G or is absent
SIPKAXXVPTELRPVQMRKIXXXXXXXXXKKATVEMVVEGX

SEQ ID NO: 52432 - protein, 41 aa, Artificial Sequence
  GFR-binding peptide
  MOD_RES (2), (39), (41): Xaa is C or S
  MOD_RES (18), (19), (20), (21), (22): Xaa is A or G
  MOD_RES (23), (24), (25), (26): Xaa is A or G or is absent
QXRPTQVQLEPLPVVYYXXXXXXXXXEQLSNTLEDHLAXKX

SEQ ID NO: 52433 - protein, 34 aa, Artificial Sequence
  GFR-binding peptide
  MOD_RES (2), (2): Xaa is C or S
  MOD_RES (16), (17), (18), (19), (20): Xaa is A or G
  MOD_RES (21), (22), (23), (24): Xaa is A or G or is absent
TXAPTKLRSVKVAKVXXXXXXXXXKEVQVNMVVR

SEQ ID NO: 52434 - protein, 38 aa, Artificial Sequence
  GFR-binding peptide
  MOD_RES (2), (3), (35), (37): Xaa is C or S
AXXVPTELRSVKMAKVDENEKVVKEVQVDMVVEGXGXR

SEQ ID NO: 52435 - protein, 36 aa, Artificial Sequence
  GFR-binding peptide
  MOD_RES (2), (3), (36): Xaa is C or S
  MOD_RES (17), (18), (19), (20), (21): Xaa is A or G
  MOD_RES (22), (23), (24), (25): Xaa is A or G or is absent
PXXVSQDLSNITIQIMXXXXXXXXXIGEMSMIVKSX

SEQ ID NO: 52436 - protein, 40 aa, Artificial Sequence
  GFR-binding peptide
  MOD_RES (5), (6), (38), (40): Xaa is C or S
VPKPXXAPTQLRSVKVAKVDDSSNVIKEVQVNMVVRAXGX

SEQ ID NO: 52437 - protein, 37 aa, Artificial Sequence
  GFR-binding peptide
  MOD_RES (3), (3): Xaa is C or S
  MOD_RES (19), (20), (21), (22), (23): Xaa is A or G
  MOD_RES (24), (25), (26), (27): Xaa is A or G or is absent
VKXQPSRVHHEPLPVVYYXXXXXXXXXEQLSNRLEEH

SEQ ID NO: 52438 - protein, 39 aa, Artificial Sequence; identical to SEQ ID NO: 19334
  GFR-binding peptide
  MOD_RES (37), (39): Xaa is C or S
  MOD_RES (16), (17), (18), (19), (20): Xaa is A or G
  MOD_RES (21), (22), (23), (24): Xaa is A or G or is absent

SEQ ID NO: 52439 - protein, 35 aa, Artificial Sequence; identical to SEQ ID NO: 14320
  GFR-binding peptide
  MOD_RES (5), (5): Xaa is C or S

SEQ ID NO: 52440 - protein, 36 aa, Artificial Sequence
  GFR-binding peptide
  MOD_RES (2), (3), (35): Xaa is C or S
PXXAPTKLRPVQVRKIDDSSNVIKKATVNMVVRSXG

SEQ ID NO: 52441 - protein, 33 aa, Artificial Sequence
  GFR-binding peptide
  MOD_RES (2), (3): Xaa is C or S
AXXVPTELRSVKMAKVDEYDKVVKEVQVEMVVE

SEQ ID NO: 52442 - protein, 32 aa, Artificial Sequence
  GFR-binding peptide
  MOD_RES (1), (2): Xaa is C or S
XXVSQDLSNITIQIMIGKTPKIIGEMSMIVKS

SEQ ID NO: 52443 - protein, 43 aa, Artificial Sequence; identical to SEQ ID NO: 19335
  GFR-binding peptide
  MOD_RES (4), (41), (43): Xaa is C or S

SEQ ID NO: 52444 - protein, 41 aa, Artificial Sequence; identical to SEQ ID NO: 19336
  GFR-binding peptide
  MOD_RES (2), (39), (41): Xaa is C or S
  MOD_RES (18), (19), (20), (21), (22): Xaa is A or G
  MOD_RES (23), (24), (25), (26): Xaa is A or G or is absent

SEQ ID NO: 52445 - protein, 42 aa, Artificial Sequence; identical to SEQ ID NO: 14322
  GFR-binding peptide
  MOD_RES (6), (7), (39), (41): Xaa is C or S

SEQ ID NO: 52446 - protein, 40 aa, Artificial Sequence; identical to SEQ ID NO: 14323
  GFR-binding peptide
  MOD_RES (5), (6), (39): Xaa is C or S
  MOD_RES (20), (21), (22), (23), (24): Xaa is A or G
  MOD_RES (25), (26), (27), (28): Xaa is A or G or is absent

SEQ ID NO: 52447 - protein, 36 aa, Artificial Sequence; identical to SEQ ID NO: 14325
  GFR-binding peptide
  MOD_RES (34), (36): Xaa is C or S
  MOD_RES (14), (15), (16), (17), (18): Xaa is A or G
  MOD_RES (19), (20), (21), (22): Xaa is A or G or is absent

SEQ ID NO: 52448 - protein, 43 aa, Artificial Sequence
  GFR-binding peptide
  MOD_RES (6), (7), (41), (43): Xaa is C or S
  MOD_RES (21), (22), (23), (24), (25): Xaa is A or G
  MOD_RES (26), (27), (28), (29): Xaa is A or G or is absent
SIPKAXXVPTELRPVQMRKIXXXXXXXXXKKATVEMVVEGXGX

SEQ ID NO: 52449 - protein, 39 aa, Artificial Sequence
  GFR-binding peptide
  MOD_RES (4), (38): Xaa is C or S
GLEXVPTEEEPLPMVYYRIKPHQGQHEQLSNFLQHNKXE

SEQ ID NO: 52450 - protein, 37 aa, Artificial Sequence
  GFR-binding peptide
  MOD_RES (3), (4), (37): Xaa is C or S
  MOD_RES (18), (19), (20), (21), (22): Xaa is A or G
  MOD_RES (23), (24), (25), (26): Xaa is A or G or is absent
APXXVPQALSNITIQIMXXXXXXXXXIGEMSMIVRSX

SEQ ID NO: 52451 - protein, 36 aa, Artificial Sequence
  GFR-binding peptide
  MOD_RES (4), (5): Xaa is C or S
PKAXXVPTELRPVQMRKIDEYDKVVKKATVEMVVEG

SEQ ID NO: 52452 - protein, 40 aa, Artificial Sequence; identical to SEQ ID NO: 14327
  GFR-binding peptide
  MOD_RES (3), (37), (39): Xaa is C or S
  MOD_RES (17), (18), (19), (20), (21): Xaa is A or G
  MOD_RES (22), (23), (24), (25): Xaa is A or G or is absent

SEQ ID NO: 52453 - protein, 39 aa, Artificial Sequence; identical to SEQ ID NO: 19340
  GFR-binding peptide
  MOD_RES (3), (3): Xaa is C or S

SEQ ID NO: 52454 - protein, 41 aa, Artificial Sequence; identical to SEQ ID NO: 19341
  GFR-binding peptide
  MOD_RES (6), (40): Xaa is C or S

SEQ ID NO: 52455 - protein, 39 aa, Artificial Sequence
  GFR-binding peptide
  MOD_RES (4), (38): Xaa is C or S
  MOD_RES (18), (19), (20), (21), (22): Xaa is A or G
  MOD_RES (23), (24), (25), (26): Xaa is A or G or is absent
KPTXAPTKLRPVQVRKIXXXXXXXXXKKATVNMVVRSXG

SEQ ID NO: 52456 - protein, 35 aa, Artificial Sequence; identical to SEQ ID NO: 14330
  GFR-binding peptide
  MOD_RES (1), (33), (35): Xaa is C or S

SEQ ID NO: 52457 - protein, 35 aa, Artificial Sequence; identical to SEQ ID NO: 14331
  GFR-binding peptide
  MOD_RES (2), (3), (35): Xaa is C or S

SEQ ID NO: 52458 - protein, 38 aa, Artificial Sequence
  GFR-binding peptide
  MOD_RES (5), (6), (38): Xaa is C or S
VPKPXXAPTKLRSVKVAKVDDSSNVIKEVQVNMVVRSX

SEQ ID NO: 52459 - protein, 35 aa, Artificial Sequence; identical to SEQ ID NO: 19345
  GFR-binding peptide
  MOD_RES (1), (35): Xaa is C or S
  MOD_RES (15), (16), (17), (18), (19): Xaa is A or G
  MOD_RES (20), (21), (22), (23): Xaa is A or G or is absent

SEQ ID NO: 52460 - protein, 32 aa, Artificial Sequence
  GFR-binding peptide
  MOD_RES (32), (32): Xaa is C or S
APTKLSNITVQIMDDSSNVIIGEMSNMVVRSX

SEQ ID NO: 52461 - protein, 40 aa, Artificial Sequence; identical to SEQ ID NO: 14333
  GFR-binding peptide
  MOD_RES (6), (7), (39): Xaa is C or S

SEQ ID NO: 52462 - protein, 36 aa, Artificial Sequence; identical to SEQ ID NO: 14336
  GFR-binding peptide
  MOD_RES (2), (3), (36): Xaa is C or S
  MOD_RES (17), (18), (19), (20), (21): Xaa is A or G
  MOD_RES (22), (23), (24), (25): Xaa is A or G or is absent

SEQ ID NO: 52463 - protein, 36 aa, Artificial Sequence
  GFR-binding peptide
  MOD_RES (1), (2), (35): Xaa is C or S
  MOD_RES (16), (17), (18), (19), (20): Xaa is A or G
  MOD_RES (21), (22), (23), (24): Xaa is A or G or is absent
XXVPQALRPVQIRKIXXXXXXXXXKKATVMIVRSXK

SEQ ID NO: 52464 - protein, 40 aa, Artificial Sequence; identical to SEQ ID NO: 19346
  GFR-binding peptide
  MOD_RES (3), (40): Xaa is C or S
  MOD_RES (19), (20), (21), (22), (23): Xaa is A or G
  MOD_RES (24), (25), (26), (27): Xaa is A or G or is absent

SEQ ID NO: 52465 - protein, 37 aa, Artificial Sequence
  GFR-binding peptide
  MOD_RES (5), (5): Xaa is C or S
EGLEXVPTEEEPLTMLYYRIKPHQGQHEQLSNFLQHN

SEQ ID NO: 52466 - protein, 37 aa, Artificial Sequence; identical to SEQ ID NO: 14337
  GFR-binding peptide
  MOD_RES (4), (5), (37): Xaa is C or S

SEQ ID NO: 52467 - protein, 35 aa, Artificial Sequence
  GFR-binding peptide
  MOD_RES (1), (33), (35): Xaa is C or S
XVPTELRSVKMAKVDENEKVVKEVQVDMVVEGXGX

SEQ ID NO: 52468 - protein, 40 aa, Artificial Sequence; identical to SEQ ID NO: 14338
  GFR-binding peptide
  MOD_RES (6), (7), (38), (40): Xaa is C or S

SEQ ID NO: 52469 - protein, 34 aa, Artificial Sequence; identical to SEQ ID NO: 19350
  GFR-binding peptide
  MOD_RES (34), (34): Xaa is C or S

SEQ ID NO: 52470 - protein, 37 aa, Artificial Sequence; identical to SEQ ID NO: 19351
  GFR-binding peptide
  MOD_RES (2), (2): Xaa is C or S

SEQ ID NO: 52471 - protein, 35 aa, Artificial Sequence
  GFR-binding peptide
  MOD_RES (3), (4), (35): Xaa is C or S
SPXXVSQDLRPVQIRKIIGKTPKIKKATVMIVKSX

SEQ ID NO: 52472 - protein, 38 aa, Artificial Sequence
  GFR-binding peptide
  MOD_RES (2), (2): Xaa is C or S
  MOD_RES (18), (19), (20), (21), (22): Xaa is A or G
  MOD_RES (23), (24), (25), (26): Xaa is A or G or is absent
KXQPSRVHHEPLTVLYYXXXXXXXXXEQLSNRLEEHLE

SEQ ID NO: 52473 - protein, 39 aa, Artificial Sequence
  GFR-binding peptide
  MOD_RES (6), (7), (39): Xaa is C or S
SIPKAXXVPTELSNITMQIMDEYDKVVIGEMSEMVVEGX

SEQ ID NO: 52474 - protein, 40 aa, Artificial Sequence
  GFR-binding peptide
  MOD_RES (6), (7): Xaa is C or S
  MOD_RES (21), (22), (23), (24), (25): Xaa is A or G
  MOD_RES (26), (27), (28), (29): Xaa is A or G or is absent
YVPKPXXAPTKLRSVKVAKVXXXXXXXXXKEVQVNMVVRS

SEQ ID NO: 52475 - protein, 38 aa, Artificial Sequence; identical to SEQ ID NO: 14345
  GFR-binding peptide
  MOD_RES (5), (6), (37): Xaa is C or S

SEQ ID NO: 52476 - protein, 40 aa, Artificial Sequence; identical to SEQ ID NO: 39755
  GFR-binding peptide
  MOD_RES (4), (5), (38), (40): Xaa is C or S
  MOD_RES (19), (20), (21), (22), (23): Xaa is A or G
  MOD_RES (24), (25), (26), (27): Xaa is A or G or is absent

SEQ ID NO: 52477 - protein, 43 aa, Artificial Sequence
  GFR-binding peptide
  MOD_RES (5), (42): Xaa is C or S
RNVQXRPTQVQLEPLPVVYYEIVRKKPIFEQLSNTLEDHLAXK

SEQ ID NO: 52478 - protein, 37 aa, Artificial Sequence; identical to SEQ ID NO: 14347
  GFR-binding peptide
  MOD_RES (34), (36): Xaa is C or S
  MOD_RES (14), (15), (16), (17), (18): Xaa is A or G
  MOD_RES (19), (20), (21), (22): Xaa is A or G or is absent

SEQ ID NO: 52479 - protein, 43 aa, Artificial Sequence; identical to SEQ ID NO: 19357
  GFR-binding peptide
  MOD_RES (7), (41), (43): Xaa is C or S
  MOD_RES (21), (22), (23), (24), (25): Xaa is A or G
  MOD_RES (26), (27), (28), (29): Xaa is A or G or is absent

SEQ ID NO: 52480 - protein, 41 aa, Artificial Sequence
  GFR-binding peptide
  MOD_RES (4), (38), (40): Xaa is C or S
GLEXVPTEEEPLTMLYYRIKPHQGQHEQLSNFLQHNKXEXR

SEQ ID NO: 52481 - protein, 39 aa, Artificial Sequence
  GFR-binding peptide
  MOD_RES (6), (7): Xaa is C or S
  MOD_RES (21), (22), (23), (24), (25): Xaa is A or G
  MOD_RES (26), (27), (28), (29): Xaa is A or G or is absent
ASASPXXVPQDLRPVQIRKIXXXXXXXXXKKATVMVVKS

SEQ ID NO: 52482 - protein, 39 aa, Artificial Sequence
  GFR-binding peptide
  MOD_RES (5), (6), (37), (39): Xaa is C or S
SASPXXVSQDLRPVQIRKIIGKTPKIKKATVMIVKSXKX

SEQ ID NO: 52483 - protein, 33 aa, Artificial Sequence
  GFR-binding peptide
VPTEEEPLTMLYYRIKPHQGQHEQLSNFLQHNK

SEQ ID NO: 52484 - protein, 41 aa, Artificial Sequence
  GFR-binding peptide
  MOD_RES (6), (7), (39), (41): Xaa is C or S
TVPKPXXAPTQLRSVKVAKVDDSSNVIKEVQVNMVVRAXGX

SEQ ID NO: 52485 - protein, 43 aa, Artificial Sequence
  GFR-binding peptide
  MOD_RES (6), (7), (41), (43): Xaa is C or S
  MOD_RES (21), (22), (23), (24), (25): Xaa is A or G
  MOD_RES (26), (27), (28), (29): Xaa is A or G or is absent
TVPKPXXAPTQLRSVKVAKVXXXXXXXXXKEVQVNMVVRAXGX

SEQ ID NO: 52486 - protein, 38 aa, Artificial Sequence
  GFR-binding peptide
  MOD_RES (2), (3), (36), (38): Xaa is C or S
  MOD_RES (17), (18), (19), (20), (21): Xaa is A or G
  MOD_RES (22), (23), (24), (25): Xaa is A or G or is absent
PXXVPQDLSNITIQIMXXXXXXXXXIGEMSMVVKSXKX

SEQ ID NO: 52487 - protein, 39 aa, Artificial Sequence; identical to SEQ ID NO: 19362
  GFR-binding peptide
  MOD_RES (3), (37), (39): Xaa is C or S
  MOD_RES (17), (18), (19), (20), (21): Xaa is A or G
  MOD_RES (22), (23), (24), (25): Xaa is A or G or is absent

SEQ ID NO: 52488 - protein, 36 aa, Artificial Sequence; identical to SEQ ID NO: 14360
  GFR-binding peptide
  MOD_RES (2), (36): Xaa is C or S
  MOD_RES (16), (17), (18), (19), (20): Xaa is A or G
  MOD_RES (21), (22), (23), (24): Xaa is A or G or is absent

SEQ ID NO: 52489 - protein, 40 aa, Artificial Sequence; identical to SEQ ID NO: 19367
  GFR-binding peptide
  MOD_RES (7), (7): Xaa is C or S
  MOD_RES (21), (22), (23), (24), (25): Xaa is A or G
  MOD_RES (26), (27), (28), (29): Xaa is A or G or is absent

SEQ ID NO: 52490 - protein, 39 aa, Artificial Sequence
  GFR-binding peptide
  MOD_RES (36), (38): Xaa is C or S
PSRVHHEPLPVVYYEYVRKKPKLEQLSNRLEEHLEXAXA

SEQ ID NO: 52491 - protein, 37 aa, Artificial Sequence; identical to SEQ ID NO: 14362
  GFR-binding peptide
  MOD_RES (5), (6): Xaa is C or S

SEQ ID NO: 52492 - protein, 35 aa, Artificial Sequence
  GFR-binding peptide
  MOD_RES (1), (33), (35): Xaa is C or S
XAPTQLRPVQVRKIDDSSNVIKKATVNMVVRAXGX

SEQ ID NO: 52493 - protein, 37 aa, Artificial Sequence
  GFR-binding peptide
  MOD_RES (2), (3), (36): Xaa is C or S
  MOD_RES (17), (18), (19), (20), (21): Xaa is A or G
  MOD_RES (22), (23), (24), (25): Xaa is A or G or is absent
PXXVPQDLSNITIQIMXXXXXXXXXIGEMSMVVKSXK

SEQ ID NO: 52494 - protein, 32 aa, Artificial Sequence
  GFR-binding peptide
  MOD_RES (1), (1): Xaa is C or S
XAPTKLRSVKVAKVDDSSNVIKEVQVNMVVRS

SEQ ID NO: 52495 - protein, 37 aa, Artificial Sequence; identical to SEQ ID NO: 14363
  GFR-binding peptide
  MOD_RES (34), (36): Xaa is C or S
  MOD_RES (14), (15), (16), (17), (18): Xaa is A or G
  MOD_RES (19), (20), (21), (22): Xaa is A or G or is absent

SEQ ID NO: 52496 - protein, 37 aa, Artificial Sequence; identical to SEQ ID NO: 14365
  GFR-binding peptide
  MOD_RES (4), (5), (36): Xaa is C or S

SEQ ID NO: 52497 - protein, 37 aa, Artificial Sequence
  GFR-binding peptide
  MOD_RES (3), (3): Xaa is C or S
  MOD_RES (19), (20), (21), (22), (23): Xaa is A or G
  MOD_RES (24), (25), (26), (27): Xaa is A or G or is absent
VKXQPSRVHHEPLTVLYYXXXXXXXXXEQLSNRLEEH

SEQ ID NO: 52498 - protein, 40 aa, Artificial Sequence
  GFR-binding peptide
  MOD_RES (4), (5), (39): Xaa is C or S
  MOD_RES (19), (20), (21), (22), (23): Xaa is A or G
  MOD_RES (24), (25), (26), (27): Xaa is A or G or is absent
PKPXXAPTQLRSVKVAKVXXXXXXXXXKEVQVNMVVRAXG

SEQ ID NO: 52499 - protein, 35 aa, Artificial Sequence; identical to SEQ ID NO: 14369
  GFR-binding peptide
  MOD_RES (1), (35): Xaa is C or S
  MOD_RES (15), (16), (17), (18), (19): Xaa is A or G
  MOD_RES (20), (21), (22), (23): Xaa is A or G or is absent

SEQ ID NO: 52500 - protein, 34 aa, Artificial Sequence; identical to SEQ ID NO: 14370
  GFR-binding peptide
  MOD_RES (1), (34): Xaa is C or S
  MOD_RES (15), (16), (17), (18), (19): Xaa is A or G
  MOD_RES (20), (21), (22), (23): Xaa is A or G or is absent

SEQ ID NO: 52501 - protein, 36 aa, Artificial Sequence
  GFR-binding peptide
  MOD_RES (1), (2), (34), (36): Xaa is C or S
XXAPTKLRSVKVAKVDDSSNVIKEVQVNMVVRSXGX

SEQ ID NO: 52502 - protein, 34 aa, Artificial Sequence
  GFR-binding peptide
  MOD_RES (1), (33): Xaa is C or S
XAPTKLSNITVQIMDDSSNVIIGEMSNMVVRSXG

SEQ ID NO: 52503 - protein, 34 aa, Artificial Sequence; identical to SEQ ID NO: 14372
  GFR-binding peptide
  MOD_RES (3), (4): Xaa is C or S

SEQ ID NO: 52504 - protein, 41 aa, Artificial Sequence; identical to SEQ ID NO: 14373
  GFR-binding peptide
  MOD_RES (6), (40): Xaa is C or S
  MOD_RES (20), (21), (22), (23), (24): Xaa is A or G
  MOD_RES (25), (26), (27), (28): Xaa is A or G or is absent

SEQ ID NO: 52505 - protein, 42 aa, Artificial Sequence
  GFR-binding peptide
  MOD_RES (6), (7), (41): Xaa is C or S
  MOD_RES (21), (22), (23), (24), (25): Xaa is A or G
  MOD_RES (26), (27), (28), (29): Xaa is A or G or is absent
TVPKPXXAPTQLRSVKVAKVXXXXXXXXXKEVQVNMVVRAXG

SEQ ID NO: 52506 - protein, 39 aa, Artificial Sequence
  GFR-binding peptide
  MOD_RES (2), (39): Xaa is C or S
QXRPTQVQLEPLPVVYYEIVRKKPIFEQLSNTLEDHLAX

SEQ ID NO: 52507 - protein, 37 aa, Artificial Sequence; identical to SEQ ID NO: 19372
  GFR-binding peptide
  MOD_RES (4), (4): Xaa is C or S

SEQ ID NO: 52508 - protein, 36 aa, Artificial Sequence; identical to SEQ ID NO: 14377
  GFR-binding peptide
  MOD_RES (3), (4), (36): Xaa is C or S

SEQ ID NO: 52509 - protein, 31 aa, Artificial Sequence
  GFR-binding peptide
  MOD_RES (31), (31): Xaa is C or S
VSQDLSNITIQIMIGKTPKIIGEMSMIVKSX

SEQ ID NO: 52510 - protein, 37 aa, Artificial Sequence
  GFR-binding peptide
  MOD_RES (2), (3), (37): Xaa is C or S
  MOD_RES (17), (18), (19), (20), (21): Xaa is A or G
  MOD_RES (22), (23), (24), (25): Xaa is A or G or is absent
AXXVPTELRSVKMAKVXXXXXXXXXKEVQVEMVVEGX

SEQ ID NO: 52511 - protein, 44 aa, Artificial Sequence
  GFR-binding peptide
  MOD_RES (4), (41), (43): Xaa is C or S
NVQXRPTQVQLEPLPVVYYEIVRKKPIFEQLSNTLEDHLAXKXE

SEQ ID NO: 52512 - protein, 39 aa, Artificial Sequence; identical to SEQ ID NO: 14379
  GFR-binding peptide
  MOD_RES (6), (7), (39): Xaa is C or S

SEQ ID NO: 52513 - protein, 36 aa, Artificial Sequence
  GFR-binding peptide
  MOD_RES (1), (34), (36): Xaa is C or S
  MOD_RES (15), (16), (17), (18), (19): Xaa is A or G
  MOD_RES (20), (21), (22), (23): Xaa is A or G or is absent
XVPQALRPVQIRKIXXXXXXXXXKKATVMIVRSXKX

SEQ ID NO: 52514 - protein, 35 aa, Artificial Sequence; identical to SEQ ID NO: 14380
  GFR-binding peptide
  MOD_RES (1), (34): Xaa is C or S
  MOD_RES (15), (16), (17), (18), (19): Xaa is A or G
  MOD_RES (20), (21), (22), (23): Xaa is A or G or is absent

SEQ ID NO: 52515 - protein, 40 aa, Artificial Sequence; identical to SEQ ID NO: 19375
  GFR-binding peptide
  MOD_RES (3), (40): Xaa is C or S
  MOD_RES (19), (20), (21), (22), (23): Xaa is A or G
  MOD_RES (24), (25), (26), (27): Xaa is A or G or is absent

SEQ ID NO: 52516 - protein, 36 aa, Artificial Sequence; identical to SEQ ID NO: 14381
  GFR-binding peptide
  MOD_RES (3), (4): Xaa is C or S
  MOD_RES (18), (19), (20), (21), (22): Xaa is A or G
  MOD_RES (23), (24), (25), (26): Xaa is A or G or is absent

SEQ ID NO: 52517 - protein, 32 aa, Artificial Sequence
  GFR-binding peptide
  MOD_RES (2), (2): Xaa is C or S
TXAPTKLRSVKVAKVDDSSNVIKEVQVNMVVR

SEQ ID NO: 52518 - protein, 39 aa, Artificial Sequence
  GFR-binding peptide
  MOD_RES (5), (6), (37), (39): Xaa is C or S
SASPXXVPQDLRPVQIRKIVGRTPKVKKATVMVVKSXKX

SEQ ID NO: 52519 - protein, 45 aa, Artificial Sequence
  GFR-binding peptide
  MOD_RES (5), (42), (44): Xaa is C or S
  MOD_RES (21), (22), (23), (24), (25): Xaa is A or G
  MOD_RES (26), (27), (28), (29): Xaa is A or G or is absent
SSVKXQPSRVHHEPLPVVYYXXXXXXXXXEQLSNRLEEHLEXAXA

SEQ ID NO: 52520 - protein, 38 aa, Artificial Sequence
  GFR-binding peptide
  MOD_RES (4), (5), (38): Xaa is C or S
  MOD_RES (19), (20), (21), (22), (23): Xaa is A or G
  MOD_RES (24), (25), (26), (27): Xaa is A or G or is absent
ASPXXVPQDLSNITIQIMXXXXXXXXXIGEMSMVVKSX

SEQ ID NO: 52521 - protein, 36 aa, Artificial Sequence
  GFR-binding peptide
  MOD_RES (2), (36): Xaa is C or S
  MOD_RES (16), (17), (18), (19), (20): Xaa is A or G
  MOD_RES (21), (22), (23), (24): Xaa is A or G or is absent
EXVPTEEEPLPMVYYXXXXXXXXXEQLSNFLQHNKX

SEQ ID NO: 52522 - protein, 37 aa, Artificial Sequence
  GFR-binding peptide
  MOD_RES (3), (4), (35), (37): Xaa is C or S
APXXVPQALRPVQIRKIVGRKPKVKKATVMIVRSXKX

SEQ ID NO: 52523 - protein, 39 aa, Artificial Sequence; identical to SEQ ID NO: 14383
  GFR-binding peptide
  MOD_RES (5), (6), (38): Xaa is C or S

SEQ ID NO: 52524 - protein, 35 aa, Artificial Sequence; identical to SEQ ID NO: 19378
  GFR-binding peptide
  MOD_RES (1), (1): Xaa is C or S

SEQ ID NO: 52525 - protein, 40 aa, Artificial Sequence
  GFR-binding peptide
  MOD_RES (4), (5), (37), (39): Xaa is C or S
PKPXXAPTKLRSVKVAKVDDSSNVIKEVQVNMVVRSXGXH

SEQ ID NO: 52526 - protein, 39 aa, Artificial Sequence
  GFR-binding peptide
  MOD_RES (4), (4): Xaa is C or S
  MOD_RES (20), (21), (22), (23), (24): Xaa is A or G
  MOD_RES (25), (26), (27), (28): Xaa is A or G or is absent
SVKXQPSRVHHEPLTVLYYXXXXXXXXXEQLSNRLEEHL

SEQ ID NO: 52527 - protein, 37 aa, Artificial Sequence
  GFR-binding peptide
  MOD_RES (5), (5): Xaa is C or S
EGLEXVPTEEEPLPMVYYRIKPHQGQHEQLSNFLQHN

SEQ ID NO: 52528 - protein, 37 aa, Artificial Sequence
  GFR-binding peptide
  MOD_RES (35), (37): Xaa is C or S
  MOD_RES (14), (15), (16), (17), (18): Xaa is A or G
  MOD_RES (19), (20), (21), (22): Xaa is A or G or is absent
TQVQLEPLTVLYYXXXXXXXXXEQLSNTLEDHLAXKX

SEQ ID NO: 52529 - protein, 35 aa, Artificial Sequence; identical to SEQ ID NO: 14386
  GFR-binding peptide
  MOD_RES (34), (34): Xaa is C or S
  MOD_RES (14), (15), (16), (17), (18): Xaa is A or G
  MOD_RES (19), (20), (21), (22): Xaa is A or G or is absent

SEQ ID NO: 52530 - protein, 38 aa, Artificial Sequence; identical to SEQ ID NO: 19381
  GFR-binding peptide
  MOD_RES (1), (35), (37): Xaa is C or S

SEQ ID NO: 52531 - protein, 37 aa, Artificial Sequence; identical to SEQ ID NO: 14387
  GFR-binding peptide
  MOD_RES (2), (36): Xaa is C or S
  MOD_RES (16), (17), (18), (19), (20): Xaa is A or G
  MOD_RES (21), (22), (23), (24): Xaa is A or G or is absent

SEQ ID NO: 52532 - protein, 43 aa, Artificial Sequence; identical to SEQ ID NO: 19383
  GFR-binding peptide
  MOD_RES (3), (40), (42): Xaa is C or S

SEQ ID NO: 52533 - protein, 37 aa, Artificial Sequence
  GFR-binding peptide
  MOD_RES (4), (5), (37): Xaa is C or S
PKPXXAPTKLSNITVQIMDDSSNVIIGEMSNMVVRSX

SEQ ID NO: 52534 - protein, 35 aa, Artificial Sequence
  GFR-binding peptide
  MOD_RES (1), (2), (34): Xaa is C or S
XXVPTELRPVQMRKIDENEKVVKKATVDMVVEGXG

SEQ ID NO: 52535 - protein, 38 aa, Artificial Sequence
  GFR-binding peptide
  MOD_RES (2), (36), (38): Xaa is C or S
  MOD_RES (16), (17), (18), (19), (20): Xaa is A or G
  MOD_RES (21), (22), (23), (24): Xaa is A or G or is absent
TXAPTKLRSVKVAKVXXXXXXXXXKEVQVNMVVRSXGX

SEQ ID NO: 52536 - protein, 37 aa, Artificial Sequence; identical to SEQ ID NO: 14390
  GFR-binding peptide
  MOD_RES (1), (2), (34), (36): Xaa is C or S

SEQ ID NO: 52537 - protein, 42 aa, Artificial Sequence; identical to SEQ ID NO: 19389
  GFR-binding peptide
  MOD_RES (5), (42): Xaa is C or S
  MOD_RES (21), (22), (23), (24), (25): Xaa is A or G
  MOD_RES (26), (27), (28), (29): Xaa is A or G or is absent

SEQ ID NO: 52538 - protein, 39 aa, Artificial Sequence; identical to SEQ ID NO: 19390
  GFR-binding peptide
  MOD_RES (1), (38): Xaa is C or S

SEQ ID NO: 52539 - protein, 38 aa, Artificial Sequence; identical to SEQ ID NO: 19391
  GFR-binding peptide
  MOD_RES (1), (38): Xaa is C or S
  MOD_RES (17), (18), (19), (20), (21): Xaa is A or G
  MOD_RES (22), (23), (24), (25): Xaa is A or G or is absent

SEQ ID NO: 52540 - protein, 34 aa, Artificial Sequence
  GFR-binding peptide
  MOD_RES (4), (4): Xaa is C or S
KPTXAPTKLRPVQVRKIDDSSNVIKKATVNMVVR

SEQ ID NO: 52541 - protein, 35 aa, Artificial Sequence
  GFR-binding peptide
  MOD_RES (2), (2): Xaa is C or S
  MOD_RES (16), (17), (18), (19), (20): Xaa is A or G
  MOD_RES (21), (22), (23), (24): Xaa is A or G or is absent
EXVPTEEEPLPMVYYXXXXXXXXXEQLSNFLQHNK

SEQ ID NO: 52542 - protein, 37 aa, Artificial Sequence
  GFR-binding peptide
  MOD_RES (2), (3), (34), (36): Xaa is C or S
PXXVPQDLRSVKIAKVVGRTPKVKEVQVMVVKSXKXS

SEQ ID NO: 52543 - protein, 36 aa, Artificial Sequence
  GFR-binding peptide
  MOD_RES (4), (5): Xaa is C or S
PKAXXVPTELRPVQMRKIDENEKVVKKATVDMVVEG

SEQ ID NO: 52544 - protein, 38 aa, Artificial Sequence
  GFR-binding peptide
  MOD_RES (36), (38): Xaa is C or S
PTQVQLEPLPVVYYEIVRKKPIFEQLSNTLEDHLAXKX

SEQ ID NO: 52545 - protein, 36 aa, Artificial Sequence
  GFR-binding peptide
  MOD_RES (5), (5): Xaa is C or S
TKPTXAPTKLSNITVQIMDDSSNVIIGEMSNMVVRS

SEQ ID NO: 52546 - protein, 36 aa, Artificial Sequence; identical to SEQ ID NO: 14392
  GFR-binding peptide
  MOD_RES (3), (4): Xaa is C or S
  MOD_RES (18), (19), (20), (21), (22): Xaa is A or G
  MOD_RES (23), (24), (25), (26): Xaa is A or G or is absent

SEQ ID NO: 52547 - protein, 39 aa, Artificial Sequence
  GFR-binding peptide
  MOD_RES (2), (3), (37), (39): Xaa is C or S
  MOD_RES (17), (18), (19), (20), (21): Xaa is A or G
  MOD_RES (22), (23), (24), (25): Xaa is A or G or is absent
AXXVPTELRPVQMRKIXXXXXXXXXKKATVDMVVEGXGX

SEQ ID NO: 52548 - protein, 38 aa, Artificial Sequence; identical to SEQ ID NO: 19397
  GFR-binding peptide
  MOD_RES (1), (38): Xaa is C or S
  MOD_RES (17), (18), (19), (20), (21): Xaa is A or G
  MOD_RES (22), (23), (24), (25): Xaa is A or G or is absent

SEQ ID NO: 52549 - protein, 43 aa, Artificial Sequence
  GFR-binding peptide
  MOD_RES (3), (40), (42): Xaa is C or S
  MOD_RES (19), (20), (21), (22), (23): Xaa is A or G
  MOD_RES (24), (25), (26), (27): Xaa is A or G or is absent
VKXQPSRVHHEPLTVLYYXXXXXXXXXEQLSNRLEEHLEXAXA

SEQ ID NO: 52550 - protein, 35 aa, Artificial Sequence; identical to SEQ ID NO: 14396
  GFR-binding peptide
  MOD_RES (2), (2): Xaa is C or S
  MOD_RES (16), (17), (18), (19), (20): Xaa is A or G
  MOD_RES (21), (22), (23), (24): Xaa is A or G or is absent

SEQ ID NO: 52551 - protein, 40 aa, Artificial Sequence; identical to SEQ ID NO: 14397
  GFR-binding peptide
  MOD_RES (4), (5), (39): Xaa is C or S
  MOD_RES (19), (20), (21), (22), (23): Xaa is A or G
  MOD_RES (24), (25), (26), (27): Xaa is A or G or is absent

SEQ ID NO: 52552 - protein, 36 aa, Artificial Sequence
  GFR-binding peptide
  MOD_RES (3), (4), (36): Xaa is C or S
KPXXAPTKLRSVKVAKVDDSSNVIKEVQVNMVVRSX

SEQ ID NO: 52553 - protein, 42 aa, Artificial Sequence; identical to SEQ ID NO: 14402
  GFR-binding peptide
  MOD_RES (6), (7), (40), (42): Xaa is C or S
  MOD_RES (21), (22), (23), (24), (25): Xaa is A or G
  MOD_RES (26), (27), (28), (29): Xaa is A or G or is absent

SEQ ID NO: 52554 - protein, 43 aa, Artificial Sequence
  GFR-binding peptide
  MOD_RES (6), (7), (41), (43): Xaa is C or S
  MOD_RES (21), (22), (23), (24), (25): Xaa is A or G
  MOD_RES (26), (27), (28), (29): Xaa is A or G or is absent
YVPKPXXAPTKLRPVQVRKIXXXXXXXXXKKATVNMVVRSXGX

SEQ ID NO: 52555 - protein, 37 aa, Artificial Sequence; identical to SEQ ID NO: 19401
  GFR-binding peptide
  MOD_RES (37), (37): Xaa is C or S

SEQ ID NO: 52556 - protein, 40 aa, Artificial Sequence; identical to SEQ ID NO: 14405
  GFR-binding peptide
  MOD_RES (6), (7), (38), (40): Xaa is C or S

SEQ ID NO: 52557 - protein, 33 aa, Artificial Sequence
  GFR-binding peptide
  MOD_RES (15), (16), (17), (18), (19): Xaa is A or G
  MOD_RES (20), (21), (22), (23): Xaa is A or G or is absent
PTQVQLEPLPVVYYXXXXXXXXXEQLSNTLEDH

SEQ ID NO: 52558 - protein, 37 aa, Artificial Sequence
  GFR-binding peptide
  MOD_RES (3), (37): Xaa is C or S
  MOD_RES (17), (18), (19), (20), (21): Xaa is A or G
  MOD_RES (22), (23), (24), (25): Xaa is A or G or is absent
LEXVPTEEEPLTMLYYXXXXXXXXXEQLSNFLQHNKX

SEQ ID NO: 52559 - protein, 34 aa, Artificial Sequence; identical to SEQ ID NO: 14406
  GFR-binding peptide
  MOD_RES (1), (34): Xaa is C or S
  MOD_RES (15), (16), (17), (18), (19): Xaa is A or G
  MOD_RES (20), (21), (22), (23): Xaa is A or G or is absent

SEQ ID NO: 52560 - protein, 36 aa, Artificial Sequence; identical to SEQ ID NO: 14407
  GFR-binding peptide
  MOD_RES (3), (4): Xaa is C or S
  MOD_RES (18), (19), (20), (21), (22): Xaa is A or G
  MOD_RES (23), (24), (25), (26): Xaa is A or G or is absent

SEQ ID NO: 52561 - protein, 34 aa, Artificial Sequence
  GFR-binding peptide
  MOD_RES (33), (33): Xaa is C or S
  MOD_RES (14), (15), (16), (17), (18): Xaa is A or G
  MOD_RES (19), (20), (21), (22): Xaa is A or G or is absent
VSQDLSNITIQIMXXXXXXXXXIGEMSMIVKSXK

SEQ ID NO: 52562 - protein, 38 aa, Artificial Sequence; identical to SEQ ID NO: 14410
  GFR-binding peptide
  MOD_RES (5), (6): Xaa is C or S
  MOD_RES (20), (21), (22), (23), (24): Xaa is A or G
  MOD_RES (25), (26), (27), (28): Xaa is A or G or is absent

SEQ ID NO: 52563 - protein, 35 aa, Artificial Sequence
  GFR-binding peptide
  MOD_RES (2), (3): Xaa is C or S
  MOD_RES (17), (18), (19), (20), (21): Xaa is A or G
  MOD_RES (22), (23), (24), (25): Xaa is A or G or is absent
PXXVSQDLSNITIQIMXXXXXXXXXIGEMSMIVKS

SEQ ID NO: 52564 - protein, 35 aa, Artificial Sequence; identical to SEQ ID NO: 14411
  GFR-binding peptide
  MOD_RES (3), (4): Xaa is C or S

SEQ ID NO: 52565 - protein, 34 aa, Artificial Sequence
  GFR-binding peptide
  MOD_RES (1), (1): Xaa is C or S
XVPTEEEPLPMVYYRIKPHQGQHEQLSNFLQHNK

SEQ ID NO: 52566 - protein, 32 aa, Artificial Sequence
  GFR-binding peptide
TQVQLEPLTVLYYEIVRKKPIFEQLSNTLEDH

SEQ ID NO: 52567 - protein, 38 aa, Artificial Sequence
  GFR-binding peptide
  MOD_RES (1), (2), (35), (37): Xaa is C or S
  MOD_RES (16), (17), (18), (19), (20): Xaa is A or G
  MOD_RES (21), (22), (23), (24): Xaa is A or G or is absent
XXVSQDLRPVQIRKIXXXXXXXXXKKATVMIVKSXKXS

SEQ ID NO: 52568 - protein, 36 aa, Artificial Sequence; identical to SEQ ID NO: 14413
  GFR-binding peptide
  MOD_RES (3), (4): Xaa is C or S
  MOD_RES (18), (19), (20), (21), (22): Xaa is A or G
  MOD_RES (23), (24), (25), (26): Xaa is A or G or is absent

SEQ ID NO: 52569 - protein, 30 aa, Artificial Sequence
  GFR-binding peptide
VPTELRSVKMAKVDENEKVVKEVQVDMVVE

SEQ ID NO: 52570 - protein, 39 aa, Artificial Sequence; identical to SEQ ID NO: 19403
  GFR-binding peptide
  MOD_RES (2), (36), (38): Xaa is C or S

SEQ ID NO: 52571 - protein, 41 aa, Artificial Sequence; identical to SEQ ID NO: 14414
  GFR-binding peptide
  MOD_RES (6), (7), (40): Xaa is C or S
  MOD_RES (21), (22), (23), (24), (25): Xaa is A or G
  MOD_RES (26), (27), (28), (29): Xaa is A or G or is absent

SEQ ID NO: 52572 - protein, 38 aa, Artificial Sequence
  GFR-binding peptide
  MOD_RES (3), (4), (38): Xaa is C or S
  MOD_RES (18), (19), (20), (21), (22): Xaa is A or G
  MOD_RES (23), (24), (25), (26): Xaa is A or G or is absent
KAXXVPTELRPVQMRKIXXXXXXXXXKKATVDMVVEGX

SEQ ID NO: 52573 - protein, 33 aa, Artificial Sequence
  GFR-binding peptide
  MOD_RES (15), (16), (17), (18), (19): Xaa is A or G
  MOD_RES (20), (21), (22), (23): Xaa is A or G or is absent
PTQVQLEPLTVLYYXXXXXXXXXEQLSNTLEDH

SEQ ID NO: 52574 - protein, 36 aa, Artificial Sequence
  GFR-binding peptide
  MOD_RES (1), (35): Xaa is C or S
  MOD_RES (15), (16), (17), (18), (19): Xaa is A or G
  MOD_RES (20), (21), (22), (23): Xaa is A or G or is absent
XAPTKLRPVQVRKIXXXXXXXXXKKATVNMVVRSXG

SEQ ID NO: 52575 - protein, 35 aa, Artificial Sequence
  GFR-binding peptide
  MOD_RES (2), (3), (34): Xaa is C or S
PXXVPQALRSVKIAKVVGRKPKVKEVQVMIVRSXK

SEQ ID NO: 52576 - protein, 38 aa, Artificial Sequence
  GFR-binding peptide
  MOD_RES (4), (5), (36), (38): Xaa is C or S
AAPXXVPQALRSVKIAKVVGRKPKVKEVQVMIVRSXKX

SEQ ID NO: 52577 - protein, 41 aa, Artificial Sequence
  GFR-binding peptide
  MOD_RES (6), (7), (39), (41): Xaa is C or S
YVPKPXXAPTKLRSVKVAKVDDSSNVIKEVQVNMVVRSXGX

SEQ ID NO: 52578 - protein, 35 aa, Artificial Sequence; identical to SEQ ID NO: 14426
  GFR-binding peptide
  MOD_RES (32), (34): Xaa is C or S

SEQ ID NO: 52579 - protein, 37 aa, Artificial Sequence
  GFR-binding peptide
  MOD_RES (3), (4): Xaa is C or S
  MOD_RES (18), (19), (20), (21), (22): Xaa is A or G
  MOD_RES (23), (24), (25), (26): Xaa is A or G or is absent
KAXXVPTELRSVKMAKVXXXXXXXXXKEVQVDMVVEG

SEQ ID NO: 52580 - protein, 37 aa, Artificial Sequence
  GFR-binding peptide
  MOD_RES (36), (36): Xaa is C or S
PTQVQLEPLTVLYYEIVRKKPIFEQLSNTLEDHLAXK

SEQ ID NO: 52581 - protein, 35 aa, Artificial Sequence
  GFR-binding peptide
  MOD_RES (1), (35): Xaa is C or S
  MOD_RES (15), (16), (17), (18), (19): Xaa is A or G
  MOD_RES (20), (21), (22), (23): Xaa is A or G or is absent
XVPTEEEPLPMVYYXXXXXXXXXEQLSNFLQHNKX

SEQ ID NO: 52582 - protein, 34 aa, Artificial Sequence
  GFR-binding peptide
  MOD_RES (1), (2), (34): Xaa is C or S
XXAPTKLRPVQVRKIDDSSNVIKKATVNMVVRSX

SEQ ID NO: 52583 - protein, 40 aa, Artificial Sequence
  GFR-binding peptide
  MOD_RES (6), (7): Xaa is C or S
  MOD_RES (21), (22), (23), (24), (25): Xaa is A or G
  MOD_RES (26), (27), (28), (29): Xaa is A or G or is absent
SIPKAXXVPTELRSVKMAKVXXXXXXXXXKEVQVEMVVEG

SEQ ID NO: 52584 - protein, 42 aa, Artificial Sequence
  GFR-binding peptide
  MOD_RES (5), (42): Xaa is C or S
  MOD_RES (21), (22), (23), (24), (25): Xaa is A or G
  MOD_RES (26), (27), (28), (29): Xaa is A or G or is absent
RNVQXRPTQVQLEPLPVVYYXXXXXXXXXEQLSNTLEDHLAX

SEQ ID NO: 52585 - protein, 36 aa, Artificial Sequence; identical to SEQ ID NO: 14432
  GFR-binding peptide
  MOD_RES (34), (36): Xaa is C or S
  MOD_RES (14), (15), (16), (17), (18): Xaa is A or G
  MOD_RES (19), (20), (21), (22): Xaa is A or G or is absent

SEQ ID NO: 52586 - protein, 35 aa, Artificial Sequence
  GFR-binding peptide
  MOD_RES (34), (34): Xaa is C or S
  MOD_RES (14), (15), (16), (17), (18): Xaa is A or G
  MOD_RES (19), (20), (21), (22): Xaa is A or G or is absent
VPTELRSVKMAKVXXXXXXXXXKEVQVEMVVEGXG

SEQ ID NO: 52587 - protein, 37 aa, Artificial Sequence
  GFR-binding peptide
  MOD_RES (1), (35), (37): Xaa is C or S
  MOD_RES (15), (16), (17), (18), (19): Xaa is A or G
  MOD_RES (20), (21), (22), (23): Xaa is A or G or is absent
XAPTKLRSVKVAKVXXXXXXXXXKEVQVNMVVRSXGX

SEQ ID NO: 52588 - protein, 40 aa, Artificial Sequence
  GFR-binding peptide
  MOD_RES (3), (40): Xaa is C or S
  MOD_RES (19), (20), (21), (22), (23): Xaa is A or G
  MOD_RES (24), (25), (26), (27): Xaa is A or G or is absent
VKXQPSRVHHEPLPVVYYXXXXXXXXXEQLSNRLEEHLEX

SEQ ID NO: 52589 - protein, 36 aa, Artificial Sequence
  GFR-binding peptide
  MOD_RES (5), (5): Xaa is C or S
TKPTXAPTKLRSVKVAKVDDSSNVIKEVQVNMVVRS

SEQ ID NO: 52590 - protein, 40 aa, Artificial Sequence
  GFR-binding peptide
  MOD_RES (5), (6), (38), (40): Xaa is C or S
IPKAXXVPTELRSVKMAKVDENEKVVKEVQVDMVVEGXGX

SEQ ID NO: 52591 - protein, 39 aa, Artificial Sequence; identical to SEQ ID NO: 19419
  GFR-binding peptide
  MOD_RES (4), (4): Xaa is C or S
  MOD_RES (20), (21), (22), (23), (24): Xaa is A or G
  MOD_RES (25), (26), (27), (28): Xaa is A or G or is absent

SEQ ID NO: 52592 - protein, 36 aa, Artificial Sequence
  GFR-binding peptide
  MOD_RES (3), (4): Xaa is C or S
  MOD_RES (18), (19), (20), (21), (22): Xaa is A or G
  MOD_RES (23), (24), (25), (26): Xaa is A or G or is absent
SPXXVSQDLSNITIQIMXXXXXXXXXIGEMSMIVKS

SEQ ID NO: 52593 - protein, 41 aa, Artificial Sequence; identical to SEQ ID NO: 19420
  GFR-binding peptide
  MOD_RES (5), (39), (41): Xaa is C or S

SEQ ID NO: 52594 - protein, 41 aa, Artificial Sequence; identical to SEQ ID NO: 14439
  GFR-binding peptide
  MOD_RES (5), (6), (40): Xaa is C or S
  MOD_RES (20), (21), (22), (23), (24): Xaa is A or G
  MOD_RES (25), (26), (27), (28): Xaa is A or G or is absent

SEQ ID NO: 52595 - protein, 38 aa, Artificial Sequence
  GFR-binding peptide
  MOD_RES (3), (4), (36), (38): Xaa is C or S
KPXXAPTKLRSVKVAKVDDSSNVIKEVQVNMVVRSXGX

SEQ ID NO: 52596 - protein, 38 aa, Artificial Sequence
  GFR-binding peptide
  MOD_RES (37), (37): Xaa is C or S
QPSRVHHEPLPVVYYEYVRKKPKLEQLSNRLEEHLEXA

SEQ ID NO: 52597 - protein, 38 aa, Artificial Sequence
  GFR-binding peptide
  MOD_RES (4), (5), (37): Xaa is C or S
PKAXXVPTELRSVKMAKVDEYDKVVKEVQVEMVVEGXG

SEQ ID NO: 52598 - protein, 40 aa, Artificial Sequence
  GFR-binding peptide
  MOD_RES (5), (6), (40): Xaa is C or S
  MOD_RES (20), (21), (22), (23), (24): Xaa is A or G
  MOD_RES (25), (26), (27), (28): Xaa is A or G or is absent
IPKAXXVPTELRPVQMRKIXXXXXXXXXKKATVEMVVEGX

SEQ ID NO: 52599 - protein, 39 aa, Artificial Sequence
  GFR-binding peptide
  MOD_RES (5), (6), (38): Xaa is C or S
IPKAXXVPTELRSVKMAKVDENEKVVKEVQVDMVVEGXG

SEQ ID NO: 52600 - protein, 40 aa, Artificial Sequence
  GFR-binding peptide
  MOD_RES (5), (6), (37), (39): Xaa is C or S
SASPXXVPQDLRSVKIAKVVGRTPKVKEVQVMVVKSXKXS

SEQ ID NO: 52601 - protein, 36 aa, Artificial Sequence; identical to SEQ ID NO: 14445
  GFR-binding peptide
  MOD_RES (1), (33), (35): Xaa is C or S

SEQ ID NO: 52602 - protein, 38 aa, Artificial Sequence; identical to SEQ ID NO: 14449
  GFR-binding peptide
  MOD_RES (1), (2), (35), (37): Xaa is C or S
  MOD_RES (16), (17), (18), (19), (20): Xaa is A or G
  MOD_RES (21), (22), (23), (24): Xaa is A or G or is absent

SEQ ID NO: 52603 - protein, 44 aa, Artificial Sequence
  GFR-binding peptide
  MOD_RES (7), (41), (43): Xaa is C or S
  MOD_RES (21), (22), (23), (24), (25): Xaa is A or G
  MOD_RES (26), (27), (28), (29): Xaa is A or G or is absent
NDEGLEXVPTEEEPLPMVYYXXXXXXXXXEQLSNFLQHNKXEXR

SEQ ID NO: 52604 - protein, 33 aa, Artificial Sequence; identical to SEQ ID NO: 19425
  GFR-binding peptide
  MOD_RES (14), (15), (16), (17), (18): Xaa is A or G
  MOD_RES (19), (20), (21), (22): Xaa is A or G or is absent

SEQ ID NO: 52605 - protein, 36 aa, Artificial Sequence
  GFR-binding peptide
  MOD_RES (1), (2), (34), (36): Xaa is C or S
XXVPTELSNITMQIMDENEKVVIGEMSDMVVEGXGX

SEQ ID NO: 52606 - protein, 38 aa, Artificial Sequence
  GFR-binding peptide
  MOD_RES (3), (4), (37): Xaa is C or S
  MOD_RES (18), (19), (20), (21), (22): Xaa is A or G
  MOD_RES (23), (24), (25), (26): Xaa is A or G or is absent
SPXXVPQDLSNITIQIMXXXXXXXXXIGEMSMVVKSXK

SEQ ID NO: 52607 - protein, 33 aa, Artificial Sequence; identical to SEQ ID NO: 14450
  GFR-binding peptide
  MOD_RES (33), (33): Xaa is C or S
  MOD_RES (14), (15), (16), (17), (18): Xaa is A or G
  MOD_RES (19), (20), (21), (22): Xaa is A or G or is absent

SEQ ID NO: 52608 - protein, 40 aa, Artificial Sequence
  GFR-binding peptide
  MOD_RES (7), (39): Xaa is C or S
HVTKPTXAPTKLRPVQVRKIDDSSNVIKKATVNMVVRSXG

SEQ ID NO: 52609 - protein, 32 aa, Artificial Sequence
  GFR-binding peptide
  MOD_RES (1), (2): Xaa is C or S
XXAPTQLSNITVQIMDDSSNVIIGEMSNMVVR

SEQ ID NO: 52610 - protein, 37 aa, Artificial Sequence; identical to SEQ ID NO: 14453
  GFR-binding peptide
  MOD_RES (3), (4), (37): Xaa is C or S
  MOD_RES (18), (19), (20), (21), (22): Xaa is A or G
  MOD_RES (23), (24), (25), (26): Xaa is A or G or is absent

SEQ ID NO: 52611 - protein, 33 aa, Artificial Sequence; identical to SEQ ID NO: 14456
  GFR-binding peptide
  MOD_RES (1), (2): Xaa is C or S

SEQ ID NO: 52612 - protein, 39 aa, Artificial Sequence
  GFR-binding peptide
  MOD_RES (1), (38): Xaa is C or S
XRPTQVQLEPLTVLYYEIVRKKPIFEQLSNTLEDHLAXK

SEQ ID NO: 52613 - protein, 37 aa, Artificial Sequence; identical to SEQ ID NO: 14457
  GFR-binding peptide
  MOD_RES (2), (3), (35), (37): Xaa is C or S

SEQ ID NO: 52614 - protein, 40 aa, Artificial Sequence; identical to SEQ ID NO: 19433
  GFR-binding peptide
  MOD_RES (5), (5): Xaa is C or S

SEQ ID NO: 52615 - protein, 37 aa, Artificial Sequence; identical to SEQ ID NO: 14459
  GFR-binding peptide
  MOD_RES (5), (6): Xaa is C or S

SEQ ID NO: 52616 - protein, 39 aa, Artificial Sequence
  GFR-binding peptide
  MOD_RES (3), (4), (36), (38): Xaa is C or S
KPXXAPTQLSNITVQIMDDSSNVIIGEMSNMVVRAXGXH

SEQ ID NO: 52617 - protein, 37 aa, Artificial Sequence; identical to SEQ ID NO: 14460
  GFR-binding peptide
  MOD_RES (34), (36): Xaa is C or S
  MOD_RES (14), (15), (16), (17), (18): Xaa is A or G
  MOD_RES (19), (20), (21), (22): Xaa is A or G or is absent

SEQ ID NO: 52618 - protein, 37 aa, Artificial Sequence
  GFR-binding peptide
  MOD_RES (4), (5), (37): Xaa is C or S
PKAXXVPTELRPVQMRKIDEYDKVVKKATVEMVVEGX

SEQ ID NO: 52619 - protein, 36 aa, Artificial Sequence
  GFR-binding peptide
  MOD_RES (4), (4): Xaa is C or S
  MOD_RES (18), (19), (20), (21), (22): Xaa is A or G
  MOD_RES (23), (24), (25), (26): Xaa is A or G or is absent
KPTXAPTKLSNITVQIMXXXXXXXXXIGEMSNMVVR

SEQ ID NO: 52620 - protein, 35 aa, Artificial Sequence; identical to SEQ ID NO: 14462
  GFR-binding peptide
  MOD_RES (1), (2), (34): Xaa is C or S

SEQ ID NO: 52621 - protein, 37 aa, Artificial Sequence; identical to SEQ ID NO: 14463
  GFR-binding peptide
  MOD_RES (4), (5), (37): Xaa is C or S

SEQ ID NO: 52622 - protein, 37 aa, Artificial Sequence
  GFR-binding peptide
  MOD_RES (2), (36): Xaa is C or S
  MOD_RES (16), (17), (18), (19), (20): Xaa is A or G
  MOD_RES (21), (22), (23), (24): Xaa is A or G or is absent
TXAPTKLRPVQVRKIXXXXXXXXXKKATVNMVVRSXG

SEQ ID NO: 52623 - protein, 35 aa, Artificial Sequence; identical to SEQ ID NO: 19435
  GFR-binding peptide

SEQ ID NO: 52624 - protein, 38 aa, Artificial Sequence
  GFR-binding peptide
  MOD_RES (5), (37): Xaa is C or S
TKPTXAPTKLSNITVQIMDDSSNVIIGEMSNMVVRSXG

SEQ ID NO: 52625 - protein, 38 aa, Artificial Sequence
  GFR-binding peptide
  MOD_RES (3), (4), (35), (37): Xaa is C or S
APXXVPQALSNITIQIMVGRKPKVIGEMSMIVRSXKXS

SEQ ID NO: 52626 - protein, 38 aa, Artificial Sequence; identical to SEQ ID NO: 19437
  GFR-binding peptide
  MOD_RES (1), (35), (37): Xaa is C or S
  MOD_RES (15), (16), (17), (18), (19): Xaa is A or G
  MOD_RES (20), (21), (22), (23): Xaa is A or G or is absent

SEQ ID NO: 52627 - protein, 37 aa, Artificial Sequence
  GFR-binding peptide
  MOD_RES (1), (2), (36): Xaa is C or S
  MOD_RES (16), (17), (18), (19), (20): Xaa is A or G
  MOD_RES (21), (22), (23), (24): Xaa is A or G or is absent
XXAPTKLSNITVQIMXXXXXXXXXIGEMSNMVVRSXG

SEQ ID NO: 52628 - protein, 39 aa, Artificial Sequence
  GFR-binding peptide
  MOD_RES (3), (4), (37), (39): Xaa is C or S
  MOD_RES (18), (19), (20), (21), (22): Xaa is A or G
  MOD_RES (23), (24), (25), (26): Xaa is A or G or is absent
APXXVPQALRPVQIRKIXXXXXXXXXKKATVMIVRSXKX

SEQ ID NO: 52629 - protein, 37 aa, Artificial Sequence; identical to SEQ ID NO: 14467
  GFR-binding peptide
  MOD_RES (4), (5): Xaa is C or S
  MOD_RES (19), (20), (21), (22), (23): Xaa is A or G
  MOD_RES (24), (25), (26), (27): Xaa is A or G or is absent

SEQ ID NO: 52630 - protein, 33 aa, Artificial Sequence; identical to SEQ ID NO: 19443
  GFR-binding peptide

SEQ ID NO: 52631 - protein, 34 aa, Artificial Sequence; identical to SEQ ID NO: 19445
  GFR-binding peptide
  MOD_RES (2), (2): Xaa is C or S
  MOD_RES (16), (17), (18), (19), (20): Xaa is A or G
  MOD_RES (21), (22), (23), (24): Xaa is A or G or is absent

SEQ ID NO: 52632 - protein, 38 aa, Artificial Sequence; identical to SEQ ID NO: 14469
  GFR-binding peptide
  MOD_RES (4), (5), (37): Xaa is C or S

SEQ ID NO: 52633 - protein, 38 aa, Artificial Sequence
  GFR-binding peptide
  MOD_RES (4), (5), (37): Xaa is C or S
PKAXXVPTELRPVQMRKIDENEKVVKKATVDMVVEGXG

SEQ ID NO: 52634 - protein, 39 aa, Artificial Sequence
  GFR-binding peptide
  MOD_RES (36), (38): Xaa is C or S
  MOD_RES (15), (16), (17), (18), (19): Xaa is A or G
  MOD_RES (20), (21), (22), (23): Xaa is A or G or is absent
PTQVQLEPLTVLYYXXXXXXXXXEQLSNTLEDHLAXKXE

SEQ ID NO: 52635 - protein, 43 aa, Artificial Sequence
  GFR-binding peptide
  MOD_RES (5), (6), (40), (42): Xaa is C or S
  MOD_RES (20), (21), (22), (23), (24): Xaa is A or G
  MOD_RES (25), (26), (27), (28): Xaa is A or G or is absent
IPKAXXVPTELSNITMQIMXXXXXXXXXIGEMSEMVVEGXGXR

SEQ ID NO: 52636 - protein, 36 aa, Artificial Sequence; identical to SEQ ID NO: 14472
  GFR-binding peptide
  MOD_RES (1), (2), (35): Xaa is C or S
  MOD_RES (16), (17), (18), (19), (20): Xaa is A or G
  MOD_RES (21), (22), (23), (24): Xaa is A or G or is absent

SEQ ID NO: 52637 - protein, 37 aa, Artificial Sequence; identical to SEQ ID NO: 19452
  GFR-binding peptide
  MOD_RES (1), (1): Xaa is C or S

SEQ ID NO: 52638 - protein, 33 aa, Artificial Sequence; identical to SEQ ID NO: 19453
  GFR-binding peptide
  MOD_RES (14), (15), (16), (17), (18): Xaa is A or G
  MOD_RES (19), (20), (21), (22): Xaa is A or G or is absent

SEQ ID NO: 52639 - protein, 39 aa, Artificial Sequence; identical to SEQ ID NO: 19456
  GFR-binding peptide
  MOD_RES (7), (7): Xaa is C or S
  MOD_RES (21), (22), (23), (24), (25): Xaa is A or G
  MOD_RES (26), (27), (28), (29): Xaa is A or G or is absent

SEQ ID NO: 52640 - protein, 38 aa, Artificial Sequence; identical to SEQ ID NO: 19457
  GFR-binding peptide
  MOD_RES (1), (38): Xaa is C or S

SEQ ID NO: 52641 - protein, 35 aa, Artificial Sequence
  GFR-binding peptide
  MOD_RES (4), (5): Xaa is C or S
ASPXXVSQDLSNITIQIMIGKTPKIIGEMSMIVKS

SEQ ID NO: 52642 - protein, 43 aa, Artificial Sequence
  GFR-binding peptide
  MOD_RES (3), (40), (42): Xaa is C or S
VKXQPSRVHHEPLTVLYYEYVRKKPKLEQLSNRLEEHLEXAXA

SEQ ID NO: 52643 - protein, 34 aa, Artificial Sequence
  GFR-binding peptide
  MOD_RES (3), (4): Xaa is C or S
KPXXAPTQLRSVKVAKVDDSSNVIKEVQVNMVVR

SEQ ID NO: 52644 - protein, 43 aa, Artificial Sequence; identical to SEQ ID NO: 14478
  GFR-binding peptide
  MOD_RES (5), (6), (40), (42): Xaa is C or S
  MOD_RES (20), (21), (22), (23), (24): Xaa is A or G
  MOD_RES (25), (26), (27), (28): Xaa is A or G or is absent

SEQ ID NO: 52645 - protein, 35 aa, Artificial Sequence
  GFR-binding peptide
  MOD_RES (1), (2), (33), (35): Xaa is C or S
XXVSQDLRSVKIAKVIGKTPKIKEVQVMIVKSXKX

SEQ ID NO: 52646 - protein, 40 aa, Artificial Sequence
  GFR-binding peptide
  MOD_RES (2), (39): Xaa is C or S
  MOD_RES (18), (19), (20), (21), (22): Xaa is A or G
  MOD_RES (23), (24), (25), (26): Xaa is A or G or is absent
KXQPSRVHHEPLTVLYYXXXXXXXXXEQLSNRLEEHLEXA

SEQ ID NO: 52647 - protein, 33 aa, Artificial Sequence; identical to SEQ ID NO: 14482
  GFR-binding peptide
  MOD_RES (33), (33): Xaa is C or S
  MOD_RES (14), (15), (16), (17), (18): Xaa is A or G
  MOD_RES (19), (20), (21), (22): Xaa is A or G or is absent

SEQ ID NO: 52648 - protein, 32 aa, Artificial Sequence; identical to SEQ ID NO: 19459
  GFR-binding peptide
  MOD_RES (14), (15), (16), (17), (18): Xaa is A or G
  MOD_RES (19), (20), (21), (22): Xaa is A or G or is absent

SEQ ID NO: 52649 - protein, 42 aa, Artificial Sequence
  GFR-binding peptide
  MOD_RES (5), (6), (39), (41): Xaa is C or S
  MOD_RES (20), (21), (22), (23), (24): Xaa is A or G
  MOD_RES (25), (26), (27), (28): Xaa is A or G or is absent
SAAPXXVPQALRSVKIAKVXXXXXXXXXKEVQVMIVRSXKXS

SEQ ID NO: 52650 - protein, 37 aa, Artificial Sequence
  GFR-binding peptide
  MOD_RES (4), (5), (37): Xaa is C or S
PKAXXVPTELRSVKMAKVDEYDKVVKEVQVEMVVEGX

SEQ ID NO: 52651 - protein, 34 aa, Artificial Sequence
  GFR-binding peptide
  MOD_RES (2), (3): Xaa is C or S
PXXAPTKLRPVQVRKIDDSSNVIKKATVNMVVRS

SEQ ID NO: 52652 - protein, 38 aa, Artificial Sequence; identical to SEQ ID NO: 19464
  GFR-binding peptide
  MOD_RES (2), (2): Xaa is C or S
  MOD_RES (18), (19), (20), (21), (22): Xaa is A or G
  MOD_RES (23), (24), (25), (26): Xaa is A or G or is absent

SEQ ID NO: 52653 - protein, 43 aa, Artificial Sequence
  GFR-binding peptide
  MOD_RES (6), (7), (41), (43): Xaa is C or S
  MOD_RES (21), (22), (23), (24), (25): Xaa is A or G
  MOD_RES (26), (27), (28), (29): Xaa is A or G or is absent
KIPKAXXVPTELSNITMQIMXXXXXXXXXIGEMSDMVVEGXGX

SEQ ID NO: 52654 - protein, 41 aa, Artificial Sequence
  GFR-binding peptide
  MOD_RES (5), (39), (41): Xaa is C or S
  MOD_RES (19), (20), (21), (22), (23): Xaa is A or G
  MOD_RES (24), (25), (26), (27): Xaa is A or G or is absent
TKPTXAPTKLSNITVQIMXXXXXXXXXIGEMSNMVVRSXGX

SEQ ID NO: 52655 - protein, 36 aa, Artificial Sequence
  GFR-binding peptide
  MOD_RES (5), (6): Xaa is C or S
VPKPXXAPTQLRSVKVAKVDDSSNVIKEVQVNMVVR

SEQ ID NO: 52656 - protein, 42 aa, Artificial Sequence
  GFR-binding peptide
  MOD_RES (5), (42): Xaa is C or S
RNVQXRPTQVQLEPLPVVYYEIVRKKPIFEQLSNTLEDHLAX

SEQ ID NO: 52657 - protein, 39 aa, Artificial Sequence; identical to SEQ ID NO: 19467
  GFR-binding peptide
  MOD_RES (5), (5): Xaa is C or S
  MOD_RES (21), (22), (23), (24), (25): Xaa is A or G
  MOD_RES (26), (27), (28), (29): Xaa is A or G or is absent

SEQ ID NO: 52658 - protein, 33 aa, Artificial Sequence
  GFR-binding peptide
  MOD_RES (1), (1): Xaa is C or S
XVPTEEEPLPMVYYRIKPHQGQHEQLSNFLQHN

SEQ ID NO: 52659 - protein, 37 aa, Artificial Sequence
  GFR-binding peptide
  MOD_RES (1), (2), (36): Xaa is C or S
  MOD_RES (16), (17), (18), (19), (20): Xaa is A or G
  MOD_RES (21), (22), (23), (24): Xaa is A or G or is absent
XXVPTELRSVKMAKVXXXXXXXXXKEVQVEMVVEGXG

SEQ ID NO: 52660 - protein, 33 aa, Artificial Sequence
  GFR-binding peptide
TQVQLEPLTVLYYEIVRKKPIFEQLSNTLEDHL

SEQ ID NO: 52661 - protein, 35 aa, Artificial Sequence
  GFR-binding peptide
  MOD_RES (2), (3): Xaa is C or S
  MOD_RES (17), (18), (19), (20), (21): Xaa is A or G
  MOD_RES (22), (23), (24), (25): Xaa is A or G or is absent
PXXVPQALRSVKIAKVXXXXXXXXXKEVQVMIVRS

SEQ ID NO: 52662 - protein, 32 aa, Artificial Sequence; identical to SEQ ID NO: 14490
  GFR-binding peptide
  MOD_RES (31), (31): Xaa is C or S

SEQ ID NO: 52663 - protein, 40 aa, Artificial Sequence
  GFR-binding peptide
  MOD_RES (4), (4): Xaa is C or S
  MOD_RES (20), (21), (22), (23), (24): Xaa is A or G
  MOD_RES (25), (26), (27), (28): Xaa is A or G or is absent
SVKXQPSRVHHEPLTVLYYXXXXXXXXXEQLSNRLEEHLE

SEQ ID NO: 52664 - protein, 39 aa, Artificial Sequence
  GFR-binding peptide
  MOD_RES (2), (36), (38): Xaa is C or S
  MOD_RES (16), (17), (18), (19), (20): Xaa is A or G
  MOD_RES (21), (22), (23), (24): Xaa is A or G or is absent
TXAPTKLRSVKVAKVXXXXXXXXXKEVQVNMVVRSXGXH

SEQ ID NO: 52665 - protein, 40 aa, Artificial Sequence; identical to SEQ ID NO: 19473
  GFR-binding peptide
  MOD_RES (5), (39): Xaa is C or S

SEQ ID NO: 52666 - protein, 39 aa, Artificial Sequence; identical to SEQ ID NO: 19474
  GFR-binding peptide
  MOD_RES (3), (37), (39): Xaa is C or S

SEQ ID NO: 52667 - protein, 39 aa, Artificial Sequence
  GFR-binding peptide
  MOD_RES (4), (5), (37), (39): Xaa is C or S
PKPXXAPTQLRSVKVAKVDDSSNVIKEVQVNMVVRAXGX

SEQ ID NO: 52668 - protein, 37 aa, Artificial Sequence; identical to SEQ ID NO: 19475
  GFR-binding peptide
  MOD_RES (36), (36): Xaa is C or S
  MOD_RES (15), (16), (17), (18), (19): Xaa is A or G
  MOD_RES (20), (21), (22), (23): Xaa is A or G or is absent

SEQ ID NO: 52669 - protein, 39 aa, Artificial Sequence
  GFR-binding peptide
  MOD_RES (36), (38): Xaa is C or S
PTQVQLEPLPVVYYEIVRKKPIFEQLSNTLEDHLAXKXE

SEQ ID NO: 52670 - protein, 38 aa, Artificial Sequence; identical to SEQ ID NO: 14492
  GFR-binding peptide
  MOD_RES (6), (7): Xaa is C or S

SEQ ID NO: 52671 - protein, 34 aa, Artificial Sequence
  GFR-binding peptide
  MOD_RES (1), (2), (33): Xaa is C or S
XXVPQDLRPVQIRKIVGRTPKVKKATVMVVKSXK

SEQ ID NO: 52672 - protein, 41 aa, Artificial Sequence; identical to SEQ ID NO: 19478
  GFR-binding peptide
  MOD_RES (1), (38), (40): Xaa is C or S
  MOD_RES (17), (18), (19), (20), (21): Xaa is A or G
  MOD_RES (22), (23), (24), (25): Xaa is A or G or is absent

SEQ ID NO: 52673 - protein, 35 aa, Artificial Sequence
  GFR-binding peptide
  MOD_RES (3), (4), (35): Xaa is C or S
SPXXVPQDLSNITIQIMVGRTPKVIGEMSMVVKSX

SEQ ID NO: 52674 - protein, 41 aa, Artificial Sequence
  GFR-binding peptide
  MOD_RES (4), (5), (39), (41): Xaa is C or S
  MOD_RES (19), (20), (21), (22), (23): Xaa is A or G
  MOD_RES (24), (25), (26), (27): Xaa is A or G or is absent
PKAXXVPTELRPVQMRKIXXXXXXXXXKKATVDMVVEGXGX

SEQ ID NO: 52675 - protein, 41 aa, Artificial Sequence
  GFR-binding peptide
  MOD_RES (3), (4), (38), (40): Xaa is C or S
  MOD_RES (18), (19), (20), (21), (22): Xaa is A or G
  MOD_RES (23), (24), (25), (26): Xaa is A or G or is absent
KAXXVPTELRPVQMRKIXXXXXXXXXKKATVDMVVEGXGXR

SEQ ID NO: 52676 - protein, 37 aa, Artificial Sequence
  GFR-binding peptide
  MOD_RES (4), (5), (37): Xaa is C or S
PKPXXAPTKLRSVKVAKVDDSSNVIKEVQVNMVVRSX

SEQ ID NO: 52677 - protein, 41 aa, Artificial Sequence; identical to SEQ ID NO: 19481
  GFR-binding peptide
  MOD_RES (4), (41): Xaa is C or S
  MOD_RES (20), (21), (22), (23), (24): Xaa is A or G
  MOD_RES (25), (26), (27), (28): Xaa is A or G or is absent

SEQ ID NO: 52678 - protein, 34 aa, Artificial Sequence
  GFR-binding peptide
  MOD_RES (1), (2), (34): Xaa is C or S
XXAPTKLRSVKVAKVDDSSNVIKEVQVNMVVRSX

SEQ ID NO: 52679 - protein, 32 aa, Artificial Sequence
  GFR-binding peptide
  MOD_RES (1), (1): Xaa is C or S
XVPTELSNITMQIMDENEKVVIGEMSDMVVEG

SEQ ID NO: 52680 - protein, 38 aa, Artificial Sequence
  GFR-binding peptide
  MOD_RES (3), (4), (38): Xaa is C or S
  MOD_RES (18), (19), (20), (21), (22): Xaa is A or G
  MOD_RES (23), (24), (25), (26): Xaa is A or G or is absent
KAXXVPTELRPVQMRKIXXXXXXXXXKKATVEMVVEGX

SEQ ID NO: 52681 - protein, 36 aa, Artificial Sequence
  GFR-binding peptide
  MOD_RES (4), (5): Xaa is C or S
PKPXXAPTKLRSVKVAKVDDSSNVIKEVQVNMVVRS

SEQ ID NO: 52682 - protein, 40 aa, Artificial Sequence; identical to SEQ ID NO: 19484
  GFR-binding peptide
  MOD_RES (4), (4): Xaa is C or S
  MOD_RES (20), (21), (22), (23), (24): Xaa is A or G
  MOD_RES (25), (26), (27), (28): Xaa is A or G or is absent

SEQ ID NO: 52683 - protein, 39 aa, Artificial Sequence; identical to SEQ ID NO: 19485
  GFR-binding peptide
  MOD_RES (3), (37), (39): Xaa is C or S

SEQ ID NO: 52684 - protein, 39 aa, Artificial Sequence
  GFR-binding peptide
  MOD_RES (4), (5), (39): Xaa is C or S
  MOD_RES (19), (20), (21), (22), (23): Xaa is A or G
  MOD_RES (24), (25), (26), (27): Xaa is A or G or is absent
PKAXXVPTELSNITMQIMXXXXXXXXXIGEMSDMVVEGX

SEQ ID NO: 52685 - protein, 33 aa, Artificial Sequence; identical to SEQ ID NO: 14500
  GFR-binding peptide
  MOD_RES (1), (1): Xaa is C or S
  MOD_RES (15), (16), (17), (18), (19): Xaa is A or G
  MOD_RES (20), (21), (22), (23): Xaa is A or G or is absent

SEQ ID NO: 52686 - protein, 31 aa, Artificial Sequence; identical to SEQ ID NO: 14501
  GFR-binding peptide

SEQ ID NO: 52687 - protein, 39 aa, Artificial Sequence; identical to SEQ ID NO: 14503
  GFR-binding peptide
  MOD_RES (5), (6): Xaa is C or S
  MOD_RES (20), (21), (22), (23), (24): Xaa is A or G
  MOD_RES (25), (26), (27), (28): Xaa is A or G or is absent

SEQ ID NO: 52688 - protein, 40 aa, Artificial Sequence; identical to SEQ ID NO: 14504
  GFR-binding peptide
  MOD_RES (6), (7), (39): Xaa is C or S

SEQ ID NO: 52689 - protein, 34 aa, Artificial Sequence; identical to SEQ ID NO: 19490
  GFR-binding peptide
  MOD_RES (16), (17), (18), (19), (20): Xaa is A or G
  MOD_RES (21), (22), (23), (24): Xaa is A or G or is absent

SEQ ID NO: 52690 - protein, 44 aa, Artificial Sequence
  GFR-binding peptide
  MOD_RES (4), (41), (43): Xaa is C or S
NVQXRPTQVQLEPLTVLYYEIVRKKPIFEQLSNTLEDHLAXKXE

SEQ ID NO: 52691 - protein, 32 aa, Artificial Sequence; identical to SEQ ID NO: 14509
  GFR-binding peptide
  MOD_RES (14), (15), (16), (17), (18): Xaa is A or G
  MOD_RES (19), (20), (21), (22): Xaa is A or G or is absent

SEQ ID NO: 52692 - protein, 33 aa, Artificial Sequence
  GFR-binding peptide
  MOD_RES (2), (3): Xaa is C or S
PXXAPTQLRPVQVRKIDDSSNVIKKATVNMVVR

SEQ ID NO: 52693 - protein, 38 aa, Artificial Sequence
  GFR-binding peptide
  MOD_RES (6), (6): Xaa is C or S
  MOD_RES (20), (21), (22), (23), (24): Xaa is A or G
  MOD_RES (25), (26), (27), (28): Xaa is A or G or is absent
VTKPTXAPTKLRPVQVRKIXXXXXXXXXKKATVNMVVR

SEQ ID NO: 52694 - protein, 40 aa, Artificial Sequence; identical to SEQ ID NO: 19493
  GFR-binding peptide
  MOD_RES (2), (39): Xaa is C or S
  MOD_RES (18), (19), (20), (21), (22): Xaa is A or G
  MOD_RES (23), (24), (25), (26): Xaa is A or G or is absent

SEQ ID NO: 52695 - protein, 34 aa, Artificial Sequence
  GFR-binding peptide
  MOD_RES (1), (2), (34): Xaa is C or S
XXVPTELSNITMQIMDENEKVVIGEMSDMVVEGX

SEQ ID NO: 52696 - protein, 38 aa, Artificial Sequence
  GFR-binding peptide
  MOD_RES (4), (5): Xaa is C or S
  MOD_RES (19), (20), (21), (22), (23): Xaa is A or G
  MOD_RES (24), (25), (26), (27): Xaa is A or G or is absent
PKPXXAPTQLRSVKVAKVXXXXXXXXXKEVQVNMVVRA

SEQ ID NO: 52697 - protein, 39 aa, Artificial Sequence
  GFR-binding peptide
  MOD_RES (36), (38): Xaa is C or S
  MOD_RES (15), (16), (17), (18), (19): Xaa is A or G
  MOD_RES (20), (21), (22), (23): Xaa is A or G or is absent
PSRVHHEPLTVLYYXXXXXXXXXEQLSNRLEEHLEXAXA

SEQ ID NO: 52698 - protein, 35 aa, Artificial Sequence
  GFR-binding peptide
  MOD_RES (1), (33), (35): Xaa is C or S
XVPTELRPVQMRKIDEYDKVVKKATVEMVVEGXGX

SEQ ID NO: 52699 - protein, 39 aa, Artificial Sequence; identical to SEQ ID NO: 14510
  GFR-binding peptide
  MOD_RES (5), (6), (38): Xaa is C or S

SEQ ID NO: 52700 - protein, 35 aa, Artificial Sequence; identical to SEQ ID NO: 14513
  GFR-binding peptide
  MOD_RES (1), (2): Xaa is C or S
  MOD_RES (16), (17), (18), (19), (20): Xaa is A or G
  MOD_RES (21), (22), (23), (24): Xaa is A or G or is absent

SEQ ID NO: 52701 - protein, 39 aa, Artificial Sequence
  GFR-binding peptide
  MOD_RES (2), (3), (37), (39): Xaa is C or S
  MOD_RES (17), (18), (19), (20), (21): Xaa is A or G
  MOD_RES (22), (23), (24), (25): Xaa is A or G or is absent
PXXAPTKLRSVKVAKVXXXXXXXXXKEVQVNMVVRSXGX

SEQ ID NO: 52702 - protein, 38 aa, Artificial Sequence; identical to SEQ ID NO: 14514
  GFR-binding peptide
  MOD_RES (4), (5), (37): Xaa is C or S

SEQ ID NO: 52703 - protein, 42 aa, Artificial Sequence
  GFR-binding peptide
  MOD_RES (5), (6), (40), (42): Xaa is C or S
  MOD_RES (20), (21), (22), (23), (24): Xaa is A or G
  MOD_RES (25), (26), (27), (28): Xaa is A or G or is absent
VPKPXXAPTQLSNITVQIMXXXXXXXXXIGEMSNMVVRAXGX

SEQ ID NO: 52704 - protein, 39 aa, Artificial Sequence
  GFR-binding peptide
  MOD_RES (4), (4): Xaa is C or S
NVQXRPTQVQLEPLPVVYYEIVRKKPIFEQLSNTLEDHL

SEQ ID NO: 52705 - protein, 36 aa, Artificial Sequence
  GFR-binding peptide
  MOD_RES (2), (3), (35): Xaa is C or S
AXXVPTELSNITMQIMDEYDKVVIGEMSEMVVEGXG

SEQ ID NO: 52706 - protein, 37 aa, Artificial Sequence
  GFR-binding peptide
  MOD_RES (4), (5): Xaa is C or S
  MOD_RES (19), (20), (21), (22), (23): Xaa is A or G
  MOD_RES (24), (25), (26), (27): Xaa is A or G or is absent
ASPXXVSQDLRPVQIRKIXXXXXXXXXKKATVMIVKS

SEQ ID NO: 52707 - protein, 36 aa, Artificial Sequence
  GFR-binding peptide
  MOD_RES (2), (3): Xaa is C or S
  MOD_RES (17), (18), (19), (20), (21): Xaa is A or G
  MOD_RES (22), (23), (24), (25): Xaa is A or G or is absent
PXXAPTQLSNITVQIMXXXXXXXXXIGEMSNMVVRA

SEQ ID NO: 52708 - protein, 40 aa, Artificial Sequence; identical to SEQ ID NO: 19498
  GFR-binding peptide
  MOD_RES (4), (4): Xaa is C or S
  MOD_RES (20), (21), (22), (23), (24): Xaa is A or G
  MOD_RES (25), (26), (27), (28): Xaa is A or G or is absent

SEQ ID NO: 52709 - protein, 35 aa, Artificial Sequence
  GFR-binding peptide
  MOD_RES (1), (2), (33), (35): Xaa is C or S
XXVPQDLRPVQIRKIVGRTPKVKKATVMVVKSXKX

SEQ ID NO: 52710 - protein, 34 aa, Artificial Sequence
  GFR-binding peptide
  MOD_RES (3), (4): Xaa is C or S
SPXXVSQDLRPVQIRKIIGKTPKIKKATVMIVKS

SEQ ID NO: 52711 - protein, 39 aa, Artificial Sequence
  GFR-binding peptide
  MOD_RES (3), (4), (37), (39): Xaa is C or S
  MOD_RES (18), (19), (20), (21), (22): Xaa is A or G
  MOD_RES (23), (24), (25), (26): Xaa is A or G or is absent
SPXXVSQDLRPVQIRKIXXXXXXXXXKKATVMIVKSXKX

SEQ ID NO: 52712 - protein, 40 aa, Artificial Sequence
  GFR-binding peptide
  MOD_RES (5), (6), (39): Xaa is C or S
  MOD_RES (20), (21), (22), (23), (24): Xaa is A or G
  MOD_RES (25), (26), (27), (28): Xaa is A or G or is absent
SASPXXVPQDLSNITIQIMXXXXXXXXXIGEMSMVVKSXK

SEQ ID NO: 52713 - protein, 38 aa, Artificial Sequence; identical to SEQ ID NO: 14520
  GFR-binding peptide
  MOD_RES (3), (4), (38): Xaa is C or S
  MOD_RES (18), (19), (20), (21), (22): Xaa is A or G
  MOD_RES (23), (24), (25), (26): Xaa is A or G or is absent

SEQ ID NO: 52714 - protein, 38 aa, Artificial Sequence
  GFR-binding peptide
  MOD_RES (4), (5), (38): Xaa is C or S
  MOD_RES (19), (20), (21), (22), (23): Xaa is A or G
  MOD_RES (24), (25), (26), (27): Xaa is A or G or is absent
ASPXXVSQDLRPVQIRKIXXXXXXXXXKKATVMIVKSX

SEQ ID NO: 52715 - protein, 36 aa, Artificial Sequence
  GFR-binding peptide
  MOD_RES (1), (2), (34), (36): Xaa is C or S
XXAPTQLSNITVQIMDDSSNVIIGEMSNMVVRAXGX

SEQ ID NO: 52716 - protein, 42 aa, Artificial Sequence
  GFR-binding peptide
  MOD_RES (4), (41): Xaa is C or S
SVKXQPSRVHHEPLTVLYYEYVRKKPKLEQLSNRLEEHLEXA

SEQ ID NO: 52717 - protein, 39 aa, Artificial Sequence
  GFR-binding peptide
  MOD_RES (6), (6): Xaa is C or S
  MOD_RES (20), (21), (22), (23), (24): Xaa is A or G
  MOD_RES (25), (26), (27), (28): Xaa is A or G or is absent
DEGLEXVPTEEEPLPMVYYXXXXXXXXXEQLSNFLQHNK

SEQ ID NO: 52718 - protein, 35 aa, Artificial Sequence; identical to SEQ ID NO: 14523
  GFR-binding peptide
  MOD_RES (1), (32), (34): Xaa is C or S

SEQ ID NO: 52719 - protein, 38 aa, Artificial Sequence; identical to SEQ ID NO: 19512
  GFR-binding peptide
  MOD_RES (35), (37): Xaa is C or S
  MOD_RES (14), (15), (16), (17), (18): Xaa is A or G
  MOD_RES (19), (20), (21), (22): Xaa is A or G or is absent

SEQ ID NO: 52720 - protein, 35 aa, Artificial Sequence
  GFR-binding peptide
  MOD_RES (1), (2): Xaa is C or S
  MOD_RES (16), (17), (18), (19), (20): Xaa is A or G
  MOD_RES (21), (22), (23), (24): Xaa is A or G or is absent
XXAPTQLRSVKVAKVXXXXXXXXXKEVQVNMVVRA

SEQ ID NO: 52721 - protein, 39 aa, Artificial Sequence; identical to SEQ ID NO: 14524
  GFR-binding peptide
  MOD_RES (2), (3), (37), (39): Xaa is C or S
  MOD_RES (17), (18), (19), (20), (21): Xaa is A or G
  MOD_RES (22), (23), (24), (25): Xaa is A or G or is absent

SEQ ID NO: 52722 - protein, 40 aa, Artificial Sequence
  GFR-binding peptide
  MOD_RES (4), (5), (37), (39): Xaa is C or S
PKPXXAPTQLRSVKVAKVDDSSNVIKEVQVNMVVRAXGXH

SEQ ID NO: 52723 - protein, 34 aa, Artificial Sequence
  GFR-binding peptide
  MOD_RES (1), (33): Xaa is C or S
XAPTQLRSVKVAKVDDSSNVIKEVQVNMVVRAXG

SEQ ID NO: 52724 - protein, 37 aa, Artificial Sequence
  GFR-binding peptide
  MOD_RES (3), (35), (37): Xaa is C or S
PTXAPTKLRPVQVRKIDDSSNVIKKATVNMVVRSXGX

SEQ ID NO: 52725 - protein, 38 aa, Artificial Sequence; identical to SEQ ID NO: 19514
  GFR-binding peptide
  MOD_RES (36), (38): Xaa is C or S
  MOD_RES (15), (16), (17), (18), (19): Xaa is A or G
  MOD_RES (20), (21), (22), (23): Xaa is A or G or is absent

SEQ ID NO: 52726 - protein, 39 aa, Artificial Sequence; identical to SEQ ID NO: 14527
  GFR-binding peptide
  MOD_RES (4), (38): Xaa is C or S
  MOD_RES (18), (19), (20), (21), (22): Xaa is A or G
  MOD_RES (23), (24), (25), (26): Xaa is A or G or is absent

SEQ ID NO: 52727 - protein, 39 aa, Artificial Sequence; identical to SEQ ID NO: 19518
  GFR-binding peptide
  MOD_RES (5), (5): Xaa is C or S

SEQ ID NO: 52728 - protein, 35 aa, Artificial Sequence
  GFR-binding peptide
  MOD_RES (35), (35): Xaa is C or S
  MOD_RES (14), (15), (16), (17), (18): Xaa is A or G
  MOD_RES (19), (20), (21), (22): Xaa is A or G or is absent
SRVHHEPLTVLYYXXXXXXXXXEQLSNRLEEHLEX

SEQ ID NO: 52729 - protein, 41 aa, Artificial Sequence
  GFR-binding peptide
  MOD_RES (6), (7), (39), (41): Xaa is C or S
TVPKPXXAPTQLRPVQVRKIDDSSNVIKKATVNMVVRAXGX

SEQ ID NO: 52730 - protein, 36 aa, Artificial Sequence
  GFR-binding peptide
  MOD_RES (5), (6): Xaa is C or S
IPKAXXVPTELSNITMQIMDENEKVVIGEMSDMVVE

SEQ ID NO: 52731 - protein, 40 aa, Artificial Sequence
  GFR-binding peptide
  MOD_RES (2), (3), (37), (39): Xaa is C or S
  MOD_RES (17), (18), (19), (20), (21): Xaa is A or G
  MOD_RES (22), (23), (24), (25): Xaa is A or G or is absent
AXXVPTELRPVQMRKIXXXXXXXXXKKATVDMVVEGXGXR

SEQ ID NO: 52732 - protein, 41 aa, Artificial Sequence
  GFR-binding peptide
  MOD_RES (3), (40): Xaa is C or S
  MOD_RES (19), (20), (21), (22), (23): Xaa is A or G
  MOD_RES (24), (25), (26), (27): Xaa is A or G or is absent
VKXQPSRVHHEPLPVVYYXXXXXXXXXEQLSNRLEEHLEXA

SEQ ID NO: 52733 - protein, 37 aa, Artificial Sequence
  GFR-binding peptide
  MOD_RES (2), (3), (36): Xaa is C or S
  MOD_RES (17), (18), (19), (20), (21): Xaa is A or G
  MOD_RES (22), (23), (24), (25): Xaa is A or G or is absent
PXXVSQDLRPVQIRKIXXXXXXXXXKKATVMIVKSXK

SEQ ID NO: 52734 - protein, 34 aa, Artificial Sequence
  GFR-binding peptide
  MOD_RES (1), (32), (34): Xaa is C or S
XVPQALSNITIQIMVGRKPKVIGEMSMIVRSXKX

SEQ ID NO: 52735 - protein, 39 aa, Artificial Sequence
  GFR-binding peptide
  MOD_RES (5), (6), (38): Xaa is C or S
VPKPXXAPTQLSNITVQIMDDSSNVIIGEMSNMVVRAXG

SEQ ID NO: 52736 - protein, 42 aa, Artificial Sequence
  GFR-binding peptide
  MOD_RES (6), (7), (40), (42): Xaa is C or S
  MOD_RES (21), (22), (23), (24), (25): Xaa is A or G
  MOD_RES (26), (27), (28), (29): Xaa is A or G or is absent
ASASPXXVSQDLRPVQIRKIXXXXXXXXXKKATVMIVKSXKX

SEQ ID NO: 52737 - protein, 36 aa, Artificial Sequence
  GFR-binding peptide
  MOD_RES (2), (3), (36): Xaa is C or S
  MOD_RES (17), (18), (19), (20), (21): Xaa is A or G
  MOD_RES (22), (23), (24), (25): Xaa is A or G or is absent
PXXVPQALSNITIQIMXXXXXXXXXIGEMSMIVRSX

SEQ ID NO: 52738 - protein, 44 aa, Artificial Sequence
  GFR-binding peptide
  MOD_RES (4), (41), (43): Xaa is C or S
SVKXQPSRVHHEPLTVLYYEYVRKKPKLEQLSNRLEEHLEXAXA

SEQ ID NO: 52739 - protein, 40 aa, Artificial Sequence
  GFR-binding peptide
  MOD_RES (3), (4), (38), (40): Xaa is C or S
  MOD_RES (18), (19), (20), (21), (22): Xaa is A or G
  MOD_RES (23), (24), (25), (26): Xaa is A or G or is absent
KAXXVPTELSNITMQIMXXXXXXXXXIGEMSDMVVEGXGX

SEQ ID NO: 52740 - protein, 33 aa, Artificial Sequence
  GFR-binding peptide
  MOD_RES (1), (1): Xaa is C or S
  MOD_RES (15), (16), (17), (18), (19): Xaa is A or G
  MOD_RES (20), (21), (22), (23): Xaa is A or G or is absent
XVPTELSNITMQIMXXXXXXXXXIGEMSDMVVE

SEQ ID NO: 52741 - protein, 37 aa, Artificial Sequence; identical to SEQ ID NO: 14532
  GFR-binding peptide
  MOD_RES (4), (5), (37): Xaa is C or S

SEQ ID NO: 52742 - protein, 36 aa, Artificial Sequence; identical to SEQ ID NO: 14533
  GFR-binding peptide
  MOD_RES (1), (35): Xaa is C or S
  MOD_RES (15), (16), (17), (18), (19): Xaa is A or G
  MOD_RES (20), (21), (22), (23): Xaa is A or G or is absent

SEQ ID NO: 52743 - protein, 33 aa, Artificial Sequence; identical to SEQ ID NO: 14534
  GFR-binding peptide
  MOD_RES (1), (2): Xaa is C or S

SEQ ID NO: 52744 - protein, 40 aa, Artificial Sequence
  GFR-binding peptide
  MOD_RES (5), (6), (38), (40): Xaa is C or S
IPKAXXVPTELRSVKMAKVDEYDKVVKEVQVEMVVEGXGX

SEQ ID NO: 52745 - protein, 34 aa, Artificial Sequence
  GFR-binding peptide
  MOD_RES (14), (15), (16), (17), (18): Xaa is A or G
  MOD_RES (19), (20), (21), (22): Xaa is A or G or is absent
SRVHHEPLTVLYYXXXXXXXXXEQLSNRLEEHLE

SEQ ID NO: 52746 - protein, 42 aa, Artificial Sequence
  GFR-binding peptide
  MOD_RES (6), (7), (41): Xaa is C or S
  MOD_RES (21), (22), (23), (24), (25): Xaa is A or G
  MOD_RES (26), (27), (28), (29): Xaa is A or G or is absent
KIPKAXXVPTELRPVQMRKIXXXXXXXXXKKATVDMVVEGXG

SEQ ID NO: 52747 - protein, 40 aa, Artificial Sequence; identical to SEQ ID NO: 14535
  GFR-binding peptide
  MOD_RES (5), (39): Xaa is C or S
  MOD_RES (19), (20), (21), (22), (23): Xaa is A or G
  MOD_RES (24), (25), (26), (27): Xaa is A or G or is absent

SEQ ID NO: 52748 - protein, 35 aa, Artificial Sequence
  GFR-binding peptide
  MOD_RES (1), (35): Xaa is C or S
  MOD_RES (15), (16), (17), (18), (19): Xaa is A or G
  MOD_RES (20), (21), (22), (23): Xaa is A or G or is absent
XAPTKLRSVKVAKVXXXXXXXXXKEVQVNMVVRSX

SEQ ID NO: 52749 - protein, 34 aa, Artificial Sequence; identical to SEQ ID NO: 14536
  GFR-binding peptide
  MOD_RES (1), (1): Xaa is C or S
  MOD_RES (15), (16), (17), (18), (19): Xaa is A or G
  MOD_RES (20), (21), (22), (23): Xaa is A or G or is absent

SEQ ID NO: 52750 - protein, 37 aa, Artificial Sequence; identical to SEQ ID NO: 19528
  GFR-binding peptide
  MOD_RES (3), (3): Xaa is C or S
  MOD_RES (19), (20), (21), (22), (23): Xaa is A or G
  MOD_RES (24), (25), (26), (27): Xaa is A or G or is absent

SEQ ID NO: 52751 - protein, 35 aa, Artificial Sequence
  GFR-binding peptide
  MOD_RES (2), (3), (34): Xaa is C or S
PXXVPQALRPVQIRKIVGRKPKVKKATVMIVRSXK

SEQ ID NO: 52752 - protein, 35 aa, Artificial Sequence
  GFR-binding peptide
  MOD_RES (15), (16), (17), (18), (19): Xaa is A or G
  MOD_RES (20), (21), (22), (23): Xaa is A or G or is absent
PSRVHHEPLPVVYYXXXXXXXXXEQLSNRLEEHLE

SEQ ID NO: 52753 - protein, 37 aa, Artificial Sequence; identical to SEQ ID NO: 14538
  GFR-binding peptide
  MOD_RES (2), (3), (36): Xaa is C or S
  MOD_RES (17), (18), (19), (20), (21): Xaa is A or G
  MOD_RES (22), (23), (24), (25): Xaa is A or G or is absent

SEQ ID NO: 52754 - protein, 39 aa, Artificial Sequence
  GFR-binding peptide
  MOD_RES (37), (39): Xaa is C or S
QPSRVHHEPLTVLYYEYVRKKPKLEQLSNRLEEHLEXAX

SEQ ID NO: 52755 - protein, 37 aa, Artificial Sequence; identical to SEQ ID NO: 14539
  GFR-binding peptide
  MOD_RES (5), (37): Xaa is C or S

SEQ ID NO: 52756 - protein, 41 aa, Artificial Sequence; identical to SEQ ID NO: 19530
  GFR-binding peptide
  MOD_RES (5), (39), (41): Xaa is C or S

SEQ ID NO: 52757 - protein, 42 aa, Artificial Sequence
  GFR-binding peptide
  MOD_RES (6), (7), (40), (42): Xaa is C or S
  MOD_RES (21), (22), (23), (24), (25): Xaa is A or G
  MOD_RES (26), (27), (28), (29): Xaa is A or G or is absent
ASAAPXXVPQALRPVQIRKIXXXXXXXXXKKATVMIVRSXKX

SEQ ID NO: 52758 - protein, 36 aa, Artificial Sequence
  GFR-binding peptide
  MOD_RES (4), (36): Xaa is C or S
KPTXAPTKLRPVQVRKIDDSSNVIKKATVNMVVRSX

SEQ ID NO: 52759 - protein, 42 aa, Artificial Sequence; identical to SEQ ID NO: 14543
  GFR-binding peptide
  MOD_RES (5), (6), (39), (41): Xaa is C or S
  MOD_RES (20), (21), (22), (23), (24): Xaa is A or G
  MOD_RES (25), (26), (27), (28): Xaa is A or G or is absent

SEQ ID NO: 52760 - protein, 41 aa, Artificial Sequence
  GFR-binding peptide
  MOD_RES (5), (6), (38), (40): Xaa is C or S
IPKAXXVPTELSNITMQIMDENEKVVIGEMSDMVVEGXGXR

SEQ ID NO: 52761 - protein, 37 aa, Artificial Sequence; identical to SEQ ID NO: 19533
  GFR-binding peptide
  MOD_RES (3), (3): Xaa is C or S
  MOD_RES (19), (20), (21), (22), (23): Xaa is A or G
  MOD_RES (24), (25), (26), (27): Xaa is A or G or is absent

SEQ ID NO: 52762 - protein, 39 aa, Artificial Sequence
  GFR-binding peptide
  MOD_RES (36), (38): Xaa is C or S
  MOD_RES (15), (16), (17), (18), (19): Xaa is A or G
  MOD_RES (20), (21), (22), (23): Xaa is A or G or is absent
PTQVQLEPLPVVYYXXXXXXXXXEQLSNTLEDHLAXKXE

SEQ ID NO: 52763 - protein, 35 aa, Artificial Sequence
  GFR-binding peptide
  MOD_RES (1), (33), (35): Xaa is C or S
XVPTELRPVQMRKIDENEKVVKKATVDMVVEGXGX

SEQ ID NO: 52764 - protein, 42 aa, Artificial Sequence
  GFR-binding peptide
  MOD_RES (5), (39), (41): Xaa is C or S
  MOD_RES (19), (20), (21), (22), (23): Xaa is A or G
  MOD_RES (24), (25), (26), (27): Xaa is A or G or is absent
TKPTXAPTKLSNITVQIMXXXXXXXXXIGEMSNMVVRSXGXH

SEQ ID NO: 52765 - protein, 35 aa, Artificial Sequence; identical to SEQ ID NO: 14545
  GFR-binding peptide
  MOD_RES (4), (5): Xaa is C or S

SEQ ID NO: 52766 - protein, 35 aa, Artificial Sequence
  GFR-binding peptide
  MOD_RES (3), (3): Xaa is C or S
  MOD_RES (17), (18), (19), (20), (21): Xaa is A or G
  MOD_RES (22), (23), (24), (25): Xaa is A or G or is absent
PTXAPTKLRSVKVAKVXXXXXXXXXKEVQVNMVVR

SEQ ID NO: 52767 - protein, 39 aa, Artificial Sequence
  GFR-binding peptide
  MOD_RES (5), (39): Xaa is C or S
  MOD_RES (19), (20), (21), (22), (23): Xaa is A or G
  MOD_RES (24), (25), (26), (27): Xaa is A or G or is absent
EGLEXVPTEEEPLTMLYYXXXXXXXXXEQLSNFLQHNKX

SEQ ID NO: 52768 - protein, 41 aa, Artificial Sequence; identical to SEQ ID NO: 14546
  GFR-binding peptide
  MOD_RES (6), (7), (41): Xaa is C or S
  MOD_RES (21), (22), (23), (24), (25): Xaa is A or G
  MOD_RES (26), (27), (28), (29): Xaa is A or G or is absent

SEQ ID NO: 52769 - protein, 37 aa, Artificial Sequence
  GFR-binding peptide
  MOD_RES (1), (35), (37): Xaa is C or S
  MOD_RES (15), (16), (17), (18), (19): Xaa is A or G
  MOD_RES (20), (21), (22), (23): Xaa is A or G or is absent
XVPTELRSVKMAKVXXXXXXXXXKEVQVEMVVEGXGX

SEQ ID NO: 52770 - protein, 35 aa, Artificial Sequence
  GFR-binding peptide
  MOD_RES (4), (5): Xaa is C or S
AAPXXVPQALRSVKIAKVVGRKPKVKEVQVMIVRS

SEQ ID NO: 52771 - protein, 42 aa, Artificial Sequence
  GFR-binding peptide
  MOD_RES (6), (7), (41): Xaa is C or S
  MOD_RES (21), (22), (23), (24), (25): Xaa is A or G
  MOD_RES (26), (27), (28), (29): Xaa is A or G or is absent
SIPKAXXVPTELSNITMQIMXXXXXXXXXIGEMSEMVVEGXG

SEQ ID NO: 52772 - protein, 35 aa, Artificial Sequence
  GFR-binding peptide
  MOD_RES (1), (2), (34): Xaa is C or S
XXAPTKLSNITVQIMDDSSNVIIGEMSNMVVRSXG

SEQ ID NO: 52773 - protein, 34 aa, Artificial Sequence; identical to SEQ ID NO: 40097
  GFR-binding peptide
  MOD_RES (1), (2): Xaa is C or S
  MOD_RES (16), (17), (18), (19), (20): Xaa is A or G
  MOD_RES (21), (22), (23), (24): Xaa is A or G or is absent

SEQ ID NO: 52774 - protein, 39 aa, Artificial Sequence
  GFR-binding peptide
  MOD_RES (4), (5), (36), (38): Xaa is C or S
AAPXXVPQALRSVKIAKVVGRKPKVKEVQVMIVRSXKXS

SEQ ID NO: 52775 - protein, 40 aa, Artificial Sequence
  GFR-binding peptide
  MOD_RES (4), (5), (38), (40): Xaa is C or S
  MOD_RES (19), (20), (21), (22), (23): Xaa is A or G
  MOD_RES (24), (25), (26), (27): Xaa is A or G or is absent
AAPXXVPQALRSVKIAKVXXXXXXXXXKEVQVMIVRSXKX

SEQ ID NO: 52776 - protein, 37 aa, Artificial Sequence
  GFR-binding peptide
  MOD_RES (4), (5): Xaa is C or S
  MOD_RES (19), (20), (21), (22), (23): Xaa is A or G
  MOD_RES (24), (25), (26), (27): Xaa is A or G or is absent
PKPXXAPTQLRPVQVRKIXXXXXXXXXKKATVNMVVR

SEQ ID NO: 52777 - protein, 40 aa, Artificial Sequence; identical to SEQ ID NO: 14549
  GFR-binding peptide
  MOD_RES (7), (7): Xaa is C or S
  MOD_RES (21), (22), (23), (24), (25): Xaa is A or G
  MOD_RES (26), (27), (28), (29): Xaa is A or G or is absent

SEQ ID NO: 52778 - protein, 35 aa, Artificial Sequence
  GFR-binding peptide
  MOD_RES (3), (35): Xaa is C or S
PTXAPTKLRSVKVAKVDDSSNVIKEVQVNMVVRSX

SEQ ID NO: 52779 - protein, 32 aa, Artificial Sequence
  GFR-binding peptide
  MOD_RES (14), (15), (16), (17), (18): Xaa is A or G
  MOD_RES (19), (20), (21), (22): Xaa is A or G or is absent
VPTELRSVKMAKVXXXXXXXXXKEVQVEMVVE

SEQ ID NO: 52780 - protein, 37 aa, Artificial Sequence; identical to SEQ ID NO: 14550
  GFR-binding peptide
  MOD_RES (1), (2), (34), (36): Xaa is C or S

SEQ ID NO: 52781 - protein, 35 aa, Artificial Sequence
  GFR-binding peptide
  MOD_RES (1), (34): Xaa is C or S
  MOD_RES (15), (16), (17), (18), (19): Xaa is A or G
  MOD_RES (20), (21), (22), (23): Xaa is A or G or is absent
XVPQDLRPVQIRKIXXXXXXXXXKKATVMVVKSXK

SEQ ID NO: 52782 - protein, 36 aa, Artificial Sequence
  GFR-binding peptide
  MOD_RES (3), (35): Xaa is C or S
PTXAPTKLRPVQVRKIDDSSNVIKKATVNMVVRSXG

SEQ ID NO: 52783 - protein, 41 aa, Artificial Sequence; identical to SEQ ID NO: 14556
  GFR-binding peptide
  MOD_RES (6), (7), (39), (41): Xaa is C or S

SEQ ID NO: 52784 - protein, 34 aa, Artificial Sequence
  GFR-binding peptide
  MOD_RES (34), (34): Xaa is C or S
  MOD_RES (14), (15), (16), (17), (18): Xaa is A or G
  MOD_RES (19), (20), (21), (22): Xaa is A or G or is absent
VPTELRPVQMRKIXXXXXXXXXKKATVDMVVEGX

SEQ ID NO: 52785 - protein, 36 aa, Artificial Sequence
  GFR-binding peptide
  MOD_RES (1), (35): Xaa is C or S
  MOD_RES (15), (16), (17), (18), (19): Xaa is A or G
  MOD_RES (20), (21), (22), (23): Xaa is A or G or is absent
XAPTQLSNITVQIMXXXXXXXXXIGEMSNMVVRAXG

SEQ ID NO: 52786 - protein, 34 aa, Artificial Sequence
  GFR-binding peptide
  MOD_RES (1), (34): Xaa is C or S
  MOD_RES (15), (16), (17), (18), (19): Xaa is A or G
  MOD_RES (20), (21), (22), (23): Xaa is A or G or is absent
XVSQDLRPVQIRKIXXXXXXXXXKKATVMIVKSX

SEQ ID NO: 52787 - protein, 37 aa, Artificial Sequence; identical to SEQ ID NO: 19546
  GFR-binding peptide
  MOD_RES (34), (36): Xaa is C or S

SEQ ID NO: 52788 - protein, 37 aa, Artificial Sequence; identical to SEQ ID NO: 19547
  GFR-binding peptide
  MOD_RES (34), (36): Xaa is C or S
  MOD_RES (14), (15), (16), (17), (18): Xaa is A or G
  MOD_RES (19), (20), (21), (22): Xaa is A or G or is absent

SEQ ID NO: 52789 - protein, 43 aa, Artificial Sequence; identical to SEQ ID NO: 14561
  GFR-binding peptide
  MOD_RES (6), (7), (40), (42): Xaa is C or S
  MOD_RES (21), (22), (23), (24), (25): Xaa is A or G
  MOD_RES (26), (27), (28), (29): Xaa is A or G or is absent

SEQ ID NO: 52790 - protein, 37 aa, Artificial Sequence
  GFR-binding peptide
  MOD_RES (1), (2), (36): Xaa is C or S
  MOD_RES (16), (17), (18), (19), (20): Xaa is A or G
  MOD_RES (21), (22), (23), (24): Xaa is A or G or is absent
XXVPTELRPVQMRKIXXXXXXXXXKKATVEMVVEGXG

SEQ ID NO: 52791 - protein, 33 aa, Artificial Sequence
  GFR-binding peptide
  MOD_RES (1), (33): Xaa is C or S
XAPTQLRPVQVRKIDDSSNVIKKATVNMVVRAX

SEQ ID NO: 52792 - protein, 37 aa, Artificial Sequence; identical to SEQ ID NO: 14564
  GFR-binding peptide
  MOD_RES (1), (35), (37): Xaa is C or S
  MOD_RES (15), (16), (17), (18), (19): Xaa is A or G
  MOD_RES (20), (21), (22), (23): Xaa is A or G or is absent

SEQ ID NO: 52793 - protein, 35 aa, Artificial Sequence
  GFR-binding peptide
  MOD_RES (2), (3), (35): Xaa is C or S
AXXVPTELSNITMQIMDENEKVVIGEMSDMVVEGX

SEQ ID NO: 52794 - protein, 38 aa, Artificial Sequence; identical to SEQ ID NO: 19550
  GFR-binding peptide
  MOD_RES (3), (3): Xaa is C or S
  MOD_RES (19), (20), (21), (22), (23): Xaa is A or G
  MOD_RES (24), (25), (26), (27): Xaa is A or G or is absent

SEQ ID NO: 52795 - protein, 34 aa, Artificial Sequence; identical to SEQ ID NO: 14565
  GFR-binding peptide
  MOD_RES (1), (2), (34): Xaa is C or S

SEQ ID NO: 52796 - protein, 38 aa, Artificial Sequence; identical to SEQ ID NO: 14566
  GFR-binding peptide
  MOD_RES (2), (3), (35), (37): Xaa is C or S

SEQ ID NO: 52797 - protein, 33 aa, Artificial Sequence; identical to SEQ ID NO: 14567
  GFR-binding peptide
  MOD_RES (3), (3): Xaa is C or S

SEQ ID NO: 52798 - protein, 42 aa, Artificial Sequence
  GFR-binding peptide
  MOD_RES (3), (40), (42): Xaa is C or S
  MOD_RES (19), (20), (21), (22), (23): Xaa is A or G
  MOD_RES (24), (25), (26), (27): Xaa is A or G or is absent
VKXQPSRVHHEPLPVVYYXXXXXXXXXEQLSNRLEEHLEXAX

SEQ ID NO: 52799 - protein, 37 aa, Artificial Sequence
  GFR-binding peptide
  MOD_RES (5), (6): Xaa is C or S
VPKPXXAPTQLRSVKVAKVDDSSNVIKEVQVNMVVRA

SEQ ID NO: 52800 - protein, 36 aa, Artificial Sequence
  GFR-binding peptide
  MOD_RES (1), (1): Xaa is C or S
  MOD_RES (17), (18), (19), (20), (21): Xaa is A or G
  MOD_RES (22), (23), (24), (25): Xaa is A or G or is absent
XQPSRVHHEPLPVVYYXXXXXXXXXEQLSNRLEEHL

SEQ ID NO: 52801 - protein, 36 aa, Artificial Sequence
  GFR-binding peptide
  MOD_RES (2), (3), (35): Xaa is C or S
PXXAPTQLRSVKVAKVDDSSNVIKEVQVNMVVRAXG

SEQ ID NO: 52802 - protein, 38 aa, Artificial Sequence
  GFR-binding peptide
  MOD_RES (1), (35), (37): Xaa is C or S
  MOD_RES (15), (16), (17), (18), (19): Xaa is A or G
  MOD_RES (20), (21), (22), (23): Xaa is A or G or is absent
XAPTKLRSVKVAKVXXXXXXXXXKEVQVNMVVRSXGXH

SEQ ID NO: 52803 - protein, 42 aa, Artificial Sequence
  GFR-binding peptide
  MOD_RES (5), (6), (39), (41): Xaa is C or S
  MOD_RES (20), (21), (22), (23), (24): Xaa is A or G
  MOD_RES (25), (26), (27), (28): Xaa is A or G or is absent
SAAPXXVPQALRPVQIRKIXXXXXXXXXKKATVMIVRSXKXS

SEQ ID NO: 52804 - protein, 36 aa, Artificial Sequence
  GFR-binding peptide
RPTQVQLEPLPVVYYEIVRKKPIFEQLSNTLEDHLA

SEQ ID NO: 52805 - protein, 40 aa, Artificial Sequence; identical to SEQ ID NO: 19557
  GFR-binding peptide
  MOD_RES (37), (39): Xaa is C or S

SEQ ID NO: 52806 - protein, 41 aa, Artificial Sequence; identical to SEQ ID NO: 14574
  GFR-binding peptide
  MOD_RES (6), (7), (39), (41): Xaa is C or S

SEQ ID NO: 52807 - protein, 41 aa, Artificial Sequence; identical to SEQ ID NO: 40142
  GFR-binding peptide
  MOD_RES (6), (7), (40): Xaa is C or S
  MOD_RES (21), (22), (23), (24), (25): Xaa is A or G
  MOD_RES (26), (27), (28), (29): Xaa is A or G or is absent

SEQ ID NO: 52808 - protein, 33 aa, Artificial Sequence
  GFR-binding peptide
  MOD_RES (1), (33): Xaa is C or S
XVPTELRSVKMAKVDENEKVVKEVQVDMVVEGX

SEQ ID NO: 52809 - protein, 40 aa, Artificial Sequence
  GFR-binding peptide
  MOD_RES (4), (5), (38), (40): Xaa is C or S
  MOD_RES (19), (20), (21), (22), (23): Xaa is A or G
  MOD_RES (24), (25), (26), (27): Xaa is A or G or is absent
ASPXXVSQDLRSVKIAKVXXXXXXXXXKEVQVMIVKSXKX

SEQ ID NO: 52810 - protein, 37 aa, Artificial Sequence
  GFR-binding peptide
  MOD_RES (3), (4), (36): Xaa is C or S
KPXXAPTKLRPVQVRKIDDSSNVIKKATVNMVVRSXG

SEQ ID NO: 52811 - protein, 41 aa, Artificial Sequence; identical to SEQ ID NO: 14575
  GFR-binding peptide
  MOD_RES (4), (5), (39), (41): Xaa is C or S
  MOD_RES (19), (20), (21), (22), (23): Xaa is A or G
  MOD_RES (24), (25), (26), (27): Xaa is A or G or is absent

SEQ ID NO: 52812 - protein, 39 aa, Artificial Sequence; identical to SEQ ID NO: 14577
  GFR-binding peptide
  MOD_RES (4), (5), (36), (38): Xaa is C or S

SEQ ID NO: 52813 - protein, 34 aa, Artificial Sequence; identical to SEQ ID NO: 14578
  GFR-binding peptide
  MOD_RES (3), (4): Xaa is C or S

SEQ ID NO: 52814 - protein, 34 aa, Artificial Sequence; identical to SEQ ID NO: 14581
  GFR-binding peptide
  MOD_RES (3), (4): Xaa is C or S

SEQ ID NO: 52815 - protein, 43 aa, Artificial Sequence; identical to SEQ ID NO: 14582
  GFR-binding peptide
  MOD_RES (6), (40), (42): Xaa is C or S
  MOD_RES (20), (21), (22), (23), (24): Xaa is A or G
  MOD_RES (25), (26), (27), (28): Xaa is A or G or is absent

SEQ ID NO: 52816 - protein, 35 aa, Artificial Sequence; identical to SEQ ID NO: 19565
  GFR-binding peptide
  MOD_RES (35), (35): Xaa is C or S
  MOD_RES (14), (15), (16), (17), (18): Xaa is A or G
  MOD_RES (19), (20), (21), (22): Xaa is A or G or is absent

SEQ ID NO: 52817 - protein, 40 aa, Artificial Sequence; identical to SEQ ID NO: 14583
  GFR-binding peptide
  MOD_RES (3), (37), (39): Xaa is C or S
  MOD_RES (17), (18), (19), (20), (21): Xaa is A or G
  MOD_RES (22), (23), (24), (25): Xaa is A or G or is absent

SEQ ID NO: 52818 - protein, 43 aa, Artificial Sequence
  GFR-binding peptide
  MOD_RES (6), (7), (40), (42): Xaa is C or S
  MOD_RES (21), (22), (23), (24), (25): Xaa is A or G
  MOD_RES (26), (27), (28), (29): Xaa is A or G or is absent
ASASPXXVSQDLRPVQIRKIXXXXXXXXXKKATVMIVKSXKXS

SEQ ID NO: 52819 - protein, 39 aa, Artificial Sequence
  GFR-binding peptide
  MOD_RES (2), (39): Xaa is C or S
KXQPSRVHHEPLPVVYYEYVRKKPKLEQLSNRLEEHLEX

SEQ ID NO: 52820 - protein, 39 aa, Artificial Sequence; identical to SEQ ID NO: 14585
  GFR-binding peptide
  MOD_RES (2), (3), (37), (39): Xaa is C or S
  MOD_RES (17), (18), (19), (20), (21): Xaa is A or G
  MOD_RES (22), (23), (24), (25): Xaa is A or G or is absent

SEQ ID NO: 52821 - protein, 38 aa, Artificial Sequence
  GFR-binding peptide
  MOD_RES (2), (36), (38): Xaa is C or S
  MOD_RES (16), (17), (18), (19), (20): Xaa is A or G
  MOD_RES (21), (22), (23), (24): Xaa is A or G or is absent
EXVPTEEEPLPMVYYXXXXXXXXXEQLSNFLQHNKXEX

SEQ ID NO: 52822 - protein, 41 aa, Artificial Sequence
  GFR-binding peptide
  MOD_RES (5), (6), (38), (40): Xaa is C or S
VPKPXXAPTKLRSVKVAKVDDSSNVIKEVQVNMVVRSXGXH

SEQ ID NO: 52823 - protein, 35 aa, Artificial Sequence
  GFR-binding peptide
  MOD_RES (1), (33), (35): Xaa is C or S
XAPTQLRSVKVAKVDDSSNVIKEVQVNMVVRAXGX

SEQ ID NO: 52824 - protein, 36 aa, Artificial Sequence; identical to SEQ ID NO: 14593
  GFR-binding peptide
  MOD_RES (3), (4), (36): Xaa is C or S

SEQ ID NO: 52825 - protein, 32 aa, Artificial Sequence
  GFR-binding peptide
  MOD_RES (14), (15), (16), (17), (18): Xaa is A or G
  MOD_RES (19), (20), (21), (22): Xaa is A or G or is absent
VPQALRSVKIAKVXXXXXXXXXKEVQVMIVRS

SEQ ID NO: 52826 - protein, 38 aa, Artificial Sequence; identical to SEQ ID NO: 19569
  GFR-binding peptide
  MOD_RES (3), (37): Xaa is C or S

SEQ ID NO: 52827 - protein, 43 aa, Artificial Sequence; identical to SEQ ID NO: 19570
  GFR-binding peptide
  MOD_RES (7), (41), (43): Xaa is C or S
  MOD_RES (21), (22), (23), (24), (25): Xaa is A or G
  MOD_RES (26), (27), (28), (29): Xaa is A or G or is absent

SEQ ID NO: 52828 - protein, 42 aa, Artificial Sequence
  GFR-binding peptide
  MOD_RES (5), (6), (40), (42): Xaa is C or S
  MOD_RES (20), (21), (22), (23), (24): Xaa is A or G
  MOD_RES (25), (26), (27), (28): Xaa is A or G or is absent
IPKAXXVPTELRPVQMRKIXXXXXXXXXKKATVDMVVEGXGX

SEQ ID NO: 52829 - protein, 36 aa, Artificial Sequence; identical to SEQ ID NO: 14596
  GFR-binding peptide
  MOD_RES (2), (3), (35): Xaa is C or S

SEQ ID NO: 52830 - protein, 40 aa, Artificial Sequence
  GFR-binding peptide
  MOD_RES (3), (37), (39): Xaa is C or S
  MOD_RES (17), (18), (19), (20), (21): Xaa is A or G
  MOD_RES (22), (23), (24), (25): Xaa is A or G or is absent
LEXVPTEEEPLPMVYYXXXXXXXXXEQLSNFLQHNKXEXR

SEQ ID NO: 52831 - protein, 39 aa, Artificial Sequence
  GFR-binding peptide
  MOD_RES (3), (4), (37), (39): Xaa is C or S
  MOD_RES (18), (19), (20), (21), (22): Xaa is A or G
  MOD_RES (23), (24), (25), (26): Xaa is A or G or is absent
SPXXVPQDLRPVQIRKIXXXXXXXXXKKATVMVVKSXKX

SEQ ID NO: 52832 - protein, 39 aa, Artificial Sequence; identical to SEQ ID NO: 19575
  GFR-binding peptide
  MOD_RES (2), (36), (38): Xaa is C or S

SEQ ID NO: 52833 - protein, 33 aa, Artificial Sequence; identical to SEQ ID NO: 14598
  GFR-binding peptide
  MOD_RES (32), (32): Xaa is C or S

SEQ ID NO: 52834 - protein, 38 aa, Artificial Sequence
  GFR-binding peptide
  MOD_RES (3), (4), (35), (37): Xaa is C or S
SPXXVSQDLSNITIQIMIGKTPKIIGEMSMIVKSXKXS

SEQ ID NO: 52835 - protein, 41 aa, Artificial Sequence
  GFR-binding peptide
  MOD_RES (5), (5): Xaa is C or S
  MOD_RES (21), (22), (23), (24), (25): Xaa is A or G
  MOD_RES (26), (27), (28), (29): Xaa is A or G or is absent
RNVQXRPTQVQLEPLTVLYYXXXXXXXXXEQLSNTLEDHLA

SEQ ID NO: 52836 - protein, 40 aa, Artificial Sequence; identical to SEQ ID NO: 14600
  GFR-binding peptide
  MOD_RES (5), (6), (39): Xaa is C or S
  MOD_RES (20), (21), (22), (23), (24): Xaa is A or G
  MOD_RES (25), (26), (27), (28): Xaa is A or G or is absent

SEQ ID NO: 52837 - protein, 40 aa, Artificial Sequence; identical to SEQ ID NO: 14601
  GFR-binding peptide
  MOD_RES (6), (7), (39): Xaa is C or S

SEQ ID NO: 52838 - protein, 39 aa, Artificial Sequence
  GFR-binding peptide
  MOD_RES (2), (3), (37), (39): Xaa is C or S
  MOD_RES (17), (18), (19), (20), (21): Xaa is A or G
  MOD_RES (22), (23), (24), (25): Xaa is A or G or is absent
PXXAPTKLRPVQVRKIXXXXXXXXXKKATVNMVVRSXGX

SEQ ID NO: 52839 - protein, 34 aa, Artificial Sequence
  GFR-binding peptide
  MOD_RES (34), (34): Xaa is C or S
VPTEEEPLTMLYYRIKPHQGQHEQLSNFLQHNKX

SEQ ID NO: 52840 - protein, 39 aa, Artificial Sequence; identical to SEQ ID NO: 19581
  GFR-binding peptide
  MOD_RES (3), (3): Xaa is C or S
  MOD_RES (19), (20), (21), (22), (23): Xaa is A or G
  MOD_RES (24), (25), (26), (27): Xaa is A or G or is absent

SEQ ID NO: 52841 - protein, 41 aa, Artificial Sequence
  GFR-binding peptide
  MOD_RES (4), (5), (39), (41): Xaa is C or S
  MOD_RES (19), (20), (21), (22), (23): Xaa is A or G
  MOD_RES (24), (25), (26), (27): Xaa is A or G or is absent
PKAXXVPTELRSVKMAKVXXXXXXXXXKEVQVDMVVEGXGX

SEQ ID NO: 52842 - protein, 32 aa, Artificial Sequence
  GFR-binding peptide
  MOD_RES (32), (32): Xaa is C or S
APTQLSNITVQIMDDSSNVIIGEMSNMVVRAX

SEQ ID NO: 52843 - protein, 39 aa, Artificial Sequence
  GFR-binding peptide
  MOD_RES (6), (7), (39): Xaa is C or S
YVPKPXXAPTKLSNITVQIMDDSSNVIIGEMSNMVVRSX

SEQ ID NO: 52844 - protein, 32 aa, Artificial Sequence; identical to SEQ ID NO: 14608
  GFR-binding peptide
  MOD_RES (2), (2): Xaa is C or S

SEQ ID NO: 52845 - protein, 38 aa, Artificial Sequence
  GFR-binding peptide
  MOD_RES (2), (3), (35), (37): Xaa is C or S
PXXAPTKLSNITVQIMDDSSNVIIGEMSNMVVRSXGXH

SEQ ID NO: 52846 - protein, 35 aa, Artificial Sequence; identical to SEQ ID NO: 14609
  GFR-binding peptide
  MOD_RES (2), (2): Xaa is C or S
  MOD_RES (16), (17), (18), (19), (20): Xaa is A or G
  MOD_RES (21), (22), (23), (24): Xaa is A or G or is absent

SEQ ID NO: 52847 - protein, 33 aa, Artificial Sequence; identical to SEQ ID NO: 14611
  GFR-binding peptide
  MOD_RES (2), (3): Xaa is C or S

SEQ ID NO: 52848 - protein, 39 aa, Artificial Sequence
  GFR-binding peptide
  MOD_RES (3), (4), (38): Xaa is C or S
  MOD_RES (18), (19), (20), (21), (22): Xaa is A or G
  MOD_RES (23), (24), (25), (26): Xaa is A or G or is absent
KAXXVPTELRPVQMRKIXXXXXXXXXKKATVDMVVEGXG

SEQ ID NO: 52849 - protein, 36 aa, Artificial Sequence; identical to SEQ ID NO: 14612
  GFR-binding peptide
  MOD_RES (1), (35): Xaa is C or S
  MOD_RES (15), (16), (17), (18), (19): Xaa is A or G
  MOD_RES (20), (21), (22), (23): Xaa is A or G or is absent

SEQ ID NO: 52850 - protein, 33 aa, Artificial Sequence; identical to SEQ ID NO: 14613
  GFR-binding peptide
  MOD_RES (14), (15), (16), (17), (18): Xaa is A or G
  MOD_RES (19), (20), (21), (22): Xaa is A or G or is absent

SEQ ID NO: 52851 - protein, 34 aa, Artificial Sequence
  GFR-binding peptide
TQVQLEPLTVLYYEIVRKKPIFEQLSNTLEDHLA

SEQ ID NO: 52852 - protein, 34 aa, Artificial Sequence; identical to SEQ ID NO: 14614
  GFR-binding peptide
  MOD_RES (2), (2): Xaa is C or S
  MOD_RES (16), (17), (18), (19), (20): Xaa is A or G
  MOD_RES (21), (22), (23), (24): Xaa is A or G or is absent

SEQ ID NO: 52853 - protein, 40 aa, Artificial Sequence
  GFR-binding peptide
  MOD_RES (7), (7): Xaa is C or S
  MOD_RES (21), (22), (23), (24), (25): Xaa is A or G
  MOD_RES (26), (27), (28), (29): Xaa is A or G or is absent
NDEGLEXVPTEEEPLPMVYYXXXXXXXXXEQLSNFLQHNK

SEQ ID NO: 52854 - protein, 36 aa, Artificial Sequence
  GFR-binding peptide
  MOD_RES (33), (35): Xaa is C or S
  MOD_RES (14), (15), (16), (17), (18): Xaa is A or G
  MOD_RES (19), (20), (21), (22): Xaa is A or G or is absent
VPQDLRPVQIRKIXXXXXXXXXKKATVMVVKSXKXS

SEQ ID NO: 52855 - protein, 37 aa, Artificial Sequence; identical to SEQ ID NO: 14623
  GFR-binding peptide
  MOD_RES (3), (4), (36): Xaa is C or S

SEQ ID NO: 52856 - protein, 37 aa, Artificial Sequence; identical to SEQ ID NO: 19599
  GFR-binding peptide
  MOD_RES (3), (37): Xaa is C or S

SEQ ID NO: 52857 - protein, 41 aa, Artificial Sequence
  GFR-binding peptide
  MOD_RES (6), (40): Xaa is C or S
  MOD_RES (20), (21), (22), (23), (24): Xaa is A or G
  MOD_RES (25), (26), (27), (28): Xaa is A or G or is absent
DEGLEXVPTEEEPLPMVYYXXXXXXXXXEQLSNFLQHNKXE

SEQ ID NO: 52858 - protein, 39 aa, Artificial Sequence; identical to SEQ ID NO: 14625
  GFR-binding peptide
  MOD_RES (3), (4), (36), (38): Xaa is C or S

SEQ ID NO: 52859 - protein, 33 aa, Artificial Sequence
  GFR-binding peptide
  MOD_RES (1), (2): Xaa is C or S
XXAPTKLSNITVQIMDDSSNVIIGEMSNMVVRS

SEQ ID NO: 52860 - protein, 39 aa, Artificial Sequence
  GFR-binding peptide
  MOD_RES (4), (5), (38): Xaa is C or S
  MOD_RES (19), (20), (21), (22), (23): Xaa is A or G
  MOD_RES (24), (25), (26), (27): Xaa is A or G or is absent
ASPXXVSQDLRSVKIAKVXXXXXXXXXKEVQVMIVKSXK

SEQ ID NO: 52861 - protein, 37 aa, Artificial Sequence; identical to SEQ ID NO: 19601
  GFR-binding peptide
  MOD_RES (5), (5): Xaa is C or S
  MOD_RES (19), (20), (21), (22), (23): Xaa is A or G
  MOD_RES (24), (25), (26), (27): Xaa is A or G or is absent

SEQ ID NO: 52862 - protein, 40 aa, Artificial Sequence
  GFR-binding peptide
  MOD_RES (6), (7), (40): Xaa is C or S
  MOD_RES (21), (22), (23), (24), (25): Xaa is A or G
  MOD_RES (26), (27), (28), (29): Xaa is A or G or is absent
ASAAPXXVPQALRSVKIAKVXXXXXXXXXKEVQVMIVRSX

SEQ ID NO: 52863 - protein, 35 aa, Artificial Sequence
  GFR-binding peptide
RPTQVQLEPLPVVYYEIVRKKPIFEQLSNTLEDHL

SEQ ID NO: 52864 - protein, 33 aa, Artificial Sequence
  GFR-binding peptide
  MOD_RES (1), (1): Xaa is C or S
XVPTEEEPLTMLYYRIKPHQGQHEQLSNFLQHN

SEQ ID NO: 52865 - protein, 41 aa, Artificial Sequence; identical to SEQ ID NO: 19602
  GFR-binding peptide
  MOD_RES (4), (41): Xaa is C or S

SEQ ID NO: 52866 - protein, 39 aa, Artificial Sequence; identical to SEQ ID NO: 40228
  GFR-binding peptide
  MOD_RES (2), (3), (36), (38): Xaa is C or S
  MOD_RES (17), (18), (19), (20), (21): Xaa is A or G
  MOD_RES (22), (23), (24), (25): Xaa is A or G or is absent

SEQ ID NO: 52867 - protein, 36 aa, Artificial Sequence
  GFR-binding peptide
  MOD_RES (4), (5), (36): Xaa is C or S
ASPXXVPQDLRSVKIAKVVGRTPKVKEVQVMVVKSX

SEQ ID NO: 52868 - protein, 34 aa, Artificial Sequence
  GFR-binding peptide
  MOD_RES (3), (4): Xaa is C or S
KPXXAPTQLSNITVQIMDDSSNVIIGEMSNMVVR

SEQ ID NO: 52869 - protein, 40 aa, Artificial Sequence
  GFR-binding peptide
  MOD_RES (5), (5): Xaa is C or S
SSVKXQPSRVHHEPLTVLYYEYVRKKPKLEQLSNRLEEHL

SEQ ID NO: 52870 - protein, 37 aa, Artificial Sequence
  GFR-binding peptide
  MOD_RES (5), (37): Xaa is C or S
TKPTXAPTKLRPVQVRKIDDSSNVIKKATVNMVVRSX

SEQ ID NO: 52871 - protein, 39 aa, Artificial Sequence; identical to SEQ ID NO: 19603
  GFR-binding peptide
  MOD_RES (7), (7): Xaa is C or S
  MOD_RES (21), (22), (23), (24), (25): Xaa is A or G
  MOD_RES (26), (27), (28), (29): Xaa is A or G or is absent

SEQ ID NO: 52872 - protein, 35 aa, Artificial Sequence
  GFR-binding peptide
  MOD_RES (1), (35): Xaa is C or S
XVPTEEEPLTMLYYRIKPHQGQHEQLSNFLQHNKX

SEQ ID NO: 52873 - protein, 35 aa, Artificial Sequence
  GFR-binding peptide
  MOD_RES (2), (3): Xaa is C or S
  MOD_RES (17), (18), (19), (20), (21): Xaa is A or G
  MOD_RES (22), (23), (24), (25): Xaa is A or G or is absent
AXXVPTELSNITMQIMXXXXXXXXXIGEMSEMVVE

SEQ ID NO: 52874 - protein, 38 aa, Artificial Sequence
  GFR-binding peptide
  MOD_RES (5), (6): Xaa is C or S
  MOD_RES (20), (21), (22), (23), (24): Xaa is A or G
  MOD_RES (25), (26), (27), (28): Xaa is A or G or is absent
IPKAXXVPTELSNITMQIMXXXXXXXXXIGEMSDMVVE

SEQ ID NO: 52875 - protein, 35 aa, Artificial Sequence
  GFR-binding peptide
  MOD_RES (33), (35): Xaa is C or S
  MOD_RES (14), (15), (16), (17), (18): Xaa is A or G
  MOD_RES (19), (20), (21), (22): Xaa is A or G or is absent
VPQDLRPVQIRKIXXXXXXXXXKKATVMVVKSXKX

SEQ ID NO: 52876 - protein, 43 aa, Artificial Sequence
  GFR-binding peptide
  MOD_RES (3), (40), (42): Xaa is C or S
VQXRPTQVQLEPLPVVYYEIVRKKPIFEQLSNTLEDHLAXKXE

SEQ ID NO: 52877 - protein, 38 aa, Artificial Sequence
  GFR-binding peptide
  MOD_RES (6), (7): Xaa is C or S
YVPKPXXAPTKLRSVKVAKVDDSSNVIKEVQVNMVVRS

SEQ ID NO: 52878 - protein, 33 aa, Artificial Sequence
  GFR-binding peptide
  MOD_RES (1), (1): Xaa is C or S
  MOD_RES (15), (16), (17), (18), (19): Xaa is A or G
  MOD_RES (20), (21), (22), (23): Xaa is A or G or is absent
XVPQDLSNITIQIMXXXXXXXXXIGEMSMVVKS

SEQ ID NO: 52879 - protein, 38 aa, Artificial Sequence
  GFR-binding peptide
  MOD_RES (6), (6): Xaa is C or S
  MOD_RES (20), (21), (22), (23), (24): Xaa is A or G
  MOD_RES (25), (26), (27), (28): Xaa is A or G or is absent
VTKPTXAPTKLRSVKVAKVXXXXXXXXXKEVQVNMVVR

SEQ ID NO: 52880 - protein, 42 aa, Artificial Sequence
  GFR-binding peptide
  MOD_RES (6), (40), (42): Xaa is C or S
  MOD_RES (20), (21), (22), (23), (24): Xaa is A or G
  MOD_RES (25), (26), (27), (28): Xaa is A or G or is absent
VTKPTXAPTKLRPVQVRKIXXXXXXXXXKKATVNMVVRSXGX

SEQ ID NO: 52881 - protein, 35 aa, Artificial Sequence
  GFR-binding peptide
  MOD_RES (33), (35): Xaa is C or S
  MOD_RES (14), (15), (16), (17), (18): Xaa is A or G
  MOD_RES (19), (20), (21), (22): Xaa is A or G or is absent
VSQDLRSVKIAKVXXXXXXXXXKEVQVMIVKSXKX

SEQ ID NO: 52882 - protein, 37 aa, Artificial Sequence
  GFR-binding peptide
  MOD_RES (3), (4), (36): Xaa is C or S
KAXXVPTELRSVKMAKVDEYDKVVKEVQVEMVVEGXG

SEQ ID NO: 52883 - protein, 37 aa, Artificial Sequence; identical to SEQ ID NO: 14636
  GFR-binding peptide
  MOD_RES (4), (4): Xaa is C or S
  MOD_RES (18), (19), (20), (21), (22): Xaa is A or G
  MOD_RES (23), (24), (25), (26): Xaa is A or G or is absent

SEQ ID NO: 52884 - protein, 37 aa, Artificial Sequence
  GFR-binding peptide
  MOD_RES (2), (2): Xaa is C or S
QXRPTQVQLEPLPVVYYEIVRKKPIFEQLSNTLEDHL

SEQ ID NO: 52885 - protein, 35 aa, Artificial Sequence; identical to SEQ ID NO: 14638
  GFR-binding peptide
  MOD_RES (1), (35): Xaa is C or S
  MOD_RES (15), (16), (17), (18), (19): Xaa is A or G
  MOD_RES (20), (21), (22), (23): Xaa is A or G or is absent

SEQ ID NO: 52886 - protein, 32 aa, Artificial Sequence
  GFR-binding peptide
VPTEEEPLPMVYYRIKPHQGQHEQLSNFLQHN

SEQ ID NO: 52887 - protein, 34 aa, Artificial Sequence
  GFR-binding peptide
  MOD_RES (1), (2), (34): Xaa is C or S
XXAPTQLRPVQVRKIDDSSNVIKKATVNMVVRAX

SEQ ID NO: 52888 - protein, 40 aa, Artificial Sequence; identical to SEQ ID NO: 19611
  GFR-binding peptide
  MOD_RES (37), (39): Xaa is C or S
  MOD_RES (16), (17), (18), (19), (20): Xaa is A or G
  MOD_RES (21), (22), (23), (24): Xaa is A or G or is absent

SEQ ID NO: 52889 - protein, 41 aa, Artificial Sequence
  GFR-binding peptide
  MOD_RES (4), (41): Xaa is C or S
  MOD_RES (20), (21), (22), (23), (24): Xaa is A or G
  MOD_RES (25), (26), (27), (28): Xaa is A or G or is absent
SVKXQPSRVHHEPLTVLYYXXXXXXXXXEQLSNRLEEHLEX

SEQ ID NO: 52890 - protein, 35 aa, Artificial Sequence
  GFR-binding peptide
  MOD_RES (33), (35): Xaa is C or S
  MOD_RES (14), (15), (16), (17), (18): Xaa is A or G
  MOD_RES (19), (20), (21), (22): Xaa is A or G or is absent
VPQALRPVQIRKIXXXXXXXXXKKATVMIVRSXKX

SEQ ID NO: 52891 - protein, 39 aa, Artificial Sequence
  GFR-binding peptide
  MOD_RES (2), (39): Xaa is C or S
  MOD_RES (18), (19), (20), (21), (22): Xaa is A or G
  MOD_RES (23), (24), (25), (26): Xaa is A or G or is absent
QXRPTQVQLEPLPVVYYXXXXXXXXXEQLSNTLEDHLAX

SEQ ID NO: 52892 - protein, 39 aa, Artificial Sequence; identical to SEQ ID NO: 19613
  GFR-binding peptide
  MOD_RES (6), (6): Xaa is C or S
  MOD_RES (20), (21), (22), (23), (24): Xaa is A or G
  MOD_RES (25), (26), (27), (28): Xaa is A or G or is absent

SEQ ID NO: 52893 - protein, 32 aa, Artificial Sequence
  GFR-binding peptide
  MOD_RES (1), (2): Xaa is C or S
XXVSQDLRPVQIRKIIGKTPKIKKATVMIVKS

SEQ ID NO: 52894 - protein, 36 aa, Artificial Sequence; identical to SEQ ID NO: 14639
  GFR-binding peptide
  MOD_RES (1), (33), (35): Xaa is C or S

SEQ ID NO: 52895 - protein, 42 aa, Artificial Sequence; identical to SEQ ID NO: 14642
  GFR-binding peptide
  MOD_RES (5), (6), (40), (42): Xaa is C or S
  MOD_RES (20), (21), (22), (23), (24): Xaa is A or G
  MOD_RES (25), (26), (27), (28): Xaa is A or G or is absent

SEQ ID NO: 52896 - protein, 40 aa, Artificial Sequence; identical to SEQ ID NO: 14643
  GFR-binding peptide
  MOD_RES (3), (4), (38), (40): Xaa is C or S
  MOD_RES (18), (19), (20), (21), (22): Xaa is A or G
  MOD_RES (23), (24), (25), (26): Xaa is A or G or is absent

SEQ ID NO: 52897 - protein, 37 aa, Artificial Sequence; identical to SEQ ID NO: 14644
  GFR-binding peptide
  MOD_RES (1), (2), (36): Xaa is C or S
  MOD_RES (16), (17), (18), (19), (20): Xaa is A or G
  MOD_RES (21), (22), (23), (24): Xaa is A or G or is absent

SEQ ID NO: 52898 - protein, 38 aa, Artificial Sequence; identical to SEQ ID NO: 14646
  GFR-binding peptide
  MOD_RES (5), (6): Xaa is C or S
  MOD_RES (20), (21), (22), (23), (24): Xaa is A or G
  MOD_RES (25), (26), (27), (28): Xaa is A or G or is absent

SEQ ID NO: 52899 - protein, 33 aa, Artificial Sequence
  GFR-binding peptide
  MOD_RES (31), (33): Xaa is C or S
VPQALSNITIQIMVGRKPKVIGEMSMIVRSXKX

SEQ ID NO: 52900 - protein, 36 aa, Artificial Sequence; identical to SEQ ID NO: 19618
  GFR-binding peptide

SEQ ID NO: 52901 - protein, 36 aa, Artificial Sequence; identical to SEQ ID NO: 19619
  GFR-binding peptide
  MOD_RES (36), (36): Xaa is C or S

SEQ ID NO: 52902 - protein, 38 aa, Artificial Sequence; identical to SEQ ID NO: 19620
  GFR-binding peptide
  MOD_RES (4), (38): Xaa is C or S
  MOD_RES (18), (19), (20), (21), (22): Xaa is A or G
  MOD_RES (23), (24), (25), (26): Xaa is A or G or is absent

SEQ ID NO: 52903 - protein, 34 aa, Artificial Sequence; identical to SEQ ID NO: 14647
  GFR-binding peptide
  MOD_RES (32), (34): Xaa is C or S

SEQ ID NO: 52904 - protein, 38 aa, Artificial Sequence
  GFR-binding peptide
  MOD_RES (6), (7): Xaa is C or S
SIPKAXXVPTELRSVKMAKVDEYDKVVKEVQVEMVVEG

SEQ ID NO: 52905 - protein, 43 aa, Artificial Sequence; identical to SEQ ID NO: 14650
  GFR-binding peptide
  MOD_RES (6), (7), (41), (43): Xaa is C or S
  MOD_RES (21), (22), (23), (24), (25): Xaa is A or G
  MOD_RES (26), (27), (28), (29): Xaa is A or G or is absent

SEQ ID NO: 52906 - protein, 32 aa, Artificial Sequence; identical to SEQ ID NO: 14651
  GFR-binding peptide
  MOD_RES (32), (32): Xaa is C or S

SEQ ID NO: 52907 - protein, 40 aa, Artificial Sequence
  GFR-binding peptide
  MOD_RES (3), (4), (38), (40): Xaa is C or S
  MOD_RES (18), (19), (20), (21), (22): Xaa is A or G
  MOD_RES (23), (24), (25), (26): Xaa is A or G or is absent
KPXXAPTQLRPVQVRKIXXXXXXXXXKKATVNMVVRAXGX

SEQ ID NO: 52908 - protein, 38 aa, Artificial Sequence; identical to SEQ ID NO: 14655
  GFR-binding peptide
  MOD_RES (6), (7): Xaa is C or S

SEQ ID NO: 52909 - protein, 38 aa, Artificial Sequence
  GFR-binding peptide
  MOD_RES (7), (7): Xaa is C or S
HVTKPTXAPTKLRSVKVAKVDDSSNVIKEVQVNMVVRS

SEQ ID NO: 52910 - protein, 43 aa, Artificial Sequence; identical to SEQ ID NO: 14659
  GFR-binding peptide
  MOD_RES (7), (41), (43): Xaa is C or S
  MOD_RES (21), (22), (23), (24), (25): Xaa is A or G
  MOD_RES (26), (27), (28), (29): Xaa is A or G or is absent

SEQ ID NO: 52911 - protein, 31 aa, Artificial Sequence; identical to SEQ ID NO: 14661
  GFR-binding peptide
  MOD_RES (1), (1): Xaa is C or S

SEQ ID NO: 52912 - protein, 34 aa, Artificial Sequence; identical to SEQ ID NO: 19625
  GFR-binding peptide
  MOD_RES (1), (1): Xaa is C or S

SEQ ID NO: 52913 - protein, 44 aa, Artificial Sequence; identical to SEQ ID NO: 19628
  GFR-binding peptide
  MOD_RES (4), (41), (43): Xaa is C or S

SEQ ID NO: 52914 - protein, 38 aa, Artificial Sequence; identical to SEQ ID NO: 14662
  GFR-binding peptide
  MOD_RES (4), (5): Xaa is C or S
  MOD_RES (19), (20), (21), (22), (23): Xaa is A or G
  MOD_RES (24), (25), (26), (27): Xaa is A or G or is absent

SEQ ID NO: 52915 - protein, 37 aa, Artificial Sequence
  GFR-binding peptide
  MOD_RES (2), (3), (37): Xaa is C or S
  MOD_RES (17), (18), (19), (20), (21): Xaa is A or G
  MOD_RES (22), (23), (24), (25): Xaa is A or G or is absent
PXXAPTKLRPVQVRKIXXXXXXXXXKKATVNMVVRSX

SEQ ID NO: 52916 - protein, 38 aa, Artificial Sequence
  GFR-binding peptide
  MOD_RES (2), (36), (38): Xaa is C or S
EXVPTEEEPLTMLYYRIKPHQGQHEQLSNFLQHNKXEX

SEQ ID NO: 52917 - protein, 40 aa, Artificial Sequence
  GFR-binding peptide
  MOD_RES (4), (38), (40): Xaa is C or S
  MOD_RES (18), (19), (20), (21), (22): Xaa is A or G
  MOD_RES (23), (24), (25), (26): Xaa is A or G or is absent
GLEXVPTEEEPLTMLYYXXXXXXXXXEQLSNFLQHNKXEX

SEQ ID NO: 52918 - protein, 38 aa, Artificial Sequence
  GFR-binding peptide
  MOD_RES (1), (2), (36), (38): Xaa is C or S
  MOD_RES (16), (17), (18), (19), (20): Xaa is A or G
  MOD_RES (21), (22), (23), (24): Xaa is A or G or is absent
XXVPTELSNITMQIMXXXXXXXXXIGEMSEMVVEGXGX

SEQ ID NO: 52919 - protein, 36 aa, Artificial Sequence
  GFR-binding peptide
  MOD_RES (34), (36): Xaa is C or S
VPTEEEPLTMLYYRIKPHQGQHEQLSNFLQHNKXEX

SEQ ID NO: 52920 - protein, 38 aa, Artificial Sequence
  GFR-binding peptide
  MOD_RES (35), (37): Xaa is C or S
SRVHHEPLTVLYYEYVRKKPKLEQLSNRLEEHLEXAXA

SEQ ID NO: 52921 - protein, 41 aa, Artificial Sequence; identical to SEQ ID NO: 14665
  GFR-binding peptide
  MOD_RES (6), (7), (39), (41): Xaa is C or S

SEQ ID NO: 52922 - protein, 31 aa, Artificial Sequence
  GFR-binding peptide
  MOD_RES (31), (31): Xaa is C or S
VPQDLRPVQIRKIVGRTPKVKKATVMVVKSX

SEQ ID NO: 52923 - protein, 41 aa, Artificial Sequence
  GFR-binding peptide
  MOD_RES (5), (6), (38), (40): Xaa is C or S
IPKAXXVPTELRSVKMAKVDENEKVVKEVQVDMVVEGXGXR

SEQ ID NO: 52924 - protein, 39 aa, Artificial Sequence
  GFR-binding peptide
  MOD_RES (6), (7): Xaa is C or S
  MOD_RES (21), (22), (23), (24), (25): Xaa is A or G
  MOD_RES (26), (27), (28), (29): Xaa is A or G or is absent
YVPKPXXAPTKLSNITVQIMXXXXXXXXXIGEMSNMVVR

SEQ ID NO: 52925 - protein, 40 aa, Artificial Sequence; identical to SEQ ID NO: 19633
  GFR-binding peptide
  MOD_RES (4), (4): Xaa is C or S

SEQ ID NO: 52926 - protein, 30 aa, Artificial Sequence; identical to SEQ ID NO: 14666
  GFR-binding peptide

SEQ ID NO: 52927 - protein, 38 aa, Artificial Sequence; identical to SEQ ID NO: 19635
  GFR-binding peptide
  MOD_RES (3), (3): Xaa is C or S
  MOD_RES (19), (20), (21), (22), (23): Xaa is A or G
  MOD_RES (24), (25), (26), (27): Xaa is A or G or is absent

SEQ ID NO: 52928 - protein, 43 aa, Artificial Sequence
  GFR-binding peptide
  MOD_RES (6), (7), (41), (43): Xaa is C or S
  MOD_RES (21), (22), (23), (24), (25): Xaa is A or G
  MOD_RES (26), (27), (28), (29): Xaa is A or G or is absent
TVPKPXXAPTQLSNITVQIMXXXXXXXXXIGEMSNMVVRAXGX

SEQ ID NO: 52929 - protein, 32 aa, Artificial Sequence
  GFR-binding peptide
  MOD_RES (1), (32): Xaa is C or S
XVSQDLRPVQIRKIIGKTPKIKKATVMIVKSX

SEQ ID NO: 52930 - protein, 34 aa, Artificial Sequence
  GFR-binding peptide
  MOD_RES (2), (34): Xaa is C or S
TXAPTKLSNITVQIMDDSSNVIIGEMSNMVVRSX

SEQ ID NO: 52931 - protein, 41 aa, Artificial Sequence; identical to SEQ ID NO: 19637
  GFR-binding peptide
  MOD_RES (3), (40): Xaa is C or S

SEQ ID NO: 52932 - protein, 36 aa, Artificial Sequence; identical to SEQ ID NO: 14671
  GFR-binding peptide
  MOD_RES (3), (35): Xaa is C or S

SEQ ID NO: 52933 - protein, 36 aa, Artificial Sequence; identical to SEQ ID NO: 19638
  GFR-binding peptide
  MOD_RES (2), (2): Xaa is C or S
  MOD_RES (18), (19), (20), (21), (22): Xaa is A or G
  MOD_RES (23), (24), (25), (26): Xaa is A or G or is absent

SEQ ID NO: 52934 - protein, 44 aa, Artificial Sequence; identical to SEQ ID NO: 19640
  GFR-binding peptide
  MOD_RES (5), (42), (44): Xaa is C or S
  MOD_RES (21), (22), (23), (24), (25): Xaa is A or G
  MOD_RES (26), (27), (28), (29): Xaa is A or G or is absent

SEQ ID NO: 52935 - protein, 36 aa, Artificial Sequence; identical to SEQ ID NO: 14672
  GFR-binding peptide
  MOD_RES (1), (2), (36): Xaa is C or S
  MOD_RES (16), (17), (18), (19), (20): Xaa is A or G
  MOD_RES (21), (22), (23), (24): Xaa is A or G or is absent

SEQ ID NO: 52936 - protein, 35 aa, Artificial Sequence; identical to SEQ ID NO: 14673
  GFR-binding peptide
  MOD_RES (1), (33), (35): Xaa is C or S

SEQ ID NO: 52937 - protein, 35 aa, Artificial Sequence
  GFR-binding peptide
  MOD_RES (32), (34): Xaa is C or S
APTQLSNITVQIMDDSSNVIIGEMSNMVVRAXGXH

SEQ ID NO: 52938 - protein, 44 aa, Artificial Sequence
  GFR-binding peptide
  MOD_RES (7), (41), (43): Xaa is C or S
  MOD_RES (21), (22), (23), (24), (25): Xaa is A or G
  MOD_RES (26), (27), (28), (29): Xaa is A or G or is absent
HVTKPTXAPTKLRPVQVRKIXXXXXXXXXKKATVNMVVRSXGXH

SEQ ID NO: 52939 - protein, 36 aa, Artificial Sequence; identical to SEQ ID NO: 14676
  GFR-binding peptide
  MOD_RES (2), (3), (35): Xaa is C or S

SEQ ID NO: 52940 - protein, 38 aa, Artificial Sequence; identical to SEQ ID NO: 19644
  GFR-binding peptide
  MOD_RES (1), (35), (37): Xaa is C or S
  MOD_RES (15), (16), (17), (18), (19): Xaa is A or G
  MOD_RES (20), (21), (22), (23): Xaa is A or G or is absent

SEQ ID NO: 52941 - protein, 40 aa, Artificial Sequence; identical to SEQ ID NO: 14677
  GFR-binding peptide
  MOD_RES (6), (7), (39): Xaa is C or S

SEQ ID NO: 52942 - protein, 39 aa, Artificial Sequence; identical to SEQ ID NO: 14678
  GFR-binding peptide
  MOD_RES (1), (2), (36), (38): Xaa is C or S
  MOD_RES (16), (17), (18), (19), (20): Xaa is A or G
  MOD_RES (21), (22), (23), (24): Xaa is A or G or is absent

SEQ ID NO: 52943 - protein, 40 aa, Artificial Sequence
  GFR-binding peptide
  MOD_RES (6), (7), (39): Xaa is C or S
SIPKAXXVPTELRSVKMAKVDEYDKVVKEVQVEMVVEGXG

SEQ ID NO: 52944 - protein, 31 aa, Artificial Sequence
  GFR-binding peptide
  MOD_RES (1), (1): Xaa is C or S
XVPTELSNITMQIMDENEKVVIGEMSDMVVE

SEQ ID NO: 52945 - protein, 32 aa, Artificial Sequence; identical to SEQ ID NO: 14680
  GFR-binding peptide
  MOD_RES (31), (31): Xaa is C or S

SEQ ID NO: 52946 - protein, 38 aa, Artificial Sequence
  GFR-binding peptide
  MOD_RES (1), (38): Xaa is C or S
XRPTQVQLEPLTVLYYEIVRKKPIFEQLSNTLEDHLAX

SEQ ID NO: 52947 - protein, 39 aa, Artificial Sequence
  GFR-binding peptide
  MOD_RES (5), (6), (39): Xaa is C or S
  MOD_RES (20), (21), (22), (23), (24): Xaa is A or G
  MOD_RES (25), (26), (27), (28): Xaa is A or G or is absent
SASPXXVPQDLRSVKIAKVXXXXXXXXXKEVQVMVVKSX

SEQ ID NO: 52948 - protein, 37 aa, Artificial Sequence; identical to SEQ ID NO: 14683
  GFR-binding peptide
  MOD_RES (7), (7): Xaa is C or S

SEQ ID NO: 52949 - protein, 38 aa, Artificial Sequence
  GFR-binding peptide
  MOD_RES (4), (5): Xaa is C or S
  MOD_RES (19), (20), (21), (22), (23): Xaa is A or G
  MOD_RES (24), (25), (26), (27): Xaa is A or G or is absent
PKPXXAPTKLRSVKVAKVXXXXXXXXXKEVQVNMVVRS

SEQ ID NO: 52950 - protein, 37 aa, Artificial Sequence; identical to SEQ ID NO: 19648
  GFR-binding peptide
  MOD_RES (35), (37): Xaa is C or S

SEQ ID NO: 52951 - protein, 34 aa, Artificial Sequence
  GFR-binding peptide
  MOD_RES (2), (34): Xaa is C or S
TXAPTKLRPVQVRKIDDSSNVIKKATVNMVVRSX

SEQ ID NO: 52952 - protein, 40 aa, Artificial Sequence; identical to SEQ ID NO: 19649
  GFR-binding peptide
  MOD_RES (3), (37), (39): Xaa is C or S
  MOD_RES (17), (18), (19), (20), (21): Xaa is A or G
  MOD_RES (22), (23), (24), (25): Xaa is A or G or is absent

SEQ ID NO: 52953 - protein, 37 aa, Artificial Sequence
  GFR-binding peptide
  MOD_RES (6), (7): Xaa is C or S
TVPKPXXAPTQLRPVQVRKIDDSSNVIKKATVNMVVR

SEQ ID NO: 52954 - protein, 42 aa, Artificial Sequence
  GFR-binding peptide
  MOD_RES (4), (5), (39), (41): Xaa is C or S
  MOD_RES (19), (20), (21), (22), (23): Xaa is A or G
  MOD_RES (24), (25), (26), (27): Xaa is A or G or is absent
PKPXXAPTKLRPVQVRKIXXXXXXXXXKKATVNMVVRSXGXH

SEQ ID NO: 52955 - protein, 42 aa, Artificial Sequence
  GFR-binding peptide
  MOD_RES (5), (39), (41): Xaa is C or S
  MOD_RES (19), (20), (21), (22), (23): Xaa is A or G
  MOD_RES (24), (25), (26), (27): Xaa is A or G or is absent
TKPTXAPTKLRSVKVAKVXXXXXXXXXKEVQVNMVVRSXGXH

SEQ ID NO: 52956 - protein, 44 aa, Artificial Sequence; identical to SEQ ID NO: 19651
  GFR-binding peptide
  MOD_RES (7), (41), (43): Xaa is C or S
  MOD_RES (21), (22), (23), (24), (25): Xaa is A or G
  MOD_RES (26), (27), (28), (29): Xaa is A or G or is absent

SEQ ID NO: 52957 - protein, 37 aa, Artificial Sequence
  GFR-binding peptide
  MOD_RES (1), (2), (34), (36): Xaa is C or S
XXAPTQLSNITVQIMDDSSNVIIGEMSNMVVRAXGXH

SEQ ID NO: 52958 - protein, 38 aa, Artificial Sequence
  GFR-binding peptide
  MOD_RES (1), (38): Xaa is C or S
  MOD_RES (17), (18), (19), (20), (21): Xaa is A or G
  MOD_RES (22), (23), (24), (25): Xaa is A or G or is absent
XRPTQVQLEPLPVVYYXXXXXXXXXEQLSNTLEDHLAX

SEQ ID NO: 52959 - protein, 34 aa, Artificial Sequence; identical to SEQ ID NO: 14691
  GFR-binding peptide
  MOD_RES (1), (1): Xaa is C or S
  MOD_RES (15), (16), (17), (18), (19): Xaa is A or G
  MOD_RES (20), (21), (22), (23): Xaa is A or G or is absent

SEQ ID NO: 52960 - protein, 44 aa, Artificial Sequence
  GFR-binding peptide
  MOD_RES (7), (41), (43): Xaa is C or S
  MOD_RES (21), (22), (23), (24), (25): Xaa is A or G
  MOD_RES (26), (27), (28), (29): Xaa is A or G or is absent
NDEGLEXVPTEEEPLTMLYYXXXXXXXXXEQLSNFLQHNKXEXR

SEQ ID NO: 52961 - protein, 39 aa, Artificial Sequence
  GFR-binding peptide
  MOD_RES (37), (39): Xaa is C or S
  MOD_RES (16), (17), (18), (19), (20): Xaa is A or G
  MOD_RES (21), (22), (23), (24): Xaa is A or G or is absent
QPSRVHHEPLPVVYYXXXXXXXXXEQLSNRLEEHLEXAX

SEQ ID NO: 52962 - protein, 40 aa, Artificial Sequence
  GFR-binding peptide
  MOD_RES (5), (6), (37), (39): Xaa is C or S
SASPXXVSQDLRPVQIRKIIGKTPKIKKATVMIVKSXKXS

SEQ ID NO: 52963 - protein, 35 aa, Artificial Sequence; identical to SEQ ID NO: 14693
  GFR-binding peptide
  MOD_RES (4), (5): Xaa is C or S

SEQ ID NO: 52964 - protein, 37 aa, Artificial Sequence; identical to SEQ ID NO: 14694
  GFR-binding peptide
  MOD_RES (2), (34), (36): Xaa is C or S

SEQ ID NO: 52965 - protein, 41 aa, Artificial Sequence; identical to SEQ ID NO: 14695
  GFR-binding peptide
  MOD_RES (4), (5), (38), (40): Xaa is C or S
  MOD_RES (19), (20), (21), (22), (23): Xaa is A or G
  MOD_RES (24), (25), (26), (27): Xaa is A or G or is absent

SEQ ID NO: 52966 - protein, 36 aa, Artificial Sequence
  GFR-binding peptide
  MOD_RES (2), (3): Xaa is C or S
  MOD_RES (17), (18), (19), (20), (21): Xaa is A or G
  MOD_RES (22), (23), (24), (25): Xaa is A or G or is absent
PXXAPTKLSNITVQIMXXXXXXXXXIGEMSNMVVRS

SEQ ID NO: 52967 - protein, 35 aa, Artificial Sequence
  GFR-binding peptide
  MOD_RES (1), (32), (34): Xaa is C or S
XVSQDLRSVKIAKVIGKTPKIKEVQVMIVKSXKXS

SEQ ID NO: 52968 - protein, 40 aa, Artificial Sequence; identical to SEQ ID NO: 14698
  GFR-binding peptide
  MOD_RES (6), (7): Xaa is C or S
  MOD_RES (21), (22), (23), (24), (25): Xaa is A or G
  MOD_RES (26), (27), (28), (29): Xaa is A or G or is absent

SEQ ID NO: 52969 - protein, 37 aa, Artificial Sequence
  GFR-binding peptide
  MOD_RES (36), (36): Xaa is C or S
PSRVHHEPLPVVYYEYVRKKPKLEQLSNRLEEHLEXA

SEQ ID NO: 52970 - protein, 38 aa, Artificial Sequence; identical to SEQ ID NO: 19663
  GFR-binding peptide
  MOD_RES (5), (5): Xaa is C or S
  MOD_RES (19), (20), (21), (22), (23): Xaa is A or G
  MOD_RES (24), (25), (26), (27): Xaa is A or G or is absent

SEQ ID NO: 52971 - protein, 41 aa, Artificial Sequence
  GFR-binding peptide
  MOD_RES (5), (6), (38), (40): Xaa is C or S
IPKAXXVPTELRPVQMRKIDEYDKVVKKATVEMVVEGXGXR

SEQ ID NO: 52972 - protein, 34 aa, Artificial Sequence; identical to SEQ ID NO: 14700
  GFR-binding peptide
  MOD_RES (1), (33): Xaa is C or S

SEQ ID NO: 52973 - protein, 39 aa, Artificial Sequence
  GFR-binding peptide
  MOD_RES (4), (38): Xaa is C or S
  MOD_RES (18), (19), (20), (21), (22): Xaa is A or G
  MOD_RES (23), (24), (25), (26): Xaa is A or G or is absent
KPTXAPTKLRSVKVAKVXXXXXXXXXKEVQVNMVVRSXG

SEQ ID NO: 52974 - protein, 36 aa, Artificial Sequence; identical to SEQ ID NO: 14701
  GFR-binding peptide
  MOD_RES (1), (2), (36): Xaa is C or S
  MOD_RES (16), (17), (18), (19), (20): Xaa is A or G
  MOD_RES (21), (22), (23), (24): Xaa is A or G or is absent

SEQ ID NO: 52975 - protein, 34 aa, Artificial Sequence
  GFR-binding peptide
  MOD_RES (2), (34): Xaa is C or S
TXAPTKLRSVKVAKVDDSSNVIKEVQVNMVVRSX

SEQ ID NO: 52976 - protein, 40 aa, Artificial Sequence; identical to SEQ ID NO: 14702
  GFR-binding peptide
  MOD_RES (6), (7): Xaa is C or S
  MOD_RES (21), (22), (23), (24), (25): Xaa is A or G
  MOD_RES (26), (27), (28), (29): Xaa is A or G or is absent

SEQ ID NO: 52977 - protein, 37 aa, Artificial Sequence
  GFR-binding peptide
  MOD_RES (5), (6): Xaa is C or S
VPKPXXAPTQLRPVQVRKIDDSSNVIKKATVNMVVRA

SEQ ID NO: 52978 - protein, 34 aa, Artificial Sequence
  GFR-binding peptide
  MOD_RES (31), (33): Xaa is C or S
VSQDLRPVQIRKIIGKTPKIKKATVMIVKSXKXS

SEQ ID NO: 52979 - protein, 40 aa, Artificial Sequence; identical to SEQ ID NO: 14703
  GFR-binding peptide
  MOD_RES (7), (39): Xaa is C or S

SEQ ID NO: 52980 - protein, 40 aa, Artificial Sequence; identical to SEQ ID NO: 19665
  GFR-binding peptide
  MOD_RES (6), (40): Xaa is C or S
  MOD_RES (20), (21), (22), (23), (24): Xaa is A or G
  MOD_RES (25), (26), (27), (28): Xaa is A or G or is absent

SEQ ID NO: 52981 - protein, 40 aa, Artificial Sequence; identical to SEQ ID NO: 19667
  GFR-binding peptide
  MOD_RES (5), (5): Xaa is C or S
  MOD_RES (21), (22), (23), (24), (25): Xaa is A or G
  MOD_RES (26), (27), (28), (29): Xaa is A or G or is absent

SEQ ID NO: 52982 - protein, 34 aa, Artificial Sequence
  GFR-binding peptide
  MOD_RES (1), (34): Xaa is C or S
  MOD_RES (15), (16), (17), (18), (19): Xaa is A or G
  MOD_RES (20), (21), (22), (23): Xaa is A or G or is absent
XVPQALSNITIQIMXXXXXXXXXIGEMSMIVRSX

SEQ ID NO: 52983 - protein, 37 aa, Artificial Sequence; identical to SEQ ID NO: 14704
  GFR-binding peptide
  MOD_RES (34), (36): Xaa is C or S
  MOD_RES (14), (15), (16), (17), (18): Xaa is A or G
  MOD_RES (19), (20), (21), (22): Xaa is A or G or is absent

SEQ ID NO: 52984 - protein, 37 aa, Artificial Sequence
  GFR-binding peptide
  MOD_RES (3), (3): Xaa is C or S
  MOD_RES (19), (20), (21), (22), (23): Xaa is A or G
  MOD_RES (24), (25), (26), (27): Xaa is A or G or is absent
VQXRPTQVQLEPLPVVYYXXXXXXXXXEQLSNTLEDH

SEQ ID NO: 52985 - protein, 37 aa, Artificial Sequence; identical to SEQ ID NO: 14708
  GFR-binding peptide
  MOD_RES (3), (4), (36): Xaa is C or S

SEQ ID NO: 52986 - protein, 39 aa, Artificial Sequence; identical to SEQ ID NO: 14710
  GFR-binding peptide
  MOD_RES (3), (4), (38): Xaa is C or S
  MOD_RES (18), (19), (20), (21), (22): Xaa is A or G
  MOD_RES (23), (24), (25), (26): Xaa is A or G or is absent

SEQ ID NO: 52987 - protein, 39 aa, Artificial Sequence
  GFR-binding peptide
  MOD_RES (5), (5): Xaa is C or S
SSVKXQPSRVHHEPLTVLYYEYVRKKPKLEQLSNRLEEH

SEQ ID NO: 52988 - protein, 36 aa, Artificial Sequence; identical to SEQ ID NO: 14711
  GFR-binding peptide
  MOD_RES (5), (6): Xaa is C or S

SEQ ID NO: 52989 - protein, 37 aa, Artificial Sequence; identical to SEQ ID NO: 14712
  GFR-binding peptide
  MOD_RES (1), (2), (34), (36): Xaa is C or S

SEQ ID NO: 52990 - protein, 36 aa, Artificial Sequence; identical to SEQ ID NO: 19675
  GFR-binding peptide
  MOD_RES (2), (36): Xaa is C or S
  MOD_RES (16), (17), (18), (19), (20): Xaa is A or G
  MOD_RES (21), (22), (23), (24): Xaa is A or G or is absent

SEQ ID NO: 52991 - protein, 39 aa, Artificial Sequence
  GFR-binding peptide
  MOD_RES (6), (7): Xaa is C or S
  MOD_RES (21), (22), (23), (24), (25): Xaa is A or G
  MOD_RES (26), (27), (28), (29): Xaa is A or G or is absent
ASASPXXVSQDLSNITIQIMXXXXXXXXXIGEMSMIVKS

SEQ ID NO: 52992 - protein, 39 aa, Artificial Sequence
  GFR-binding peptide
  MOD_RES (6), (7), (39): Xaa is C or S
KIPKAXXVPTELRSVKMAKVDENEKVVKEVQVDMVVEGX

SEQ ID NO: 52993 - protein, 35 aa, Artificial Sequence
  GFR-binding peptide
  MOD_RES (34), (34): Xaa is C or S
  MOD_RES (14), (15), (16), (17), (18): Xaa is A or G
  MOD_RES (19), (20), (21), (22): Xaa is A or G or is absent
VPTELSNITMQIMXXXXXXXXXIGEMSDMVVEGXG

SEQ ID NO: 52994 - protein, 34 aa, Artificial Sequence
  GFR-binding peptide
  MOD_RES (34), (34): Xaa is C or S
  MOD_RES (14), (15), (16), (17), (18): Xaa is A or G
  MOD_RES (19), (20), (21), (22): Xaa is A or G or is absent
VPTELSNITMQIMXXXXXXXXXIGEMSEMVVEGX

SEQ ID NO: 52995 - protein, 30 aa, Artificial Sequence; identical to SEQ ID NO: 14717
  GFR-binding peptide

SEQ ID NO: 52996 - protein, 38 aa, Artificial Sequence; identical to SEQ ID NO: 14718
  GFR-binding peptide
  MOD_RES (1), (2), (36), (38): Xaa is C or S
  MOD_RES (16), (17), (18), (19), (20): Xaa is A or G
  MOD_RES (21), (22), (23), (24): Xaa is A or G or is absent

SEQ ID NO: 52997 - protein, 39 aa, Artificial Sequence
  GFR-binding peptide
  MOD_RES (3), (4), (38): Xaa is C or S
  MOD_RES (18), (19), (20), (21), (22): Xaa is A or G
  MOD_RES (23), (24), (25), (26): Xaa is A or G or is absent
KPXXAPTQLRPVQVRKIXXXXXXXXXKKATVNMVVRAXG

SEQ ID NO: 52998 - protein, 39 aa, Artificial Sequence; identical to SEQ ID NO: 14719
  GFR-binding peptide
  MOD_RES (3), (4), (36), (38): Xaa is C or S

SEQ ID NO: 52999 - protein, 39 aa, Artificial Sequence
  GFR-binding peptide
  MOD_RES (6), (7), (38): Xaa is C or S
ASAAPXXVPQALRPVQIRKIVGRKPKVKKATVMIVRSXK

SEQ ID NO: 53000 - protein, 34 aa, Artificial Sequence
  GFR-binding peptide
  MOD_RES (1), (2), (33): Xaa is C or S
XXVPQALSNITIQIMVGRKPKVIGEMSMIVRSXK

SEQ ID NO: 53001 - protein, 41 aa, Artificial Sequence; identical to SEQ ID NO: 14721
  GFR-binding peptide
  MOD_RES (6), (7), (40): Xaa is C or S
  MOD_RES (21), (22), (23), (24), (25): Xaa is A or G
  MOD_RES (26), (27), (28), (29): Xaa is A or G or is absent

SEQ ID NO: 53002 - protein, 43 aa, Artificial Sequence; identical to SEQ ID NO: 14723
  GFR-binding peptide
  MOD_RES (5), (6), (40), (42): Xaa is C or S
  MOD_RES (20), (21), (22), (23), (24): Xaa is A or G
  MOD_RES (25), (26), (27), (28): Xaa is A or G or is absent

SEQ ID NO: 53003 - protein, 42 aa, Artificial Sequence; identical to SEQ ID NO: 14725
  GFR-binding peptide
  MOD_RES (6), (7), (39), (41): Xaa is C or S

SEQ ID NO: 53004 - protein, 37 aa, Artificial Sequence
  GFR-binding peptide
  MOD_RES (6), (7): Xaa is C or S
ASASPXXVSQDLRPVQIRKIIGKTPKIKKATVMIVKS

SEQ ID NO: 53005 - protein, 35 aa, Artificial Sequence
  GFR-binding peptide
  MOD_RES (1), (2), (35): Xaa is C or S
  MOD_RES (16), (17), (18), (19), (20): Xaa is A or G
  MOD_RES (21), (22), (23), (24): Xaa is A or G or is absent
XXVSQDLSNITIQIMXXXXXXXXXIGEMSMIVKSX

SEQ ID NO: 53006 - protein, 37 aa, Artificial Sequence; identical to SEQ ID NO: 14728
  GFR-binding peptide
  MOD_RES (3), (4), (36): Xaa is C or S

SEQ ID NO: 53007 - protein, 34 aa, Artificial Sequence; identical to SEQ ID NO: 14729
  GFR-binding peptide
  MOD_RES (1), (2), (33): Xaa is C or S

SEQ ID NO: 53008 - protein, 38 aa, Artificial Sequence; identical to SEQ ID NO: 14730
  GFR-binding peptide
  MOD_RES (5), (6), (37): Xaa is C or S

SEQ ID NO: 53009 - protein, 40 aa, Artificial Sequence
  GFR-binding peptide
  MOD_RES (4), (5), (37), (39): Xaa is C or S
PKAXXVPTELRSVKMAKVDEYDKVVKEVQVEMVVEGXGXR

SEQ ID NO: 53010 - protein, 40 aa, Artificial Sequence
  GFR-binding peptide
  MOD_RES (5), (6), (38), (40): Xaa is C or S
VPKPXXAPTKLSNITVQIMDDSSNVIIGEMSNMVVRSXGX

SEQ ID NO: 53011 - protein, 37 aa, Artificial Sequence; identical to SEQ ID NO: 14731
  GFR-binding peptide
  MOD_RES (5), (5): Xaa is C or S
  MOD_RES (19), (20), (21), (22), (23): Xaa is A or G
  MOD_RES (24), (25), (26), (27): Xaa is A or G or is absent

SEQ ID NO: 53012 - protein, 34 aa, Artificial Sequence; identical to SEQ ID NO: 14732
  GFR-binding peptide
  MOD_RES (2), (3): Xaa is C or S

SEQ ID NO: 53013 - protein, 41 aa, Artificial Sequence
  GFR-binding peptide
  MOD_RES (6), (7), (41): Xaa is C or S
  MOD_RES (21), (22), (23), (24), (25): Xaa is A or G
  MOD_RES (26), (27), (28), (29): Xaa is A or G or is absent
SIPKAXXVPTELSNITMQIMXXXXXXXXXIGEMSEMVVEGX

SEQ ID NO: 53014 - protein, 37 aa, Artificial Sequence
  GFR-binding peptide
  MOD_RES (2), (3), (35), (37): Xaa is C or S
AXXVPTELRSVKMAKVDEYDKVVKEVQVEMVVEGXGX

SEQ ID NO: 53015 - protein, 38 aa, Artificial Sequence
  GFR-binding peptide
  MOD_RES (1), (35), (37): Xaa is C or S
  MOD_RES (15), (16), (17), (18), (19): Xaa is A or G
  MOD_RES (20), (21), (22), (23): Xaa is A or G or is absent
XAPTKLSNITVQIMXXXXXXXXXIGEMSNMVVRSXGXH

SEQ ID NO: 53016 - protein, 40 aa, Artificial Sequence
  GFR-binding peptide
  MOD_RES (7), (7): Xaa is C or S
NDEGLEXVPTEEEPLTMLYYRIKPHQGQHEQLSNFLQHNK

SEQ ID NO: 53017 - protein, 38 aa, Artificial Sequence; identical to SEQ ID NO: 19683
  GFR-binding peptide
  MOD_RES (4), (4): Xaa is C or S

SEQ ID NO: 53018 - protein, 37 aa, Artificial Sequence
  GFR-binding peptide
  MOD_RES (1), (2), (35), (37): Xaa is C or S
  MOD_RES (16), (17), (18), (19), (20): Xaa is A or G
  MOD_RES (21), (22), (23), (24): Xaa is A or G or is absent
XXVPQDLRPVQIRKIXXXXXXXXXKKATVMVVKSXKX

SEQ ID NO: 53019 - protein, 37 aa, Artificial Sequence
  GFR-binding peptide
  MOD_RES (1), (34), (36): Xaa is C or S
  MOD_RES (15), (16), (17), (18), (19): Xaa is A or G
  MOD_RES (20), (21), (22), (23): Xaa is A or G or is absent
XVPQALSNITIQIMXXXXXXXXXIGEMSMIVRSXKXS

SEQ ID NO: 53020 - protein, 37 aa, Artificial Sequence; identical to SEQ ID NO: 14734
  GFR-binding peptide
  MOD_RES (4), (5), (37): Xaa is C or S

SEQ ID NO: 53021 - protein, 30 aa, Artificial Sequence
  GFR-binding peptide
VPQDLRSVKIAKVVGRTPKVKEVQVMVVKS

SEQ ID NO: 53022 - protein, 42 aa, Artificial Sequence; identical to SEQ ID NO: 14737
  GFR-binding peptide
  MOD_RES (7), (39), (41): Xaa is C or S

SEQ ID NO: 53023 - protein, 36 aa, Artificial Sequence
  GFR-binding peptide
  MOD_RES (36), (36): Xaa is C or S
  MOD_RES (15), (16), (17), (18), (19): Xaa is A or G
  MOD_RES (20), (21), (22), (23): Xaa is A or G or is absent
PSRVHHEPLTVLYYXXXXXXXXXEQLSNRLEEHLEX

SEQ ID NO: 53024 - protein, 38 aa, Artificial Sequence
  GFR-binding peptide
  MOD_RES (6), (7): Xaa is C or S
TVPKPXXAPTQLRPVQVRKIDDSSNVIKKATVNMVVRA

SEQ ID NO: 53025 - protein, 33 aa, Artificial Sequence
  GFR-binding peptide
  MOD_RES (3), (3): Xaa is C or S
PTXAPTKLRSVKVAKVDDSSNVIKEVQVNMVVR

SEQ ID NO: 53026 - protein, 36 aa, Artificial Sequence
  GFR-binding peptide
  MOD_RES (34), (36): Xaa is C or S
  MOD_RES (14), (15), (16), (17), (18): Xaa is A or G
  MOD_RES (19), (20), (21), (22): Xaa is A or G or is absent
VPTELRPVQMRKIXXXXXXXXXKKATVEMVVEGXGX

SEQ ID NO: 53027 - protein, 33 aa, Artificial Sequence; identical to SEQ ID NO: 14739
  GFR-binding peptide
  MOD_RES (1), (2): Xaa is C or S

SEQ ID NO: 53028 - protein, 40 aa, Artificial Sequence; identical to SEQ ID NO: 14742
  GFR-binding peptide
  MOD_RES (5), (6), (38), (40): Xaa is C or S

SEQ ID NO: 53029 - protein, 40 aa, Artificial Sequence
  GFR-binding peptide
  MOD_RES (6), (7): Xaa is C or S
  MOD_RES (21), (22), (23), (24), (25): Xaa is A or G
  MOD_RES (26), (27), (28), (29): Xaa is A or G or is absent
TVPKPXXAPTQLSNITVQIMXXXXXXXXXIGEMSNMVVRA

SEQ ID NO: 53030 - protein, 38 aa, Artificial Sequence
  GFR-binding peptide
  MOD_RES (3), (4), (36), (38): Xaa is C or S
KAXXVPTELSNITMQIMDEYDKVVIGEMSEMVVEGXGX

SEQ ID NO: 53031 - protein, 33 aa, Artificial Sequence
  GFR-binding peptide
  MOD_RES (1), (32): Xaa is C or S
XVPQALSNITIQIMVGRKPKVIGEMSMIVRSXK

SEQ ID NO: 53032 - protein, 40 aa, Artificial Sequence
  GFR-binding peptide
  MOD_RES (4), (5), (37), (39): Xaa is C or S
PKAXXVPTELRPVQMRKIDENEKVVKKATVDMVVEGXGXR

SEQ ID NO: 53033 - protein, 31 aa, Artificial Sequence; identical to SEQ ID NO: 14745
  GFR-binding peptide
  MOD_RES (1), (1): Xaa is C or S

SEQ ID NO: 53034 - protein, 42 aa, Artificial Sequence; identical to SEQ ID NO: 14747
  GFR-binding peptide
  MOD_RES (6), (40), (42): Xaa is C or S
  MOD_RES (20), (21), (22), (23), (24): Xaa is A or G
  MOD_RES (25), (26), (27), (28): Xaa is A or G or is absent

SEQ ID NO: 53035 - protein, 39 aa, Artificial Sequence
  GFR-binding peptide
  MOD_RES (4), (5), (36), (38): Xaa is C or S
AAPXXVPQALRPVQIRKIVGRKPKVKKATVMIVRSXKXS

SEQ ID NO: 53036 - protein, 39 aa, Artificial Sequence
  GFR-binding peptide
  MOD_RES (37), (39): Xaa is C or S
RPTQVQLEPLTVLYYEIVRKKPIFEQLSNTLEDHLAXKX

SEQ ID NO: 53037 - protein, 36 aa, Artificial Sequence; identical to SEQ ID NO: 14748
  GFR-binding peptide
  MOD_RES (3), (4): Xaa is C or S
  MOD_RES (18), (19), (20), (21), (22): Xaa is A or G
  MOD_RES (23), (24), (25), (26): Xaa is A or G or is absent

SEQ ID NO: 53038 - protein, 36 aa, Artificial Sequence; identical to SEQ ID NO: 19707
  GFR-binding peptide
  MOD_RES (35), (35): Xaa is C or S

SEQ ID NO: 53039 - protein, 34 aa, Artificial Sequence
  GFR-binding peptide
  MOD_RES (1), (2): Xaa is C or S
  MOD_RES (16), (17), (18), (19), (20): Xaa is A or G
  MOD_RES (21), (22), (23), (24): Xaa is A or G or is absent
XXVPQDLSNITIQIMXXXXXXXXXIGEMSMVVKS

SEQ ID NO: 53040 - protein, 33 aa, Artificial Sequence; identical to SEQ ID NO: 14751
  GFR-binding peptide
  MOD_RES (1), (1): Xaa is C or S
  MOD_RES (15), (16), (17), (18), (19): Xaa is A or G
  MOD_RES (20), (21), (22), (23): Xaa is A or G or is absent

SEQ ID NO: 53041 - protein, 37 aa, Artificial Sequence; identical to SEQ ID NO: 14753
  GFR-binding peptide
  MOD_RES (4), (5): Xaa is C or S
  MOD_RES (19), (20), (21), (22), (23): Xaa is A or G
  MOD_RES (24), (25), (26), (27): Xaa is A or G or is absent

SEQ ID NO: 53042 - protein, 43 aa, Artificial Sequence
  GFR-binding peptide
  MOD_RES (6), (40), (42): Xaa is C or S
DEGLEXVPTEEEPLTMLYYRIKPHQGQHEQLSNFLQHNKXEXR

SEQ ID NO: 53043 - protein, 33 aa, Artificial Sequence; identical to SEQ ID NO: 14754
  GFR-binding peptide
  MOD_RES (1), (1): Xaa is C or S
  MOD_RES (15), (16), (17), (18), (19): Xaa is A or G
  MOD_RES (20), (21), (22), (23): Xaa is A or G or is absent

SEQ ID NO: 53044 - protein, 40 aa, Artificial Sequence; identical to SEQ ID NO: 14755
  GFR-binding peptide
  MOD_RES (5), (6), (37), (39): Xaa is C or S

SEQ ID NO: 53045 - protein, 41 aa, Artificial Sequence
  GFR-binding peptide
  MOD_RES (6), (7), (38), (40): Xaa is C or S
ASASPXXVSQDLSNITIQIMIGKTPKIIGEMSMIVKSXKXS

SEQ ID NO: 53046 - protein, 36 aa, Artificial Sequence
  GFR-binding peptide
  MOD_RES (1), (2), (33), (35): Xaa is C or S
XXVSQDLSNITIQIMIGKTPKIIGEMSMIVKSXKXS

SEQ ID NO: 53047 - protein, 37 aa, Artificial Sequence; identical to SEQ ID NO: 19709
  GFR-binding peptide
  MOD_RES (4), (4): Xaa is C or S
  MOD_RES (18), (19), (20), (21), (22): Xaa is A or G
  MOD_RES (23), (24), (25), (26): Xaa is A or G or is absent

SEQ ID NO: 53048 - protein, 42 aa, Artificial Sequence
  GFR-binding peptide
  MOD_RES (7), (41): Xaa is C or S
  MOD_RES (21), (22), (23), (24), (25): Xaa is A or G
  MOD_RES (26), (27), (28), (29): Xaa is A or G or is absent
HVTKPTXAPTKLSNITVQIMXXXXXXXXXIGEMSNMVVRSXG

SEQ ID NO: 53049 - protein, 36 aa, Artificial Sequence
  GFR-binding peptide
  MOD_RES (16), (17), (18), (19), (20): Xaa is A or G
  MOD_RES (21), (22), (23), (24): Xaa is A or G or is absent
QPSRVHHEPLPVVYYXXXXXXXXXEQLSNRLEEHLE

SEQ ID NO: 53050 - protein, 44 aa, Artificial Sequence
  GFR-binding peptide
  MOD_RES (4), (41), (43): Xaa is C or S
  MOD_RES (20), (21), (22), (23), (24): Xaa is A or G
  MOD_RES (25), (26), (27), (28): Xaa is A or G or is absent
NVQXRPTQVQLEPLPVVYYXXXXXXXXXEQLSNTLEDHLAXKXE

SEQ ID NO: 53051 - protein, 42 aa, Artificial Sequence
  GFR-binding peptide
  MOD_RES (6), (7), (41): Xaa is C or S
  MOD_RES (21), (22), (23), (24), (25): Xaa is A or G
  MOD_RES (26), (27), (28), (29): Xaa is A or G or is absent
YVPKPXXAPTKLSNITVQIMXXXXXXXXXIGEMSNMVVRSXG

SEQ ID NO: 53052 - protein, 44 aa, Artificial Sequence; identical to SEQ ID NO: 19710
  GFR-binding peptide
  MOD_RES (4), (41), (43): Xaa is C or S
  MOD_RES (20), (21), (22), (23), (24): Xaa is A or G
  MOD_RES (25), (26), (27), (28): Xaa is A or G or is absent

SEQ ID NO: 53053 - protein, 36 aa, Artificial Sequence; identical to SEQ ID NO: 14757
  GFR-binding peptide
  MOD_RES (33), (35): Xaa is C or S
  MOD_RES (14), (15), (16), (17), (18): Xaa is A or G
  MOD_RES (19), (20), (21), (22): Xaa is A or G or is absent

SEQ ID NO: 53054 - protein, 37 aa, Artificial Sequence
  GFR-binding peptide
  MOD_RES (36), (36): Xaa is C or S
  MOD_RES (15), (16), (17), (18), (19): Xaa is A or G
  MOD_RES (20), (21), (22), (23): Xaa is A or G or is absent
PTQVQLEPLTVLYYXXXXXXXXXEQLSNTLEDHLAXK

SEQ ID NO: 53055 - protein, 42 aa, Artificial Sequence; identical to SEQ ID NO: 14762
  GFR-binding peptide
  MOD_RES (5), (6), (40), (42): Xaa is C or S
  MOD_RES (20), (21), (22), (23), (24): Xaa is A or G
  MOD_RES (25), (26), (27), (28): Xaa is A or G or is absent

SEQ ID NO: 53056 - protein, 39 aa, Artificial Sequence; identical to SEQ ID NO: 19715
  GFR-binding peptide
  MOD_RES (5), (5): Xaa is C or S

SEQ ID NO: 53057 - protein, 32 aa, Artificial Sequence; identical to SEQ ID NO: 14763
  GFR-binding peptide
  MOD_RES (32), (32): Xaa is C or S

SEQ ID NO: 53058 - protein, 38 aa, Artificial Sequence
  GFR-binding peptide
  MOD_RES (2), (2): Xaa is C or S
KXQPSRVHHEPLTVLYYEYVRKKPKLEQLSNRLEEHLE

SEQ ID NO: 53059 - protein, 32 aa, Artificial Sequence; identical to SEQ ID NO: 14764
  GFR-binding peptide
  MOD_RES (14), (15), (16), (17), (18): Xaa is A or G
  MOD_RES (19), (20), (21), (22): Xaa is A or G or is absent

SEQ ID NO: 53060 - protein, 40 aa, Artificial Sequence
  GFR-binding peptide
  MOD_RES (4), (5), (38), (40): Xaa is C or S
  MOD_RES (19), (20), (21), (22), (23): Xaa is A or G
  MOD_RES (24), (25), (26), (27): Xaa is A or G or is absent
AAPXXVPQALRPVQIRKIXXXXXXXXXKKATVMIVRSXKX

SEQ ID NO: 53061 - protein, 33 aa, Artificial Sequence
  GFR-binding peptide
  MOD_RES (1), (33): Xaa is C or S
XVPTELRPVQMRKIDENEKVVKKATVDMVVEGX

SEQ ID NO: 53062 - protein, 38 aa, Artificial Sequence; identical to SEQ ID NO: 19719
  GFR-binding peptide
  MOD_RES (6), (6): Xaa is C or S
  MOD_RES (20), (21), (22), (23), (24): Xaa is A or G
  MOD_RES (25), (26), (27), (28): Xaa is A or G or is absent

SEQ ID NO: 53063 - protein, 42 aa, Artificial Sequence
  GFR-binding peptide
  MOD_RES (4), (41): Xaa is C or S
NVQXRPTQVQLEPLPVVYYEIVRKKPIFEQLSNTLEDHLAXK

SEQ ID NO: 53064 - protein, 32 aa, Artificial Sequence; identical to SEQ ID NO: 14768
  GFR-binding peptide
  MOD_RES (1), (2): Xaa is C or S

SEQ ID NO: 53065 - protein, 38 aa, Artificial Sequence
  GFR-binding peptide
  MOD_RES (1), (2), (36), (38): Xaa is C or S
  MOD_RES (16), (17), (18), (19), (20): Xaa is A or G
  MOD_RES (21), (22), (23), (24): Xaa is A or G or is absent
XXAPTKLSNITVQIMXXXXXXXXXIGEMSNMVVRSXGX

SEQ ID NO: 53066 - protein, 40 aa, Artificial Sequence; identical to SEQ ID NO: 14772
  GFR-binding peptide
  MOD_RES (4), (5), (39): Xaa is C or S
  MOD_RES (19), (20), (21), (22), (23): Xaa is A or G
  MOD_RES (24), (25), (26), (27): Xaa is A or G or is absent

SEQ ID NO: 53067 - protein, 34 aa, Artificial Sequence
  GFR-binding peptide
  MOD_RES (1), (1): Xaa is C or S
  MOD_RES (15), (16), (17), (18), (19): Xaa is A or G
  MOD_RES (20), (21), (22), (23): Xaa is A or G or is absent
XVPTELRPVQMRKIXXXXXXXXXKKATVDMVVEG

SEQ ID NO: 53068 - protein, 41 aa, Artificial Sequence
  GFR-binding peptide
  MOD_RES (4), (5), (39), (41): Xaa is C or S
  MOD_RES (19), (20), (21), (22), (23): Xaa is A or G
  MOD_RES (24), (25), (26), (27): Xaa is A or G or is absent
PKAXXVPTELRPVQMRKIXXXXXXXXXKKATVEMVVEGXGX

SEQ ID NO: 53069 - protein, 40 aa, Artificial Sequence; identical to SEQ ID NO: 19724
  GFR-binding peptide
  MOD_RES (4), (38), (40): Xaa is C or S
  MOD_RES (18), (19), (20), (21), (22): Xaa is A or G
  MOD_RES (23), (24), (25), (26): Xaa is A or G or is absent

SEQ ID NO: 53070 - protein, 36 aa, Artificial Sequence
  GFR-binding peptide
  MOD_RES (1), (2), (36): Xaa is C or S
  MOD_RES (16), (17), (18), (19), (20): Xaa is A or G
  MOD_RES (21), (22), (23), (24): Xaa is A or G or is absent
XXAPTKLRPVQVRKIXXXXXXXXXKKATVNMVVRSX

SEQ ID NO: 53071 - protein, 38 aa, Artificial Sequence; identical to SEQ ID NO: 14775
  GFR-binding peptide
  MOD_RES (5), (6): Xaa is C or S
  MOD_RES (20), (21), (22), (23), (24): Xaa is A or G
  MOD_RES (25), (26), (27), (28): Xaa is A or G or is absent

SEQ ID NO: 53072 - protein, 35 aa, Artificial Sequence
  GFR-binding peptide
  MOD_RES (16), (17), (18), (19), (20): Xaa is A or G
  MOD_RES (21), (22), (23), (24): Xaa is A or G or is absent
QPSRVHHEPLTVLYYXXXXXXXXXEQLSNRLEEHL

SEQ ID NO: 53073 - protein, 40 aa, Artificial Sequence; identical to SEQ ID NO: 14777
  GFR-binding peptide
  MOD_RES (5), (6), (40): Xaa is C or S
  MOD_RES (20), (21), (22), (23), (24): Xaa is A or G
  MOD_RES (25), (26), (27), (28): Xaa is A or G or is absent

SEQ ID NO: 53074 - protein, 42 aa, Artificial Sequence; identical to SEQ ID NO: 14780
  GFR-binding peptide
  MOD_RES (5), (6), (40), (42): Xaa is C or S
  MOD_RES (20), (21), (22), (23), (24): Xaa is A or G
  MOD_RES (25), (26), (27), (28): Xaa is A or G or is absent

SEQ ID NO: 53075 - protein, 36 aa, Artificial Sequence
  GFR-binding peptide
  MOD_RES (1), (33), (35): Xaa is C or S
XAPTKLRPVQVRKIDDSSNVIKKATVNMVVRSXGXH

SEQ ID NO: 53076 - protein, 37 aa, Artificial Sequence; identical to SEQ ID NO: 14783
  GFR-binding peptide
  MOD_RES (3), (4), (36): Xaa is C or S

SEQ ID NO: 53077 - protein, 38 aa, Artificial Sequence
  GFR-binding peptide
  MOD_RES (4), (5), (38): Xaa is C or S
  MOD_RES (19), (20), (21), (22), (23): Xaa is A or G
  MOD_RES (24), (25), (26), (27): Xaa is A or G or is absent
ASPXXVPQDLRPVQIRKIXXXXXXXXXKKATVMVVKSX

SEQ ID NO: 53078 - protein, 35 aa, Artificial Sequence
  GFR-binding peptide
  MOD_RES (34), (34): Xaa is C or S
  MOD_RES (14), (15), (16), (17), (18): Xaa is A or G
  MOD_RES (19), (20), (21), (22): Xaa is A or G or is absent
APTQLRSVKVAKVXXXXXXXXXKEVQVNMVVRAXG

SEQ ID NO: 53079 - protein, 39 aa, Artificial Sequence; identical to SEQ ID NO: 14787
  GFR-binding peptide
  MOD_RES (5), (39): Xaa is C or S
  MOD_RES (19), (20), (21), (22), (23): Xaa is A or G
  MOD_RES (24), (25), (26), (27): Xaa is A or G or is absent

SEQ ID NO: 53080 - protein, 33 aa, Artificial Sequence
  GFR-binding peptide
  MOD_RES (14), (15), (16), (17), (18): Xaa is A or G
  MOD_RES (19), (20), (21), (22): Xaa is A or G or is absent
VPTELSNITMQIMXXXXXXXXXIGEMSEMVVEG

SEQ ID NO: 53081 - protein, 38 aa, Artificial Sequence; identical to SEQ ID NO: 14788
  GFR-binding peptide
  MOD_RES (1), (35), (37): Xaa is C or S
  MOD_RES (15), (16), (17), (18), (19): Xaa is A or G
  MOD_RES (20), (21), (22), (23): Xaa is A or G or is absent

SEQ ID NO: 53082 - protein, 38 aa, Artificial Sequence; identical to SEQ ID NO: 14790
  GFR-binding peptide
  MOD_RES (5), (6): Xaa is C or S
  MOD_RES (20), (21), (22), (23), (24): Xaa is A or G
  MOD_RES (25), (26), (27), (28): Xaa is A or G or is absent

SEQ ID NO: 53083 - protein, 40 aa, Artificial Sequence; identical to SEQ ID NO: 14792
  GFR-binding peptide
  MOD_RES (6), (7): Xaa is C or S
  MOD_RES (21), (22), (23), (24), (25): Xaa is A or G
  MOD_RES (26), (27), (28), (29): Xaa is A or G or is absent

SEQ ID NO: 53084 - protein, 35 aa, Artificial Sequence
  GFR-binding peptide
  MOD_RES (1), (34): Xaa is C or S
  MOD_RES (15), (16), (17), (18), (19): Xaa is A or G
  MOD_RES (20), (21), (22), (23): Xaa is A or G or is absent
XVSQDLRSVKIAKVXXXXXXXXXKEVQVMIVKSXK

SEQ ID NO: 53085 - protein, 41 aa, Artificial Sequence; identical to SEQ ID NO: 14793
  GFR-binding peptide
  MOD_RES (3), (4), (38), (40): Xaa is C or S
  MOD_RES (18), (19), (20), (21), (22): Xaa is A or G
  MOD_RES (23), (24), (25), (26): Xaa is A or G or is absent

SEQ ID NO: 53086 - protein, 39 aa, Artificial Sequence
  GFR-binding peptide
  MOD_RES (7), (7): Xaa is C or S
  MOD_RES (21), (22), (23), (24), (25): Xaa is A or G
  MOD_RES (26), (27), (28), (29): Xaa is A or G or is absent
HVTKPTXAPTKLRPVQVRKIXXXXXXXXXKKATVNMVVR

SEQ ID NO: 53087 - protein, 39 aa, Artificial Sequence
  GFR-binding peptide
  MOD_RES (7), (7): Xaa is C or S
  MOD_RES (21), (22), (23), (24), (25): Xaa is A or G
  MOD_RES (26), (27), (28), (29): Xaa is A or G or is absent
HVTKPTXAPTKLRSVKVAKVXXXXXXXXXKEVQVNMVVR

SEQ ID NO: 53088 - protein, 37 aa, Artificial Sequence; identical to SEQ ID NO: 14801
  GFR-binding peptide
  MOD_RES (5), (5): Xaa is C or S
  MOD_RES (19), (20), (21), (22), (23): Xaa is A or G
  MOD_RES (24), (25), (26), (27): Xaa is A or G or is absent

SEQ ID NO: 53089 - protein, 36 aa, Artificial Sequence
  GFR-binding peptide
  MOD_RES (1), (35): Xaa is C or S
  MOD_RES (15), (16), (17), (18), (19): Xaa is A or G
  MOD_RES (20), (21), (22), (23): Xaa is A or G or is absent
XVPTEEEPLPMVYYXXXXXXXXXEQLSNFLQHNKXE

SEQ ID NO: 53090 - protein, 41 aa, Artificial Sequence; identical to SEQ ID NO: 19738
  GFR-binding peptide
  MOD_RES (7), (41): Xaa is C or S
  MOD_RES (21), (22), (23), (24), (25): Xaa is A or G
  MOD_RES (26), (27), (28), (29): Xaa is A or G or is absent

SEQ ID NO: 53091 - protein, 38 aa, Artificial Sequence
  GFR-binding peptide
  MOD_RES (3), (3): Xaa is C or S
  MOD_RES (19), (20), (21), (22), (23): Xaa is A or G
  MOD_RES (24), (25), (26), (27): Xaa is A or G or is absent
VQXRPTQVQLEPLTVLYYXXXXXXXXXEQLSNTLEDHL

SEQ ID NO: 53092 - protein, 35 aa, Artificial Sequence
  GFR-binding peptide
  MOD_RES (3), (4): Xaa is C or S
KAXXVPTELRPVQMRKIDENEKVVKKATVDMVVEG

SEQ ID NO: 53093 - protein, 40 aa, Artificial Sequence
  GFR-binding peptide
  MOD_RES (7), (7): Xaa is C or S
  MOD_RES (21), (22), (23), (24), (25): Xaa is A or G
  MOD_RES (26), (27), (28), (29): Xaa is A or G or is absent
NDEGLEXVPTEEEPLTMLYYXXXXXXXXXEQLSNFLQHNK

SEQ ID NO: 53094 - protein, 40 aa, Artificial Sequence; identical to SEQ ID NO: 14807
  GFR-binding peptide
  MOD_RES (6), (7): Xaa is C or S
  MOD_RES (21), (22), (23), (24), (25): Xaa is A or G
  MOD_RES (26), (27), (28), (29): Xaa is A or G or is absent

SEQ ID NO: 53095 - protein, 42 aa, Artificial Sequence; identical to SEQ ID NO: 19742
  GFR-binding peptide
  MOD_RES (3), (40), (42): Xaa is C or S
  MOD_RES (19), (20), (21), (22), (23): Xaa is A or G
  MOD_RES (24), (25), (26), (27): Xaa is A or G or is absent

SEQ ID NO: 53096 - protein, 41 aa, Artificial Sequence
  GFR-binding peptide
  MOD_RES (4), (41): Xaa is C or S
NVQXRPTQVQLEPLTVLYYEIVRKKPIFEQLSNTLEDHLAX

SEQ ID NO: 53097 - protein, 38 aa, Artificial Sequence
  GFR-binding peptide
  MOD_RES (5), (6), (38): Xaa is C or S
VPKPXXAPTQLRPVQVRKIDDSSNVIKKATVNMVVRAX

SEQ ID NO: 53098 - protein, 33 aa, Artificial Sequence
  GFR-binding peptide
  MOD_RES (32), (32): Xaa is C or S
VPTELSNITMQIMDENEKVVIGEMSDMVVEGXG

SEQ ID NO: 53099 - protein, 41 aa, Artificial Sequence
  GFR-binding peptide
  MOD_RES (5), (6), (40): Xaa is C or S
  MOD_RES (20), (21), (22), (23), (24): Xaa is A or G
  MOD_RES (25), (26), (27), (28): Xaa is A or G or is absent
IPKAXXVPTELRPVQMRKIXXXXXXXXXKKATVDMVVEGXG

SEQ ID NO: 53100 - protein, 36 aa, Artificial Sequence
  GFR-binding peptide
  MOD_RES (34), (36): Xaa is C or S
VPTEEEPLPMVYYRIKPHQGQHEQLSNFLQHNKXEX

SEQ ID NO: 53101 - protein, 39 aa, Artificial Sequence; identical to SEQ ID NO: 14814
  GFR-binding peptide
  MOD_RES (4), (5), (36), (38): Xaa is C or S

SEQ ID NO: 53102 - protein, 40 aa, Artificial Sequence
  GFR-binding peptide
  MOD_RES (6), (7), (40): Xaa is C or S
  MOD_RES (21), (22), (23), (24), (25): Xaa is A or G
  MOD_RES (26), (27), (28), (29): Xaa is A or G or is absent
ASAAPXXVPQALSNITIQIMXXXXXXXXXIGEMSMIVRSX

SEQ ID NO: 53103 - protein, 40 aa, Artificial Sequence; identical to SEQ ID NO: 14815
  GFR-binding peptide
  MOD_RES (5), (6), (38), (40): Xaa is C or S

SEQ ID NO: 53104 - protein, 43 aa, Artificial Sequence; identical to SEQ ID NO: 14816
  GFR-binding peptide
  MOD_RES (6), (7), (41), (43): Xaa is C or S
  MOD_RES (21), (22), (23), (24), (25): Xaa is A or G
  MOD_RES (26), (27), (28), (29): Xaa is A or G or is absent

SEQ ID NO: 53105 - protein, 33 aa, Artificial Sequence; identical to SEQ ID NO: 14817
  GFR-binding peptide
  MOD_RES (14), (15), (16), (17), (18): Xaa is A or G
  MOD_RES (19), (20), (21), (22): Xaa is A or G or is absent

SEQ ID NO: 53106 - protein, 32 aa, Artificial Sequence; identical to SEQ ID NO: 14818
  GFR-binding peptide
  MOD_RES (1), (2): Xaa is C or S

SEQ ID NO: 53107 - protein, 38 aa, Artificial Sequence
  GFR-binding peptide
  MOD_RES (4), (4): Xaa is C or S
SVKXQPSRVHHEPLTVLYYEYVRKKPKLEQLSNRLEEH

SEQ ID NO: 53108 - protein, 42 aa, Artificial Sequence; identical to SEQ ID NO: 14819
  GFR-binding peptide
  MOD_RES (4), (5), (39), (41): Xaa is C or S
  MOD_RES (19), (20), (21), (22), (23): Xaa is A or G
  MOD_RES (24), (25), (26), (27): Xaa is A or G or is absent

SEQ ID NO: 53109 - protein, 36 aa, Artificial Sequence
  GFR-binding peptide
  MOD_RES (2), (34), (36): Xaa is C or S
TXAPTKLRPVQVRKIDDSSNVIKKATVNMVVRSXGX

SEQ ID NO: 53110 - protein, 34 aa, Artificial Sequence; identical to SEQ ID NO: 14820
  GFR-binding peptide
  MOD_RES (2), (3): Xaa is C or S

SEQ ID NO: 53111 - protein, 37 aa, Artificial Sequence
  GFR-binding peptide
  MOD_RES (5), (6), (37): Xaa is C or S
SAAPXXVPQALSNITIQIMVGRKPKVIGEMSMIVRSX

SEQ ID NO: 53112 - protein, 37 aa, Artificial Sequence
  GFR-binding peptide
  MOD_RES (3), (4): Xaa is C or S
  MOD_RES (18), (19), (20), (21), (22): Xaa is A or G
  MOD_RES (23), (24), (25), (26): Xaa is A or G or is absent
KAXXVPTELRPVQMRKIXXXXXXXXXKKATVEMVVEG

SEQ ID NO: 53113 - protein, 41 aa, Artificial Sequence; identical to SEQ ID NO: 14823
  GFR-binding peptide
  MOD_RES (6), (7), (39), (41): Xaa is C or S

SEQ ID NO: 53114 - protein, 40 aa, Artificial Sequence
  GFR-binding peptide
  MOD_RES (4), (5), (38), (40): Xaa is C or S
  MOD_RES (19), (20), (21), (22), (23): Xaa is A or G
  MOD_RES (24), (25), (26), (27): Xaa is A or G or is absent
ASPXXVSQDLRPVQIRKIXXXXXXXXXKKATVMIVKSXKX

SEQ ID NO: 53115 - protein, 38 aa, Artificial Sequence
  GFR-binding peptide
  MOD_RES (4), (4): Xaa is C or S
SVKXQPSRVHHEPLPVVYYEYVRKKPKLEQLSNRLEEH

SEQ ID NO: 53116 - protein, 40 aa, Artificial Sequence
  GFR-binding peptide
  MOD_RES (6), (7), (39): Xaa is C or S
TVPKPXXAPTQLRSVKVAKVDDSSNVIKEVQVNMVVRAXG

SEQ ID NO: 53117 - protein, 37 aa, Artificial Sequence
  GFR-binding peptide
  MOD_RES (1), (35), (37): Xaa is C or S
  MOD_RES (15), (16), (17), (18), (19): Xaa is A or G
  MOD_RES (20), (21), (22), (23): Xaa is A or G or is absent
XVPTEEEPLPMVYYXXXXXXXXXEQLSNFLQHNKXEX

SEQ ID NO: 53118 - protein, 34 aa, Artificial Sequence; identical to SEQ ID NO: 14826
  GFR-binding peptide
  MOD_RES (31), (33): Xaa is C or S

SEQ ID NO: 53119 - protein, 36 aa, Artificial Sequence
  GFR-binding peptide
  MOD_RES (1), (2), (35): Xaa is C or S
  MOD_RES (16), (17), (18), (19), (20): Xaa is A or G
  MOD_RES (21), (22), (23), (24): Xaa is A or G or is absent
XXVPQDLRSVKIAKVXXXXXXXXXKEVQVMVVKSXK

SEQ ID NO: 53120 - protein, 38 aa, Artificial Sequence; identical to SEQ ID NO: 14828
  GFR-binding peptide
  MOD_RES (2), (36), (38): Xaa is C or S
  MOD_RES (16), (17), (18), (19), (20): Xaa is A or G
  MOD_RES (21), (22), (23), (24): Xaa is A or G or is absent

SEQ ID NO: 53121 - protein, 39 aa, Artificial Sequence; identical to SEQ ID NO: 19753
  GFR-binding peptide
  MOD_RES (5), (39): Xaa is C or S
  MOD_RES (19), (20), (21), (22), (23): Xaa is A or G
  MOD_RES (24), (25), (26), (27): Xaa is A or G or is absent

SEQ ID NO: 53122 - protein, 40 aa, Artificial Sequence; identical to SEQ ID NO: 14829
  GFR-binding peptide
  MOD_RES (3), (4), (38), (40): Xaa is C or S
  MOD_RES (18), (19), (20), (21), (22): Xaa is A or G
  MOD_RES (23), (24), (25), (26): Xaa is A or G or is absent

SEQ ID NO: 53123 - protein, 37 aa, Artificial Sequence; identical to SEQ ID NO: 40575
  GFR-binding peptide
  MOD_RES (4), (5): Xaa is C or S
  MOD_RES (19), (20), (21), (22), (23): Xaa is A or G
  MOD_RES (24), (25), (26), (27): Xaa is A or G or is absent

SEQ ID NO: 53124 - protein, 33 aa, Artificial Sequence
  GFR-binding peptide
  MOD_RES (1), (32): Xaa is C or S
XVPQALRSVKIAKVVGRKPKVKEVQVMIVRSXK

SEQ ID NO: 53125 - protein, 36 aa, Artificial Sequence; identical to SEQ ID NO: 14831
  GFR-binding peptide
  MOD_RES (1), (2), (34), (36): Xaa is C or S

SEQ ID NO: 53126 - protein, 40 aa, Artificial Sequence
  GFR-binding peptide
  MOD_RES (4), (4): Xaa is C or S
  MOD_RES (20), (21), (22), (23), (24): Xaa is A or G
  MOD_RES (25), (26), (27), (28): Xaa is A or G or is absent
NVQXRPTQVQLEPLTVLYYXXXXXXXXXEQLSNTLEDHLA

SEQ ID NO: 53127 - protein, 39 aa, Artificial Sequence; identical to SEQ ID NO: 14833
  GFR-binding peptide
  MOD_RES (6), (7), (39): Xaa is C or S

SEQ ID NO: 53128 - protein, 38 aa, Artificial Sequence
  GFR-binding peptide
  MOD_RES (2), (3), (35), (37): Xaa is C or S
PXXAPTKLRSVKVAKVDDSSNVIKEVQVNMVVRSXGXH

SEQ ID NO: 53129 - protein, 39 aa, Artificial Sequence
  GFR-binding peptide
  MOD_RES (5), (5): Xaa is C or S
  MOD_RES (21), (22), (23), (24), (25): Xaa is A or G
  MOD_RES (26), (27), (28), (29): Xaa is A or G or is absent
SSVKXQPSRVHHEPLPVVYYXXXXXXXXXEQLSNRLEEH

SEQ ID NO: 53130 - protein, 40 aa, Artificial Sequence; identical to SEQ ID NO: 19758
  GFR-binding peptide
  MOD_RES (4), (4): Xaa is C or S

SEQ ID NO: 53131 - protein, 34 aa, Artificial Sequence
  GFR-binding peptide
  MOD_RES (1), (2): Xaa is C or S
  MOD_RES (16), (17), (18), (19), (20): Xaa is A or G
  MOD_RES (21), (22), (23), (24): Xaa is A or G or is absent
XXVPTELRPVQMRKIXXXXXXXXXKKATVDMVVE

SEQ ID NO: 53132 - protein, 35 aa, Artificial Sequence; identical to SEQ ID NO: 14835
  GFR-binding peptide
  MOD_RES (34), (34): Xaa is C or S
  MOD_RES (14), (15), (16), (17), (18): Xaa is A or G
  MOD_RES (19), (20), (21), (22): Xaa is A or G or is absent

SEQ ID NO: 53133 - protein, 40 aa, Artificial Sequence
  GFR-binding peptide
  MOD_RES (6), (7), (38), (40): Xaa is C or S
ASAAPXXVPQALRSVKIAKVVGRKPKVKEVQVMIVRSXKX

SEQ ID NO: 53134 - protein, 39 aa, Artificial Sequence; identical to SEQ ID NO: 14837
  GFR-binding peptide
  MOD_RES (4), (5), (37), (39): Xaa is C or S

SEQ ID NO: 53135 - protein, 36 aa, Artificial Sequence
  GFR-binding peptide
  MOD_RES (16), (17), (18), (19), (20): Xaa is A or G
  MOD_RES (21), (22), (23), (24): Xaa is A or G or is absent
RPTQVQLEPLPVVYYXXXXXXXXXEQLSNTLEDHLA

SEQ ID NO: 53136 - protein, 38 aa, Artificial Sequence
  GFR-binding peptide
  MOD_RES (35), (37): Xaa is C or S
  MOD_RES (14), (15), (16), (17), (18): Xaa is A or G
  MOD_RES (19), (20), (21), (22): Xaa is A or G or is absent
TQVQLEPLPVVYYXXXXXXXXXEQLSNTLEDHLAXKXE

SEQ ID NO: 53137 - protein, 41 aa, Artificial Sequence
  GFR-binding peptide
  MOD_RES (5), (5): Xaa is C or S
RNVQXRPTQVQLEPLTVLYYEIVRKKPIFEQLSNTLEDHLA

SEQ ID NO: 53138 - protein, 42 aa, Artificial Sequence; identical to SEQ ID NO: 14841
  GFR-binding peptide
  MOD_RES (5), (6), (40), (42): Xaa is C or S
  MOD_RES (20), (21), (22), (23), (24): Xaa is A or G
  MOD_RES (25), (26), (27), (28): Xaa is A or G or is absent

SEQ ID NO: 53139 - protein, 37 aa, Artificial Sequence
  GFR-binding peptide
  MOD_RES (4), (5): Xaa is C or S
  MOD_RES (19), (20), (21), (22), (23): Xaa is A or G
  MOD_RES (24), (25), (26), (27): Xaa is A or G or is absent
AAPXXVPQALRSVKIAKVXXXXXXXXXKEVQVMIVRS

SEQ ID NO: 53140 - protein, 32 aa, Artificial Sequence
  GFR-binding peptide
  MOD_RES (1), (2): Xaa is C or S
XXVPQDLRPVQIRKIVGRTPKVKKATVMVVKS

SEQ ID NO: 53141 - protein, 35 aa, Artificial Sequence; identical to SEQ ID NO: 14843
  GFR-binding peptide
  MOD_RES (1), (33), (35): Xaa is C or S

SEQ ID NO: 53142 - protein, 37 aa, Artificial Sequence; identical to SEQ ID NO: 19765
  GFR-binding peptide
  MOD_RES (5), (5): Xaa is C or S
  MOD_RES (19), (20), (21), (22), (23): Xaa is A or G
  MOD_RES (24), (25), (26), (27): Xaa is A or G or is absent

SEQ ID NO: 53143 - protein, 37 aa, Artificial Sequence; identical to SEQ ID NO: 14844
  GFR-binding peptide
  MOD_RES (3), (35), (37): Xaa is C or S

SEQ ID NO: 53144 - protein, 36 aa, Artificial Sequence
  GFR-binding peptide
  MOD_RES (2), (3), (36): Xaa is C or S
  MOD_RES (17), (18), (19), (20), (21): Xaa is A or G
  MOD_RES (22), (23), (24), (25): Xaa is A or G or is absent
PXXVSQDLRPVQIRKIXXXXXXXXXKKATVMIVKSX

SEQ ID NO: 53145 - protein, 42 aa, Artificial Sequence; identical to SEQ ID NO: 14845
  GFR-binding peptide
  MOD_RES (5), (6), (39), (41): Xaa is C or S
  MOD_RES (20), (21), (22), (23), (24): Xaa is A or G
  MOD_RES (25), (26), (27), (28): Xaa is A or G or is absent

SEQ ID NO: 53146 - protein, 40 aa, Artificial Sequence; identical to SEQ ID NO: 19767
  GFR-binding peptide
  MOD_RES (7), (7): Xaa is C or S

SEQ ID NO: 53147 - protein, 37 aa, Artificial Sequence; identical to SEQ ID NO: 19768
  GFR-binding peptide
  MOD_RES (34), (36): Xaa is C or S
  MOD_RES (14), (15), (16), (17), (18): Xaa is A or G
  MOD_RES (19), (20), (21), (22): Xaa is A or G or is absent

SEQ ID NO: 53148 - protein, 31 aa, Artificial Sequence
  GFR-binding peptide
  MOD_RES (1), (1): Xaa is C or S
XVPQDLRPVQIRKIVGRTPKVKKATVMVVKS

SEQ ID NO: 53149 - protein, 34 aa, Artificial Sequence; identical to SEQ ID NO: 14846
  GFR-binding peptide
  MOD_RES (34), (34): Xaa is C or S
  MOD_RES (14), (15), (16), (17), (18): Xaa is A or G
  MOD_RES (19), (20), (21), (22): Xaa is A or G or is absent

SEQ ID NO: 53150 - protein, 36 aa, Artificial Sequence
  GFR-binding peptide
  MOD_RES (3), (4), (36): Xaa is C or S
KAXXVPTELRSVKMAKVDEYDKVVKEVQVEMVVEGX

SEQ ID NO: 53151 - protein, 43 aa, Artificial Sequence; identical to SEQ ID NO: 14847
  GFR-binding peptide
  MOD_RES (5), (6), (40), (42): Xaa is C or S
  MOD_RES (20), (21), (22), (23), (24): Xaa is A or G
  MOD_RES (25), (26), (27), (28): Xaa is A or G or is absent

SEQ ID NO: 53152 - protein, 42 aa, Artificial Sequence
  GFR-binding peptide
  MOD_RES (4), (5), (39), (41): Xaa is C or S
  MOD_RES (19), (20), (21), (22), (23): Xaa is A or G
  MOD_RES (24), (25), (26), (27): Xaa is A or G or is absent
PKAXXVPTELRPVQMRKIXXXXXXXXXKKATVDMVVEGXGXR

SEQ ID NO: 53153 - protein, 38 aa, Artificial Sequence; identical to SEQ ID NO: 19771
  GFR-binding peptide
  MOD_RES (4), (38): Xaa is C or S

SEQ ID NO: 53154 - protein, 38 aa, Artificial Sequence; identical to SEQ ID NO: 19772
  GFR-binding peptide
  MOD_RES (4), (4): Xaa is C or S
  MOD_RES (20), (21), (22), (23), (24): Xaa is A or G
  MOD_RES (25), (26), (27), (28): Xaa is A or G or is absent

SEQ ID NO: 53155 - protein, 38 aa, Artificial Sequence; identical to SEQ ID NO: 19773
  GFR-binding peptide
  MOD_RES (35), (37): Xaa is C or S
  MOD_RES (14), (15), (16), (17), (18): Xaa is A or G
  MOD_RES (19), (20), (21), (22): Xaa is A or G or is absent

SEQ ID NO: 53156 - protein, 37 aa, Artificial Sequence; identical to SEQ ID NO: 14849
  GFR-binding peptide
  MOD_RES (2), (3), (36): Xaa is C or S
  MOD_RES (17), (18), (19), (20), (21): Xaa is A or G
  MOD_RES (22), (23), (24), (25): Xaa is A or G or is absent

SEQ ID NO: 53157 - protein, 38 aa, Artificial Sequence
  GFR-binding peptide
  MOD_RES (4), (5): Xaa is C or S
  MOD_RES (19), (20), (21), (22), (23): Xaa is A or G
  MOD_RES (24), (25), (26), (27): Xaa is A or G or is absent
PKPXXAPTKLRPVQVRKIXXXXXXXXXKKATVNMVVRS

SEQ ID NO: 53158 - protein, 40 aa, Artificial Sequence; identical to SEQ ID NO: 14853
  GFR-binding peptide
  MOD_RES (3), (4), (38), (40): Xaa is C or S
  MOD_RES (18), (19), (20), (21), (22): Xaa is A or G
  MOD_RES (23), (24), (25), (26): Xaa is A or G or is absent

SEQ ID NO: 53159 - protein, 37 aa, Artificial Sequence
  GFR-binding peptide
  MOD_RES (3), (4), (36): Xaa is C or S
KPXXAPTQLRPVQVRKIDDSSNVIKKATVNMVVRAXG

SEQ ID NO: 53160 - protein, 36 aa, Artificial Sequence
  GFR-binding peptide
  MOD_RES (34), (36): Xaa is C or S
  MOD_RES (14), (15), (16), (17), (18): Xaa is A or G
  MOD_RES (19), (20), (21), (22): Xaa is A or G or is absent
APTKLSNITVQIMXXXXXXXXXIGEMSNMVVRSXGX

SEQ ID NO: 53161 - protein, 41 aa, Artificial Sequence
  GFR-binding peptide
  MOD_RES (6), (7), (40): Xaa is C or S
  MOD_RES (21), (22), (23), (24), (25): Xaa is A or G
  MOD_RES (26), (27), (28), (29): Xaa is A or G or is absent
ASASPXXVSQDLRPVQIRKIXXXXXXXXXKKATVMIVKSXK

SEQ ID NO: 53162 - protein, 40 aa, Artificial Sequence; identical to SEQ ID NO: 14856
  GFR-binding peptide
  MOD_RES (3), (4), (38), (40): Xaa is C or S
  MOD_RES (18), (19), (20), (21), (22): Xaa is A or G
  MOD_RES (23), (24), (25), (26): Xaa is A or G or is absent

SEQ ID NO: 53163 - protein, 38 aa, Artificial Sequence; identical to SEQ ID NO: 14859
  GFR-binding peptide
  MOD_RES (3), (4), (36), (38): Xaa is C or S

SEQ ID NO: 53164 - protein, 41 aa, Artificial Sequence
  GFR-binding peptide
  MOD_RES (7), (39), (41): Xaa is C or S
HVTKPTXAPTKLSNITVQIMDDSSNVIIGEMSNMVVRSXGX

SEQ ID NO: 53165 - protein, 37 aa, Artificial Sequence
  GFR-binding peptide
  MOD_RES (2), (3), (35), (37): Xaa is C or S
AXXVPTELRSVKMAKVDENEKVVKEVQVDMVVEGXGX

SEQ ID NO: 53166 - protein, 34 aa, Artificial Sequence
  GFR-binding peptide
  MOD_RES (32), (34): Xaa is C or S
APTQLRPVQVRKIDDSSNVIKKATVNMVVRAXGX

SEQ ID NO: 53167 - protein, 36 aa, Artificial Sequence
  GFR-binding peptide
  MOD_RES (3), (4), (35): Xaa is C or S
SPXXVPQDLSNITIQIMVGRTPKVIGEMSMVVKSXK

SEQ ID NO: 53168 - protein, 38 aa, Artificial Sequence; identical to SEQ ID NO: 19784
  GFR-binding peptide
  MOD_RES (2), (2): Xaa is C or S
  MOD_RES (18), (19), (20), (21), (22): Xaa is A or G
  MOD_RES (23), (24), (25), (26): Xaa is A or G or is absent

SEQ ID NO: 53169 - protein, 41 aa, Artificial Sequence; identical to SEQ ID NO: 19786
  GFR-binding peptide
  MOD_RES (5), (5): Xaa is C or S

SEQ ID NO: 53170 - protein, 38 aa, Artificial Sequence
  GFR-binding peptide
  MOD_RES (2), (2): Xaa is C or S
  MOD_RES (18), (19), (20), (21), (22): Xaa is A or G
  MOD_RES (23), (24), (25), (26): Xaa is A or G or is absent
QXRPTQVQLEPLTVLYYXXXXXXXXXEQLSNTLEDHLA

SEQ ID NO: 53171 - protein, 32 aa, Artificial Sequence; identical to SEQ ID NO: 19788
  GFR-binding peptide
  MOD_RES (14), (15), (16), (17), (18): Xaa is A or G
  MOD_RES (19), (20), (21), (22): Xaa is A or G or is absent

SEQ ID NO: 53172 - protein, 36 aa, Artificial Sequence; identical to SEQ ID NO: 19789
  GFR-binding peptide
  MOD_RES (1), (1): Xaa is C or S

SEQ ID NO: 53173 - protein, 40 aa, Artificial Sequence
  GFR-binding peptide
  MOD_RES (4), (38), (40): Xaa is C or S
  MOD_RES (18), (19), (20), (21), (22): Xaa is A or G
  MOD_RES (23), (24), (25), (26): Xaa is A or G or is absent
GLEXVPTEEEPLPMVYYXXXXXXXXXEQLSNFLQHNKXEX

SEQ ID NO: 53174 - protein, 41 aa, Artificial Sequence; identical to SEQ ID NO: 14869
  GFR-binding peptide
  MOD_RES (6), (7), (41): Xaa is C or S
  MOD_RES (21), (22), (23), (24), (25): Xaa is A or G
  MOD_RES (26), (27), (28), (29): Xaa is A or G or is absent

SEQ ID NO: 53175 - protein, 33 aa, Artificial Sequence; identical to SEQ ID NO: 14870
  GFR-binding peptide
  MOD_RES (1), (1): Xaa is C or S
  MOD_RES (15), (16), (17), (18), (19): Xaa is A or G
  MOD_RES (20), (21), (22), (23): Xaa is A or G or is absent

SEQ ID NO: 53176 - protein, 32 aa, Artificial Sequence; identical to SEQ ID NO: 14872
  GFR-binding peptide
  MOD_RES (1), (2): Xaa is C or S

SEQ ID NO: 53177 - protein, 42 aa, Artificial Sequence; identical to SEQ ID NO: 14873
  GFR-binding peptide
  MOD_RES (5), (39), (41): Xaa is C or S
  MOD_RES (19), (20), (21), (22), (23): Xaa is A or G
  MOD_RES (24), (25), (26), (27): Xaa is A or G or is absent

SEQ ID NO: 53178 - protein, 41 aa, Artificial Sequence
  GFR-binding peptide
  MOD_RES (4), (5), (39), (41): Xaa is C or S
  MOD_RES (19), (20), (21), (22), (23): Xaa is A or G
  MOD_RES (24), (25), (26), (27): Xaa is A or G or is absent
PKPXXAPTQLRPVQVRKIXXXXXXXXXKKATVNMVVRAXGX

SEQ ID NO: 53179 - protein, 41 aa, Artificial Sequence
  GFR-binding peptide
  MOD_RES (4), (5), (39), (41): Xaa is C or S
  MOD_RES (19), (20), (21), (22), (23): Xaa is A or G
  MOD_RES (24), (25), (26), (27): Xaa is A or G or is absent
PKAXXVPTELRSVKMAKVXXXXXXXXXKEVQVEMVVEGXGX

SEQ ID NO: 53180 - protein, 39 aa, Artificial Sequence
  GFR-binding peptide
  MOD_RES (36), (38): Xaa is C or S
PSRVHHEPLTVLYYEYVRKKPKLEQLSNRLEEHLEXAXA

SEQ ID NO: 53181 - protein, 33 aa, Artificial Sequence
  GFR-binding peptide
  MOD_RES (1), (1): Xaa is C or S
  MOD_RES (15), (16), (17), (18), (19): Xaa is A or G
  MOD_RES (20), (21), (22), (23): Xaa is A or G or is absent
XVPQALRSVKIAKVXXXXXXXXXKEVQVMIVRS

SEQ ID NO: 53182 - protein, 40 aa, Artificial Sequence
  GFR-binding peptide
  MOD_RES (4), (4): Xaa is C or S
  MOD_RES (20), (21), (22), (23), (24): Xaa is A or G
  MOD_RES (25), (26), (27), (28): Xaa is A or G or is absent
NVQXRPTQVQLEPLPVVYYXXXXXXXXXEQLSNTLEDHLA

SEQ ID NO: 53183 - protein, 36 aa, Artificial Sequence; identical to SEQ ID NO: 14879
  GFR-binding peptide
  MOD_RES (2), (3), (35): Xaa is C or S

SEQ ID NO: 53184 - protein, 37 aa, Artificial Sequence
  GFR-binding peptide
  MOD_RES (1), (35), (37): Xaa is C or S
  MOD_RES (15), (16), (17), (18), (19): Xaa is A or G
  MOD_RES (20), (21), (22), (23): Xaa is A or G or is absent
XVPTELRPVQMRKIXXXXXXXXXKKATVDMVVEGXGX

SEQ ID NO: 53185 - protein, 35 aa, Artificial Sequence
  GFR-binding peptide
  MOD_RES (3), (4): Xaa is C or S
KPXXAPTQLSNITVQIMDDSSNVIIGEMSNMVVRA

SEQ ID NO: 53186 - protein, 38 aa, Artificial Sequence; identical to SEQ ID NO: 14880
  GFR-binding peptide
  MOD_RES (6), (7), (38): Xaa is C or S

SEQ ID NO: 53187 - protein, 37 aa, Artificial Sequence
  GFR-binding peptide
  MOD_RES (1), (2), (35), (37): Xaa is C or S
  MOD_RES (16), (17), (18), (19), (20): Xaa is A or G
  MOD_RES (21), (22), (23), (24): Xaa is A or G or is absent
XXVPQDLRSVKIAKVXXXXXXXXXKEVQVMVVKSXKX

SEQ ID NO: 53188 - protein, 35 aa, Artificial Sequence; identical to SEQ ID NO: 14881
  GFR-binding peptide
  MOD_RES (32), (34): Xaa is C or S

SEQ ID NO: 53189 - protein, 32 aa, Artificial Sequence; identical to SEQ ID NO: 40652
  GFR-binding peptide
  MOD_RES (14), (15), (16), (17), (18): Xaa is A or G
  MOD_RES (19), (20), (21), (22): Xaa is A or G or is absent

SEQ ID NO: 53190 - protein, 32 aa, Artificial Sequence
  GFR-binding peptide
  MOD_RES (14), (15), (16), (17), (18): Xaa is A or G
  MOD_RES (19), (20), (21), (22): Xaa is A or G or is absent
VPQDLSNITIQIMXXXXXXXXXIGEMSMVVKS

SEQ ID NO: 53191 - protein, 40 aa, Artificial Sequence; identical to SEQ ID NO: 14882
  GFR-binding peptide
  MOD_RES (5), (6), (38), (40): Xaa is C or S

SEQ ID NO: 53192 - protein, 38 aa, Artificial Sequence
  GFR-binding peptide
  MOD_RES (2), (3), (36), (38): Xaa is C or S
  MOD_RES (17), (18), (19), (20), (21): Xaa is A or G
  MOD_RES (22), (23), (24), (25): Xaa is A or G or is absent
PXXVSQDLRPVQIRKIXXXXXXXXXKKATVMIVKSXKX

SEQ ID NO: 53193 - protein, 37 aa, Artificial Sequence
  GFR-binding peptide
  MOD_RES (3), (4), (37): Xaa is C or S
  MOD_RES (18), (19), (20), (21), (22): Xaa is A or G
  MOD_RES (23), (24), (25), (26): Xaa is A or G or is absent
SPXXVPQDLRSVKIAKVXXXXXXXXXKEVQVMVVKSX

SEQ ID NO: 53194 - protein, 35 aa, Artificial Sequence; identical to SEQ ID NO: 19797
  GFR-binding peptide
  MOD_RES (16), (17), (18), (19), (20): Xaa is A or G
  MOD_RES (21), (22), (23), (24): Xaa is A or G or is absent

SEQ ID NO: 53195 - protein, 40 aa, Artificial Sequence
  GFR-binding peptide
  MOD_RES (6), (7), (40): Xaa is C or S
  MOD_RES (21), (22), (23), (24), (25): Xaa is A or G
  MOD_RES (26), (27), (28), (29): Xaa is A or G or is absent
ASASPXXVSQDLSNITIQIMXXXXXXXXXIGEMSMIVKSX

SEQ ID NO: 53196 - protein, 40 aa, Artificial Sequence
  GFR-binding peptide
  MOD_RES (5), (6), (40): Xaa is C or S
  MOD_RES (20), (21), (22), (23), (24): Xaa is A or G
  MOD_RES (25), (26), (27), (28): Xaa is A or G or is absent
VPKPXXAPTKLRSVKVAKVXXXXXXXXXKEVQVNMVVRSX

SEQ ID NO: 53197 - protein, 37 aa, Artificial Sequence
  GFR-binding peptide
  MOD_RES (6), (7): Xaa is C or S
YVPKPXXAPTKLRPVQVRKIDDSSNVIKKATVNMVVR

SEQ ID NO: 53198 - protein, 39 aa, Artificial Sequence
  GFR-binding peptide
  MOD_RES (4), (5), (38): Xaa is C or S
  MOD_RES (19), (20), (21), (22), (23): Xaa is A or G
  MOD_RES (24), (25), (26), (27): Xaa is A or G or is absent
ASPXXVPQDLSNITIQIMXXXXXXXXXIGEMSMVVKSXK

SEQ ID NO: 53199 - protein, 34 aa, Artificial Sequence
  GFR-binding peptide
  MOD_RES (33), (33): Xaa is C or S
  MOD_RES (14), (15), (16), (17), (18): Xaa is A or G
  MOD_RES (19), (20), (21), (22): Xaa is A or G or is absent
VSQDLRSVKIAKVXXXXXXXXXKEVQVMIVKSXK

SEQ ID NO: 53200 - protein, 40 aa, Artificial Sequence
  GFR-binding peptide
  MOD_RES (5), (6), (37), (39): Xaa is C or S
SAAPXXVPQALRPVQIRKIVGRKPKVKKATVMIVRSXKXS

SEQ ID NO: 53201 - protein, 40 aa, Artificial Sequence
  GFR-binding peptide
  MOD_RES (37), (39): Xaa is C or S
QPSRVHHEPLTVLYYEYVRKKPKLEQLSNRLEEHLEXAXA

SEQ ID NO: 53202 - protein, 37 aa, Artificial Sequence
  GFR-binding peptide
  MOD_RES (4), (36): Xaa is C or S
KPTXAPTKLSNITVQIMDDSSNVIIGEMSNMVVRSXG

SEQ ID NO: 53203 - protein, 42 aa, Artificial Sequence
  GFR-binding peptide
  MOD_RES (4), (41): Xaa is C or S
  MOD_RES (20), (21), (22), (23), (24): Xaa is A or G
  MOD_RES (25), (26), (27), (28): Xaa is A or G or is absent
NVQXRPTQVQLEPLPVVYYXXXXXXXXXEQLSNTLEDHLAXK

SEQ ID NO: 53204 - protein, 41 aa, Artificial Sequence
  GFR-binding peptide
  MOD_RES (6), (7), (38), (40): Xaa is C or S
ASASPXXVSQDLRSVKIAKVIGKTPKIKEVQVMIVKSXKXS

SEQ ID NO: 53205 - protein, 33 aa, Artificial Sequence
  GFR-binding peptide
  MOD_RES (14), (15), (16), (17), (18): Xaa is A or G
  MOD_RES (19), (20), (21), (22): Xaa is A or G or is absent
VPTEEEPLTMLYYXXXXXXXXXEQLSNFLQHNK

SEQ ID NO: 53206 - protein, 39 aa, Artificial Sequence; identical to SEQ ID NO: 14890
  GFR-binding peptide
  MOD_RES (4), (5), (38): Xaa is C or S
  MOD_RES (19), (20), (21), (22), (23): Xaa is A or G
  MOD_RES (24), (25), (26), (27): Xaa is A or G or is absent

SEQ ID NO: 53207 - protein, 36 aa, Artificial Sequence; identical to SEQ ID NO: 19800
  GFR-binding peptide
  MOD_RES (2), (2): Xaa is C or S

SEQ ID NO: 53208 - protein, 40 aa, Artificial Sequence; identical to SEQ ID NO: 19801
  GFR-binding peptide
  MOD_RES (5), (39): Xaa is C or S
  MOD_RES (19), (20), (21), (22), (23): Xaa is A or G
  MOD_RES (24), (25), (26), (27): Xaa is A or G or is absent

SEQ ID NO: 53209 - protein, 39 aa, Artificial Sequence; identical to SEQ ID NO: 14892
  GFR-binding peptide
  MOD_RES (1), (2), (36), (38): Xaa is C or S
  MOD_RES (16), (17), (18), (19), (20): Xaa is A or G
  MOD_RES (21), (22), (23), (24): Xaa is A or G or is absent

SEQ ID NO: 53210 - protein, 35 aa, Artificial Sequence; identical to SEQ ID NO: 19802
  GFR-binding peptide
  MOD_RES (34), (34): Xaa is C or S
  MOD_RES (14), (15), (16), (17), (18): Xaa is A or G
  MOD_RES (19), (20), (21), (22): Xaa is A or G or is absent

SEQ ID NO: 53211 - protein, 35 aa, Artificial Sequence; identical to SEQ ID NO: 14894
  GFR-binding peptide
  MOD_RES (1), (2): Xaa is C or S
  MOD_RES (16), (17), (18), (19), (20): Xaa is A or G
  MOD_RES (21), (22), (23), (24): Xaa is A or G or is absent

SEQ ID NO: 53212 - protein, 37 aa, Artificial Sequence
  GFR-binding peptide
  MOD_RES (4), (5): Xaa is C or S
  MOD_RES (19), (20), (21), (22), (23): Xaa is A or G
  MOD_RES (24), (25), (26), (27): Xaa is A or G or is absent
PKPXXAPTKLSNITVQIMXXXXXXXXXIGEMSNMVVR

SEQ ID NO: 53213 - protein, 39 aa, Artificial Sequence; identical to SEQ ID NO: 19804
  GFR-binding peptide
  MOD_RES (37), (39): Xaa is C or S
  MOD_RES (16), (17), (18), (19), (20): Xaa is A or G
  MOD_RES (21), (22), (23), (24): Xaa is A or G or is absent

SEQ ID NO: 53214 - protein, 40 aa, Artificial Sequence
  GFR-binding peptide
  MOD_RES (3), (37), (39): Xaa is C or S
LEXVPTEEEPLTMLYYRIKPHQGQHEQLSNFLQHNKXEXR

SEQ ID NO: 53215 - protein, 39 aa, Artificial Sequence; identical to SEQ ID NO: 14896
  GFR-binding peptide
  MOD_RES (5), (6): Xaa is C or S
  MOD_RES (20), (21), (22), (23), (24): Xaa is A or G
  MOD_RES (25), (26), (27), (28): Xaa is A or G or is absent

SEQ ID NO: 53216 - protein, 38 aa, Artificial Sequence
  GFR-binding peptide
  MOD_RES (5), (6): Xaa is C or S
  MOD_RES (20), (21), (22), (23), (24): Xaa is A or G
  MOD_RES (25), (26), (27), (28): Xaa is A or G or is absent
VPKPXXAPTKLRPVQVRKIXXXXXXXXXKKATVNMVVR

SEQ ID NO: 53217 - protein, 41 aa, Artificial Sequence
  GFR-binding peptide
  MOD_RES (4), (5), (39), (41): Xaa is C or S
  MOD_RES (19), (20), (21), (22), (23): Xaa is A or G
  MOD_RES (24), (25), (26), (27): Xaa is A or G or is absent
PKPXXAPTQLSNITVQIMXXXXXXXXXIGEMSNMVVRAXGX

SEQ ID NO: 53218 - protein, 31 aa, Artificial Sequence
  GFR-binding peptide
  MOD_RES (31), (31): Xaa is C or S
VSQDLRPVQIRKIIGKTPKIKKATVMIVKSX

SEQ ID NO: 53219 - protein, 34 aa, Artificial Sequence; identical to SEQ ID NO: 19809
  GFR-binding peptide
  MOD_RES (1), (1): Xaa is C or S
  MOD_RES (15), (16), (17), (18), (19): Xaa is A or G
  MOD_RES (20), (21), (22), (23): Xaa is A or G or is absent

SEQ ID NO: 53220 - protein, 37 aa, Artificial Sequence
  GFR-binding peptide
  MOD_RES (2), (3), (37): Xaa is C or S
  MOD_RES (17), (18), (19), (20), (21): Xaa is A or G
  MOD_RES (22), (23), (24), (25): Xaa is A or G or is absent
AXXVPTELSNITMQIMXXXXXXXXXIGEMSEMVVEGX

SEQ ID NO: 53221 - protein, 36 aa, Artificial Sequence; identical to SEQ ID NO: 14898
  GFR-binding peptide
  MOD_RES (5), (6): Xaa is C or S

SEQ ID NO: 53222 - protein, 30 aa, Artificial Sequence
  GFR-binding peptide
VSQDLRPVQIRKIIGKTPKIKKATVMIVKS

SEQ ID NO: 53223 - protein, 39 aa, Artificial Sequence
  GFR-binding peptide
  MOD_RES (3), (4), (37), (39): Xaa is C or S
  MOD_RES (18), (19), (20), (21), (22): Xaa is A or G
  MOD_RES (23), (24), (25), (26): Xaa is A or G or is absent
APXXVPQALRSVKIAKVXXXXXXXXXKEVQVMIVRSXKX

SEQ ID NO: 53224 - protein, 40 aa, Artificial Sequence; identical to SEQ ID NO: 14901
  GFR-binding peptide
  MOD_RES (6), (7): Xaa is C or S
  MOD_RES (21), (22), (23), (24), (25): Xaa is A or G
  MOD_RES (26), (27), (28), (29): Xaa is A or G or is absent

SEQ ID NO: 53225 - protein, 36 aa, Artificial Sequence; identical to SEQ ID NO: 19813
  GFR-binding peptide
  MOD_RES (1), (1): Xaa is C or S

SEQ ID NO: 53226 - protein, 43 aa, Artificial Sequence; identical to SEQ ID NO: 19816
  GFR-binding peptide
  MOD_RES (3), (40), (42): Xaa is C or S

SEQ ID NO: 53227 - protein, 33 aa, Artificial Sequence
  GFR-binding peptide
  MOD_RES (1), (2): Xaa is C or S
XXVPTELRPVQMRKIDEYDKVVKKATVEMVVEG

SEQ ID NO: 53228 - protein, 38 aa, Artificial Sequence
  GFR-binding peptide
  MOD_RES (4), (38): Xaa is C or S
GLEXVPTEEEPLPMVYYRIKPHQGQHEQLSNFLQHNKX

SEQ ID NO: 53229 - protein, 33 aa, Artificial Sequence
  GFR-binding peptide
  MOD_RES (1), (33): Xaa is C or S
XVPTELSNITMQIMDENEKVVIGEMSDMVVEGX

SEQ ID NO: 53230 - protein, 32 aa, Artificial Sequence; identical to SEQ ID NO: 14903
  GFR-binding peptide
  MOD_RES (1), (2): Xaa is C or S

SEQ ID NO: 53231 - protein, 39 aa, Artificial Sequence
  GFR-binding peptide
  MOD_RES (6), (7), (39): Xaa is C or S
TVPKPXXAPTQLRPVQVRKIDDSSNVIKKATVNMVVRAX

SEQ ID NO: 53232 - protein, 41 aa, Artificial Sequence; identical to SEQ ID NO: 19819
  GFR-binding peptide
  MOD_RES (4), (41): Xaa is C or S
  MOD_RES (20), (21), (22), (23), (24): Xaa is A or G
  MOD_RES (25), (26), (27), (28): Xaa is A or G or is absent

SEQ ID NO: 53233 - protein, 43 aa, Artificial Sequence; identical to SEQ ID NO: 19820
  GFR-binding peptide
  MOD_RES (4), (41), (43): Xaa is C or S
  MOD_RES (20), (21), (22), (23), (24): Xaa is A or G
  MOD_RES (25), (26), (27), (28): Xaa is A or G or is absent

SEQ ID NO: 53234 - protein, 37 aa, Artificial Sequence
  GFR-binding peptide
  MOD_RES (6), (7): Xaa is C or S
TVPKPXXAPTQLRSVKVAKVDDSSNVIKEVQVNMVVR

SEQ ID NO: 53235 - protein, 40 aa, Artificial Sequence
  GFR-binding peptide
  MOD_RES (5), (6), (40): Xaa is C or S
  MOD_RES (20), (21), (22), (23), (24): Xaa is A or G
  MOD_RES (25), (26), (27), (28): Xaa is A or G or is absent
VPKPXXAPTQLSNITVQIMXXXXXXXXXIGEMSNMVVRAX

SEQ ID NO: 53236 - protein, 34 aa, Artificial Sequence
  GFR-binding peptide
  MOD_RES (3), (4): Xaa is C or S
SPXXVPQDLRPVQIRKIVGRTPKVKKATVMVVKS

SEQ ID NO: 53237 - protein, 44 aa, Artificial Sequence; identical to SEQ ID NO: 19823
  GFR-binding peptide
  MOD_RES (7), (41), (43): Xaa is C or S

SEQ ID NO: 53238 - protein, 41 aa, Artificial Sequence
  GFR-binding peptide
  MOD_RES (5), (5): Xaa is C or S
RNVQXRPTQVQLEPLPVVYYEIVRKKPIFEQLSNTLEDHLA

SEQ ID NO: 53239 - protein, 39 aa, Artificial Sequence
  GFR-binding peptide
  MOD_RES (3), (4), (37), (39): Xaa is C or S
  MOD_RES (18), (19), (20), (21), (22): Xaa is A or G
  MOD_RES (23), (24), (25), (26): Xaa is A or G or is absent
SPXXVSQDLRSVKIAKVXXXXXXXXXKEVQVMIVKSXKX

SEQ ID NO: 53240 - protein, 32 aa, Artificial Sequence
  GFR-binding peptide
  MOD_RES (32), (32): Xaa is C or S
APTKLRPVQVRKIDDSSNVIKKATVNMVVRSX

SEQ ID NO: 53241 - protein, 32 aa, Artificial Sequence
  GFR-binding peptide
VPTEEEPLTMLYYRIKPHQGQHEQLSNFLQHN

SEQ ID NO: 53242 - protein, 36 aa, Artificial Sequence
  GFR-binding peptide
  MOD_RES (4), (5): Xaa is C or S
PKAXXVPTELSNITMQIMDEYDKVVIGEMSEMVVEG

SEQ ID NO: 53243 - protein, 38 aa, Artificial Sequence
  GFR-binding peptide
  MOD_RES (3), (37): Xaa is C or S
  MOD_RES (17), (18), (19), (20), (21): Xaa is A or G
  MOD_RES (22), (23), (24), (25): Xaa is A or G or is absent
PTXAPTKLRPVQVRKIXXXXXXXXXKKATVNMVVRSXG

SEQ ID NO: 53244 - protein, 36 aa, Artificial Sequence; identical to SEQ ID NO: 19826
  GFR-binding peptide
  MOD_RES (36), (36): Xaa is C or S
  MOD_RES (15), (16), (17), (18), (19): Xaa is A or G
  MOD_RES (20), (21), (22), (23): Xaa is A or G or is absent

SEQ ID NO: 53245 - protein, 40 aa, Artificial Sequence; identical to SEQ ID NO: 14910
  GFR-binding peptide
  MOD_RES (6), (7), (39): Xaa is C or S

SEQ ID NO: 53246 - protein, 39 aa, Artificial Sequence
  GFR-binding peptide
  MOD_RES (3), (4), (38): Xaa is C or S
  MOD_RES (18), (19), (20), (21), (22): Xaa is A or G
  MOD_RES (23), (24), (25), (26): Xaa is A or G or is absent
KAXXVPTELRPVQMRKIXXXXXXXXXKKATVEMVVEGXG

SEQ ID NO: 53247 - protein, 36 aa, Artificial Sequence
  GFR-binding peptide
  MOD_RES (6), (6): Xaa is C or S
VTKPTXAPTKLSNITVQIMDDSSNVIIGEMSNMVVR

SEQ ID NO: 53248 - protein, 40 aa, Artificial Sequence
  GFR-binding peptide
  MOD_RES (5), (37), (39): Xaa is C or S
TKPTXAPTKLSNITVQIMDDSSNVIIGEMSNMVVRSXGXH

SEQ ID NO: 53249 - protein, 38 aa, Artificial Sequence; identical to SEQ ID NO: 19829
  GFR-binding peptide
  MOD_RES (4), (38): Xaa is C or S
  MOD_RES (18), (19), (20), (21), (22): Xaa is A or G
  MOD_RES (23), (24), (25), (26): Xaa is A or G or is absent

SEQ ID NO: 53250 - protein, 39 aa, Artificial Sequence
  GFR-binding peptide
  MOD_RES (5), (39): Xaa is C or S
EGLEXVPTEEEPLPMVYYRIKPHQGQHEQLSNFLQHNKX

SEQ ID NO: 53251 - protein, 40 aa, Artificial Sequence
  GFR-binding peptide
  MOD_RES (37), (39): Xaa is C or S
  MOD_RES (16), (17), (18), (19), (20): Xaa is A or G
  MOD_RES (21), (22), (23), (24): Xaa is A or G or is absent
RPTQVQLEPLPVVYYXXXXXXXXXEQLSNTLEDHLAXKXE

SEQ ID NO: 53252 - protein, 34 aa, Artificial Sequence
  GFR-binding peptide
  MOD_RES (2), (3), (34): Xaa is C or S
PXXVSQDLRSVKIAKVIGKTPKIKEVQVMIVKSX

SEQ ID NO: 53253 - protein, 42 aa, Artificial Sequence
  GFR-binding peptide
  MOD_RES (2), (39), (41): Xaa is C or S
QXRPTQVQLEPLPVVYYEIVRKKPIFEQLSNTLEDHLAXKXE

SEQ ID NO: 53254 - protein, 37 aa, Artificial Sequence
  GFR-binding peptide
  MOD_RES (2), (36): Xaa is C or S
  MOD_RES (16), (17), (18), (19), (20): Xaa is A or G
  MOD_RES (21), (22), (23), (24): Xaa is A or G or is absent
EXVPTEEEPLTMLYYXXXXXXXXXEQLSNFLQHNKXE

SEQ ID NO: 53255 - protein, 42 aa, Artificial Sequence; identical to SEQ ID NO: 14913
  GFR-binding peptide
  MOD_RES (6), (7), (41): Xaa is C or S
  MOD_RES (21), (22), (23), (24), (25): Xaa is A or G
  MOD_RES (26), (27), (28), (29): Xaa is A or G or is absent

SEQ ID NO: 53256 - protein, 38 aa, Artificial Sequence; identical to SEQ ID NO: 14914
  GFR-binding peptide
  MOD_RES (2), (3), (37): Xaa is C or S
  MOD_RES (17), (18), (19), (20), (21): Xaa is A or G
  MOD_RES (22), (23), (24), (25): Xaa is A or G or is absent

SEQ ID NO: 53257 - protein, 35 aa, Artificial Sequence
  GFR-binding peptide
  MOD_RES (1), (35): Xaa is C or S
  MOD_RES (15), (16), (17), (18), (19): Xaa is A or G
  MOD_RES (20), (21), (22), (23): Xaa is A or G or is absent
XVPTELRPVQMRKIXXXXXXXXXKKATVDMVVEGX

SEQ ID NO: 53258 - protein, 43 aa, Artificial Sequence
  GFR-binding peptide
  MOD_RES (6), (40), (42): Xaa is C or S
  MOD_RES (20), (21), (22), (23), (24): Xaa is A or G
  MOD_RES (25), (26), (27), (28): Xaa is A or G or is absent
VTKPTXAPTKLSNITVQIMXXXXXXXXXIGEMSNMVVRSXGXH

SEQ ID NO: 53259 - protein, 38 aa, Artificial Sequence
  GFR-binding peptide
  MOD_RES (2), (3), (37): Xaa is C or S
  MOD_RES (17), (18), (19), (20), (21): Xaa is A or G
  MOD_RES (22), (23), (24), (25): Xaa is A or G or is absent
AXXVPTELRPVQMRKIXXXXXXXXXKKATVDMVVEGXG

SEQ ID NO: 53260 - protein, 36 aa, Artificial Sequence
  GFR-binding peptide
  MOD_RES (4), (5), (36): Xaa is C or S
ASPXXVSQDLRSVKIAKVIGKTPKIKEVQVMIVKSX

SEQ ID NO: 53261 - protein, 33 aa, Artificial Sequence; identical to SEQ ID NO: 14918
  GFR-binding peptide
  MOD_RES (1), (1): Xaa is C or S
  MOD_RES (15), (16), (17), (18), (19): Xaa is A or G
  MOD_RES (20), (21), (22), (23): Xaa is A or G or is absent

SEQ ID NO: 53262 - protein, 34 aa, Artificial Sequence; identical to SEQ ID NO: 19835
  GFR-binding peptide
  MOD_RES (14), (15), (16), (17), (18): Xaa is A or G
  MOD_RES (19), (20), (21), (22): Xaa is A or G or is absent

SEQ ID NO: 53263 - protein, 34 aa, Artificial Sequence
  GFR-binding peptide
  MOD_RES (14), (15), (16), (17), (18): Xaa is A or G
  MOD_RES (19), (20), (21), (22): Xaa is A or G or is absent
TQVQLEPLPVVYYXXXXXXXXXEQLSNTLEDHLA

SEQ ID NO: 53264 - protein, 36 aa, Artificial Sequence
  GFR-binding peptide
  MOD_RES (1), (2), (33), (35): Xaa is C or S
XXVPQDLRPVQIRKIVGRTPKVKKATVMVVKSXKXS

SEQ ID NO: 53265 - protein, 35 aa, Artificial Sequence
  GFR-binding peptide
  MOD_RES (1), (32), (34): Xaa is C or S
XVPQALRPVQIRKIVGRKPKVKKATVMIVRSXKXS

SEQ ID NO: 53266 - protein, 39 aa, Artificial Sequence
  GFR-binding peptide
  MOD_RES (2), (36), (38): Xaa is C or S
EXVPTEEEPLPMVYYRIKPHQGQHEQLSNFLQHNKXEXR

SEQ ID NO: 53267 - protein, 41 aa, Artificial Sequence
  GFR-binding peptide
  MOD_RES (3), (4), (38), (40): Xaa is C or S
  MOD_RES (18), (19), (20), (21), (22): Xaa is A or G
  MOD_RES (23), (24), (25), (26): Xaa is A or G or is absent
KPXXAPTQLRSVKVAKVXXXXXXXXXKEVQVNMVVRAXGXH

SEQ ID NO: 53268 - protein, 39 aa, Artificial Sequence
  GFR-binding peptide
  MOD_RES (6), (7): Xaa is C or S
  MOD_RES (21), (22), (23), (24), (25): Xaa is A or G
  MOD_RES (26), (27), (28), (29): Xaa is A or G or is absent
KIPKAXXVPTELRSVKMAKVXXXXXXXXXKEVQVDMVVE

SEQ ID NO: 53269 - protein, 39 aa, Artificial Sequence; identical to SEQ ID NO: 14922
  GFR-binding peptide
  MOD_RES (4), (5), (37), (39): Xaa is C or S

SEQ ID NO: 53270 - protein, 34 aa, Artificial Sequence; identical to SEQ ID NO: 14923
  GFR-binding peptide
  MOD_RES (1), (2): Xaa is C or S
  MOD_RES (16), (17), (18), (19), (20): Xaa is A or G
  MOD_RES (21), (22), (23), (24): Xaa is A or G or is absent

SEQ ID NO: 53271 - protein, 44 aa, Artificial Sequence; identical to SEQ ID NO: 19840
  GFR-binding peptide
  MOD_RES (5), (42), (44): Xaa is C or S
  MOD_RES (21), (22), (23), (24), (25): Xaa is A or G
  MOD_RES (26), (27), (28), (29): Xaa is A or G or is absent

SEQ ID NO: 53272 - protein, 33 aa, Artificial Sequence
  GFR-binding peptide
TQVQLEPLPVVYYEIVRKKPIFEQLSNTLEDHL

SEQ ID NO: 53273 - protein, 41 aa, Artificial Sequence; identical to SEQ ID NO: 14927
  GFR-binding peptide
  MOD_RES (7), (41): Xaa is C or S
  MOD_RES (21), (22), (23), (24), (25): Xaa is A or G
  MOD_RES (26), (27), (28), (29): Xaa is A or G or is absent

SEQ ID NO: 53274 - protein, 38 aa, Artificial Sequence
  GFR-binding peptide
  MOD_RES (4), (38): Xaa is C or S
  MOD_RES (18), (19), (20), (21), (22): Xaa is A or G
  MOD_RES (23), (24), (25), (26): Xaa is A or G or is absent
KPTXAPTKLRSVKVAKVXXXXXXXXXKEVQVNMVVRSX

SEQ ID NO: 53275 - protein, 37 aa, Artificial Sequence; identical to SEQ ID NO: 19847
  GFR-binding peptide
  MOD_RES (1), (35), (37): Xaa is C or S
  MOD_RES (15), (16), (17), (18), (19): Xaa is A or G
  MOD_RES (20), (21), (22), (23): Xaa is A or G or is absent

SEQ ID NO: 53276 - protein, 42 aa, Artificial Sequence; identical to SEQ ID NO: 14930
  GFR-binding peptide
  MOD_RES (6), (7), (39), (41): Xaa is C or S

SEQ ID NO: 53277 - protein, 34 aa, Artificial Sequence; identical to SEQ ID NO: 19848
  GFR-binding peptide
  MOD_RES (1), (1): Xaa is C or S

SEQ ID NO: 53278 - protein, 39 aa, Artificial Sequence; identical to SEQ ID NO: 14932
  GFR-binding peptide
  MOD_RES (3), (4), (36), (38): Xaa is C or S

SEQ ID NO: 53279 - protein, 39 aa, Artificial Sequence
  GFR-binding peptide
  MOD_RES (6), (7), (39): Xaa is C or S
SIPKAXXVPTELRPVQMRKIDEYDKVVKKATVEMVVEGX

SEQ ID NO: 53280 - protein, 38 aa, Artificial Sequence
  GFR-binding peptide
  MOD_RES (4), (38): Xaa is C or S
  MOD_RES (18), (19), (20), (21), (22): Xaa is A or G
  MOD_RES (23), (24), (25), (26): Xaa is A or G or is absent
GLEXVPTEEEPLPMVYYXXXXXXXXXEQLSNFLQHNKX

SEQ ID NO: 53281 - protein, 34 aa, Artificial Sequence
  GFR-binding peptide
  MOD_RES (3), (4): Xaa is C or S
KPXXAPTKLRSVKVAKVDDSSNVIKEVQVNMVVR

SEQ ID NO: 53282 - protein, 38 aa, Artificial Sequence; identical to SEQ ID NO: 19852
  GFR-binding peptide
  MOD_RES (4), (4): Xaa is C or S
  MOD_RES (20), (21), (22), (23), (24): Xaa is A or G
  MOD_RES (25), (26), (27), (28): Xaa is A or G or is absent

SEQ ID NO: 53283 - protein, 38 aa, Artificial Sequence; identical to SEQ ID NO: 14934
  GFR-binding peptide
  MOD_RES (5), (6), (37): Xaa is C or S

SEQ ID NO: 53284 - protein, 38 aa, Artificial Sequence; identical to SEQ ID NO: 14936
  GFR-binding peptide
  MOD_RES (3), (4), (36), (38): Xaa is C or S

SEQ ID NO: 53285 - protein, 42 aa, Artificial Sequence; identical to SEQ ID NO: 19853
  GFR-binding peptide
  MOD_RES (3), (40), (42): Xaa is C or S
  MOD_RES (19), (20), (21), (22), (23): Xaa is A or G
  MOD_RES (24), (25), (26), (27): Xaa is A or G or is absent

SEQ ID NO: 53286 - protein, 39 aa, Artificial Sequence; identical to SEQ ID NO: 19856
  GFR-binding peptide
  MOD_RES (1), (38): Xaa is C or S
  MOD_RES (17), (18), (19), (20), (21): Xaa is A or G
  MOD_RES (22), (23), (24), (25): Xaa is A or G or is absent

SEQ ID NO: 53287 - protein, 35 aa, Artificial Sequence; identical to SEQ ID NO: 14938
  GFR-binding peptide
  MOD_RES (3), (4): Xaa is C or S

SEQ ID NO: 53288 - protein, 42 aa, Artificial Sequence
  GFR-binding peptide
  MOD_RES (6), (7), (39), (41): Xaa is C or S
KIPKAXXVPTELRPVQMRKIDENEKVVKKATVDMVVEGXGXR

SEQ ID NO: 53289 - protein, 35 aa, Artificial Sequence; identical to SEQ ID NO: 19857
  GFR-binding peptide
  MOD_RES (2), (2): Xaa is C or S
  MOD_RES (16), (17), (18), (19), (20): Xaa is A or G
  MOD_RES (21), (22), (23), (24): Xaa is A or G or is absent

SEQ ID NO: 53290 - protein, 41 aa, Artificial Sequence
  GFR-binding peptide
  MOD_RES (5), (6), (40): Xaa is C or S
  MOD_RES (20), (21), (22), (23), (24): Xaa is A or G
  MOD_RES (25), (26), (27), (28): Xaa is A or G or is absent
VPKPXXAPTQLRPVQVRKIXXXXXXXXXKKATVNMVVRAXG

SEQ ID NO: 53291 - protein, 40 aa, Artificial Sequence; identical to SEQ ID NO: 14941
  GFR-binding peptide
  MOD_RES (6), (7), (40): Xaa is C or S
  MOD_RES (21), (22), (23), (24), (25): Xaa is A or G
  MOD_RES (26), (27), (28), (29): Xaa is A or G or is absent

SEQ ID NO: 53292 - protein, 39 aa, Artificial Sequence; identical to SEQ ID NO: 19858
  GFR-binding peptide
  MOD_RES (4), (4): Xaa is C or S
  MOD_RES (20), (21), (22), (23), (24): Xaa is A or G
  MOD_RES (25), (26), (27), (28): Xaa is A or G or is absent

SEQ ID NO: 53293 - protein, 40 aa, Artificial Sequence; identical to SEQ ID NO: 19860
  GFR-binding peptide
  MOD_RES (3), (40): Xaa is C or S

SEQ ID NO: 53294 - protein, 35 aa, Artificial Sequence; identical to SEQ ID NO: 14944
  GFR-binding peptide
  MOD_RES (4), (5): Xaa is C or S

SEQ ID NO: 53295 - protein, 32 aa, Artificial Sequence
  GFR-binding peptide
  MOD_RES (32), (32): Xaa is C or S
VPTELSNITMQIMDENEKVVIGEMSDMVVEGX

SEQ ID NO: 53296 - protein, 41 aa, Artificial Sequence
  GFR-binding peptide
  MOD_RES (6), (40): Xaa is C or S
  MOD_RES (20), (21), (22), (23), (24): Xaa is A or G
  MOD_RES (25), (26), (27), (28): Xaa is A or G or is absent
VTKPTXAPTKLRPVQVRKIXXXXXXXXXKKATVNMVVRSXG

SEQ ID NO: 53297 - protein, 37 aa, Artificial Sequence
  GFR-binding peptide
  MOD_RES (2), (3), (34), (36): Xaa is C or S
PXXVPQALSNITIQIMVGRKPKVIGEMSMIVRSXKXS

SEQ ID NO: 53298 - protein, 37 aa, Artificial Sequence; identical to SEQ ID NO: 14947
  GFR-binding peptide
  MOD_RES (4), (5): Xaa is C or S
  MOD_RES (19), (20), (21), (22), (23): Xaa is A or G
  MOD_RES (24), (25), (26), (27): Xaa is A or G or is absent

SEQ ID NO: 53299 - protein, 34 aa, Artificial Sequence
  GFR-binding peptide
  MOD_RES (2), (3): Xaa is C or S
AXXVPTELRSVKMAKVDEYDKVVKEVQVEMVVEG

SEQ ID NO: 53300 - protein, 40 aa, Artificial Sequence
  GFR-binding peptide
  MOD_RES (3), (4), (38), (40): Xaa is C or S
  MOD_RES (18), (19), (20), (21), (22): Xaa is A or G
  MOD_RES (23), (24), (25), (26): Xaa is A or G or is absent
KPXXAPTQLRSVKVAKVXXXXXXXXXKEVQVNMVVRAXGX

SEQ ID NO: 53301 - protein, 39 aa, Artificial Sequence
  GFR-binding peptide
  MOD_RES (5), (5): Xaa is C or S
  MOD_RES (21), (22), (23), (24), (25): Xaa is A or G
  MOD_RES (26), (27), (28), (29): Xaa is A or G or is absent
RNVQXRPTQVQLEPLTVLYYXXXXXXXXXEQLSNTLEDH

SEQ ID NO: 53302 - protein, 36 aa, Artificial Sequence; identical to SEQ ID NO: 19861
  GFR-binding peptide
  MOD_RES (2), (2): Xaa is C or S

SEQ ID NO: 53303 - protein, 37 aa, Artificial Sequence
  GFR-binding peptide
  MOD_RES (1), (34), (36): Xaa is C or S
  MOD_RES (15), (16), (17), (18), (19): Xaa is A or G
  MOD_RES (20), (21), (22), (23): Xaa is A or G or is absent
XVPQDLRSVKIAKVXXXXXXXXXKEVQVMVVKSXKXS

SEQ ID NO: 53304 - protein, 40 aa, Artificial Sequence
  GFR-binding peptide
  MOD_RES (6), (7), (38), (40): Xaa is C or S
ASAAPXXVPQALRPVQIRKIVGRKPKVKKATVMIVRSXKX

SEQ ID NO: 53305 - protein, 37 aa, Artificial Sequence
  GFR-binding peptide
  MOD_RES (1), (2), (35), (37): Xaa is C or S
  MOD_RES (16), (17), (18), (19), (20): Xaa is A or G
  MOD_RES (21), (22), (23), (24): Xaa is A or G or is absent
XXVSQDLRSVKIAKVXXXXXXXXXKEVQVMIVKSXKX

SEQ ID NO: 53306 - protein, 36 aa, Artificial Sequence; identical to SEQ ID NO: 40773
  GFR-binding peptide
  MOD_RES (33), (35): Xaa is C or S
  MOD_RES (14), (15), (16), (17), (18): Xaa is A or G
  MOD_RES (19), (20), (21), (22): Xaa is A or G or is absent

SEQ ID NO: 53307 - protein, 38 aa, Artificial Sequence
  GFR-binding peptide
  MOD_RES (6), (7): Xaa is C or S
KIPKAXXVPTELRPVQMRKIDENEKVVKKATVDMVVEG

SEQ ID NO: 53308 - protein, 33 aa, Artificial Sequence; identical to SEQ ID NO: 19869
  GFR-binding peptide

SEQ ID NO: 53309 - protein, 36 aa, Artificial Sequence
  GFR-binding peptide
QPSRVHHEPLTVLYYEYVRKKPKLEQLSNRLEEHLE

SEQ ID NO: 53310 - protein, 33 aa, Artificial Sequence
  GFR-binding peptide
  MOD_RES (1), (1): Xaa is C or S
  MOD_RES (15), (16), (17), (18), (19): Xaa is A or G
  MOD_RES (20), (21), (22), (23): Xaa is A or G or is absent
XVSQDLRPVQIRKIXXXXXXXXXKKATVMIVKS

SEQ ID NO: 53311 - protein, 39 aa, Artificial Sequence
  GFR-binding peptide
  MOD_RES (4), (5), (37), (39): Xaa is C or S
PKPXXAPTQLSNITVQIMDDSSNVIIGEMSNMVVRAXGX

SEQ ID NO: 53312 - protein, 34 aa, Artificial Sequence
  GFR-binding peptide
  MOD_RES (1), (33): Xaa is C or S
XVPTELSNITMQIMDENEKVVIGEMSDMVVEGXG

SEQ ID NO: 53313 - protein, 38 aa, Artificial Sequence
  GFR-binding peptide
  MOD_RES (3), (3): Xaa is C or S
VKXQPSRVHHEPLTVLYYEYVRKKPKLEQLSNRLEEHL

SEQ ID NO: 53314 - protein, 33 aa, Artificial Sequence
  GFR-binding peptide
  MOD_RES (32), (32): Xaa is C or S
APTKLSNITVQIMDDSSNVIIGEMSNMVVRSXG

SEQ ID NO: 53315 - protein, 34 aa, Artificial Sequence; identical to SEQ ID NO: 19871
  GFR-binding peptide
  MOD_RES (14), (15), (16), (17), (18): Xaa is A or G
  MOD_RES (19), (20), (21), (22): Xaa is A or G or is absent

SEQ ID NO: 53316 - protein, 38 aa, Artificial Sequence
  GFR-binding peptide
  MOD_RES (3), (4), (36), (38): Xaa is C or S
KPXXAPTQLSNITVQIMDDSSNVIIGEMSNMVVRAXGX

SEQ ID NO: 53317 - protein, 40 aa, Artificial Sequence
  GFR-binding peptide
  MOD_RES (7), (7): Xaa is C or S
  MOD_RES (21), (22), (23), (24), (25): Xaa is A or G
  MOD_RES (26), (27), (28), (29): Xaa is A or G or is absent
HVTKPTXAPTKLRPVQVRKIXXXXXXXXXKKATVNMVVRS

SEQ ID NO: 53318 - protein, 33 aa, Artificial Sequence; identical to SEQ ID NO: 19872
  GFR-binding peptide

SEQ ID NO: 53319 - protein, 41 aa, Artificial Sequence
  GFR-binding peptide
  MOD_RES (6), (7), (39), (41): Xaa is C or S
SIPKAXXVPTELRPVQMRKIDEYDKVVKKATVEMVVEGXGX

SEQ ID NO: 53320 - protein, 31 aa, Artificial Sequence
  GFR-binding peptide
  MOD_RES (1), (1): Xaa is C or S
XVPQDLRSVKIAKVVGRTPKVKEVQVMVVKS

SEQ ID NO: 53321 - protein, 40 aa, Artificial Sequence
  GFR-binding peptide
  MOD_RES (3), (4), (37), (39): Xaa is C or S
  MOD_RES (18), (19), (20), (21), (22): Xaa is A or G
  MOD_RES (23), (24), (25), (26): Xaa is A or G or is absent
SPXXVSQDLRSVKIAKVXXXXXXXXXKEVQVMIVKSXKXS

SEQ ID NO: 53322 - protein, 38 aa, Artificial Sequence
  GFR-binding peptide
  MOD_RES (3), (4), (37): Xaa is C or S
  MOD_RES (18), (19), (20), (21), (22): Xaa is A or G
  MOD_RES (23), (24), (25), (26): Xaa is A or G or is absent
APXXVPQALRSVKIAKVXXXXXXXXXKEVQVMIVRSXK

SEQ ID NO: 53323 - protein, 38 aa, Artificial Sequence
  GFR-binding peptide
  MOD_RES (4), (5), (37): Xaa is C or S
PKPXXAPTKLRSVKVAKVDDSSNVIKEVQVNMVVRSXG

SEQ ID NO: 53324 - protein, 40 aa, Artificial Sequence; identical to SEQ ID NO: 14958
  GFR-binding peptide
  MOD_RES (5), (37), (39): Xaa is C or S

SEQ ID NO: 53325 - protein, 38 aa, Artificial Sequence
  GFR-binding peptide
  MOD_RES (1), (35), (37): Xaa is C or S
  MOD_RES (15), (16), (17), (18), (19): Xaa is A or G
  MOD_RES (20), (21), (22), (23): Xaa is A or G or is absent
XVPTELSNITMQIMXXXXXXXXXIGEMSEMVVEGXGXR

SEQ ID NO: 53326 - protein, 33 aa, Artificial Sequence
  GFR-binding peptide
  MOD_RES (2), (3): Xaa is C or S
AXXVPTELSNITMQIMDEYDKVVIGEMSEMVVE

SEQ ID NO: 53327 - protein, 40 aa, Artificial Sequence; identical to SEQ ID NO: 19880
  GFR-binding peptide
  MOD_RES (7), (7): Xaa is C or S

SEQ ID NO: 53328 - protein, 40 aa, Artificial Sequence
  GFR-binding peptide
  MOD_RES (5), (5): Xaa is C or S
  MOD_RES (21), (22), (23), (24), (25): Xaa is A or G
  MOD_RES (26), (27), (28), (29): Xaa is A or G or is absent
SSVKXQPSRVHHEPLPVVYYXXXXXXXXXEQLSNRLEEHL

SEQ ID NO: 53329 - protein, 35 aa, Artificial Sequence
  GFR-binding peptide
  MOD_RES (33), (35): Xaa is C or S
  MOD_RES (14), (15), (16), (17), (18): Xaa is A or G
  MOD_RES (19), (20), (21), (22): Xaa is A or G or is absent
VSQDLRPVQIRKIXXXXXXXXXKKATVMIVKSXKX

SEQ ID NO: 53330 - protein, 35 aa, Artificial Sequence
  GFR-binding peptide
  MOD_RES (1), (34): Xaa is C or S
  MOD_RES (15), (16), (17), (18), (19): Xaa is A or G
  MOD_RES (20), (21), (22), (23): Xaa is A or G or is absent
XVPQALSNITIQIMXXXXXXXXXIGEMSMIVRSXK

SEQ ID NO: 53331 - protein, 39 aa, Artificial Sequence
  GFR-binding peptide
  MOD_RES (5), (5): Xaa is C or S
RNVQXRPTQVQLEPLTVLYYEIVRKKPIFEQLSNTLEDH

SEQ ID NO: 53332 - protein, 37 aa, Artificial Sequence
  GFR-binding peptide
  MOD_RES (2), (34), (36): Xaa is C or S
TXAPTKLRPVQVRKIDDSSNVIKKATVNMVVRSXGXH

SEQ ID NO: 53333 - protein, 37 aa, Artificial Sequence; identical to SEQ ID NO: 19881
  GFR-binding peptide
  MOD_RES (36), (36): Xaa is C or S
  MOD_RES (15), (16), (17), (18), (19): Xaa is A or G
  MOD_RES (20), (21), (22), (23): Xaa is A or G or is absent

SEQ ID NO: 53334 - protein, 36 aa, Artificial Sequence; identical to SEQ ID NO: 19882
  GFR-binding peptide

SEQ ID NO: 53335 - protein, 37 aa, Artificial Sequence; identical to SEQ ID NO: 19883
  GFR-binding peptide
  MOD_RES (37), (37): Xaa is C or S
  MOD_RES (16), (17), (18), (19), (20): Xaa is A or G
  MOD_RES (21), (22), (23), (24): Xaa is A or G or is absent

SEQ ID NO: 53336 - protein, 38 aa, Artificial Sequence
  GFR-binding peptide
  MOD_RES (5), (6), (38): Xaa is C or S
VPKPXXAPTQLRSVKVAKVDDSSNVIKEVQVNMVVRAX

SEQ ID NO: 53337 - protein, 34 aa, Artificial Sequence; identical to SEQ ID NO: 19885
  GFR-binding peptide
  MOD_RES (15), (16), (17), (18), (19): Xaa is A or G
  MOD_RES (20), (21), (22), (23): Xaa is A or G or is absent

SEQ ID NO: 53338 - protein, 39 aa, Artificial Sequence
  GFR-binding peptide
  MOD_RES (4), (5), (36), (38): Xaa is C or S
ASPXXVSQDLRSVKIAKVIGKTPKIKEVQVMIVKSXKXS

SEQ ID NO: 53339 - protein, 39 aa, Artificial Sequence; identical to SEQ ID NO: 14962
  GFR-binding peptide
  MOD_RES (4), (5), (37), (39): Xaa is C or S

SEQ ID NO: 53340 - protein, 39 aa, Artificial Sequence
  GFR-binding peptide
  MOD_RES (6), (7), (39): Xaa is C or S
YVPKPXXAPTKLRSVKVAKVDDSSNVIKEVQVNMVVRSX

SEQ ID NO: 53341 - protein, 38 aa, Artificial Sequence; identical to SEQ ID NO: 19889
  GFR-binding peptide
  MOD_RES (3), (3): Xaa is C or S
  MOD_RES (19), (20), (21), (22), (23): Xaa is A or G
  MOD_RES (24), (25), (26), (27): Xaa is A or G or is absent

SEQ ID NO: 53342 - protein, 39 aa, Artificial Sequence
  GFR-binding peptide
  MOD_RES (3), (37), (39): Xaa is C or S
LEXVPTEEEPLPMVYYRIKPHQGQHEQLSNFLQHNKXEX

SEQ ID NO: 53343 - protein, 38 aa, Artificial Sequence
  GFR-binding peptide
  MOD_RES (3), (3): Xaa is C or S
  MOD_RES (19), (20), (21), (22), (23): Xaa is A or G
  MOD_RES (24), (25), (26), (27): Xaa is A or G or is absent
VQXRPTQVQLEPLPVVYYXXXXXXXXXEQLSNTLEDHL

SEQ ID NO: 53344 - protein, 39 aa, Artificial Sequence
  GFR-binding peptide
  MOD_RES (5), (6), (39): Xaa is C or S
  MOD_RES (20), (21), (22), (23), (24): Xaa is A or G
  MOD_RES (25), (26), (27), (28): Xaa is A or G or is absent
SASPXXVPQDLRPVQIRKIXXXXXXXXXKKATVMVVKSX

SEQ ID NO: 53345 - protein, 35 aa, Artificial Sequence
  GFR-binding peptide
  MOD_RES (1), (2), (34): Xaa is C or S
XXAPTQLSNITVQIMDDSSNVIIGEMSNMVVRAXG

SEQ ID NO: 53346 - protein, 38 aa, Artificial Sequence; identical to SEQ ID NO: 19890
  GFR-binding peptide
  MOD_RES (3), (3): Xaa is C or S

SEQ ID NO: 53347 - protein, 40 aa, Artificial Sequence; identical to SEQ ID NO: 19891
  GFR-binding peptide
  MOD_RES (37), (39): Xaa is C or S
  MOD_RES (16), (17), (18), (19), (20): Xaa is A or G
  MOD_RES (21), (22), (23), (24): Xaa is A or G or is absent

SEQ ID NO: 53348 - protein, 32 aa, Artificial Sequence
  GFR-binding peptide
  MOD_RES (14), (15), (16), (17), (18): Xaa is A or G
  MOD_RES (19), (20), (21), (22): Xaa is A or G or is absent
VPTELRPVQMRKIXXXXXXXXXKKATVEMVVE

SEQ ID NO: 53349 - protein, 41 aa, Artificial Sequence; identical to SEQ ID NO: 14966
  GFR-binding peptide
  MOD_RES (6), (7), (41): Xaa is C or S
  MOD_RES (21), (22), (23), (24), (25): Xaa is A or G
  MOD_RES (26), (27), (28), (29): Xaa is A or G or is absent

SEQ ID NO: 53350 - protein, 37 aa, Artificial Sequence; identical to SEQ ID NO: 14968
  GFR-binding peptide
  MOD_RES (5), (6), (37): Xaa is C or S

SEQ ID NO: 53351 - protein, 43 aa, Artificial Sequence; identical to SEQ ID NO: 19894
  GFR-binding peptide
  MOD_RES (4), (41), (43): Xaa is C or S

SEQ ID NO: 53352 - protein, 40 aa, Artificial Sequence; identical to SEQ ID NO: 19895
  GFR-binding peptide
  MOD_RES (2), (39): Xaa is C or S

SEQ ID NO: 53353 - protein, 42 aa, Artificial Sequence; identical to SEQ ID NO: 14969
  GFR-binding peptide
  MOD_RES (7), (41): Xaa is C or S
  MOD_RES (21), (22), (23), (24), (25): Xaa is A or G
  MOD_RES (26), (27), (28), (29): Xaa is A or G or is absent

SEQ ID NO: 53354 - protein, 37 aa, Artificial Sequence
  GFR-binding peptide
  MOD_RES (3), (37): Xaa is C or S
  MOD_RES (17), (18), (19), (20), (21): Xaa is A or G
  MOD_RES (22), (23), (24), (25): Xaa is A or G or is absent
PTXAPTKLSNITVQIMXXXXXXXXXIGEMSNMVVRSX

SEQ ID NO: 53355 - protein, 37 aa, Artificial Sequence
  GFR-binding peptide
  MOD_RES (2), (3), (34), (36): Xaa is C or S
PXXVPQDLRPVQIRKIVGRTPKVKKATVMVVKSXKXS

SEQ ID NO: 53356 - protein, 32 aa, Artificial Sequence
  GFR-binding peptide
  MOD_RES (14), (15), (16), (17), (18): Xaa is A or G
  MOD_RES (19), (20), (21), (22): Xaa is A or G or is absent
APTKLRSVKVAKVXXXXXXXXXKEVQVNMVVR

SEQ ID NO: 53357 - protein, 34 aa, Artificial Sequence
  GFR-binding peptide
  MOD_RES (1), (2), (34): Xaa is C or S
XXVPTELRSVKMAKVDENEKVVKEVQVDMVVEGX

SEQ ID NO: 53358 - protein, 39 aa, Artificial Sequence
  GFR-binding peptide
  MOD_RES (5), (39): Xaa is C or S
  MOD_RES (19), (20), (21), (22), (23): Xaa is A or G
  MOD_RES (24), (25), (26), (27): Xaa is A or G or is absent
EGLEXVPTEEEPLPMVYYXXXXXXXXXEQLSNFLQHNKX

SEQ ID NO: 53359 - protein, 36 aa, Artificial Sequence
  GFR-binding peptide
  MOD_RES (2), (3), (36): Xaa is C or S
  MOD_RES (17), (18), (19), (20), (21): Xaa is A or G
  MOD_RES (22), (23), (24), (25): Xaa is A or G or is absent
PXXVSQDLRSVKIAKVXXXXXXXXXKEVQVMIVKSX

SEQ ID NO: 53360 - protein, 41 aa, Artificial Sequence; identical to SEQ ID NO: 14970
  GFR-binding peptide
  MOD_RES (7), (39), (41): Xaa is C or S

SEQ ID NO: 53361 - protein, 35 aa, Artificial Sequence; identical to SEQ ID NO: 14972
  GFR-binding peptide
  MOD_RES (4), (5): Xaa is C or S

SEQ ID NO: 53362 - protein, 41 aa, Artificial Sequence
  GFR-binding peptide
  MOD_RES (4), (5), (39), (41): Xaa is C or S
  MOD_RES (19), (20), (21), (22), (23): Xaa is A or G
  MOD_RES (24), (25), (26), (27): Xaa is A or G or is absent
PKPXXAPTQLRSVKVAKVXXXXXXXXXKEVQVNMVVRAXGX

SEQ ID NO: 53363 - protein, 37 aa, Artificial Sequence
  GFR-binding peptide
  MOD_RES (1), (35), (37): Xaa is C or S
  MOD_RES (15), (16), (17), (18), (19): Xaa is A or G
  MOD_RES (20), (21), (22), (23): Xaa is A or G or is absent
XVPTELRSVKMAKVXXXXXXXXXKEVQVDMVVEGXGX

SEQ ID NO: 53364 - protein, 39 aa, Artificial Sequence
  GFR-binding peptide
  MOD_RES (5), (6): Xaa is C or S
  MOD_RES (20), (21), (22), (23), (24): Xaa is A or G
  MOD_RES (25), (26), (27), (28): Xaa is A or G or is absent
IPKAXXVPTELRSVKMAKVXXXXXXXXXKEVQVEMVVEG

SEQ ID NO: 53365 - protein, 37 aa, Artificial Sequence
  GFR-binding peptide
  MOD_RES (3), (3): Xaa is C or S
VQXRPTQVQLEPLPVVYYEIVRKKPIFEQLSNTLEDH

SEQ ID NO: 53366 - protein, 37 aa, Artificial Sequence
  GFR-binding peptide
  MOD_RES (1), (2), (35), (37): Xaa is C or S
  MOD_RES (16), (17), (18), (19), (20): Xaa is A or G
  MOD_RES (21), (22), (23), (24): Xaa is A or G or is absent
XXVPQALRPVQIRKIXXXXXXXXXKKATVMIVRSXKX

SEQ ID NO: 53367 - protein, 33 aa, Artificial Sequence; identical to SEQ ID NO: 14975
  GFR-binding peptide
  MOD_RES (14), (15), (16), (17), (18): Xaa is A or G
  MOD_RES (19), (20), (21), (22): Xaa is A or G or is absent

SEQ ID NO: 53368 - protein, 40 aa, Artificial Sequence
  GFR-binding peptide
  MOD_RES (5), (6), (38), (40): Xaa is C or S
IPKAXXVPTELSNITMQIMDEYDKVVIGEMSEMVVEGXGX

SEQ ID NO: 53369 - protein, 38 aa, Artificial Sequence; identical to SEQ ID NO: 14977
  GFR-binding peptide
  MOD_RES (4), (5), (37): Xaa is C or S

SEQ ID NO: 53370 - protein, 30 aa, Artificial Sequence; identical to SEQ ID NO: 14978
  GFR-binding peptide

SEQ ID NO: 53371 - protein, 42 aa, Artificial Sequence
  GFR-binding peptide
  MOD_RES (5), (39), (41): Xaa is C or S
EGLEXVPTEEEPLTMLYYRIKPHQGQHEQLSNFLQHNKXEXR

SEQ ID NO: 53372 - protein, 38 aa, Artificial Sequence; identical to SEQ ID NO: 19905
  GFR-binding peptide
  MOD_RES (2), (36), (38): Xaa is C or S
  MOD_RES (16), (17), (18), (19), (20): Xaa is A or G
  MOD_RES (21), (22), (23), (24): Xaa is A or G or is absent

SEQ ID NO: 53373 - protein, 35 aa, Artificial Sequence; identical to SEQ ID NO: 19906
  GFR-binding peptide
  MOD_RES (1), (1): Xaa is C or S
  MOD_RES (17), (18), (19), (20), (21): Xaa is A or G
  MOD_RES (22), (23), (24), (25): Xaa is A or G or is absent

SEQ ID NO: 53374 - protein, 38 aa, Artificial Sequence; identical to SEQ ID NO: 14979
  GFR-binding peptide
  MOD_RES (2), (3), (36), (38): Xaa is C or S
  MOD_RES (17), (18), (19), (20), (21): Xaa is A or G
  MOD_RES (22), (23), (24), (25): Xaa is A or G or is absent

SEQ ID NO: 53375 - protein, 35 aa, Artificial Sequence
  GFR-binding peptide
  MOD_RES (4), (4): Xaa is C or S
KPTXAPTKLRSVKVAKVDDSSNVIKEVQVNMVVRS

SEQ ID NO: 53376 - protein, 43 aa, Artificial Sequence; identical to SEQ ID NO: 14980
  GFR-binding peptide
  MOD_RES (5), (6), (40), (42): Xaa is C or S
  MOD_RES (20), (21), (22), (23), (24): Xaa is A or G
  MOD_RES (25), (26), (27), (28): Xaa is A or G or is absent

SEQ ID NO: 53377 - protein, 38 aa, Artificial Sequence
  GFR-binding peptide
  MOD_RES (5), (5): Xaa is C or S
  MOD_RES (19), (20), (21), (22), (23): Xaa is A or G
  MOD_RES (24), (25), (26), (27): Xaa is A or G or is absent
TKPTXAPTKLSNITVQIMXXXXXXXXXIGEMSNMVVRS

SEQ ID NO: 53378 - protein, 40 aa, Artificial Sequence
  GFR-binding peptide
  MOD_RES (4), (5), (39): Xaa is C or S
  MOD_RES (19), (20), (21), (22), (23): Xaa is A or G
  MOD_RES (24), (25), (26), (27): Xaa is A or G or is absent
PKPXXAPTKLSNITVQIMXXXXXXXXXIGEMSNMVVRSXG

SEQ ID NO: 53379 - protein, 37 aa, Artificial Sequence; identical to SEQ ID NO: 19913
  GFR-binding peptide
  MOD_RES (3), (3): Xaa is C or S

SEQ ID NO: 53380 - protein, 33 aa, Artificial Sequence; identical to SEQ ID NO: 19914
  GFR-binding peptide
  MOD_RES (14), (15), (16), (17), (18): Xaa is A or G
  MOD_RES (19), (20), (21), (22): Xaa is A or G or is absent

SEQ ID NO: 53381 - protein, 40 aa, Artificial Sequence; identical to SEQ ID NO: 19915
  GFR-binding peptide
  MOD_RES (4), (4): Xaa is C or S
  MOD_RES (20), (21), (22), (23), (24): Xaa is A or G
  MOD_RES (25), (26), (27), (28): Xaa is A or G or is absent

SEQ ID NO: 53382 - protein, 41 aa, Artificial Sequence
  GFR-binding peptide
  MOD_RES (2), (39), (41): Xaa is C or S
  MOD_RES (18), (19), (20), (21), (22): Xaa is A or G
  MOD_RES (23), (24), (25), (26): Xaa is A or G or is absent
QXRPTQVQLEPLTVLYYXXXXXXXXXEQLSNTLEDHLAXKX

SEQ ID NO: 53383 - protein, 35 aa, Artificial Sequence; identical to SEQ ID NO: 14985
  GFR-binding peptide
  MOD_RES (33), (35): Xaa is C or S
  MOD_RES (14), (15), (16), (17), (18): Xaa is A or G
  MOD_RES (19), (20), (21), (22): Xaa is A or G or is absent

SEQ ID NO: 53384 - protein, 43 aa, Artificial Sequence
  GFR-binding peptide
  MOD_RES (5), (42): Xaa is C or S
SSVKXQPSRVHHEPLPVVYYEYVRKKPKLEQLSNRLEEHLEXA

SEQ ID NO: 53385 - protein, 35 aa, Artificial Sequence
  GFR-binding peptide
  MOD_RES (16), (17), (18), (19), (20): Xaa is A or G
  MOD_RES (21), (22), (23), (24): Xaa is A or G or is absent
QPSRVHHEPLPVVYYXXXXXXXXXEQLSNRLEEHL

SEQ ID NO: 53386 - protein, 31 aa, Artificial Sequence
  GFR-binding peptide
  MOD_RES (1), (1): Xaa is C or S
XAPTQLSNITVQIMDDSSNVIIGEMSNMVVR

SEQ ID NO: 53387 - protein, 37 aa, Artificial Sequence; identical to SEQ ID NO: 14988
  GFR-binding peptide
  MOD_RES (5), (6): Xaa is C or S

SEQ ID NO: 53388 - protein, 40 aa, Artificial Sequence; identical to SEQ ID NO: 19918
  GFR-binding peptide
  MOD_RES (1), (38), (40): Xaa is C or S
  MOD_RES (17), (18), (19), (20), (21): Xaa is A or G
  MOD_RES (22), (23), (24), (25): Xaa is A or G or is absent

SEQ ID NO: 53389 - protein, 37 aa, Artificial Sequence; identical to SEQ ID NO: 14989
  GFR-binding peptide
  MOD_RES (1), (35), (37): Xaa is C or S
  MOD_RES (15), (16), (17), (18), (19): Xaa is A or G
  MOD_RES (20), (21), (22), (23): Xaa is A or G or is absent

SEQ ID NO: 53390 - protein, 38 aa, Artificial Sequence
  GFR-binding peptide
  MOD_RES (1), (35), (37): Xaa is C or S
  MOD_RES (15), (16), (17), (18), (19): Xaa is A or G
  MOD_RES (20), (21), (22), (23): Xaa is A or G or is absent
XVPTEEEPLPMVYYXXXXXXXXXEQLSNFLQHNKXEXR

SEQ ID NO: 53391 - protein, 41 aa, Artificial Sequence
  GFR-binding peptide
  MOD_RES (3), (4), (38), (40): Xaa is C or S
  MOD_RES (18), (19), (20), (21), (22): Xaa is A or G
  MOD_RES (23), (24), (25), (26): Xaa is A or G or is absent
KAXXVPTELRSVKMAKVXXXXXXXXXKEVQVEMVVEGXGXR

SEQ ID NO: 53392 - protein, 38 aa, Artificial Sequence
  GFR-binding peptide
  MOD_RES (5), (6), (38): Xaa is C or S
VPKPXXAPTKLRPVQVRKIDDSSNVIKKATVNMVVRSX

SEQ ID NO: 53393 - protein, 40 aa, Artificial Sequence; identical to SEQ ID NO: 19919
  GFR-binding peptide
  MOD_RES (4), (4): Xaa is C or S
  MOD_RES (20), (21), (22), (23), (24): Xaa is A or G
  MOD_RES (25), (26), (27), (28): Xaa is A or G or is absent

SEQ ID NO: 53394 - protein, 40 aa, Artificial Sequence
  GFR-binding peptide
  MOD_RES (37), (39): Xaa is C or S
QPSRVHHEPLPVVYYEYVRKKPKLEQLSNRLEEHLEXAXA

SEQ ID NO: 53395 - protein, 38 aa, Artificial Sequence; identical to SEQ ID NO: 19920
  GFR-binding peptide
  MOD_RES (3), (37): Xaa is C or S
  MOD_RES (17), (18), (19), (20), (21): Xaa is A or G
  MOD_RES (22), (23), (24), (25): Xaa is A or G or is absent

SEQ ID NO: 53396 - protein, 38 aa, Artificial Sequence; identical to SEQ ID NO: 14992
  GFR-binding peptide
  MOD_RES (4), (5): Xaa is C or S
  MOD_RES (19), (20), (21), (22), (23): Xaa is A or G
  MOD_RES (24), (25), (26), (27): Xaa is A or G or is absent

SEQ ID NO: 53397 - protein, 33 aa, Artificial Sequence
  GFR-binding peptide
  MOD_RES (1), (32): Xaa is C or S
XVPQALRPVQIRKIVGRKPKVKKATVMIVRSXK

SEQ ID NO: 53398 - protein, 35 aa, Artificial Sequence
  GFR-binding peptide
  MOD_RES (3), (4): Xaa is C or S
KAXXVPTELSNITMQIMDEYDKVVIGEMSEMVVEG

SEQ ID NO: 53399 - protein, 37 aa, Artificial Sequence
  GFR-binding peptide
  MOD_RES (2), (3), (36): Xaa is C or S
  MOD_RES (17), (18), (19), (20), (21): Xaa is A or G
  MOD_RES (22), (23), (24), (25): Xaa is A or G or is absent
PXXVPQALRSVKIAKVXXXXXXXXXKEVQVMIVRSXK

SEQ ID NO: 53400 - protein, 38 aa, Artificial Sequence
  GFR-binding peptide
  MOD_RES (2), (3), (37): Xaa is C or S
  MOD_RES (17), (18), (19), (20), (21): Xaa is A or G
  MOD_RES (22), (23), (24), (25): Xaa is A or G or is absent
PXXAPTQLRPVQVRKIXXXXXXXXXKKATVNMVVRAXG

SEQ ID NO: 53401 - protein, 37 aa, Artificial Sequence
  GFR-binding peptide
  MOD_RES (37), (37): Xaa is C or S
QPSRVHHEPLPVVYYEYVRKKPKLEQLSNRLEEHLEX

SEQ ID NO: 53402 - protein, 36 aa, Artificial Sequence
  GFR-binding peptide
  MOD_RES (34), (36): Xaa is C or S
  MOD_RES (14), (15), (16), (17), (18): Xaa is A or G
  MOD_RES (19), (20), (21), (22): Xaa is A or G or is absent
APTKLRPVQVRKIXXXXXXXXXKKATVNMVVRSXGX

SEQ ID NO: 53403 - protein, 38 aa, Artificial Sequence
  GFR-binding peptide
  MOD_RES (35), (37): Xaa is C or S
TQVQLEPLTVLYYEIVRKKPIFEQLSNTLEDHLAXKXE

SEQ ID NO: 53404 - protein, 33 aa, Artificial Sequence
  GFR-binding peptide
  MOD_RES (1), (1): Xaa is C or S
  MOD_RES (15), (16), (17), (18), (19): Xaa is A or G
  MOD_RES (20), (21), (22), (23): Xaa is A or G or is absent
XVPTELRSVKMAKVXXXXXXXXXKEVQVEMVVE

SEQ ID NO: 53405 - protein, 39 aa, Artificial Sequence; identical to SEQ ID NO: 14994
  GFR-binding peptide
  MOD_RES (2), (3), (37), (39): Xaa is C or S
  MOD_RES (17), (18), (19), (20), (21): Xaa is A or G
  MOD_RES (22), (23), (24), (25): Xaa is A or G or is absent

SEQ ID NO: 53406 - protein, 36 aa, Artificial Sequence
  GFR-binding peptide
  MOD_RES (3), (4): Xaa is C or S
  MOD_RES (18), (19), (20), (21), (22): Xaa is A or G
  MOD_RES (23), (24), (25), (26): Xaa is A or G or is absent
KAXXVPTELSNITMQIMXXXXXXXXXIGEMSEMVVE

SEQ ID NO: 53407 - protein, 41 aa, Artificial Sequence; identical to SEQ ID NO: 14999
  GFR-binding peptide
  MOD_RES (5), (6), (40): Xaa is C or S
  MOD_RES (20), (21), (22), (23), (24): Xaa is A or G
  MOD_RES (25), (26), (27), (28): Xaa is A or G or is absent

SEQ ID NO: 53408 - protein, 39 aa, Artificial Sequence
  GFR-binding peptide
  MOD_RES (5), (5): Xaa is C or S
RNVQXRPTQVQLEPLPVVYYEIVRKKPIFEQLSNTLEDH

SEQ ID NO: 53409 - protein, 39 aa, Artificial Sequence
  GFR-binding peptide
  MOD_RES (4), (5), (37), (39): Xaa is C or S
PKPXXAPTKLSNITVQIMDDSSNVIIGEMSNMVVRSXGX

SEQ ID NO: 53410 - protein, 33 aa, Artificial Sequence
  GFR-binding peptide
  MOD_RES (1), (1): Xaa is C or S
  MOD_RES (15), (16), (17), (18), (19): Xaa is A or G
  MOD_RES (20), (21), (22), (23): Xaa is A or G or is absent
XVPTELRPVQMRKIXXXXXXXXXKKATVEMVVE

SEQ ID NO: 53411 - protein, 31 aa, Artificial Sequence
  GFR-binding peptide
  MOD_RES (1), (1): Xaa is C or S
XVSQDLRPVQIRKIIGKTPKIKKATVMIVKS

SEQ ID NO: 53412 - protein, 40 aa, Artificial Sequence
  GFR-binding peptide
  MOD_RES (5), (39): Xaa is C or S
  MOD_RES (19), (20), (21), (22), (23): Xaa is A or G
  MOD_RES (24), (25), (26), (27): Xaa is A or G or is absent
TKPTXAPTKLRSVKVAKVXXXXXXXXXKEVQVNMVVRSXG

SEQ ID NO: 53413 - protein, 36 aa, Artificial Sequence
  GFR-binding peptide
  MOD_RES (1), (2), (35): Xaa is C or S
  MOD_RES (16), (17), (18), (19), (20): Xaa is A or G
  MOD_RES (21), (22), (23), (24): Xaa is A or G or is absent
XXVSQDLRPVQIRKIXXXXXXXXXKKATVMIVKSXK

SEQ ID NO: 53414 - protein, 37 aa, Artificial Sequence
  GFR-binding peptide
  MOD_RES (4), (5): Xaa is C or S
  MOD_RES (19), (20), (21), (22), (23): Xaa is A or G
  MOD_RES (24), (25), (26), (27): Xaa is A or G or is absent
PKPXXAPTQLRSVKVAKVXXXXXXXXXKEVQVNMVVR

SEQ ID NO: 53415 - protein, 32 aa, Artificial Sequence
  GFR-binding peptide
  MOD_RES (14), (15), (16), (17), (18): Xaa is A or G
  MOD_RES (19), (20), (21), (22): Xaa is A or G or is absent
VPQALRPVQIRKIXXXXXXXXXKKATVMIVRS

SEQ ID NO: 53416 - protein, 37 aa, Artificial Sequence
  GFR-binding peptide
  MOD_RES (35), (37): Xaa is C or S
SRVHHEPLPVVYYEYVRKKPKLEQLSNRLEEHLEXAX

SEQ ID NO: 53417 - protein, 36 aa, Artificial Sequence
  GFR-binding peptide
  MOD_RES (3), (4), (36): Xaa is C or S
KAXXVPTELRPVQMRKIDEYDKVVKKATVEMVVEGX

SEQ ID NO: 53418 - protein, 34 aa, Artificial Sequence; identical to SEQ ID NO: 19935
  GFR-binding peptide

SEQ ID NO: 53419 - protein, 39 aa, Artificial Sequence
  GFR-binding peptide
  MOD_RES (3), (4), (38): Xaa is C or S
  MOD_RES (18), (19), (20), (21), (22): Xaa is A or G
  MOD_RES (23), (24), (25), (26): Xaa is A or G or is absent
KPXXAPTKLSNITVQIMXXXXXXXXXIGEMSNMVVRSXG

SEQ ID NO: 53420 - protein, 41 aa, Artificial Sequence
  GFR-binding peptide
  MOD_RES (5), (6), (39), (41): Xaa is C or S
  MOD_RES (20), (21), (22), (23), (24): Xaa is A or G
  MOD_RES (25), (26), (27), (28): Xaa is A or G or is absent
SASPXXVSQDLSNITIQIMXXXXXXXXXIGEMSMIVKSXKX

SEQ ID NO: 53421 - protein, 37 aa, Artificial Sequence; identical to SEQ ID NO: 19938
  GFR-binding peptide
  MOD_RES (1), (35), (37): Xaa is C or S
  MOD_RES (15), (16), (17), (18), (19): Xaa is A or G
  MOD_RES (20), (21), (22), (23): Xaa is A or G or is absent

SEQ ID NO: 53422 - protein, 38 aa, Artificial Sequence
  GFR-binding peptide
  MOD_RES (4), (5), (38): Xaa is C or S
  MOD_RES (19), (20), (21), (22), (23): Xaa is A or G
  MOD_RES (24), (25), (26), (27): Xaa is A or G or is absent
ASPXXVPQDLRSVKIAKVXXXXXXXXXKEVQVMVVKSX

SEQ ID NO: 53423 - protein, 41 aa, Artificial Sequence; identical to SEQ ID NO: 19940
  GFR-binding peptide
  MOD_RES (3), (40): Xaa is C or S
  MOD_RES (19), (20), (21), (22), (23): Xaa is A or G
  MOD_RES (24), (25), (26), (27): Xaa is A or G or is absent

SEQ ID NO: 53424 - protein, 42 aa, Artificial Sequence; identical to SEQ ID NO: 19941
  GFR-binding peptide
  MOD_RES (3), (40), (42): Xaa is C or S
  MOD_RES (19), (20), (21), (22), (23): Xaa is A or G
  MOD_RES (24), (25), (26), (27): Xaa is A or G or is absent

SEQ ID NO: 53425 - protein, 40 aa, Artificial Sequence
  GFR-binding peptide
  MOD_RES (4), (5), (37), (39): Xaa is C or S
PKAXXVPTELSNITMQIMDEYDKVVIGEMSEMVVEGXGXR

SEQ ID NO: 53426 - protein, 34 aa, Artificial Sequence
  GFR-binding peptide
  MOD_RES (34), (34): Xaa is C or S
  MOD_RES (14), (15), (16), (17), (18): Xaa is A or G
  MOD_RES (19), (20), (21), (22): Xaa is A or G or is absent
APTKLRSVKVAKVXXXXXXXXXKEVQVNMVVRSX

SEQ ID NO: 53427 - protein, 37 aa, Artificial Sequence
  GFR-binding peptide
  MOD_RES (34), (36): Xaa is C or S
  MOD_RES (14), (15), (16), (17), (18): Xaa is A or G
  MOD_RES (19), (20), (21), (22): Xaa is A or G or is absent
APTQLSNITVQIMXXXXXXXXXIGEMSNMVVRAXGXH

SEQ ID NO: 53428 - protein, 42 aa, Artificial Sequence
  GFR-binding peptide
  MOD_RES (6), (40), (42): Xaa is C or S
  MOD_RES (20), (21), (22), (23), (24): Xaa is A or G
  MOD_RES (25), (26), (27), (28): Xaa is A or G or is absent
VTKPTXAPTKLSNITVQIMXXXXXXXXXIGEMSNMVVRSXGX

SEQ ID NO: 53429 - protein, 39 aa, Artificial Sequence
  GFR-binding peptide
  MOD_RES (6), (38): Xaa is C or S
VTKPTXAPTKLRSVKVAKVDDSSNVIKEVQVNMVVRSXG

SEQ ID NO: 53430 - protein, 37 aa, Artificial Sequence; identical to SEQ ID NO: 40888
  GFR-binding peptide
  MOD_RES (1), (2), (35), (37): Xaa is C or S
  MOD_RES (16), (17), (18), (19), (20): Xaa is A or G
  MOD_RES (21), (22), (23), (24): Xaa is A or G or is absent

SEQ ID NO: 53431 - protein, 35 aa, Artificial Sequence; identical to SEQ ID NO: 15010
  GFR-binding peptide
  MOD_RES (1), (2), (35): Xaa is C or S
  MOD_RES (16), (17), (18), (19), (20): Xaa is A or G
  MOD_RES (21), (22), (23), (24): Xaa is A or G or is absent

SEQ ID NO: 53432 - protein, 38 aa, Artificial Sequence; identical to SEQ ID NO: 19945
  GFR-binding peptide
  MOD_RES (2), (2): Xaa is C or S

SEQ ID NO: 53433 - protein, 37 aa, Artificial Sequence
  GFR-binding peptide
  MOD_RES (3), (4): Xaa is C or S
  MOD_RES (18), (19), (20), (21), (22): Xaa is A or G
  MOD_RES (23), (24), (25), (26): Xaa is A or G or is absent
KPXXAPTKLRSVKVAKVXXXXXXXXXKEVQVNMVVRS

SEQ ID NO: 53434 - protein, 41 aa, Artificial Sequence
  GFR-binding peptide
  MOD_RES (6), (38), (40): Xaa is C or S
VTKPTXAPTKLRSVKVAKVDDSSNVIKEVQVNMVVRSXGXH

SEQ ID NO: 53435 - protein, 38 aa, Artificial Sequence
  GFR-binding peptide
  MOD_RES (3), (4), (37): Xaa is C or S
  MOD_RES (18), (19), (20), (21), (22): Xaa is A or G
  MOD_RES (23), (24), (25), (26): Xaa is A or G or is absent
SPXXVSQDLRSVKIAKVXXXXXXXXXKEVQVMIVKSXK

SEQ ID NO: 53436 - protein, 40 aa, Artificial Sequence; identical to SEQ ID NO: 15016
  GFR-binding peptide
  MOD_RES (4), (5), (37), (39): Xaa is C or S

SEQ ID NO: 53437 - protein, 33 aa, Artificial Sequence; identical to SEQ ID NO: 15018
  GFR-binding peptide
  MOD_RES (1), (2): Xaa is C or S

SEQ ID NO: 53438 - protein, 40 aa, Artificial Sequence; identical to SEQ ID NO: 15019
  GFR-binding peptide
  MOD_RES (5), (6), (39): Xaa is C or S
  MOD_RES (20), (21), (22), (23), (24): Xaa is A or G
  MOD_RES (25), (26), (27), (28): Xaa is A or G or is absent

SEQ ID NO: 53439 - protein, 36 aa, Artificial Sequence; identical to SEQ ID NO: 15022
  GFR-binding peptide
  MOD_RES (1), (35): Xaa is C or S
  MOD_RES (15), (16), (17), (18), (19): Xaa is A or G
  MOD_RES (20), (21), (22), (23): Xaa is A or G or is absent

SEQ ID NO: 53440 - protein, 37 aa, Artificial Sequence; identical to SEQ ID NO: 15023
  GFR-binding peptide
  MOD_RES (2), (3), (37): Xaa is C or S
  MOD_RES (17), (18), (19), (20), (21): Xaa is A or G
  MOD_RES (22), (23), (24), (25): Xaa is A or G or is absent

SEQ ID NO: 53441 - protein, 41 aa, Artificial Sequence; identical to SEQ ID NO: 15026
  GFR-binding peptide
  MOD_RES (4), (5), (39), (41): Xaa is C or S
  MOD_RES (19), (20), (21), (22), (23): Xaa is A or G
  MOD_RES (24), (25), (26), (27): Xaa is A or G or is absent

SEQ ID NO: 53442 - protein, 37 aa, Artificial Sequence; identical to SEQ ID NO: 19951
  GFR-binding peptide
  MOD_RES (35), (37): Xaa is C or S
  MOD_RES (14), (15), (16), (17), (18): Xaa is A or G
  MOD_RES (19), (20), (21), (22): Xaa is A or G or is absent

SEQ ID NO: 53443 - protein, 39 aa, Artificial Sequence; identical to SEQ ID NO: 15031
  GFR-binding peptide
  MOD_RES (6), (38): Xaa is C or S

SEQ ID NO: 53444 - protein, 40 aa, Artificial Sequence; identical to SEQ ID NO: 19952
  GFR-binding peptide
  MOD_RES (3), (40): Xaa is C or S

SEQ ID NO: 53445 - protein, 40 aa, Artificial Sequence
  GFR-binding peptide
  MOD_RES (6), (7): Xaa is C or S
  MOD_RES (21), (22), (23), (24), (25): Xaa is A or G
  MOD_RES (26), (27), (28), (29): Xaa is A or G or is absent
KIPKAXXVPTELRSVKMAKVXXXXXXXXXKEVQVDMVVEG

SEQ ID NO: 53446 - protein, 35 aa, Artificial Sequence
  GFR-binding peptide
  MOD_RES (32), (34): Xaa is C or S
APTKLRSVKVAKVDDSSNVIKEVQVNMVVRSXGXH

SEQ ID NO: 53447 - protein, 33 aa, Artificial Sequence; identical to SEQ ID NO: 15032
  GFR-binding peptide
  MOD_RES (3), (3): Xaa is C or S

SEQ ID NO: 53448 - protein, 42 aa, Artificial Sequence; identical to SEQ ID NO: 19953
  GFR-binding peptide
  MOD_RES (5), (42): Xaa is C or S
  MOD_RES (21), (22), (23), (24), (25): Xaa is A or G
  MOD_RES (26), (27), (28), (29): Xaa is A or G or is absent

SEQ ID NO: 53449 - protein, 39 aa, Artificial Sequence
  GFR-binding peptide
  MOD_RES (1), (38): Xaa is C or S
  MOD_RES (17), (18), (19), (20), (21): Xaa is A or G
  MOD_RES (22), (23), (24), (25): Xaa is A or G or is absent
XQPSRVHHEPLTVLYYXXXXXXXXXEQLSNRLEEHLEXA

SEQ ID NO: 53450 - protein, 37 aa, Artificial Sequence
  GFR-binding peptide
  MOD_RES (7), (7): Xaa is C or S
HVTKPTXAPTKLRSVKVAKVDDSSNVIKEVQVNMVVR

SEQ ID NO: 53451 - protein, 37 aa, Artificial Sequence
  GFR-binding peptide
  MOD_RES (37), (37): Xaa is C or S
RPTQVQLEPLPVVYYEIVRKKPIFEQLSNTLEDHLAX

SEQ ID NO: 53452 - protein, 44 aa, Artificial Sequence; identical to SEQ ID NO: 15035
  GFR-binding peptide
  MOD_RES (6), (7), (41), (43): Xaa is C or S
  MOD_RES (21), (22), (23), (24), (25): Xaa is A or G
  MOD_RES (26), (27), (28), (29): Xaa is A or G or is absent

SEQ ID NO: 53453 - protein, 41 aa, Artificial Sequence; identical to SEQ ID NO: 15036
  GFR-binding peptide
  MOD_RES (5), (6), (39), (41): Xaa is C or S
  MOD_RES (20), (21), (22), (23), (24): Xaa is A or G
  MOD_RES (25), (26), (27), (28): Xaa is A or G or is absent

SEQ ID NO: 53454 - protein, 40 aa, Artificial Sequence; identical to SEQ ID NO: 19957
  GFR-binding peptide
  MOD_RES (5), (5): Xaa is C or S

SEQ ID NO: 53455 - protein, 40 aa, Artificial Sequence
  GFR-binding peptide
  MOD_RES (4), (5), (39): Xaa is C or S
  MOD_RES (19), (20), (21), (22), (23): Xaa is A or G
  MOD_RES (24), (25), (26), (27): Xaa is A or G or is absent
PKAXXVPTELRPVQMRKIXXXXXXXXXKKATVEMVVEGXG

SEQ ID NO: 53456 - protein, 39 aa, Artificial Sequence
  GFR-binding peptide
  MOD_RES (5), (39): Xaa is C or S
  MOD_RES (19), (20), (21), (22), (23): Xaa is A or G
  MOD_RES (24), (25), (26), (27): Xaa is A or G or is absent
TKPTXAPTKLRSVKVAKVXXXXXXXXXKEVQVNMVVRSX

SEQ ID NO: 53457 - protein, 39 aa, Artificial Sequence; identical to SEQ ID NO: 15041
  GFR-binding peptide
  MOD_RES (5), (6), (37), (39): Xaa is C or S

SEQ ID NO: 53458 - protein, 38 aa, Artificial Sequence
  GFR-binding peptide
  MOD_RES (2), (2): Xaa is C or S
QXRPTQVQLEPLTVLYYEIVRKKPIFEQLSNTLEDHLA

SEQ ID NO: 53459 - protein, 37 aa, Artificial Sequence
  GFR-binding peptide
  MOD_RES (4), (5): Xaa is C or S
  MOD_RES (19), (20), (21), (22), (23): Xaa is A or G
  MOD_RES (24), (25), (26), (27): Xaa is A or G or is absent
PKAXXVPTELSNITMQIMXXXXXXXXXIGEMSDMVVE

SEQ ID NO: 53460 - protein, 34 aa, Artificial Sequence; identical to SEQ ID NO: 15043
  GFR-binding peptide
  MOD_RES (1), (1): Xaa is C or S
  MOD_RES (15), (16), (17), (18), (19): Xaa is A or G
  MOD_RES (20), (21), (22), (23): Xaa is A or G or is absent

SEQ ID NO: 53461 - protein, 42 aa, Artificial Sequence; identical to SEQ ID NO: 19960
  GFR-binding peptide
  MOD_RES (3), (40), (42): Xaa is C or S
  MOD_RES (19), (20), (21), (22), (23): Xaa is A or G
  MOD_RES (24), (25), (26), (27): Xaa is A or G or is absent

SEQ ID NO: 53462 - protein, 34 aa, Artificial Sequence
  GFR-binding peptide
  MOD_RES (2), (3), (34): Xaa is C or S
PXXVPQALSNITIQIMVGRKPKVIGEMSMIVRSX

SEQ ID NO: 53463 - protein, 36 aa, Artificial Sequence
  GFR-binding peptide
  MOD_RES (1), (35): Xaa is C or S
  MOD_RES (15), (16), (17), (18), (19): Xaa is A or G
  MOD_RES (20), (21), (22), (23): Xaa is A or G or is absent
XAPTKLRSVKVAKVXXXXXXXXXKEVQVNMVVRSXG

SEQ ID NO: 53464 - protein, 38 aa, Artificial Sequence; identical to SEQ ID NO: 40936
  GFR-binding peptide
  MOD_RES (1), (2), (35), (37): Xaa is C or S
  MOD_RES (16), (17), (18), (19), (20): Xaa is A or G
  MOD_RES (21), (22), (23), (24): Xaa is A or G or is absent

SEQ ID NO: 53465 - protein, 43 aa, Artificial Sequence; identical to SEQ ID NO: 19964
  GFR-binding peptide
  MOD_RES (5), (42): Xaa is C or S
  MOD_RES (21), (22), (23), (24), (25): Xaa is A or G
  MOD_RES (26), (27), (28), (29): Xaa is A or G or is absent

SEQ ID NO: 53466 - protein, 37 aa, Artificial Sequence
  GFR-binding peptide
  MOD_RES (5), (6): Xaa is C or S
VPKPXXAPTKLSNITVQIMDDSSNVIIGEMSNMVVRS

SEQ ID NO: 53467 - protein, 40 aa, Artificial Sequence; identical to SEQ ID NO: 15049
  GFR-binding peptide
  MOD_RES (6), (7), (40): Xaa is C or S
  MOD_RES (21), (22), (23), (24), (25): Xaa is A or G
  MOD_RES (26), (27), (28), (29): Xaa is A or G or is absent

SEQ ID NO: 53468 - protein, 37 aa, Artificial Sequence; identical to SEQ ID NO: 19966
  GFR-binding peptide
  MOD_RES (35), (37): Xaa is C or S
  MOD_RES (14), (15), (16), (17), (18): Xaa is A or G
  MOD_RES (19), (20), (21), (22): Xaa is A or G or is absent

SEQ ID NO: 53469 - protein, 35 aa, Artificial Sequence
  GFR-binding peptide
  MOD_RES (4), (5): Xaa is C or S
PKPXXAPTQLSNITVQIMDDSSNVIIGEMSNMVVR

SEQ ID NO: 53470 - protein, 38 aa, Artificial Sequence
  GFR-binding peptide
  MOD_RES (37), (37): Xaa is C or S
RPTQVQLEPLPVVYYEIVRKKPIFEQLSNTLEDHLAXK

SEQ ID NO: 53471 - protein, 38 aa, Artificial Sequence; identical to SEQ ID NO: 15051
  GFR-binding peptide
  MOD_RES (1), (35), (37): Xaa is C or S
  MOD_RES (15), (16), (17), (18), (19): Xaa is A or G
  MOD_RES (20), (21), (22), (23): Xaa is A or G or is absent

SEQ ID NO: 53472 - protein, 42 aa, Artificial Sequence; identical to SEQ ID NO: 15052
  GFR-binding peptide
  MOD_RES (4), (5), (39), (41): Xaa is C or S
  MOD_RES (19), (20), (21), (22), (23): Xaa is A or G
  MOD_RES (24), (25), (26), (27): Xaa is A or G or is absent

SEQ ID NO: 53473 - protein, 34 aa, Artificial Sequence
  GFR-binding peptide
  MOD_RES (1), (1): Xaa is C or S
  MOD_RES (15), (16), (17), (18), (19): Xaa is A or G
  MOD_RES (20), (21), (22), (23): Xaa is A or G or is absent
XAPTKLSNITVQIMXXXXXXXXXIGEMSNMVVRS

SEQ ID NO: 53474 - protein, 37 aa, Artificial Sequence
  GFR-binding peptide
  MOD_RES (1), (2), (36): Xaa is C or S
  MOD_RES (16), (17), (18), (19), (20): Xaa is A or G
  MOD_RES (21), (22), (23), (24): Xaa is A or G or is absent
XXAPTQLRPVQVRKIXXXXXXXXXKKATVNMVVRAXG

SEQ ID NO: 53475 - protein, 40 aa, Artificial Sequence
  GFR-binding peptide
  MOD_RES (6), (7), (39): Xaa is C or S
KIPKAXXVPTELRPVQMRKIDENEKVVKKATVDMVVEGXG

SEQ ID NO: 53476 - protein, 42 aa, Artificial Sequence
  GFR-binding peptide
  MOD_RES (6), (7), (41): Xaa is C or S
  MOD_RES (21), (22), (23), (24), (25): Xaa is A or G
  MOD_RES (26), (27), (28), (29): Xaa is A or G or is absent
KIPKAXXVPTELRSVKMAKVXXXXXXXXXKEVQVDMVVEGXG

SEQ ID NO: 53477 - protein, 41 aa, Artificial Sequence; identical to SEQ ID NO: 19968
  GFR-binding peptide
  MOD_RES (5), (5): Xaa is C or S
  MOD_RES (21), (22), (23), (24), (25): Xaa is A or G
  MOD_RES (26), (27), (28), (29): Xaa is A or G or is absent

SEQ ID NO: 53478 - protein, 39 aa, Artificial Sequence
  GFR-binding peptide
  MOD_RES (1), (2), (36), (38): Xaa is C or S
  MOD_RES (16), (17), (18), (19), (20): Xaa is A or G
  MOD_RES (21), (22), (23), (24): Xaa is A or G or is absent
XXVPTELRPVQMRKIXXXXXXXXXKKATVDMVVEGXGXR

SEQ ID NO: 53479 - protein, 41 aa, Artificial Sequence
  GFR-binding peptide
  MOD_RES (2), (39), (41): Xaa is C or S
QXRPTQVQLEPLTVLYYEIVRKKPIFEQLSNTLEDHLAXKX

SEQ ID NO: 53480 - protein, 40 aa, Artificial Sequence; identical to SEQ ID NO: 15059
  GFR-binding peptide
  MOD_RES (5), (6), (39): Xaa is C or S
  MOD_RES (20), (21), (22), (23), (24): Xaa is A or G
  MOD_RES (25), (26), (27), (28): Xaa is A or G or is absent

SEQ ID NO: 53481 - protein, 38 aa, Artificial Sequence; identical to SEQ ID NO: 15060
  GFR-binding peptide
  MOD_RES (3), (4), (38): Xaa is C or S
  MOD_RES (18), (19), (20), (21), (22): Xaa is A or G
  MOD_RES (23), (24), (25), (26): Xaa is A or G or is absent

SEQ ID NO: 53482 - protein, 33 aa, Artificial Sequence
  GFR-binding peptide
  MOD_RES (1), (2): Xaa is C or S
XXAPTQLRPVQVRKIDDSSNVIKKATVNMVVRA

SEQ ID NO: 53483 - protein, 37 aa, Artificial Sequence
  GFR-binding peptide
  MOD_RES (1), (2), (36): Xaa is C or S
  MOD_RES (16), (17), (18), (19), (20): Xaa is A or G
  MOD_RES (21), (22), (23), (24): Xaa is A or G or is absent
XXVPTELRPVQMRKIXXXXXXXXXKKATVDMVVEGXG

SEQ ID NO: 53484 - protein, 38 aa, Artificial Sequence; identical to SEQ ID NO: 19971
  GFR-binding peptide
  MOD_RES (36), (38): Xaa is C or S

SEQ ID NO: 53485 - protein, 35 aa, Artificial Sequence
  GFR-binding peptide
  MOD_RES (2), (3), (35): Xaa is C or S
PXXAPTQLRPVQVRKIDDSSNVIKKATVNMVVRAX

SEQ ID NO: 53486 - protein, 39 aa, Artificial Sequence
  GFR-binding peptide
  MOD_RES (5), (6): Xaa is C or S
  MOD_RES (20), (21), (22), (23), (24): Xaa is A or G
  MOD_RES (25), (26), (27), (28): Xaa is A or G or is absent
IPKAXXVPTELRPVQMRKIXXXXXXXXXKKATVEMVVEG

SEQ ID NO: 53487 - protein, 39 aa, Artificial Sequence; identical to SEQ ID NO: 15064
  GFR-binding peptide
  MOD_RES (6), (6): Xaa is C or S
  MOD_RES (20), (21), (22), (23), (24): Xaa is A or G
  MOD_RES (25), (26), (27), (28): Xaa is A or G or is absent

SEQ ID NO: 53488 - protein, 35 aa, Artificial Sequence; identical to SEQ ID NO: 19973
  GFR-binding peptide
  MOD_RES (15), (16), (17), (18), (19): Xaa is A or G
  MOD_RES (20), (21), (22), (23): Xaa is A or G or is absent

SEQ ID NO: 53489 - protein, 38 aa, Artificial Sequence
  GFR-binding peptide
  MOD_RES (35), (37): Xaa is C or S
  MOD_RES (14), (15), (16), (17), (18): Xaa is A or G
  MOD_RES (19), (20), (21), (22): Xaa is A or G or is absent
TQVQLEPLTVLYYXXXXXXXXXEQLSNTLEDHLAXKXE

SEQ ID NO: 53490 - protein, 41 aa, Artificial Sequence; identical to SEQ ID NO: 19974
  GFR-binding peptide
  MOD_RES (6), (40): Xaa is C or S
  MOD_RES (20), (21), (22), (23), (24): Xaa is A or G
  MOD_RES (25), (26), (27), (28): Xaa is A or G or is absent

SEQ ID NO: 53491 - protein, 34 aa, Artificial Sequence; identical to SEQ ID NO: 15065
  GFR-binding peptide
  MOD_RES (3), (4): Xaa is C or S

SEQ ID NO: 53492 - protein, 33 aa, Artificial Sequence
  GFR-binding peptide
  MOD_RES (1), (33): Xaa is C or S
XAPTQLSNITVQIMDDSSNVIIGEMSNMVVRAX

SEQ ID NO: 53493 - protein, 35 aa, Artificial Sequence
  GFR-binding peptide
  MOD_RES (2), (3), (35): Xaa is C or S
AXXVPTELRPVQMRKIDENEKVVKKATVDMVVEGX

SEQ ID NO: 53494 - protein, 39 aa, Artificial Sequence; identical to SEQ ID NO: 19979
  GFR-binding peptide
  MOD_RES (36), (38): Xaa is C or S
  MOD_RES (15), (16), (17), (18), (19): Xaa is A or G
  MOD_RES (20), (21), (22), (23): Xaa is A or G or is absent

SEQ ID NO: 53495 - protein, 40 aa, Artificial Sequence
  GFR-binding peptide
  MOD_RES (5), (6), (39): Xaa is C or S
  MOD_RES (20), (21), (22), (23), (24): Xaa is A or G
  MOD_RES (25), (26), (27), (28): Xaa is A or G or is absent
SAAPXXVPQALRPVQIRKIXXXXXXXXXKKATVMIVRSXK

SEQ ID NO: 53496 - protein, 31 aa, Artificial Sequence; identical to SEQ ID NO: 15066
  GFR-binding peptide
  MOD_RES (1), (1): Xaa is C or S

SEQ ID NO: 53497 - protein, 34 aa, Artificial Sequence; identical to SEQ ID NO: 15070
  GFR-binding peptide
  MOD_RES (32), (34): Xaa is C or S

SEQ ID NO: 53498 - protein, 44 aa, Artificial Sequence
  GFR-binding peptide
  MOD_RES (5), (42), (44): Xaa is C or S
SSVKXQPSRVHHEPLPVVYYEYVRKKPKLEQLSNRLEEHLEXAX

SEQ ID NO: 53499 - protein, 40 aa, Artificial Sequence
  GFR-binding peptide
  MOD_RES (7), (7): Xaa is C or S
  MOD_RES (21), (22), (23), (24), (25): Xaa is A or G
  MOD_RES (26), (27), (28), (29): Xaa is A or G or is absent
HVTKPTXAPTKLRSVKVAKVXXXXXXXXXKEVQVNMVVRS

SEQ ID NO: 53500 - protein, 35 aa, Artificial Sequence
  GFR-binding peptide
  MOD_RES (34), (34): Xaa is C or S
  MOD_RES (14), (15), (16), (17), (18): Xaa is A or G
  MOD_RES (19), (20), (21), (22): Xaa is A or G or is absent
VPTEEEPLTMLYYXXXXXXXXXEQLSNFLQHNKXE

SEQ ID NO: 53501 - protein, 43 aa, Artificial Sequence
  GFR-binding peptide
  MOD_RES (4), (41), (43): Xaa is C or S
SVKXQPSRVHHEPLPVVYYEYVRKKPKLEQLSNRLEEHLEXAX

SEQ ID NO: 53502 - protein, 38 aa, Artificial Sequence; identical to SEQ ID NO: 15073
  GFR-binding peptide
  MOD_RES (1), (35), (37): Xaa is C or S
  MOD_RES (15), (16), (17), (18), (19): Xaa is A or G
  MOD_RES (20), (21), (22), (23): Xaa is A or G or is absent

SEQ ID NO: 53503 - protein, 35 aa, Artificial Sequence
  GFR-binding peptide
  MOD_RES (1), (2), (34): Xaa is C or S
XXVPTELRPVQMRKIDEYDKVVKKATVEMVVEGXG

SEQ ID NO: 53504 - protein, 37 aa, Artificial Sequence
  GFR-binding peptide
  MOD_RES (34), (36): Xaa is C or S
  MOD_RES (14), (15), (16), (17), (18): Xaa is A or G
  MOD_RES (19), (20), (21), (22): Xaa is A or G or is absent
VPTELRPVQMRKIXXXXXXXXXKKATVDMVVEGXGXR

SEQ ID NO: 53505 - protein, 38 aa, Artificial Sequence; identical to SEQ ID NO: 19981
  GFR-binding peptide
  MOD_RES (3), (3): Xaa is C or S

SEQ ID NO: 53506 - protein, 40 aa, Artificial Sequence
  GFR-binding peptide
  MOD_RES (2), (39): Xaa is C or S
  MOD_RES (18), (19), (20), (21), (22): Xaa is A or G
  MOD_RES (23), (24), (25), (26): Xaa is A or G or is absent
QXRPTQVQLEPLTVLYYXXXXXXXXXEQLSNTLEDHLAXK

SEQ ID NO: 53507 - protein, 37 aa, Artificial Sequence
  GFR-binding peptide
  MOD_RES (3), (3): Xaa is C or S
VQXRPTQVQLEPLTVLYYEIVRKKPIFEQLSNTLEDH

SEQ ID NO: 53508 - protein, 38 aa, Artificial Sequence; identical to SEQ ID NO: 15079
  GFR-binding peptide
  MOD_RES (4), (5), (37): Xaa is C or S

SEQ ID NO: 53509 - protein, 42 aa, Artificial Sequence; identical to SEQ ID NO: 19984
  GFR-binding peptide
  MOD_RES (4), (41): Xaa is C or S

SEQ ID NO: 53510 - protein, 38 aa, Artificial Sequence; identical to SEQ ID NO: 19986
  GFR-binding peptide
  MOD_RES (36), (38): Xaa is C or S
  MOD_RES (15), (16), (17), (18), (19): Xaa is A or G
  MOD_RES (20), (21), (22), (23): Xaa is A or G or is absent

SEQ ID NO: 53511 - protein, 38 aa, Artificial Sequence
  GFR-binding peptide
  MOD_RES (5), (6): Xaa is C or S
  MOD_RES (20), (21), (22), (23), (24): Xaa is A or G
  MOD_RES (25), (26), (27), (28): Xaa is A or G or is absent
VPKPXXAPTKLRSVKVAKVXXXXXXXXXKEVQVNMVVR

SEQ ID NO: 53512 - protein, 42 aa, Artificial Sequence
  GFR-binding peptide
  MOD_RES (5), (6), (40), (42): Xaa is C or S
  MOD_RES (20), (21), (22), (23), (24): Xaa is A or G
  MOD_RES (25), (26), (27), (28): Xaa is A or G or is absent
IPKAXXVPTELSNITMQIMXXXXXXXXXIGEMSDMVVEGXGX

SEQ ID NO: 53513 - protein, 43 aa, Artificial Sequence
  GFR-binding peptide
  MOD_RES (7), (41), (43): Xaa is C or S
NDEGLEXVPTEEEPLPMVYYRIKPHQGQHEQLSNFLQHNKXEX

SEQ ID NO: 53514 - protein, 35 aa, Artificial Sequence; identical to SEQ ID NO: 19988
  GFR-binding peptide
  MOD_RES (35), (35): Xaa is C or S

SEQ ID NO: 53515 - protein, 42 aa, Artificial Sequence
  GFR-binding peptide
  MOD_RES (4), (41): Xaa is C or S
  MOD_RES (20), (21), (22), (23), (24): Xaa is A or G
  MOD_RES (25), (26), (27), (28): Xaa is A or G or is absent
SVKXQPSRVHHEPLPVVYYXXXXXXXXXEQLSNRLEEHLEXA

SEQ ID NO: 53516 - protein, 34 aa, Artificial Sequence; identical to SEQ ID NO: 15084
  GFR-binding peptide
  MOD_RES (1), (2), (33): Xaa is C or S

SEQ ID NO: 53517 - protein, 40 aa, Artificial Sequence
  GFR-binding peptide
  MOD_RES (4), (4): Xaa is C or S
NVQXRPTQVQLEPLTVLYYEIVRKKPIFEQLSNTLEDHLA

SEQ ID NO: 53518 - protein, 41 aa, Artificial Sequence
  GFR-binding peptide
  MOD_RES (7), (41): Xaa is C or S
  MOD_RES (21), (22), (23), (24), (25): Xaa is A or G
  MOD_RES (26), (27), (28), (29): Xaa is A or G or is absent
HVTKPTXAPTKLRPVQVRKIXXXXXXXXXKKATVNMVVRSX

SEQ ID NO: 53519 - protein, 34 aa, Artificial Sequence; identical to SEQ ID NO: 19993
  GFR-binding peptide

SEQ ID NO: 53520 - protein, 42 aa, Artificial Sequence
  GFR-binding peptide
  MOD_RES (6), (7), (40), (42): Xaa is C or S
  MOD_RES (21), (22), (23), (24), (25): Xaa is A or G
  MOD_RES (26), (27), (28), (29): Xaa is A or G or is absent
ASASPXXVPQDLRPVQIRKIXXXXXXXXXKKATVMVVKSXKX

SEQ ID NO: 53521 - protein, 35 aa, Artificial Sequence; identical to SEQ ID NO: 15091
  GFR-binding peptide
  MOD_RES (3), (4), (35): Xaa is C or S

SEQ ID NO: 53522 - protein, 33 aa, Artificial Sequence
  GFR-binding peptide
  MOD_RES (1), (2), (33): Xaa is C or S
XXVPQDLRSVKIAKVVGRTPKVKEVQVMVVKSX

SEQ ID NO: 53523 - protein, 38 aa, Artificial Sequence
  GFR-binding peptide
  MOD_RES (4), (5), (37): Xaa is C or S
PKAXXVPTELRSVKMAKVDENEKVVKEVQVDMVVEGXG

SEQ ID NO: 53524 - protein, 35 aa, Artificial Sequence
  GFR-binding peptide
  MOD_RES (3), (4), (35): Xaa is C or S
APXXVPQALRPVQIRKIVGRKPKVKKATVMIVRSX

SEQ ID NO: 53525 - protein, 38 aa, Artificial Sequence; identical to SEQ ID NO: 19997
  GFR-binding peptide
  MOD_RES (2), (2): Xaa is C or S

SEQ ID NO: 53526 - protein, 34 aa, Artificial Sequence; identical to SEQ ID NO: 15096
  GFR-binding peptide
  MOD_RES (1), (33): Xaa is C or S

SEQ ID NO: 53527 - protein, 35 aa, Artificial Sequence; identical to SEQ ID NO: 15097
  GFR-binding peptide
  MOD_RES (4), (5): Xaa is C or S

SEQ ID NO: 53528 - protein, 32 aa, Artificial Sequence
  GFR-binding peptide
  MOD_RES (31), (31): Xaa is C or S
VPQALRPVQIRKIVGRKPKVKKATVMIVRSXK

SEQ ID NO: 53529 - protein, 36 aa, Artificial Sequence; identical to SEQ ID NO: 15098
  GFR-binding peptide
  MOD_RES (1), (2), (34), (36): Xaa is C or S

SEQ ID NO: 53530 - protein, 38 aa, Artificial Sequence
  GFR-binding peptide
  MOD_RES (3), (4), (35), (37): Xaa is C or S
SPXXVPQDLRPVQIRKIVGRTPKVKKATVMVVKSXKXS

SEQ ID NO: 53531 - protein, 34 aa, Artificial Sequence
  GFR-binding peptide
  MOD_RES (1), (2), (34): Xaa is C or S
XXAPTQLRSVKVAKVDDSSNVIKEVQVNMVVRAX

SEQ ID NO: 53532 - protein, 33 aa, Artificial Sequence
  GFR-binding peptide
  MOD_RES (2), (3): Xaa is C or S
PXXVPQALRPVQIRKIVGRKPKVKKATVMIVRS

SEQ ID NO: 53533 - protein, 39 aa, Artificial Sequence
  GFR-binding peptide
  MOD_RES (3), (4), (36), (38): Xaa is C or S
KPXXAPTKLRSVKVAKVDDSSNVIKEVQVNMVVRSXGXH

SEQ ID NO: 53534 - protein, 32 aa, Artificial Sequence; identical to SEQ ID NO: 15099
  GFR-binding peptide
  MOD_RES (14), (15), (16), (17), (18): Xaa is A or G
  MOD_RES (19), (20), (21), (22): Xaa is A or G or is absent

SEQ ID NO: 53535 - protein, 39 aa, Artificial Sequence; identical to SEQ ID NO: 15100
  GFR-binding peptide
  MOD_RES (4), (5), (38): Xaa is C or S
  MOD_RES (19), (20), (21), (22), (23): Xaa is A or G
  MOD_RES (24), (25), (26), (27): Xaa is A or G or is absent

SEQ ID NO: 53536 - protein, 42 aa, Artificial Sequence; identical to SEQ ID NO: 15104
  GFR-binding peptide
  MOD_RES (6), (7), (41): Xaa is C or S
  MOD_RES (21), (22), (23), (24), (25): Xaa is A or G
  MOD_RES (26), (27), (28), (29): Xaa is A or G or is absent

SEQ ID NO: 53537 - protein, 37 aa, Artificial Sequence; identical to SEQ ID NO: 15106
  GFR-binding peptide
  MOD_RES (4), (5): Xaa is C or S
  MOD_RES (19), (20), (21), (22), (23): Xaa is A or G
  MOD_RES (24), (25), (26), (27): Xaa is A or G or is absent

SEQ ID NO: 53538 - protein, 41 aa, Artificial Sequence
  GFR-binding peptide
  MOD_RES (5), (6), (39), (41): Xaa is C or S
  MOD_RES (20), (21), (22), (23), (24): Xaa is A or G
  MOD_RES (25), (26), (27), (28): Xaa is A or G or is absent
SAAPXXVPQALSNITIQIMXXXXXXXXXIGEMSMIVRSXKX

SEQ ID NO: 53539 - protein, 37 aa, Artificial Sequence; identical to SEQ ID NO: 20003
  GFR-binding peptide
  MOD_RES (1), (35), (37): Xaa is C or S
  MOD_RES (15), (16), (17), (18), (19): Xaa is A or G
  MOD_RES (20), (21), (22), (23): Xaa is A or G or is absent

SEQ ID NO: 53540 - protein, 40 aa, Artificial Sequence; identical to SEQ ID NO: 20007
  GFR-binding peptide
  MOD_RES (3), (40): Xaa is C or S
  MOD_RES (19), (20), (21), (22), (23): Xaa is A or G
  MOD_RES (24), (25), (26), (27): Xaa is A or G or is absent

SEQ ID NO: 53541 - protein, 42 aa, Artificial Sequence
  GFR-binding peptide
  MOD_RES (3), (40), (42): Xaa is C or S
VKXQPSRVHHEPLTVLYYEYVRKKPKLEQLSNRLEEHLEXAX

SEQ ID NO: 53542 - protein, 37 aa, Artificial Sequence; identical to SEQ ID NO: 15110
  GFR-binding peptide
  MOD_RES (4), (5): Xaa is C or S
  MOD_RES (19), (20), (21), (22), (23): Xaa is A or G
  MOD_RES (24), (25), (26), (27): Xaa is A or G or is absent

SEQ ID NO: 53543 - protein, 38 aa, Artificial Sequence; identical to SEQ ID NO: 15111
  GFR-binding peptide
  MOD_RES (3), (4), (38): Xaa is C or S
  MOD_RES (18), (19), (20), (21), (22): Xaa is A or G
  MOD_RES (23), (24), (25), (26): Xaa is A or G or is absent

SEQ ID NO: 53544 - protein, 40 aa, Artificial Sequence
  GFR-binding peptide
  MOD_RES (6), (40): Xaa is C or S
  MOD_RES (20), (21), (22), (23), (24): Xaa is A or G
  MOD_RES (25), (26), (27), (28): Xaa is A or G or is absent
VTKPTXAPTKLRPVQVRKIXXXXXXXXXKKATVNMVVRSX

SEQ ID NO: 53545 - protein, 36 aa, Artificial Sequence
  GFR-binding peptide
  MOD_RES (4), (5): Xaa is C or S
PKAXXVPTELRSVKMAKVDENEKVVKEVQVDMVVEG

SEQ ID NO: 53546 - protein, 40 aa, Artificial Sequence
  GFR-binding peptide
  MOD_RES (6), (7): Xaa is C or S
  MOD_RES (21), (22), (23), (24), (25): Xaa is A or G
  MOD_RES (26), (27), (28), (29): Xaa is A or G or is absent
SIPKAXXVPTELRPVQMRKIXXXXXXXXXKKATVEMVVEG

SEQ ID NO: 53547 - protein, 44 aa, Artificial Sequence
  GFR-binding peptide
  MOD_RES (4), (41), (43): Xaa is C or S
  MOD_RES (20), (21), (22), (23), (24): Xaa is A or G
  MOD_RES (25), (26), (27), (28): Xaa is A or G or is absent
NVQXRPTQVQLEPLTVLYYXXXXXXXXXEQLSNTLEDHLAXKXE

SEQ ID NO: 53548 - protein, 38 aa, Artificial Sequence
  GFR-binding peptide
  MOD_RES (3), (4), (36), (38): Xaa is C or S
KAXXVPTELRSVKMAKVDENEKVVKEVQVDMVVEGXGX

SEQ ID NO: 53549 - protein, 38 aa, Artificial Sequence
  GFR-binding peptide
  MOD_RES (3), (4), (36), (38): Xaa is C or S
KAXXVPTELRSVKMAKVDEYDKVVKEVQVEMVVEGXGX

SEQ ID NO: 53550 - protein, 40 aa, Artificial Sequence
  GFR-binding peptide
  MOD_RES (4), (5), (38), (40): Xaa is C or S
  MOD_RES (19), (20), (21), (22), (23): Xaa is A or G
  MOD_RES (24), (25), (26), (27): Xaa is A or G or is absent
ASPXXVPQDLRPVQIRKIXXXXXXXXXKKATVMVVKSXKX

SEQ ID NO: 53551 - protein, 40 aa, Artificial Sequence
  GFR-binding peptide
  MOD_RES (7), (7): Xaa is C or S
NDEGLEXVPTEEEPLPMVYYRIKPHQGQHEQLSNFLQHNK

SEQ ID NO: 53552 - protein, 40 aa, Artificial Sequence; identical to SEQ ID NO: 20011
  GFR-binding peptide
  MOD_RES (37), (39): Xaa is C or S

SEQ ID NO: 53553 - protein, 33 aa, Artificial Sequence
  GFR-binding peptide
  MOD_RES (32), (32): Xaa is C or S
APTQLSNITVQIMDDSSNVIIGEMSNMVVRAXG

SEQ ID NO: 53554 - protein, 42 aa, Artificial Sequence
  GFR-binding peptide
  MOD_RES (6), (7), (41): Xaa is C or S
  MOD_RES (21), (22), (23), (24), (25): Xaa is A or G
  MOD_RES (26), (27), (28), (29): Xaa is A or G or is absent
TVPKPXXAPTQLSNITVQIMXXXXXXXXXIGEMSNMVVRAXG

SEQ ID NO: 53555 - protein, 36 aa, Artificial Sequence; identical to SEQ ID NO: 20013
  GFR-binding peptide
  MOD_RES (1), (1): Xaa is C or S
  MOD_RES (17), (18), (19), (20), (21): Xaa is A or G
  MOD_RES (22), (23), (24), (25): Xaa is A or G or is absent

SEQ ID NO: 53556 - protein, 39 aa, Artificial Sequence
  GFR-binding peptide
  MOD_RES (6), (7): Xaa is C or S
  MOD_RES (21), (22), (23), (24), (25): Xaa is A or G
  MOD_RES (26), (27), (28), (29): Xaa is A or G or is absent
TVPKPXXAPTQLSNITVQIMXXXXXXXXXIGEMSNMVVR

SEQ ID NO: 53557 - protein, 33 aa, Artificial Sequence; identical to SEQ ID NO: 20015
  GFR-binding peptide

SEQ ID NO: 53558 - protein, 36 aa, Artificial Sequence
  GFR-binding peptide
  MOD_RES (1), (2), (33), (35): Xaa is C or S
XXVPQALSNITIQIMVGRKPKVIGEMSMIVRSXKXS

SEQ ID NO: 53559 - protein, 34 aa, Artificial Sequence
  GFR-binding peptide
  MOD_RES (1), (1): Xaa is C or S
  MOD_RES (15), (16), (17), (18), (19): Xaa is A or G
  MOD_RES (20), (21), (22), (23): Xaa is A or G or is absent
XVPTEEEPLPMVYYXXXXXXXXXEQLSNFLQHNK

SEQ ID NO: 53560 - protein, 42 aa, Artificial Sequence
  GFR-binding peptide
  MOD_RES (3), (40), (42): Xaa is C or S
  MOD_RES (19), (20), (21), (22), (23): Xaa is A or G
  MOD_RES (24), (25), (26), (27): Xaa is A or G or is absent
VQXRPTQVQLEPLPVVYYXXXXXXXXXEQLSNTLEDHLAXKX

SEQ ID NO: 53561 - protein, 38 aa, Artificial Sequence; identical to SEQ ID NO: 20018
  GFR-binding peptide
  MOD_RES (1), (38): Xaa is C or S
  MOD_RES (17), (18), (19), (20), (21): Xaa is A or G
  MOD_RES (22), (23), (24), (25): Xaa is A or G or is absent

SEQ ID NO: 53562 - protein, 38 aa, Artificial Sequence
  GFR-binding peptide
  MOD_RES (3), (4), (38): Xaa is C or S
  MOD_RES (18), (19), (20), (21), (22): Xaa is A or G
  MOD_RES (23), (24), (25), (26): Xaa is A or G or is absent
KPXXAPTKLRSVKVAKVXXXXXXXXXKEVQVNMVVRSX

SEQ ID NO: 53563 - protein, 35 aa, Artificial Sequence; identical to SEQ ID NO: 15118
  GFR-binding peptide
  MOD_RES (3), (4): Xaa is C or S

SEQ ID NO: 53564 - protein, 40 aa, Artificial Sequence; identical to SEQ ID NO: 15120
  GFR-binding peptide
  MOD_RES (5), (6), (37), (39): Xaa is C or S

SEQ ID NO: 53565 - protein, 44 aa, Artificial Sequence
  GFR-binding peptide
  MOD_RES (6), (7), (41), (43): Xaa is C or S
  MOD_RES (21), (22), (23), (24), (25): Xaa is A or G
  MOD_RES (26), (27), (28), (29): Xaa is A or G or is absent
KIPKAXXVPTELRPVQMRKIXXXXXXXXXKKATVDMVVEGXGXR

SEQ ID NO: 53566 - protein, 35 aa, Artificial Sequence
  GFR-binding peptide
  MOD_RES (34), (34): Xaa is C or S
VPTEEEPLTMLYYRIKPHQGQHEQLSNFLQHNKXE

SEQ ID NO: 53567 - protein, 36 aa, Artificial Sequence; identical to SEQ ID NO: 15124
  GFR-binding peptide
  MOD_RES (2), (3), (36): Xaa is C or S
  MOD_RES (17), (18), (19), (20), (21): Xaa is A or G
  MOD_RES (22), (23), (24), (25): Xaa is A or G or is absent

SEQ ID NO: 53568 - protein, 41 aa, Artificial Sequence; identical to SEQ ID NO: 20023
  GFR-binding peptide
  MOD_RES (5), (5): Xaa is C or S
  MOD_RES (21), (22), (23), (24), (25): Xaa is A or G
  MOD_RES (26), (27), (28), (29): Xaa is A or G or is absent

SEQ ID NO: 53569 - protein, 42 aa, Artificial Sequence; identical to SEQ ID NO: 20024
  GFR-binding peptide
  MOD_RES (2), (39), (41): Xaa is C or S
  MOD_RES (18), (19), (20), (21), (22): Xaa is A or G
  MOD_RES (23), (24), (25), (26): Xaa is A or G or is absent

SEQ ID NO: 53570 - protein, 36 aa, Artificial Sequence
  GFR-binding peptide
  MOD_RES (2), (3), (36): Xaa is C or S
  MOD_RES (17), (18), (19), (20), (21): Xaa is A or G
  MOD_RES (22), (23), (24), (25): Xaa is A or G or is absent
PXXVPQDLSNITIQIMXXXXXXXXXIGEMSMVVKSX

SEQ ID NO: 53571 - protein, 33 aa, Artificial Sequence; identical to SEQ ID NO: 15131
  GFR-binding peptide
  MOD_RES (1), (1): Xaa is C or S
  MOD_RES (15), (16), (17), (18), (19): Xaa is A or G
  MOD_RES (20), (21), (22), (23): Xaa is A or G or is absent

SEQ ID NO: 53572 - protein, 34 aa, Artificial Sequence; identical to SEQ ID NO: 15134
  GFR-binding peptide
  MOD_RES (1), (2): Xaa is C or S
  MOD_RES (16), (17), (18), (19), (20): Xaa is A or G
  MOD_RES (21), (22), (23), (24): Xaa is A or G or is absent

SEQ ID NO: 53573 - protein, 39 aa, Artificial Sequence; identical to SEQ ID NO: 15135
  GFR-binding peptide
  MOD_RES (4), (5), (38): Xaa is C or S
  MOD_RES (19), (20), (21), (22), (23): Xaa is A or G
  MOD_RES (24), (25), (26), (27): Xaa is A or G or is absent

SEQ ID NO: 53574 - protein, 38 aa, Artificial Sequence
  GFR-binding peptide
  MOD_RES (4), (5), (37): Xaa is C or S
PKPXXAPTQLRPVQVRKIDDSSNVIKKATVNMVVRAXG

SEQ ID NO: 53575 - protein, 34 aa, Artificial Sequence
  GFR-binding peptide
TQVQLEPLPVVYYEIVRKKPIFEQLSNTLEDHLA

SEQ ID NO: 53576 - protein, 41 aa, Artificial Sequence
  GFR-binding peptide
  MOD_RES (5), (5): Xaa is C or S
  MOD_RES (21), (22), (23), (24), (25): Xaa is A or G
  MOD_RES (26), (27), (28), (29): Xaa is A or G or is absent
RNVQXRPTQVQLEPLPVVYYXXXXXXXXXEQLSNTLEDHLA

SEQ ID NO: 53577 - protein, 36 aa, Artificial Sequence
  GFR-binding peptide
  MOD_RES (1), (2), (36): Xaa is C or S
  MOD_RES (16), (17), (18), (19), (20): Xaa is A or G
  MOD_RES (21), (22), (23), (24): Xaa is A or G or is absent
XXAPTQLRSVKVAKVXXXXXXXXXKEVQVNMVVRAX

SEQ ID NO: 53578 - protein, 41 aa, Artificial Sequence; identical to SEQ ID NO: 15138
  GFR-binding peptide
  MOD_RES (5), (6), (38), (40): Xaa is C or S

SEQ ID NO: 53579 - protein, 36 aa, Artificial Sequence; identical to SEQ ID NO: 15139
  GFR-binding peptide
  MOD_RES (1), (2), (35): Xaa is C or S
  MOD_RES (16), (17), (18), (19), (20): Xaa is A or G
  MOD_RES (21), (22), (23), (24): Xaa is A or G or is absent

SEQ ID NO: 53580 - protein, 43 aa, Artificial Sequence
  GFR-binding peptide
  MOD_RES (7), (41), (43): Xaa is C or S
  MOD_RES (21), (22), (23), (24), (25): Xaa is A or G
  MOD_RES (26), (27), (28), (29): Xaa is A or G or is absent
HVTKPTXAPTKLRPVQVRKIXXXXXXXXXKKATVNMVVRSXGX

SEQ ID NO: 53581 - protein, 35 aa, Artificial Sequence; identical to SEQ ID NO: 20032
  GFR-binding peptide
  MOD_RES (16), (17), (18), (19), (20): Xaa is A or G
  MOD_RES (21), (22), (23), (24): Xaa is A or G or is absent

SEQ ID NO: 53582 - protein, 40 aa, Artificial Sequence; identical to SEQ ID NO: 15141
  GFR-binding peptide
  MOD_RES (3), (4), (38), (40): Xaa is C or S
  MOD_RES (18), (19), (20), (21), (22): Xaa is A or G
  MOD_RES (23), (24), (25), (26): Xaa is A or G or is absent

SEQ ID NO: 53583 - protein, 39 aa, Artificial Sequence; identical to SEQ ID NO: 20033
  GFR-binding peptide
  MOD_RES (37), (39): Xaa is C or S
  MOD_RES (16), (17), (18), (19), (20): Xaa is A or G
  MOD_RES (21), (22), (23), (24): Xaa is A or G or is absent

SEQ ID NO: 53584 - protein, 39 aa, Artificial Sequence; identical to SEQ ID NO: 15142
  GFR-binding peptide
  MOD_RES (5), (6), (38): Xaa is C or S

SEQ ID NO: 53585 - protein, 39 aa, Artificial Sequence; identical to SEQ ID NO: 20034
  GFR-binding peptide
  MOD_RES (1), (38): Xaa is C or S

SEQ ID NO: 53586 - protein, 36 aa, Artificial Sequence
  GFR-binding peptide
  MOD_RES (1), (2), (36): Xaa is C or S
  MOD_RES (16), (17), (18), (19), (20): Xaa is A or G
  MOD_RES (21), (22), (23), (24): Xaa is A or G or is absent
XXVPTELRSVKMAKVXXXXXXXXXKEVQVEMVVEGX

SEQ ID NO: 53587 - protein, 43 aa, Artificial Sequence
  GFR-binding peptide
  MOD_RES (6), (7), (40), (42): Xaa is C or S
  MOD_RES (21), (22), (23), (24), (25): Xaa is A or G
  MOD_RES (26), (27), (28), (29): Xaa is A or G or is absent
ASASPXXVSQDLRSVKIAKVXXXXXXXXXKEVQVMIVKSXKXS

SEQ ID NO: 53588 - protein, 43 aa, Artificial Sequence; identical to SEQ ID NO: 15145
  GFR-binding peptide
  MOD_RES (6), (7), (41), (43): Xaa is C or S
  MOD_RES (21), (22), (23), (24), (25): Xaa is A or G
  MOD_RES (26), (27), (28), (29): Xaa is A or G or is absent

SEQ ID NO: 53589 - protein, 39 aa, Artificial Sequence; identical to SEQ ID NO: 20038
  GFR-binding peptide
  MOD_RES (4), (38): Xaa is C or S
  MOD_RES (18), (19), (20), (21), (22): Xaa is A or G
  MOD_RES (23), (24), (25), (26): Xaa is A or G or is absent

SEQ ID NO: 53590 - protein, 39 aa, Artificial Sequence; identical to SEQ ID NO: 15146
  GFR-binding peptide
  MOD_RES (6), (6): Xaa is C or S
  MOD_RES (20), (21), (22), (23), (24): Xaa is A or G
  MOD_RES (25), (26), (27), (28): Xaa is A or G or is absent

SEQ ID NO: 53591 - protein, 37 aa, Artificial Sequence
  GFR-binding peptide
  MOD_RES (6), (7): Xaa is C or S
ASASPXXVSQDLRSVKIAKVIGKTPKIKEVQVMIVKS

SEQ ID NO: 53592 - protein, 38 aa, Artificial Sequence
  GFR-binding peptide
  MOD_RES (3), (4), (36), (38): Xaa is C or S
KPXXAPTKLSNITVQIMDDSSNVIIGEMSNMVVRSXGX

SEQ ID NO: 53593 - protein, 38 aa, Artificial Sequence; identical to SEQ ID NO: 15147
  GFR-binding peptide
  MOD_RES (2), (3), (37): Xaa is C or S
  MOD_RES (17), (18), (19), (20), (21): Xaa is A or G
  MOD_RES (22), (23), (24), (25): Xaa is A or G or is absent

SEQ ID NO: 53594 - protein, 44 aa, Artificial Sequence; identical to SEQ ID NO: 15148
  GFR-binding peptide
  MOD_RES (6), (7), (41), (43): Xaa is C or S
  MOD_RES (21), (22), (23), (24), (25): Xaa is A or G
  MOD_RES (26), (27), (28), (29): Xaa is A or G or is absent

SEQ ID NO: 53595 - protein, 37 aa, Artificial Sequence
  GFR-binding peptide
  MOD_RES (4), (5): Xaa is C or S
  MOD_RES (19), (20), (21), (22), (23): Xaa is A or G
  MOD_RES (24), (25), (26), (27): Xaa is A or G or is absent
ASPXXVSQDLRSVKIAKVXXXXXXXXXKEVQVMIVKS

SEQ ID NO: 53596 - protein, 39 aa, Artificial Sequence; identical to SEQ ID NO: 20044
  GFR-binding peptide
  MOD_RES (5), (5): Xaa is C or S
  MOD_RES (21), (22), (23), (24), (25): Xaa is A or G
  MOD_RES (26), (27), (28), (29): Xaa is A or G or is absent

SEQ ID NO: 53597 - protein, 43 aa, Artificial Sequence
  GFR-binding peptide
  MOD_RES (5), (6), (40), (42): Xaa is C or S
  MOD_RES (20), (21), (22), (23), (24): Xaa is A or G
  MOD_RES (25), (26), (27), (28): Xaa is A or G or is absent
IPKAXXVPTELRSVKMAKVXXXXXXXXXKEVQVEMVVEGXGXR

SEQ ID NO: 53598 - protein, 42 aa, Artificial Sequence
  GFR-binding peptide
  MOD_RES (6), (7), (40), (42): Xaa is C or S
  MOD_RES (21), (22), (23), (24), (25): Xaa is A or G
  MOD_RES (26), (27), (28), (29): Xaa is A or G or is absent
ASASPXXVSQDLRSVKIAKVXXXXXXXXXKEVQVMIVKSXKX

SEQ ID NO: 53599 - protein, 34 aa, Artificial Sequence; identical to SEQ ID NO: 15150
  GFR-binding peptide
  MOD_RES (2), (3): Xaa is C or S

SEQ ID NO: 53600 - protein, 32 aa, Artificial Sequence; identical to SEQ ID NO: 15155
  GFR-binding peptide
  MOD_RES (14), (15), (16), (17), (18): Xaa is A or G
  MOD_RES (19), (20), (21), (22): Xaa is A or G or is absent

SEQ ID NO: 53601 - protein, 41 aa, Artificial Sequence
  GFR-binding peptide
  MOD_RES (6), (7), (41): Xaa is C or S
  MOD_RES (21), (22), (23), (24), (25): Xaa is A or G
  MOD_RES (26), (27), (28), (29): Xaa is A or G or is absent
TVPKPXXAPTQLRPVQVRKIXXXXXXXXXKKATVNMVVRAX

SEQ ID NO: 53602 - protein, 37 aa, Artificial Sequence; identical to SEQ ID NO: 15158
  GFR-binding peptide
  MOD_RES (4), (5): Xaa is C or S
  MOD_RES (19), (20), (21), (22), (23): Xaa is A or G
  MOD_RES (24), (25), (26), (27): Xaa is A or G or is absent

SEQ ID NO: 53603 - protein, 37 aa, Artificial Sequence
  GFR-binding peptide
  MOD_RES (4), (4): Xaa is C or S
GLEXVPTEEEPLTMLYYRIKPHQGQHEQLSNFLQHNK

SEQ ID NO: 53604 - protein, 33 aa, Artificial Sequence
  GFR-binding peptide
  MOD_RES (14), (15), (16), (17), (18): Xaa is A or G
  MOD_RES (19), (20), (21), (22): Xaa is A or G or is absent
VPTEEEPLPMVYYXXXXXXXXXEQLSNFLQHNK

SEQ ID NO: 53605 - protein, 42 aa, Artificial Sequence; identical to SEQ ID NO: 20052
  GFR-binding peptide
  MOD_RES (3), (40), (42): Xaa is C or S

SEQ ID NO: 53606 - protein, 40 aa, Artificial Sequence
  GFR-binding peptide
  MOD_RES (5), (6), (39): Xaa is C or S
  MOD_RES (20), (21), (22), (23), (24): Xaa is A or G
  MOD_RES (25), (26), (27), (28): Xaa is A or G or is absent
SASPXXVSQDLRPVQIRKIXXXXXXXXXKKATVMIVKSXK

SEQ ID NO: 53607 - protein, 33 aa, Artificial Sequence
  GFR-binding peptide
  MOD_RES (1), (33): Xaa is C or S
XAPTQLRSVKVAKVDDSSNVIKEVQVNMVVRAX

SEQ ID NO: 53608 - protein, 40 aa, Artificial Sequence; identical to SEQ ID NO: 20054
  GFR-binding peptide
  MOD_RES (5), (5): Xaa is C or S
  MOD_RES (21), (22), (23), (24), (25): Xaa is A or G
  MOD_RES (26), (27), (28), (29): Xaa is A or G or is absent

SEQ ID NO: 53609 - protein, 40 aa, Artificial Sequence; identical to SEQ ID NO: 15165
  GFR-binding peptide
  MOD_RES (2), (3), (37), (39): Xaa is C or S
  MOD_RES (17), (18), (19), (20), (21): Xaa is A or G
  MOD_RES (22), (23), (24), (25): Xaa is A or G or is absent

SEQ ID NO: 53610 - protein, 30 aa, Artificial Sequence
  GFR-binding peptide
VPQALSNITIQIMVGRKPKVIGEMSMIVRS

SEQ ID NO: 53611 - protein, 37 aa, Artificial Sequence; identical to SEQ ID NO: 15166
  GFR-binding peptide
  MOD_RES (1), (34), (36): Xaa is C or S
  MOD_RES (15), (16), (17), (18), (19): Xaa is A or G
  MOD_RES (20), (21), (22), (23): Xaa is A or G or is absent

SEQ ID NO: 53612 - protein, 33 aa, Artificial Sequence
  GFR-binding peptide
  MOD_RES (2), (2): Xaa is C or S
TXAPTKLRSVKVAKVDDSSNVIKEVQVNMVVRS

SEQ ID NO: 53613 - protein, 36 aa, Artificial Sequence
  GFR-binding peptide
  MOD_RES (3), (4), (35): Xaa is C or S
SPXXVSQDLSNITIQIMIGKTPKIIGEMSMIVKSXK

SEQ ID NO: 53614 - protein, 37 aa, Artificial Sequence
  GFR-binding peptide
  MOD_RES (5), (6): Xaa is C or S
IPKAXXVPTELSNITMQIMDENEKVVIGEMSDMVVEG

SEQ ID NO: 53615 - protein, 37 aa, Artificial Sequence
  GFR-binding peptide
  MOD_RES (7), (7): Xaa is C or S
HVTKPTXAPTKLRPVQVRKIDDSSNVIKKATVNMVVR

SEQ ID NO: 53616 - protein, 42 aa, Artificial Sequence
  GFR-binding peptide
  MOD_RES (6), (40), (42): Xaa is C or S
  MOD_RES (20), (21), (22), (23), (24): Xaa is A or G
  MOD_RES (25), (26), (27), (28): Xaa is A or G or is absent
VTKPTXAPTKLRSVKVAKVXXXXXXXXXKEVQVNMVVRSXGX

SEQ ID NO: 53617 - protein, 33 aa, Artificial Sequence
  GFR-binding peptide
  MOD_RES (2), (3): Xaa is C or S
AXXVPTELRSVKMAKVDENEKVVKEVQVDMVVE

SEQ ID NO: 53618 - protein, 33 aa, Artificial Sequence
  GFR-binding peptide
  MOD_RES (2), (3): Xaa is C or S
PXXVPQALRSVKIAKVVGRKPKVKEVQVMIVRS

SEQ ID NO: 53619 - protein, 34 aa, Artificial Sequence; identical to SEQ ID NO: 15173
  GFR-binding peptide
  MOD_RES (1), (34): Xaa is C or S
  MOD_RES (15), (16), (17), (18), (19): Xaa is A or G
  MOD_RES (20), (21), (22), (23): Xaa is A or G or is absent

SEQ ID NO: 53620 - protein, 35 aa, Artificial Sequence
  GFR-binding peptide
  MOD_RES (32), (34): Xaa is C or S
APTKLSNITVQIMDDSSNVIIGEMSNMVVRSXGXH

SEQ ID NO: 53621 - protein, 40 aa, Artificial Sequence; identical to SEQ ID NO: 15175
  GFR-binding peptide
  MOD_RES (6), (7), (38), (40): Xaa is C or S

SEQ ID NO: 53622 - protein, 38 aa, Artificial Sequence
  GFR-binding peptide
  MOD_RES (4), (38): Xaa is C or S
GLEXVPTEEEPLTMLYYRIKPHQGQHEQLSNFLQHNKX

SEQ ID NO: 53623 - protein, 32 aa, Artificial Sequence
  GFR-binding peptide
  MOD_RES (1), (2): Xaa is C or S
XXVSQDLRSVKIAKVIGKTPKIKEVQVMIVKS

SEQ ID NO: 53624 - protein, 33 aa, Artificial Sequence; identical to SEQ ID NO: 15176
  GFR-binding peptide
  MOD_RES (1), (32): Xaa is C or S

SEQ ID NO: 53625 - protein, 35 aa, Artificial Sequence; identical to SEQ ID NO: 20063
  GFR-binding peptide
  MOD_RES (1), (35): Xaa is C or S

SEQ ID NO: 53626 - protein, 36 aa, Artificial Sequence
  GFR-binding peptide
  MOD_RES (2), (2): Xaa is C or S
KXQPSRVHHEPLPVVYYEYVRKKPKLEQLSNRLEEH

SEQ ID NO: 53627 - protein, 38 aa, Artificial Sequence; identical to SEQ ID NO: 41132
  GFR-binding peptide
  MOD_RES (3), (4), (37): Xaa is C or S
  MOD_RES (18), (19), (20), (21), (22): Xaa is A or G
  MOD_RES (23), (24), (25), (26): Xaa is A or G or is absent

SEQ ID NO: 53628 - protein, 36 aa, Artificial Sequence
  GFR-binding peptide
  MOD_RES (3), (4): Xaa is C or S
  MOD_RES (18), (19), (20), (21), (22): Xaa is A or G
  MOD_RES (23), (24), (25), (26): Xaa is A or G or is absent
SPXXVPQDLRPVQIRKIXXXXXXXXXKKATVMVVKS

SEQ ID NO: 53629 - protein, 41 aa, Artificial Sequence; identical to SEQ ID NO: 20066
  GFR-binding peptide
  MOD_RES (2), (39), (41): Xaa is C or S

SEQ ID NO: 53630 - protein, 38 aa, Artificial Sequence
  GFR-binding peptide
  MOD_RES (37), (37): Xaa is C or S
  MOD_RES (16), (17), (18), (19), (20): Xaa is A or G
  MOD_RES (21), (22), (23), (24): Xaa is A or G or is absent
RPTQVQLEPLPVVYYXXXXXXXXXEQLSNTLEDHLAXK

SEQ ID NO: 53631 - protein, 34 aa, Artificial Sequence; identical to SEQ ID NO: 15180
  GFR-binding peptide
  MOD_RES (2), (3), (34): Xaa is C or S

SEQ ID NO: 53632 - protein, 37 aa, Artificial Sequence; identical to SEQ ID NO: 20068
  GFR-binding peptide
  MOD_RES (2), (36): Xaa is C or S

SEQ ID NO: 53633 - protein, 38 aa, Artificial Sequence
  GFR-binding peptide
  MOD_RES (36), (38): Xaa is C or S
PSRVHHEPLPVVYYEYVRKKPKLEQLSNRLEEHLEXAX

SEQ ID NO: 53634 - protein, 36 aa, Artificial Sequence
  GFR-binding peptide
RPTQVQLEPLTVLYYEIVRKKPIFEQLSNTLEDHLA

SEQ ID NO: 53635 - protein, 37 aa, Artificial Sequence; identical to SEQ ID NO: 15182
  GFR-binding peptide
  MOD_RES (6), (7): Xaa is C or S

SEQ ID NO: 53636 - protein, 37 aa, Artificial Sequence; identical to SEQ ID NO: 15183
  GFR-binding peptide
  MOD_RES (5), (6): Xaa is C or S

SEQ ID NO: 53637 - protein, 33 aa, Artificial Sequence
  GFR-binding peptide
  MOD_RES (1), (33): Xaa is C or S
XAPTKLRPVQVRKIDDSSNVIKKATVNMVVRSX

SEQ ID NO: 53638 - protein, 44 aa, Artificial Sequence; identical to SEQ ID NO: 20072
  GFR-binding peptide
  MOD_RES (5), (42), (44): Xaa is C or S

SEQ ID NO: 53639 - protein, 33 aa, Artificial Sequence
  GFR-binding peptide
  MOD_RES (33), (33): Xaa is C or S
  MOD_RES (14), (15), (16), (17), (18): Xaa is A or G
  MOD_RES (19), (20), (21), (22): Xaa is A or G or is absent
VSQDLSNITIQIMXXXXXXXXXIGEMSMIVKSX

SEQ ID NO: 53640 - protein, 39 aa, Artificial Sequence; identical to SEQ ID NO: 15185
  GFR-binding peptide
  MOD_RES (4), (5), (39): Xaa is C or S
  MOD_RES (19), (20), (21), (22), (23): Xaa is A or G
  MOD_RES (24), (25), (26), (27): Xaa is A or G or is absent

SEQ ID NO: 53641 - protein, 32 aa, Artificial Sequence; identical to SEQ ID NO: 15187
  GFR-binding peptide
  MOD_RES (1), (1): Xaa is C or S

SEQ ID NO: 53642 - protein, 38 aa, Artificial Sequence
  GFR-binding peptide
  MOD_RES (3), (3): Xaa is C or S
  MOD_RES (19), (20), (21), (22), (23): Xaa is A or G
  MOD_RES (24), (25), (26), (27): Xaa is A or G or is absent
VKXQPSRVHHEPLTVLYYXXXXXXXXXEQLSNRLEEHL

SEQ ID NO: 53643 - protein, 42 aa, Artificial Sequence; identical to SEQ ID NO: 20073
  GFR-binding peptide
  MOD_RES (7), (41): Xaa is C or S
  MOD_RES (21), (22), (23), (24), (25): Xaa is A or G
  MOD_RES (26), (27), (28), (29): Xaa is A or G or is absent

SEQ ID NO: 53644 - protein, 35 aa, Artificial Sequence
  GFR-binding peptide
PSRVHHEPLTVLYYEYVRKKPKLEQLSNRLEEHLE

SEQ ID NO: 53645 - protein, 44 aa, Artificial Sequence; identical to SEQ ID NO: 15190
  GFR-binding peptide
  MOD_RES (6), (7), (41), (43): Xaa is C or S
  MOD_RES (21), (22), (23), (24), (25): Xaa is A or G
  MOD_RES (26), (27), (28), (29): Xaa is A or G or is absent

SEQ ID NO: 53646 - protein, 31 aa, Artificial Sequence
  GFR-binding peptide
APTKLRPVQVRKIDDSSNVIKKATVNMVVRS

SEQ ID NO: 53647 - protein, 38 aa, Artificial Sequence
  GFR-binding peptide
  MOD_RES (4), (5): Xaa is C or S
  MOD_RES (19), (20), (21), (22), (23): Xaa is A or G
  MOD_RES (24), (25), (26), (27): Xaa is A or G or is absent
PKAXXVPTELRSVKMAKVXXXXXXXXXKEVQVEMVVEG

SEQ ID NO: 53648 - protein, 39 aa, Artificial Sequence; identical to SEQ ID NO: 20075
  GFR-binding peptide
  MOD_RES (36), (38): Xaa is C or S
  MOD_RES (15), (16), (17), (18), (19): Xaa is A or G
  MOD_RES (20), (21), (22), (23): Xaa is A or G or is absent

SEQ ID NO: 53649 - protein, 38 aa, Artificial Sequence
  GFR-binding peptide
  MOD_RES (4), (38): Xaa is C or S
  MOD_RES (18), (19), (20), (21), (22): Xaa is A or G
  MOD_RES (23), (24), (25), (26): Xaa is A or G or is absent
GLEXVPTEEEPLTMLYYXXXXXXXXXEQLSNFLQHNKX

SEQ ID NO: 53650 - protein, 36 aa, Artificial Sequence; identical to SEQ ID NO: 15193
  GFR-binding peptide
  MOD_RES (1), (35): Xaa is C or S
  MOD_RES (15), (16), (17), (18), (19): Xaa is A or G
  MOD_RES (20), (21), (22), (23): Xaa is A or G or is absent

SEQ ID NO: 53651 - protein, 37 aa, Artificial Sequence; identical to SEQ ID NO: 20076
  GFR-binding peptide
  MOD_RES (3), (3): Xaa is C or S

SEQ ID NO: 53652 - protein, 42 aa, Artificial Sequence
  GFR-binding peptide
  MOD_RES (6), (7), (39), (41): Xaa is C or S
SIPKAXXVPTELRSVKMAKVDEYDKVVKEVQVEMVVEGXGXR

SEQ ID NO: 53653 - protein, 38 aa, Artificial Sequence
  GFR-binding peptide
  MOD_RES (4), (5), (37): Xaa is C or S
PKPXXAPTKLRPVQVRKIDDSSNVIKKATVNMVVRSXG

SEQ ID NO: 53654 - protein, 38 aa, Artificial Sequence
  GFR-binding peptide
  MOD_RES (5), (6), (37): Xaa is C or S
SAAPXXVPQALRPVQIRKIVGRKPKVKKATVMIVRSXK

SEQ ID NO: 53655 - protein, 41 aa, Artificial Sequence
  GFR-binding peptide
  MOD_RES (2), (39), (41): Xaa is C or S
  MOD_RES (18), (19), (20), (21), (22): Xaa is A or G
  MOD_RES (23), (24), (25), (26): Xaa is A or G or is absent
KXQPSRVHHEPLTVLYYXXXXXXXXXEQLSNRLEEHLEXAX

SEQ ID NO: 53656 - protein, 36 aa, Artificial Sequence
  GFR-binding peptide
  MOD_RES (2), (3): Xaa is C or S
  MOD_RES (17), (18), (19), (20), (21): Xaa is A or G
  MOD_RES (22), (23), (24), (25): Xaa is A or G or is absent
AXXVPTELSNITMQIMXXXXXXXXXIGEMSEMVVEG

SEQ ID NO: 53657 - protein, 37 aa, Artificial Sequence; identical to SEQ ID NO: 15196
  GFR-binding peptide
  MOD_RES (2), (3), (35), (37): Xaa is C or S

SEQ ID NO: 53658 - protein, 36 aa, Artificial Sequence
  GFR-binding peptide
  MOD_RES (2), (2): Xaa is C or S
KXQPSRVHHEPLTVLYYEYVRKKPKLEQLSNRLEEH

SEQ ID NO: 53659 - protein, 43 aa, Artificial Sequence; identical to SEQ ID NO: 20080
  GFR-binding peptide
  MOD_RES (3), (40), (42): Xaa is C or S
  MOD_RES (19), (20), (21), (22), (23): Xaa is A or G
  MOD_RES (24), (25), (26), (27): Xaa is A or G or is absent

SEQ ID NO: 53660 - protein, 41 aa, Artificial Sequence; identical to SEQ ID NO: 20081
  GFR-binding peptide
  MOD_RES (3), (40): Xaa is C or S

SEQ ID NO: 53661 - protein, 32 aa, Artificial Sequence; identical to SEQ ID NO: 15198
  GFR-binding peptide
  MOD_RES (14), (15), (16), (17), (18): Xaa is A or G
  MOD_RES (19), (20), (21), (22): Xaa is A or G or is absent

SEQ ID NO: 53662 - protein, 40 aa, Artificial Sequence
  GFR-binding peptide
  MOD_RES (5), (5): Xaa is C or S
SSVKXQPSRVHHEPLPVVYYEYVRKKPKLEQLSNRLEEHL

SEQ ID NO: 53663 - protein, 37 aa, Artificial Sequence; identical to SEQ ID NO: 15199
  GFR-binding peptide
  MOD_RES (4), (5), (36): Xaa is C or S

SEQ ID NO: 53664 - protein, 38 aa, Artificial Sequence
  GFR-binding peptide
  MOD_RES (3), (4), (38): Xaa is C or S
  MOD_RES (18), (19), (20), (21), (22): Xaa is A or G
  MOD_RES (23), (24), (25), (26): Xaa is A or G or is absent
KAXXVPTELRSVKMAKVXXXXXXXXXKEVQVDMVVEGX

SEQ ID NO: 53665 - protein, 41 aa, Artificial Sequence; identical to SEQ ID NO: 20082
  GFR-binding peptide
  MOD_RES (4), (38), (40): Xaa is C or S

SEQ ID NO: 53666 - protein, 39 aa, Artificial Sequence
  GFR-binding peptide
  MOD_RES (4), (5), (37), (39): Xaa is C or S
PKAXXVPTELRSVKMAKVDENEKVVKEVQVDMVVEGXGX

SEQ ID NO: 53667 - protein, 36 aa, Artificial Sequence
  GFR-binding peptide
  MOD_RES (3), (4): Xaa is C or S
  MOD_RES (18), (19), (20), (21), (22): Xaa is A or G
  MOD_RES (23), (24), (25), (26): Xaa is A or G or is absent
SPXXVPQDLRSVKIAKVXXXXXXXXXKEVQVMVVKS

SEQ ID NO: 53668 - protein, 36 aa, Artificial Sequence
  GFR-binding peptide
  MOD_RES (1), (2), (34), (36): Xaa is C or S
XXVPTELSNITMQIMDEYDKVVIGEMSEMVVEGXGX

SEQ ID NO: 53669 - protein, 33 aa, Artificial Sequence; identical to SEQ ID NO: 15200
  GFR-binding peptide
  MOD_RES (1), (1): Xaa is C or S
  MOD_RES (15), (16), (17), (18), (19): Xaa is A or G
  MOD_RES (20), (21), (22), (23): Xaa is A or G or is absent

SEQ ID NO: 53670 - protein, 33 aa, Artificial Sequence; identical to SEQ ID NO: 41174
  GFR-binding peptide
  MOD_RES (1), (1): Xaa is C or S
  MOD_RES (15), (16), (17), (18), (19): Xaa is A or G
  MOD_RES (20), (21), (22), (23): Xaa is A or G or is absent

SEQ ID NO: 53671 - protein, 37 aa, Artificial Sequence
  GFR-binding peptide
  MOD_RES (1), (2), (34), (36): Xaa is C or S
XXAPTQLRSVKVAKVDDSSNVIKEVQVNMVVRAXGXH

SEQ ID NO: 53672 - protein, 33 aa, Artificial Sequence; identical to SEQ ID NO: 15202
  GFR-binding peptide
  MOD_RES (1), (1): Xaa is C or S
  MOD_RES (15), (16), (17), (18), (19): Xaa is A or G
  MOD_RES (20), (21), (22), (23): Xaa is A or G or is absent

SEQ ID NO: 53673 - protein, 37 aa, Artificial Sequence
  GFR-binding peptide
  MOD_RES (4), (5): Xaa is C or S
  MOD_RES (19), (20), (21), (22), (23): Xaa is A or G
  MOD_RES (24), (25), (26), (27): Xaa is A or G or is absent
ASPXXVPQDLSNITIQIMXXXXXXXXXIGEMSMVVKS

SEQ ID NO: 53674 - protein, 36 aa, Artificial Sequence
  GFR-binding peptide
  MOD_RES (4), (36): Xaa is C or S
KPTXAPTKLRSVKVAKVDDSSNVIKEVQVNMVVRSX

SEQ ID NO: 53675 - protein, 38 aa, Artificial Sequence; identical to SEQ ID NO: 20089
  GFR-binding peptide
  MOD_RES (2), (36), (38): Xaa is C or S
  MOD_RES (16), (17), (18), (19), (20): Xaa is A or G
  MOD_RES (21), (22), (23), (24): Xaa is A or G or is absent

SEQ ID NO: 53676 - protein, 38 aa, Artificial Sequence
  GFR-binding peptide
  MOD_RES (3), (4), (38): Xaa is C or S
  MOD_RES (18), (19), (20), (21), (22): Xaa is A or G
  MOD_RES (23), (24), (25), (26): Xaa is A or G or is absent
KPXXAPTQLSNITVQIMXXXXXXXXXIGEMSNMVVRAX

SEQ ID NO: 53677 - protein, 39 aa, Artificial Sequence
  GFR-binding peptide
  MOD_RES (1), (38): Xaa is C or S
XQPSRVHHEPLPVVYYEYVRKKPKLEQLSNRLEEHLEXA

SEQ ID NO: 53678 - protein, 35 aa, Artificial Sequence; identical to SEQ ID NO: 20093
  GFR-binding peptide
  MOD_RES (16), (17), (18), (19), (20): Xaa is A or G
  MOD_RES (21), (22), (23), (24): Xaa is A or G or is absent

SEQ ID NO: 53679 - protein, 36 aa, Artificial Sequence
  GFR-binding peptide
  MOD_RES (1), (2), (36): Xaa is C or S
  MOD_RES (16), (17), (18), (19), (20): Xaa is A or G
  MOD_RES (21), (22), (23), (24): Xaa is A or G or is absent
XXVPTELSNITMQIMXXXXXXXXXIGEMSDMVVEGX

SEQ ID NO: 53680 - protein, 40 aa, Artificial Sequence; identical to SEQ ID NO: 15205
  GFR-binding peptide
  MOD_RES (3), (4), (37), (39): Xaa is C or S
  MOD_RES (18), (19), (20), (21), (22): Xaa is A or G
  MOD_RES (23), (24), (25), (26): Xaa is A or G or is absent

SEQ ID NO: 53681 - protein, 43 aa, Artificial Sequence; identical to SEQ ID NO: 20095
  GFR-binding peptide
  MOD_RES (4), (41), (43): Xaa is C or S
  MOD_RES (20), (21), (22), (23), (24): Xaa is A or G
  MOD_RES (25), (26), (27), (28): Xaa is A or G or is absent

SEQ ID NO: 53682 - protein, 43 aa, Artificial Sequence
  GFR-binding peptide
  MOD_RES (7), (41), (43): Xaa is C or S
  MOD_RES (21), (22), (23), (24), (25): Xaa is A or G
  MOD_RES (26), (27), (28), (29): Xaa is A or G or is absent
HVTKPTXAPTKLSNITVQIMXXXXXXXXXIGEMSNMVVRSXGX

SEQ ID NO: 53683 - protein, 33 aa, Artificial Sequence
  GFR-binding peptide
  MOD_RES (14), (15), (16), (17), (18): Xaa is A or G
  MOD_RES (19), (20), (21), (22): Xaa is A or G or is absent
APTKLSNITVQIMXXXXXXXXXIGEMSNMVVRS

SEQ ID NO: 53684 - protein, 41 aa, Artificial Sequence
  GFR-binding peptide
  MOD_RES (5), (6), (38), (40): Xaa is C or S
VPKPXXAPTKLSNITVQIMDDSSNVIIGEMSNMVVRSXGXH

SEQ ID NO: 53685 - protein, 41 aa, Artificial Sequence
  GFR-binding peptide
  MOD_RES (5), (6), (40): Xaa is C or S
  MOD_RES (20), (21), (22), (23), (24): Xaa is A or G
  MOD_RES (25), (26), (27), (28): Xaa is A or G or is absent
IPKAXXVPTELRPVQMRKIXXXXXXXXXKKATVEMVVEGXG

SEQ ID NO: 53686 - protein, 38 aa, Artificial Sequence; identical to SEQ ID NO: 20099
  GFR-binding peptide
  MOD_RES (3), (37): Xaa is C or S

SEQ ID NO: 53687 - protein, 35 aa, Artificial Sequence
  GFR-binding peptide
  MOD_RES (3), (35): Xaa is C or S
PTXAPTKLRPVQVRKIDDSSNVIKKATVNMVVRSX

SEQ ID NO: 53688 - protein, 37 aa, Artificial Sequence
  GFR-binding peptide
  MOD_RES (2), (2): Xaa is C or S
QXRPTQVQLEPLTVLYYEIVRKKPIFEQLSNTLEDHL

SEQ ID NO: 53689 - protein, 38 aa, Artificial Sequence; identical to SEQ ID NO: 15211
  GFR-binding peptide
  MOD_RES (2), (3), (35), (37): Xaa is C or S

SEQ ID NO: 53690 - protein, 32 aa, Artificial Sequence
  GFR-binding peptide
  MOD_RES (14), (15), (16), (17), (18): Xaa is A or G
  MOD_RES (19), (20), (21), (22): Xaa is A or G or is absent
APTQLSNITVQIMXXXXXXXXXIGEMSNMVVR

SEQ ID NO: 53691 - protein, 39 aa, Artificial Sequence; identical to SEQ ID NO: 15213
  GFR-binding peptide
  MOD_RES (4), (36), (38): Xaa is C or S

SEQ ID NO: 53692 - protein, 37 aa, Artificial Sequence
  GFR-binding peptide
  MOD_RES (2), (3), (35), (37): Xaa is C or S
AXXVPTELSNITMQIMDEYDKVVIGEMSEMVVEGXGX

SEQ ID NO: 53693 - protein, 40 aa, Artificial Sequence; identical to SEQ ID NO: 15214
  GFR-binding peptide
  MOD_RES (3), (4), (38), (40): Xaa is C or S
  MOD_RES (18), (19), (20), (21), (22): Xaa is A or G
  MOD_RES (23), (24), (25), (26): Xaa is A or G or is absent

SEQ ID NO: 53694 - protein, 42 aa, Artificial Sequence
  GFR-binding peptide
  MOD_RES (5), (6), (40), (42): Xaa is C or S
  MOD_RES (20), (21), (22), (23), (24): Xaa is A or G
  MOD_RES (25), (26), (27), (28): Xaa is A or G or is absent
IPKAXXVPTELRSVKMAKVXXXXXXXXXKEVQVDMVVEGXGX

SEQ ID NO: 53695 - protein, 38 aa, Artificial Sequence; identical to SEQ ID NO: 15216
  GFR-binding peptide
  MOD_RES (2), (3), (36), (38): Xaa is C or S
  MOD_RES (17), (18), (19), (20), (21): Xaa is A or G
  MOD_RES (22), (23), (24), (25): Xaa is A or G or is absent

SEQ ID NO: 53696 - protein, 34 aa, Artificial Sequence; identical to SEQ ID NO: 15217
  GFR-binding peptide
  MOD_RES (1), (1): Xaa is C or S
  MOD_RES (15), (16), (17), (18), (19): Xaa is A or G
  MOD_RES (20), (21), (22), (23): Xaa is A or G or is absent

SEQ ID NO: 53697 - protein, 41 aa, Artificial Sequence; identical to SEQ ID NO: 20105
  GFR-binding peptide
  MOD_RES (4), (38), (40): Xaa is C or S
  MOD_RES (18), (19), (20), (21), (22): Xaa is A or G
  MOD_RES (23), (24), (25), (26): Xaa is A or G or is absent

SEQ ID NO: 53698 - protein, 41 aa, Artificial Sequence; identical to SEQ ID NO: 20106
  GFR-binding peptide
  MOD_RES (3), (40): Xaa is C or S
  MOD_RES (19), (20), (21), (22), (23): Xaa is A or G
  MOD_RES (24), (25), (26), (27): Xaa is A or G or is absent

SEQ ID NO: 53699 - protein, 41 aa, Artificial Sequence
  GFR-binding peptide
  MOD_RES (6), (7), (41): Xaa is C or S
  MOD_RES (21), (22), (23), (24), (25): Xaa is A or G
  MOD_RES (26), (27), (28), (29): Xaa is A or G or is absent
KIPKAXXVPTELRPVQMRKIXXXXXXXXXKKATVDMVVEGX

SEQ ID NO: 53700 - protein, 35 aa, Artificial Sequence; identical to SEQ ID NO: 20107
  GFR-binding peptide
  MOD_RES (1), (35): Xaa is C or S
  MOD_RES (15), (16), (17), (18), (19): Xaa is A or G
  MOD_RES (20), (21), (22), (23): Xaa is A or G or is absent

SEQ ID NO: 53701 - protein, 41 aa, Artificial Sequence; identical to SEQ ID NO: 15220
  GFR-binding peptide
  MOD_RES (6), (38), (40): Xaa is C or S

SEQ ID NO: 53702 - protein, 39 aa, Artificial Sequence
  GFR-binding peptide
  MOD_RES (4), (36), (38): Xaa is C or S
KPTXAPTKLRPVQVRKIDDSSNVIKKATVNMVVRSXGXH

SEQ ID NO: 53703 - protein, 37 aa, Artificial Sequence
  GFR-binding peptide
  MOD_RES (1), (35), (37): Xaa is C or S
  MOD_RES (15), (16), (17), (18), (19): Xaa is A or G
  MOD_RES (20), (21), (22), (23): Xaa is A or G or is absent
XVPTELSNITMQIMXXXXXXXXXIGEMSDMVVEGXGX

SEQ ID NO: 53704 - protein, 37 aa, Artificial Sequence
  GFR-binding peptide
  MOD_RES (2), (3), (37): Xaa is C or S
  MOD_RES (17), (18), (19), (20), (21): Xaa is A or G
  MOD_RES (22), (23), (24), (25): Xaa is A or G or is absent
PXXAPTQLRSVKVAKVXXXXXXXXXKEVQVNMVVRAX

SEQ ID NO: 53705 - protein, 34 aa, Artificial Sequence; identical to SEQ ID NO: 15223
  GFR-binding peptide
  MOD_RES (34), (34): Xaa is C or S
  MOD_RES (14), (15), (16), (17), (18): Xaa is A or G
  MOD_RES (19), (20), (21), (22): Xaa is A or G or is absent

SEQ ID NO: 53706 - protein, 37 aa, Artificial Sequence
  GFR-binding peptide
  MOD_RES (34), (36): Xaa is C or S
  MOD_RES (14), (15), (16), (17), (18): Xaa is A or G
  MOD_RES (19), (20), (21), (22): Xaa is A or G or is absent
APTQLRSVKVAKVXXXXXXXXXKEVQVNMVVRAXGXH

SEQ ID NO: 53707 - protein, 32 aa, Artificial Sequence
  GFR-binding peptide
  MOD_RES (2), (2): Xaa is C or S
TXAPTKLSNITVQIMDDSSNVIIGEMSNMVVR

SEQ ID NO: 53708 - protein, 43 aa, Artificial Sequence
  GFR-binding peptide
  MOD_RES (7), (41), (43): Xaa is C or S
NDEGLEXVPTEEEPLTMLYYRIKPHQGQHEQLSNFLQHNKXEX

SEQ ID NO: 53709 - protein, 37 aa, Artificial Sequence; identical to SEQ ID NO: 20111
  GFR-binding peptide
  MOD_RES (36), (36): Xaa is C or S

SEQ ID NO: 53710 - protein, 39 aa, Artificial Sequence
  GFR-binding peptide
  MOD_RES (36), (38): Xaa is C or S
PTQVQLEPLTVLYYEIVRKKPIFEQLSNTLEDHLAXKXE

SEQ ID NO: 53711 - protein, 42 aa, Artificial Sequence
  GFR-binding peptide
  MOD_RES (6), (7), (40), (42): Xaa is C or S
  MOD_RES (21), (22), (23), (24), (25): Xaa is A or G
  MOD_RES (26), (27), (28), (29): Xaa is A or G or is absent
ASAAPXXVPQALRSVKIAKVXXXXXXXXXKEVQVMIVRSXKX

SEQ ID NO: 53712 - protein, 38 aa, Artificial Sequence
  GFR-binding peptide
  MOD_RES (5), (6): Xaa is C or S
  MOD_RES (20), (21), (22), (23), (24): Xaa is A or G
  MOD_RES (25), (26), (27), (28): Xaa is A or G or is absent
VPKPXXAPTQLSNITVQIMXXXXXXXXXIGEMSNMVVR

SEQ ID NO: 53713 - protein, 36 aa, Artificial Sequence
  GFR-binding peptide
  MOD_RES (36), (36): Xaa is C or S
  MOD_RES (15), (16), (17), (18), (19): Xaa is A or G
  MOD_RES (20), (21), (22), (23): Xaa is A or G or is absent
PTQVQLEPLPVVYYXXXXXXXXXEQLSNTLEDHLAX

SEQ ID NO: 53714 - protein, 37 aa, Artificial Sequence
  GFR-binding peptide
  MOD_RES (2), (3), (35), (37): Xaa is C or S
AXXVPTELSNITMQIMDENEKVVIGEMSDMVVEGXGX

SEQ ID NO: 53715 - protein, 40 aa, Artificial Sequence; identical to SEQ ID NO: 15227
  GFR-binding peptide
  MOD_RES (5), (6), (40): Xaa is C or S
  MOD_RES (20), (21), (22), (23), (24): Xaa is A or G
  MOD_RES (25), (26), (27), (28): Xaa is A or G or is absent

SEQ ID NO: 53716 - protein, 40 aa, Artificial Sequence
  GFR-binding peptide
  MOD_RES (6), (7): Xaa is C or S
  MOD_RES (21), (22), (23), (24), (25): Xaa is A or G
  MOD_RES (26), (27), (28), (29): Xaa is A or G or is absent
KIPKAXXVPTELRPVQMRKIXXXXXXXXXKKATVDMVVEG

SEQ ID NO: 53717 - protein, 41 aa, Artificial Sequence
  GFR-binding peptide
  MOD_RES (5), (5): Xaa is C or S
  MOD_RES (21), (22), (23), (24), (25): Xaa is A or G
  MOD_RES (26), (27), (28), (29): Xaa is A or G or is absent
SSVKXQPSRVHHEPLTVLYYXXXXXXXXXEQLSNRLEEHLE

SEQ ID NO: 53718 - protein, 41 aa, Artificial Sequence; identical to SEQ ID NO: 20116
  GFR-binding peptide
  MOD_RES (4), (41): Xaa is C or S

SEQ ID NO: 53719 - protein, 39 aa, Artificial Sequence
  GFR-binding peptide
  MOD_RES (5), (6): Xaa is C or S
  MOD_RES (20), (21), (22), (23), (24): Xaa is A or G
  MOD_RES (25), (26), (27), (28): Xaa is A or G or is absent
VPKPXXAPTKLSNITVQIMXXXXXXXXXIGEMSNMVVRS

SEQ ID NO: 53720 - protein, 35 aa, Artificial Sequence
  GFR-binding peptide
  MOD_RES (4), (5): Xaa is C or S
ASPXXVPQDLSNITIQIMVGRTPKVIGEMSMVVKS

SEQ ID NO: 53721 - protein, 41 aa, Artificial Sequence
  GFR-binding peptide
  MOD_RES (6), (7), (40): Xaa is C or S
  MOD_RES (21), (22), (23), (24), (25): Xaa is A or G
  MOD_RES (26), (27), (28), (29): Xaa is A or G or is absent
ASAAPXXVPQALRPVQIRKIXXXXXXXXXKKATVMIVRSXK

SEQ ID NO: 53722 - protein, 36 aa, Artificial Sequence; identical to SEQ ID NO: 15231
  GFR-binding peptide
  MOD_RES (1), (2), (34), (36): Xaa is C or S

SEQ ID NO: 53723 - protein, 34 aa, Artificial Sequence; identical to SEQ ID NO: 15232
  GFR-binding peptide
  MOD_RES (1), (33): Xaa is C or S

SEQ ID NO: 53724 - protein, 32 aa, Artificial Sequence; identical to SEQ ID NO: 20121
  GFR-binding peptide
  MOD_RES (14), (15), (16), (17), (18): Xaa is A or G
  MOD_RES (19), (20), (21), (22): Xaa is A or G or is absent

SEQ ID NO: 53725 - protein, 31 aa, Artificial Sequence
  GFR-binding peptide
  MOD_RES (1), (1): Xaa is C or S
XVSQDLRSVKIAKVIGKTPKIKEVQVMIVKS

SEQ ID NO: 53726 - protein, 35 aa, Artificial Sequence; identical to SEQ ID NO: 15233
  GFR-binding peptide
  MOD_RES (1), (2): Xaa is C or S
  MOD_RES (16), (17), (18), (19), (20): Xaa is A or G
  MOD_RES (21), (22), (23), (24): Xaa is A or G or is absent

SEQ ID NO: 53727 - protein, 34 aa, Artificial Sequence; identical to SEQ ID NO: 20125
  GFR-binding peptide
  MOD_RES (34), (34): Xaa is C or S
  MOD_RES (14), (15), (16), (17), (18): Xaa is A or G
  MOD_RES (19), (20), (21), (22): Xaa is A or G or is absent

SEQ ID NO: 53728 - protein, 37 aa, Artificial Sequence; identical to SEQ ID NO: 15234
  GFR-binding peptide
  MOD_RES (1), (34), (36): Xaa is C or S
  MOD_RES (15), (16), (17), (18), (19): Xaa is A or G
  MOD_RES (20), (21), (22), (23): Xaa is A or G or is absent

SEQ ID NO: 53729 - protein, 35 aa, Artificial Sequence; identical to SEQ ID NO: 15235
  GFR-binding peptide
  MOD_RES (1), (35): Xaa is C or S
  MOD_RES (15), (16), (17), (18), (19): Xaa is A or G
  MOD_RES (20), (21), (22), (23): Xaa is A or G or is absent

SEQ ID NO: 53730 - protein, 34 aa, Artificial Sequence
  GFR-binding peptide
  MOD_RES (1), (2), (34): Xaa is C or S
XXAPTQLSNITVQIMDDSSNVIIGEMSNMVVRAX

SEQ ID NO: 53731 - protein, 38 aa, Artificial Sequence; identical to SEQ ID NO: 20129
  GFR-binding peptide
  MOD_RES (2), (36), (38): Xaa is C or S
  MOD_RES (16), (17), (18), (19), (20): Xaa is A or G
  MOD_RES (21), (22), (23), (24): Xaa is A or G or is absent

SEQ ID NO: 53732 - protein, 39 aa, Artificial Sequence; identical to SEQ ID NO: 15239
  GFR-binding peptide
  MOD_RES (6), (7): Xaa is C or S
  MOD_RES (21), (22), (23), (24), (25): Xaa is A or G
  MOD_RES (26), (27), (28), (29): Xaa is A or G or is absent

SEQ ID NO: 53733 - protein, 35 aa, Artificial Sequence
  GFR-binding peptide
  MOD_RES (2), (34): Xaa is C or S
TXAPTKLRSVKVAKVDDSSNVIKEVQVNMVVRSXG

SEQ ID NO: 53734 - protein, 39 aa, Artificial Sequence; identical to SEQ ID NO: 15240
  GFR-binding peptide
  MOD_RES (6), (7): Xaa is C or S
  MOD_RES (21), (22), (23), (24), (25): Xaa is A or G
  MOD_RES (26), (27), (28), (29): Xaa is A or G or is absent

SEQ ID NO: 53735 - protein, 39 aa, Artificial Sequence
  GFR-binding peptide
  MOD_RES (4), (5), (37), (39): Xaa is C or S
PKAXXVPTELRSVKMAKVDEYDKVVKEVQVEMVVEGXGX

SEQ ID NO: 53736 - protein, 38 aa, Artificial Sequence
  GFR-binding peptide
  MOD_RES (3), (3): Xaa is C or S
VKXQPSRVHHEPLPVVYYEYVRKKPKLEQLSNRLEEHL

SEQ ID NO: 53737 - protein, 36 aa, Artificial Sequence; identical to SEQ ID NO: 20132
  GFR-binding peptide
  MOD_RES (1), (1): Xaa is C or S
  MOD_RES (17), (18), (19), (20), (21): Xaa is A or G
  MOD_RES (22), (23), (24), (25): Xaa is A or G or is absent

SEQ ID NO: 53738 - protein, 31 aa, Artificial Sequence
  GFR-binding peptide
VPTELRPVQMRKIDENEKVVKKATVDMVVEG

SEQ ID NO: 53739 - protein, 42 aa, Artificial Sequence; identical to SEQ ID NO: 20133
  GFR-binding peptide
  MOD_RES (2), (39), (41): Xaa is C or S

SEQ ID NO: 53740 - protein, 38 aa, Artificial Sequence; identical to SEQ ID NO: 15245
  GFR-binding peptide
  MOD_RES (3), (4), (37): Xaa is C or S
  MOD_RES (18), (19), (20), (21), (22): Xaa is A or G
  MOD_RES (23), (24), (25), (26): Xaa is A or G or is absent

SEQ ID NO: 53741 - protein, 34 aa, Artificial Sequence; identical to SEQ ID NO: 20135
  GFR-binding peptide
  MOD_RES (16), (17), (18), (19), (20): Xaa is A or G
  MOD_RES (21), (22), (23), (24): Xaa is A or G or is absent

SEQ ID NO: 53742 - protein, 34 aa, Artificial Sequence; identical to SEQ ID NO: 20136
  GFR-binding peptide
  MOD_RES (34), (34): Xaa is C or S

SEQ ID NO: 53743 - protein, 34 aa, Artificial Sequence
  GFR-binding peptide
  MOD_RES (1), (34): Xaa is C or S
  MOD_RES (15), (16), (17), (18), (19): Xaa is A or G
  MOD_RES (20), (21), (22), (23): Xaa is A or G or is absent
XVSQDLRSVKIAKVXXXXXXXXXKEVQVMIVKSX

SEQ ID NO: 53744 - protein, 36 aa, Artificial Sequence; identical to SEQ ID NO: 15249
  GFR-binding peptide
  MOD_RES (2), (3), (36): Xaa is C or S
  MOD_RES (17), (18), (19), (20), (21): Xaa is A or G
  MOD_RES (22), (23), (24), (25): Xaa is A or G or is absent

SEQ ID NO: 53745 - protein, 37 aa, Artificial Sequence
  GFR-binding peptide
  MOD_RES (3), (4), (36): Xaa is C or S
KAXXVPTELRPVQMRKIDENEKVVKKATVDMVVEGXG

SEQ ID NO: 53746 - protein, 41 aa, Artificial Sequence
  GFR-binding peptide
  MOD_RES (6), (38), (40): Xaa is C or S
VTKPTXAPTKLSNITVQIMDDSSNVIIGEMSNMVVRSXGXH

SEQ ID NO: 53747 - protein, 36 aa, Artificial Sequence; identical to SEQ ID NO: 15250
  GFR-binding peptide
  MOD_RES (1), (34), (36): Xaa is C or S
  MOD_RES (15), (16), (17), (18), (19): Xaa is A or G
  MOD_RES (20), (21), (22), (23): Xaa is A or G or is absent

SEQ ID NO: 53748 - protein, 39 aa, Artificial Sequence
  GFR-binding peptide
  MOD_RES (6), (38): Xaa is C or S
VTKPTXAPTKLRPVQVRKIDDSSNVIKKATVNMVVRSXG

SEQ ID NO: 53749 - protein, 35 aa, Artificial Sequence
  GFR-binding peptide
  MOD_RES (32), (34): Xaa is C or S
VPTELSNITMQIMDENEKVVIGEMSDMVVEGXGXR

SEQ ID NO: 53750 - protein, 37 aa, Artificial Sequence; identical to SEQ ID NO: 15252
  GFR-binding peptide
  MOD_RES (2), (3), (36): Xaa is C or S
  MOD_RES (17), (18), (19), (20), (21): Xaa is A or G
  MOD_RES (22), (23), (24), (25): Xaa is A or G or is absent

SEQ ID NO: 53751 - protein, 40 aa, Artificial Sequence; identical to SEQ ID NO: 20141
  GFR-binding peptide
  MOD_RES (3), (40): Xaa is C or S
  MOD_RES (19), (20), (21), (22), (23): Xaa is A or G
  MOD_RES (24), (25), (26), (27): Xaa is A or G or is absent

SEQ ID NO: 53752 - protein, 38 aa, Artificial Sequence
  GFR-binding peptide
  MOD_RES (2), (3), (35), (37): Xaa is C or S
AXXVPTELRPVQMRKIDEYDKVVKKATVEMVVEGXGXR

SEQ ID NO: 53753 - protein, 36 aa, Artificial Sequence
  GFR-binding peptide
  MOD_RES (4), (36): Xaa is C or S
KPTXAPTKLSNITVQIMDDSSNVIIGEMSNMVVRSX

SEQ ID NO: 53754 - protein, 34 aa, Artificial Sequence
  GFR-binding peptide
  MOD_RES (31), (33): Xaa is C or S
VPQDLRSVKIAKVVGRTPKVKEVQVMVVKSXKXS

SEQ ID NO: 53755 - protein, 35 aa, Artificial Sequence; identical to SEQ ID NO: 15258
  GFR-binding peptide
  MOD_RES (2), (34): Xaa is C or S

SEQ ID NO: 53756 - protein, 41 aa, Artificial Sequence
  GFR-binding peptide
  MOD_RES (3), (4), (38), (40): Xaa is C or S
  MOD_RES (18), (19), (20), (21), (22): Xaa is A or G
  MOD_RES (23), (24), (25), (26): Xaa is A or G or is absent
KAXXVPTELSNITMQIMXXXXXXXXXIGEMSEMVVEGXGXR

SEQ ID NO: 53757 - protein, 42 aa, Artificial Sequence; identical to SEQ ID NO: 18703
  GFR-binding peptide
  MOD_RES (7), (41): Xaa is C or S
  MOD_RES (21), (22), (23), (24), (25): Xaa is A or G
  MOD_RES (26), (27), (28), (29): Xaa is A or G or is absent

SEQ ID NO: 53758 - protein, 37 aa, Artificial Sequence
  GFR-binding peptide
  MOD_RES (34), (36): Xaa is C or S
  MOD_RES (14), (15), (16), (17), (18): Xaa is A or G
  MOD_RES (19), (20), (21), (22): Xaa is A or G or is absent
VPTELRSVKMAKVXXXXXXXXXKEVQVEMVVEGXGXR

SEQ ID NO: 53759 - protein, 39 aa, Artificial Sequence
  GFR-binding peptide
  MOD_RES (6), (7), (38): Xaa is C or S
ASASPXXVSQDLRPVQIRKIIGKTPKIKKATVMIVKSXK

SEQ ID NO: 53760 - protein, 37 aa, Artificial Sequence
  GFR-binding peptide
  MOD_RES (6), (7): Xaa is C or S
ASASPXXVSQDLSNITIQIMIGKTPKIIGEMSMIVKS

SEQ ID NO: 53761 - protein, 42 aa, Artificial Sequence; identical to SEQ ID NO: 15263
  GFR-binding peptide
  MOD_RES (6), (7), (41): Xaa is C or S
  MOD_RES (21), (22), (23), (24), (25): Xaa is A or G
  MOD_RES (26), (27), (28), (29): Xaa is A or G or is absent

SEQ ID NO: 53762 - protein, 37 aa, Artificial Sequence
  GFR-binding peptide
  MOD_RES (34), (36): Xaa is C or S
  MOD_RES (14), (15), (16), (17), (18): Xaa is A or G
  MOD_RES (19), (20), (21), (22): Xaa is A or G or is absent
VPTELSNITMQIMXXXXXXXXXIGEMSDMVVEGXGXR

SEQ ID NO: 53763 - protein, 38 aa, Artificial Sequence
  GFR-binding peptide
  MOD_RES (5), (6): Xaa is C or S
  MOD_RES (20), (21), (22), (23), (24): Xaa is A or G
  MOD_RES (25), (26), (27), (28): Xaa is A or G or is absent
SASPXXVSQDLSNITIQIMXXXXXXXXXIGEMSMIVKS

SEQ ID NO: 53764 - protein, 35 aa, Artificial Sequence; identical to SEQ ID NO: 15268
  GFR-binding peptide
  MOD_RES (34), (34): Xaa is C or S
  MOD_RES (14), (15), (16), (17), (18): Xaa is A or G
  MOD_RES (19), (20), (21), (22): Xaa is A or G or is absent

SEQ ID NO: 53765 - protein, 32 aa, Artificial Sequence
  GFR-binding peptide
  MOD_RES (14), (15), (16), (17), (18): Xaa is A or G
  MOD_RES (19), (20), (21), (22): Xaa is A or G or is absent
VPQDLRSVKIAKVXXXXXXXXXKEVQVMVVKS

SEQ ID NO: 53766 - protein, 35 aa, Artificial Sequence; identical to SEQ ID NO: 15270
  GFR-binding peptide
  MOD_RES (33), (35): Xaa is C or S
  MOD_RES (14), (15), (16), (17), (18): Xaa is A or G
  MOD_RES (19), (20), (21), (22): Xaa is A or G or is absent

SEQ ID NO: 53767 - protein, 34 aa, Artificial Sequence; identical to SEQ ID NO: 38513
  GFR-binding peptide
  MOD_RES (1), (34): Xaa is C or S
  MOD_RES (15), (16), (17), (18), (19): Xaa is A or G
  MOD_RES (20), (21), (22), (23): Xaa is A or G or is absent

SEQ ID NO: 53768 - protein, 36 aa, Artificial Sequence
  GFR-binding peptide
  MOD_RES (3), (4): Xaa is C or S
  MOD_RES (18), (19), (20), (21), (22): Xaa is A or G
  MOD_RES (23), (24), (25), (26): Xaa is A or G or is absent
KAXXVPTELRPVQMRKIXXXXXXXXXKKATVDMVVE

SEQ ID NO: 53769 - protein, 37 aa, Artificial Sequence
  GFR-binding peptide
  MOD_RES (1), (35), (37): Xaa is C or S
XVPTEEEPLPMVYYRIKPHQGQHEQLSNFLQHNKXEX

SEQ ID NO: 53770 - protein, 35 aa, Artificial Sequence
  GFR-binding peptide
  MOD_RES (35), (35): Xaa is C or S
  MOD_RES (14), (15), (16), (17), (18): Xaa is A or G
  MOD_RES (19), (20), (21), (22): Xaa is A or G or is absent
TQVQLEPLTVLYYXXXXXXXXXEQLSNTLEDHLAX

SEQ ID NO: 53771 - protein, 42 aa, Artificial Sequence; identical to SEQ ID NO: 18709
  GFR-binding peptide
  MOD_RES (2), (39), (41): Xaa is C or S
  MOD_RES (18), (19), (20), (21), (22): Xaa is A or G
  MOD_RES (23), (24), (25), (26): Xaa is A or G or is absent

SEQ ID NO: 53772 - protein, 36 aa, Artificial Sequence; identical to SEQ ID NO: 15273
  GFR-binding peptide
  MOD_RES (6), (6): Xaa is C or S

SEQ ID NO: 53773 - protein, 41 aa, Artificial Sequence
  GFR-binding peptide
  MOD_RES (7), (39), (41): Xaa is C or S
HVTKPTXAPTKLRPVQVRKIDDSSNVIKKATVNMVVRSXGX

SEQ ID NO: 53774 - protein, 35 aa, Artificial Sequence; identical to SEQ ID NO: 15274
  GFR-binding peptide
  MOD_RES (1), (34): Xaa is C or S
  MOD_RES (15), (16), (17), (18), (19): Xaa is A or G
  MOD_RES (20), (21), (22), (23): Xaa is A or G or is absent

SEQ ID NO: 53775 - protein, 36 aa, Artificial Sequence
  GFR-binding peptide
  MOD_RES (5), (6): Xaa is C or S
VPKPXXAPTKLRPVQVRKIDDSSNVIKKATVNMVVR

SEQ ID NO: 53776 - protein, 41 aa, Artificial Sequence; identical to SEQ ID NO: 18711
  GFR-binding peptide
  MOD_RES (2), (39), (41): Xaa is C or S
  MOD_RES (18), (19), (20), (21), (22): Xaa is A or G
  MOD_RES (23), (24), (25), (26): Xaa is A or G or is absent

SEQ ID NO: 53777 - protein, 37 aa, Artificial Sequence
  GFR-binding peptide
  MOD_RES (2), (3), (37): Xaa is C or S
  MOD_RES (17), (18), (19), (20), (21): Xaa is A or G
  MOD_RES (22), (23), (24), (25): Xaa is A or G or is absent
PXXAPTQLRPVQVRKIXXXXXXXXXKKATVNMVVRAX

SEQ ID NO: 53778 - protein, 40 aa, Artificial Sequence
  GFR-binding peptide
  MOD_RES (5), (5): Xaa is C or S
RNVQXRPTQVQLEPLTVLYYEIVRKKPIFEQLSNTLEDHL

SEQ ID NO: 53779 - protein, 39 aa, Artificial Sequence
  GFR-binding peptide
  MOD_RES (4), (5), (39): Xaa is C or S
  MOD_RES (19), (20), (21), (22), (23): Xaa is A or G
  MOD_RES (24), (25), (26), (27): Xaa is A or G or is absent
PKAXXVPTELRSVKMAKVXXXXXXXXXKEVQVEMVVEGX

SEQ ID NO: 53780 - protein, 40 aa, Artificial Sequence
  GFR-binding peptide
  MOD_RES (3), (37), (39): Xaa is C or S
  MOD_RES (17), (18), (19), (20), (21): Xaa is A or G
  MOD_RES (22), (23), (24), (25): Xaa is A or G or is absent
PTXAPTKLRPVQVRKIXXXXXXXXXKKATVNMVVRSXGXH

SEQ ID NO: 53781 - protein, 32 aa, Artificial Sequence
  GFR-binding peptide
  MOD_RES (14), (15), (16), (17), (18): Xaa is A or G
  MOD_RES (19), (20), (21), (22): Xaa is A or G or is absent
SRVHHEPLTVLYYXXXXXXXXXEQLSNRLEEH

SEQ ID NO: 53782 - protein, 34 aa, Artificial Sequence; identical to SEQ ID NO: 15279
  GFR-binding peptide
  MOD_RES (2), (3): Xaa is C or S

SEQ ID NO: 53783 - protein, 37 aa, Artificial Sequence
  GFR-binding peptide
  MOD_RES (35), (37): Xaa is C or S
SRVHHEPLTVLYYEYVRKKPKLEQLSNRLEEHLEXAX

SEQ ID NO: 53784 - protein, 34 aa, Artificial Sequence; identical to SEQ ID NO: 15281
  GFR-binding peptide
  MOD_RES (2), (3), (34): Xaa is C or S

SEQ ID NO: 53785 - protein, 32 aa, Artificial Sequence
  GFR-binding peptide
  MOD_RES (1), (32): Xaa is C or S
XVSQDLSNITIQIMIGKTPKIIGEMSMIVKSX

SEQ ID NO: 53786 - protein, 34 aa, Artificial Sequence
  GFR-binding peptide
  MOD_RES (2), (3): Xaa is C or S
PXXAPTKLSNITVQIMDDSSNVIIGEMSNMVVRS

SEQ ID NO: 53787 - protein, 32 aa, Artificial Sequence
  GFR-binding peptide
  MOD_RES (32), (32): Xaa is C or S
VPTELRPVQMRKIDENEKVVKKATVDMVVEGX

SEQ ID NO: 53788 - protein, 37 aa, Artificial Sequence
  GFR-binding peptide
  MOD_RES (2), (36): Xaa is C or S
  MOD_RES (16), (17), (18), (19), (20): Xaa is A or G
  MOD_RES (21), (22), (23), (24): Xaa is A or G or is absent
TXAPTKLSNITVQIMXXXXXXXXXIGEMSNMVVRSXG

SEQ ID NO: 53789 - protein, 32 aa, Artificial Sequence
  GFR-binding peptide
  MOD_RES (1), (1): Xaa is C or S
XVPTELRPVQMRKIDENEKVVKKATVDMVVEG

SEQ ID NO: 53790 - protein, 36 aa, Artificial Sequence
  GFR-binding peptide
  MOD_RES (1), (1): Xaa is C or S
  MOD_RES (17), (18), (19), (20), (21): Xaa is A or G
  MOD_RES (22), (23), (24), (25): Xaa is A or G or is absent
XRPTQVQLEPLPVVYYXXXXXXXXXEQLSNTLEDHL

SEQ ID NO: 53791 - protein, 40 aa, Artificial Sequence
  GFR-binding peptide
  MOD_RES (3), (40): Xaa is C or S
  MOD_RES (19), (20), (21), (22), (23): Xaa is A or G
  MOD_RES (24), (25), (26), (27): Xaa is A or G or is absent
VQXRPTQVQLEPLTVLYYXXXXXXXXXEQLSNTLEDHLAX

SEQ ID NO: 53792 - protein, 34 aa, Artificial Sequence
  GFR-binding peptide
  MOD_RES (1), (1): Xaa is C or S
  MOD_RES (15), (16), (17), (18), (19): Xaa is A or G
  MOD_RES (20), (21), (22), (23): Xaa is A or G or is absent
XVPTELRSVKMAKVXXXXXXXXXKEVQVDMVVEG

SEQ ID NO: 53793 - protein, 34 aa, Artificial Sequence
  GFR-binding peptide
  MOD_RES (2), (3): Xaa is C or S
PXXAPTQLRPVQVRKIDDSSNVIKKATVNMVVRA

SEQ ID NO: 53794 - protein, 38 aa, Artificial Sequence; identical to SEQ ID NO: 18720
  GFR-binding peptide
  MOD_RES (2), (2): Xaa is C or S
  MOD_RES (18), (19), (20), (21), (22): Xaa is A or G
  MOD_RES (23), (24), (25), (26): Xaa is A or G or is absent

SEQ ID NO: 53795 - protein, 37 aa, Artificial Sequence
  GFR-binding peptide
  MOD_RES (34), (36): Xaa is C or S
  MOD_RES (14), (15), (16), (17), (18): Xaa is A or G
  MOD_RES (19), (20), (21), (22): Xaa is A or G or is absent
VPTELRPVQMRKIXXXXXXXXXKKATVEMVVEGXGXR

SEQ ID NO: 53796 - protein, 40 aa, Artificial Sequence
  GFR-binding peptide
  MOD_RES (3), (4), (37), (39): Xaa is C or S
  MOD_RES (18), (19), (20), (21), (22): Xaa is A or G
  MOD_RES (23), (24), (25), (26): Xaa is A or G or is absent
APXXVPQALRSVKIAKVXXXXXXXXXKEVQVMIVRSXKXS

SEQ ID NO: 53797 - protein, 36 aa, Artificial Sequence; identical to SEQ ID NO: 18723
  GFR-binding peptide
  MOD_RES (1), (35): Xaa is C or S
  MOD_RES (15), (16), (17), (18), (19): Xaa is A or G
  MOD_RES (20), (21), (22), (23): Xaa is A or G or is absent

SEQ ID NO: 53798 - protein, 40 aa, Artificial Sequence; identical to SEQ ID NO: 15283
  GFR-binding peptide
  MOD_RES (5), (6), (40): Xaa is C or S
  MOD_RES (20), (21), (22), (23), (24): Xaa is A or G
  MOD_RES (25), (26), (27), (28): Xaa is A or G or is absent

SEQ ID NO: 53799 - protein, 35 aa, Artificial Sequence
  GFR-binding peptide
  MOD_RES (1), (32), (34): Xaa is C or S
XVPQDLRPVQIRKIVGRTPKVKKATVMVVKSXKXS

SEQ ID NO: 53800 - protein, 38 aa, Artificial Sequence; identical to SEQ ID NO: 18726
  GFR-binding peptide
  MOD_RES (4), (38): Xaa is C or S
  MOD_RES (18), (19), (20), (21), (22): Xaa is A or G
  MOD_RES (23), (24), (25), (26): Xaa is A or G or is absent

SEQ ID NO: 53801 - protein, 38 aa, Artificial Sequence; identical to SEQ ID NO: 15286
  GFR-binding peptide
  MOD_RES (4), (5), (37): Xaa is C or S

SEQ ID NO: 53802 - protein, 36 aa, Artificial Sequence; identical to SEQ ID NO: 18727
  GFR-binding peptide
  MOD_RES (34), (36): Xaa is C or S

SEQ ID NO: 53803 - protein, 38 aa, Artificial Sequence; identical to SEQ ID NO: 15289
  GFR-binding peptide
  MOD_RES (3), (4), (38): Xaa is C or S
  MOD_RES (18), (19), (20), (21), (22): Xaa is A or G
  MOD_RES (23), (24), (25), (26): Xaa is A or G or is absent

SEQ ID NO: 53804 - protein, 34 aa, Artificial Sequence
  GFR-binding peptide
  MOD_RES (1), (2), (34): Xaa is C or S
XXVPTELRPVQMRKIDEYDKVVKKATVEMVVEGX

SEQ ID NO: 53805 - protein, 39 aa, Artificial Sequence
  GFR-binding peptide
  MOD_RES (6), (6): Xaa is C or S
  MOD_RES (20), (21), (22), (23), (24): Xaa is A or G
  MOD_RES (25), (26), (27), (28): Xaa is A or G or is absent
VTKPTXAPTKLRPVQVRKIXXXXXXXXXKKATVNMVVRS

SEQ ID NO: 53806 - protein, 40 aa, Artificial Sequence
  GFR-binding peptide
  MOD_RES (1), (38), (40): Xaa is C or S
  MOD_RES (17), (18), (19), (20), (21): Xaa is A or G
  MOD_RES (22), (23), (24), (25): Xaa is A or G or is absent
XRPTQVQLEPLTVLYYXXXXXXXXXEQLSNTLEDHLAXKX

SEQ ID NO: 53807 - protein, 37 aa, Artificial Sequence; identical to SEQ ID NO: 15292
  GFR-binding peptide
  MOD_RES (6), (6): Xaa is C or S

SEQ ID NO: 53808 - protein, 36 aa, Artificial Sequence
  GFR-binding peptide
  MOD_RES (2), (2): Xaa is C or S
QXRPTQVQLEPLPVVYYEIVRKKPIFEQLSNTLEDH

SEQ ID NO: 53809 - protein, 40 aa, Artificial Sequence; identical to SEQ ID NO: 18731
  GFR-binding peptide
  MOD_RES (37), (39): Xaa is C or S
  MOD_RES (16), (17), (18), (19), (20): Xaa is A or G
  MOD_RES (21), (22), (23), (24): Xaa is A or G or is absent

SEQ ID NO: 53810 - protein, 40 aa, Artificial Sequence
  GFR-binding peptide
  MOD_RES (3), (37), (39): Xaa is C or S
  MOD_RES (17), (18), (19), (20), (21): Xaa is A or G
  MOD_RES (22), (23), (24), (25): Xaa is A or G or is absent
PTXAPTKLRSVKVAKVXXXXXXXXXKEVQVNMVVRSXGXH

SEQ ID NO: 53811 - protein, 37 aa, Artificial Sequence; identical to SEQ ID NO: 18732
  GFR-binding peptide
  MOD_RES (1), (1): Xaa is C or S

SEQ ID NO: 53812 - protein, 42 aa, Artificial Sequence; identical to SEQ ID NO: 18733
  GFR-binding peptide
  MOD_RES (5), (42): Xaa is C or S
  MOD_RES (21), (22), (23), (24), (25): Xaa is A or G
  MOD_RES (26), (27), (28), (29): Xaa is A or G or is absent

SEQ ID NO: 53813 - protein, 36 aa, Artificial Sequence; identical to SEQ ID NO: 18734
  GFR-binding peptide
  MOD_RES (35), (35): Xaa is C or S
  MOD_RES (14), (15), (16), (17), (18): Xaa is A or G
  MOD_RES (19), (20), (21), (22): Xaa is A or G or is absent

SEQ ID NO: 53814 - protein, 36 aa, Artificial Sequence; identical to SEQ ID NO: 18735
  GFR-binding peptide
  MOD_RES (1), (1): Xaa is C or S

SEQ ID NO: 53815 - protein, 38 aa, Artificial Sequence
  GFR-binding peptide
  MOD_RES (1), (2), (36), (38): Xaa is C or S
  MOD_RES (16), (17), (18), (19), (20): Xaa is A or G
  MOD_RES (21), (22), (23), (24): Xaa is A or G or is absent
XXAPTKLRSVKVAKVXXXXXXXXXKEVQVNMVVRSXGX

SEQ ID NO: 53816 - protein, 35 aa, Artificial Sequence; identical to SEQ ID NO: 15296
  GFR-binding peptide
  MOD_RES (2), (3), (35): Xaa is C or S

SEQ ID NO: 53817 - protein, 36 aa, Artificial Sequence
  GFR-binding peptide
  MOD_RES (3), (4), (36): Xaa is C or S
KAXXVPTELSNITMQIMDEYDKVVIGEMSEMVVEGX

SEQ ID NO: 53818 - protein, 45 aa, Artificial Sequence; identical to SEQ ID NO: 18736
  GFR-binding peptide
  MOD_RES (5), (42), (44): Xaa is C or S

SEQ ID NO: 53819 - protein, 34 aa, Artificial Sequence; identical to SEQ ID NO: 18737
  GFR-binding peptide

SEQ ID NO: 53820 - protein, 39 aa, Artificial Sequence
  GFR-binding peptide
  MOD_RES (4), (5), (36), (38): Xaa is C or S
ASPXXVSQDLSNITIQIMIGKTPKIIGEMSMIVKSXKXS

SEQ ID NO: 53821 - protein, 40 aa, Artificial Sequence; identical to SEQ ID NO: 15301
  GFR-binding peptide
  MOD_RES (4), (5), (37), (39): Xaa is C or S

SEQ ID NO: 53822 - protein, 37 aa, Artificial Sequence; identical to SEQ ID NO: 15302
  GFR-binding peptide
  MOD_RES (3), (4), (37): Xaa is C or S
  MOD_RES (18), (19), (20), (21), (22): Xaa is A or G
  MOD_RES (23), (24), (25), (26): Xaa is A or G or is absent

SEQ ID NO: 53823 - protein, 37 aa, Artificial Sequence
  GFR-binding peptide
  MOD_RES (35), (37): Xaa is C or S
TQVQLEPLTVLYYEIVRKKPIFEQLSNTLEDHLAXKX

SEQ ID NO: 53824 - protein, 34 aa, Artificial Sequence
  GFR-binding peptide
  MOD_RES (1), (34): Xaa is C or S
  MOD_RES (15), (16), (17), (18), (19): Xaa is A or G
  MOD_RES (20), (21), (22), (23): Xaa is A or G or is absent
XVSQDLSNITIQIMXXXXXXXXXIGEMSMIVKSX

SEQ ID NO: 53825 - protein, 37 aa, Artificial Sequence; identical to SEQ ID NO: 18740
  GFR-binding peptide
  MOD_RES (37), (37): Xaa is C or S
  MOD_RES (16), (17), (18), (19), (20): Xaa is A or G
  MOD_RES (21), (22), (23), (24): Xaa is A or G or is absent

SEQ ID NO: 53826 - protein, 37 aa, Artificial Sequence
  GFR-binding peptide
  MOD_RES (1), (2), (35), (37): Xaa is C or S
  MOD_RES (16), (17), (18), (19), (20): Xaa is A or G
  MOD_RES (21), (22), (23), (24): Xaa is A or G or is absent
XXVPQALRSVKIAKVXXXXXXXXXKEVQVMIVRSXKX

SEQ ID NO: 53827 - protein, 36 aa, Artificial Sequence; identical to SEQ ID NO: 15304
  GFR-binding peptide
  MOD_RES (1), (2), (35): Xaa is C or S
  MOD_RES (16), (17), (18), (19), (20): Xaa is A or G
  MOD_RES (21), (22), (23), (24): Xaa is A or G or is absent

SEQ ID NO: 53828 - protein, 33 aa, Artificial Sequence
  GFR-binding peptide
  MOD_RES (33), (33): Xaa is C or S
  MOD_RES (14), (15), (16), (17), (18): Xaa is A or G
  MOD_RES (19), (20), (21), (22): Xaa is A or G or is absent
VPQDLSNITIQIMXXXXXXXXXIGEMSMVVKSX

SEQ ID NO: 53829 - protein, 44 aa, Artificial Sequence; identical to SEQ ID NO: 18743
  GFR-binding peptide
  MOD_RES (4), (41), (43): Xaa is C or S

SEQ ID NO: 53830 - protein, 42 aa, Artificial Sequence
  GFR-binding peptide
  MOD_RES (6), (7), (41): Xaa is C or S
  MOD_RES (21), (22), (23), (24), (25): Xaa is A or G
  MOD_RES (26), (27), (28), (29): Xaa is A or G or is absent
SIPKAXXVPTELRSVKMAKVXXXXXXXXXKEVQVEMVVEGXG

SEQ ID NO: 53831 - protein, 40 aa, Artificial Sequence
  GFR-binding peptide
  MOD_RES (5), (6), (39): Xaa is C or S
  MOD_RES (20), (21), (22), (23), (24): Xaa is A or G
  MOD_RES (25), (26), (27), (28): Xaa is A or G or is absent
SAAPXXVPQALSNITIQIMXXXXXXXXXIGEMSMIVRSXK

SEQ ID NO: 53832 - protein, 38 aa, Artificial Sequence; identical to SEQ ID NO: 15306
  GFR-binding peptide
  MOD_RES (4), (5), (37): Xaa is C or S

SEQ ID NO: 53833 - protein, 39 aa, Artificial Sequence; identical to SEQ ID NO: 15307
  GFR-binding peptide
  MOD_RES (6), (7), (38): Xaa is C or S

SEQ ID NO: 53834 - protein, 36 aa, Artificial Sequence
  GFR-binding peptide
  MOD_RES (3), (4), (35): Xaa is C or S
SPXXVSQDLRPVQIRKIIGKTPKIKKATVMIVKSXK

SEQ ID NO: 53835 - protein, 41 aa, Artificial Sequence; identical to SEQ ID NO: 15308
  GFR-binding peptide
  MOD_RES (3), (4), (38), (40): Xaa is C or S
  MOD_RES (18), (19), (20), (21), (22): Xaa is A or G
  MOD_RES (23), (24), (25), (26): Xaa is A or G or is absent

SEQ ID NO: 53836 - protein, 44 aa, Artificial Sequence
  GFR-binding peptide
  MOD_RES (5), (42), (44): Xaa is C or S
  MOD_RES (21), (22), (23), (24), (25): Xaa is A or G
  MOD_RES (26), (27), (28), (29): Xaa is A or G or is absent
SSVKXQPSRVHHEPLPVVYYXXXXXXXXXEQLSNRLEEHLEXAX

SEQ ID NO: 53837 - protein, 35 aa, Artificial Sequence
  GFR-binding peptide
  MOD_RES (1), (33), (35): Xaa is C or S
XAPTKLRSVKVAKVDDSSNVIKEVQVNMVVRSXGX

SEQ ID NO: 53838 - protein, 36 aa, Artificial Sequence; identical to SEQ ID NO: 15311
  GFR-binding peptide
  MOD_RES (3), (4), (35): Xaa is C or S

SEQ ID NO: 53839 - protein, 36 aa, Artificial Sequence; identical to SEQ ID NO: 15312
  GFR-binding peptide
  MOD_RES (3), (4), (36): Xaa is C or S

SEQ ID NO: 53840 - protein, 37 aa, Artificial Sequence
  GFR-binding peptide
  MOD_RES (1), (2), (36): Xaa is C or S
  MOD_RES (16), (17), (18), (19), (20): Xaa is A or G
  MOD_RES (21), (22), (23), (24): Xaa is A or G or is absent
XXAPTKLRPVQVRKIXXXXXXXXXKKATVNMVVRSXG

SEQ ID NO: 53841 - protein, 38 aa, Artificial Sequence
  GFR-binding peptide
  MOD_RES (4), (5), (37): Xaa is C or S
PKPXXAPTQLRSVKVAKVDDSSNVIKEVQVNMVVRAXG

SEQ ID NO: 53842 - protein, 42 aa, Artificial Sequence; identical to SEQ ID NO: 18748
  GFR-binding peptide
  MOD_RES (4), (41): Xaa is C or S
  MOD_RES (20), (21), (22), (23), (24): Xaa is A or G
  MOD_RES (25), (26), (27), (28): Xaa is A or G or is absent

SEQ ID NO: 53843 - protein, 37 aa, Artificial Sequence
  GFR-binding peptide
  MOD_RES (1), (35), (37): Xaa is C or S
  MOD_RES (15), (16), (17), (18), (19): Xaa is A or G
  MOD_RES (20), (21), (22), (23): Xaa is A or G or is absent
XVPTEEEPLTMLYYXXXXXXXXXEQLSNFLQHNKXEX

SEQ ID NO: 53844 - protein, 40 aa, Artificial Sequence
  GFR-binding peptide
  MOD_RES (6), (7), (39): Xaa is C or S
SIPKAXXVPTELSNITMQIMDEYDKVVIGEMSEMVVEGXG

SEQ ID NO: 53845 - protein, 40 aa, Artificial Sequence; identical to SEQ ID NO: 15319
  GFR-binding peptide
  MOD_RES (4), (5), (37), (39): Xaa is C or S

SEQ ID NO: 53846 - protein, 37 aa, Artificial Sequence
  GFR-binding peptide
  MOD_RES (5), (6): Xaa is C or S
IPKAXXVPTELRPVQMRKIDENEKVVKKATVDMVVEG

SEQ ID NO: 53847 - protein, 36 aa, Artificial Sequence
  GFR-binding peptide
  MOD_RES (33), (35): Xaa is C or S
  MOD_RES (14), (15), (16), (17), (18): Xaa is A or G
  MOD_RES (19), (20), (21), (22): Xaa is A or G or is absent
VPQALSNITIQIMXXXXXXXXXIGEMSMIVRSXKXS

SEQ ID NO: 53848 - protein, 39 aa, Artificial Sequence; identical to SEQ ID NO: 18754
  GFR-binding peptide
  MOD_RES (5), (5): Xaa is C or S
  MOD_RES (21), (22), (23), (24), (25): Xaa is A or G
  MOD_RES (26), (27), (28), (29): Xaa is A or G or is absent

SEQ ID NO: 53849 - protein, 39 aa, Artificial Sequence
  GFR-binding peptide
  MOD_RES (5), (37), (39): Xaa is C or S
TKPTXAPTKLRSVKVAKVDDSSNVIKEVQVNMVVRSXGX

SEQ ID NO: 53850 - protein, 37 aa, Artificial Sequence; identical to SEQ ID NO: 15320
  GFR-binding peptide
  MOD_RES (2), (3), (37): Xaa is C or S
  MOD_RES (17), (18), (19), (20), (21): Xaa is A or G
  MOD_RES (22), (23), (24), (25): Xaa is A or G or is absent

SEQ ID NO: 53851 - protein, 39 aa, Artificial Sequence; identical to SEQ ID NO: 15321
  GFR-binding peptide
  MOD_RES (2), (3), (37), (39): Xaa is C or S
  MOD_RES (17), (18), (19), (20), (21): Xaa is A or G
  MOD_RES (22), (23), (24), (25): Xaa is A or G or is absent

SEQ ID NO: 53852 - protein, 33 aa, Artificial Sequence
  GFR-binding peptide
  MOD_RES (1), (1): Xaa is C or S
  MOD_RES (15), (16), (17), (18), (19): Xaa is A or G
  MOD_RES (20), (21), (22), (23): Xaa is A or G or is absent
XVPTELSNITMQIMXXXXXXXXXIGEMSEMVVE

SEQ ID NO: 53853 - protein, 35 aa, Artificial Sequence
  GFR-binding peptide
  MOD_RES (2), (3), (35): Xaa is C or S
PXXAPTKLRSVKVAKVDDSSNVIKEVQVNMVVRSX

SEQ ID NO: 53854 - protein, 38 aa, Artificial Sequence
  GFR-binding peptide
  MOD_RES (5), (6): Xaa is C or S
  MOD_RES (20), (21), (22), (23), (24): Xaa is A or G
  MOD_RES (25), (26), (27), (28): Xaa is A or G or is absent
VPKPXXAPTQLRPVQVRKIXXXXXXXXXKKATVNMVVR

SEQ ID NO: 53855 - protein, 35 aa, Artificial Sequence
  GFR-binding peptide
  MOD_RES (35), (35): Xaa is C or S
TQVQLEPLTVLYYEIVRKKPIFEQLSNTLEDHLAX

SEQ ID NO: 53856 - protein, 40 aa, Artificial Sequence
  GFR-binding peptide
  MOD_RES (3), (40): Xaa is C or S
VQXRPTQVQLEPLTVLYYEIVRKKPIFEQLSNTLEDHLAX

SEQ ID NO: 53857 - protein, 38 aa, Artificial Sequence
  GFR-binding peptide
  MOD_RES (6), (7): Xaa is C or S
TVPKPXXAPTQLSNITVQIMDDSSNVIIGEMSNMVVRA

SEQ ID NO: 53858 - protein, 41 aa, Artificial Sequence; identical to SEQ ID NO: 18758
  GFR-binding peptide
  MOD_RES (4), (41): Xaa is C or S

SEQ ID NO: 53859 - protein, 38 aa, Artificial Sequence
  GFR-binding peptide
  MOD_RES (4), (5): Xaa is C or S
  MOD_RES (19), (20), (21), (22), (23): Xaa is A or G
  MOD_RES (24), (25), (26), (27): Xaa is A or G or is absent
PKAXXVPTELRPVQMRKIXXXXXXXXXKKATVEMVVEG

SEQ ID NO: 53860 - protein, 33 aa, Artificial Sequence
  GFR-binding peptide
  MOD_RES (1), (32): Xaa is C or S
XVPQDLSNITIQIMVGRTPKVIGEMSMVVKSXK

SEQ ID NO: 53861 - protein, 38 aa, Artificial Sequence
  GFR-binding peptide
  MOD_RES (4), (36), (38): Xaa is C or S
KPTXAPTKLRSVKVAKVDDSSNVIKEVQVNMVVRSXGX

SEQ ID NO: 53862 - protein, 35 aa, Artificial Sequence; identical to SEQ ID NO: 15322
  GFR-binding peptide
  MOD_RES (1), (33), (35): Xaa is C or S

SEQ ID NO: 53863 - protein, 37 aa, Artificial Sequence
  GFR-binding peptide
  MOD_RES (5), (6), (37): Xaa is C or S
SASPXXVPQDLRSVKIAKVVGRTPKVKEVQVMVVKSX

SEQ ID NO: 53864 - protein, 38 aa, Artificial Sequence; identical to SEQ ID NO: 18760
  GFR-binding peptide
  MOD_RES (4), (4): Xaa is C or S

SEQ ID NO: 53865 - protein, 37 aa, Artificial Sequence; identical to SEQ ID NO: 18761
  GFR-binding peptide
  MOD_RES (5), (5): Xaa is C or S

SEQ ID NO: 53866 - protein, 35 aa, Artificial Sequence
  GFR-binding peptide
  MOD_RES (2), (3): Xaa is C or S
  MOD_RES (17), (18), (19), (20), (21): Xaa is A or G
  MOD_RES (22), (23), (24), (25): Xaa is A or G or is absent
AXXVPTELRPVQMRKIXXXXXXXXXKKATVDMVVE

SEQ ID NO: 53867 - protein, 35 aa, Artificial Sequence
  GFR-binding peptide
  MOD_RES (3), (3): Xaa is C or S
  MOD_RES (17), (18), (19), (20), (21): Xaa is A or G
  MOD_RES (22), (23), (24), (25): Xaa is A or G or is absent
LEXVPTEEEPLTMLYYXXXXXXXXXEQLSNFLQHN

SEQ ID NO: 53868 - protein, 37 aa, Artificial Sequence; identical to SEQ ID NO: 15324
  GFR-binding peptide
  MOD_RES (3), (4), (36): Xaa is C or S

SEQ ID NO: 53869 - protein, 32 aa, Artificial Sequence
  GFR-binding peptide
  MOD_RES (1), (32): Xaa is C or S
XVSQDLRSVKIAKVIGKTPKIKEVQVMIVKSX

SEQ ID NO: 53870 - protein, 42 aa, Artificial Sequence; identical to SEQ ID NO: 15326
  GFR-binding peptide
  MOD_RES (6), (7), (39), (41): Xaa is C or S

SEQ ID NO: 53871 - protein, 35 aa, Artificial Sequence; identical to SEQ ID NO: 18765
  GFR-binding peptide
  MOD_RES (1), (1): Xaa is C or S

SEQ ID NO: 53872 - protein, 37 aa, Artificial Sequence
  GFR-binding peptide
  MOD_RES (34), (36): Xaa is C or S
VPTEEEPLTMLYYRIKPHQGQHEQLSNFLQHNKXEXR

SEQ ID NO: 53873 - protein, 40 aa, Artificial Sequence; identical to SEQ ID NO: 15329
  GFR-binding peptide
  MOD_RES (5), (6), (37), (39): Xaa is C or S

SEQ ID NO: 53874 - protein, 34 aa, Artificial Sequence
  GFR-binding peptide
  MOD_RES (3), (4): Xaa is C or S
KPXXAPTKLRPVQVRKIDDSSNVIKKATVNMVVR

SEQ ID NO: 53875 - protein, 37 aa, Artificial Sequence
  GFR-binding peptide
  MOD_RES (1), (2), (34), (36): Xaa is C or S
XXAPTQLRPVQVRKIDDSSNVIKKATVNMVVRAXGXH

SEQ ID NO: 53876 - protein, 33 aa, Artificial Sequence
  GFR-binding peptide
  MOD_RES (1), (1): Xaa is C or S
  MOD_RES (15), (16), (17), (18), (19): Xaa is A or G
  MOD_RES (20), (21), (22), (23): Xaa is A or G or is absent
XVPQALSNITIQIMXXXXXXXXXIGEMSMIVRS

SEQ ID NO: 53877 - protein, 40 aa, Artificial Sequence
  GFR-binding peptide
  MOD_RES (4), (5), (39): Xaa is C or S
  MOD_RES (19), (20), (21), (22), (23): Xaa is A or G
  MOD_RES (24), (25), (26), (27): Xaa is A or G or is absent
PKAXXVPTELRSVKMAKVXXXXXXXXXKEVQVDMVVEGXG

SEQ ID NO: 53878 - protein, 35 aa, Artificial Sequence; identical to SEQ ID NO: 15333
  GFR-binding peptide
  MOD_RES (1), (2): Xaa is C or S
  MOD_RES (16), (17), (18), (19), (20): Xaa is A or G
  MOD_RES (21), (22), (23), (24): Xaa is A or G or is absent

SEQ ID NO: 53879 - protein, 36 aa, Artificial Sequence
  GFR-binding peptide
  MOD_RES (1), (2), (33), (35): Xaa is C or S
XXVPQDLSNITIQIMVGRTPKVIGEMSMVVKSXKXS

SEQ ID NO: 53880 - protein, 42 aa, Artificial Sequence
  GFR-binding peptide
  MOD_RES (5), (42): Xaa is C or S
SSVKXQPSRVHHEPLPVVYYEYVRKKPKLEQLSNRLEEHLEX

SEQ ID NO: 53881 - protein, 36 aa, Artificial Sequence; identical to SEQ ID NO: 15334
  GFR-binding peptide
  MOD_RES (1), (34), (36): Xaa is C or S
  MOD_RES (15), (16), (17), (18), (19): Xaa is A or G
  MOD_RES (20), (21), (22), (23): Xaa is A or G or is absent

SEQ ID NO: 53882 - protein, 39 aa, Artificial Sequence; identical to SEQ ID NO: 15337
  GFR-binding peptide
  MOD_RES (3), (4), (38): Xaa is C or S
  MOD_RES (18), (19), (20), (21), (22): Xaa is A or G
  MOD_RES (23), (24), (25), (26): Xaa is A or G or is absent

SEQ ID NO: 53883 - protein, 42 aa, Artificial Sequence
  GFR-binding peptide
  MOD_RES (5), (39), (41): Xaa is C or S
  MOD_RES (19), (20), (21), (22), (23): Xaa is A or G
  MOD_RES (24), (25), (26), (27): Xaa is A or G or is absent
EGLEXVPTEEEPLPMVYYXXXXXXXXXEQLSNFLQHNKXEXR

SEQ ID NO: 53884 - protein, 41 aa, Artificial Sequence; identical to SEQ ID NO: 15339
  GFR-binding peptide
  MOD_RES (5), (6), (39), (41): Xaa is C or S
  MOD_RES (20), (21), (22), (23), (24): Xaa is A or G
  MOD_RES (25), (26), (27), (28): Xaa is A or G or is absent

SEQ ID NO: 53885 - protein, 33 aa, Artificial Sequence
  GFR-binding peptide
  MOD_RES (32), (32): Xaa is C or S
VPTELRPVQMRKIDEYDKVVKKATVEMVVEGXG

SEQ ID NO: 53886 - protein, 43 aa, Artificial Sequence
  GFR-binding peptide
  MOD_RES (4), (41), (43): Xaa is C or S
SVKXQPSRVHHEPLTVLYYEYVRKKPKLEQLSNRLEEHLEXAX

SEQ ID NO: 53887 - protein, 40 aa, Artificial Sequence
  GFR-binding peptide
  MOD_RES (4), (5), (38), (40): Xaa is C or S
  MOD_RES (19), (20), (21), (22), (23): Xaa is A or G
  MOD_RES (24), (25), (26), (27): Xaa is A or G or is absent
AAPXXVPQALSNITIQIMXXXXXXXXXIGEMSMIVRSXKX

SEQ ID NO: 53888 - protein, 36 aa, Artificial Sequence; identical to SEQ ID NO: 18776
  GFR-binding peptide
  MOD_RES (2), (36): Xaa is C or S
  MOD_RES (16), (17), (18), (19), (20): Xaa is A or G
  MOD_RES (21), (22), (23), (24): Xaa is A or G or is absent

SEQ ID NO: 53889 - protein, 42 aa, Artificial Sequence; identical to SEQ ID NO: 18777
  GFR-binding peptide
  MOD_RES (5), (42): Xaa is C or S

SEQ ID NO: 53890 - protein, 41 aa, Artificial Sequence
  GFR-binding peptide
  MOD_RES (5), (39), (41): Xaa is C or S
  MOD_RES (19), (20), (21), (22), (23): Xaa is A or G
  MOD_RES (24), (25), (26), (27): Xaa is A or G or is absent
TKPTXAPTKLRSVKVAKVXXXXXXXXXKEVQVNMVVRSXGX

SEQ ID NO: 53891 - protein, 39 aa, Artificial Sequence; identical to SEQ ID NO: 15343
  GFR-binding peptide
  MOD_RES (5), (6), (38): Xaa is C or S

SEQ ID NO: 53892 - protein, 36 aa, Artificial Sequence; identical to SEQ ID NO: 15347
  GFR-binding peptide
  MOD_RES (1), (2), (34), (36): Xaa is C or S

SEQ ID NO: 53893 - protein, 38 aa, Artificial Sequence
  GFR-binding peptide
  MOD_RES (36), (38): Xaa is C or S
  MOD_RES (15), (16), (17), (18), (19): Xaa is A or G
  MOD_RES (20), (21), (22), (23): Xaa is A or G or is absent
PTQVQLEPLTVLYYXXXXXXXXXEQLSNTLEDHLAXKX

SEQ ID NO: 53894 - protein, 36 aa, Artificial Sequence
  GFR-binding peptide
  MOD_RES (2), (3), (35): Xaa is C or S
PXXAPTQLSNITVQIMDDSSNVIIGEMSNMVVRAXG

SEQ ID NO: 53895 - protein, 35 aa, Artificial Sequence; identical to SEQ ID NO: 18780
  GFR-binding peptide
  MOD_RES (2), (2): Xaa is C or S
  MOD_RES (16), (17), (18), (19), (20): Xaa is A or G
  MOD_RES (21), (22), (23), (24): Xaa is A or G or is absent

SEQ ID NO: 53896 - protein, 37 aa, Artificial Sequence; identical to SEQ ID NO: 15351
  GFR-binding peptide
  MOD_RES (4), (5): Xaa is C or S
  MOD_RES (19), (20), (21), (22), (23): Xaa is A or G
  MOD_RES (24), (25), (26), (27): Xaa is A or G or is absent

SEQ ID NO: 53897 - protein, 41 aa, Artificial Sequence
  GFR-binding peptide
  MOD_RES (4), (5), (38), (40): Xaa is C or S
  MOD_RES (19), (20), (21), (22), (23): Xaa is A or G
  MOD_RES (24), (25), (26), (27): Xaa is A or G or is absent
AAPXXVPQALRSVKIAKVXXXXXXXXXKEVQVMIVRSXKXS

SEQ ID NO: 53898 - protein, 41 aa, Artificial Sequence; identical to SEQ ID NO: 15352
  GFR-binding peptide
  MOD_RES (3), (4), (38), (40): Xaa is C or S
  MOD_RES (18), (19), (20), (21), (22): Xaa is A or G
  MOD_RES (23), (24), (25), (26): Xaa is A or G or is absent

SEQ ID NO: 53899 - protein, 34 aa, Artificial Sequence
  GFR-binding peptide
  MOD_RES (2), (2): Xaa is C or S
EXVPTEEEPLTMLYYRIKPHQGQHEQLSNFLQHN

SEQ ID NO: 53900 - protein, 37 aa, Artificial Sequence
  GFR-binding peptide
  MOD_RES (2), (3), (34), (36): Xaa is C or S
PXXVPQALRPVQIRKIVGRKPKVKKATVMIVRSXKXS

SEQ ID NO: 53901 - protein, 35 aa, Artificial Sequence; identical to SEQ ID NO: 18787
  GFR-binding peptide

SEQ ID NO: 53902 - protein, 34 aa, Artificial Sequence
  GFR-binding peptide
  MOD_RES (1), (1): Xaa is C or S
  MOD_RES (15), (16), (17), (18), (19): Xaa is A or G
  MOD_RES (20), (21), (22), (23): Xaa is A or G or is absent
XAPTQLRPVQVRKIXXXXXXXXXKKATVNMVVRA

SEQ ID NO: 53903 - protein, 39 aa, Artificial Sequence
  GFR-binding peptide
  MOD_RES (4), (4): Xaa is C or S
SVKXQPSRVHHEPLPVVYYEYVRKKPKLEQLSNRLEEHL

SEQ ID NO: 53904 - protein, 36 aa, Artificial Sequence
  GFR-binding peptide
  MOD_RES (3), (4), (36): Xaa is C or S
KPXXAPTQLSNITVQIMDDSSNVIIGEMSNMVVRAX

SEQ ID NO: 53905 - protein, 42 aa, Artificial Sequence
  GFR-binding peptide
  MOD_RES (4), (5), (39), (41): Xaa is C or S
  MOD_RES (19), (20), (21), (22), (23): Xaa is A or G
  MOD_RES (24), (25), (26), (27): Xaa is A or G or is absent
PKAXXVPTELSNITMQIMXXXXXXXXXIGEMSEMVVEGXGXR

SEQ ID NO: 53906 - protein, 33 aa, Artificial Sequence; identical to SEQ ID NO: 15358
  GFR-binding peptide
  MOD_RES (32), (32): Xaa is C or S

SEQ ID NO: 53907 - protein, 31 aa, Artificial Sequence
  GFR-binding peptide
  MOD_RES (1), (1): Xaa is C or S
XVPQDLSNITIQIMVGRTPKVIGEMSMVVKS

SEQ ID NO: 53908 - protein, 39 aa, Artificial Sequence; identical to SEQ ID NO: 18793
  GFR-binding peptide
  MOD_RES (1), (38): Xaa is C or S
  MOD_RES (17), (18), (19), (20), (21): Xaa is A or G
  MOD_RES (22), (23), (24), (25): Xaa is A or G or is absent

SEQ ID NO: 53909 - protein, 34 aa, Artificial Sequence; identical to SEQ ID NO: 18794
  GFR-binding peptide
  MOD_RES (16), (17), (18), (19), (20): Xaa is A or G
  MOD_RES (21), (22), (23), (24): Xaa is A or G or is absent

SEQ ID NO: 53910 - protein, 38 aa, Artificial Sequence
  GFR-binding peptide
  MOD_RES (4), (5), (38): Xaa is C or S
  MOD_RES (19), (20), (21), (22), (23): Xaa is A or G
  MOD_RES (24), (25), (26), (27): Xaa is A or G or is absent
ASPXXVSQDLSNITIQIMXXXXXXXXXIGEMSMIVKSX

SEQ ID NO: 53911 - protein, 37 aa, Artificial Sequence
  GFR-binding peptide
  MOD_RES (5), (6), (37): Xaa is C or S
SASPXXVPQDLSNITIQIMVGRTPKVIGEMSMVVKSX

SEQ ID NO: 53912 - protein, 39 aa, Artificial Sequence
  GFR-binding peptide
  MOD_RES (4), (5), (39): Xaa is C or S
  MOD_RES (19), (20), (21), (22), (23): Xaa is A or G
  MOD_RES (24), (25), (26), (27): Xaa is A or G or is absent
PKPXXAPTKLSNITVQIMXXXXXXXXXIGEMSNMVVRSX

SEQ ID NO: 53913 - protein, 35 aa, Artificial Sequence
  GFR-binding peptide
  MOD_RES (2), (3): Xaa is C or S
  MOD_RES (17), (18), (19), (20), (21): Xaa is A or G
  MOD_RES (22), (23), (24), (25): Xaa is A or G or is absent
PXXVSQDLRPVQIRKIXXXXXXXXXKKATVMIVKS

SEQ ID NO: 53914 - protein, 42 aa, Artificial Sequence
  GFR-binding peptide
  MOD_RES (6), (7), (41): Xaa is C or S
  MOD_RES (21), (22), (23), (24), (25): Xaa is A or G
  MOD_RES (26), (27), (28), (29): Xaa is A or G or is absent
KIPKAXXVPTELSNITMQIMXXXXXXXXXIGEMSDMVVEGXG

SEQ ID NO: 53915 - protein, 41 aa, Artificial Sequence
  GFR-binding peptide
  MOD_RES (6), (7), (39), (41): Xaa is C or S
KIPKAXXVPTELSNITMQIMDENEKVVIGEMSDMVVEGXGX

SEQ ID NO: 53916 - protein, 43 aa, Artificial Sequence
  GFR-binding peptide
  MOD_RES (6), (7), (40), (42): Xaa is C or S
  MOD_RES (21), (22), (23), (24), (25): Xaa is A or G
  MOD_RES (26), (27), (28), (29): Xaa is A or G or is absent
ASASPXXVSQDLSNITIQIMXXXXXXXXXIGEMSMIVKSXKXS

SEQ ID NO: 53917 - protein, 36 aa, Artificial Sequence
  GFR-binding peptide
  MOD_RES (5), (6): Xaa is C or S
IPKAXXVPTELRSVKMAKVDEYDKVVKEVQVEMVVE

SEQ ID NO: 53918 - protein, 33 aa, Artificial Sequence
  GFR-binding peptide
  MOD_RES (1), (1): Xaa is C or S
  MOD_RES (15), (16), (17), (18), (19): Xaa is A or G
  MOD_RES (20), (21), (22), (23): Xaa is A or G or is absent
XVSQDLRSVKIAKVXXXXXXXXXKEVQVMIVKS

SEQ ID NO: 53919 - protein, 37 aa, Artificial Sequence; identical to SEQ ID NO: 15369
  GFR-binding peptide
  MOD_RES (2), (3), (37): Xaa is C or S
  MOD_RES (17), (18), (19), (20), (21): Xaa is A or G
  MOD_RES (22), (23), (24), (25): Xaa is A or G or is absent

SEQ ID NO: 53920 - protein, 45 aa, Artificial Sequence; identical to SEQ ID NO: 18804
  GFR-binding peptide
  MOD_RES (5), (42), (44): Xaa is C or S
  MOD_RES (21), (22), (23), (24), (25): Xaa is A or G
  MOD_RES (26), (27), (28), (29): Xaa is A or G or is absent

SEQ ID NO: 53921 - protein, 42 aa, Artificial Sequence; identical to SEQ ID NO: 15370
  GFR-binding peptide
  MOD_RES (6), (7), (40), (42): Xaa is C or S
  MOD_RES (21), (22), (23), (24), (25): Xaa is A or G
  MOD_RES (26), (27), (28), (29): Xaa is A or G or is absent

SEQ ID NO: 53922 - protein, 39 aa, Artificial Sequence
  GFR-binding peptide
  MOD_RES (5), (37), (39): Xaa is C or S
TKPTXAPTKLRPVQVRKIDDSSNVIKKATVNMVVRSXGX

SEQ ID NO: 53923 - protein, 43 aa, Artificial Sequence; identical to SEQ ID NO: 15371
  GFR-binding peptide
  MOD_RES (6), (7), (40), (42): Xaa is C or S
  MOD_RES (21), (22), (23), (24), (25): Xaa is A or G
  MOD_RES (26), (27), (28), (29): Xaa is A or G or is absent

SEQ ID NO: 53924 - protein, 44 aa, Artificial Sequence
  GFR-binding peptide
  MOD_RES (5), (42), (44): Xaa is C or S
RNVQXRPTQVQLEPLTVLYYEIVRKKPIFEQLSNTLEDHLAXKX

SEQ ID NO: 53925 - protein, 35 aa, Artificial Sequence
  GFR-binding peptide
  MOD_RES (4), (5): Xaa is C or S
PKPXXAPTQLRPVQVRKIDDSSNVIKKATVNMVVR

SEQ ID NO: 53926 - protein, 38 aa, Artificial Sequence
  GFR-binding peptide
  MOD_RES (2), (3), (36), (38): Xaa is C or S
  MOD_RES (17), (18), (19), (20), (21): Xaa is A or G
  MOD_RES (22), (23), (24), (25): Xaa is A or G or is absent
PXXVSQDLRSVKIAKVXXXXXXXXXKEVQVMIVKSXKX

SEQ ID NO: 53927 - protein, 36 aa, Artificial Sequence
  GFR-binding peptide
  MOD_RES (35), (35): Xaa is C or S
  MOD_RES (14), (15), (16), (17), (18): Xaa is A or G
  MOD_RES (19), (20), (21), (22): Xaa is A or G or is absent
TQVQLEPLTVLYYXXXXXXXXXEQLSNTLEDHLAXK

SEQ ID NO: 53928 - protein, 43 aa, Artificial Sequence; identical to SEQ ID NO: 18805
  GFR-binding peptide
  MOD_RES (6), (40), (42): Xaa is C or S

SEQ ID NO: 53929 - protein, 41 aa, Artificial Sequence
  GFR-binding peptide
  MOD_RES (6), (7), (40): Xaa is C or S
  MOD_RES (21), (22), (23), (24), (25): Xaa is A or G
  MOD_RES (26), (27), (28), (29): Xaa is A or G or is absent
ASASPXXVPQDLRSVKIAKVXXXXXXXXXKEVQVMVVKSXK

SEQ ID NO: 53930 - protein, 39 aa, Artificial Sequence
  GFR-binding peptide
  MOD_RES (3), (4), (36), (38): Xaa is C or S
KAXXVPTELRPVQMRKIDENEKVVKKATVDMVVEGXGXR

SEQ ID NO: 53931 - protein, 38 aa, Artificial Sequence; identical to SEQ ID NO: 15373
  GFR-binding peptide
  MOD_RES (2), (3), (37): Xaa is C or S
  MOD_RES (17), (18), (19), (20), (21): Xaa is A or G
  MOD_RES (22), (23), (24), (25): Xaa is A or G or is absent

SEQ ID NO: 53932 - protein, 37 aa, Artificial Sequence
  GFR-binding peptide
  MOD_RES (2), (3), (36): Xaa is C or S
  MOD_RES (17), (18), (19), (20), (21): Xaa is A or G
  MOD_RES (22), (23), (24), (25): Xaa is A or G or is absent
PXXVPQALRPVQIRKIXXXXXXXXXKKATVMIVRSXK

SEQ ID NO: 53933 - protein, 40 aa, Artificial Sequence; identical to SEQ ID NO: 18808
  GFR-binding peptide
  MOD_RES (2), (39): Xaa is C or S

SEQ ID NO: 53934 - protein, 35 aa, Artificial Sequence
  GFR-binding peptide
  MOD_RES (2), (2): Xaa is C or S
  MOD_RES (16), (17), (18), (19), (20): Xaa is A or G
  MOD_RES (21), (22), (23), (24): Xaa is A or G or is absent
EXVPTEEEPLTMLYYXXXXXXXXXEQLSNFLQHNK

SEQ ID NO: 53935 - protein, 37 aa, Artificial Sequence
  GFR-binding peptide
  MOD_RES (2), (36): Xaa is C or S
  MOD_RES (16), (17), (18), (19), (20): Xaa is A or G
  MOD_RES (21), (22), (23), (24): Xaa is A or G or is absent
EXVPTEEEPLPMVYYXXXXXXXXXEQLSNFLQHNKXE

SEQ ID NO: 53936 - protein, 32 aa, Artificial Sequence; identical to SEQ ID NO: 15374
  GFR-binding peptide
  MOD_RES (1), (2): Xaa is C or S

SEQ ID NO: 53937 - protein, 40 aa, Artificial Sequence
  GFR-binding peptide
  MOD_RES (7), (7): Xaa is C or S
  MOD_RES (21), (22), (23), (24), (25): Xaa is A or G
  MOD_RES (26), (27), (28), (29): Xaa is A or G or is absent
HVTKPTXAPTKLSNITVQIMXXXXXXXXXIGEMSNMVVRS

SEQ ID NO: 53938 - protein, 36 aa, Artificial Sequence; identical to SEQ ID NO: 15377
  GFR-binding peptide
  MOD_RES (2), (3), (35): Xaa is C or S

SEQ ID NO: 53939 - protein, 34 aa, Artificial Sequence; identical to SEQ ID NO: 15380
  GFR-binding peptide
  MOD_RES (32), (34): Xaa is C or S

SEQ ID NO: 53940 - protein, 39 aa, Artificial Sequence; identical to SEQ ID NO: 15381
  GFR-binding peptide
  MOD_RES (3), (4), (37), (39): Xaa is C or S
  MOD_RES (18), (19), (20), (21), (22): Xaa is A or G
  MOD_RES (23), (24), (25), (26): Xaa is A or G or is absent

SEQ ID NO: 53941 - protein, 37 aa, Artificial Sequence; identical to SEQ ID NO: 15382
  GFR-binding peptide
  MOD_RES (6), (7): Xaa is C or S

SEQ ID NO: 53942 - protein, 40 aa, Artificial Sequence
  GFR-binding peptide
  MOD_RES (2), (39): Xaa is C or S
KXQPSRVHHEPLTVLYYEYVRKKPKLEQLSNRLEEHLEXA

SEQ ID NO: 53943 - protein, 32 aa, Artificial Sequence
  GFR-binding peptide
  MOD_RES (1), (32): Xaa is C or S
XVPQALRSVKIAKVVGRKPKVKEVQVMIVRSX

SEQ ID NO: 53944 - protein, 34 aa, Artificial Sequence
  GFR-binding peptide
PSRVHHEPLPVVYYEYVRKKPKLEQLSNRLEEHL

SEQ ID NO: 53945 - protein, 33 aa, Artificial Sequence; identical to SEQ ID NO: 15384
  GFR-binding peptide
  MOD_RES (2), (3): Xaa is C or S

SEQ ID NO: 53946 - protein, 40 aa, Artificial Sequence
  GFR-binding peptide
  MOD_RES (6), (7), (40): Xaa is C or S
  MOD_RES (21), (22), (23), (24), (25): Xaa is A or G
  MOD_RES (26), (27), (28), (29): Xaa is A or G or is absent
ASASPXXVPQDLRSVKIAKVXXXXXXXXXKEVQVMVVKSX

SEQ ID NO: 53947 - protein, 38 aa, Artificial Sequence; identical to SEQ ID NO: 15388
  GFR-binding peptide
  MOD_RES (3), (4), (35), (37): Xaa is C or S

SEQ ID NO: 53948 - protein, 42 aa, Artificial Sequence
  GFR-binding peptide
  MOD_RES (5), (6), (39), (41): Xaa is C or S
  MOD_RES (20), (21), (22), (23), (24): Xaa is A or G
  MOD_RES (25), (26), (27), (28): Xaa is A or G or is absent
SAAPXXVPQALSNITIQIMXXXXXXXXXIGEMSMIVRSXKXS

SEQ ID NO: 53949 - protein, 40 aa, Artificial Sequence
  GFR-binding peptide
  MOD_RES (5), (6), (40): Xaa is C or S
  MOD_RES (20), (21), (22), (23), (24): Xaa is A or G
  MOD_RES (25), (26), (27), (28): Xaa is A or G or is absent
VPKPXXAPTQLRSVKVAKVXXXXXXXXXKEVQVNMVVRAX

SEQ ID NO: 53950 - protein, 38 aa, Artificial Sequence
  GFR-binding peptide
  MOD_RES (6), (7), (38): Xaa is C or S
ASAAPXXVPQALRSVKIAKVVGRKPKVKEVQVMIVRSX

SEQ ID NO: 53951 - protein, 42 aa, Artificial Sequence
  GFR-binding peptide
  MOD_RES (7), (41): Xaa is C or S
  MOD_RES (21), (22), (23), (24), (25): Xaa is A or G
  MOD_RES (26), (27), (28), (29): Xaa is A or G or is absent
NDEGLEXVPTEEEPLPMVYYXXXXXXXXXEQLSNFLQHNKXE

SEQ ID NO: 53952 - protein, 36 aa, Artificial Sequence
  GFR-binding peptide
  MOD_RES (1), (34), (36): Xaa is C or S
  MOD_RES (15), (16), (17), (18), (19): Xaa is A or G
  MOD_RES (20), (21), (22), (23): Xaa is A or G or is absent
XVPQALRSVKIAKVXXXXXXXXXKEVQVMIVRSXKX

SEQ ID NO: 53953 - protein, 39 aa, Artificial Sequence; identical to SEQ ID NO: 38713
  GFR-binding peptide
  MOD_RES (4), (5), (38): Xaa is C or S
  MOD_RES (19), (20), (21), (22), (23): Xaa is A or G
  MOD_RES (24), (25), (26), (27): Xaa is A or G or is absent

SEQ ID NO: 53954 - protein, 35 aa, Artificial Sequence
  GFR-binding peptide
  MOD_RES (1), (35): Xaa is C or S
  MOD_RES (15), (16), (17), (18), (19): Xaa is A or G
  MOD_RES (20), (21), (22), (23): Xaa is A or G or is absent
XVPTELRSVKMAKVXXXXXXXXXKEVQVDMVVEGX

SEQ ID NO: 53955 - protein, 34 aa, Artificial Sequence
  GFR-binding peptide
RPTQVQLEPLTVLYYEIVRKKPIFEQLSNTLEDH

SEQ ID NO: 53956 - protein, 32 aa, Artificial Sequence
  GFR-binding peptide
  MOD_RES (1), (2): Xaa is C or S
XXVPTELRPVQMRKIDEYDKVVKKATVEMVVE

SEQ ID NO: 53957 - protein, 40 aa, Artificial Sequence
  GFR-binding peptide
  MOD_RES (37), (39): Xaa is C or S
  MOD_RES (16), (17), (18), (19), (20): Xaa is A or G
  MOD_RES (21), (22), (23), (24): Xaa is A or G or is absent
QPSRVHHEPLPVVYYXXXXXXXXXEQLSNRLEEHLEXAXA

SEQ ID NO: 53958 - protein, 32 aa, Artificial Sequence; identical to SEQ ID NO: 15394
  GFR-binding peptide
  MOD_RES (14), (15), (16), (17), (18): Xaa is A or G
  MOD_RES (19), (20), (21), (22): Xaa is A or G or is absent

SEQ ID NO: 53959 - protein, 44 aa, Artificial Sequence; identical to SEQ ID NO: 18817
  GFR-binding peptide
  MOD_RES (4), (41), (43): Xaa is C or S

SEQ ID NO: 53960 - protein, 36 aa, Artificial Sequence
  GFR-binding peptide
  MOD_RES (3), (4), (36): Xaa is C or S
KAXXVPTELRPVQMRKIDENEKVVKKATVDMVVEGX

SEQ ID NO: 53961 - protein, 34 aa, Artificial Sequence; identical to SEQ ID NO: 15395
  GFR-binding peptide
  MOD_RES (3), (4): Xaa is C or S

SEQ ID NO: 53962 - protein, 43 aa, Artificial Sequence; identical to SEQ ID NO: 18818
  GFR-binding peptide
  MOD_RES (5), (42): Xaa is C or S

SEQ ID NO: 53963 - protein, 31 aa, Artificial Sequence
  GFR-binding peptide
VPTELSNITMQIMDENEKVVIGEMSDMVVEG

SEQ ID NO: 53964 - protein, 33 aa, Artificial Sequence
  GFR-binding peptide
  MOD_RES (14), (15), (16), (17), (18): Xaa is A or G
  MOD_RES (19), (20), (21), (22): Xaa is A or G or is absent
VPTELRPVQMRKIXXXXXXXXXKKATVDMVVEG

SEQ ID NO: 53965 - protein, 41 aa, Artificial Sequence
  GFR-binding peptide
  MOD_RES (4), (38), (40): Xaa is C or S
  MOD_RES (18), (19), (20), (21), (22): Xaa is A or G
  MOD_RES (23), (24), (25), (26): Xaa is A or G or is absent
GLEXVPTEEEPLTMLYYXXXXXXXXXEQLSNFLQHNKXEXR

SEQ ID NO: 53966 - protein, 36 aa, Artificial Sequence; identical to SEQ ID NO: 15397
  GFR-binding peptide
  MOD_RES (1), (34), (36): Xaa is C or S
  MOD_RES (15), (16), (17), (18), (19): Xaa is A or G
  MOD_RES (20), (21), (22), (23): Xaa is A or G or is absent

SEQ ID NO: 53967 - protein, 41 aa, Artificial Sequence
  GFR-binding peptide
  MOD_RES (4), (5), (38), (40): Xaa is C or S
  MOD_RES (19), (20), (21), (22), (23): Xaa is A or G
  MOD_RES (24), (25), (26), (27): Xaa is A or G or is absent
AAPXXVPQALRPVQIRKIXXXXXXXXXKKATVMIVRSXKXS

SEQ ID NO: 53968 - protein, 36 aa, Artificial Sequence; identical to SEQ ID NO: 15399
  GFR-binding peptide
  MOD_RES (5), (6): Xaa is C or S

SEQ ID NO: 53969 - protein, 36 aa, Artificial Sequence
  GFR-binding peptide
  MOD_RES (3), (4), (35): Xaa is C or S
SPXXVPQDLRPVQIRKIVGRTPKVKKATVMVVKSXK

SEQ ID NO: 53970 - protein, 34 aa, Artificial Sequence; identical to SEQ ID NO: 38731
  GFR-binding peptide
  MOD_RES (33), (33): Xaa is C or S
  MOD_RES (14), (15), (16), (17), (18): Xaa is A or G
  MOD_RES (19), (20), (21), (22): Xaa is A or G or is absent

SEQ ID NO: 53971 - protein, 41 aa, Artificial Sequence; identical to SEQ ID NO: 15402
  GFR-binding peptide
  MOD_RES (4), (5), (39), (41): Xaa is C or S
  MOD_RES (19), (20), (21), (22), (23): Xaa is A or G
  MOD_RES (24), (25), (26), (27): Xaa is A or G or is absent

SEQ ID NO: 53972 - protein, 32 aa, Artificial Sequence
  GFR-binding peptide
  MOD_RES (14), (15), (16), (17), (18): Xaa is A or G
  MOD_RES (19), (20), (21), (22): Xaa is A or G or is absent
APTKLSNITVQIMXXXXXXXXXIGEMSNMVVR

SEQ ID NO: 53973 - protein, 33 aa, Artificial Sequence
  GFR-binding peptide
  MOD_RES (1), (1): Xaa is C or S
  MOD_RES (15), (16), (17), (18), (19): Xaa is A or G
  MOD_RES (20), (21), (22), (23): Xaa is A or G or is absent
XAPTKLRSVKVAKVXXXXXXXXXKEVQVNMVVR

SEQ ID NO: 53974 - protein, 37 aa, Artificial Sequence; identical to SEQ ID NO: 15405
  GFR-binding peptide
  MOD_RES (1), (2), (35), (37): Xaa is C or S
  MOD_RES (16), (17), (18), (19), (20): Xaa is A or G
  MOD_RES (21), (22), (23), (24): Xaa is A or G or is absent

SEQ ID NO: 53975 - protein, 40 aa, Artificial Sequence; identical to SEQ ID NO: 15406
  GFR-binding peptide
  MOD_RES (2), (3), (37), (39): Xaa is C or S
  MOD_RES (17), (18), (19), (20), (21): Xaa is A or G
  MOD_RES (22), (23), (24), (25): Xaa is A or G or is absent

SEQ ID NO: 53976 - protein, 37 aa, Artificial Sequence
  GFR-binding peptide
  MOD_RES (5), (5): Xaa is C or S
  MOD_RES (19), (20), (21), (22), (23): Xaa is A or G
  MOD_RES (24), (25), (26), (27): Xaa is A or G or is absent
TKPTXAPTKLRPVQVRKIXXXXXXXXXKKATVNMVVR

SEQ ID NO: 53977 - protein, 37 aa, Artificial Sequence
  GFR-binding peptide
  MOD_RES (5), (5): Xaa is C or S
  MOD_RES (19), (20), (21), (22), (23): Xaa is A or G
  MOD_RES (24), (25), (26), (27): Xaa is A or G or is absent
TKPTXAPTKLRSVKVAKVXXXXXXXXXKEVQVNMVVR

SEQ ID NO: 53978 - protein, 38 aa, Artificial Sequence
  GFR-binding peptide
  MOD_RES (2), (3), (35), (37): Xaa is C or S
PXXAPTQLSNITVQIMDDSSNVIIGEMSNMVVRAXGXH

SEQ ID NO: 53979 - protein, 36 aa, Artificial Sequence
  GFR-binding peptide
  MOD_RES (33), (35): Xaa is C or S
  MOD_RES (14), (15), (16), (17), (18): Xaa is A or G
  MOD_RES (19), (20), (21), (22): Xaa is A or G or is absent
VPQDLSNITIQIMXXXXXXXXXIGEMSMVVKSXKXS

SEQ ID NO: 53980 - protein, 31 aa, Artificial Sequence
  GFR-binding peptide
VPTELSNITMQIMDEYDKVVIGEMSEMVVEG

SEQ ID NO: 53981 - protein, 43 aa, Artificial Sequence; identical to SEQ ID NO: 15414
  GFR-binding peptide
  MOD_RES (5), (6), (40), (42): Xaa is C or S
  MOD_RES (20), (21), (22), (23), (24): Xaa is A or G
  MOD_RES (25), (26), (27), (28): Xaa is A or G or is absent

SEQ ID NO: 53982 - protein, 37 aa, Artificial Sequence; identical to SEQ ID NO: 18824
  GFR-binding peptide
  MOD_RES (3), (3): Xaa is C or S

SEQ ID NO: 53983 - protein, 38 aa, Artificial Sequence
  GFR-binding peptide
  MOD_RES (1), (35), (37): Xaa is C or S
  MOD_RES (15), (16), (17), (18), (19): Xaa is A or G
  MOD_RES (20), (21), (22), (23): Xaa is A or G or is absent
XVPTELRPVQMRKIXXXXXXXXXKKATVEMVVEGXGXR

SEQ ID NO: 53984 - protein, 43 aa, Artificial Sequence
  GFR-binding peptide
  MOD_RES (6), (40), (42): Xaa is C or S
  MOD_RES (20), (21), (22), (23), (24): Xaa is A or G
  MOD_RES (25), (26), (27), (28): Xaa is A or G or is absent
VTKPTXAPTKLRPVQVRKIXXXXXXXXXKKATVNMVVRSXGXH

SEQ ID NO: 53985 - protein, 41 aa, Artificial Sequence
  GFR-binding peptide
  MOD_RES (5), (39), (41): Xaa is C or S
  MOD_RES (19), (20), (21), (22), (23): Xaa is A or G
  MOD_RES (24), (25), (26), (27): Xaa is A or G or is absent
TKPTXAPTKLRPVQVRKIXXXXXXXXXKKATVNMVVRSXGX

SEQ ID NO: 53986 - protein, 34 aa, Artificial Sequence; identical to SEQ ID NO: 18827
  GFR-binding peptide

SEQ ID NO: 53987 - protein, 36 aa, Artificial Sequence; identical to SEQ ID NO: 15417
  GFR-binding peptide
  MOD_RES (1), (2), (36): Xaa is C or S
  MOD_RES (16), (17), (18), (19), (20): Xaa is A or G
  MOD_RES (21), (22), (23), (24): Xaa is A or G or is absent

SEQ ID NO: 53988 - protein, 39 aa, Artificial Sequence
  GFR-binding peptide
  MOD_RES (6), (7), (39): Xaa is C or S
TVPKPXXAPTQLSNITVQIMDDSSNVIIGEMSNMVVRAX

SEQ ID NO: 53989 - protein, 43 aa, Artificial Sequence
  GFR-binding peptide
  MOD_RES (6), (7), (40), (42): Xaa is C or S
  MOD_RES (21), (22), (23), (24), (25): Xaa is A or G
  MOD_RES (26), (27), (28), (29): Xaa is A or G or is absent
ASASPXXVPQDLRPVQIRKIXXXXXXXXXKKATVMVVKSXKXS

SEQ ID NO: 53990 - protein, 36 aa, Artificial Sequence
  GFR-binding peptide
  MOD_RES (1), (1): Xaa is C or S
XRPTQVQLEPLTVLYYEIVRKKPIFEQLSNTLEDHL

SEQ ID NO: 53991 - protein, 40 aa, Artificial Sequence
  GFR-binding peptide
  MOD_RES (37), (39): Xaa is C or S
RPTQVQLEPLTVLYYEIVRKKPIFEQLSNTLEDHLAXKXE

SEQ ID NO: 53992 - protein, 44 aa, Artificial Sequence; identical to SEQ ID NO: 15421
  GFR-binding peptide
  MOD_RES (7), (41), (43): Xaa is C or S
  MOD_RES (21), (22), (23), (24), (25): Xaa is A or G
  MOD_RES (26), (27), (28), (29): Xaa is A or G or is absent

SEQ ID NO: 53993 - protein, 33 aa, Artificial Sequence
  GFR-binding peptide
  MOD_RES (1), (1): Xaa is C or S
  MOD_RES (15), (16), (17), (18), (19): Xaa is A or G
  MOD_RES (20), (21), (22), (23): Xaa is A or G or is absent
XAPTKLRPVQVRKIXXXXXXXXXKKATVNMVVR

SEQ ID NO: 53994 - protein, 39 aa, Artificial Sequence; identical to SEQ ID NO: 15422
  GFR-binding peptide
  MOD_RES (6), (7), (38): Xaa is C or S

SEQ ID NO: 53995 - protein, 37 aa, Artificial Sequence
  GFR-binding peptide
  MOD_RES (1), (2), (34), (36): Xaa is C or S
XXVPTELRSVKMAKVDEYDKVVKEVQVEMVVEGXGXR

SEQ ID NO: 53996 - protein, 42 aa, Artificial Sequence
  GFR-binding peptide
  MOD_RES (4), (41): Xaa is C or S
  MOD_RES (20), (21), (22), (23), (24): Xaa is A or G
  MOD_RES (25), (26), (27), (28): Xaa is A or G or is absent
SVKXQPSRVHHEPLTVLYYXXXXXXXXXEQLSNRLEEHLEXA

SEQ ID NO: 53997 - protein, 34 aa, Artificial Sequence
  GFR-binding peptide
  MOD_RES (1), (2): Xaa is C or S
  MOD_RES (16), (17), (18), (19), (20): Xaa is A or G
  MOD_RES (21), (22), (23), (24): Xaa is A or G or is absent
XXAPTQLSNITVQIMXXXXXXXXXIGEMSNMVVR

SEQ ID NO: 53998 - protein, 32 aa, Artificial Sequence
  GFR-binding peptide
  MOD_RES (1), (2): Xaa is C or S
XXVPQALRPVQIRKIVGRKPKVKKATVMIVRS

SEQ ID NO: 53999 - protein, 40 aa, Artificial Sequence
  GFR-binding peptide
  MOD_RES (2), (39): Xaa is C or S
QXRPTQVQLEPLTVLYYEIVRKKPIFEQLSNTLEDHLAXK

SEQ ID NO: 54000 - protein, 36 aa, Artificial Sequence; identical to SEQ ID NO: 18834
  GFR-binding peptide
  MOD_RES (36), (36): Xaa is C or S
  MOD_RES (15), (16), (17), (18), (19): Xaa is A or G
  MOD_RES (20), (21), (22), (23): Xaa is A or G or is absent

SEQ ID NO: 54001 - protein, 41 aa, Artificial Sequence
  GFR-binding peptide
  MOD_RES (4), (38), (40): Xaa is C or S
  MOD_RES (18), (19), (20), (21), (22): Xaa is A or G
  MOD_RES (23), (24), (25), (26): Xaa is A or G or is absent
KPTXAPTKLSNITVQIMXXXXXXXXXIGEMSNMVVRSXGXH

SEQ ID NO: 54002 - protein, 40 aa, Artificial Sequence; identical to SEQ ID NO: 15429
  GFR-binding peptide
  MOD_RES (4), (5), (39): Xaa is C or S
  MOD_RES (19), (20), (21), (22), (23): Xaa is A or G
  MOD_RES (24), (25), (26), (27): Xaa is A or G or is absent

SEQ ID NO: 54003 - protein, 41 aa, Artificial Sequence; identical to SEQ ID NO: 18836
  GFR-binding peptide
  MOD_RES (3), (40): Xaa is C or S
  MOD_RES (19), (20), (21), (22), (23): Xaa is A or G
  MOD_RES (24), (25), (26), (27): Xaa is A or G or is absent

SEQ ID NO: 54004 - protein, 38 aa, Artificial Sequence; identical to SEQ ID NO: 15430
  GFR-binding peptide
  MOD_RES (3), (4), (37): Xaa is C or S
  MOD_RES (18), (19), (20), (21), (22): Xaa is A or G
  MOD_RES (23), (24), (25), (26): Xaa is A or G or is absent

SEQ ID NO: 54005 - protein, 40 aa, Artificial Sequence
  GFR-binding peptide
  MOD_RES (6), (7), (39): Xaa is C or S
YVPKPXXAPTKLRPVQVRKIDDSSNVIKKATVNMVVRSXG

SEQ ID NO: 54006 - protein, 38 aa, Artificial Sequence
  GFR-binding peptide
  MOD_RES (2), (3), (35), (37): Xaa is C or S
AXXVPTELSNITMQIMDEYDKVVIGEMSEMVVEGXGXR

SEQ ID NO: 54007 - protein, 37 aa, Artificial Sequence
  GFR-binding peptide
  MOD_RES (37), (37): Xaa is C or S
  MOD_RES (16), (17), (18), (19), (20): Xaa is A or G
  MOD_RES (21), (22), (23), (24): Xaa is A or G or is absent
QPSRVHHEPLPVVYYXXXXXXXXXEQLSNRLEEHLEX

SEQ ID NO: 54008 - protein, 38 aa, Artificial Sequence; identical to SEQ ID NO: 18841
  GFR-binding peptide
  MOD_RES (1), (38): Xaa is C or S

SEQ ID NO: 54009 - protein, 38 aa, Artificial Sequence
  GFR-binding peptide
  MOD_RES (1), (35), (37): Xaa is C or S
  MOD_RES (15), (16), (17), (18), (19): Xaa is A or G
  MOD_RES (20), (21), (22), (23): Xaa is A or G or is absent
XVPTELRSVKMAKVXXXXXXXXXKEVQVDMVVEGXGXR

SEQ ID NO: 54010 - protein, 35 aa, Artificial Sequence; identical to SEQ ID NO: 15433
  GFR-binding peptide
  MOD_RES (3), (4): Xaa is C or S

SEQ ID NO: 54011 - protein, 36 aa, Artificial Sequence; identical to SEQ ID NO: 15434
  GFR-binding peptide
  MOD_RES (5), (6): Xaa is C or S

SEQ ID NO: 54012 - protein, 39 aa, Artificial Sequence
  GFR-binding peptide
  MOD_RES (6), (7): Xaa is C or S
  MOD_RES (21), (22), (23), (24), (25): Xaa is A or G
  MOD_RES (26), (27), (28), (29): Xaa is A or G or is absent
ASAAPXXVPQALSNITIQIMXXXXXXXXXIGEMSMIVRS

SEQ ID NO: 54013 - protein, 35 aa, Artificial Sequence
  GFR-binding peptide
  MOD_RES (1), (32), (34): Xaa is C or S
XVPQDLRSVKIAKVVGRTPKVKEVQVMVVKSXKXS

SEQ ID NO: 54014 - protein, 41 aa, Artificial Sequence; identical to SEQ ID NO: 18844
  GFR-binding peptide
  MOD_RES (3), (40): Xaa is C or S
  MOD_RES (19), (20), (21), (22), (23): Xaa is A or G
  MOD_RES (24), (25), (26), (27): Xaa is A or G or is absent

SEQ ID NO: 54015 - protein, 43 aa, Artificial Sequence; identical to SEQ ID NO: 18847
  GFR-binding peptide
  MOD_RES (7), (41), (43): Xaa is C or S
  MOD_RES (21), (22), (23), (24), (25): Xaa is A or G
  MOD_RES (26), (27), (28), (29): Xaa is A or G or is absent

SEQ ID NO: 54016 - protein, 41 aa, Artificial Sequence; identical to SEQ ID NO: 15437
  GFR-binding peptide
  MOD_RES (5), (6), (40): Xaa is C or S
  MOD_RES (20), (21), (22), (23), (24): Xaa is A or G
  MOD_RES (25), (26), (27), (28): Xaa is A or G or is absent

SEQ ID NO: 54017 - protein, 32 aa, Artificial Sequence; identical to SEQ ID NO: 15438
  GFR-binding peptide
  MOD_RES (32), (32): Xaa is C or S

SEQ ID NO: 54018 - protein, 33 aa, Artificial Sequence; identical to SEQ ID NO: 18848
  GFR-binding peptide
  MOD_RES (1), (1): Xaa is C or S

SEQ ID NO: 54019 - protein, 32 aa, Artificial Sequence; identical to SEQ ID NO: 15441
  GFR-binding peptide
  MOD_RES (1), (1): Xaa is C or S

SEQ ID NO: 54020 - protein, 37 aa, Artificial Sequence
  GFR-binding peptide
  MOD_RES (4), (5), (36): Xaa is C or S
AAPXXVPQALRPVQIRKIVGRKPKVKKATVMIVRSXK

SEQ ID NO: 54021 - protein, 37 aa, Artificial Sequence; identical to SEQ ID NO: 18849
  GFR-binding peptide
  MOD_RES (1), (1): Xaa is C or S
  MOD_RES (17), (18), (19), (20), (21): Xaa is A or G
  MOD_RES (22), (23), (24), (25): Xaa is A or G or is absent

SEQ ID NO: 54022 - protein, 39 aa, Artificial Sequence; identical to SEQ ID NO: 15443
  GFR-binding peptide
  MOD_RES (3), (4), (36), (38): Xaa is C or S

SEQ ID NO: 54023 - protein, 41 aa, Artificial Sequence; identical to SEQ ID NO: 18851
  GFR-binding peptide
  MOD_RES (6), (40): Xaa is C or S

SEQ ID NO: 54024 - protein, 36 aa, Artificial Sequence
  GFR-binding peptide
  MOD_RES (1), (35): Xaa is C or S
  MOD_RES (15), (16), (17), (18), (19): Xaa is A or G
  MOD_RES (20), (21), (22), (23): Xaa is A or G or is absent
XAPTQLRSVKVAKVXXXXXXXXXKEVQVNMVVRAXG

SEQ ID NO: 54025 - protein, 40 aa, Artificial Sequence
  GFR-binding peptide
  MOD_RES (4), (5), (39): Xaa is C or S
  MOD_RES (19), (20), (21), (22), (23): Xaa is A or G
  MOD_RES (24), (25), (26), (27): Xaa is A or G or is absent
PKPXXAPTQLRPVQVRKIXXXXXXXXXKKATVNMVVRAXG

SEQ ID NO: 54026 - protein, 34 aa, Artificial Sequence
  GFR-binding peptide
  MOD_RES (34), (34): Xaa is C or S
  MOD_RES (14), (15), (16), (17), (18): Xaa is A or G
  MOD_RES (19), (20), (21), (22): Xaa is A or G or is absent
VPTELSNITMQIMXXXXXXXXXIGEMSDMVVEGX

SEQ ID NO: 54027 - protein, 34 aa, Artificial Sequence
  GFR-binding peptide
  MOD_RES (3), (4): Xaa is C or S
KAXXVPTELRSVKMAKVDENEKVVKEVQVDMVVE

SEQ ID NO: 54028 - protein, 41 aa, Artificial Sequence
  GFR-binding peptide
  MOD_RES (3), (4), (38), (40): Xaa is C or S
  MOD_RES (18), (19), (20), (21), (22): Xaa is A or G
  MOD_RES (23), (24), (25), (26): Xaa is A or G or is absent
KPXXAPTKLRPVQVRKIXXXXXXXXXKKATVNMVVRSXGXH

SEQ ID NO: 54029 - protein, 38 aa, Artificial Sequence
  GFR-binding peptide
  MOD_RES (5), (6), (37): Xaa is C or S
SAAPXXVPQALSNITIQIMVGRKPKVIGEMSMIVRSXK

SEQ ID NO: 54030 - protein, 34 aa, Artificial Sequence
  GFR-binding peptide
  MOD_RES (16), (17), (18), (19), (20): Xaa is A or G
  MOD_RES (21), (22), (23), (24): Xaa is A or G or is absent
QPSRVHHEPLPVVYYXXXXXXXXXEQLSNRLEEH

SEQ ID NO: 54031 - protein, 36 aa, Artificial Sequence
  GFR-binding peptide
  MOD_RES (1), (33), (35): Xaa is C or S
XAPTKLSNITVQIMDDSSNVIIGEMSNMVVRSXGXH

SEQ ID NO: 54032 - protein, 43 aa, Artificial Sequence; identical to SEQ ID NO: 15451
  GFR-binding peptide
  MOD_RES (6), (7), (41), (43): Xaa is C or S
  MOD_RES (21), (22), (23), (24), (25): Xaa is A or G
  MOD_RES (26), (27), (28), (29): Xaa is A or G or is absent

SEQ ID NO: 54033 - protein, 43 aa, Artificial Sequence
  GFR-binding peptide
  MOD_RES (4), (41), (43): Xaa is C or S
NVQXRPTQVQLEPLPVVYYEIVRKKPIFEQLSNTLEDHLAXKX

SEQ ID NO: 54034 - protein, 34 aa, Artificial Sequence; identical to SEQ ID NO: 15452
  GFR-binding peptide
  MOD_RES (32), (34): Xaa is C or S

SEQ ID NO: 54035 - protein, 42 aa, Artificial Sequence
  GFR-binding peptide
  MOD_RES (6), (7), (41): Xaa is C or S
  MOD_RES (21), (22), (23), (24), (25): Xaa is A or G
  MOD_RES (26), (27), (28), (29): Xaa is A or G or is absent
TVPKPXXAPTQLRPVQVRKIXXXXXXXXXKKATVNMVVRAXG

SEQ ID NO: 54036 - protein, 36 aa, Artificial Sequence; identical to SEQ ID NO: 15456
  GFR-binding peptide
  MOD_RES (2), (3), (34), (36): Xaa is C or S

SEQ ID NO: 54037 - protein, 42 aa, Artificial Sequence; identical to SEQ ID NO: 15459
  GFR-binding peptide
  MOD_RES (6), (7), (39), (41): Xaa is C or S

SEQ ID NO: 54038 - protein, 44 aa, Artificial Sequence; identical to SEQ ID NO: 18857
  GFR-binding peptide
  MOD_RES (4), (41), (43): Xaa is C or S
  MOD_RES (20), (21), (22), (23), (24): Xaa is A or G
  MOD_RES (25), (26), (27), (28): Xaa is A or G or is absent

SEQ ID NO: 54039 - protein, 36 aa, Artificial Sequence; identical to SEQ ID NO: 18858
  GFR-binding peptide
  MOD_RES (34), (36): Xaa is C or S

SEQ ID NO: 54040 - protein, 35 aa, Artificial Sequence
  GFR-binding peptide
PTQVQLEPLTVLYYEIVRKKPIFEQLSNTLEDHLA

SEQ ID NO: 54041 - protein, 38 aa, Artificial Sequence
  GFR-binding peptide
  MOD_RES (5), (6), (38): Xaa is C or S
VPKPXXAPTQLSNITVQIMDDSSNVIIGEMSNMVVRAX

SEQ ID NO: 54042 - protein, 35 aa, Artificial Sequence
  GFR-binding peptide
  MOD_RES (2), (34): Xaa is C or S
TXAPTKLSNITVQIMDDSSNVIIGEMSNMVVRSXG

SEQ ID NO: 54043 - protein, 38 aa, Artificial Sequence; identical to SEQ ID NO: 18864
  GFR-binding peptide
  MOD_RES (37), (37): Xaa is C or S
  MOD_RES (16), (17), (18), (19), (20): Xaa is A or G
  MOD_RES (21), (22), (23), (24): Xaa is A or G or is absent

SEQ ID NO: 54044 - protein, 39 aa, Artificial Sequence
  GFR-binding peptide
  MOD_RES (4), (5), (37), (39): Xaa is C or S
PKAXXVPTELRPVQMRKIDEYDKVVKKATVEMVVEGXGX

SEQ ID NO: 54045 - protein, 35 aa, Artificial Sequence
  GFR-binding peptide
  MOD_RES (33), (35): Xaa is C or S
  MOD_RES (14), (15), (16), (17), (18): Xaa is A or G
  MOD_RES (19), (20), (21), (22): Xaa is A or G or is absent
VSQDLSNITIQIMXXXXXXXXXIGEMSMIVKSXKX

SEQ ID NO: 54046 - protein, 38 aa, Artificial Sequence; identical to SEQ ID NO: 15465
  GFR-binding peptide
  MOD_RES (2), (3), (35), (37): Xaa is C or S

SEQ ID NO: 54047 - protein, 37 aa, Artificial Sequence
  GFR-binding peptide
  MOD_RES (1), (1): Xaa is C or S
  MOD_RES (17), (18), (19), (20), (21): Xaa is A or G
  MOD_RES (22), (23), (24), (25): Xaa is A or G or is absent
XRPTQVQLEPLPVVYYXXXXXXXXXEQLSNTLEDHLA

SEQ ID NO: 54048 - protein, 36 aa, Artificial Sequence
  GFR-binding peptide
  MOD_RES (2), (36): Xaa is C or S
  MOD_RES (16), (17), (18), (19), (20): Xaa is A or G
  MOD_RES (21), (22), (23), (24): Xaa is A or G or is absent
TXAPTKLRPVQVRKIXXXXXXXXXKKATVNMVVRSX

SEQ ID NO: 54049 - protein, 35 aa, Artificial Sequence; identical to SEQ ID NO: 15469
  GFR-binding peptide
  MOD_RES (2), (3): Xaa is C or S
  MOD_RES (17), (18), (19), (20), (21): Xaa is A or G
  MOD_RES (22), (23), (24), (25): Xaa is A or G or is absent

SEQ ID NO: 54050 - protein, 34 aa, Artificial Sequence
  GFR-binding peptide
  MOD_RES (34), (34): Xaa is C or S
  MOD_RES (14), (15), (16), (17), (18): Xaa is A or G
  MOD_RES (19), (20), (21), (22): Xaa is A or G or is absent
VPTEEEPLTMLYYXXXXXXXXXEQLSNFLQHNKX

SEQ ID NO: 54051 - protein, 37 aa, Artificial Sequence
  GFR-binding peptide
  MOD_RES (3), (4), (36): Xaa is C or S
KAXXVPTELRSVKMAKVDENEKVVKEVQVDMVVEGXG

SEQ ID NO: 54052 - protein, 39 aa, Artificial Sequence
  GFR-binding peptide
  MOD_RES (5), (6), (37), (39): Xaa is C or S
SAAPXXVPQALRPVQIRKIVGRKPKVKKATVMIVRSXKX

SEQ ID NO: 54053 - protein, 35 aa, Artificial Sequence; identical to SEQ ID NO: 15472
  GFR-binding peptide
  MOD_RES (2), (3): Xaa is C or S
  MOD_RES (17), (18), (19), (20), (21): Xaa is A or G
  MOD_RES (22), (23), (24), (25): Xaa is A or G or is absent

SEQ ID NO: 54054 - protein, 35 aa, Artificial Sequence; identical to SEQ ID NO: 15474
  GFR-binding peptide
  MOD_RES (2), (3): Xaa is C or S
  MOD_RES (17), (18), (19), (20), (21): Xaa is A or G
  MOD_RES (22), (23), (24), (25): Xaa is A or G or is absent

SEQ ID NO: 54055 - protein, 38 aa, Artificial Sequence
  GFR-binding peptide
  MOD_RES (1), (35), (37): Xaa is C or S
XVPTEEEPLTMLYYRIKPHQGQHEQLSNFLQHNKXEXR

SEQ ID NO: 54056 - protein, 42 aa, Artificial Sequence; identical to SEQ ID NO: 38843
  GFR-binding peptide
  MOD_RES (6), (7), (40), (42): Xaa is C or S
  MOD_RES (21), (22), (23), (24), (25): Xaa is A or G
  MOD_RES (26), (27), (28), (29): Xaa is A or G or is absent

SEQ ID NO: 54057 - protein, 36 aa, Artificial Sequence
  GFR-binding peptide
  MOD_RES (3), (3): Xaa is C or S
  MOD_RES (17), (18), (19), (20), (21): Xaa is A or G
  MOD_RES (22), (23), (24), (25): Xaa is A or G or is absent
PTXAPTKLSNITVQIMXXXXXXXXXIGEMSNMVVRS

SEQ ID NO: 54058 - protein, 39 aa, Artificial Sequence
  GFR-binding peptide
  MOD_RES (37), (39): Xaa is C or S
  MOD_RES (16), (17), (18), (19), (20): Xaa is A or G
  MOD_RES (21), (22), (23), (24): Xaa is A or G or is absent
RPTQVQLEPLPVVYYXXXXXXXXXEQLSNTLEDHLAXKX

SEQ ID NO: 54059 - protein, 41 aa, Artificial Sequence; identical to SEQ ID NO: 15477
  GFR-binding peptide
  MOD_RES (5), (6), (39), (41): Xaa is C or S
  MOD_RES (20), (21), (22), (23), (24): Xaa is A or G
  MOD_RES (25), (26), (27), (28): Xaa is A or G or is absent

SEQ ID NO: 54060 - protein, 39 aa, Artificial Sequence
  GFR-binding peptide
  MOD_RES (6), (7): Xaa is C or S
  MOD_RES (21), (22), (23), (24), (25): Xaa is A or G
  MOD_RES (26), (27), (28), (29): Xaa is A or G or is absent
KIPKAXXVPTELSNITMQIMXXXXXXXXXIGEMSDMVVE

SEQ ID NO: 54061 - protein, 36 aa, Artificial Sequence; identical to SEQ ID NO: 15479
  GFR-binding peptide
  MOD_RES (2), (34), (36): Xaa is C or S

SEQ ID NO: 54062 - protein, 37 aa, Artificial Sequence; identical to SEQ ID NO: 18878
  GFR-binding peptide
  MOD_RES (3), (37): Xaa is C or S
  MOD_RES (17), (18), (19), (20), (21): Xaa is A or G
  MOD_RES (22), (23), (24), (25): Xaa is A or G or is absent

SEQ ID NO: 54063 - protein, 33 aa, Artificial Sequence; identical to SEQ ID NO: 15481
  GFR-binding peptide
  MOD_RES (33), (33): Xaa is C or S
  MOD_RES (14), (15), (16), (17), (18): Xaa is A or G
  MOD_RES (19), (20), (21), (22): Xaa is A or G or is absent

SEQ ID NO: 54064 - protein, 39 aa, Artificial Sequence; identical to SEQ ID NO: 18879
  GFR-binding peptide
  MOD_RES (3), (3): Xaa is C or S
  MOD_RES (19), (20), (21), (22), (23): Xaa is A or G
  MOD_RES (24), (25), (26), (27): Xaa is A or G or is absent

SEQ ID NO: 54065 - protein, 36 aa, Artificial Sequence
  GFR-binding peptide
  MOD_RES (6), (6): Xaa is C or S
VTKPTXAPTKLRSVKVAKVDDSSNVIKEVQVNMVVR

SEQ ID NO: 54066 - protein, 40 aa, Artificial Sequence
  GFR-binding peptide
  MOD_RES (5), (5): Xaa is C or S
  MOD_RES (21), (22), (23), (24), (25): Xaa is A or G
  MOD_RES (26), (27), (28), (29): Xaa is A or G or is absent
RNVQXRPTQVQLEPLPVVYYXXXXXXXXXEQLSNTLEDHL

SEQ ID NO: 54067 - protein, 36 aa, Artificial Sequence; identical to SEQ ID NO: 15482
  GFR-binding peptide
  MOD_RES (2), (3): Xaa is C or S
  MOD_RES (17), (18), (19), (20), (21): Xaa is A or G
  MOD_RES (22), (23), (24), (25): Xaa is A or G or is absent

SEQ ID NO: 54068 - protein, 39 aa, Artificial Sequence
  GFR-binding peptide
  MOD_RES (4), (38): Xaa is C or S
  MOD_RES (18), (19), (20), (21), (22): Xaa is A or G
  MOD_RES (23), (24), (25), (26): Xaa is A or G or is absent
GLEXVPTEEEPLTMLYYXXXXXXXXXEQLSNFLQHNKXE

SEQ ID NO: 54069 - protein, 42 aa, Artificial Sequence
  GFR-binding peptide
  MOD_RES (4), (5), (39), (41): Xaa is C or S
  MOD_RES (19), (20), (21), (22), (23): Xaa is A or G
  MOD_RES (24), (25), (26), (27): Xaa is A or G or is absent
PKAXXVPTELSNITMQIMXXXXXXXXXIGEMSDMVVEGXGXR

SEQ ID NO: 54070 - protein, 36 aa, Artificial Sequence
  GFR-binding peptide
  MOD_RES (5), (6): Xaa is C or S
IPKAXXVPTELRPVQMRKIDENEKVVKKATVDMVVE

SEQ ID NO: 54071 - protein, 39 aa, Artificial Sequence; identical to SEQ ID NO: 18882
  GFR-binding peptide
  MOD_RES (4), (4): Xaa is C or S

SEQ ID NO: 54072 - protein, 35 aa, Artificial Sequence
  GFR-binding peptide
  MOD_RES (1), (35): Xaa is C or S
XVPTEEEPLPMVYYRIKPHQGQHEQLSNFLQHNKX

SEQ ID NO: 54073 - protein, 38 aa, Artificial Sequence
  GFR-binding peptide
  MOD_RES (2), (3), (37): Xaa is C or S
  MOD_RES (17), (18), (19), (20), (21): Xaa is A or G
  MOD_RES (22), (23), (24), (25): Xaa is A or G or is absent
AXXVPTELRSVKMAKVXXXXXXXXXKEVQVEMVVEGXG

SEQ ID NO: 54074 - protein, 37 aa, Artificial Sequence; identical to SEQ ID NO: 18884
  GFR-binding peptide
  MOD_RES (2), (36): Xaa is C or S

SEQ ID NO: 54075 - protein, 37 aa, Artificial Sequence; identical to SEQ ID NO: 15491
  GFR-binding peptide
  MOD_RES (2), (3), (34), (36): Xaa is C or S

SEQ ID NO: 54076 - protein, 37 aa, Artificial Sequence; identical to SEQ ID NO: 15492
  GFR-binding peptide
  MOD_RES (3), (4), (36): Xaa is C or S

SEQ ID NO: 54077 - protein, 37 aa, Artificial Sequence; identical to SEQ ID NO: 18887
  GFR-binding peptide
  MOD_RES (2), (36): Xaa is C or S
  MOD_RES (16), (17), (18), (19), (20): Xaa is A or G
  MOD_RES (21), (22), (23), (24): Xaa is A or G or is absent

SEQ ID NO: 54078 - protein, 36 aa, Artificial Sequence; identical to SEQ ID NO: 15496
  GFR-binding peptide
  MOD_RES (3), (3): Xaa is C or S
  MOD_RES (17), (18), (19), (20), (21): Xaa is A or G
  MOD_RES (22), (23), (24), (25): Xaa is A or G or is absent

SEQ ID NO: 54079 - protein, 37 aa, Artificial Sequence; identical to SEQ ID NO: 15497
  GFR-binding peptide
  MOD_RES (3), (4), (36): Xaa is C or S

SEQ ID NO: 54080 - protein, 40 aa, Artificial Sequence
  GFR-binding peptide
  MOD_RES (5), (6), (37), (39): Xaa is C or S
SAAPXXVPQALRSVKIAKVVGRKPKVKEVQVMIVRSXKXS

SEQ ID NO: 54081 - protein, 38 aa, Artificial Sequence; identical to SEQ ID NO: 15502
  GFR-binding peptide
  MOD_RES (6), (7), (38): Xaa is C or S

SEQ ID NO: 54082 - protein, 36 aa, Artificial Sequence
  GFR-binding peptide
  MOD_RES (2), (3), (36): Xaa is C or S
  MOD_RES (17), (18), (19), (20), (21): Xaa is A or G
  MOD_RES (22), (23), (24), (25): Xaa is A or G or is absent
PXXVPQALRPVQIRKIXXXXXXXXXKKATVMIVRSX

SEQ ID NO: 54083 - protein, 34 aa, Artificial Sequence; identical to SEQ ID NO: 18893
  GFR-binding peptide

SEQ ID NO: 54084 - protein, 38 aa, Artificial Sequence
  GFR-binding peptide
  MOD_RES (2), (3), (37): Xaa is C or S
  MOD_RES (17), (18), (19), (20), (21): Xaa is A or G
  MOD_RES (22), (23), (24), (25): Xaa is A or G or is absent
PXXAPTKLRPVQVRKIXXXXXXXXXKKATVNMVVRSXG

SEQ ID NO: 54085 - protein, 41 aa, Artificial Sequence; identical to SEQ ID NO: 15503
  GFR-binding peptide
  MOD_RES (4), (5), (38), (40): Xaa is C or S
  MOD_RES (19), (20), (21), (22), (23): Xaa is A or G
  MOD_RES (24), (25), (26), (27): Xaa is A or G or is absent

SEQ ID NO: 54086 - protein, 40 aa, Artificial Sequence; identical to SEQ ID NO: 18895
  GFR-binding peptide
  MOD_RES (4), (4): Xaa is C or S

SEQ ID NO: 54087 - protein, 42 aa, Artificial Sequence
  GFR-binding peptide
  MOD_RES (2), (39), (41): Xaa is C or S
KXQPSRVHHEPLPVVYYEYVRKKPKLEQLSNRLEEHLEXAXA

SEQ ID NO: 54088 - protein, 31 aa, Artificial Sequence; identical to SEQ ID NO: 15504
  GFR-binding peptide
  MOD_RES (1), (1): Xaa is C or S

SEQ ID NO: 54089 - protein, 35 aa, Artificial Sequence
  GFR-binding peptide
  MOD_RES (1), (2), (35): Xaa is C or S
  MOD_RES (16), (17), (18), (19), (20): Xaa is A or G
  MOD_RES (21), (22), (23), (24): Xaa is A or G or is absent
XXVPQDLRSVKIAKVXXXXXXXXXKEVQVMVVKSX

SEQ ID NO: 54090 - protein, 33 aa, Artificial Sequence
  GFR-binding peptide
  MOD_RES (31), (33): Xaa is C or S
VPQDLRSVKIAKVVGRTPKVKEVQVMVVKSXKX

SEQ ID NO: 54091 - protein, 38 aa, Artificial Sequence; identical to SEQ ID NO: 15506
  GFR-binding peptide
  MOD_RES (6), (7): Xaa is C or S

SEQ ID NO: 54092 - protein, 32 aa, Artificial Sequence
  GFR-binding peptide
  MOD_RES (14), (15), (16), (17), (18): Xaa is A or G
  MOD_RES (19), (20), (21), (22): Xaa is A or G or is absent
VPTEEEPLTMLYYXXXXXXXXXEQLSNFLQHN

SEQ ID NO: 54093 - protein, 41 aa, Artificial Sequence
  GFR-binding peptide
  MOD_RES (6), (7), (39), (41): Xaa is C or S
YVPKPXXAPTKLSNITVQIMDDSSNVIIGEMSNMVVRSXGX

SEQ ID NO: 54094 - protein, 36 aa, Artificial Sequence; identical to SEQ ID NO: 15510
  GFR-binding peptide
  MOD_RES (3), (4), (36): Xaa is C or S

SEQ ID NO: 54095 - protein, 32 aa, Artificial Sequence
  GFR-binding peptide
  MOD_RES (14), (15), (16), (17), (18): Xaa is A or G
  MOD_RES (19), (20), (21), (22): Xaa is A or G or is absent
VPQDLRPVQIRKIXXXXXXXXXKKATVMVVKS

SEQ ID NO: 54096 - protein, 34 aa, Artificial Sequence
  GFR-binding peptide
  MOD_RES (31), (33): Xaa is C or S
VPQALSNITIQIMVGRKPKVIGEMSMIVRSXKXS

SEQ ID NO: 54097 - protein, 38 aa, Artificial Sequence
  GFR-binding peptide
  MOD_RES (1), (2), (36), (38): Xaa is C or S
  MOD_RES (16), (17), (18), (19), (20): Xaa is A or G
  MOD_RES (21), (22), (23), (24): Xaa is A or G or is absent
XXVPTELRPVQMRKIXXXXXXXXXKKATVEMVVEGXGX

SEQ ID NO: 54098 - protein, 35 aa, Artificial Sequence
  GFR-binding peptide
  MOD_RES (3), (35): Xaa is C or S
PTXAPTKLSNITVQIMDDSSNVIIGEMSNMVVRSX

SEQ ID NO: 54099 - protein, 36 aa, Artificial Sequence
  GFR-binding peptide
  MOD_RES (1), (2), (36): Xaa is C or S
  MOD_RES (16), (17), (18), (19), (20): Xaa is A or G
  MOD_RES (21), (22), (23), (24): Xaa is A or G or is absent
XXVPTELSNITMQIMXXXXXXXXXIGEMSEMVVEGX

SEQ ID NO: 54100 - protein, 34 aa, Artificial Sequence
  GFR-binding peptide
  MOD_RES (2), (2): Xaa is C or S
EXVPTEEEPLPMVYYRIKPHQGQHEQLSNFLQHN

SEQ ID NO: 54101 - protein, 37 aa, Artificial Sequence
  GFR-binding peptide
  MOD_RES (34), (36): Xaa is C or S
VPTEEEPLPMVYYRIKPHQGQHEQLSNFLQHNKXEXR

SEQ ID NO: 54102 - protein, 35 aa, Artificial Sequence
  GFR-binding peptide
  MOD_RES (1), (2): Xaa is C or S
  MOD_RES (16), (17), (18), (19), (20): Xaa is A or G
  MOD_RES (21), (22), (23), (24): Xaa is A or G or is absent
XXVPTELRPVQMRKIXXXXXXXXXKKATVDMVVEG

SEQ ID NO: 54103 - protein, 37 aa, Artificial Sequence; identical to SEQ ID NO: 15512
  GFR-binding peptide
  MOD_RES (4), (5): Xaa is C or S
  MOD_RES (19), (20), (21), (22), (23): Xaa is A or G
  MOD_RES (24), (25), (26), (27): Xaa is A or G or is absent

SEQ ID NO: 54104 - protein, 38 aa, Artificial Sequence; identical to SEQ ID NO: 18907
  GFR-binding peptide
  MOD_RES (35), (37): Xaa is C or S

SEQ ID NO: 54105 - protein, 39 aa, Artificial Sequence; identical to SEQ ID NO: 15514
  GFR-binding peptide
  MOD_RES (5), (6): Xaa is C or S
  MOD_RES (20), (21), (22), (23), (24): Xaa is A or G
  MOD_RES (25), (26), (27), (28): Xaa is A or G or is absent

SEQ ID NO: 54106 - protein, 41 aa, Artificial Sequence; identical to SEQ ID NO: 18911
  GFR-binding peptide
  MOD_RES (2), (39), (41): Xaa is C or S
  MOD_RES (18), (19), (20), (21), (22): Xaa is A or G
  MOD_RES (23), (24), (25), (26): Xaa is A or G or is absent

SEQ ID NO: 54107 - protein, 37 aa, Artificial Sequence
  GFR-binding peptide
  MOD_RES (3), (4), (36): Xaa is C or S
KPXXAPTQLRSVKVAKVDDSSNVIKEVQVNMVVRAXG

SEQ ID NO: 54108 - protein, 38 aa, Artificial Sequence; identical to SEQ ID NO: 18912
  GFR-binding peptide
  MOD_RES (37), (37): Xaa is C or S
  MOD_RES (16), (17), (18), (19), (20): Xaa is A or G
  MOD_RES (21), (22), (23), (24): Xaa is A or G or is absent

SEQ ID NO: 54109 - protein, 35 aa, Artificial Sequence; identical to SEQ ID NO: 15520
  GFR-binding peptide
  MOD_RES (2), (3), (35): Xaa is C or S

SEQ ID NO: 54110 - protein, 36 aa, Artificial Sequence; identical to SEQ ID NO: 15521
  GFR-binding peptide
  MOD_RES (33), (35): Xaa is C or S
  MOD_RES (14), (15), (16), (17), (18): Xaa is A or G
  MOD_RES (19), (20), (21), (22): Xaa is A or G or is absent

SEQ ID NO: 54111 - protein, 38 aa, Artificial Sequence; identical to SEQ ID NO: 38912
  GFR-binding peptide
  MOD_RES (2), (3), (36), (38): Xaa is C or S
  MOD_RES (17), (18), (19), (20), (21): Xaa is A or G
  MOD_RES (22), (23), (24), (25): Xaa is A or G or is absent

SEQ ID NO: 54112 - protein, 39 aa, Artificial Sequence; identical to SEQ ID NO: 18915
  GFR-binding peptide
  MOD_RES (4), (4): Xaa is C or S

SEQ ID NO: 54113 - protein, 33 aa, Artificial Sequence; identical to SEQ ID NO: 18918
  GFR-binding peptide
  MOD_RES (14), (15), (16), (17), (18): Xaa is A or G
  MOD_RES (19), (20), (21), (22): Xaa is A or G or is absent

SEQ ID NO: 54114 - protein, 32 aa, Artificial Sequence
  GFR-binding peptide
  MOD_RES (1), (1): Xaa is C or S
XVPTELRPVQMRKIDEYDKVVKKATVEMVVEG

SEQ ID NO: 54115 - protein, 33 aa, Artificial Sequence; identical to SEQ ID NO: 15527
  GFR-binding peptide
  MOD_RES (1), (2): Xaa is C or S

SEQ ID NO: 54116 - protein, 41 aa, Artificial Sequence; identical to SEQ ID NO: 18921
  GFR-binding peptide
  MOD_RES (2), (39), (41): Xaa is C or S
  MOD_RES (18), (19), (20), (21), (22): Xaa is A or G
  MOD_RES (23), (24), (25), (26): Xaa is A or G or is absent

SEQ ID NO: 54117 - protein, 35 aa, Artificial Sequence; identical to SEQ ID NO: 15528
  GFR-binding peptide
  MOD_RES (1), (2), (35): Xaa is C or S
  MOD_RES (16), (17), (18), (19), (20): Xaa is A or G
  MOD_RES (21), (22), (23), (24): Xaa is A or G or is absent

SEQ ID NO: 54118 - protein, 37 aa, Artificial Sequence; identical to SEQ ID NO: 15530
  GFR-binding peptide
  MOD_RES (4), (5): Xaa is C or S
  MOD_RES (19), (20), (21), (22), (23): Xaa is A or G
  MOD_RES (24), (25), (26), (27): Xaa is A or G or is absent

SEQ ID NO: 54119 - protein, 35 aa, Artificial Sequence; identical to SEQ ID NO: 15531
  GFR-binding peptide
  MOD_RES (33), (35): Xaa is C or S
  MOD_RES (14), (15), (16), (17), (18): Xaa is A or G
  MOD_RES (19), (20), (21), (22): Xaa is A or G or is absent

SEQ ID NO: 54120 - protein, 41 aa, Artificial Sequence
  GFR-binding peptide
  MOD_RES (3), (4), (38), (40): Xaa is C or S
  MOD_RES (18), (19), (20), (21), (22): Xaa is A or G
  MOD_RES (23), (24), (25), (26): Xaa is A or G or is absent
KPXXAPTQLSNITVQIMXXXXXXXXXIGEMSNMVVRAXGXH

SEQ ID NO: 54121 - protein, 36 aa, Artificial Sequence; identical to SEQ ID NO: 15533
  GFR-binding peptide
  MOD_RES (3), (4), (35): Xaa is C or S

SEQ ID NO: 54122 - protein, 36 aa, Artificial Sequence; identical to SEQ ID NO: 15535
  GFR-binding peptide
  MOD_RES (4), (5): Xaa is C or S

SEQ ID NO: 54123 - protein, 37 aa, Artificial Sequence
  GFR-binding peptide
  MOD_RES (5), (6): Xaa is C or S
VPKPXXAPTKLRSVKVAKVDDSSNVIKEVQVNMVVRS

SEQ ID NO: 54124 - protein, 34 aa, Artificial Sequence
  GFR-binding peptide
  MOD_RES (1), (2): Xaa is C or S
  MOD_RES (16), (17), (18), (19), (20): Xaa is A or G
  MOD_RES (21), (22), (23), (24): Xaa is A or G or is absent
XXVPTELRPVQMRKIXXXXXXXXXKKATVEMVVE

SEQ ID NO: 54125 - protein, 41 aa, Artificial Sequence
  GFR-binding peptide
  MOD_RES (6), (7), (38), (40): Xaa is C or S
ASAAPXXVPQALRSVKIAKVVGRKPKVKEVQVMIVRSXKXS

SEQ ID NO: 54126 - protein, 35 aa, Artificial Sequence
  GFR-binding peptide
  MOD_RES (1), (35): Xaa is C or S
  MOD_RES (15), (16), (17), (18), (19): Xaa is A or G
  MOD_RES (20), (21), (22), (23): Xaa is A or G or is absent
XVPTEEEPLTMLYYXXXXXXXXXEQLSNFLQHNKX

SEQ ID NO: 54127 - protein, 37 aa, Artificial Sequence
  GFR-binding peptide
  MOD_RES (1), (2), (35), (37): Xaa is C or S
  MOD_RES (16), (17), (18), (19), (20): Xaa is A or G
  MOD_RES (21), (22), (23), (24): Xaa is A or G or is absent
XXVSQDLSNITIQIMXXXXXXXXXIGEMSMIVKSXKX

SEQ ID NO: 54128 - protein, 34 aa, Artificial Sequence
  GFR-binding peptide
  MOD_RES (1), (1): Xaa is C or S
  MOD_RES (15), (16), (17), (18), (19): Xaa is A or G
  MOD_RES (20), (21), (22), (23): Xaa is A or G or is absent
XVPTEEEPLTMLYYXXXXXXXXXEQLSNFLQHNK

SEQ ID NO: 54129 - protein, 35 aa, Artificial Sequence; identical to SEQ ID NO: 18932
  GFR-binding peptide
  MOD_RES (35), (35): Xaa is C or S
  MOD_RES (14), (15), (16), (17), (18): Xaa is A or G
  MOD_RES (19), (20), (21), (22): Xaa is A or G or is absent

SEQ ID NO: 54130 - protein, 36 aa, Artificial Sequence
  GFR-binding peptide
  MOD_RES (2), (36): Xaa is C or S
EXVPTEEEPLTMLYYRIKPHQGQHEQLSNFLQHNKX

SEQ ID NO: 54131 - protein, 32 aa, Artificial Sequence; identical to SEQ ID NO: 15542
  GFR-binding peptide
  MOD_RES (14), (15), (16), (17), (18): Xaa is A or G
  MOD_RES (19), (20), (21), (22): Xaa is A or G or is absent

SEQ ID NO: 54132 - protein, 34 aa, Artificial Sequence; identical to SEQ ID NO: 15543
  GFR-binding peptide
  MOD_RES (1), (2), (34): Xaa is C or S

SEQ ID NO: 54133 - protein, 34 aa, Artificial Sequence; identical to SEQ ID NO: 18937
  GFR-binding peptide

SEQ ID NO: 54134 - protein, 42 aa, Artificial Sequence; identical to SEQ ID NO: 15546
  GFR-binding peptide
  MOD_RES (6), (7), (40), (42): Xaa is C or S
  MOD_RES (21), (22), (23), (24), (25): Xaa is A or G
  MOD_RES (26), (27), (28), (29): Xaa is A or G or is absent

SEQ ID NO: 54135 - protein, 33 aa, Artificial Sequence; identical to SEQ ID NO: 18938
  GFR-binding peptide
  MOD_RES (14), (15), (16), (17), (18): Xaa is A or G
  MOD_RES (19), (20), (21), (22): Xaa is A or G or is absent

SEQ ID NO: 54136 - protein, 36 aa, Artificial Sequence
  GFR-binding peptide
  MOD_RES (3), (4): Xaa is C or S
  MOD_RES (18), (19), (20), (21), (22): Xaa is A or G
  MOD_RES (23), (24), (25), (26): Xaa is A or G or is absent
KPXXAPTKLRPVQVRKIXXXXXXXXXKKATVNMVVR

SEQ ID NO: 54137 - protein, 39 aa, Artificial Sequence
  GFR-binding peptide
  MOD_RES (5), (6), (38): Xaa is C or S
VPKPXXAPTKLSNITVQIMDDSSNVIIGEMSNMVVRSXG

SEQ ID NO: 54138 - protein, 32 aa, Artificial Sequence
  GFR-binding peptide
  MOD_RES (1), (2): Xaa is C or S
XXAPTKLRSVKVAKVDDSSNVIKEVQVNMVVR

SEQ ID NO: 54139 - protein, 33 aa, Artificial Sequence; identical to SEQ ID NO: 18940
  GFR-binding peptide
  MOD_RES (14), (15), (16), (17), (18): Xaa is A or G
  MOD_RES (19), (20), (21), (22): Xaa is A or G or is absent

SEQ ID NO: 54140 - protein, 36 aa, Artificial Sequence; identical to SEQ ID NO: 15549
  GFR-binding peptide
  MOD_RES (4), (5): Xaa is C or S

SEQ ID NO: 54141 - protein, 35 aa, Artificial Sequence
  GFR-binding peptide
  MOD_RES (1), (35): Xaa is C or S
  MOD_RES (15), (16), (17), (18), (19): Xaa is A or G
  MOD_RES (20), (21), (22), (23): Xaa is A or G or is absent
XVPTELSNITMQIMXXXXXXXXXIGEMSEMVVEGX

SEQ ID NO: 54142 - protein, 35 aa, Artificial Sequence
  GFR-binding peptide
  MOD_RES (15), (16), (17), (18), (19): Xaa is A or G
  MOD_RES (20), (21), (22), (23): Xaa is A or G or is absent
PSRVHHEPLTVLYYXXXXXXXXXEQLSNRLEEHLE

SEQ ID NO: 54143 - protein, 36 aa, Artificial Sequence
  GFR-binding peptide
  MOD_RES (2), (3): Xaa is C or S
  MOD_RES (17), (18), (19), (20), (21): Xaa is A or G
  MOD_RES (22), (23), (24), (25): Xaa is A or G or is absent
PXXAPTKLRSVKVAKVXXXXXXXXXKEVQVNMVVRS

SEQ ID NO: 54144 - protein, 42 aa, Artificial Sequence; identical to SEQ ID NO: 15550
  GFR-binding peptide
  MOD_RES (5), (6), (39), (41): Xaa is C or S
  MOD_RES (20), (21), (22), (23), (24): Xaa is A or G
  MOD_RES (25), (26), (27), (28): Xaa is A or G or is absent

SEQ ID NO: 54145 - protein, 41 aa, Artificial Sequence; identical to SEQ ID NO: 15551
  GFR-binding peptide
  MOD_RES (4), (5), (39), (41): Xaa is C or S
  MOD_RES (19), (20), (21), (22), (23): Xaa is A or G
  MOD_RES (24), (25), (26), (27): Xaa is A or G or is absent

SEQ ID NO: 54146 - protein, 38 aa, Artificial Sequence; identical to SEQ ID NO: 15553
  GFR-binding peptide
  MOD_RES (6), (7): Xaa is C or S

SEQ ID NO: 54147 - protein, 40 aa, Artificial Sequence
  GFR-binding peptide
  MOD_RES (3), (40): Xaa is C or S
VKXQPSRVHHEPLTVLYYEYVRKKPKLEQLSNRLEEHLEX

SEQ ID NO: 54148 - protein, 32 aa, Artificial Sequence; identical to SEQ ID NO: 15555
  GFR-binding peptide
  MOD_RES (1), (1): Xaa is C or S

SEQ ID NO: 54149 - protein, 39 aa, Artificial Sequence; identical to SEQ ID NO: 15556
  GFR-binding peptide
  MOD_RES (4), (5), (39): Xaa is C or S
  MOD_RES (19), (20), (21), (22), (23): Xaa is A or G
  MOD_RES (24), (25), (26), (27): Xaa is A or G or is absent

SEQ ID NO: 54150 - protein, 38 aa, Artificial Sequence; identical to SEQ ID NO: 15557
  GFR-binding peptide
  MOD_RES (3), (35), (37): Xaa is C or S

SEQ ID NO: 54151 - protein, 41 aa, Artificial Sequence; identical to SEQ ID NO: 15558
  GFR-binding peptide
  MOD_RES (6), (7), (41): Xaa is C or S
  MOD_RES (21), (22), (23), (24), (25): Xaa is A or G
  MOD_RES (26), (27), (28), (29): Xaa is A or G or is absent

SEQ ID NO: 54152 - protein, 38 aa, Artificial Sequence
  GFR-binding peptide
  MOD_RES (4), (5), (38): Xaa is C or S
  MOD_RES (19), (20), (21), (22), (23): Xaa is A or G
  MOD_RES (24), (25), (26), (27): Xaa is A or G or is absent
AAPXXVPQALRPVQIRKIXXXXXXXXXKKATVMIVRSX

SEQ ID NO: 54153 - protein, 37 aa, Artificial Sequence; identical to SEQ ID NO: 18945
  GFR-binding peptide
  MOD_RES (3), (3): Xaa is C or S
  MOD_RES (19), (20), (21), (22), (23): Xaa is A or G
  MOD_RES (24), (25), (26), (27): Xaa is A or G or is absent

SEQ ID NO: 54154 - protein, 42 aa, Artificial Sequence; identical to SEQ ID NO: 15559
  GFR-binding peptide
  MOD_RES (5), (39), (41): Xaa is C or S
  MOD_RES (19), (20), (21), (22), (23): Xaa is A or G
  MOD_RES (24), (25), (26), (27): Xaa is A or G or is absent

SEQ ID NO: 54155 - protein, 40 aa, Artificial Sequence; identical to SEQ ID NO: 15560
  GFR-binding peptide
  MOD_RES (6), (7), (40): Xaa is C or S
  MOD_RES (21), (22), (23), (24), (25): Xaa is A or G
  MOD_RES (26), (27), (28), (29): Xaa is A or G or is absent

SEQ ID NO: 54156 - protein, 37 aa, Artificial Sequence
  GFR-binding peptide
  MOD_RES (6), (7): Xaa is C or S
ASASPXXVPQDLRPVQIRKIVGRTPKVKKATVMVVKS

SEQ ID NO: 54157 - protein, 42 aa, Artificial Sequence; identical to SEQ ID NO: 15565
  GFR-binding peptide
  MOD_RES (6), (7), (40), (42): Xaa is C or S
  MOD_RES (21), (22), (23), (24), (25): Xaa is A or G
  MOD_RES (26), (27), (28), (29): Xaa is A or G or is absent

SEQ ID NO: 54158 - protein, 42 aa, Artificial Sequence
  GFR-binding peptide
  MOD_RES (4), (5), (39), (41): Xaa is C or S
  MOD_RES (19), (20), (21), (22), (23): Xaa is A or G
  MOD_RES (24), (25), (26), (27): Xaa is A or G or is absent
PKAXXVPTELRPVQMRKIXXXXXXXXXKKATVEMVVEGXGXR

SEQ ID NO: 54159 - protein, 37 aa, Artificial Sequence; identical to SEQ ID NO: 18951
  GFR-binding peptide
  MOD_RES (5), (5): Xaa is C or S

SEQ ID NO: 54160 - protein, 37 aa, Artificial Sequence
  GFR-binding peptide
  MOD_RES (1), (34), (36): Xaa is C or S
  MOD_RES (15), (16), (17), (18), (19): Xaa is A or G
  MOD_RES (20), (21), (22), (23): Xaa is A or G or is absent
XVPQALRPVQIRKIXXXXXXXXXKKATVMIVRSXKXS

SEQ ID NO: 54161 - protein, 38 aa, Artificial Sequence
  GFR-binding peptide
  MOD_RES (3), (4), (35), (37): Xaa is C or S
APXXVPQALRSVKIAKVVGRKPKVKEVQVMIVRSXKXS

SEQ ID NO: 54162 - protein, 37 aa, Artificial Sequence
  GFR-binding peptide
  MOD_RES (6), (7): Xaa is C or S
ASASPXXVPQDLRSVKIAKVVGRTPKVKEVQVMVVKS

SEQ ID NO: 54163 - protein, 32 aa, Artificial Sequence
  GFR-binding peptide
  MOD_RES (32), (32): Xaa is C or S
VPTELSNITMQIMDEYDKVVIGEMSEMVVEGX

SEQ ID NO: 54164 - protein, 35 aa, Artificial Sequence
  GFR-binding peptide
  MOD_RES (2), (3): Xaa is C or S
  MOD_RES (17), (18), (19), (20), (21): Xaa is A or G
  MOD_RES (22), (23), (24), (25): Xaa is A or G or is absent
AXXVPTELRSVKMAKVXXXXXXXXXKEVQVDMVVE

SEQ ID NO: 54165 - protein, 32 aa, Artificial Sequence
  GFR-binding peptide
  MOD_RES (1), (32): Xaa is C or S
XVPQALSNITIQIMVGRKPKVIGEMSMIVRSX

SEQ ID NO: 54166 - protein, 33 aa, Artificial Sequence; identical to SEQ ID NO: 15571
  GFR-binding peptide
  MOD_RES (1), (32): Xaa is C or S

SEQ ID NO: 54167 - protein, 37 aa, Artificial Sequence; identical to SEQ ID NO: 15573
  GFR-binding peptide
  MOD_RES (3), (4): Xaa is C or S
  MOD_RES (18), (19), (20), (21), (22): Xaa is A or G
  MOD_RES (23), (24), (25), (26): Xaa is A or G or is absent

SEQ ID NO: 54168 - protein, 38 aa, Artificial Sequence; identical to SEQ ID NO: 38984
  GFR-binding peptide
  MOD_RES (5), (6): Xaa is C or S
  MOD_RES (20), (21), (22), (23), (24): Xaa is A or G
  MOD_RES (25), (26), (27), (28): Xaa is A or G or is absent

SEQ ID NO: 54169 - protein, 38 aa, Artificial Sequence; identical to SEQ ID NO: 15576
  GFR-binding peptide
  MOD_RES (3), (4), (36), (38): Xaa is C or S

SEQ ID NO: 54170 - protein, 42 aa, Artificial Sequence
  GFR-binding peptide
  MOD_RES (3), (40), (42): Xaa is C or S
VQXRPTQVQLEPLPVVYYEIVRKKPIFEQLSNTLEDHLAXKX

SEQ ID NO: 54171 - protein, 41 aa, Artificial Sequence
  GFR-binding peptide
  MOD_RES (2), (39), (41): Xaa is C or S
  MOD_RES (18), (19), (20), (21), (22): Xaa is A or G
  MOD_RES (23), (24), (25), (26): Xaa is A or G or is absent
KXQPSRVHHEPLPVVYYXXXXXXXXXEQLSNRLEEHLEXAX

SEQ ID NO: 54172 - protein, 36 aa, Artificial Sequence
  GFR-binding peptide
  MOD_RES (3), (4): Xaa is C or S
  MOD_RES (18), (19), (20), (21), (22): Xaa is A or G
  MOD_RES (23), (24), (25), (26): Xaa is A or G or is absent
KAXXVPTELRSVKMAKVXXXXXXXXXKEVQVDMVVE

SEQ ID NO: 54173 - protein, 33 aa, Artificial Sequence; identical to SEQ ID NO: 18960
  GFR-binding peptide
  MOD_RES (15), (16), (17), (18), (19): Xaa is A or G
  MOD_RES (20), (21), (22), (23): Xaa is A or G or is absent

SEQ ID NO: 54174 - protein, 37 aa, Artificial Sequence
  GFR-binding peptide
  MOD_RES (6), (7): Xaa is C or S
ASAAPXXVPQALSNITIQIMVGRKPKVIGEMSMIVRS

SEQ ID NO: 54175 - protein, 41 aa, Artificial Sequence
  GFR-binding peptide
  MOD_RES (4), (38), (40): Xaa is C or S
  MOD_RES (18), (19), (20), (21), (22): Xaa is A or G
  MOD_RES (23), (24), (25), (26): Xaa is A or G or is absent
GLEXVPTEEEPLPMVYYXXXXXXXXXEQLSNFLQHNKXEXR

SEQ ID NO: 54176 - protein, 32 aa, Artificial Sequence
  GFR-binding peptide
  MOD_RES (14), (15), (16), (17), (18): Xaa is A or G
  MOD_RES (19), (20), (21), (22): Xaa is A or G or is absent
SRVHHEPLPVVYYXXXXXXXXXEQLSNRLEEH

SEQ ID NO: 54177 - protein, 43 aa, Artificial Sequence; identical to SEQ ID NO: 18961
  GFR-binding peptide
  MOD_RES (3), (40), (42): Xaa is C or S
  MOD_RES (19), (20), (21), (22), (23): Xaa is A or G
  MOD_RES (24), (25), (26), (27): Xaa is A or G or is absent

SEQ ID NO: 54178 - protein, 40 aa, Artificial Sequence
  GFR-binding peptide
  MOD_RES (1), (38), (40): Xaa is C or S
  MOD_RES (17), (18), (19), (20), (21): Xaa is A or G
  MOD_RES (22), (23), (24), (25): Xaa is A or G or is absent
XQPSRVHHEPLPVVYYXXXXXXXXXEQLSNRLEEHLEXAX

SEQ ID NO: 54179 - protein, 35 aa, Artificial Sequence; identical to SEQ ID NO: 15583
  GFR-binding peptide
  MOD_RES (2), (3), (34): Xaa is C or S

SEQ ID NO: 54180 - protein, 39 aa, Artificial Sequence
  GFR-binding peptide
  MOD_RES (3), (4), (38): Xaa is C or S
  MOD_RES (18), (19), (20), (21), (22): Xaa is A or G
  MOD_RES (23), (24), (25), (26): Xaa is A or G or is absent
KAXXVPTELSNITMQIMXXXXXXXXXIGEMSDMVVEGXG

SEQ ID NO: 54181 - protein, 36 aa, Artificial Sequence
  GFR-binding peptide
  MOD_RES (5), (6): Xaa is C or S
SASPXXVPQDLSNITIQIMVGRTPKVIGEMSMVVKS

SEQ ID NO: 54182 - protein, 39 aa, Artificial Sequence; identical to SEQ ID NO: 15586
  GFR-binding peptide
  MOD_RES (3), (4), (37), (39): Xaa is C or S
  MOD_RES (18), (19), (20), (21), (22): Xaa is A or G
  MOD_RES (23), (24), (25), (26): Xaa is A or G or is absent

SEQ ID NO: 54183 - protein, 36 aa, Artificial Sequence
  GFR-binding peptide
  MOD_RES (2), (3): Xaa is C or S
  MOD_RES (17), (18), (19), (20), (21): Xaa is A or G
  MOD_RES (22), (23), (24), (25): Xaa is A or G or is absent
PXXAPTKLRPVQVRKIXXXXXXXXXKKATVNMVVRS

SEQ ID NO: 54184 - protein, 38 aa, Artificial Sequence
  GFR-binding peptide
  MOD_RES (36), (38): Xaa is C or S
  MOD_RES (15), (16), (17), (18), (19): Xaa is A or G
  MOD_RES (20), (21), (22), (23): Xaa is A or G or is absent
PSRVHHEPLPVVYYXXXXXXXXXEQLSNRLEEHLEXAX

SEQ ID NO: 54185 - protein, 35 aa, Artificial Sequence
  GFR-binding peptide
  MOD_RES (2), (3), (35): Xaa is C or S
PXXAPTQLRSVKVAKVDDSSNVIKEVQVNMVVRAX

SEQ ID NO: 54186 - protein, 36 aa, Artificial Sequence
  GFR-binding peptide
  MOD_RES (2), (3), (34), (36): Xaa is C or S
PXXVPQDLSNITIQIMVGRTPKVIGEMSMVVKSXKX

SEQ ID NO: 54187 - protein, 37 aa, Artificial Sequence; identical to SEQ ID NO: 15588
  GFR-binding peptide
  MOD_RES (6), (6): Xaa is C or S

SEQ ID NO: 54188 - protein, 40 aa, Artificial Sequence; identical to SEQ ID NO: 18962
  GFR-binding peptide
  MOD_RES (37), (39): Xaa is C or S

SEQ ID NO: 54189 - protein, 37 aa, Artificial Sequence; identical to SEQ ID NO: 18963
  GFR-binding peptide
  MOD_RES (36), (36): Xaa is C or S

SEQ ID NO: 54190 - protein, 38 aa, Artificial Sequence; identical to SEQ ID NO: 18965
  GFR-binding peptide
  MOD_RES (5), (5): Xaa is C or S
  MOD_RES (19), (20), (21), (22), (23): Xaa is A or G
  MOD_RES (24), (25), (26), (27): Xaa is A or G or is absent

SEQ ID NO: 54191 - protein, 38 aa, Artificial Sequence
  GFR-binding peptide
  MOD_RES (1), (2), (36), (38): Xaa is C or S
  MOD_RES (16), (17), (18), (19), (20): Xaa is A or G
  MOD_RES (21), (22), (23), (24): Xaa is A or G or is absent
XXAPTKLRPVQVRKIXXXXXXXXXKKATVNMVVRSXGX

SEQ ID NO: 54192 - protein, 35 aa, Artificial Sequence; identical to SEQ ID NO: 18967
  GFR-binding peptide
  MOD_RES (34), (34): Xaa is C or S

SEQ ID NO: 54193 - protein, 42 aa, Artificial Sequence; identical to SEQ ID NO: 18970
  GFR-binding peptide
  MOD_RES (4), (41): Xaa is C or S
  MOD_RES (20), (21), (22), (23), (24): Xaa is A or G
  MOD_RES (25), (26), (27), (28): Xaa is A or G or is absent

SEQ ID NO: 54194 - protein, 38 aa, Artificial Sequence
  GFR-binding peptide
  MOD_RES (5), (6): Xaa is C or S
  MOD_RES (20), (21), (22), (23), (24): Xaa is A or G
  MOD_RES (25), (26), (27), (28): Xaa is A or G or is absent
SAAPXXVPQALRSVKIAKVXXXXXXXXXKEVQVMIVRS

SEQ ID NO: 54195 - protein, 41 aa, Artificial Sequence; identical to SEQ ID NO: 15591
  GFR-binding peptide
  MOD_RES (5), (6), (38), (40): Xaa is C or S

SEQ ID NO: 54196 - protein, 37 aa, Artificial Sequence; identical to SEQ ID NO: 15592
  GFR-binding peptide
  MOD_RES (3), (4): Xaa is C or S
  MOD_RES (18), (19), (20), (21), (22): Xaa is A or G
  MOD_RES (23), (24), (25), (26): Xaa is A or G or is absent

SEQ ID NO: 54197 - protein, 35 aa, Artificial Sequence
  GFR-binding peptide
  MOD_RES (2), (3): Xaa is C or S
  MOD_RES (17), (18), (19), (20), (21): Xaa is A or G
  MOD_RES (22), (23), (24), (25): Xaa is A or G or is absent
PXXAPTKLRPVQVRKIXXXXXXXXXKKATVNMVVR

SEQ ID NO: 54198 - protein, 37 aa, Artificial Sequence
  GFR-binding peptide
  MOD_RES (3), (4), (37): Xaa is C or S
  MOD_RES (18), (19), (20), (21), (22): Xaa is A or G
  MOD_RES (23), (24), (25), (26): Xaa is A or G or is absent
SPXXVSQDLRPVQIRKIXXXXXXXXXKKATVMIVKSX

SEQ ID NO: 54199 - protein, 34 aa, Artificial Sequence
  GFR-binding peptide
  MOD_RES (3), (4): Xaa is C or S
KAXXVPTELRSVKMAKVDEYDKVVKEVQVEMVVE

SEQ ID NO: 54200 - protein, 40 aa, Artificial Sequence; identical to SEQ ID NO: 15594
  GFR-binding peptide
  MOD_RES (6), (7), (39): Xaa is C or S

SEQ ID NO: 54201 - protein, 34 aa, Artificial Sequence
  GFR-binding peptide
  MOD_RES (1), (2), (33): Xaa is C or S
XXVPQDLSNITIQIMVGRTPKVIGEMSMVVKSXK

SEQ ID NO: 54202 - protein, 35 aa, Artificial Sequence; identical to SEQ ID NO: 15595
  GFR-binding peptide
  MOD_RES (34), (34): Xaa is C or S
  MOD_RES (14), (15), (16), (17), (18): Xaa is A or G
  MOD_RES (19), (20), (21), (22): Xaa is A or G or is absent

SEQ ID NO: 54203 - protein, 44 aa, Artificial Sequence
  GFR-binding peptide
  MOD_RES (5), (42), (44): Xaa is C or S
  MOD_RES (21), (22), (23), (24), (25): Xaa is A or G
  MOD_RES (26), (27), (28), (29): Xaa is A or G or is absent
SSVKXQPSRVHHEPLTVLYYXXXXXXXXXEQLSNRLEEHLEXAX

SEQ ID NO: 54204 - protein, 37 aa, Artificial Sequence
  GFR-binding peptide
  MOD_RES (34), (36): Xaa is C or S
  MOD_RES (14), (15), (16), (17), (18): Xaa is A or G
  MOD_RES (19), (20), (21), (22): Xaa is A or G or is absent
VPTELSNITMQIMXXXXXXXXXIGEMSEMVVEGXGXR

SEQ ID NO: 54205 - protein, 36 aa, Artificial Sequence
  GFR-binding peptide
  MOD_RES (5), (6): Xaa is C or S
SAAPXXVPQALRSVKIAKVVGRKPKVKEVQVMIVRS

SEQ ID NO: 54206 - protein, 40 aa, Artificial Sequence; identical to SEQ ID NO: 15598
  GFR-binding peptide
  MOD_RES (6), (7), (39): Xaa is C or S

SEQ ID NO: 54207 - protein, 33 aa, Artificial Sequence; identical to SEQ ID NO: 15599
  GFR-binding peptide
  MOD_RES (1), (2): Xaa is C or S

SEQ ID NO: 54208 - protein, 36 aa, Artificial Sequence
  GFR-binding peptide
  MOD_RES (1), (2), (33), (35): Xaa is C or S
XXVPQALRSVKIAKVVGRKPKVKEVQVMIVRSXKXS

SEQ ID NO: 54209 - protein, 41 aa, Artificial Sequence; identical to SEQ ID NO: 18976
  GFR-binding peptide
  MOD_RES (1), (38), (40): Xaa is C or S
  MOD_RES (17), (18), (19), (20), (21): Xaa is A or G
  MOD_RES (22), (23), (24), (25): Xaa is A or G or is absent

SEQ ID NO: 54210 - protein, 39 aa, Artificial Sequence; identical to SEQ ID NO: 18977
  GFR-binding peptide
  MOD_RES (37), (39): Xaa is C or S

SEQ ID NO: 54211 - protein, 38 aa, Artificial Sequence
  GFR-binding peptide
  MOD_RES (2), (3), (36), (38): Xaa is C or S
  MOD_RES (17), (18), (19), (20), (21): Xaa is A or G
  MOD_RES (22), (23), (24), (25): Xaa is A or G or is absent
PXXVPQDLRPVQIRKIXXXXXXXXXKKATVMVVKSXKX

SEQ ID NO: 54212 - protein, 39 aa, Artificial Sequence
  GFR-binding peptide
  MOD_RES (5), (6), (37), (39): Xaa is C or S
SAAPXXVPQALRSVKIAKVVGRKPKVKEVQVMIVRSXKX

SEQ ID NO: 54213 - protein, 41 aa, Artificial Sequence
  GFR-binding peptide
  MOD_RES (4), (5), (39), (41): Xaa is C or S
  MOD_RES (19), (20), (21), (22), (23): Xaa is A or G
  MOD_RES (24), (25), (26), (27): Xaa is A or G or is absent
PKAXXVPTELSNITMQIMXXXXXXXXXIGEMSDMVVEGXGX

SEQ ID NO: 54214 - protein, 33 aa, Artificial Sequence
  GFR-binding peptide
  MOD_RES (1), (32): Xaa is C or S
XVSQDLRPVQIRKIIGKTPKIKKATVMIVKSXK

SEQ ID NO: 54215 - protein, 45 aa, Artificial Sequence
  GFR-binding peptide
  MOD_RES (5), (42), (44): Xaa is C or S
  MOD_RES (21), (22), (23), (24), (25): Xaa is A or G
  MOD_RES (26), (27), (28), (29): Xaa is A or G or is absent
RNVQXRPTQVQLEPLTVLYYXXXXXXXXXEQLSNTLEDHLAXKXE

SEQ ID NO: 54216 - protein, 36 aa, Artificial Sequence
  GFR-binding peptide
  MOD_RES (34), (36): Xaa is C or S
  MOD_RES (14), (15), (16), (17), (18): Xaa is A or G
  MOD_RES (19), (20), (21), (22): Xaa is A or G or is absent
VPTELSNITMQIMXXXXXXXXXIGEMSDMVVEGXGX

SEQ ID NO: 54217 - protein, 42 aa, Artificial Sequence; identical to SEQ ID NO: 18979
  GFR-binding peptide
  MOD_RES (2), (39), (41): Xaa is C or S
  MOD_RES (18), (19), (20), (21), (22): Xaa is A or G
  MOD_RES (23), (24), (25), (26): Xaa is A or G or is absent

SEQ ID NO: 54218 - protein, 35 aa, Artificial Sequence
  GFR-binding peptide
  MOD_RES (3), (4), (35): Xaa is C or S
SPXXVSQDLSNITIQIMIGKTPKIIGEMSMIVKSX

SEQ ID NO: 54219 - protein, 35 aa, Artificial Sequence; identical to SEQ ID NO: 15602
  GFR-binding peptide
  MOD_RES (1), (35): Xaa is C or S
  MOD_RES (15), (16), (17), (18), (19): Xaa is A or G
  MOD_RES (20), (21), (22), (23): Xaa is A or G or is absent

SEQ ID NO: 54220 - protein, 41 aa, Artificial Sequence; identical to SEQ ID NO: 15604
  GFR-binding peptide
  MOD_RES (5), (6), (40): Xaa is C or S
  MOD_RES (20), (21), (22), (23), (24): Xaa is A or G
  MOD_RES (25), (26), (27), (28): Xaa is A or G or is absent

SEQ ID NO: 54221 - protein, 36 aa, Artificial Sequence
  GFR-binding peptide
  MOD_RES (5), (6): Xaa is C or S
SAAPXXVPQALSNITIQIMVGRKPKVIGEMSMIVRS

SEQ ID NO: 54222 - protein, 34 aa, Artificial Sequence
  GFR-binding peptide
  MOD_RES (2), (3), (34): Xaa is C or S
PXXVSQDLRPVQIRKIIGKTPKIKKATVMIVKSX

SEQ ID NO: 54223 - protein, 34 aa, Artificial Sequence
  GFR-binding peptide
  MOD_RES (2), (3): Xaa is C or S
PXXAPTQLRSVKVAKVDDSSNVIKEVQVNMVVRA

SEQ ID NO: 54224 - protein, 36 aa, Artificial Sequence
  GFR-binding peptide
  MOD_RES (1), (2), (34), (36): Xaa is C or S
XXAPTKLSNITVQIMDDSSNVIIGEMSNMVVRSXGX

SEQ ID NO: 54225 - protein, 36 aa, Artificial Sequence
  GFR-binding peptide
  MOD_RES (1), (2), (36): Xaa is C or S
  MOD_RES (16), (17), (18), (19), (20): Xaa is A or G
  MOD_RES (21), (22), (23), (24): Xaa is A or G or is absent
XXVPTELRPVQMRKIXXXXXXXXXKKATVDMVVEGX

SEQ ID NO: 54226 - protein, 39 aa, Artificial Sequence
  GFR-binding peptide
  MOD_RES (3), (3): Xaa is C or S
VKXQPSRVHHEPLPVVYYEYVRKKPKLEQLSNRLEEHLE

SEQ ID NO: 54227 - protein, 39 aa, Artificial Sequence
  GFR-binding peptide
  MOD_RES (5), (6), (38): Xaa is C or S
VPKPXXAPTQLRSVKVAKVDDSSNVIKEVQVNMVVRAXG

SEQ ID NO: 54228 - protein, 39 aa, Artificial Sequence; identical to SEQ ID NO: 15610
  GFR-binding peptide
  MOD_RES (6), (7): Xaa is C or S
  MOD_RES (21), (22), (23), (24), (25): Xaa is A or G
  MOD_RES (26), (27), (28), (29): Xaa is A or G or is absent

SEQ ID NO: 54229 - protein, 41 aa, Artificial Sequence
  GFR-binding peptide
  MOD_RES (4), (5), (39), (41): Xaa is C or S
  MOD_RES (19), (20), (21), (22), (23): Xaa is A or G
  MOD_RES (24), (25), (26), (27): Xaa is A or G or is absent
PKAXXVPTELSNITMQIMXXXXXXXXXIGEMSEMVVEGXGX

SEQ ID NO: 54230 - protein, 40 aa, Artificial Sequence
  GFR-binding peptide
  MOD_RES (2), (39): Xaa is C or S
QXRPTQVQLEPLPVVYYEIVRKKPIFEQLSNTLEDHLAXK

SEQ ID NO: 54231 - protein, 37 aa, Artificial Sequence
  GFR-binding peptide
  MOD_RES (2), (36): Xaa is C or S
EXVPTEEEPLPMVYYRIKPHQGQHEQLSNFLQHNKXE

SEQ ID NO: 54232 - protein, 34 aa, Artificial Sequence; identical to SEQ ID NO: 18986
  GFR-binding peptide
  MOD_RES (1), (1): Xaa is C or S
  MOD_RES (15), (16), (17), (18), (19): Xaa is A or G
  MOD_RES (20), (21), (22), (23): Xaa is A or G or is absent

SEQ ID NO: 54233 - protein, 37 aa, Artificial Sequence; identical to SEQ ID NO: 18987
  GFR-binding peptide
  MOD_RES (1), (1): Xaa is C or S
  MOD_RES (17), (18), (19), (20), (21): Xaa is A or G
  MOD_RES (22), (23), (24), (25): Xaa is A or G or is absent

SEQ ID NO: 54234 - protein, 36 aa, Artificial Sequence
  GFR-binding peptide
  MOD_RES (34), (36): Xaa is C or S
  MOD_RES (14), (15), (16), (17), (18): Xaa is A or G
  MOD_RES (19), (20), (21), (22): Xaa is A or G or is absent
VPTELSNITMQIMXXXXXXXXXIGEMSEMVVEGXGX

SEQ ID NO: 54235 - protein, 37 aa, Artificial Sequence
  GFR-binding peptide
  MOD_RES (5), (6): Xaa is C or S
IPKAXXVPTELRSVKMAKVDENEKVVKEVQVDMVVEG

SEQ ID NO: 54236 - protein, 36 aa, Artificial Sequence
  GFR-binding peptide
  MOD_RES (1), (34), (36): Xaa is C or S
  MOD_RES (15), (16), (17), (18), (19): Xaa is A or G
  MOD_RES (20), (21), (22), (23): Xaa is A or G or is absent
XVSQDLSNITIQIMXXXXXXXXXIGEMSMIVKSXKX

SEQ ID NO: 54237 - protein, 35 aa, Artificial Sequence; identical to SEQ ID NO: 15622
  GFR-binding peptide
  MOD_RES (4), (4): Xaa is C or S

SEQ ID NO: 54238 - protein, 38 aa, Artificial Sequence
  GFR-binding peptide
  MOD_RES (1), (35), (37): Xaa is C or S
  MOD_RES (15), (16), (17), (18), (19): Xaa is A or G
  MOD_RES (20), (21), (22), (23): Xaa is A or G or is absent
XVPTELSNITMQIMXXXXXXXXXIGEMSDMVVEGXGXR

SEQ ID NO: 54239 - protein, 38 aa, Artificial Sequence
  GFR-binding peptide
  MOD_RES (1), (35), (37): Xaa is C or S
  MOD_RES (15), (16), (17), (18), (19): Xaa is A or G
  MOD_RES (20), (21), (22), (23): Xaa is A or G or is absent
XVPTELRSVKMAKVXXXXXXXXXKEVQVEMVVEGXGXR

SEQ ID NO: 54240 - protein, 38 aa, Artificial Sequence
  GFR-binding peptide
  MOD_RES (1), (38): Xaa is C or S
XQPSRVHHEPLTVLYYEYVRKKPKLEQLSNRLEEHLEX

SEQ ID NO: 54241 - protein, 34 aa, Artificial Sequence
  GFR-binding peptide
  MOD_RES (1), (33): Xaa is C or S
XVPTELSNITMQIMDEYDKVVIGEMSEMVVEGXG

SEQ ID NO: 54242 - protein, 37 aa, Artificial Sequence
  GFR-binding peptide
  MOD_RES (6), (7): Xaa is C or S
SIPKAXXVPTELRPVQMRKIDEYDKVVKKATVEMVVE

SEQ ID NO: 54243 - protein, 42 aa, Artificial Sequence
  GFR-binding peptide
  MOD_RES (6), (7), (41): Xaa is C or S
  MOD_RES (21), (22), (23), (24), (25): Xaa is A or G
  MOD_RES (26), (27), (28), (29): Xaa is A or G or is absent
YVPKPXXAPTKLRPVQVRKIXXXXXXXXXKKATVNMVVRSXG

SEQ ID NO: 54244 - protein, 43 aa, Artificial Sequence
  GFR-binding peptide
  MOD_RES (6), (40), (42): Xaa is C or S
  MOD_RES (20), (21), (22), (23), (24): Xaa is A or G
  MOD_RES (25), (26), (27), (28): Xaa is A or G or is absent
VTKPTXAPTKLRSVKVAKVXXXXXXXXXKEVQVNMVVRSXGXH

SEQ ID NO: 54245 - protein, 37 aa, Artificial Sequence
  GFR-binding peptide
  MOD_RES (2), (3), (34), (36): Xaa is C or S
PXXVPQDLSNITIQIMVGRTPKVIGEMSMVVKSXKXS

SEQ ID NO: 54246 - protein, 38 aa, Artificial Sequence
  GFR-binding peptide
  MOD_RES (36), (38): Xaa is C or S
  MOD_RES (15), (16), (17), (18), (19): Xaa is A or G
  MOD_RES (20), (21), (22), (23): Xaa is A or G or is absent
PTQVQLEPLPVVYYXXXXXXXXXEQLSNTLEDHLAXKX

SEQ ID NO: 54247 - protein, 37 aa, Artificial Sequence
  GFR-binding peptide
  MOD_RES (3), (4), (36): Xaa is C or S
KPXXAPTKLRSVKVAKVDDSSNVIKEVQVNMVVRSXG

SEQ ID NO: 54248 - protein, 34 aa, Artificial Sequence
  GFR-binding peptide
QPSRVHHEPLTVLYYEYVRKKPKLEQLSNRLEEH

SEQ ID NO: 54249 - protein, 38 aa, Artificial Sequence
  GFR-binding peptide
  MOD_RES (1), (35), (37): Xaa is C or S
XVPTEEEPLPMVYYRIKPHQGQHEQLSNFLQHNKXEXR

SEQ ID NO: 54250 - protein, 41 aa, Artificial Sequence
  GFR-binding peptide
  MOD_RES (3), (40): Xaa is C or S
  MOD_RES (19), (20), (21), (22), (23): Xaa is A or G
  MOD_RES (24), (25), (26), (27): Xaa is A or G or is absent
VQXRPTQVQLEPLPVVYYXXXXXXXXXEQLSNTLEDHLAXK

SEQ ID NO: 54251 - protein, 36 aa, Artificial Sequence; identical to SEQ ID NO: 15629
  GFR-binding peptide
  MOD_RES (3), (35): Xaa is C or S

SEQ ID NO: 54252 - protein, 34 aa, Artificial Sequence; identical to SEQ ID NO: 18996
  GFR-binding peptide

SEQ ID NO: 54253 - protein, 33 aa, Artificial Sequence
  GFR-binding peptide
PTQVQLEPLTVLYYEIVRKKPIFEQLSNTLEDH

SEQ ID NO: 54254 - protein, 39 aa, Artificial Sequence; identical to SEQ ID NO: 15630
  GFR-binding peptide
  MOD_RES (5), (37), (39): Xaa is C or S

SEQ ID NO: 54255 - protein, 34 aa, Artificial Sequence; identical to SEQ ID NO: 15631
  GFR-binding peptide
  MOD_RES (3), (4): Xaa is C or S

SEQ ID NO: 54256 - protein, 39 aa, Artificial Sequence
  GFR-binding peptide
  MOD_RES (6), (7), (39): Xaa is C or S
KIPKAXXVPTELSNITMQIMDENEKVVIGEMSDMVVEGX

SEQ ID NO: 54257 - protein, 36 aa, Artificial Sequence
  GFR-binding peptide
  MOD_RES (2), (3): Xaa is C or S
  MOD_RES (17), (18), (19), (20), (21): Xaa is A or G
  MOD_RES (22), (23), (24), (25): Xaa is A or G or is absent
PXXAPTQLRSVKVAKVXXXXXXXXXKEVQVNMVVRA

SEQ ID NO: 54258 - protein, 36 aa, Artificial Sequence; identical to SEQ ID NO: 18999
  GFR-binding peptide
  MOD_RES (2), (2): Xaa is C or S
  MOD_RES (18), (19), (20), (21), (22): Xaa is A or G
  MOD_RES (23), (24), (25), (26): Xaa is A or G or is absent

SEQ ID NO: 54259 - protein, 41 aa, Artificial Sequence; identical to SEQ ID NO: 19002
  GFR-binding peptide
  MOD_RES (4), (41): Xaa is C or S
  MOD_RES (20), (21), (22), (23), (24): Xaa is A or G
  MOD_RES (25), (26), (27), (28): Xaa is A or G or is absent

SEQ ID NO: 54260 - protein, 32 aa, Artificial Sequence
  GFR-binding peptide
  MOD_RES (32), (32): Xaa is C or S
APTQLRPVQVRKIDDSSNVIKKATVNMVVRAX

SEQ ID NO: 54261 - protein, 37 aa, Artificial Sequence; identical to SEQ ID NO: 15636
  GFR-binding peptide
  MOD_RES (4), (5): Xaa is C or S
  MOD_RES (19), (20), (21), (22), (23): Xaa is A or G
  MOD_RES (24), (25), (26), (27): Xaa is A or G or is absent

SEQ ID NO: 54262 - protein, 38 aa, Artificial Sequence; identical to SEQ ID NO: 39086
  GFR-binding peptide
  MOD_RES (4), (5), (38): Xaa is C or S
  MOD_RES (19), (20), (21), (22), (23): Xaa is A or G
  MOD_RES (24), (25), (26), (27): Xaa is A or G or is absent

SEQ ID NO: 54263 - protein, 42 aa, Artificial Sequence; identical to SEQ ID NO: 15637
  GFR-binding peptide
  MOD_RES (6), (7), (41): Xaa is C or S
  MOD_RES (21), (22), (23), (24), (25): Xaa is A or G
  MOD_RES (26), (27), (28), (29): Xaa is A or G or is absent

SEQ ID NO: 54264 - protein, 33 aa, Artificial Sequence
  GFR-binding peptide
PTQVQLEPLPVVYYEIVRKKPIFEQLSNTLEDH

SEQ ID NO: 54265 - protein, 34 aa, Artificial Sequence
  GFR-binding peptide
  MOD_RES (32), (34): Xaa is C or S
APTKLRPVQVRKIDDSSNVIKKATVNMVVRSXGX

SEQ ID NO: 54266 - protein, 36 aa, Artificial Sequence
  GFR-binding peptide
  MOD_RES (34), (36): Xaa is C or S
  MOD_RES (14), (15), (16), (17), (18): Xaa is A or G
  MOD_RES (19), (20), (21), (22): Xaa is A or G or is absent
APTKLRSVKVAKVXXXXXXXXXKEVQVNMVVRSXGX

SEQ ID NO: 54267 - protein, 37 aa, Artificial Sequence
  GFR-binding peptide
  MOD_RES (1), (1): Xaa is C or S
XRPTQVQLEPLPVVYYEIVRKKPIFEQLSNTLEDHLA

SEQ ID NO: 54268 - protein, 34 aa, Artificial Sequence
  GFR-binding peptide
  MOD_RES (1), (2), (33): Xaa is C or S
XXVPQALRSVKIAKVVGRKPKVKEVQVMIVRSXK

SEQ ID NO: 54269 - protein, 33 aa, Artificial Sequence; identical to SEQ ID NO: 15640
  GFR-binding peptide
  MOD_RES (1), (2), (33): Xaa is C or S

SEQ ID NO: 54270 - protein, 35 aa, Artificial Sequence; identical to SEQ ID NO: 19003
  GFR-binding peptide
  MOD_RES (3), (3): Xaa is C or S
  MOD_RES (17), (18), (19), (20), (21): Xaa is A or G
  MOD_RES (22), (23), (24), (25): Xaa is A or G or is absent

SEQ ID NO: 54271 - protein, 33 aa, Artificial Sequence; identical to SEQ ID NO: 15641
  GFR-binding peptide
  MOD_RES (2), (3): Xaa is C or S

SEQ ID NO: 54272 - protein, 36 aa, Artificial Sequence
  GFR-binding peptide
  MOD_RES (5), (6): Xaa is C or S
SASPXXVPQDLRSVKIAKVVGRTPKVKEVQVMVVKS

SEQ ID NO: 54273 - protein, 43 aa, Artificial Sequence; identical to SEQ ID NO: 19004
  GFR-binding peptide
  MOD_RES (6), (40), (42): Xaa is C or S

SEQ ID NO: 54274 - protein, 38 aa, Artificial Sequence; identical to SEQ ID NO: 15645
  GFR-binding peptide
  MOD_RES (3), (4), (37): Xaa is C or S
  MOD_RES (18), (19), (20), (21), (22): Xaa is A or G
  MOD_RES (23), (24), (25), (26): Xaa is A or G or is absent

SEQ ID NO: 54275 - protein, 37 aa, Artificial Sequence
  GFR-binding peptide
  MOD_RES (6), (7): Xaa is C or S
ASAAPXXVPQALRSVKIAKVVGRKPKVKEVQVMIVRS

SEQ ID NO: 54276 - protein, 38 aa, Artificial Sequence; identical to SEQ ID NO: 15647
  GFR-binding peptide
  MOD_RES (5), (6), (38): Xaa is C or S

SEQ ID NO: 54277 - protein, 35 aa, Artificial Sequence
  GFR-binding peptide
  MOD_RES (2), (3), (34): Xaa is C or S
PXXVPQDLRPVQIRKIVGRTPKVKKATVMVVKSXK

SEQ ID NO: 54278 - protein, 44 aa, Artificial Sequence
  GFR-binding peptide
  MOD_RES (6), (7), (41), (43): Xaa is C or S
  MOD_RES (21), (22), (23), (24), (25): Xaa is A or G
  MOD_RES (26), (27), (28), (29): Xaa is A or G or is absent
YVPKPXXAPTKLRPVQVRKIXXXXXXXXXKKATVNMVVRSXGXH

SEQ ID NO: 54279 - protein, 37 aa, Artificial Sequence
  GFR-binding peptide
  MOD_RES (1), (2), (36): Xaa is C or S
  MOD_RES (16), (17), (18), (19), (20): Xaa is A or G
  MOD_RES (21), (22), (23), (24): Xaa is A or G or is absent
XXVPTELSNITMQIMXXXXXXXXXIGEMSEMVVEGXG

SEQ ID NO: 54280 - protein, 37 aa, Artificial Sequence; identical to SEQ ID NO: 15648
  GFR-binding peptide
  MOD_RES (1), (2), (35), (37): Xaa is C or S
  MOD_RES (16), (17), (18), (19), (20): Xaa is A or G
  MOD_RES (21), (22), (23), (24): Xaa is A or G or is absent

SEQ ID NO: 54281 - protein, 36 aa, Artificial Sequence; identical to SEQ ID NO: 15649
  GFR-binding peptide
  MOD_RES (4), (5): Xaa is C or S

SEQ ID NO: 54282 - protein, 36 aa, Artificial Sequence
  GFR-binding peptide
  MOD_RES (1), (33), (35): Xaa is C or S
XVPTELRSVKMAKVDEYDKVVKEVQVEMVVEGXGXR

SEQ ID NO: 54283 - protein, 34 aa, Artificial Sequence
  GFR-binding peptide
  MOD_RES (32), (34): Xaa is C or S
APTQLRSVKVAKVDDSSNVIKEVQVNMVVRAXGX

SEQ ID NO: 54284 - protein, 35 aa, Artificial Sequence
  GFR-binding peptide
  MOD_RES (34), (34): Xaa is C or S
  MOD_RES (14), (15), (16), (17), (18): Xaa is A or G
  MOD_RES (19), (20), (21), (22): Xaa is A or G or is absent
APTQLSNITVQIMXXXXXXXXXIGEMSNMVVRAXG

SEQ ID NO: 54285 - protein, 40 aa, Artificial Sequence; identical to SEQ ID NO: 15651
  GFR-binding peptide
  MOD_RES (7), (7): Xaa is C or S
  MOD_RES (21), (22), (23), (24), (25): Xaa is A or G
  MOD_RES (26), (27), (28), (29): Xaa is A or G or is absent

SEQ ID NO: 54286 - protein, 37 aa, Artificial Sequence
  GFR-binding peptide
  MOD_RES (5), (6): Xaa is C or S
VPKPXXAPTKLRPVQVRKIDDSSNVIKKATVNMVVRS

SEQ ID NO: 54287 - protein, 38 aa, Artificial Sequence
  GFR-binding peptide
  MOD_RES (6), (38): Xaa is C or S
VTKPTXAPTKLRSVKVAKVDDSSNVIKEVQVNMVVRSX

SEQ ID NO: 54288 - protein, 34 aa, Artificial Sequence
  GFR-binding peptide
  MOD_RES (1), (2): Xaa is C or S
  MOD_RES (16), (17), (18), (19), (20): Xaa is A or G
  MOD_RES (21), (22), (23), (24): Xaa is A or G or is absent
XXVPQALRSVKIAKVXXXXXXXXXKEVQVMIVRS

SEQ ID NO: 54289 - protein, 32 aa, Artificial Sequence
  GFR-binding peptide
  MOD_RES (14), (15), (16), (17), (18): Xaa is A or G
  MOD_RES (19), (20), (21), (22): Xaa is A or G or is absent
VPTEEEPLPMVYYXXXXXXXXXEQLSNFLQHN

SEQ ID NO: 54290 - protein, 36 aa, Artificial Sequence
  GFR-binding peptide
  MOD_RES (3), (35): Xaa is C or S
PTXAPTKLRSVKVAKVDDSSNVIKEVQVNMVVRSXG

SEQ ID NO: 54291 - protein, 34 aa, Artificial Sequence; identical to SEQ ID NO: 15654
  GFR-binding peptide
  MOD_RES (33), (33): Xaa is C or S
  MOD_RES (14), (15), (16), (17), (18): Xaa is A or G
  MOD_RES (19), (20), (21), (22): Xaa is A or G or is absent

SEQ ID NO: 54292 - protein, 39 aa, Artificial Sequence
  GFR-binding peptide
  MOD_RES (2), (39): Xaa is C or S
  MOD_RES (18), (19), (20), (21), (22): Xaa is A or G
  MOD_RES (23), (24), (25), (26): Xaa is A or G or is absent
QXRPTQVQLEPLTVLYYXXXXXXXXXEQLSNTLEDHLAX

SEQ ID NO: 54293 - protein, 39 aa, Artificial Sequence; identical to SEQ ID NO: 15655
  GFR-binding peptide
  MOD_RES (5), (6), (39): Xaa is C or S
  MOD_RES (20), (21), (22), (23), (24): Xaa is A or G
  MOD_RES (25), (26), (27), (28): Xaa is A or G or is absent

SEQ ID NO: 54294 - protein, 37 aa, Artificial Sequence
  GFR-binding peptide
  MOD_RES (1), (34), (36): Xaa is C or S
  MOD_RES (15), (16), (17), (18), (19): Xaa is A or G
  MOD_RES (20), (21), (22), (23): Xaa is A or G or is absent
XVSQDLSNITIQIMXXXXXXXXXIGEMSMIVKSXKXS

SEQ ID NO: 54295 - protein, 33 aa, Artificial Sequence; identical to SEQ ID NO: 15657
  GFR-binding peptide
  MOD_RES (1), (32): Xaa is C or S

SEQ ID NO: 54296 - protein, 38 aa, Artificial Sequence; identical to SEQ ID NO: 15658
  GFR-binding peptide
  MOD_RES (2), (3), (37): Xaa is C or S
  MOD_RES (17), (18), (19), (20), (21): Xaa is A or G
  MOD_RES (22), (23), (24), (25): Xaa is A or G or is absent

SEQ ID NO: 54297 - protein, 34 aa, Artificial Sequence; identical to SEQ ID NO: 15662
  GFR-binding peptide
  MOD_RES (34), (34): Xaa is C or S
  MOD_RES (14), (15), (16), (17), (18): Xaa is A or G
  MOD_RES (19), (20), (21), (22): Xaa is A or G or is absent

SEQ ID NO: 54298 - protein, 41 aa, Artificial Sequence; identical to SEQ ID NO: 15663
  GFR-binding peptide
  MOD_RES (5), (6), (38), (40): Xaa is C or S

SEQ ID NO: 54299 - protein, 37 aa, Artificial Sequence
  GFR-binding peptide
  MOD_RES (5), (6): Xaa is C or S
IPKAXXVPTELRSVKMAKVDEYDKVVKEVQVEMVVEG

SEQ ID NO: 54300 - protein, 39 aa, Artificial Sequence
  GFR-binding peptide
  MOD_RES (5), (6), (38): Xaa is C or S
IPKAXXVPTELRPVQMRKIDENEKVVKKATVDMVVEGXG

SEQ ID NO: 54301 - protein, 36 aa, Artificial Sequence; identical to SEQ ID NO: 15666
  GFR-binding peptide
  MOD_RES (2), (3): Xaa is C or S
  MOD_RES (17), (18), (19), (20), (21): Xaa is A or G
  MOD_RES (22), (23), (24), (25): Xaa is A or G or is absent

SEQ ID NO: 54302 - protein, 41 aa, Artificial Sequence
  GFR-binding peptide
  MOD_RES (6), (7), (40): Xaa is C or S
  MOD_RES (21), (22), (23), (24), (25): Xaa is A or G
  MOD_RES (26), (27), (28), (29): Xaa is A or G or is absent
ASAAPXXVPQALSNITIQIMXXXXXXXXXIGEMSMIVRSXK

SEQ ID NO: 54303 - protein, 36 aa, Artificial Sequence; identical to SEQ ID NO: 15669
  GFR-binding peptide
  MOD_RES (5), (6): Xaa is C or S

SEQ ID NO: 54304 - protein, 36 aa, Artificial Sequence
  GFR-binding peptide
  MOD_RES (6), (6): Xaa is C or S
VTKPTXAPTKLRPVQVRKIDDSSNVIKKATVNMVVR

SEQ ID NO: 54305 - protein, 38 aa, Artificial Sequence
  GFR-binding peptide
  MOD_RES (3), (3): Xaa is C or S
VQXRPTQVQLEPLPVVYYEIVRKKPIFEQLSNTLEDHL

SEQ ID NO: 54306 - protein, 36 aa, Artificial Sequence
  GFR-binding peptide
  MOD_RES (1), (1): Xaa is C or S
XQPSRVHHEPLPVVYYEYVRKKPKLEQLSNRLEEHL

SEQ ID NO: 54307 - protein, 35 aa, Artificial Sequence
  GFR-binding peptide
QPSRVHHEPLPVVYYEYVRKKPKLEQLSNRLEEHL

SEQ ID NO: 54308 - protein, 39 aa, Artificial Sequence; identical to SEQ ID NO: 19014
  GFR-binding peptide
  MOD_RES (7), (7): Xaa is C or S

SEQ ID NO: 54309 - protein, 36 aa, Artificial Sequence
  GFR-binding peptide
  MOD_RES (1), (2), (36): Xaa is C or S
  MOD_RES (16), (17), (18), (19), (20): Xaa is A or G
  MOD_RES (21), (22), (23), (24): Xaa is A or G or is absent
XXVPTELRSVKMAKVXXXXXXXXXKEVQVDMVVEGX

SEQ ID NO: 54310 - protein, 34 aa, Artificial Sequence
  GFR-binding peptide
  MOD_RES (3), (4): Xaa is C or S
KAXXVPTELSNITMQIMDEYDKVVIGEMSEMVVE

SEQ ID NO: 54311 - protein, 36 aa, Artificial Sequence; identical to SEQ ID NO: 15671
  GFR-binding peptide
  MOD_RES (5), (6): Xaa is C or S

SEQ ID NO: 54312 - protein, 33 aa, Artificial Sequence; identical to SEQ ID NO: 19015
  GFR-binding peptide
  MOD_RES (15), (16), (17), (18), (19): Xaa is A or G
  MOD_RES (20), (21), (22), (23): Xaa is A or G or is absent

SEQ ID NO: 54313 - protein, 39 aa, Artificial Sequence
  GFR-binding peptide
  MOD_RES (1), (2), (36), (38): Xaa is C or S
  MOD_RES (16), (17), (18), (19), (20): Xaa is A or G
  MOD_RES (21), (22), (23), (24): Xaa is A or G or is absent
XXVPTELRPVQMRKIXXXXXXXXXKKATVEMVVEGXGXR

SEQ ID NO: 54314 - protein, 40 aa, Artificial Sequence
  GFR-binding peptide
  MOD_RES (5), (6), (38), (40): Xaa is C or S
VPKPXXAPTQLSNITVQIMDDSSNVIIGEMSNMVVRAXGX

SEQ ID NO: 54315 - protein, 33 aa, Artificial Sequence
  GFR-binding peptide
  MOD_RES (1), (33): Xaa is C or S
XVPTELRPVQMRKIDEYDKVVKKATVEMVVEGX

SEQ ID NO: 54316 - protein, 38 aa, Artificial Sequence; identical to SEQ ID NO: 19018
  GFR-binding peptide
  MOD_RES (3), (3): Xaa is C or S
  MOD_RES (19), (20), (21), (22), (23): Xaa is A or G
  MOD_RES (24), (25), (26), (27): Xaa is A or G or is absent

SEQ ID NO: 54317 - protein, 39 aa, Artificial Sequence; identical to SEQ ID NO: 19019
  GFR-binding peptide
  MOD_RES (7), (7): Xaa is C or S

SEQ ID NO: 54318 - protein, 39 aa, Artificial Sequence; identical to SEQ ID NO: 19020
  GFR-binding peptide
  MOD_RES (37), (39): Xaa is C or S

SEQ ID NO: 54319 - protein, 37 aa, Artificial Sequence; identical to SEQ ID NO: 19021
  GFR-binding peptide
  MOD_RES (1), (1): Xaa is C or S
  MOD_RES (17), (18), (19), (20), (21): Xaa is A or G
  MOD_RES (22), (23), (24), (25): Xaa is A or G or is absent

SEQ ID NO: 54320 - protein, 43 aa, Artificial Sequence
  GFR-binding peptide
  MOD_RES (6), (7), (40), (42): Xaa is C or S
  MOD_RES (21), (22), (23), (24), (25): Xaa is A or G
  MOD_RES (26), (27), (28), (29): Xaa is A or G or is absent
ASAAPXXVPQALSNITIQIMXXXXXXXXXIGEMSMIVRSXKXS

SEQ ID NO: 54321 - protein, 36 aa, Artificial Sequence
  GFR-binding peptide
  MOD_RES (2), (3), (34), (36): Xaa is C or S
PXXVSQDLRPVQIRKIIGKTPKIKKATVMIVKSXKX

SEQ ID NO: 54322 - protein, 34 aa, Artificial Sequence; identical to SEQ ID NO: 15675
  GFR-binding peptide
  MOD_RES (1), (33): Xaa is C or S

SEQ ID NO: 54323 - protein, 43 aa, Artificial Sequence
  GFR-binding peptide
  MOD_RES (7), (41), (43): Xaa is C or S
  MOD_RES (21), (22), (23), (24), (25): Xaa is A or G
  MOD_RES (26), (27), (28), (29): Xaa is A or G or is absent
NDEGLEXVPTEEEPLTMLYYXXXXXXXXXEQLSNFLQHNKXEX

SEQ ID NO: 54324 - protein, 36 aa, Artificial Sequence
  GFR-binding peptide
  MOD_RES (36), (36): Xaa is C or S
  MOD_RES (15), (16), (17), (18), (19): Xaa is A or G
  MOD_RES (20), (21), (22), (23): Xaa is A or G or is absent
PSRVHHEPLPVVYYXXXXXXXXXEQLSNRLEEHLEX

SEQ ID NO: 54325 - protein, 36 aa, Artificial Sequence
  GFR-binding peptide
  MOD_RES (4), (5): Xaa is C or S
PKPXXAPTQLSNITVQIMDDSSNVIIGEMSNMVVRA

SEQ ID NO: 54326 - protein, 40 aa, Artificial Sequence
  GFR-binding peptide
  MOD_RES (1), (38), (40): Xaa is C or S
  MOD_RES (17), (18), (19), (20), (21): Xaa is A or G
  MOD_RES (22), (23), (24), (25): Xaa is A or G or is absent
XRPTQVQLEPLPVVYYXXXXXXXXXEQLSNTLEDHLAXKX

SEQ ID NO: 54327 - protein, 40 aa, Artificial Sequence; identical to SEQ ID NO: 15680
  GFR-binding peptide
  MOD_RES (2), (3), (37), (39): Xaa is C or S
  MOD_RES (17), (18), (19), (20), (21): Xaa is A or G
  MOD_RES (22), (23), (24), (25): Xaa is A or G or is absent

SEQ ID NO: 54328 - protein, 33 aa, Artificial Sequence; identical to SEQ ID NO: 19024
  GFR-binding peptide
  MOD_RES (15), (16), (17), (18), (19): Xaa is A or G
  MOD_RES (20), (21), (22), (23): Xaa is A or G or is absent

SEQ ID NO: 54329 - protein, 43 aa, Artificial Sequence; identical to SEQ ID NO: 19025
  GFR-binding peptide
  MOD_RES (4), (41), (43): Xaa is C or S
  MOD_RES (20), (21), (22), (23), (24): Xaa is A or G
  MOD_RES (25), (26), (27), (28): Xaa is A or G or is absent

SEQ ID NO: 54330 - protein, 38 aa, Artificial Sequence; identical to SEQ ID NO: 19027
  GFR-binding peptide
  MOD_RES (3), (37): Xaa is C or S
  MOD_RES (17), (18), (19), (20), (21): Xaa is A or G
  MOD_RES (22), (23), (24), (25): Xaa is A or G or is absent

SEQ ID NO: 54331 - protein, 32 aa, Artificial Sequence
  GFR-binding peptide
  MOD_RES (14), (15), (16), (17), (18): Xaa is A or G
  MOD_RES (19), (20), (21), (22): Xaa is A or G or is absent
TQVQLEPLTVLYYXXXXXXXXXEQLSNTLEDH

SEQ ID NO: 54332 - protein, 36 aa, Artificial Sequence; identical to SEQ ID NO: 19028
  GFR-binding peptide
  MOD_RES (16), (17), (18), (19), (20): Xaa is A or G
  MOD_RES (21), (22), (23), (24): Xaa is A or G or is absent

SEQ ID NO: 54333 - protein, 36 aa, Artificial Sequence; identical to SEQ ID NO: 19030
  GFR-binding peptide
  MOD_RES (35), (35): Xaa is C or S
  MOD_RES (14), (15), (16), (17), (18): Xaa is A or G
  MOD_RES (19), (20), (21), (22): Xaa is A or G or is absent

SEQ ID NO: 54334 - protein, 35 aa, Artificial Sequence
  GFR-binding peptide
  MOD_RES (33), (35): Xaa is C or S
  MOD_RES (14), (15), (16), (17), (18): Xaa is A or G
  MOD_RES (19), (20), (21), (22): Xaa is A or G or is absent
VPQALRSVKIAKVXXXXXXXXXKEVQVMIVRSXKX

SEQ ID NO: 54335 - protein, 34 aa, Artificial Sequence; identical to SEQ ID NO: 15685
  GFR-binding peptide
  MOD_RES (3), (4): Xaa is C or S

SEQ ID NO: 54336 - protein, 37 aa, Artificial Sequence; identical to SEQ ID NO: 15686
  GFR-binding peptide
  MOD_RES (4), (5): Xaa is C or S
  MOD_RES (19), (20), (21), (22), (23): Xaa is A or G
  MOD_RES (24), (25), (26), (27): Xaa is A or G or is absent

SEQ ID NO: 54337 - protein, 36 aa, Artificial Sequence
  GFR-binding peptide
  MOD_RES (2), (3), (34), (36): Xaa is C or S
PXXVPQDLRPVQIRKIVGRTPKVKKATVMVVKSXKX

SEQ ID NO: 54338 - protein, 34 aa, Artificial Sequence
  GFR-binding peptide
  MOD_RES (1), (2): Xaa is C or S
  MOD_RES (16), (17), (18), (19), (20): Xaa is A or G
  MOD_RES (21), (22), (23), (24): Xaa is A or G or is absent
XXVPQALRPVQIRKIXXXXXXXXXKKATVMIVRS

SEQ ID NO: 54339 - protein, 38 aa, Artificial Sequence
  GFR-binding peptide
  MOD_RES (6), (7), (38): Xaa is C or S
ASAAPXXVPQALSNITIQIMVGRKPKVIGEMSMIVRSX

SEQ ID NO: 54340 - protein, 38 aa, Artificial Sequence; identical to SEQ ID NO: 15688
  GFR-binding peptide
  MOD_RES (3), (4), (37): Xaa is C or S
  MOD_RES (18), (19), (20), (21), (22): Xaa is A or G
  MOD_RES (23), (24), (25), (26): Xaa is A or G or is absent

SEQ ID NO: 54341 - protein, 32 aa, Artificial Sequence
  GFR-binding peptide
  MOD_RES (14), (15), (16), (17), (18): Xaa is A or G
  MOD_RES (19), (20), (21), (22): Xaa is A or G or is absent
TQVQLEPLPVVYYXXXXXXXXXEQLSNTLEDH

SEQ ID NO: 54342 - protein, 35 aa, Artificial Sequence
  GFR-binding peptide
  MOD_RES (34), (34): Xaa is C or S
  MOD_RES (14), (15), (16), (17), (18): Xaa is A or G
  MOD_RES (19), (20), (21), (22): Xaa is A or G or is absent
VPTELRSVKMAKVXXXXXXXXXKEVQVDMVVEGXG

SEQ ID NO: 54343 - protein, 39 aa, Artificial Sequence; identical to SEQ ID NO: 15690
  GFR-binding peptide
  MOD_RES (5), (6), (38): Xaa is C or S

SEQ ID NO: 54344 - protein, 40 aa, Artificial Sequence; identical to SEQ ID NO: 15692
  GFR-binding peptide
  MOD_RES (6), (40): Xaa is C or S
  MOD_RES (20), (21), (22), (23), (24): Xaa is A or G
  MOD_RES (25), (26), (27), (28): Xaa is A or G or is absent

SEQ ID NO: 54345 - protein, 41 aa, Artificial Sequence
  GFR-binding peptide
  MOD_RES (3), (4), (38), (40): Xaa is C or S
  MOD_RES (18), (19), (20), (21), (22): Xaa is A or G
  MOD_RES (23), (24), (25), (26): Xaa is A or G or is absent
KPXXAPTKLRSVKVAKVXXXXXXXXXKEVQVNMVVRSXGXH

SEQ ID NO: 54346 - protein, 36 aa, Artificial Sequence
  GFR-binding peptide
  MOD_RES (1), (2), (34), (36): Xaa is C or S
XXVPTELRSVKMAKVDENEKVVKEVQVDMVVEGXGX

SEQ ID NO: 54347 - protein, 36 aa, Artificial Sequence
  GFR-binding peptide
  MOD_RES (34), (36): Xaa is C or S
  MOD_RES (14), (15), (16), (17), (18): Xaa is A or G
  MOD_RES (19), (20), (21), (22): Xaa is A or G or is absent
APTQLRPVQVRKIXXXXXXXXXKKATVNMVVRAXGX

SEQ ID NO: 54348 - protein, 34 aa, Artificial Sequence; identical to SEQ ID NO: 15693
  GFR-binding peptide
  MOD_RES (1), (2), (33): Xaa is C or S

SEQ ID NO: 54349 - protein, 33 aa, Artificial Sequence
  GFR-binding peptide
  MOD_RES (2), (3): Xaa is C or S
PXXVPQDLRPVQIRKIVGRTPKVKKATVMVVKS

SEQ ID NO: 54350 - protein, 38 aa, Artificial Sequence
  GFR-binding peptide
  MOD_RES (3), (4), (38): Xaa is C or S
  MOD_RES (18), (19), (20), (21), (22): Xaa is A or G
  MOD_RES (23), (24), (25), (26): Xaa is A or G or is absent
KPXXAPTQLRSVKVAKVXXXXXXXXXKEVQVNMVVRAX

SEQ ID NO: 54351 - protein, 34 aa, Artificial Sequence
  GFR-binding peptide
  MOD_RES (3), (3): Xaa is C or S
PTXAPTKLSNITVQIMDDSSNVIIGEMSNMVVRS

SEQ ID NO: 54352 - protein, 39 aa, Artificial Sequence; identical to SEQ ID NO: 15696
  GFR-binding peptide
  MOD_RES (5), (6): Xaa is C or S
  MOD_RES (20), (21), (22), (23), (24): Xaa is A or G
  MOD_RES (25), (26), (27), (28): Xaa is A or G or is absent

SEQ ID NO: 54353 - protein, 37 aa, Artificial Sequence
  GFR-binding peptide
  MOD_RES (4), (5): Xaa is C or S
  MOD_RES (19), (20), (21), (22), (23): Xaa is A or G
  MOD_RES (24), (25), (26), (27): Xaa is A or G or is absent
AAPXXVPQALRPVQIRKIXXXXXXXXXKKATVMIVRS

SEQ ID NO: 54354 - protein, 39 aa, Artificial Sequence; identical to SEQ ID NO: 15700
  GFR-binding peptide
  MOD_RES (4), (5), (38): Xaa is C or S
  MOD_RES (19), (20), (21), (22), (23): Xaa is A or G
  MOD_RES (24), (25), (26), (27): Xaa is A or G or is absent

SEQ ID NO: 54355 - protein, 37 aa, Artificial Sequence; identical to SEQ ID NO: 15701
  GFR-binding peptide
  MOD_RES (1), (35), (37): Xaa is C or S
  MOD_RES (15), (16), (17), (18), (19): Xaa is A or G
  MOD_RES (20), (21), (22), (23): Xaa is A or G or is absent

SEQ ID NO: 54356 - protein, 36 aa, Artificial Sequence
  GFR-binding peptide
  MOD_RES (1), (33), (35): Xaa is C or S
XVPTELRPVQMRKIDENEKVVKKATVDMVVEGXGXR

SEQ ID NO: 54357 - protein, 39 aa, Artificial Sequence; identical to SEQ ID NO: 19045
  GFR-binding peptide
  MOD_RES (5), (39): Xaa is C or S

SEQ ID NO: 54358 - protein, 39 aa, Artificial Sequence
  GFR-binding peptide
  MOD_RES (2), (36), (38): Xaa is C or S
  MOD_RES (16), (17), (18), (19), (20): Xaa is A or G
  MOD_RES (21), (22), (23), (24): Xaa is A or G or is absent
EXVPTEEEPLTMLYYXXXXXXXXXEQLSNFLQHNKXEXR

SEQ ID NO: 54359 - protein, 41 aa, Artificial Sequence
  GFR-binding peptide
  MOD_RES (6), (7), (40): Xaa is C or S
  MOD_RES (21), (22), (23), (24), (25): Xaa is A or G
  MOD_RES (26), (27), (28), (29): Xaa is A or G or is absent
ASASPXXVSQDLSNITIQIMXXXXXXXXXIGEMSMIVKSXK

SEQ ID NO: 54360 - protein, 33 aa, Artificial Sequence
  GFR-binding peptide
  MOD_RES (3), (3): Xaa is C or S
PTXAPTKLSNITVQIMDDSSNVIIGEMSNMVVR

SEQ ID NO: 54361 - protein, 38 aa, Artificial Sequence; identical to SEQ ID NO: 19050
  GFR-binding peptide
  MOD_RES (36), (38): Xaa is C or S

SEQ ID NO: 54362 - protein, 34 aa, Artificial Sequence
  GFR-binding peptide
  MOD_RES (34), (34): Xaa is C or S
  MOD_RES (14), (15), (16), (17), (18): Xaa is A or G
  MOD_RES (19), (20), (21), (22): Xaa is A or G or is absent
VPTELRSVKMAKVXXXXXXXXXKEVQVDMVVEGX

SEQ ID NO: 54363 - protein, 38 aa, Artificial Sequence; identical to SEQ ID NO: 15706
  GFR-binding peptide
  MOD_RES (3), (35), (37): Xaa is C or S

SEQ ID NO: 54364 - protein, 35 aa, Artificial Sequence; identical to SEQ ID NO: 15707
  GFR-binding peptide
  MOD_RES (4), (4): Xaa is C or S

SEQ ID NO: 54365 - protein, 39 aa, Artificial Sequence
  GFR-binding peptide
  MOD_RES (2), (3), (36), (38): Xaa is C or S
  MOD_RES (17), (18), (19), (20), (21): Xaa is A or G
  MOD_RES (22), (23), (24), (25): Xaa is A or G or is absent
PXXVSQDLRSVKIAKVXXXXXXXXXKEVQVMIVKSXKXS

SEQ ID NO: 54366 - protein, 35 aa, Artificial Sequence; identical to SEQ ID NO: 15709
  GFR-binding peptide
  MOD_RES (1), (33), (35): Xaa is C or S

SEQ ID NO: 54367 - protein, 40 aa, Artificial Sequence; identical to SEQ ID NO: 19055
  GFR-binding peptide
  MOD_RES (6), (40): Xaa is C or S

SEQ ID NO: 54368 - protein, 37 aa, Artificial Sequence; identical to SEQ ID NO: 15715
  GFR-binding peptide
  MOD_RES (2), (3), (36): Xaa is C or S
  MOD_RES (17), (18), (19), (20), (21): Xaa is A or G
  MOD_RES (22), (23), (24), (25): Xaa is A or G or is absent

SEQ ID NO: 54369 - protein, 30 aa, Artificial Sequence
  GFR-binding peptide
VPQALRPVQIRKIVGRKPKVKKATVMIVRS

SEQ ID NO: 54370 - protein, 33 aa, Artificial Sequence
  GFR-binding peptide
PSRVHHEPLPVVYYEYVRKKPKLEQLSNRLEEH

SEQ ID NO: 54371 - protein, 36 aa, Artificial Sequence
  GFR-binding peptide
  MOD_RES (2), (36): Xaa is C or S
  MOD_RES (16), (17), (18), (19), (20): Xaa is A or G
  MOD_RES (21), (22), (23), (24): Xaa is A or G or is absent
TXAPTKLRSVKVAKVXXXXXXXXXKEVQVNMVVRSX

SEQ ID NO: 54372 - protein, 36 aa, Artificial Sequence
  GFR-binding peptide
  MOD_RES (2), (36): Xaa is C or S
EXVPTEEEPLPMVYYRIKPHQGQHEQLSNFLQHNKX

SEQ ID NO: 54373 - protein, 32 aa, Artificial Sequence
  GFR-binding peptide
  MOD_RES (1), (32): Xaa is C or S
XVPQDLRPVQIRKIVGRTPKVKKATVMVVKSX

SEQ ID NO: 54374 - protein, 32 aa, Artificial Sequence; identical to SEQ ID NO: 19059
  GFR-binding peptide
  MOD_RES (14), (15), (16), (17), (18): Xaa is A or G
  MOD_RES (19), (20), (21), (22): Xaa is A or G or is absent

SEQ ID NO: 54375 - protein, 33 aa, Artificial Sequence
  GFR-binding peptide
SRVHHEPLTVLYYEYVRKKPKLEQLSNRLEEHL

SEQ ID NO: 54376 - protein, 33 aa, Artificial Sequence
  GFR-binding peptide
  MOD_RES (2), (3): Xaa is C or S
PXXAPTKLSNITVQIMDDSSNVIIGEMSNMVVR

SEQ ID NO: 54377 - protein, 37 aa, Artificial Sequence
  GFR-binding peptide
  MOD_RES (1), (34), (36): Xaa is C or S
  MOD_RES (15), (16), (17), (18), (19): Xaa is A or G
  MOD_RES (20), (21), (22), (23): Xaa is A or G or is absent
XVPQDLRPVQIRKIXXXXXXXXXKKATVMVVKSXKXS

SEQ ID NO: 54378 - protein, 41 aa, Artificial Sequence
  GFR-binding peptide
  MOD_RES (4), (5), (38), (40): Xaa is C or S
  MOD_RES (19), (20), (21), (22), (23): Xaa is A or G
  MOD_RES (24), (25), (26), (27): Xaa is A or G or is absent
ASPXXVSQDLRPVQIRKIXXXXXXXXXKKATVMIVKSXKXS

SEQ ID NO: 54379 - protein, 42 aa, Artificial Sequence
  GFR-binding peptide
  MOD_RES (5), (6), (40), (42): Xaa is C or S
  MOD_RES (20), (21), (22), (23), (24): Xaa is A or G
  MOD_RES (25), (26), (27), (28): Xaa is A or G or is absent
IPKAXXVPTELSNITMQIMXXXXXXXXXIGEMSEMVVEGXGX

SEQ ID NO: 54380 - protein, 34 aa, Artificial Sequence
  GFR-binding peptide
  MOD_RES (1), (33): Xaa is C or S
XAPTKLRPVQVRKIDDSSNVIKKATVNMVVRSXG

SEQ ID NO: 54381 - protein, 33 aa, Artificial Sequence
  GFR-binding peptide
  MOD_RES (1), (32): Xaa is C or S
XVPQDLRPVQIRKIVGRTPKVKKATVMVVKSXK

SEQ ID NO: 54382 - protein, 38 aa, Artificial Sequence
  GFR-binding peptide
  MOD_RES (1), (2), (35), (37): Xaa is C or S
  MOD_RES (16), (17), (18), (19), (20): Xaa is A or G
  MOD_RES (21), (22), (23), (24): Xaa is A or G or is absent
XXVPQDLSNITIQIMXXXXXXXXXIGEMSMVVKSXKXS

SEQ ID NO: 54383 - protein, 43 aa, Artificial Sequence; identical to SEQ ID NO: 15722
  GFR-binding peptide
  MOD_RES (7), (41), (43): Xaa is C or S
  MOD_RES (21), (22), (23), (24), (25): Xaa is A or G
  MOD_RES (26), (27), (28), (29): Xaa is A or G or is absent

SEQ ID NO: 54384 - protein, 41 aa, Artificial Sequence; identical to SEQ ID NO: 19063
  GFR-binding peptide
  MOD_RES (5), (5): Xaa is C or S
  MOD_RES (21), (22), (23), (24), (25): Xaa is A or G
  MOD_RES (26), (27), (28), (29): Xaa is A or G or is absent

SEQ ID NO: 54385 - protein, 41 aa, Artificial Sequence
  GFR-binding peptide
  MOD_RES (5), (6), (38), (40): Xaa is C or S
IPKAXXVPTELRPVQMRKIDENEKVVKKATVDMVVEGXGXR

SEQ ID NO: 54386 - protein, 40 aa, Artificial Sequence
  GFR-binding peptide
  MOD_RES (3), (4), (37), (39): Xaa is C or S
  MOD_RES (18), (19), (20), (21), (22): Xaa is A or G
  MOD_RES (23), (24), (25), (26): Xaa is A or G or is absent
SPXXVSQDLRPVQIRKIXXXXXXXXXKKATVMIVKSXKXS

SEQ ID NO: 54387 - protein, 36 aa, Artificial Sequence; identical to SEQ ID NO: 15724
  GFR-binding peptide
  MOD_RES (3), (4): Xaa is C or S
  MOD_RES (18), (19), (20), (21), (22): Xaa is A or G
  MOD_RES (23), (24), (25), (26): Xaa is A or G or is absent

SEQ ID NO: 54388 - protein, 34 aa, Artificial Sequence
  GFR-binding peptide
  MOD_RES (2), (3): Xaa is C or S
PXXAPTKLRSVKVAKVDDSSNVIKEVQVNMVVRS

SEQ ID NO: 54389 - protein, 41 aa, Artificial Sequence; identical to SEQ ID NO: 15725
  GFR-binding peptide
  MOD_RES (5), (6), (40): Xaa is C or S
  MOD_RES (20), (21), (22), (23), (24): Xaa is A or G
  MOD_RES (25), (26), (27), (28): Xaa is A or G or is absent

SEQ ID NO: 54390 - protein, 45 aa, Artificial Sequence; identical to SEQ ID NO: 19066
  GFR-binding peptide
  MOD_RES (5), (42), (44): Xaa is C or S
  MOD_RES (21), (22), (23), (24), (25): Xaa is A or G
  MOD_RES (26), (27), (28), (29): Xaa is A or G or is absent

SEQ ID NO: 54391 - protein, 35 aa, Artificial Sequence; identical to SEQ ID NO: 15728
  GFR-binding peptide
  MOD_RES (1), (35): Xaa is C or S
  MOD_RES (15), (16), (17), (18), (19): Xaa is A or G
  MOD_RES (20), (21), (22), (23): Xaa is A or G or is absent

SEQ ID NO: 54392 - protein, 34 aa, Artificial Sequence
  GFR-binding peptide
  MOD_RES (16), (17), (18), (19), (20): Xaa is A or G
  MOD_RES (21), (22), (23), (24): Xaa is A or G or is absent
QPSRVHHEPLTVLYYXXXXXXXXXEQLSNRLEEH

SEQ ID NO: 54393 - protein, 38 aa, Artificial Sequence; identical to SEQ ID NO: 19067
  GFR-binding peptide
  MOD_RES (35), (37): Xaa is C or S
  MOD_RES (14), (15), (16), (17), (18): Xaa is A or G
  MOD_RES (19), (20), (21), (22): Xaa is A or G or is absent

SEQ ID NO: 54394 - protein, 36 aa, Artificial Sequence
  GFR-binding peptide
  MOD_RES (34), (36): Xaa is C or S
  MOD_RES (14), (15), (16), (17), (18): Xaa is A or G
  MOD_RES (19), (20), (21), (22): Xaa is A or G or is absent
VPTELRSVKMAKVXXXXXXXXXKEVQVEMVVEGXGX

SEQ ID NO: 54395 - protein, 40 aa, Artificial Sequence
  GFR-binding peptide
  MOD_RES (3), (4), (38), (40): Xaa is C or S
  MOD_RES (18), (19), (20), (21), (22): Xaa is A or G
  MOD_RES (23), (24), (25), (26): Xaa is A or G or is absent
KPXXAPTKLRSVKVAKVXXXXXXXXXKEVQVNMVVRSXGX

SEQ ID NO: 54396 - protein, 41 aa, Artificial Sequence
  GFR-binding peptide
  MOD_RES (5), (6), (38), (40): Xaa is C or S
VPKPXXAPTQLRPVQVRKIDDSSNVIKKATVNMVVRAXGXH

SEQ ID NO: 54397 - protein, 37 aa, Artificial Sequence; identical to SEQ ID NO: 15733
  GFR-binding peptide
  MOD_RES (6), (7): Xaa is C or S

SEQ ID NO: 54398 - protein, 36 aa, Artificial Sequence
  GFR-binding peptide
  MOD_RES (3), (4), (35): Xaa is C or S
APXXVPQALSNITIQIMVGRKPKVIGEMSMIVRSXK

SEQ ID NO: 54399 - protein, 35 aa, Artificial Sequence
  GFR-binding peptide
  MOD_RES (4), (5): Xaa is C or S
PKPXXAPTQLRSVKVAKVDDSSNVIKEVQVNMVVR

SEQ ID NO: 54400 - protein, 40 aa, Artificial Sequence
  GFR-binding peptide
  MOD_RES (5), (6), (39): Xaa is C or S
  MOD_RES (20), (21), (22), (23), (24): Xaa is A or G
  MOD_RES (25), (26), (27), (28): Xaa is A or G or is absent
SASPXXVPQDLRSVKIAKVXXXXXXXXXKEVQVMVVKSXK

SEQ ID NO: 54401 - protein, 42 aa, Artificial Sequence; identical to SEQ ID NO: 19071
  GFR-binding peptide
  MOD_RES (7), (41): Xaa is C or S

SEQ ID NO: 54402 - protein, 38 aa, Artificial Sequence
  GFR-binding peptide
  MOD_RES (3), (4), (38): Xaa is C or S
  MOD_RES (18), (19), (20), (21), (22): Xaa is A or G
  MOD_RES (23), (24), (25), (26): Xaa is A or G or is absent
KPXXAPTKLRPVQVRKIXXXXXXXXXKKATVNMVVRSX

SEQ ID NO: 54403 - protein, 41 aa, Artificial Sequence; identical to SEQ ID NO: 15741
  GFR-binding peptide
  MOD_RES (4), (5), (39), (41): Xaa is C or S
  MOD_RES (19), (20), (21), (22), (23): Xaa is A or G
  MOD_RES (24), (25), (26), (27): Xaa is A or G or is absent

SEQ ID NO: 54404 - protein, 41 aa, Artificial Sequence
  GFR-binding peptide
  MOD_RES (5), (6), (39), (41): Xaa is C or S
  MOD_RES (20), (21), (22), (23), (24): Xaa is A or G
  MOD_RES (25), (26), (27), (28): Xaa is A or G or is absent
SASPXXVSQDLRSVKIAKVXXXXXXXXXKEVQVMIVKSXKX

SEQ ID NO: 54405 - protein, 37 aa, Artificial Sequence; identical to SEQ ID NO: 19072
  GFR-binding peptide
  MOD_RES (3), (37): Xaa is C or S
  MOD_RES (17), (18), (19), (20), (21): Xaa is A or G
  MOD_RES (22), (23), (24), (25): Xaa is A or G or is absent

SEQ ID NO: 54406 - protein, 34 aa, Artificial Sequence
  GFR-binding peptide
  MOD_RES (1), (2): Xaa is C or S
  MOD_RES (16), (17), (18), (19), (20): Xaa is A or G
  MOD_RES (21), (22), (23), (24): Xaa is A or G or is absent
XXVPTELRSVKMAKVXXXXXXXXXKEVQVEMVVE

SEQ ID NO: 54407 - protein, 38 aa, Artificial Sequence; identical to SEQ ID NO: 19075
  GFR-binding peptide
  MOD_RES (36), (38): Xaa is C or S

SEQ ID NO: 54408 - protein, 36 aa, Artificial Sequence
  GFR-binding peptide
  MOD_RES (4), (5): Xaa is C or S
PKPXXAPTQLRPVQVRKIDDSSNVIKKATVNMVVRA

SEQ ID NO: 54409 - protein, 39 aa, Artificial Sequence
  GFR-binding peptide
  MOD_RES (37), (39): Xaa is C or S
  MOD_RES (16), (17), (18), (19), (20): Xaa is A or G
  MOD_RES (21), (22), (23), (24): Xaa is A or G or is absent
RPTQVQLEPLTVLYYXXXXXXXXXEQLSNTLEDHLAXKX

SEQ ID NO: 54410 - protein, 36 aa, Artificial Sequence; identical to SEQ ID NO: 15743
  GFR-binding peptide
  MOD_RES (4), (5): Xaa is C or S

SEQ ID NO: 54411 - protein, 33 aa, Artificial Sequence
  GFR-binding peptide
  MOD_RES (33), (33): Xaa is C or S
  MOD_RES (14), (15), (16), (17), (18): Xaa is A or G
  MOD_RES (19), (20), (21), (22): Xaa is A or G or is absent
VPQALRPVQIRKIXXXXXXXXXKKATVMIVRSX

SEQ ID NO: 54412 - protein, 38 aa, Artificial Sequence
  GFR-binding peptide
  MOD_RES (2), (2): Xaa is C or S
KXQPSRVHHEPLPVVYYEYVRKKPKLEQLSNRLEEHLE

SEQ ID NO: 54413 - protein, 39 aa, Artificial Sequence
  GFR-binding peptide
  MOD_RES (2), (3), (36), (38): Xaa is C or S
  MOD_RES (17), (18), (19), (20), (21): Xaa is A or G
  MOD_RES (22), (23), (24), (25): Xaa is A or G or is absent
PXXVPQDLRPVQIRKIXXXXXXXXXKKATVMVVKSXKXS

SEQ ID NO: 54414 - protein, 37 aa, Artificial Sequence
  GFR-binding peptide
  MOD_RES (3), (4), (37): Xaa is C or S
  MOD_RES (18), (19), (20), (21), (22): Xaa is A or G
  MOD_RES (23), (24), (25), (26): Xaa is A or G or is absent
SPXXVSQDLRSVKIAKVXXXXXXXXXKEVQVMIVKSX

SEQ ID NO: 54415 - protein, 38 aa, Artificial Sequence
  GFR-binding peptide
  MOD_RES (3), (4), (36), (38): Xaa is C or S
KAXXVPTELSNITMQIMDENEKVVIGEMSDMVVEGXGX

SEQ ID NO: 54416 - protein, 34 aa, Artificial Sequence
  GFR-binding peptide
  MOD_RES (2), (2): Xaa is C or S
  MOD_RES (16), (17), (18), (19), (20): Xaa is A or G
  MOD_RES (21), (22), (23), (24): Xaa is A or G or is absent
EXVPTEEEPLPMVYYXXXXXXXXXEQLSNFLQHN

SEQ ID NO: 54417 - protein, 38 aa, Artificial Sequence; identical to SEQ ID NO: 15747
  GFR-binding peptide
  MOD_RES (2), (3), (37): Xaa is C or S
  MOD_RES (17), (18), (19), (20), (21): Xaa is A or G
  MOD_RES (22), (23), (24), (25): Xaa is A or G or is absent

SEQ ID NO: 54418 - protein, 39 aa, Artificial Sequence; identical to SEQ ID NO: 15749
  GFR-binding peptide
  MOD_RES (3), (4), (38): Xaa is C or S
  MOD_RES (18), (19), (20), (21), (22): Xaa is A or G
  MOD_RES (23), (24), (25), (26): Xaa is A or G or is absent

SEQ ID NO: 54419 - protein, 39 aa, Artificial Sequence
  GFR-binding peptide
  MOD_RES (5), (6), (38): Xaa is C or S
IPKAXXVPTELRPVQMRKIDEYDKVVKKATVEMVVEGXG

SEQ ID NO: 54420 - protein, 41 aa, Artificial Sequence; identical to SEQ ID NO: 15751
  GFR-binding peptide
  MOD_RES (6), (7), (40): Xaa is C or S
  MOD_RES (21), (22), (23), (24), (25): Xaa is A or G
  MOD_RES (26), (27), (28), (29): Xaa is A or G or is absent

SEQ ID NO: 54421 - protein, 34 aa, Artificial Sequence
  GFR-binding peptide
  MOD_RES (3), (4): Xaa is C or S
KAXXVPTELSNITMQIMDENEKVVIGEMSDMVVE

SEQ ID NO: 54422 - protein, 32 aa, Artificial Sequence; identical to SEQ ID NO: 15754
  GFR-binding peptide
  MOD_RES (32), (32): Xaa is C or S

SEQ ID NO: 54423 - protein, 39 aa, Artificial Sequence; identical to SEQ ID NO: 19081
  GFR-binding peptide
  MOD_RES (36), (38): Xaa is C or S

SEQ ID NO: 54424 - protein, 36 aa, Artificial Sequence
  GFR-binding peptide
  MOD_RES (2), (3), (34), (36): Xaa is C or S
PXXVSQDLRSVKIAKVIGKTPKIKEVQVMIVKSXKX

SEQ ID NO: 54425 - protein, 39 aa, Artificial Sequence; identical to SEQ ID NO: 19082
  GFR-binding peptide
  MOD_RES (1), (38): Xaa is C or S

SEQ ID NO: 54426 - protein, 42 aa, Artificial Sequence
  GFR-binding peptide
  MOD_RES (5), (6), (39), (41): Xaa is C or S
  MOD_RES (20), (21), (22), (23), (24): Xaa is A or G
  MOD_RES (25), (26), (27), (28): Xaa is A or G or is absent
SASPXXVSQDLRSVKIAKVXXXXXXXXXKEVQVMIVKSXKXS

SEQ ID NO: 54427 - protein, 44 aa, Artificial Sequence
  GFR-binding peptide
  MOD_RES (7), (41), (43): Xaa is C or S
NDEGLEXVPTEEEPLTMLYYRIKPHQGQHEQLSNFLQHNKXEXR

SEQ ID NO: 54428 - protein, 41 aa, Artificial Sequence; identical to SEQ ID NO: 15756
  GFR-binding peptide
  MOD_RES (6), (7), (41): Xaa is C or S
  MOD_RES (21), (22), (23), (24), (25): Xaa is A or G
  MOD_RES (26), (27), (28), (29): Xaa is A or G or is absent

SEQ ID NO: 54429 - protein, 40 aa, Artificial Sequence
  GFR-binding peptide
  MOD_RES (1), (38), (40): Xaa is C or S
  MOD_RES (17), (18), (19), (20), (21): Xaa is A or G
  MOD_RES (22), (23), (24), (25): Xaa is A or G or is absent
XQPSRVHHEPLTVLYYXXXXXXXXXEQLSNRLEEHLEXAX

SEQ ID NO: 54430 - protein, 37 aa, Artificial Sequence; identical to SEQ ID NO: 19085
  GFR-binding peptide
  MOD_RES (37), (37): Xaa is C or S
  MOD_RES (16), (17), (18), (19), (20): Xaa is A or G
  MOD_RES (21), (22), (23), (24): Xaa is A or G or is absent

SEQ ID NO: 54431 - protein, 40 aa, Artificial Sequence
  GFR-binding peptide
  MOD_RES (5), (39): Xaa is C or S
  MOD_RES (19), (20), (21), (22), (23): Xaa is A or G
  MOD_RES (24), (25), (26), (27): Xaa is A or G or is absent
EGLEXVPTEEEPLPMVYYXXXXXXXXXEQLSNFLQHNKXE

SEQ ID NO: 54432 - protein, 33 aa, Artificial Sequence; identical to SEQ ID NO: 19086
  GFR-binding peptide
  MOD_RES (14), (15), (16), (17), (18): Xaa is A or G
  MOD_RES (19), (20), (21), (22): Xaa is A or G or is absent

SEQ ID NO: 54433 - protein, 39 aa, Artificial Sequence
  GFR-binding peptide
  MOD_RES (1), (2), (36), (38): Xaa is C or S
  MOD_RES (16), (17), (18), (19), (20): Xaa is A or G
  MOD_RES (21), (22), (23), (24): Xaa is A or G or is absent
XXVPTELRSVKMAKVXXXXXXXXXKEVQVEMVVEGXGXR

SEQ ID NO: 54434 - protein, 36 aa, Artificial Sequence
  GFR-binding peptide
  MOD_RES (2), (3), (34), (36): Xaa is C or S
PXXVPQALRSVKIAKVVGRKPKVKEVQVMIVRSXKX

SEQ ID NO: 54435 - protein, 39 aa, Artificial Sequence; identical to SEQ ID NO: 19088
  GFR-binding peptide
  MOD_RES (5), (39): Xaa is C or S

SEQ ID NO: 54436 - protein, 36 aa, Artificial Sequence
  GFR-binding peptide
  MOD_RES (1), (33), (35): Xaa is C or S
XVPTELSNITMQIMDEYDKVVIGEMSEMVVEGXGXR

SEQ ID NO: 54437 - protein, 42 aa, Artificial Sequence
  GFR-binding peptide
  MOD_RES (4), (5), (39), (41): Xaa is C or S
  MOD_RES (19), (20), (21), (22), (23): Xaa is A or G
  MOD_RES (24), (25), (26), (27): Xaa is A or G or is absent
PKAXXVPTELRSVKMAKVXXXXXXXXXKEVQVDMVVEGXGXR

SEQ ID NO: 54438 - protein, 39 aa, Artificial Sequence; identical to SEQ ID NO: 15758
  GFR-binding peptide
  MOD_RES (6), (7): Xaa is C or S
  MOD_RES (21), (22), (23), (24), (25): Xaa is A or G
  MOD_RES (26), (27), (28), (29): Xaa is A or G or is absent

SEQ ID NO: 54439 - protein, 39 aa, Artificial Sequence; identical to SEQ ID NO: 15759
  GFR-binding peptide
  MOD_RES (3), (4), (36), (38): Xaa is C or S

SEQ ID NO: 54440 - protein, 38 aa, Artificial Sequence
  GFR-binding peptide
  MOD_RES (6), (7): Xaa is C or S
TVPKPXXAPTQLRSVKVAKVDDSSNVIKEVQVNMVVRA

SEQ ID NO: 54441 - protein, 36 aa, Artificial Sequence; identical to SEQ ID NO: 15761
  GFR-binding peptide
  MOD_RES (3), (4), (36): Xaa is C or S

SEQ ID NO: 54442 - protein, 39 aa, Artificial Sequence
  GFR-binding peptide
  MOD_RES (2), (39): Xaa is C or S
  MOD_RES (18), (19), (20), (21), (22): Xaa is A or G
  MOD_RES (23), (24), (25), (26): Xaa is A or G or is absent
KXQPSRVHHEPLPVVYYXXXXXXXXXEQLSNRLEEHLEX

SEQ ID NO: 54443 - protein, 35 aa, Artificial Sequence
  GFR-binding peptide
  MOD_RES (1), (35): Xaa is C or S
  MOD_RES (15), (16), (17), (18), (19): Xaa is A or G
  MOD_RES (20), (21), (22), (23): Xaa is A or G or is absent
XAPTKLSNITVQIMXXXXXXXXXIGEMSNMVVRSX

SEQ ID NO: 54444 - protein, 38 aa, Artificial Sequence; identical to SEQ ID NO: 19092
  GFR-binding peptide
  MOD_RES (2), (36), (38): Xaa is C or S

SEQ ID NO: 54445 - protein, 31 aa, Artificial Sequence; identical to SEQ ID NO: 15767
  GFR-binding peptide
  MOD_RES (1), (1): Xaa is C or S

SEQ ID NO: 54446 - protein, 34 aa, Artificial Sequence
  GFR-binding peptide
  MOD_RES (3), (3): Xaa is C or S
PTXAPTKLRPVQVRKIDDSSNVIKKATVNMVVRS

SEQ ID NO: 54447 - protein, 35 aa, Artificial Sequence; identical to SEQ ID NO: 15770
  GFR-binding peptide
  MOD_RES (2), (3), (35): Xaa is C or S

SEQ ID NO: 54448 - protein, 36 aa, Artificial Sequence
  GFR-binding peptide
  MOD_RES (2), (3): Xaa is C or S
  MOD_RES (17), (18), (19), (20), (21): Xaa is A or G
  MOD_RES (22), (23), (24), (25): Xaa is A or G or is absent
PXXAPTQLRPVQVRKIXXXXXXXXXKKATVNMVVRA

SEQ ID NO: 54449 - protein, 39 aa, Artificial Sequence; identical to SEQ ID NO: 15773
  GFR-binding peptide
  MOD_RES (4), (5), (37), (39): Xaa is C or S

SEQ ID NO: 54450 - protein, 38 aa, Artificial Sequence; identical to SEQ ID NO: 19095
  GFR-binding peptide
  MOD_RES (35), (37): Xaa is C or S

SEQ ID NO: 54451 - protein, 31 aa, Artificial Sequence
  GFR-binding peptide
  MOD_RES (1), (1): Xaa is C or S
XAPTQLRSVKVAKVDDSSNVIKEVQVNMVVR

SEQ ID NO: 54452 - protein, 32 aa, Artificial Sequence
  GFR-binding peptide
  MOD_RES (1), (2): Xaa is C or S
XXAPTKLSNITVQIMDDSSNVIIGEMSNMVVR

SEQ ID NO: 54453 - protein, 38 aa, Artificial Sequence
  GFR-binding peptide
  MOD_RES (2), (2): Xaa is C or S
  MOD_RES (18), (19), (20), (21), (22): Xaa is A or G
  MOD_RES (23), (24), (25), (26): Xaa is A or G or is absent
QXRPTQVQLEPLPVVYYXXXXXXXXXEQLSNTLEDHLA

SEQ ID NO: 54454 - protein, 36 aa, Artificial Sequence
  GFR-binding peptide
  MOD_RES (4), (5): Xaa is C or S
PKPXXAPTKLSNITVQIMDDSSNVIIGEMSNMVVRS

SEQ ID NO: 54455 - protein, 38 aa, Artificial Sequence
  GFR-binding peptide
  MOD_RES (1), (2), (35), (37): Xaa is C or S
  MOD_RES (16), (17), (18), (19), (20): Xaa is A or G
  MOD_RES (21), (22), (23), (24): Xaa is A or G or is absent
XXVPQDLRPVQIRKIXXXXXXXXXKKATVMVVKSXKXS

SEQ ID NO: 54456 - protein, 32 aa, Artificial Sequence
  GFR-binding peptide
  MOD_RES (14), (15), (16), (17), (18): Xaa is A or G
  MOD_RES (19), (20), (21), (22): Xaa is A or G or is absent
VPTELSNITMQIMXXXXXXXXXIGEMSDMVVE

SEQ ID NO: 54457 - protein, 40 aa, Artificial Sequence; identical to SEQ ID NO: 15777
  GFR-binding peptide
  MOD_RES (6), (7): Xaa is C or S
  MOD_RES (21), (22), (23), (24), (25): Xaa is A or G
  MOD_RES (26), (27), (28), (29): Xaa is A or G or is absent

SEQ ID NO: 54458 - protein, 34 aa, Artificial Sequence
  GFR-binding peptide
PTQVQLEPLPVVYYEIVRKKPIFEQLSNTLEDHL

SEQ ID NO: 54459 - protein, 37 aa, Artificial Sequence
  GFR-binding peptide
  MOD_RES (1), (2), (34), (36): Xaa is C or S
XXVPTELRPVQMRKIDENEKVVKKATVDMVVEGXGXR

SEQ ID NO: 54460 - protein, 38 aa, Artificial Sequence; identical to SEQ ID NO: 15778
  GFR-binding peptide
  MOD_RES (2), (36), (38): Xaa is C or S
  MOD_RES (16), (17), (18), (19), (20): Xaa is A or G
  MOD_RES (21), (22), (23), (24): Xaa is A or G or is absent

SEQ ID NO: 54461 - protein, 33 aa, Artificial Sequence
  GFR-binding peptide
  MOD_RES (2), (3): Xaa is C or S
PXXVSQDLSNITIQIMIGKTPKIIGEMSMIVKS

SEQ ID NO: 54462 - protein, 34 aa, Artificial Sequence
  GFR-binding peptide
  MOD_RES (1), (2), (34): Xaa is C or S
XXVPTELRPVQMRKIDENEKVVKKATVDMVVEGX

SEQ ID NO: 54463 - protein, 39 aa, Artificial Sequence
  GFR-binding peptide
  MOD_RES (1), (2), (36), (38): Xaa is C or S
  MOD_RES (16), (17), (18), (19), (20): Xaa is A or G
  MOD_RES (21), (22), (23), (24): Xaa is A or G or is absent
XXVPTELSNITMQIMXXXXXXXXXIGEMSDMVVEGXGXR

SEQ ID NO: 54464 - protein, 39 aa, Artificial Sequence
  GFR-binding peptide
  MOD_RES (4), (5), (39): Xaa is C or S
  MOD_RES (19), (20), (21), (22), (23): Xaa is A or G
  MOD_RES (24), (25), (26), (27): Xaa is A or G or is absent
PKPXXAPTKLRSVKVAKVXXXXXXXXXKEVQVNMVVRSX

SEQ ID NO: 54465 - protein, 39 aa, Artificial Sequence
  GFR-binding peptide
  MOD_RES (6), (7), (38): Xaa is C or S
ASAAPXXVPQALSNITIQIMVGRKPKVIGEMSMIVRSXK

SEQ ID NO: 54466 - protein, 42 aa, Artificial Sequence; identical to SEQ ID NO: 19102
  GFR-binding peptide
  MOD_RES (5), (42): Xaa is C or S
  MOD_RES (21), (22), (23), (24), (25): Xaa is A or G
  MOD_RES (26), (27), (28), (29): Xaa is A or G or is absent

SEQ ID NO: 54467 - protein, 39 aa, Artificial Sequence; identical to SEQ ID NO: 19103
  GFR-binding peptide
  MOD_RES (37), (39): Xaa is C or S

SEQ ID NO: 54468 - protein, 35 aa, Artificial Sequence
  GFR-binding peptide
  MOD_RES (1), (2): Xaa is C or S
  MOD_RES (16), (17), (18), (19), (20): Xaa is A or G
  MOD_RES (21), (22), (23), (24): Xaa is A or G or is absent
XXAPTQLRPVQVRKIXXXXXXXXXKKATVNMVVRA

SEQ ID NO: 54469 - protein, 39 aa, Artificial Sequence
  GFR-binding peptide
  MOD_RES (4), (5), (37), (39): Xaa is C or S
PKAXXVPTELSNITMQIMDENEKVVIGEMSDMVVEGXGX

SEQ ID NO: 54470 - protein, 36 aa, Artificial Sequence; identical to SEQ ID NO: 15785
  GFR-binding peptide
  MOD_RES (4), (5), (36): Xaa is C or S

SEQ ID NO: 54471 - protein, 42 aa, Artificial Sequence
  GFR-binding peptide
  MOD_RES (6), (40), (42): Xaa is C or S
DEGLEXVPTEEEPLTMLYYRIKPHQGQHEQLSNFLQHNKXEX

SEQ ID NO: 54472 - protein, 39 aa, Artificial Sequence
  GFR-binding peptide
  MOD_RES (3), (4), (38): Xaa is C or S
  MOD_RES (18), (19), (20), (21), (22): Xaa is A or G
  MOD_RES (23), (24), (25), (26): Xaa is A or G or is absent
KAXXVPTELRSVKMAKVXXXXXXXXXKEVQVEMVVEGXG

SEQ ID NO: 54473 - protein, 36 aa, Artificial Sequence
  GFR-binding peptide
  MOD_RES (3), (4): Xaa is C or S
  MOD_RES (18), (19), (20), (21), (22): Xaa is A or G
  MOD_RES (23), (24), (25), (26): Xaa is A or G or is absent
KPXXAPTKLRSVKVAKVXXXXXXXXXKEVQVNMVVR

SEQ ID NO: 54474 - protein, 40 aa, Artificial Sequence; identical to SEQ ID NO: 19113
  GFR-binding peptide
  MOD_RES (6), (40): Xaa is C or S
  MOD_RES (20), (21), (22), (23), (24): Xaa is A or G
  MOD_RES (25), (26), (27), (28): Xaa is A or G or is absent

SEQ ID NO: 54475 - protein, 38 aa, Artificial Sequence
  GFR-binding peptide
  MOD_RES (2), (3), (35), (37): Xaa is C or S
PXXAPTQLRSVKVAKVDDSSNVIKEVQVNMVVRAXGXH

SEQ ID NO: 54476 - protein, 34 aa, Artificial Sequence
  GFR-binding peptide
  MOD_RES (1), (2): Xaa is C or S
  MOD_RES (16), (17), (18), (19), (20): Xaa is A or G
  MOD_RES (21), (22), (23), (24): Xaa is A or G or is absent
XXAPTKLSNITVQIMXXXXXXXXXIGEMSNMVVR

SEQ ID NO: 54477 - protein, 36 aa, Artificial Sequence
  GFR-binding peptide
  MOD_RES (34), (36): Xaa is C or S
  MOD_RES (14), (15), (16), (17), (18): Xaa is A or G
  MOD_RES (19), (20), (21), (22): Xaa is A or G or is absent
APTQLRSVKVAKVXXXXXXXXXKEVQVNMVVRAXGX

SEQ ID NO: 54478 - protein, 38 aa, Artificial Sequence
  GFR-binding peptide
  MOD_RES (2), (3), (37): Xaa is C or S
  MOD_RES (17), (18), (19), (20), (21): Xaa is A or G
  MOD_RES (22), (23), (24), (25): Xaa is A or G or is absent
AXXVPTELRSVKMAKVXXXXXXXXXKEVQVDMVVEGXG

SEQ ID NO: 54479 - protein, 31 aa, Artificial Sequence
  GFR-binding peptide
  MOD_RES (31), (31): Xaa is C or S
VPQDLSNITIQIMVGRTPKVIGEMSMVVKSX

SEQ ID NO: 54480 - protein, 36 aa, Artificial Sequence; identical to SEQ ID NO: 15788
  GFR-binding peptide
  MOD_RES (4), (5): Xaa is C or S

SEQ ID NO: 54481 - protein, 42 aa, Artificial Sequence
  GFR-binding peptide
  MOD_RES (5), (6), (40), (42): Xaa is C or S
  MOD_RES (20), (21), (22), (23), (24): Xaa is A or G
  MOD_RES (25), (26), (27), (28): Xaa is A or G or is absent
IPKAXXVPTELRSVKMAKVXXXXXXXXXKEVQVEMVVEGXGX

SEQ ID NO: 54482 - protein, 39 aa, Artificial Sequence; identical to SEQ ID NO: 19117
  GFR-binding peptide
  MOD_RES (36), (38): Xaa is C or S

SEQ ID NO: 54483 - protein, 34 aa, Artificial Sequence; identical to SEQ ID NO: 15789
  GFR-binding peptide
  MOD_RES (3), (4): Xaa is C or S

SEQ ID NO: 54484 - protein, 35 aa, Artificial Sequence
  GFR-binding peptide
  MOD_RES (1), (33), (35): Xaa is C or S
XVPTELSNITMQIMDEYDKVVIGEMSEMVVEGXGX

SEQ ID NO: 54485 - protein, 40 aa, Artificial Sequence
  GFR-binding peptide
  MOD_RES (2), (39): Xaa is C or S
KXQPSRVHHEPLPVVYYEYVRKKPKLEQLSNRLEEHLEXA

SEQ ID NO: 54486 - protein, 43 aa, Artificial Sequence; identical to SEQ ID NO: 19118
  GFR-binding peptide
  MOD_RES (5), (42): Xaa is C or S
  MOD_RES (21), (22), (23), (24), (25): Xaa is A or G
  MOD_RES (26), (27), (28), (29): Xaa is A or G or is absent

SEQ ID NO: 54487 - protein, 37 aa, Artificial Sequence
  GFR-binding peptide
  MOD_RES (1), (34), (36): Xaa is C or S
  MOD_RES (15), (16), (17), (18), (19): Xaa is A or G
  MOD_RES (20), (21), (22), (23): Xaa is A or G or is absent
XVSQDLRPVQIRKIXXXXXXXXXKKATVMIVKSXKXS

SEQ ID NO: 54488 - protein, 41 aa, Artificial Sequence
  GFR-binding peptide
  MOD_RES (6), (7), (38), (40): Xaa is C or S
ASAAPXXVPQALRPVQIRKIVGRKPKVKKATVMIVRSXKXS

SEQ ID NO: 54489 - protein, 41 aa, Artificial Sequence
  GFR-binding peptide
  MOD_RES (7), (41): Xaa is C or S
  MOD_RES (21), (22), (23), (24), (25): Xaa is A or G
  MOD_RES (26), (27), (28), (29): Xaa is A or G or is absent
HVTKPTXAPTKLRSVKVAKVXXXXXXXXXKEVQVNMVVRSX

SEQ ID NO: 54490 - protein, 34 aa, Artificial Sequence
  GFR-binding peptide
  MOD_RES (1), (34): Xaa is C or S
  MOD_RES (15), (16), (17), (18), (19): Xaa is A or G
  MOD_RES (20), (21), (22), (23): Xaa is A or G or is absent
XVPQDLRSVKIAKVXXXXXXXXXKEVQVMVVKSX

SEQ ID NO: 54491 - protein, 33 aa, Artificial Sequence; identical to SEQ ID NO: 19121
  GFR-binding peptide
  MOD_RES (1), (1): Xaa is C or S
  MOD_RES (15), (16), (17), (18), (19): Xaa is A or G
  MOD_RES (20), (21), (22), (23): Xaa is A or G or is absent

SEQ ID NO: 54492 - protein, 33 aa, Artificial Sequence; identical to SEQ ID NO: 19123
  GFR-binding peptide
  MOD_RES (15), (16), (17), (18), (19): Xaa is A or G
  MOD_RES (20), (21), (22), (23): Xaa is A or G or is absent

SEQ ID NO: 54493 - protein, 37 aa, Artificial Sequence
  GFR-binding peptide
  MOD_RES (2), (2): Xaa is C or S
  MOD_RES (18), (19), (20), (21), (22): Xaa is A or G
  MOD_RES (23), (24), (25), (26): Xaa is A or G or is absent
QXRPTQVQLEPLPVVYYXXXXXXXXXEQLSNTLEDHL

SEQ ID NO: 54494 - protein, 33 aa, Artificial Sequence; identical to SEQ ID NO: 15796
  GFR-binding peptide
  MOD_RES (1), (33): Xaa is C or S

SEQ ID NO: 54495 - protein, 43 aa, Artificial Sequence; identical to SEQ ID NO: 15797
  GFR-binding peptide
  MOD_RES (6), (7), (40), (42): Xaa is C or S
  MOD_RES (21), (22), (23), (24), (25): Xaa is A or G
  MOD_RES (26), (27), (28), (29): Xaa is A or G or is absent

SEQ ID NO: 54496 - protein, 36 aa, Artificial Sequence; identical to SEQ ID NO: 15798
  GFR-binding peptide
  MOD_RES (3), (4), (36): Xaa is C or S

SEQ ID NO: 54497 - protein, 34 aa, Artificial Sequence; identical to SEQ ID NO: 15799
  GFR-binding peptide
  MOD_RES (3), (4): Xaa is C or S

SEQ ID NO: 54498 - protein, 36 aa, Artificial Sequence
  GFR-binding peptide
  MOD_RES (4), (5), (36): Xaa is C or S
ASPXXVSQDLSNITIQIMIGKTPKIIGEMSMIVKSX

SEQ ID NO: 54499 - protein, 39 aa, Artificial Sequence
  GFR-binding peptide
  MOD_RES (4), (5), (36), (38): Xaa is C or S
ASPXXVPQDLSNITIQIMVGRTPKVIGEMSMVVKSXKXS

SEQ ID NO: 54500 - protein, 36 aa, Artificial Sequence; identical to SEQ ID NO: 15801
  GFR-binding peptide
  MOD_RES (5), (6): Xaa is C or S

SEQ ID NO: 54501 - protein, 40 aa, Artificial Sequence
  GFR-binding peptide
  MOD_RES (6), (7), (40): Xaa is C or S
  MOD_RES (21), (22), (23), (24), (25): Xaa is A or G
  MOD_RES (26), (27), (28), (29): Xaa is A or G or is absent
ASASPXXVPQDLRPVQIRKIXXXXXXXXXKKATVMVVKSX

SEQ ID NO: 54502 - protein, 36 aa, Artificial Sequence
  GFR-binding peptide
  MOD_RES (2), (3), (35): Xaa is C or S
PXXAPTKLSNITVQIMDDSSNVIIGEMSNMVVRSXG

SEQ ID NO: 54503 - protein, 36 aa, Artificial Sequence; identical to SEQ ID NO: 15804
  GFR-binding peptide
  MOD_RES (2), (3), (35): Xaa is C or S

SEQ ID NO: 54504 - protein, 40 aa, Artificial Sequence; identical to SEQ ID NO: 15805
  GFR-binding peptide
  MOD_RES (5), (6), (40): Xaa is C or S
  MOD_RES (20), (21), (22), (23), (24): Xaa is A or G
  MOD_RES (25), (26), (27), (28): Xaa is A or G or is absent

SEQ ID NO: 54505 - protein, 32 aa, Artificial Sequence
  GFR-binding peptide
  MOD_RES (1), (1): Xaa is C or S
XVPTELRSVKMAKVDENEKVVKEVQVDMVVEG

SEQ ID NO: 54506 - protein, 40 aa, Artificial Sequence; identical to SEQ ID NO: 15806
  GFR-binding peptide
  MOD_RES (4), (5), (39): Xaa is C or S
  MOD_RES (19), (20), (21), (22), (23): Xaa is A or G
  MOD_RES (24), (25), (26), (27): Xaa is A or G or is absent

SEQ ID NO: 54507 - protein, 38 aa, Artificial Sequence; identical to SEQ ID NO: 15807
  GFR-binding peptide
  MOD_RES (2), (3), (36), (38): Xaa is C or S
  MOD_RES (17), (18), (19), (20), (21): Xaa is A or G
  MOD_RES (22), (23), (24), (25): Xaa is A or G or is absent

SEQ ID NO: 54508 - protein, 40 aa, Artificial Sequence
  GFR-binding peptide
  MOD_RES (2), (3), (37), (39): Xaa is C or S
  MOD_RES (17), (18), (19), (20), (21): Xaa is A or G
  MOD_RES (22), (23), (24), (25): Xaa is A or G or is absent
AXXVPTELSNITMQIMXXXXXXXXXIGEMSEMVVEGXGXR

SEQ ID NO: 54509 - protein, 36 aa, Artificial Sequence; identical to SEQ ID NO: 19134
  GFR-binding peptide
  MOD_RES (4), (4): Xaa is C or S

SEQ ID NO: 54510 - protein, 39 aa, Artificial Sequence; identical to SEQ ID NO: 15810
  GFR-binding peptide
  MOD_RES (4), (5), (36), (38): Xaa is C or S

SEQ ID NO: 54511 - protein, 41 aa, Artificial Sequence
  GFR-binding peptide
  MOD_RES (6), (7), (41): Xaa is C or S
  MOD_RES (21), (22), (23), (24), (25): Xaa is A or G
  MOD_RES (26), (27), (28), (29): Xaa is A or G or is absent
TVPKPXXAPTQLRSVKVAKVXXXXXXXXXKEVQVNMVVRAX

SEQ ID NO: 54512 - protein, 37 aa, Artificial Sequence; identical to SEQ ID NO: 15813
  GFR-binding peptide
  MOD_RES (1), (2), (35), (37): Xaa is C or S
  MOD_RES (16), (17), (18), (19), (20): Xaa is A or G
  MOD_RES (21), (22), (23), (24): Xaa is A or G or is absent

SEQ ID NO: 54513 - protein, 37 aa, Artificial Sequence
  GFR-binding peptide
  MOD_RES (3), (3): Xaa is C or S
  MOD_RES (19), (20), (21), (22), (23): Xaa is A or G
  MOD_RES (24), (25), (26), (27): Xaa is A or G or is absent
VQXRPTQVQLEPLTVLYYXXXXXXXXXEQLSNTLEDH

SEQ ID NO: 54514 - protein, 37 aa, Artificial Sequence; identical to SEQ ID NO: 15814
  GFR-binding peptide
  MOD_RES (3), (4), (36): Xaa is C or S

SEQ ID NO: 54515 - protein, 37 aa, Artificial Sequence; identical to SEQ ID NO: 15815
  GFR-binding peptide
  MOD_RES (6), (7): Xaa is C or S

SEQ ID NO: 54516 - protein, 39 aa, Artificial Sequence; identical to SEQ ID NO: 15818
  GFR-binding peptide
  MOD_RES (4), (5), (37), (39): Xaa is C or S

SEQ ID NO: 54517 - protein, 39 aa, Artificial Sequence
  GFR-binding peptide
  MOD_RES (2), (3), (36), (38): Xaa is C or S
  MOD_RES (17), (18), (19), (20), (21): Xaa is A or G
  MOD_RES (22), (23), (24), (25): Xaa is A or G or is absent
PXXVPQDLRSVKIAKVXXXXXXXXXKEVQVMVVKSXKXS

SEQ ID NO: 54518 - protein, 42 aa, Artificial Sequence
  GFR-binding peptide
  MOD_RES (3), (40), (42): Xaa is C or S
  MOD_RES (19), (20), (21), (22), (23): Xaa is A or G
  MOD_RES (24), (25), (26), (27): Xaa is A or G or is absent
VKXQPSRVHHEPLTVLYYXXXXXXXXXEQLSNRLEEHLEXAX

SEQ ID NO: 54519 - protein, 35 aa, Artificial Sequence
  GFR-binding peptide
  MOD_RES (1), (32), (34): Xaa is C or S
XVSQDLRPVQIRKIIGKTPKIKKATVMIVKSXKXS

SEQ ID NO: 54520 - protein, 38 aa, Artificial Sequence
  GFR-binding peptide
  MOD_RES (5), (6): Xaa is C or S
  MOD_RES (20), (21), (22), (23), (24): Xaa is A or G
  MOD_RES (25), (26), (27), (28): Xaa is A or G or is absent
SAAPXXVPQALRPVQIRKIXXXXXXXXXKKATVMIVRS

SEQ ID NO: 54521 - protein, 35 aa, Artificial Sequence
  GFR-binding peptide
  MOD_RES (2), (3): Xaa is C or S
  MOD_RES (17), (18), (19), (20), (21): Xaa is A or G
  MOD_RES (22), (23), (24), (25): Xaa is A or G or is absent
PXXAPTKLRSVKVAKVXXXXXXXXXKEVQVNMVVR

SEQ ID NO: 54522 - protein, 36 aa, Artificial Sequence
  GFR-binding peptide
  MOD_RES (1), (35): Xaa is C or S
  MOD_RES (15), (16), (17), (18), (19): Xaa is A or G
  MOD_RES (20), (21), (22), (23): Xaa is A or G or is absent
XVPTELRPVQMRKIXXXXXXXXXKKATVEMVVEGXG

SEQ ID NO: 54523 - protein, 43 aa, Artificial Sequence
  GFR-binding peptide
  MOD_RES (5), (42): Xaa is C or S
  MOD_RES (21), (22), (23), (24), (25): Xaa is A or G
  MOD_RES (26), (27), (28), (29): Xaa is A or G or is absent
RNVQXRPTQVQLEPLTVLYYXXXXXXXXXEQLSNTLEDHLAXK

SEQ ID NO: 54524 - protein, 33 aa, Artificial Sequence
  GFR-binding peptide
  MOD_RES (1), (1): Xaa is C or S
  MOD_RES (15), (16), (17), (18), (19): Xaa is A or G
  MOD_RES (20), (21), (22), (23): Xaa is A or G or is absent
XVPTELRPVQMRKIXXXXXXXXXKKATVDMVVE

SEQ ID NO: 54525 - protein, 36 aa, Artificial Sequence
  GFR-binding peptide
  MOD_RES (1), (34), (36): Xaa is C or S
  MOD_RES (15), (16), (17), (18), (19): Xaa is A or G
  MOD_RES (20), (21), (22), (23): Xaa is A or G or is absent
XVPQDLRSVKIAKVXXXXXXXXXKEVQVMVVKSXKX

SEQ ID NO: 54526 - protein, 42 aa, Artificial Sequence
  GFR-binding peptide
  MOD_RES (6), (7), (39), (41): Xaa is C or S
YVPKPXXAPTKLSNITVQIMDDSSNVIIGEMSNMVVRSXGXH

SEQ ID NO: 54527 - protein, 36 aa, Artificial Sequence; identical to SEQ ID NO: 19141
  GFR-binding peptide
  MOD_RES (4), (4): Xaa is C or S

SEQ ID NO: 54528 - protein, 39 aa, Artificial Sequence; identical to SEQ ID NO: 15829
  GFR-binding peptide
  MOD_RES (1), (2), (36), (38): Xaa is C or S
  MOD_RES (16), (17), (18), (19), (20): Xaa is A or G
  MOD_RES (21), (22), (23), (24): Xaa is A or G or is absent

SEQ ID NO: 54529 - protein, 37 aa, Artificial Sequence
  GFR-binding peptide
  MOD_RES (2), (3), (34), (36): Xaa is C or S
PXXVSQDLSNITIQIMIGKTPKIIGEMSMIVKSXKXS

SEQ ID NO: 54530 - protein, 34 aa, Artificial Sequence
  GFR-binding peptide
  MOD_RES (31), (33): Xaa is C or S
VPQDLRPVQIRKIVGRTPKVKKATVMVVKSXKXS

SEQ ID NO: 54531 - protein, 36 aa, Artificial Sequence
  GFR-binding peptide
  MOD_RES (5), (6): Xaa is C or S
IPKAXXVPTELSNITMQIMDEYDKVVIGEMSEMVVE

SEQ ID NO: 54532 - protein, 41 aa, Artificial Sequence
  GFR-binding peptide
  MOD_RES (5), (6), (40): Xaa is C or S
  MOD_RES (20), (21), (22), (23), (24): Xaa is A or G
  MOD_RES (25), (26), (27), (28): Xaa is A or G or is absent
VPKPXXAPTQLRSVKVAKVXXXXXXXXXKEVQVNMVVRAXG

SEQ ID NO: 54533 - protein, 43 aa, Artificial Sequence; identical to SEQ ID NO: 15834
  GFR-binding peptide
  MOD_RES (6), (7), (41), (43): Xaa is C or S
  MOD_RES (21), (22), (23), (24), (25): Xaa is A or G
  MOD_RES (26), (27), (28), (29): Xaa is A or G or is absent

SEQ ID NO: 54534 - protein, 31 aa, Artificial Sequence
  GFR-binding peptide
  MOD_RES (31), (31): Xaa is C or S
VPQDLRSVKIAKVVGRTPKVKEVQVMVVKSX

SEQ ID NO: 54535 - protein, 39 aa, Artificial Sequence
  GFR-binding peptide
  MOD_RES (2), (39): Xaa is C or S
QXRPTQVQLEPLTVLYYEIVRKKPIFEQLSNTLEDHLAX

SEQ ID NO: 54536 - protein, 34 aa, Artificial Sequence; identical to SEQ ID NO: 15835
  GFR-binding peptide
  MOD_RES (1), (2): Xaa is C or S
  MOD_RES (16), (17), (18), (19), (20): Xaa is A or G
  MOD_RES (21), (22), (23), (24): Xaa is A or G or is absent

SEQ ID NO: 54537 - protein, 35 aa, Artificial Sequence; identical to SEQ ID NO: 15837
  GFR-binding peptide
  MOD_RES (1), (2), (34): Xaa is C or S

SEQ ID NO: 54538 - protein, 40 aa, Artificial Sequence; identical to SEQ ID NO: 19147
  GFR-binding peptide
  MOD_RES (2), (39): Xaa is C or S
  MOD_RES (18), (19), (20), (21), (22): Xaa is A or G
  MOD_RES (23), (24), (25), (26): Xaa is A or G or is absent

SEQ ID NO: 54539 - protein, 38 aa, Artificial Sequence
  GFR-binding peptide
  MOD_RES (3), (35), (37): Xaa is C or S
PTXAPTKLRPVQVRKIDDSSNVIKKATVNMVVRSXGXH

SEQ ID NO: 54540 - protein, 33 aa, Artificial Sequence; identical to SEQ ID NO: 15840
  GFR-binding peptide
  MOD_RES (2), (2): Xaa is C or S

SEQ ID NO: 54541 - protein, 35 aa, Artificial Sequence
  GFR-binding peptide
  MOD_RES (2), (3): Xaa is C or S
  MOD_RES (17), (18), (19), (20), (21): Xaa is A or G
  MOD_RES (22), (23), (24), (25): Xaa is A or G or is absent
PXXVPQDLSNITIQIMXXXXXXXXXIGEMSMVVKS

SEQ ID NO: 54542 - protein, 37 aa, Artificial Sequence; identical to SEQ ID NO: 15841
  GFR-binding peptide
  MOD_RES (1), (2), (35), (37): Xaa is C or S
  MOD_RES (16), (17), (18), (19), (20): Xaa is A or G
  MOD_RES (21), (22), (23), (24): Xaa is A or G or is absent

SEQ ID NO: 54543 - protein, 37 aa, Artificial Sequence; identical to SEQ ID NO: 19149
  GFR-binding peptide
  MOD_RES (4), (4): Xaa is C or S

SEQ ID NO: 54544 - protein, 39 aa, Artificial Sequence; identical to SEQ ID NO: 15843
  GFR-binding peptide
  MOD_RES (6), (7), (38): Xaa is C or S

SEQ ID NO: 54545 - protein, 35 aa, Artificial Sequence
  GFR-binding peptide
  MOD_RES (3), (3): Xaa is C or S
  MOD_RES (17), (18), (19), (20), (21): Xaa is A or G
  MOD_RES (22), (23), (24), (25): Xaa is A or G or is absent
PTXAPTKLSNITVQIMXXXXXXXXXIGEMSNMVVR

SEQ ID NO: 54546 - protein, 39 aa, Artificial Sequence
  GFR-binding peptide
  MOD_RES (5), (5): Xaa is C or S
SSVKXQPSRVHHEPLPVVYYEYVRKKPKLEQLSNRLEEH

SEQ ID NO: 54547 - protein, 41 aa, Artificial Sequence; identical to SEQ ID NO: 19152
  GFR-binding peptide
  MOD_RES (1), (38), (40): Xaa is C or S

SEQ ID NO: 54548 - protein, 39 aa, Artificial Sequence
  GFR-binding peptide
  MOD_RES (4), (4): Xaa is C or S
NVQXRPTQVQLEPLTVLYYEIVRKKPIFEQLSNTLEDHL

SEQ ID NO: 54549 - protein, 41 aa, Artificial Sequence; identical to SEQ ID NO: 39380
  GFR-binding peptide
  MOD_RES (5), (6), (39), (41): Xaa is C or S
  MOD_RES (20), (21), (22), (23), (24): Xaa is A or G
  MOD_RES (25), (26), (27), (28): Xaa is A or G or is absent

SEQ ID NO: 54550 - protein, 33 aa, Artificial Sequence
  GFR-binding peptide
  MOD_RES (31), (33): Xaa is C or S
VSQDLRSVKIAKVIGKTPKIKEVQVMIVKSXKX

SEQ ID NO: 54551 - protein, 37 aa, Artificial Sequence
  GFR-binding peptide
  MOD_RES (1), (2), (34), (36): Xaa is C or S
XXAPTKLRSVKVAKVDDSSNVIKEVQVNMVVRSXGXH

SEQ ID NO: 54552 - protein, 39 aa, Artificial Sequence; identical to SEQ ID NO: 19158
  GFR-binding peptide
  MOD_RES (2), (36), (38): Xaa is C or S
  MOD_RES (16), (17), (18), (19), (20): Xaa is A or G
  MOD_RES (21), (22), (23), (24): Xaa is A or G or is absent

SEQ ID NO: 54553 - protein, 39 aa, Artificial Sequence; identical to SEQ ID NO: 15848
  GFR-binding peptide
  MOD_RES (2), (3), (37), (39): Xaa is C or S
  MOD_RES (17), (18), (19), (20), (21): Xaa is A or G
  MOD_RES (22), (23), (24), (25): Xaa is A or G or is absent

SEQ ID NO: 54554 - protein, 37 aa, Artificial Sequence
  GFR-binding peptide
  MOD_RES (3), (4): Xaa is C or S
  MOD_RES (18), (19), (20), (21), (22): Xaa is A or G
  MOD_RES (23), (24), (25), (26): Xaa is A or G or is absent
KPXXAPTQLSNITVQIMXXXXXXXXXIGEMSNMVVRA

SEQ ID NO: 54555 - protein, 36 aa, Artificial Sequence; identical to SEQ ID NO: 15851
  GFR-binding peptide
  MOD_RES (2), (3), (34), (36): Xaa is C or S

SEQ ID NO: 54556 - protein, 37 aa, Artificial Sequence
  GFR-binding peptide
  MOD_RES (2), (3), (35), (37): Xaa is C or S
PXXAPTKLSNITVQIMDDSSNVIIGEMSNMVVRSXGX

SEQ ID NO: 54557 - protein, 34 aa, Artificial Sequence
  GFR-binding peptide
  MOD_RES (34), (34): Xaa is C or S
  MOD_RES (14), (15), (16), (17), (18): Xaa is A or G
  MOD_RES (19), (20), (21), (22): Xaa is A or G or is absent
VPTEEEPLPMVYYXXXXXXXXXEQLSNFLQHNKX

SEQ ID NO: 54558 - protein, 40 aa, Artificial Sequence; identical to SEQ ID NO: 19165
  GFR-binding peptide
  MOD_RES (3), (40): Xaa is C or S
  MOD_RES (19), (20), (21), (22), (23): Xaa is A or G
  MOD_RES (24), (25), (26), (27): Xaa is A or G or is absent

SEQ ID NO: 54559 - protein, 40 aa, Artificial Sequence; identical to SEQ ID NO: 19166
  GFR-binding peptide
  MOD_RES (1), (38), (40): Xaa is C or S

SEQ ID NO: 54560 - protein, 35 aa, Artificial Sequence
  GFR-binding peptide
  MOD_RES (1), (34): Xaa is C or S
  MOD_RES (15), (16), (17), (18), (19): Xaa is A or G
  MOD_RES (20), (21), (22), (23): Xaa is A or G or is absent
XVPQDLSNITIQIMXXXXXXXXXIGEMSMVVKSXK

SEQ ID NO: 54561 - protein, 33 aa, Artificial Sequence
  GFR-binding peptide
  MOD_RES (1), (2): Xaa is C or S
XXAPTQLSNITVQIMDDSSNVIIGEMSNMVVRA

SEQ ID NO: 54562 - protein, 35 aa, Artificial Sequence
  GFR-binding peptide
  MOD_RES (4), (5): Xaa is C or S
PKAXXVPTELRPVQMRKIDEYDKVVKKATVEMVVE

SEQ ID NO: 54563 - protein, 34 aa, Artificial Sequence; identical to SEQ ID NO: 15859
  GFR-binding peptide
  MOD_RES (33), (33): Xaa is C or S
  MOD_RES (14), (15), (16), (17), (18): Xaa is A or G
  MOD_RES (19), (20), (21), (22): Xaa is A or G or is absent

SEQ ID NO: 54564 - protein, 38 aa, Artificial Sequence; identical to SEQ ID NO: 15860
  GFR-binding peptide
  MOD_RES (5), (6), (38): Xaa is C or S

SEQ ID NO: 54565 - protein, 38 aa, Artificial Sequence; identical to SEQ ID NO: 15861
  GFR-binding peptide
  MOD_RES (1), (2), (35), (37): Xaa is C or S
  MOD_RES (16), (17), (18), (19), (20): Xaa is A or G
  MOD_RES (21), (22), (23), (24): Xaa is A or G or is absent

SEQ ID NO: 54566 - protein, 45 aa, Artificial Sequence; identical to SEQ ID NO: 19170
  GFR-binding peptide
  MOD_RES (5), (42), (44): Xaa is C or S
  MOD_RES (21), (22), (23), (24), (25): Xaa is A or G
  MOD_RES (26), (27), (28), (29): Xaa is A or G or is absent

SEQ ID NO: 54567 - protein, 44 aa, Artificial Sequence
  GFR-binding peptide
  MOD_RES (4), (41), (43): Xaa is C or S
  MOD_RES (20), (21), (22), (23), (24): Xaa is A or G
  MOD_RES (25), (26), (27), (28): Xaa is A or G or is absent
SVKXQPSRVHHEPLTVLYYXXXXXXXXXEQLSNRLEEHLEXAXA

SEQ ID NO: 54568 - protein, 37 aa, Artificial Sequence
  GFR-binding peptide
  MOD_RES (5), (6): Xaa is C or S
IPKAXXVPTELRPVQMRKIDEYDKVVKKATVEMVVEG

SEQ ID NO: 54569 - protein, 35 aa, Artificial Sequence; identical to SEQ ID NO: 15863
  GFR-binding peptide
  MOD_RES (3), (4), (35): Xaa is C or S

SEQ ID NO: 54570 - protein, 32 aa, Artificial Sequence; identical to SEQ ID NO: 15865
  GFR-binding peptide
  MOD_RES (1), (32): Xaa is C or S

SEQ ID NO: 54571 - protein, 39 aa, Artificial Sequence
  GFR-binding peptide
  MOD_RES (6), (7): Xaa is C or S
  MOD_RES (21), (22), (23), (24), (25): Xaa is A or G
  MOD_RES (26), (27), (28), (29): Xaa is A or G or is absent
ASASPXXVPQDLSNITIQIMXXXXXXXXXIGEMSMVVKS

SEQ ID NO: 54572 - protein, 42 aa, Artificial Sequence
  GFR-binding peptide
  MOD_RES (5), (6), (39), (41): Xaa is C or S
  MOD_RES (20), (21), (22), (23), (24): Xaa is A or G
  MOD_RES (25), (26), (27), (28): Xaa is A or G or is absent
SASPXXVPQDLRSVKIAKVXXXXXXXXXKEVQVMVVKSXKXS

SEQ ID NO: 54573 - protein, 36 aa, Artificial Sequence; identical to SEQ ID NO: 15866
  GFR-binding peptide
  MOD_RES (2), (3), (34), (36): Xaa is C or S

SEQ ID NO: 54574 - protein, 38 aa, Artificial Sequence; identical to SEQ ID NO: 19177
  GFR-binding peptide
  MOD_RES (4), (4): Xaa is C or S

SEQ ID NO: 54575 - protein, 31 aa, Artificial Sequence; identical to SEQ ID NO: 15868
  GFR-binding peptide
  MOD_RES (31), (31): Xaa is C or S

SEQ ID NO: 54576 - protein, 31 aa, Artificial Sequence
  GFR-binding peptide
VPTELRSVKMAKVDENEKVVKEVQVDMVVEG

SEQ ID NO: 54577 - protein, 40 aa, Artificial Sequence; identical to SEQ ID NO: 19180
  GFR-binding peptide
  MOD_RES (3), (37), (39): Xaa is C or S

SEQ ID NO: 54578 - protein, 40 aa, Artificial Sequence; identical to SEQ ID NO: 15870
  GFR-binding peptide
  MOD_RES (4), (5), (37), (39): Xaa is C or S

SEQ ID NO: 54579 - protein, 39 aa, Artificial Sequence
  GFR-binding peptide
  MOD_RES (3), (4), (36), (38): Xaa is C or S
KPXXAPTQLRSVKVAKVDDSSNVIKEVQVNMVVRAXGXH

SEQ ID NO: 54580 - protein, 38 aa, Artificial Sequence
  GFR-binding peptide
  MOD_RES (36), (38): Xaa is C or S
  MOD_RES (15), (16), (17), (18), (19): Xaa is A or G
  MOD_RES (20), (21), (22), (23): Xaa is A or G or is absent
PSRVHHEPLTVLYYXXXXXXXXXEQLSNRLEEHLEXAX

SEQ ID NO: 54581 - protein, 41 aa, Artificial Sequence; identical to SEQ ID NO: 15871
  GFR-binding peptide
  MOD_RES (5), (6), (38), (40): Xaa is C or S

SEQ ID NO: 54582 - protein, 35 aa, Artificial Sequence
  GFR-binding peptide
  MOD_RES (3), (3): Xaa is C or S
  MOD_RES (17), (18), (19), (20), (21): Xaa is A or G
  MOD_RES (22), (23), (24), (25): Xaa is A or G or is absent
LEXVPTEEEPLPMVYYXXXXXXXXXEQLSNFLQHN

SEQ ID NO: 54583 - protein, 36 aa, Artificial Sequence; identical to SEQ ID NO: 19184
  GFR-binding peptide
  MOD_RES (36), (36): Xaa is C or S

SEQ ID NO: 54584 - protein, 37 aa, Artificial Sequence
  GFR-binding peptide
  MOD_RES (3), (4): Xaa is C or S
  MOD_RES (18), (19), (20), (21), (22): Xaa is A or G
  MOD_RES (23), (24), (25), (26): Xaa is A or G or is absent
KAXXVPTELRPVQMRKIXXXXXXXXXKKATVDMVVEG

SEQ ID NO: 54585 - protein, 42 aa, Artificial Sequence
  GFR-binding peptide
  MOD_RES (5), (6), (39), (41): Xaa is C or S
  MOD_RES (20), (21), (22), (23), (24): Xaa is A or G
  MOD_RES (25), (26), (27), (28): Xaa is A or G or is absent
SASPXXVSQDLSNITIQIMXXXXXXXXXIGEMSMIVKSXKXS

SEQ ID NO: 54586 - protein, 40 aa, Artificial Sequence; identical to SEQ ID NO: 19185
  GFR-binding peptide
  MOD_RES (5), (39): Xaa is C or S
  MOD_RES (19), (20), (21), (22), (23): Xaa is A or G
  MOD_RES (24), (25), (26), (27): Xaa is A or G or is absent

SEQ ID NO: 54587 - protein, 39 aa, Artificial Sequence; identical to SEQ ID NO: 19186
  GFR-binding peptide
  MOD_RES (36), (38): Xaa is C or S

SEQ ID NO: 54588 - protein, 35 aa, Artificial Sequence
  GFR-binding peptide
  MOD_RES (1), (2): Xaa is C or S
  MOD_RES (16), (17), (18), (19), (20): Xaa is A or G
  MOD_RES (21), (22), (23), (24): Xaa is A or G or is absent
XXVPTELRSVKMAKVXXXXXXXXXKEVQVDMVVEG

SEQ ID NO: 54589 - protein, 41 aa, Artificial Sequence
  GFR-binding peptide
  MOD_RES (5), (39), (41): Xaa is C or S
EGLEXVPTEEEPLPMVYYRIKPHQGQHEQLSNFLQHNKXEX

SEQ ID NO: 54590 - protein, 36 aa, Artificial Sequence
  GFR-binding peptide
  MOD_RES (2), (3), (34), (36): Xaa is C or S
PXXVSQDLSNITIQIMIGKTPKIIGEMSMIVKSXKX

SEQ ID NO: 54591 - protein, 37 aa, Artificial Sequence; identical to SEQ ID NO: 15879
  GFR-binding peptide
  MOD_RES (1), (2), (36): Xaa is C or S
  MOD_RES (16), (17), (18), (19), (20): Xaa is A or G
  MOD_RES (21), (22), (23), (24): Xaa is A or G or is absent

SEQ ID NO: 54592 - protein, 42 aa, Artificial Sequence; identical to SEQ ID NO: 19188
  GFR-binding peptide
  MOD_RES (5), (39), (41): Xaa is C or S

SEQ ID NO: 54593 - protein, 41 aa, Artificial Sequence
  GFR-binding peptide
  MOD_RES (4), (41): Xaa is C or S
  MOD_RES (20), (21), (22), (23), (24): Xaa is A or G
  MOD_RES (25), (26), (27), (28): Xaa is A or G or is absent
NVQXRPTQVQLEPLTVLYYXXXXXXXXXEQLSNTLEDHLAX

SEQ ID NO: 54594 - protein, 33 aa, Artificial Sequence
  GFR-binding peptide
  MOD_RES (2), (3): Xaa is C or S
PXXVPQALSNITIQIMVGRKPKVIGEMSMIVRS

SEQ ID NO: 54595 - protein, 41 aa, Artificial Sequence
  GFR-binding peptide
  MOD_RES (7), (41): Xaa is C or S
NDEGLEXVPTEEEPLTMLYYRIKPHQGQHEQLSNFLQHNKX

SEQ ID NO: 54596 - protein, 35 aa, Artificial Sequence
  GFR-binding peptide
  MOD_RES (1), (33), (35): Xaa is C or S
XAPTQLSNITVQIMDDSSNVIIGEMSNMVVRAXGX

SEQ ID NO: 54597 - protein, 40 aa, Artificial Sequence; identical to SEQ ID NO: 15881
  GFR-binding peptide
  MOD_RES (4), (5), (37), (39): Xaa is C or S

SEQ ID NO: 54598 - protein, 33 aa, Artificial Sequence
  GFR-binding peptide
  MOD_RES (33), (33): Xaa is C or S
  MOD_RES (14), (15), (16), (17), (18): Xaa is A or G
  MOD_RES (19), (20), (21), (22): Xaa is A or G or is absent
VSQDLRSVKIAKVXXXXXXXXXKEVQVMIVKSX

SEQ ID NO: 54599 - protein, 41 aa, Artificial Sequence
  GFR-binding peptide
  MOD_RES (5), (6), (39), (41): Xaa is C or S
  MOD_RES (20), (21), (22), (23), (24): Xaa is A or G
  MOD_RES (25), (26), (27), (28): Xaa is A or G or is absent
SASPXXVPQDLSNITIQIMXXXXXXXXXIGEMSMVVKSXKX

SEQ ID NO: 54600 - protein, 36 aa, Artificial Sequence; identical to SEQ ID NO: 19191
  GFR-binding peptide
  MOD_RES (35), (35): Xaa is C or S

SEQ ID NO: 54601 - protein, 39 aa, Artificial Sequence
  GFR-binding peptide
  MOD_RES (6), (6): Xaa is C or S
  MOD_RES (20), (21), (22), (23), (24): Xaa is A or G
  MOD_RES (25), (26), (27), (28): Xaa is A or G or is absent
VTKPTXAPTKLRSVKVAKVXXXXXXXXXKEVQVNMVVRS

SEQ ID NO: 54602 - protein, 39 aa, Artificial Sequence; identical to SEQ ID NO: 19193
  GFR-binding peptide
  MOD_RES (1), (38): Xaa is C or S
  MOD_RES (17), (18), (19), (20), (21): Xaa is A or G
  MOD_RES (22), (23), (24), (25): Xaa is A or G or is absent

SEQ ID NO: 54603 - protein, 40 aa, Artificial Sequence; identical to SEQ ID NO: 15885
  GFR-binding peptide
  MOD_RES (6), (7), (40): Xaa is C or S
  MOD_RES (21), (22), (23), (24), (25): Xaa is A or G
  MOD_RES (26), (27), (28), (29): Xaa is A or G or is absent

SEQ ID NO: 54604 - protein, 32 aa, Artificial Sequence
  GFR-binding peptide
  MOD_RES (1), (2): Xaa is C or S
XXAPTKLRPVQVRKIDDSSNVIKKATVNMVVR

SEQ ID NO: 54605 - protein, 37 aa, Artificial Sequence; identical to SEQ ID NO: 15889
  GFR-binding peptide
  MOD_RES (2), (3), (37): Xaa is C or S
  MOD_RES (17), (18), (19), (20), (21): Xaa is A or G
  MOD_RES (22), (23), (24), (25): Xaa is A or G or is absent

SEQ ID NO: 54606 - protein, 31 aa, Artificial Sequence
  GFR-binding peptide
VPTELRSVKMAKVDEYDKVVKEVQVEMVVEG

SEQ ID NO: 54607 - protein, 37 aa, Artificial Sequence; identical to SEQ ID NO: 15892
  GFR-binding peptide
  MOD_RES (4), (4): Xaa is C or S
  MOD_RES (18), (19), (20), (21), (22): Xaa is A or G
  MOD_RES (23), (24), (25), (26): Xaa is A or G or is absent

SEQ ID NO: 54608 - protein, 42 aa, Artificial Sequence
  GFR-binding peptide
  MOD_RES (5), (6), (40), (42): Xaa is C or S
  MOD_RES (20), (21), (22), (23), (24): Xaa is A or G
  MOD_RES (25), (26), (27), (28): Xaa is A or G or is absent
IPKAXXVPTELRPVQMRKIXXXXXXXXXKKATVEMVVEGXGX

SEQ ID NO: 54609 - protein, 33 aa, Artificial Sequence
  GFR-binding peptide
VPTEEEPLPMVYYRIKPHQGQHEQLSNFLQHNK

SEQ ID NO: 54610 - protein, 32 aa, Artificial Sequence; identical to SEQ ID NO: 19197
  GFR-binding peptide

SEQ ID NO: 54611 - protein, 37 aa, Artificial Sequence
  GFR-binding peptide
  MOD_RES (1), (34), (36): Xaa is C or S
  MOD_RES (15), (16), (17), (18), (19): Xaa is A or G
  MOD_RES (20), (21), (22), (23): Xaa is A or G or is absent
XVPQALRSVKIAKVXXXXXXXXXKEVQVMIVRSXKXS

SEQ ID NO: 54612 - protein, 35 aa, Artificial Sequence; identical to SEQ ID NO: 15895
  GFR-binding peptide
  MOD_RES (1), (2), (34): Xaa is C or S

SEQ ID NO: 54613 - protein, 39 aa, Artificial Sequence
  GFR-binding peptide
  MOD_RES (4), (5), (39): Xaa is C or S
  MOD_RES (19), (20), (21), (22), (23): Xaa is A or G
  MOD_RES (24), (25), (26), (27): Xaa is A or G or is absent
PKAXXVPTELRPVQMRKIXXXXXXXXXKKATVEMVVEGX

SEQ ID NO: 54614 - protein, 37 aa, Artificial Sequence
  GFR-binding peptide
  MOD_RES (6), (7): Xaa is C or S
ASASPXXVPQDLSNITIQIMVGRTPKVIGEMSMVVKS

SEQ ID NO: 54615 - protein, 34 aa, Artificial Sequence
  GFR-binding peptide
  MOD_RES (34), (34): Xaa is C or S
VPTEEEPLPMVYYRIKPHQGQHEQLSNFLQHNKX

SEQ ID NO: 54616 - protein, 35 aa, Artificial Sequence
  GFR-binding peptide
RPTQVQLEPLTVLYYEIVRKKPIFEQLSNTLEDHL

SEQ ID NO: 54617 - protein, 34 aa, Artificial Sequence
  GFR-binding peptide
  MOD_RES (1), (1): Xaa is C or S
  MOD_RES (15), (16), (17), (18), (19): Xaa is A or G
  MOD_RES (20), (21), (22), (23): Xaa is A or G or is absent
XVPTELRPVQMRKIXXXXXXXXXKKATVEMVVEG

SEQ ID NO: 54618 - protein, 38 aa, Artificial Sequence
  GFR-binding peptide
  MOD_RES (4), (5): Xaa is C or S
  MOD_RES (19), (20), (21), (22), (23): Xaa is A or G
  MOD_RES (24), (25), (26), (27): Xaa is A or G or is absent
PKAXXVPTELRSVKMAKVXXXXXXXXXKEVQVDMVVEG

SEQ ID NO: 54619 - protein, 34 aa, Artificial Sequence; identical to SEQ ID NO: 15905
  GFR-binding peptide
  MOD_RES (1), (1): Xaa is C or S
  MOD_RES (15), (16), (17), (18), (19): Xaa is A or G
  MOD_RES (20), (21), (22), (23): Xaa is A or G or is absent

SEQ ID NO: 54620 - protein, 40 aa, Artificial Sequence
  GFR-binding peptide
  MOD_RES (4), (38), (40): Xaa is C or S
GLEXVPTEEEPLPMVYYRIKPHQGQHEQLSNFLQHNKXEX

SEQ ID NO: 54621 - protein, 32 aa, Artificial Sequence; identical to SEQ ID NO: 15906
  GFR-binding peptide
  MOD_RES (1), (2): Xaa is C or S

SEQ ID NO: 54622 - protein, 38 aa, Artificial Sequence
  GFR-binding peptide
  MOD_RES (1), (2), (35), (37): Xaa is C or S
  MOD_RES (16), (17), (18), (19), (20): Xaa is A or G
  MOD_RES (21), (22), (23), (24): Xaa is A or G or is absent
XXVPQDLRSVKIAKVXXXXXXXXXKEVQVMVVKSXKXS

SEQ ID NO: 54623 - protein, 32 aa, Artificial Sequence; identical to SEQ ID NO: 15907
  GFR-binding peptide
  MOD_RES (31), (31): Xaa is C or S

SEQ ID NO: 54624 - protein, 38 aa, Artificial Sequence; identical to SEQ ID NO: 19211
  GFR-binding peptide
  MOD_RES (35), (37): Xaa is C or S

SEQ ID NO: 54625 - protein, 36 aa, Artificial Sequence
  GFR-binding peptide
  MOD_RES (2), (3): Xaa is C or S
  MOD_RES (17), (18), (19), (20), (21): Xaa is A or G
  MOD_RES (22), (23), (24), (25): Xaa is A or G or is absent
AXXVPTELSNITMQIMXXXXXXXXXIGEMSDMVVEG

SEQ ID NO: 54626 - protein, 32 aa, Artificial Sequence
  GFR-binding peptide
  MOD_RES (31), (31): Xaa is C or S
VPQALRSVKIAKVVGRKPKVKEVQVMIVRSXK

SEQ ID NO: 54627 - protein, 41 aa, Artificial Sequence
  GFR-binding peptide
  MOD_RES (6), (7), (40): Xaa is C or S
  MOD_RES (21), (22), (23), (24), (25): Xaa is A or G
  MOD_RES (26), (27), (28), (29): Xaa is A or G or is absent
ASASPXXVPQDLSNITIQIMXXXXXXXXXIGEMSMVVKSXK

SEQ ID NO: 54628 - protein, 36 aa, Artificial Sequence
  GFR-binding peptide
  MOD_RES (1), (2), (35): Xaa is C or S
  MOD_RES (16), (17), (18), (19), (20): Xaa is A or G
  MOD_RES (21), (22), (23), (24): Xaa is A or G or is absent
XXVSQDLSNITIQIMXXXXXXXXXIGEMSMIVKSXK

SEQ ID NO: 54629 - protein, 39 aa, Artificial Sequence; identical to SEQ ID NO: 15910
  GFR-binding peptide
  MOD_RES (6), (7), (39): Xaa is C or S

SEQ ID NO: 54630 - protein, 41 aa, Artificial Sequence
  GFR-binding peptide
  MOD_RES (4), (38), (40): Xaa is C or S
  MOD_RES (18), (19), (20), (21), (22): Xaa is A or G
  MOD_RES (23), (24), (25), (26): Xaa is A or G or is absent
KPTXAPTKLRPVQVRKIXXXXXXXXXKKATVNMVVRSXGXH

SEQ ID NO: 54631 - protein, 43 aa, Artificial Sequence; identical to SEQ ID NO: 19215
  GFR-binding peptide
  MOD_RES (5), (42): Xaa is C or S
  MOD_RES (21), (22), (23), (24), (25): Xaa is A or G
  MOD_RES (26), (27), (28), (29): Xaa is A or G or is absent

SEQ ID NO: 54632 - protein, 38 aa, Artificial Sequence; identical to SEQ ID NO: 15920
  GFR-binding peptide
  MOD_RES (3), (4), (38): Xaa is C or S
  MOD_RES (18), (19), (20), (21), (22): Xaa is A or G
  MOD_RES (23), (24), (25), (26): Xaa is A or G or is absent

SEQ ID NO: 54633 - protein, 37 aa, Artificial Sequence
  GFR-binding peptide
  MOD_RES (2), (2): Xaa is C or S
KXQPSRVHHEPLPVVYYEYVRKKPKLEQLSNRLEEHL

SEQ ID NO: 54634 - protein, 37 aa, Artificial Sequence
  GFR-binding peptide
  MOD_RES (6), (7): Xaa is C or S
ASAAPXXVPQALRPVQIRKIVGRKPKVKKATVMIVRS

SEQ ID NO: 54635 - protein, 40 aa, Artificial Sequence
  GFR-binding peptide
  MOD_RES (6), (7), (39): Xaa is C or S
TVPKPXXAPTQLSNITVQIMDDSSNVIIGEMSNMVVRAXG

SEQ ID NO: 54636 - protein, 36 aa, Artificial Sequence; identical to SEQ ID NO: 15922
  GFR-binding peptide
  MOD_RES (1), (2), (35): Xaa is C or S
  MOD_RES (16), (17), (18), (19), (20): Xaa is A or G
  MOD_RES (21), (22), (23), (24): Xaa is A or G or is absent

SEQ ID NO: 54637 - protein, 41 aa, Artificial Sequence; identical to SEQ ID NO: 19221
  GFR-binding peptide
  MOD_RES (1), (38), (40): Xaa is C or S
  MOD_RES (17), (18), (19), (20), (21): Xaa is A or G
  MOD_RES (22), (23), (24), (25): Xaa is A or G or is absent

SEQ ID NO: 54638 - protein, 36 aa, Artificial Sequence
  GFR-binding peptide
  MOD_RES (5), (6): Xaa is C or S
SASPXXVPQDLRPVQIRKIVGRTPKVKKATVMVVKS

SEQ ID NO: 54639 - protein, 44 aa, Artificial Sequence; identical to SEQ ID NO: 15923
  GFR-binding peptide
  MOD_RES (6), (7), (41), (43): Xaa is C or S
  MOD_RES (21), (22), (23), (24), (25): Xaa is A or G
  MOD_RES (26), (27), (28), (29): Xaa is A or G or is absent

SEQ ID NO: 54640 - protein, 36 aa, Artificial Sequence; identical to SEQ ID NO: 15924
  GFR-binding peptide
  MOD_RES (1), (2), (36): Xaa is C or S
  MOD_RES (16), (17), (18), (19), (20): Xaa is A or G
  MOD_RES (21), (22), (23), (24): Xaa is A or G or is absent

SEQ ID NO: 54641 - protein, 36 aa, Artificial Sequence; identical to SEQ ID NO: 19224
  GFR-binding peptide
  MOD_RES (3), (3): Xaa is C or S

SEQ ID NO: 54642 - protein, 34 aa, Artificial Sequence
  GFR-binding peptide
  MOD_RES (2), (3), (34): Xaa is C or S
PXXVPQALRPVQIRKIVGRKPKVKKATVMIVRSX

SEQ ID NO: 54643 - protein, 34 aa, Artificial Sequence
  GFR-binding peptide
  MOD_RES (1), (32), (34): Xaa is C or S
XVPQDLRSVKIAKVVGRTPKVKEVQVMVVKSXKX

SEQ ID NO: 54644 - protein, 37 aa, Artificial Sequence
  GFR-binding peptide
  MOD_RES (3), (4), (36): Xaa is C or S
KAXXVPTELSNITMQIMDEYDKVVIGEMSEMVVEGXG

SEQ ID NO: 54645 - protein, 45 aa, Artificial Sequence; identical to SEQ ID NO: 19229
  GFR-binding peptide
  MOD_RES (5), (42), (44): Xaa is C or S
  MOD_RES (21), (22), (23), (24), (25): Xaa is A or G
  MOD_RES (26), (27), (28), (29): Xaa is A or G or is absent

SEQ ID NO: 54646 - protein, 33 aa, Artificial Sequence
  GFR-binding peptide
  MOD_RES (1), (1): Xaa is C or S
  MOD_RES (15), (16), (17), (18), (19): Xaa is A or G
  MOD_RES (20), (21), (22), (23): Xaa is A or G or is absent
XVPTELRSVKMAKVXXXXXXXXXKEVQVDMVVE

SEQ ID NO: 54647 - protein, 38 aa, Artificial Sequence; identical to SEQ ID NO: 19232
  GFR-binding peptide
  MOD_RES (2), (2): Xaa is C or S

SEQ ID NO: 54648 - protein, 39 aa, Artificial Sequence
  GFR-binding peptide
  MOD_RES (7), (39): Xaa is C or S
HVTKPTXAPTKLSNITVQIMDDSSNVIIGEMSNMVVRSX

SEQ ID NO: 54649 - protein, 32 aa, Artificial Sequence; identical to SEQ ID NO: 19238
  GFR-binding peptide
  MOD_RES (14), (15), (16), (17), (18): Xaa is A or G
  MOD_RES (19), (20), (21), (22): Xaa is A or G or is absent

SEQ ID NO: 54650 - protein, 37 aa, Artificial Sequence
  GFR-binding peptide
  MOD_RES (36), (36): Xaa is C or S
  MOD_RES (15), (16), (17), (18), (19): Xaa is A or G
  MOD_RES (20), (21), (22), (23): Xaa is A or G or is absent
PTQVQLEPLPVVYYXXXXXXXXXEQLSNTLEDHLAXK

SEQ ID NO: 54651 - protein, 31 aa, Artificial Sequence
  GFR-binding peptide
APTKLRSVKVAKVDDSSNVIKEVQVNMVVRS

SEQ ID NO: 54652 - protein, 40 aa, Artificial Sequence
  GFR-binding peptide
  MOD_RES (37), (39): Xaa is C or S
  MOD_RES (16), (17), (18), (19), (20): Xaa is A or G
  MOD_RES (21), (22), (23), (24): Xaa is A or G or is absent
RPTQVQLEPLTVLYYXXXXXXXXXEQLSNTLEDHLAXKXE

SEQ ID NO: 54653 - protein, 38 aa, Artificial Sequence
  GFR-binding peptide
  MOD_RES (5), (5): Xaa is C or S
  MOD_RES (19), (20), (21), (22), (23): Xaa is A or G
  MOD_RES (24), (25), (26), (27): Xaa is A or G or is absent
EGLEXVPTEEEPLTMLYYXXXXXXXXXEQLSNFLQHNK

SEQ ID NO: 54654 - protein, 35 aa, Artificial Sequence; identical to SEQ ID NO: 39506
  GFR-binding peptide
  MOD_RES (1), (34): Xaa is C or S
  MOD_RES (15), (16), (17), (18), (19): Xaa is A or G
  MOD_RES (20), (21), (22), (23): Xaa is A or G or is absent

SEQ ID NO: 54655 - protein, 38 aa, Artificial Sequence
  GFR-binding peptide
  MOD_RES (5), (6), (37): Xaa is C or S
SASPXXVPQDLRPVQIRKIVGRTPKVKKATVMVVKSXK

SEQ ID NO: 54656 - protein, 37 aa, Artificial Sequence; identical to SEQ ID NO: 15929
  GFR-binding peptide
  MOD_RES (1), (2), (36): Xaa is C or S
  MOD_RES (16), (17), (18), (19), (20): Xaa is A or G
  MOD_RES (21), (22), (23), (24): Xaa is A or G or is absent

SEQ ID NO: 54657 - protein, 35 aa, Artificial Sequence; identical to SEQ ID NO: 15930
  GFR-binding peptide
  MOD_RES (2), (3): Xaa is C or S
  MOD_RES (17), (18), (19), (20), (21): Xaa is A or G
  MOD_RES (22), (23), (24), (25): Xaa is A or G or is absent

SEQ ID NO: 54658 - protein, 39 aa, Artificial Sequence
  GFR-binding peptide
  MOD_RES (1), (38): Xaa is C or S
XRPTQVQLEPLPVVYYEIVRKKPIFEQLSNTLEDHLAXK

SEQ ID NO: 54659 - protein, 44 aa, Artificial Sequence
  GFR-binding peptide
  MOD_RES (6), (7), (41), (43): Xaa is C or S
  MOD_RES (21), (22), (23), (24), (25): Xaa is A or G
  MOD_RES (26), (27), (28), (29): Xaa is A or G or is absent
YVPKPXXAPTKLRSVKVAKVXXXXXXXXXKEVQVNMVVRSXGXH

SEQ ID NO: 54660 - protein, 38 aa, Artificial Sequence
  GFR-binding peptide
  MOD_RES (5), (6), (37): Xaa is C or S
SASPXXVSQDLRPVQIRKIIGKTPKIKKATVMIVKSXK

SEQ ID NO: 54661 - protein, 34 aa, Artificial Sequence
  GFR-binding peptide
  MOD_RES (33), (33): Xaa is C or S
  MOD_RES (14), (15), (16), (17), (18): Xaa is A or G
  MOD_RES (19), (20), (21), (22): Xaa is A or G or is absent
VPQDLSNITIQIMXXXXXXXXXIGEMSMVVKSXK

SEQ ID NO: 54662 - protein, 35 aa, Artificial Sequence; identical to SEQ ID NO: 19247
  GFR-binding peptide
  MOD_RES (1), (1): Xaa is C or S
  MOD_RES (17), (18), (19), (20), (21): Xaa is A or G
  MOD_RES (22), (23), (24), (25): Xaa is A or G or is absent

SEQ ID NO: 54663 - protein, 38 aa, Artificial Sequence
  GFR-binding peptide
  MOD_RES (35), (37): Xaa is C or S
  MOD_RES (14), (15), (16), (17), (18): Xaa is A or G
  MOD_RES (19), (20), (21), (22): Xaa is A or G or is absent
SRVHHEPLTVLYYXXXXXXXXXEQLSNRLEEHLEXAXA

SEQ ID NO: 54664 - protein, 34 aa, Artificial Sequence; identical to SEQ ID NO: 15936
  GFR-binding peptide
  MOD_RES (2), (3): Xaa is C or S

SEQ ID NO: 54665 - protein, 40 aa, Artificial Sequence; identical to SEQ ID NO: 15937
  GFR-binding peptide
  MOD_RES (4), (5), (38), (40): Xaa is C or S
  MOD_RES (19), (20), (21), (22), (23): Xaa is A or G
  MOD_RES (24), (25), (26), (27): Xaa is A or G or is absent

SEQ ID NO: 54666 - protein, 39 aa, Artificial Sequence
  GFR-binding peptide
  MOD_RES (5), (6), (37), (39): Xaa is C or S
SAAPXXVPQALSNITIQIMVGRKPKVIGEMSMIVRSXKX

SEQ ID NO: 54667 - protein, 37 aa, Artificial Sequence; identical to SEQ ID NO: 15941
  GFR-binding peptide
  MOD_RES (2), (3), (37): Xaa is C or S
  MOD_RES (17), (18), (19), (20), (21): Xaa is A or G
  MOD_RES (22), (23), (24), (25): Xaa is A or G or is absent

SEQ ID NO: 54668 - protein, 39 aa, Artificial Sequence
  GFR-binding peptide
  MOD_RES (5), (6): Xaa is C or S
  MOD_RES (20), (21), (22), (23), (24): Xaa is A or G
  MOD_RES (25), (26), (27), (28): Xaa is A or G or is absent
VPKPXXAPTQLSNITVQIMXXXXXXXXXIGEMSNMVVRA

SEQ ID NO: 54669 - protein, 39 aa, Artificial Sequence
  GFR-binding peptide
  MOD_RES (3), (3): Xaa is C or S
  MOD_RES (19), (20), (21), (22), (23): Xaa is A or G
  MOD_RES (24), (25), (26), (27): Xaa is A or G or is absent
VKXQPSRVHHEPLTVLYYXXXXXXXXXEQLSNRLEEHLE

SEQ ID NO: 54670 - protein, 30 aa, Artificial Sequence; identical to SEQ ID NO: 15944
  GFR-binding peptide

SEQ ID NO: 54671 - protein, 31 aa, Artificial Sequence; identical to SEQ ID NO: 15945
  GFR-binding peptide
  MOD_RES (31), (31): Xaa is C or S

SEQ ID NO: 54672 - protein, 33 aa, Artificial Sequence; identical to SEQ ID NO: 19254
  GFR-binding peptide

SEQ ID NO: 54673 - protein, 34 aa, Artificial Sequence
  GFR-binding peptide
SRVHHEPLPVVYYEYVRKKPKLEQLSNRLEEHLE

SEQ ID NO: 54674 - protein, 35 aa, Artificial Sequence; identical to SEQ ID NO: 15949
  GFR-binding peptide
  MOD_RES (1), (2), (34): Xaa is C or S

SEQ ID NO: 54675 - protein, 39 aa, Artificial Sequence; identical to SEQ ID NO: 19258
  GFR-binding peptide
  MOD_RES (6), (6): Xaa is C or S

SEQ ID NO: 54676 - protein, 38 aa, Artificial Sequence
  GFR-binding peptide
  MOD_RES (5), (6), (38): Xaa is C or S
VPKPXXAPTKLSNITVQIMDDSSNVIIGEMSNMVVRSX

SEQ ID NO: 54677 - protein, 39 aa, Artificial Sequence; identical to SEQ ID NO: 15951
  GFR-binding peptide
  MOD_RES (7), (39): Xaa is C or S

SEQ ID NO: 54678 - protein, 39 aa, Artificial Sequence
  GFR-binding peptide
  MOD_RES (5), (6), (38): Xaa is C or S
IPKAXXVPTELRSVKMAKVDEYDKVVKEVQVEMVVEGXG

SEQ ID NO: 54679 - protein, 36 aa, Artificial Sequence
  GFR-binding peptide
  MOD_RES (5), (6): Xaa is C or S
SAAPXXVPQALRPVQIRKIVGRKPKVKKATVMIVRS

SEQ ID NO: 54680 - protein, 38 aa, Artificial Sequence
  GFR-binding peptide
  MOD_RES (4), (5), (37): Xaa is C or S
PKAXXVPTELSNITMQIMDEYDKVVIGEMSEMVVEGXG

SEQ ID NO: 54681 - protein, 37 aa, Artificial Sequence
  GFR-binding peptide
  MOD_RES (5), (6), (37): Xaa is C or S
SAAPXXVPQALRPVQIRKIVGRKPKVKKATVMIVRSX

SEQ ID NO: 54682 - protein, 32 aa, Artificial Sequence; identical to SEQ ID NO: 15956
  GFR-binding peptide
  MOD_RES (32), (32): Xaa is C or S

SEQ ID NO: 54683 - protein, 40 aa, Artificial Sequence; identical to SEQ ID NO: 19263
  GFR-binding peptide
  MOD_RES (2), (39): Xaa is C or S
  MOD_RES (18), (19), (20), (21), (22): Xaa is A or G
  MOD_RES (23), (24), (25), (26): Xaa is A or G or is absent

SEQ ID NO: 54684 - protein, 36 aa, Artificial Sequence
  GFR-binding peptide
  MOD_RES (2), (3), (35): Xaa is C or S
AXXVPTELSNITMQIMDENEKVVIGEMSDMVVEGXG

SEQ ID NO: 54685 - protein, 38 aa, Artificial Sequence; identical to SEQ ID NO: 15959
  GFR-binding peptide
  MOD_RES (4), (5), (38): Xaa is C or S
  MOD_RES (19), (20), (21), (22), (23): Xaa is A or G
  MOD_RES (24), (25), (26), (27): Xaa is A or G or is absent

SEQ ID NO: 54686 - protein, 35 aa, Artificial Sequence
  GFR-binding peptide
  MOD_RES (3), (3): Xaa is C or S
LEXVPTEEEPLTMLYYRIKPHQGQHEQLSNFLQHN

SEQ ID NO: 54687 - protein, 41 aa, Artificial Sequence; identical to SEQ ID NO: 15961
  GFR-binding peptide
  MOD_RES (6), (40): Xaa is C or S
  MOD_RES (20), (21), (22), (23), (24): Xaa is A or G
  MOD_RES (25), (26), (27), (28): Xaa is A or G or is absent

SEQ ID NO: 54688 - protein, 33 aa, Artificial Sequence; identical to SEQ ID NO: 15962
  GFR-binding peptide
  MOD_RES (33), (33): Xaa is C or S
  MOD_RES (14), (15), (16), (17), (18): Xaa is A or G
  MOD_RES (19), (20), (21), (22): Xaa is A or G or is absent

SEQ ID NO: 54689 - protein, 39 aa, Artificial Sequence
  GFR-binding peptide
  MOD_RES (6), (7), (39): Xaa is C or S
KIPKAXXVPTELRPVQMRKIDENEKVVKKATVDMVVEGX

SEQ ID NO: 54690 - protein, 35 aa, Artificial Sequence; identical to SEQ ID NO: 19269
  GFR-binding peptide
  MOD_RES (15), (16), (17), (18), (19): Xaa is A or G
  MOD_RES (20), (21), (22), (23): Xaa is A or G or is absent

SEQ ID NO: 54691 - protein, 39 aa, Artificial Sequence
  GFR-binding peptide
  MOD_RES (2), (36), (38): Xaa is C or S
  MOD_RES (16), (17), (18), (19), (20): Xaa is A or G
  MOD_RES (21), (22), (23), (24): Xaa is A or G or is absent
TXAPTKLSNITVQIMXXXXXXXXXIGEMSNMVVRSXGXH

SEQ ID NO: 54692 - protein, 35 aa, Artificial Sequence
  GFR-binding peptide
  MOD_RES (32), (34): Xaa is C or S
VPTELRSVKMAKVDEYDKVVKEVQVEMVVEGXGXR

SEQ ID NO: 54693 - protein, 36 aa, Artificial Sequence; identical to SEQ ID NO: 15964
  GFR-binding peptide
  MOD_RES (2), (3): Xaa is C or S
  MOD_RES (17), (18), (19), (20), (21): Xaa is A or G
  MOD_RES (22), (23), (24), (25): Xaa is A or G or is absent

SEQ ID NO: 54694 - protein, 35 aa, Artificial Sequence
  GFR-binding peptide
  MOD_RES (1), (1): Xaa is C or S
  MOD_RES (17), (18), (19), (20), (21): Xaa is A or G
  MOD_RES (22), (23), (24), (25): Xaa is A or G or is absent
XRPTQVQLEPLPVVYYXXXXXXXXXEQLSNTLEDH

SEQ ID NO: 54695 - protein, 38 aa, Artificial Sequence
  GFR-binding peptide
  MOD_RES (6), (7): Xaa is C or S
YVPKPXXAPTKLSNITVQIMDDSSNVIIGEMSNMVVRS

SEQ ID NO: 54696 - protein, 38 aa, Artificial Sequence
  GFR-binding peptide
  MOD_RES (4), (36), (38): Xaa is C or S
KPTXAPTKLRPVQVRKIDDSSNVIKKATVNMVVRSXGX

SEQ ID NO: 54697 - protein, 33 aa, Artificial Sequence
  GFR-binding peptide
  MOD_RES (32), (32): Xaa is C or S
VPTELRSVKMAKVDEYDKVVKEVQVEMVVEGXG

SEQ ID NO: 54698 - protein, 37 aa, Artificial Sequence; identical to SEQ ID NO: 15965
  GFR-binding peptide
  MOD_RES (2), (3), (35), (37): Xaa is C or S

SEQ ID NO: 54699 - protein, 34 aa, Artificial Sequence; identical to SEQ ID NO: 15966
  GFR-binding peptide
  MOD_RES (1), (34): Xaa is C or S
  MOD_RES (15), (16), (17), (18), (19): Xaa is A or G
  MOD_RES (20), (21), (22), (23): Xaa is A or G or is absent

SEQ ID NO: 54700 - protein, 34 aa, Artificial Sequence; identical to SEQ ID NO: 15967
  GFR-binding peptide
  MOD_RES (1), (2): Xaa is C or S
  MOD_RES (16), (17), (18), (19), (20): Xaa is A or G
  MOD_RES (21), (22), (23), (24): Xaa is A or G or is absent

SEQ ID NO: 54701 - protein, 41 aa, Artificial Sequence
  GFR-binding peptide
  MOD_RES (5), (5): Xaa is C or S
  MOD_RES (21), (22), (23), (24), (25): Xaa is A or G
  MOD_RES (26), (27), (28), (29): Xaa is A or G or is absent
SSVKXQPSRVHHEPLPVVYYXXXXXXXXXEQLSNRLEEHLE

SEQ ID NO: 54702 - protein, 38 aa, Artificial Sequence
  GFR-binding peptide
  MOD_RES (4), (38): Xaa is C or S
  MOD_RES (18), (19), (20), (21), (22): Xaa is A or G
  MOD_RES (23), (24), (25), (26): Xaa is A or G or is absent
KPTXAPTKLRPVQVRKIXXXXXXXXXKKATVNMVVRSX

SEQ ID NO: 54703 - protein, 37 aa, Artificial Sequence; identical to SEQ ID NO: 15974
  GFR-binding peptide
  MOD_RES (3), (4): Xaa is C or S
  MOD_RES (18), (19), (20), (21), (22): Xaa is A or G
  MOD_RES (23), (24), (25), (26): Xaa is A or G or is absent

SEQ ID NO: 54704 - protein, 37 aa, Artificial Sequence
  GFR-binding peptide
  MOD_RES (1), (2), (34), (36): Xaa is C or S
XXAPTKLSNITVQIMDDSSNVIIGEMSNMVVRSXGXH

SEQ ID NO: 54705 - protein, 35 aa, Artificial Sequence
  GFR-binding peptide
  MOD_RES (1), (33), (35): Xaa is C or S
XAPTKLRPVQVRKIDDSSNVIKKATVNMVVRSXGX

SEQ ID NO: 54706 - protein, 44 aa, Artificial Sequence
  GFR-binding peptide
  MOD_RES (6), (7), (41), (43): Xaa is C or S
  MOD_RES (21), (22), (23), (24), (25): Xaa is A or G
  MOD_RES (26), (27), (28), (29): Xaa is A or G or is absent
YVPKPXXAPTKLSNITVQIMXXXXXXXXXIGEMSNMVVRSXGXH

SEQ ID NO: 54707 - protein, 36 aa, Artificial Sequence; identical to SEQ ID NO: 15980
  GFR-binding peptide
  MOD_RES (2), (3), (36): Xaa is C or S
  MOD_RES (17), (18), (19), (20), (21): Xaa is A or G
  MOD_RES (22), (23), (24), (25): Xaa is A or G or is absent

SEQ ID NO: 54708 - protein, 41 aa, Artificial Sequence; identical to SEQ ID NO: 15981
  GFR-binding peptide
  MOD_RES (5), (6), (40): Xaa is C or S
  MOD_RES (20), (21), (22), (23), (24): Xaa is A or G
  MOD_RES (25), (26), (27), (28): Xaa is A or G or is absent

SEQ ID NO: 54709 - protein, 33 aa, Artificial Sequence; identical to SEQ ID NO: 19276
  GFR-binding peptide
  MOD_RES (1), (1): Xaa is C or S

SEQ ID NO: 54710 - protein, 42 aa, Artificial Sequence
  GFR-binding peptide
  MOD_RES (4), (5), (39), (41): Xaa is C or S
  MOD_RES (19), (20), (21), (22), (23): Xaa is A or G
  MOD_RES (24), (25), (26), (27): Xaa is A or G or is absent
PKAXXVPTELRSVKMAKVXXXXXXXXXKEVQVEMVVEGXGXR

SEQ ID NO: 54711 - protein, 37 aa, Artificial Sequence
  GFR-binding peptide
  MOD_RES (4), (5), (36): Xaa is C or S
ASPXXVSQDLRSVKIAKVIGKTPKIKEVQVMIVKSXK

SEQ ID NO: 54712 - protein, 36 aa, Artificial Sequence
  GFR-binding peptide
  MOD_RES (1), (2), (35): Xaa is C or S
  MOD_RES (16), (17), (18), (19), (20): Xaa is A or G
  MOD_RES (21), (22), (23), (24): Xaa is A or G or is absent
XXVPQDLSNITIQIMXXXXXXXXXIGEMSMVVKSXK

SEQ ID NO: 54713 - protein, 38 aa, Artificial Sequence; identical to SEQ ID NO: 15984
  GFR-binding peptide
  MOD_RES (3), (4), (36), (38): Xaa is C or S

SEQ ID NO: 54714 - protein, 36 aa, Artificial Sequence
  GFR-binding peptide
  MOD_RES (33), (35): Xaa is C or S
  MOD_RES (14), (15), (16), (17), (18): Xaa is A or G
  MOD_RES (19), (20), (21), (22): Xaa is A or G or is absent
VPQDLRSVKIAKVXXXXXXXXXKEVQVMVVKSXKXS

SEQ ID NO: 54715 - protein, 38 aa, Artificial Sequence
  GFR-binding peptide
  MOD_RES (7), (7): Xaa is C or S
HVTKPTXAPTKLSNITVQIMDDSSNVIIGEMSNMVVRS

SEQ ID NO: 54716 - protein, 32 aa, Artificial Sequence; identical to SEQ ID NO: 15988
  GFR-binding peptide
  MOD_RES (1), (1): Xaa is C or S

SEQ ID NO: 54717 - protein, 42 aa, Artificial Sequence
  GFR-binding peptide
  MOD_RES (2), (39), (41): Xaa is C or S
QXRPTQVQLEPLTVLYYEIVRKKPIFEQLSNTLEDHLAXKXE

SEQ ID NO: 54718 - protein, 41 aa, Artificial Sequence; identical to SEQ ID NO: 15990
  GFR-binding peptide
  MOD_RES (3), (4), (38), (40): Xaa is C or S
  MOD_RES (18), (19), (20), (21), (22): Xaa is A or G
  MOD_RES (23), (24), (25), (26): Xaa is A or G or is absent

SEQ ID NO: 54719 - protein, 41 aa, Artificial Sequence; identical to SEQ ID NO: 19281
  GFR-binding peptide
  MOD_RES (7), (41): Xaa is C or S

SEQ ID NO: 54720 - protein, 36 aa, Artificial Sequence; identical to SEQ ID NO: 15991
  GFR-binding peptide
  MOD_RES (2), (3), (36): Xaa is C or S
  MOD_RES (17), (18), (19), (20), (21): Xaa is A or G
  MOD_RES (22), (23), (24), (25): Xaa is A or G or is absent

SEQ ID NO: 54721 - protein, 41 aa, Artificial Sequence; identical to SEQ ID NO: 19282
  GFR-binding peptide
  MOD_RES (7), (41): Xaa is C or S
  MOD_RES (21), (22), (23), (24), (25): Xaa is A or G
  MOD_RES (26), (27), (28), (29): Xaa is A or G or is absent

SEQ ID NO: 54722 - protein, 39 aa, Artificial Sequence
  GFR-binding peptide
  MOD_RES (5), (6), (39): Xaa is C or S
  MOD_RES (20), (21), (22), (23), (24): Xaa is A or G
  MOD_RES (25), (26), (27), (28): Xaa is A or G or is absent
SASPXXVPQDLSNITIQIMXXXXXXXXXIGEMSMVVKSX

SEQ ID NO: 54723 - protein, 34 aa, Artificial Sequence; identical to SEQ ID NO: 15993
  GFR-binding peptide
  MOD_RES (34), (34): Xaa is C or S
  MOD_RES (14), (15), (16), (17), (18): Xaa is A or G
  MOD_RES (19), (20), (21), (22): Xaa is A or G or is absent

SEQ ID NO: 54724 - protein, 35 aa, Artificial Sequence
  GFR-binding peptide
  MOD_RES (2), (3), (34): Xaa is C or S
PXXVPQALSNITIQIMVGRKPKVIGEMSMIVRSXK

SEQ ID NO: 54725 - protein, 40 aa, Artificial Sequence
  GFR-binding peptide
  MOD_RES (5), (6), (39): Xaa is C or S
  MOD_RES (20), (21), (22), (23), (24): Xaa is A or G
  MOD_RES (25), (26), (27), (28): Xaa is A or G or is absent
SASPXXVSQDLRSVKIAKVXXXXXXXXXKEVQVMIVKSXK

SEQ ID NO: 54726 - protein, 42 aa, Artificial Sequence
  GFR-binding peptide
  MOD_RES (6), (40), (42): Xaa is C or S
DEGLEXVPTEEEPLPMVYYRIKPHQGQHEQLSNFLQHNKXEX

SEQ ID NO: 54727 - protein, 45 aa, Artificial Sequence
  GFR-binding peptide
  MOD_RES (5), (42), (44): Xaa is C or S
RNVQXRPTQVQLEPLTVLYYEIVRKKPIFEQLSNTLEDHLAXKXE

SEQ ID NO: 54728 - protein, 33 aa, Artificial Sequence; identical to SEQ ID NO: 15996
  GFR-binding peptide
  MOD_RES (2), (3): Xaa is C or S

SEQ ID NO: 54729 - protein, 37 aa, Artificial Sequence; identical to SEQ ID NO: 15998
  GFR-binding peptide
  MOD_RES (2), (3), (37): Xaa is C or S
  MOD_RES (17), (18), (19), (20), (21): Xaa is A or G
  MOD_RES (22), (23), (24), (25): Xaa is A or G or is absent

SEQ ID NO: 54730 - protein, 31 aa, Artificial Sequence
  GFR-binding peptide
  MOD_RES (1), (1): Xaa is C or S
XAPTQLRPVQVRKIDDSSNVIKKATVNMVVR

SEQ ID NO: 54731 - protein, 32 aa, Artificial Sequence
  GFR-binding peptide
  MOD_RES (1), (2): Xaa is C or S
XXVPQALSNITIQIMVGRKPKVIGEMSMIVRS

SEQ ID NO: 54732 - protein, 37 aa, Artificial Sequence; identical to SEQ ID NO: 16000
  GFR-binding peptide
  MOD_RES (2), (3), (35), (37): Xaa is C or S

SEQ ID NO: 54733 - protein, 39 aa, Artificial Sequence; identical to SEQ ID NO: 19289
  GFR-binding peptide
  MOD_RES (3), (37), (39): Xaa is C or S
  MOD_RES (17), (18), (19), (20), (21): Xaa is A or G
  MOD_RES (22), (23), (24), (25): Xaa is A or G or is absent

SEQ ID NO: 54734 - protein, 40 aa, Artificial Sequence
  GFR-binding peptide
  MOD_RES (3), (40): Xaa is C or S
  MOD_RES (19), (20), (21), (22), (23): Xaa is A or G
  MOD_RES (24), (25), (26), (27): Xaa is A or G or is absent
VKXQPSRVHHEPLTVLYYXXXXXXXXXEQLSNRLEEHLEX

SEQ ID NO: 54735 - protein, 35 aa, Artificial Sequence
  GFR-binding peptide
  MOD_RES (32), (34): Xaa is C or S
APTQLRPVQVRKIDDSSNVIKKATVNMVVRAXGXH

SEQ ID NO: 54736 - protein, 38 aa, Artificial Sequence
  GFR-binding peptide
  MOD_RES (4), (5): Xaa is C or S
  MOD_RES (19), (20), (21), (22), (23): Xaa is A or G
  MOD_RES (24), (25), (26), (27): Xaa is A or G or is absent
PKPXXAPTQLRPVQVRKIXXXXXXXXXKKATVNMVVRA

SEQ ID NO: 54737 - protein, 37 aa, Artificial Sequence; identical to SEQ ID NO: 19291
  GFR-binding peptide
  MOD_RES (2), (2): Xaa is C or S
  MOD_RES (18), (19), (20), (21), (22): Xaa is A or G
  MOD_RES (23), (24), (25), (26): Xaa is A or G or is absent

SEQ ID NO: 54738 - protein, 37 aa, Artificial Sequence; identical to SEQ ID NO: 16002
  GFR-binding peptide
  MOD_RES (2), (3), (36): Xaa is C or S
  MOD_RES (17), (18), (19), (20), (21): Xaa is A or G
  MOD_RES (22), (23), (24), (25): Xaa is A or G or is absent

SEQ ID NO: 54739 - protein, 35 aa, Artificial Sequence
  GFR-binding peptide
  MOD_RES (4), (5): Xaa is C or S
ASPXXVPQDLRSVKIAKVVGRTPKVKEVQVMVVKS

SEQ ID NO: 54740 - protein, 35 aa, Artificial Sequence
  GFR-binding peptide
PSRVHHEPLPVVYYEYVRKKPKLEQLSNRLEEHLE

SEQ ID NO: 54741 - protein, 33 aa, Artificial Sequence
  GFR-binding peptide
  MOD_RES (14), (15), (16), (17), (18): Xaa is A or G
  MOD_RES (19), (20), (21), (22): Xaa is A or G or is absent
VPTELRSVKMAKVXXXXXXXXXKEVQVDMVVEG

SEQ ID NO: 54742 - protein, 38 aa, Artificial Sequence
  GFR-binding peptide
  MOD_RES (4), (5): Xaa is C or S
  MOD_RES (19), (20), (21), (22), (23): Xaa is A or G
  MOD_RES (24), (25), (26), (27): Xaa is A or G or is absent
PKAXXVPTELSNITMQIMXXXXXXXXXIGEMSDMVVEG

SEQ ID NO: 54743 - protein, 38 aa, Artificial Sequence
  GFR-binding peptide
  MOD_RES (5), (6): Xaa is C or S
  MOD_RES (20), (21), (22), (23), (24): Xaa is A or G
  MOD_RES (25), (26), (27), (28): Xaa is A or G or is absent
SASPXXVPQDLRSVKIAKVXXXXXXXXXKEVQVMVVKS

SEQ ID NO: 54744 - protein, 38 aa, Artificial Sequence; identical to SEQ ID NO: 16004
  GFR-binding peptide
  MOD_RES (2), (3), (35), (37): Xaa is C or S

SEQ ID NO: 54745 - protein, 44 aa, Artificial Sequence
  GFR-binding peptide
  MOD_RES (6), (7), (41), (43): Xaa is C or S
  MOD_RES (21), (22), (23), (24), (25): Xaa is A or G
  MOD_RES (26), (27), (28), (29): Xaa is A or G or is absent
TVPKPXXAPTQLRSVKVAKVXXXXXXXXXKEVQVNMVVRAXGXH

SEQ ID NO: 54746 - protein, 41 aa, Artificial Sequence
  GFR-binding peptide
  MOD_RES (6), (7), (38), (40): Xaa is C or S
ASASPXXVPQDLRPVQIRKIVGRTPKVKKATVMVVKSXKXS

SEQ ID NO: 54747 - protein, 35 aa, Artificial Sequence; identical to SEQ ID NO: 16005
  GFR-binding peptide
  MOD_RES (34), (34): Xaa is C or S
  MOD_RES (14), (15), (16), (17), (18): Xaa is A or G
  MOD_RES (19), (20), (21), (22): Xaa is A or G or is absent

SEQ ID NO: 54748 - protein, 34 aa, Artificial Sequence; identical to SEQ ID NO: 19300
  GFR-binding peptide
  MOD_RES (16), (17), (18), (19), (20): Xaa is A or G
  MOD_RES (21), (22), (23), (24): Xaa is A or G or is absent

SEQ ID NO: 54749 - protein, 40 aa, Artificial Sequence; identical to SEQ ID NO: 16009
  GFR-binding peptide
  MOD_RES (2), (3), (37), (39): Xaa is C or S
  MOD_RES (17), (18), (19), (20), (21): Xaa is A or G
  MOD_RES (22), (23), (24), (25): Xaa is A or G or is absent

SEQ ID NO: 54750 - protein, 38 aa, Artificial Sequence
  GFR-binding peptide
  MOD_RES (6), (7): Xaa is C or S
SIPKAXXVPTELSNITMQIMDEYDKVVIGEMSEMVVEG

SEQ ID NO: 54751 - protein, 40 aa, Artificial Sequence
  GFR-binding peptide
  MOD_RES (5), (6), (40): Xaa is C or S
  MOD_RES (20), (21), (22), (23), (24): Xaa is A or G
  MOD_RES (25), (26), (27), (28): Xaa is A or G or is absent
VPKPXXAPTQLRPVQVRKIXXXXXXXXXKKATVNMVVRAX

SEQ ID NO: 54752 - protein, 35 aa, Artificial Sequence
  GFR-binding peptide
  MOD_RES (2), (3), (35): Xaa is C or S
AXXVPTELRSVKMAKVDEYDKVVKEVQVEMVVEGX

SEQ ID NO: 54753 - protein, 41 aa, Artificial Sequence
  GFR-binding peptide
  MOD_RES (7), (39), (41): Xaa is C or S
HVTKPTXAPTKLRSVKVAKVDDSSNVIKEVQVNMVVRSXGX

SEQ ID NO: 54754 - protein, 38 aa, Artificial Sequence; identical to SEQ ID NO: 16013
  GFR-binding peptide
  MOD_RES (5), (37): Xaa is C or S

SEQ ID NO: 54755 - protein, 31 aa, Artificial Sequence
  GFR-binding peptide
  MOD_RES (1), (1): Xaa is C or S
XVSQDLSNITIQIMIGKTPKIIGEMSMIVKS

SEQ ID NO: 54756 - protein, 34 aa, Artificial Sequence
  GFR-binding peptide
  MOD_RES (1), (1): Xaa is C or S
  MOD_RES (15), (16), (17), (18), (19): Xaa is A or G
  MOD_RES (20), (21), (22), (23): Xaa is A or G or is absent
XAPTQLRSVKVAKVXXXXXXXXXKEVQVNMVVRA

SEQ ID NO: 54757 - protein, 39 aa, Artificial Sequence
  GFR-binding peptide
  MOD_RES (6), (7), (38): Xaa is C or S
ASAAPXXVPQALRSVKIAKVVGRKPKVKEVQVMIVRSXK

SEQ ID NO: 54758 - protein, 36 aa, Artificial Sequence
  GFR-binding peptide
  MOD_RES (1), (2), (33), (35): Xaa is C or S
XXVSQDLRSVKIAKVIGKTPKIKEVQVMIVKSXKXS

SEQ ID NO: 54759 - protein, 40 aa, Artificial Sequence
  GFR-binding peptide
  MOD_RES (5), (6), (38), (40): Xaa is C or S
VPKPXXAPTKLRSVKVAKVDDSSNVIKEVQVNMVVRSXGX

SEQ ID NO: 54760 - protein, 34 aa, Artificial Sequence
  GFR-binding peptide
  MOD_RES (1), (33): Xaa is C or S
XAPTKLRSVKVAKVDDSSNVIKEVQVNMVVRSXG

SEQ ID NO: 54761 - protein, 37 aa, Artificial Sequence
  GFR-binding peptide
  MOD_RES (2), (3), (34), (36): Xaa is C or S
PXXVPQALRSVKIAKVVGRKPKVKEVQVMIVRSXKXS

SEQ ID NO: 54762 - protein, 40 aa, Artificial Sequence
  GFR-binding peptide
  MOD_RES (4), (5), (38), (40): Xaa is C or S
  MOD_RES (19), (20), (21), (22), (23): Xaa is A or G
  MOD_RES (24), (25), (26), (27): Xaa is A or G or is absent
ASPXXVPQDLRSVKIAKVXXXXXXXXXKEVQVMVVKSXKX

SEQ ID NO: 54763 - protein, 38 aa, Artificial Sequence; identical to SEQ ID NO: 16019
  GFR-binding peptide
  MOD_RES (4), (5), (37): Xaa is C or S

SEQ ID NO: 54764 - protein, 35 aa, Artificial Sequence; identical to SEQ ID NO: 39667
  GFR-binding peptide
  MOD_RES (1), (2), (35): Xaa is C or S
  MOD_RES (16), (17), (18), (19), (20): Xaa is A or G
  MOD_RES (21), (22), (23), (24): Xaa is A or G or is absent

SEQ ID NO: 54765 - protein, 36 aa, Artificial Sequence
  GFR-binding peptide
  MOD_RES (5), (6): Xaa is C or S
SASPXXVSQDLSNITIQIMIGKTPKIIGEMSMIVKS

SEQ ID NO: 54766 - protein, 38 aa, Artificial Sequence; identical to SEQ ID NO: 16020
  GFR-binding peptide
  MOD_RES (3), (37): Xaa is C or S
  MOD_RES (17), (18), (19), (20), (21): Xaa is A or G
  MOD_RES (22), (23), (24), (25): Xaa is A or G or is absent

SEQ ID NO: 54767 - protein, 35 aa, Artificial Sequence; identical to SEQ ID NO: 16021
  GFR-binding peptide
  MOD_RES (3), (35): Xaa is C or S

SEQ ID NO: 54768 - protein, 37 aa, Artificial Sequence
  GFR-binding peptide
  MOD_RES (6), (7): Xaa is C or S
SIPKAXXVPTELRSVKMAKVDEYDKVVKEVQVEMVVE

SEQ ID NO: 54769 - protein, 33 aa, Artificial Sequence
  GFR-binding peptide
  MOD_RES (14), (15), (16), (17), (18): Xaa is A or G
  MOD_RES (19), (20), (21), (22): Xaa is A or G or is absent
APTQLRPVQVRKIXXXXXXXXXKKATVNMVVRA

SEQ ID NO: 54770 - protein, 35 aa, Artificial Sequence
  GFR-binding peptide
  MOD_RES (2), (3): Xaa is C or S
  MOD_RES (17), (18), (19), (20), (21): Xaa is A or G
  MOD_RES (22), (23), (24), (25): Xaa is A or G or is absent
PXXVSQDLRSVKIAKVXXXXXXXXXKEVQVMIVKS

SEQ ID NO: 54771 - protein, 32 aa, Artificial Sequence; identical to SEQ ID NO: 16024
  GFR-binding peptide
  MOD_RES (14), (15), (16), (17), (18): Xaa is A or G
  MOD_RES (19), (20), (21), (22): Xaa is A or G or is absent

SEQ ID NO: 54772 - protein, 35 aa, Artificial Sequence
  GFR-binding peptide
  MOD_RES (1), (33), (35): Xaa is C or S
XVPTELRSVKMAKVDEYDKVVKEVQVEMVVEGXGX

SEQ ID NO: 54773 - protein, 38 aa, Artificial Sequence; identical to SEQ ID NO: 16025
  GFR-binding peptide
  MOD_RES (7), (7): Xaa is C or S

SEQ ID NO: 54774 - protein, 34 aa, Artificial Sequence
  GFR-binding peptide
  MOD_RES (2), (3): Xaa is C or S
AXXVPTELSNITMQIMDENEKVVIGEMSDMVVEG

SEQ ID NO: 54775 - protein, 38 aa, Artificial Sequence
  GFR-binding peptide
  MOD_RES (5), (6), (38): Xaa is C or S
IPKAXXVPTELSNITMQIMDENEKVVIGEMSDMVVEGX

SEQ ID NO: 54776 - protein, 35 aa, Artificial Sequence; identical to SEQ ID NO: 16027
  GFR-binding peptide
  MOD_RES (3), (4): Xaa is C or S

SEQ ID NO: 54777 - protein, 37 aa, Artificial Sequence
  GFR-binding peptide
  MOD_RES (35), (37): Xaa is C or S
TQVQLEPLPVVYYEIVRKKPIFEQLSNTLEDHLAXKX

SEQ ID NO: 54778 - protein, 36 aa, Artificial Sequence
  GFR-binding peptide
  MOD_RES (1), (35): Xaa is C or S
XVPTEEEPLTMLYYRIKPHQGQHEQLSNFLQHNKXE

SEQ ID NO: 54779 - protein, 32 aa, Artificial Sequence
  GFR-binding peptide
  MOD_RES (1), (1): Xaa is C or S
XVPTELRSVKMAKVDEYDKVVKEVQVEMVVEG

SEQ ID NO: 54780 - protein, 33 aa, Artificial Sequence; identical to SEQ ID NO: 19323
  GFR-binding peptide
  MOD_RES (1), (1): Xaa is C or S
  MOD_RES (15), (16), (17), (18), (19): Xaa is A or G
  MOD_RES (20), (21), (22), (23): Xaa is A or G or is absent

SEQ ID NO: 54781 - protein, 35 aa, Artificial Sequence; identical to SEQ ID NO: 16030
  GFR-binding peptide
  MOD_RES (4), (5): Xaa is C or S

SEQ ID NO: 54782 - protein, 39 aa, Artificial Sequence
  GFR-binding peptide
  MOD_RES (4), (5), (39): Xaa is C or S
  MOD_RES (19), (20), (21), (22), (23): Xaa is A or G
  MOD_RES (24), (25), (26), (27): Xaa is A or G or is absent
PKAXXVPTELRSVKMAKVXXXXXXXXXKEVQVDMVVEGX

SEQ ID NO: 54783 - protein, 36 aa, Artificial Sequence
  GFR-binding peptide
  MOD_RES (2), (3), (34), (36): Xaa is C or S
PXXVPQDLRSVKIAKVVGRTPKVKEVQVMVVKSXKX

SEQ ID NO: 54784 - protein, 34 aa, Artificial Sequence
  GFR-binding peptide
  MOD_RES (32), (34): Xaa is C or S
VPTELRPVQMRKIDEYDKVVKKATVEMVVEGXGX

SEQ ID NO: 54785 - protein, 35 aa, Artificial Sequence; identical to SEQ ID NO: 16032
  GFR-binding peptide
  MOD_RES (2), (3), (34): Xaa is C or S

SEQ ID NO: 54786 - protein, 44 aa, Artificial Sequence; identical to SEQ ID NO: 16035
  GFR-binding peptide
  MOD_RES (7), (41), (43): Xaa is C or S
  MOD_RES (21), (22), (23), (24), (25): Xaa is A or G
  MOD_RES (26), (27), (28), (29): Xaa is A or G or is absent

SEQ ID NO: 54787 - protein, 38 aa, Artificial Sequence
  GFR-binding peptide
  MOD_RES (2), (3), (37): Xaa is C or S
  MOD_RES (17), (18), (19), (20), (21): Xaa is A or G
  MOD_RES (22), (23), (24), (25): Xaa is A or G or is absent
PXXAPTKLSNITVQIMXXXXXXXXXIGEMSNMVVRSXG

SEQ ID NO: 54788 - protein, 39 aa, Artificial Sequence; identical to SEQ ID NO: 19324
  GFR-binding peptide
  MOD_RES (5), (5): Xaa is C or S
  MOD_RES (21), (22), (23), (24), (25): Xaa is A or G
  MOD_RES (26), (27), (28), (29): Xaa is A or G or is absent

SEQ ID NO: 54789 - protein, 33 aa, Artificial Sequence
  GFR-binding peptide
  MOD_RES (1), (33): Xaa is C or S
XAPTKLRSVKVAKVDDSSNVIKEVQVNMVVRSX

SEQ ID NO: 54790 - protein, 35 aa, Artificial Sequence
  GFR-binding peptide
  MOD_RES (33), (35): Xaa is C or S
  MOD_RES (14), (15), (16), (17), (18): Xaa is A or G
  MOD_RES (19), (20), (21), (22): Xaa is A or G or is absent
VPQDLRSVKIAKVXXXXXXXXXKEVQVMVVKSXKX

SEQ ID NO: 54791 - protein, 34 aa, Artificial Sequence
  GFR-binding peptide
  MOD_RES (1), (33): Xaa is C or S
XAPTQLRPVQVRKIDDSSNVIKKATVNMVVRAXG

SEQ ID NO: 54792 - protein, 38 aa, Artificial Sequence; identical to SEQ ID NO: 19330
  GFR-binding peptide
  MOD_RES (36), (38): Xaa is C or S

SEQ ID NO: 54793 - protein, 35 aa, Artificial Sequence
  GFR-binding peptide
  MOD_RES (2), (3), (35): Xaa is C or S
AXXVPTELRSVKMAKVDENEKVVKEVQVDMVVEGX

SEQ ID NO: 54794 - protein, 35 aa, Artificial Sequence
  GFR-binding peptide
  MOD_RES (3), (4), (35): Xaa is C or S
SPXXVPQDLRPVQIRKIVGRTPKVKKATVMVVKSX

SEQ ID NO: 54795 - protein, 37 aa, Artificial Sequence
  GFR-binding peptide
  MOD_RES (2), (36): Xaa is C or S
  MOD_RES (16), (17), (18), (19), (20): Xaa is A or G
  MOD_RES (21), (22), (23), (24): Xaa is A or G or is absent
TXAPTKLRSVKVAKVXXXXXXXXXKEVQVNMVVRSXG

SEQ ID NO: 54796 - protein, 40 aa, Artificial Sequence
  GFR-binding peptide
  MOD_RES (4), (5), (37), (39): Xaa is C or S
PKPXXAPTKLRPVQVRKIDDSSNVIKKATVNMVVRSXGXH

SEQ ID NO: 54797 - protein, 35 aa, Artificial Sequence; identical to SEQ ID NO: 16043
  GFR-binding peptide
  MOD_RES (2), (3), (34): Xaa is C or S

SEQ ID NO: 54798 - protein, 36 aa, Artificial Sequence; identical to SEQ ID NO: 16045
  GFR-binding peptide
  MOD_RES (6), (6): Xaa is C or S

SEQ ID NO: 54799 - protein, 39 aa, Artificial Sequence
  GFR-binding peptide
  MOD_RES (2), (3), (36), (38): Xaa is C or S
  MOD_RES (17), (18), (19), (20), (21): Xaa is A or G
  MOD_RES (22), (23), (24), (25): Xaa is A or G or is absent
PXXVSQDLRPVQIRKIXXXXXXXXXKKATVMIVKSXKXS

SEQ ID NO: 54800 - protein, 37 aa, Artificial Sequence; identical to SEQ ID NO: 19332
  GFR-binding peptide
  MOD_RES (2), (2): Xaa is C or S

SEQ ID NO: 54801 - protein, 37 aa, Artificial Sequence; identical to SEQ ID NO: 16049
  GFR-binding peptide
  MOD_RES (6), (7): Xaa is C or S

SEQ ID NO: 54802 - protein, 36 aa, Artificial Sequence
  GFR-binding peptide
  MOD_RES (36), (36): Xaa is C or S
PSRVHHEPLTVLYYEYVRKKPKLEQLSNRLEEHLEX

SEQ ID NO: 54803 - protein, 42 aa, Artificial Sequence; identical to SEQ ID NO: 16050
  GFR-binding peptide
  MOD_RES (6), (7), (41): Xaa is C or S
  MOD_RES (21), (22), (23), (24), (25): Xaa is A or G
  MOD_RES (26), (27), (28), (29): Xaa is A or G or is absent

SEQ ID NO: 54804 - protein, 35 aa, Artificial Sequence; identical to SEQ ID NO: 16052
  GFR-binding peptide
  MOD_RES (2), (3): Xaa is C or S
  MOD_RES (17), (18), (19), (20), (21): Xaa is A or G
  MOD_RES (22), (23), (24), (25): Xaa is A or G or is absent

SEQ ID NO: 54805 - protein, 35 aa, Artificial Sequence; identical to SEQ ID NO: 19338
  GFR-binding peptide
  MOD_RES (34), (34): Xaa is C or S
  MOD_RES (14), (15), (16), (17), (18): Xaa is A or G
  MOD_RES (19), (20), (21), (22): Xaa is A or G or is absent

SEQ ID NO: 54806 - protein, 39 aa, Artificial Sequence
  GFR-binding peptide
  MOD_RES (5), (6), (39): Xaa is C or S
  MOD_RES (20), (21), (22), (23), (24): Xaa is A or G
  MOD_RES (25), (26), (27), (28): Xaa is A or G or is absent
SAAPXXVPQALSNITIQIMXXXXXXXXXIGEMSMIVRSX

SEQ ID NO: 54807 - protein, 39 aa, Artificial Sequence; identical to SEQ ID NO: 16055
  GFR-binding peptide
  MOD_RES (3), (4), (38): Xaa is C or S
  MOD_RES (18), (19), (20), (21), (22): Xaa is A or G
  MOD_RES (23), (24), (25), (26): Xaa is A or G or is absent

SEQ ID NO: 54808 - protein, 41 aa, Artificial Sequence; identical to SEQ ID NO: 16057
  GFR-binding peptide
  MOD_RES (5), (6), (39), (41): Xaa is C or S
  MOD_RES (20), (21), (22), (23), (24): Xaa is A or G
  MOD_RES (25), (26), (27), (28): Xaa is A or G or is absent

SEQ ID NO: 54809 - protein, 35 aa, Artificial Sequence; identical to SEQ ID NO: 16058
  GFR-binding peptide
  MOD_RES (3), (3): Xaa is C or S
  MOD_RES (17), (18), (19), (20), (21): Xaa is A or G
  MOD_RES (22), (23), (24), (25): Xaa is A or G or is absent

SEQ ID NO: 54810 - protein, 40 aa, Artificial Sequence; identical to SEQ ID NO: 16059
  GFR-binding peptide
  MOD_RES (4), (5), (39): Xaa is C or S
  MOD_RES (19), (20), (21), (22), (23): Xaa is A or G
  MOD_RES (24), (25), (26), (27): Xaa is A or G or is absent

SEQ ID NO: 54811 - protein, 36 aa, Artificial Sequence
  GFR-binding peptide
  MOD_RES (5), (6): Xaa is C or S
IPKAXXVPTELRSVKMAKVDENEKVVKEVQVDMVVE

SEQ ID NO: 54812 - protein, 42 aa, Artificial Sequence
  GFR-binding peptide
  MOD_RES (7), (41): Xaa is C or S
NDEGLEXVPTEEEPLPMVYYRIKPHQGQHEQLSNFLQHNKXE

SEQ ID NO: 54813 - protein, 39 aa, Artificial Sequence
  GFR-binding peptide
  MOD_RES (2), (39): Xaa is C or S
KXQPSRVHHEPLTVLYYEYVRKKPKLEQLSNRLEEHLEX

SEQ ID NO: 54814 - protein, 38 aa, Artificial Sequence
  GFR-binding peptide
  MOD_RES (2), (3), (36), (38): Xaa is C or S
  MOD_RES (17), (18), (19), (20), (21): Xaa is A or G
  MOD_RES (22), (23), (24), (25): Xaa is A or G or is absent
PXXVPQALRPVQIRKIXXXXXXXXXKKATVMIVRSXKX

SEQ ID NO: 54815 - protein, 35 aa, Artificial Sequence
  GFR-binding peptide
  MOD_RES (1), (34): Xaa is C or S
  MOD_RES (15), (16), (17), (18), (19): Xaa is A or G
  MOD_RES (20), (21), (22), (23): Xaa is A or G or is absent
XVSQDLSNITIQIMXXXXXXXXXIGEMSMIVKSXK

SEQ ID NO: 54816 - protein, 33 aa, Artificial Sequence; identical to SEQ ID NO: 16062
  GFR-binding peptide
  MOD_RES (1), (1): Xaa is C or S
  MOD_RES (15), (16), (17), (18), (19): Xaa is A or G
  MOD_RES (20), (21), (22), (23): Xaa is A or G or is absent

SEQ ID NO: 54817 - protein, 36 aa, Artificial Sequence; identical to SEQ ID NO: 16063
  GFR-binding peptide
  MOD_RES (5), (6): Xaa is C or S

SEQ ID NO: 54818 - protein, 38 aa, Artificial Sequence; identical to SEQ ID NO: 19342
  GFR-binding peptide
  MOD_RES (2), (2): Xaa is C or S
  MOD_RES (18), (19), (20), (21), (22): Xaa is A or G
  MOD_RES (23), (24), (25), (26): Xaa is A or G or is absent

SEQ ID NO: 54819 - protein, 39 aa, Artificial Sequence
  GFR-binding peptide
  MOD_RES (6), (7): Xaa is C or S
  MOD_RES (21), (22), (23), (24), (25): Xaa is A or G
  MOD_RES (26), (27), (28), (29): Xaa is A or G or is absent
ASASPXXVPQDLRSVKIAKVXXXXXXXXXKEVQVMVVKS

SEQ ID NO: 54820 - protein, 36 aa, Artificial Sequence
  GFR-binding peptide
  MOD_RES (3), (4), (35): Xaa is C or S
APXXVPQALRSVKIAKVVGRKPKVKEVQVMIVRSXK

SEQ ID NO: 54821 - protein, 42 aa, Artificial Sequence
  GFR-binding peptide
  MOD_RES (5), (6), (39), (41): Xaa is C or S
  MOD_RES (20), (21), (22), (23), (24): Xaa is A or G
  MOD_RES (25), (26), (27), (28): Xaa is A or G or is absent
SASPXXVSQDLRPVQIRKIXXXXXXXXXKKATVMIVKSXKXS

SEQ ID NO: 54822 - protein, 39 aa, Artificial Sequence
  GFR-binding peptide
  MOD_RES (6), (7): Xaa is C or S
  MOD_RES (21), (22), (23), (24), (25): Xaa is A or G
  MOD_RES (26), (27), (28), (29): Xaa is A or G or is absent
SIPKAXXVPTELRPVQMRKIXXXXXXXXXKKATVEMVVE

SEQ ID NO: 54823 - protein, 34 aa, Artificial Sequence
  GFR-binding peptide
  MOD_RES (2), (3): Xaa is C or S
PXXAPTQLSNITVQIMDDSSNVIIGEMSNMVVRA

SEQ ID NO: 54824 - protein, 37 aa, Artificial Sequence
  GFR-binding peptide
  MOD_RES (37), (37): Xaa is C or S
  MOD_RES (16), (17), (18), (19), (20): Xaa is A or G
  MOD_RES (21), (22), (23), (24): Xaa is A or G or is absent
RPTQVQLEPLPVVYYXXXXXXXXXEQLSNTLEDHLAX

SEQ ID NO: 54825 - protein, 41 aa, Artificial Sequence
  GFR-binding peptide
  MOD_RES (3), (40): Xaa is C or S
  MOD_RES (19), (20), (21), (22), (23): Xaa is A or G
  MOD_RES (24), (25), (26), (27): Xaa is A or G or is absent
VQXRPTQVQLEPLTVLYYXXXXXXXXXEQLSNTLEDHLAXK

SEQ ID NO: 54826 - protein, 41 aa, Artificial Sequence
  GFR-binding peptide
  MOD_RES (4), (5), (38), (40): Xaa is C or S
  MOD_RES (19), (20), (21), (22), (23): Xaa is A or G
  MOD_RES (24), (25), (26), (27): Xaa is A or G or is absent
ASPXXVSQDLRSVKIAKVXXXXXXXXXKEVQVMIVKSXKXS

SEQ ID NO: 54827 - protein, 39 aa, Artificial Sequence; identical to SEQ ID NO: 16068
  GFR-binding peptide
  MOD_RES (5), (39): Xaa is C or S
  MOD_RES (19), (20), (21), (22), (23): Xaa is A or G
  MOD_RES (24), (25), (26), (27): Xaa is A or G or is absent

SEQ ID NO: 54828 - protein, 38 aa, Artificial Sequence; identical to SEQ ID NO: 16069
  GFR-binding peptide
  MOD_RES (4), (5), (38): Xaa is C or S
  MOD_RES (19), (20), (21), (22), (23): Xaa is A or G
  MOD_RES (24), (25), (26), (27): Xaa is A or G or is absent

SEQ ID NO: 54829 - protein, 34 aa, Artificial Sequence; identical to SEQ ID NO: 19349
  GFR-binding peptide
  MOD_RES (14), (15), (16), (17), (18): Xaa is A or G
  MOD_RES (19), (20), (21), (22): Xaa is A or G or is absent

SEQ ID NO: 54830 - protein, 35 aa, Artificial Sequence; identical to SEQ ID NO: 16074
  GFR-binding peptide
  MOD_RES (34), (34): Xaa is C or S
  MOD_RES (14), (15), (16), (17), (18): Xaa is A or G
  MOD_RES (19), (20), (21), (22): Xaa is A or G or is absent

SEQ ID NO: 54831 - protein, 37 aa, Artificial Sequence
  GFR-binding peptide
  MOD_RES (2), (3), (37): Xaa is C or S
  MOD_RES (17), (18), (19), (20), (21): Xaa is A or G
  MOD_RES (22), (23), (24), (25): Xaa is A or G or is absent
AXXVPTELSNITMQIMXXXXXXXXXIGEMSDMVVEGX

SEQ ID NO: 54832 - protein, 43 aa, Artificial Sequence
  GFR-binding peptide
  MOD_RES (6), (40), (42): Xaa is C or S
  MOD_RES (20), (21), (22), (23), (24): Xaa is A or G
  MOD_RES (25), (26), (27), (28): Xaa is A or G or is absent
DEGLEXVPTEEEPLPMVYYXXXXXXXXXEQLSNFLQHNKXEXR

SEQ ID NO: 54833 - protein, 36 aa, Artificial Sequence
  GFR-binding peptide
  MOD_RES (3), (4), (36): Xaa is C or S
KPXXAPTKLSNITVQIMDDSSNVIIGEMSNMVVRSX

SEQ ID NO: 54834 - protein, 36 aa, Artificial Sequence
  GFR-binding peptide
  MOD_RES (4), (5), (36): Xaa is C or S
ASPXXVPQDLRPVQIRKIVGRTPKVKKATVMVVKSX

SEQ ID NO: 54835 - protein, 41 aa, Artificial Sequence
  GFR-binding peptide
  MOD_RES (6), (7), (40): Xaa is C or S
  MOD_RES (21), (22), (23), (24), (25): Xaa is A or G
  MOD_RES (26), (27), (28), (29): Xaa is A or G or is absent
ASAAPXXVPQALRSVKIAKVXXXXXXXXXKEVQVMIVRSXK

SEQ ID NO: 54836 - protein, 36 aa, Artificial Sequence; identical to SEQ ID NO: 19352
  GFR-binding peptide

SEQ ID NO: 54837 - protein, 38 aa, Artificial Sequence
  GFR-binding peptide
  MOD_RES (2), (3), (35), (37): Xaa is C or S
AXXVPTELRPVQMRKIDENEKVVKKATVDMVVEGXGXR

SEQ ID NO: 54838 - protein, 36 aa, Artificial Sequence; identical to SEQ ID NO: 16076
  GFR-binding peptide
  MOD_RES (34), (36): Xaa is C or S
  MOD_RES (14), (15), (16), (17), (18): Xaa is A or G
  MOD_RES (19), (20), (21), (22): Xaa is A or G or is absent

SEQ ID NO: 54839 - protein, 35 aa, Artificial Sequence; identical to SEQ ID NO: 19353
  GFR-binding peptide
  MOD_RES (35), (35): Xaa is C or S
  MOD_RES (14), (15), (16), (17), (18): Xaa is A or G
  MOD_RES (19), (20), (21), (22): Xaa is A or G or is absent

SEQ ID NO: 54840 - protein, 40 aa, Artificial Sequence
  GFR-binding peptide
  MOD_RES (2), (3), (37), (39): Xaa is C or S
  MOD_RES (17), (18), (19), (20), (21): Xaa is A or G
  MOD_RES (22), (23), (24), (25): Xaa is A or G or is absent
AXXVPTELRSVKMAKVXXXXXXXXXKEVQVEMVVEGXGXR

SEQ ID NO: 54841 - protein, 36 aa, Artificial Sequence
  GFR-binding peptide
  MOD_RES (1), (2), (36): Xaa is C or S
  MOD_RES (16), (17), (18), (19), (20): Xaa is A or G
  MOD_RES (21), (22), (23), (24): Xaa is A or G or is absent
XXAPTKLSNITVQIMXXXXXXXXXIGEMSNMVVRSX

SEQ ID NO: 54842 - protein, 44 aa, Artificial Sequence
  GFR-binding peptide
  MOD_RES (6), (7), (41), (43): Xaa is C or S
  MOD_RES (21), (22), (23), (24), (25): Xaa is A or G
  MOD_RES (26), (27), (28), (29): Xaa is A or G or is absent
SIPKAXXVPTELSNITMQIMXXXXXXXXXIGEMSEMVVEGXGXR

SEQ ID NO: 54843 - protein, 40 aa, Artificial Sequence; identical to SEQ ID NO: 19356
  GFR-binding peptide
  MOD_RES (3), (37), (39): Xaa is C or S

SEQ ID NO: 54844 - protein, 39 aa, Artificial Sequence
  GFR-binding peptide
  MOD_RES (6), (7), (38): Xaa is C or S
ASASPXXVPQDLRPVQIRKIVGRTPKVKKATVMVVKSXK

SEQ ID NO: 54845 - protein, 39 aa, Artificial Sequence
  GFR-binding peptide
  MOD_RES (6), (7): Xaa is C or S
  MOD_RES (21), (22), (23), (24), (25): Xaa is A or G
  MOD_RES (26), (27), (28), (29): Xaa is A or G or is absent
SIPKAXXVPTELRSVKMAKVXXXXXXXXXKEVQVEMVVE

SEQ ID NO: 54846 - protein, 39 aa, Artificial Sequence
  GFR-binding peptide
  MOD_RES (2), (3), (37), (39): Xaa is C or S
  MOD_RES (17), (18), (19), (20), (21): Xaa is A or G
  MOD_RES (22), (23), (24), (25): Xaa is A or G or is absent
AXXVPTELSNITMQIMXXXXXXXXXIGEMSDMVVEGXGX

SEQ ID NO: 54847 - protein, 36 aa, Artificial Sequence
  GFR-binding peptide
  MOD_RES (2), (2): Xaa is C or S
  MOD_RES (18), (19), (20), (21), (22): Xaa is A or G
  MOD_RES (23), (24), (25), (26): Xaa is A or G or is absent
KXQPSRVHHEPLPVVYYXXXXXXXXXEQLSNRLEEH

SEQ ID NO: 54848 - protein, 36 aa, Artificial Sequence
  GFR-binding peptide
  MOD_RES (1), (33), (35): Xaa is C or S
XAPTQLRPVQVRKIDDSSNVIKKATVNMVVRAXGXH

SEQ ID NO: 54849 - protein, 33 aa, Artificial Sequence; identical to SEQ ID NO: 16087
  GFR-binding peptide
  MOD_RES (1), (33): Xaa is C or S

SEQ ID NO: 54850 - protein, 37 aa, Artificial Sequence; identical to SEQ ID NO: 19358
  GFR-binding peptide
  MOD_RES (2), (2): Xaa is C or S

SEQ ID NO: 54851 - protein, 37 aa, Artificial Sequence; identical to SEQ ID NO: 19359
  GFR-binding peptide
  MOD_RES (36), (36): Xaa is C or S

SEQ ID NO: 54852 - protein, 35 aa, Artificial Sequence; identical to SEQ ID NO: 16091
  GFR-binding peptide
  MOD_RES (2), (3): Xaa is C or S
  MOD_RES (17), (18), (19), (20), (21): Xaa is A or G
  MOD_RES (22), (23), (24), (25): Xaa is A or G or is absent

SEQ ID NO: 54853 - protein, 38 aa, Artificial Sequence
  GFR-binding peptide
  MOD_RES (1), (2), (36), (38): Xaa is C or S
  MOD_RES (16), (17), (18), (19), (20): Xaa is A or G
  MOD_RES (21), (22), (23), (24): Xaa is A or G or is absent
XXVPTELRSVKMAKVXXXXXXXXXKEVQVEMVVEGXGX

SEQ ID NO: 54854 - protein, 30 aa, Artificial Sequence
  GFR-binding peptide
APTQLSNITVQIMDDSSNVIIGEMSNMVVR

SEQ ID NO: 54855 - protein, 38 aa, Artificial Sequence; identical to SEQ ID NO: 16092
  GFR-binding peptide
  MOD_RES (4), (5), (37): Xaa is C or S

SEQ ID NO: 54856 - protein, 34 aa, Artificial Sequence; identical to SEQ ID NO: 16094
  GFR-binding peptide
  MOD_RES (33), (33): Xaa is C or S
  MOD_RES (14), (15), (16), (17), (18): Xaa is A or G
  MOD_RES (19), (20), (21), (22): Xaa is A or G or is absent

SEQ ID NO: 54857 - protein, 35 aa, Artificial Sequence; identical to SEQ ID NO: 16095
  GFR-binding peptide
  MOD_RES (3), (3): Xaa is C or S
  MOD_RES (17), (18), (19), (20), (21): Xaa is A or G
  MOD_RES (22), (23), (24), (25): Xaa is A or G or is absent

SEQ ID NO: 54858 - protein, 38 aa, Artificial Sequence
  GFR-binding peptide
  MOD_RES (1), (2), (35), (37): Xaa is C or S
  MOD_RES (16), (17), (18), (19), (20): Xaa is A or G
  MOD_RES (21), (22), (23), (24): Xaa is A or G or is absent
XXVSQDLSNITIQIMXXXXXXXXXIGEMSMIVKSXKXS

SEQ ID NO: 54859 - protein, 35 aa, Artificial Sequence; identical to SEQ ID NO: 19365
  GFR-binding peptide
  MOD_RES (34), (34): Xaa is C or S
  MOD_RES (14), (15), (16), (17), (18): Xaa is A or G
  MOD_RES (19), (20), (21), (22): Xaa is A or G or is absent

SEQ ID NO: 54860 - protein, 44 aa, Artificial Sequence; identical to SEQ ID NO: 16096
  GFR-binding peptide
  MOD_RES (6), (7), (41), (43): Xaa is C or S
  MOD_RES (21), (22), (23), (24), (25): Xaa is A or G
  MOD_RES (26), (27), (28), (29): Xaa is A or G or is absent

SEQ ID NO: 54861 - protein, 42 aa, Artificial Sequence
  GFR-binding peptide
  MOD_RES (3), (40), (42): Xaa is C or S
VQXRPTQVQLEPLTVLYYEIVRKKPIFEQLSNTLEDHLAXKX

SEQ ID NO: 54862 - protein, 38 aa, Artificial Sequence
  GFR-binding peptide
  MOD_RES (5), (6): Xaa is C or S
  MOD_RES (20), (21), (22), (23), (24): Xaa is A or G
  MOD_RES (25), (26), (27), (28): Xaa is A or G or is absent
SASPXXVPQDLRPVQIRKIXXXXXXXXXKKATVMVVKS

SEQ ID NO: 54863 - protein, 39 aa, Artificial Sequence
  GFR-binding peptide
  MOD_RES (6), (7), (39): Xaa is C or S
YVPKPXXAPTKLRPVQVRKIDDSSNVIKKATVNMVVRSX

SEQ ID NO: 54864 - protein, 39 aa, Artificial Sequence; identical to SEQ ID NO: 16099
  GFR-binding peptide
  MOD_RES (4), (5), (39): Xaa is C or S
  MOD_RES (19), (20), (21), (22), (23): Xaa is A or G
  MOD_RES (24), (25), (26), (27): Xaa is A or G or is absent

SEQ ID NO: 54865 - protein, 35 aa, Artificial Sequence; identical to SEQ ID NO: 16100
  GFR-binding peptide
  MOD_RES (1), (33), (35): Xaa is C or S

SEQ ID NO: 54866 - protein, 38 aa, Artificial Sequence
  GFR-binding peptide
  MOD_RES (1), (35), (37): Xaa is C or S
  MOD_RES (15), (16), (17), (18), (19): Xaa is A or G
  MOD_RES (20), (21), (22), (23): Xaa is A or G or is absent
XVPTELRPVQMRKIXXXXXXXXXKKATVDMVVEGXGXR

SEQ ID NO: 54867 - protein, 43 aa, Artificial Sequence
  GFR-binding peptide
  MOD_RES (6), (7), (41), (43): Xaa is C or S
  MOD_RES (21), (22), (23), (24), (25): Xaa is A or G
  MOD_RES (26), (27), (28), (29): Xaa is A or G or is absent
YVPKPXXAPTKLSNITVQIMXXXXXXXXXIGEMSNMVVRSXGX

SEQ ID NO: 54868 - protein, 38 aa, Artificial Sequence; identical to SEQ ID NO: 16103
  GFR-binding peptide
  MOD_RES (5), (6), (38): Xaa is C or S

SEQ ID NO: 54869 - protein, 40 aa, Artificial Sequence; identical to SEQ ID NO: 16104
  GFR-binding peptide
  MOD_RES (6), (40): Xaa is C or S
  MOD_RES (20), (21), (22), (23), (24): Xaa is A or G
  MOD_RES (25), (26), (27), (28): Xaa is A or G or is absent

SEQ ID NO: 54870 - protein, 37 aa, Artificial Sequence; identical to SEQ ID NO: 16105
  GFR-binding peptide
  MOD_RES (1), (2), (34), (36): Xaa is C or S

SEQ ID NO: 54871 - protein, 35 aa, Artificial Sequence
  GFR-binding peptide
  MOD_RES (32), (34): Xaa is C or S
VPTELSNITMQIMDEYDKVVIGEMSEMVVEGXGXR

SEQ ID NO: 54872 - protein, 38 aa, Artificial Sequence
  GFR-binding peptide
  MOD_RES (6), (7), (38): Xaa is C or S
ASAAPXXVPQALRPVQIRKIVGRKPKVKKATVMIVRSX

SEQ ID NO: 54873 - protein, 35 aa, Artificial Sequence
  GFR-binding peptide
  MOD_RES (1), (2), (33), (35): Xaa is C or S
XXVPQDLRSVKIAKVVGRTPKVKEVQVMVVKSXKX

SEQ ID NO: 54874 - protein, 36 aa, Artificial Sequence
  GFR-binding peptide
  MOD_RES (36), (36): Xaa is C or S
PSRVHHEPLPVVYYEYVRKKPKLEQLSNRLEEHLEX

SEQ ID NO: 54875 - protein, 41 aa, Artificial Sequence
  GFR-binding peptide
  MOD_RES (6), (40): Xaa is C or S
DEGLEXVPTEEEPLTMLYYRIKPHQGQHEQLSNFLQHNKXE

SEQ ID NO: 54876 - protein, 39 aa, Artificial Sequence; identical to SEQ ID NO: 16112
  GFR-binding peptide
  MOD_RES (3), (4), (38): Xaa is C or S
  MOD_RES (18), (19), (20), (21), (22): Xaa is A or G
  MOD_RES (23), (24), (25), (26): Xaa is A or G or is absent

SEQ ID NO: 54877 - protein, 43 aa, Artificial Sequence
  GFR-binding peptide
  MOD_RES (5), (42): Xaa is C or S
  MOD_RES (21), (22), (23), (24), (25): Xaa is A or G
  MOD_RES (26), (27), (28), (29): Xaa is A or G or is absent
RNVQXRPTQVQLEPLPVVYYXXXXXXXXXEQLSNTLEDHLAXK

SEQ ID NO: 54878 - protein, 37 aa, Artificial Sequence; identical to SEQ ID NO: 19369
  GFR-binding peptide
  MOD_RES (37), (37): Xaa is C or S

SEQ ID NO: 54879 - protein, 39 aa, Artificial Sequence
  GFR-binding peptide
  MOD_RES (4), (38): Xaa is C or S
GLEXVPTEEEPLTMLYYRIKPHQGQHEQLSNFLQHNKXE

SEQ ID NO: 54880 - protein, 35 aa, Artificial Sequence; identical to SEQ ID NO: 16121
  GFR-binding peptide
  MOD_RES (2), (3), (35): Xaa is C or S

SEQ ID NO: 54881 - protein, 38 aa, Artificial Sequence
  GFR-binding peptide
  MOD_RES (2), (2): Xaa is C or S
QXRPTQVQLEPLPVVYYEIVRKKPIFEQLSNTLEDHLA

SEQ ID NO: 54882 - protein, 35 aa, Artificial Sequence
  GFR-binding peptide
  MOD_RES (2), (3): Xaa is C or S
  MOD_RES (17), (18), (19), (20), (21): Xaa is A or G
  MOD_RES (22), (23), (24), (25): Xaa is A or G or is absent
PXXVPQALSNITIQIMXXXXXXXXXIGEMSMIVRS

SEQ ID NO: 54883 - protein, 41 aa, Artificial Sequence
  GFR-binding peptide
  MOD_RES (1), (38), (40): Xaa is C or S
  MOD_RES (17), (18), (19), (20), (21): Xaa is A or G
  MOD_RES (22), (23), (24), (25): Xaa is A or G or is absent
XQPSRVHHEPLPVVYYXXXXXXXXXEQLSNRLEEHLEXAXA

SEQ ID NO: 54884 - protein, 41 aa, Artificial Sequence
  GFR-binding peptide
  MOD_RES (6), (7), (40): Xaa is C or S
  MOD_RES (21), (22), (23), (24), (25): Xaa is A or G
  MOD_RES (26), (27), (28), (29): Xaa is A or G or is absent
ASASPXXVSQDLRSVKIAKVXXXXXXXXXKEVQVMIVKSXK

SEQ ID NO: 54885 - protein, 35 aa, Artificial Sequence
  GFR-binding peptide
  MOD_RES (15), (16), (17), (18), (19): Xaa is A or G
  MOD_RES (20), (21), (22), (23): Xaa is A or G or is absent
PTQVQLEPLTVLYYXXXXXXXXXEQLSNTLEDHLA

SEQ ID NO: 54886 - protein, 44 aa, Artificial Sequence
  GFR-binding peptide
  MOD_RES (5), (42), (44): Xaa is C or S
RNVQXRPTQVQLEPLPVVYYEIVRKKPIFEQLSNTLEDHLAXKX

SEQ ID NO: 54887 - protein, 40 aa, Artificial Sequence
  GFR-binding peptide
  MOD_RES (5), (6), (39): Xaa is C or S
  MOD_RES (20), (21), (22), (23), (24): Xaa is A or G
  MOD_RES (25), (26), (27), (28): Xaa is A or G or is absent
SAAPXXVPQALRSVKIAKVXXXXXXXXXKEVQVMIVRSXK

SEQ ID NO: 54888 - protein, 38 aa, Artificial Sequence
  GFR-binding peptide
  MOD_RES (5), (6), (38): Xaa is C or S
IPKAXXVPTELRSVKMAKVDENEKVVKEVQVDMVVEGX

SEQ ID NO: 54889 - protein, 39 aa, Artificial Sequence
  GFR-binding peptide
  MOD_RES (3), (4), (37), (39): Xaa is C or S
  MOD_RES (18), (19), (20), (21), (22): Xaa is A or G
  MOD_RES (23), (24), (25), (26): Xaa is A or G or is absent
SPXXVPQDLRSVKIAKVXXXXXXXXXKEVQVMVVKSXKX

SEQ ID NO: 54890 - protein, 37 aa, Artificial Sequence
  GFR-binding peptide
  MOD_RES (2), (2): Xaa is C or S
  MOD_RES (18), (19), (20), (21), (22): Xaa is A or G
  MOD_RES (23), (24), (25), (26): Xaa is A or G or is absent
KXQPSRVHHEPLPVVYYXXXXXXXXXEQLSNRLEEHL

SEQ ID NO: 54891 - protein, 38 aa, Artificial Sequence; identical to SEQ ID NO: 16129
  GFR-binding peptide
  MOD_RES (5), (6), (38): Xaa is C or S

SEQ ID NO: 54892 - protein, 38 aa, Artificial Sequence
  GFR-binding peptide
  MOD_RES (1), (38): Xaa is C or S
  MOD_RES (17), (18), (19), (20), (21): Xaa is A or G
  MOD_RES (22), (23), (24), (25): Xaa is A or G or is absent
XQPSRVHHEPLTVLYYXXXXXXXXXEQLSNRLEEHLEX

SEQ ID NO: 54893 - protein, 43 aa, Artificial Sequence
  GFR-binding peptide
  MOD_RES (3), (40), (42): Xaa is C or S
  MOD_RES (19), (20), (21), (22), (23): Xaa is A or G
  MOD_RES (24), (25), (26), (27): Xaa is A or G or is absent
VQXRPTQVQLEPLPVVYYXXXXXXXXXEQLSNTLEDHLAXKXE

SEQ ID NO: 54894 - protein, 36 aa, Artificial Sequence
  GFR-binding peptide
  MOD_RES (35), (35): Xaa is C or S
  MOD_RES (14), (15), (16), (17), (18): Xaa is A or G
  MOD_RES (19), (20), (21), (22): Xaa is A or G or is absent
SRVHHEPLPVVYYXXXXXXXXXEQLSNRLEEHLEXA

SEQ ID NO: 54895 - protein, 39 aa, Artificial Sequence
  GFR-binding peptide
  MOD_RES (2), (3), (36), (38): Xaa is C or S
  MOD_RES (17), (18), (19), (20), (21): Xaa is A or G
  MOD_RES (22), (23), (24), (25): Xaa is A or G or is absent
PXXVSQDLSNITIQIMXXXXXXXXXIGEMSMIVKSXKXS

SEQ ID NO: 54896 - protein, 34 aa, Artificial Sequence
  GFR-binding peptide
  MOD_RES (3), (4): Xaa is C or S
KPXXAPTKLSNITVQIMDDSSNVIIGEMSNMVVR

SEQ ID NO: 54897 - protein, 34 aa, Artificial Sequence; identical to SEQ ID NO: 19380
  GFR-binding peptide
  MOD_RES (16), (17), (18), (19), (20): Xaa is A or G
  MOD_RES (21), (22), (23), (24): Xaa is A or G or is absent

SEQ ID NO: 54898 - protein, 33 aa, Artificial Sequence
  GFR-binding peptide
PSRVHHEPLTVLYYEYVRKKPKLEQLSNRLEEH

SEQ ID NO: 54899 - protein, 38 aa, Artificial Sequence; identical to SEQ ID NO: 16136
  GFR-binding peptide
  MOD_RES (4), (5): Xaa is C or S
  MOD_RES (19), (20), (21), (22), (23): Xaa is A or G
  MOD_RES (24), (25), (26), (27): Xaa is A or G or is absent

SEQ ID NO: 54900 - protein, 37 aa, Artificial Sequence
  GFR-binding peptide
  MOD_RES (4), (4): Xaa is C or S
  MOD_RES (18), (19), (20), (21), (22): Xaa is A or G
  MOD_RES (23), (24), (25), (26): Xaa is A or G or is absent
GLEXVPTEEEPLTMLYYXXXXXXXXXEQLSNFLQHNK

SEQ ID NO: 54901 - protein, 38 aa, Artificial Sequence; identical to SEQ ID NO: 16139
  GFR-binding peptide
  MOD_RES (4), (36), (38): Xaa is C or S

SEQ ID NO: 54902 - protein, 42 aa, Artificial Sequence; identical to SEQ ID NO: 19384
  GFR-binding peptide
  MOD_RES (2), (39), (41): Xaa is C or S
  MOD_RES (18), (19), (20), (21), (22): Xaa is A or G
  MOD_RES (23), (24), (25), (26): Xaa is A or G or is absent

SEQ ID NO: 54903 - protein, 40 aa, Artificial Sequence
  GFR-binding peptide
  MOD_RES (6), (7), (40): Xaa is C or S
  MOD_RES (21), (22), (23), (24), (25): Xaa is A or G
  MOD_RES (26), (27), (28), (29): Xaa is A or G or is absent
ASAAPXXVPQALRPVQIRKIXXXXXXXXXKKATVMIVRSX

SEQ ID NO: 54904 - protein, 39 aa, Artificial Sequence; identical to SEQ ID NO: 16143
  GFR-binding peptide
  MOD_RES (5), (6): Xaa is C or S
  MOD_RES (20), (21), (22), (23), (24): Xaa is A or G
  MOD_RES (25), (26), (27), (28): Xaa is A or G or is absent

SEQ ID NO: 54905 - protein, 36 aa, Artificial Sequence
  GFR-binding peptide
  MOD_RES (2), (3), (34), (36): Xaa is C or S
PXXVPQALRPVQIRKIVGRKPKVKKATVMIVRSXKX

SEQ ID NO: 54906 - protein, 37 aa, Artificial Sequence
  GFR-binding peptide
  MOD_RES (1), (35), (37): Xaa is C or S
  MOD_RES (15), (16), (17), (18), (19): Xaa is A or G
  MOD_RES (20), (21), (22), (23): Xaa is A or G or is absent
XVPTELRPVQMRKIXXXXXXXXXKKATVEMVVEGXGX

SEQ ID NO: 54907 - protein, 41 aa, Artificial Sequence; identical to SEQ ID NO: 19393
  GFR-binding peptide
  MOD_RES (1), (38), (40): Xaa is C or S

SEQ ID NO: 54908 - protein, 44 aa, Artificial Sequence; identical to SEQ ID NO: 19394
  GFR-binding peptide
  MOD_RES (4), (41), (43): Xaa is C or S
  MOD_RES (20), (21), (22), (23), (24): Xaa is A or G
  MOD_RES (25), (26), (27), (28): Xaa is A or G or is absent

SEQ ID NO: 54909 - protein, 36 aa, Artificial Sequence
  GFR-binding peptide
  MOD_RES (2), (3), (36): Xaa is C or S
  MOD_RES (17), (18), (19), (20), (21): Xaa is A or G
  MOD_RES (22), (23), (24), (25): Xaa is A or G or is absent
PXXVPQALRSVKIAKVXXXXXXXXXKEVQVMIVRSX

SEQ ID NO: 54910 - protein, 37 aa, Artificial Sequence
  GFR-binding peptide
  MOD_RES (4), (4): Xaa is C or S
  MOD_RES (18), (19), (20), (21), (22): Xaa is A or G
  MOD_RES (23), (24), (25), (26): Xaa is A or G or is absent
KPTXAPTKLSNITVQIMXXXXXXXXXIGEMSNMVVRS

SEQ ID NO: 54911 - protein, 35 aa, Artificial Sequence; identical to SEQ ID NO: 16146
  GFR-binding peptide
  MOD_RES (3), (4): Xaa is C or S

SEQ ID NO: 54912 - protein, 39 aa, Artificial Sequence; identical to SEQ ID NO: 16147
  GFR-binding peptide
  MOD_RES (6), (7): Xaa is C or S
  MOD_RES (21), (22), (23), (24), (25): Xaa is A or G
  MOD_RES (26), (27), (28), (29): Xaa is A or G or is absent

SEQ ID NO: 54913 - protein, 39 aa, Artificial Sequence
  GFR-binding peptide
  MOD_RES (1), (2), (36), (38): Xaa is C or S
  MOD_RES (16), (17), (18), (19), (20): Xaa is A or G
  MOD_RES (21), (22), (23), (24): Xaa is A or G or is absent
XXVPTELSNITMQIMXXXXXXXXXIGEMSEMVVEGXGXR

SEQ ID NO: 54914 - protein, 36 aa, Artificial Sequence; identical to SEQ ID NO: 16148
  GFR-binding peptide
  MOD_RES (3), (4), (35): Xaa is C or S

SEQ ID NO: 54915 - protein, 40 aa, Artificial Sequence; identical to SEQ ID NO: 16149
  GFR-binding peptide
  MOD_RES (5), (6), (40): Xaa is C or S
  MOD_RES (20), (21), (22), (23), (24): Xaa is A or G
  MOD_RES (25), (26), (27), (28): Xaa is A or G or is absent

SEQ ID NO: 54916 - protein, 34 aa, Artificial Sequence; identical to SEQ ID NO: 16152
  GFR-binding peptide
  MOD_RES (1), (2): Xaa is C or S
  MOD_RES (16), (17), (18), (19), (20): Xaa is A or G
  MOD_RES (21), (22), (23), (24): Xaa is A or G or is absent

SEQ ID NO: 54917 - protein, 33 aa, Artificial Sequence
  GFR-binding peptide
  MOD_RES (14), (15), (16), (17), (18): Xaa is A or G
  MOD_RES (19), (20), (21), (22): Xaa is A or G or is absent
SRVHHEPLPVVYYXXXXXXXXXEQLSNRLEEHL

SEQ ID NO: 54918 - protein, 35 aa, Artificial Sequence
  GFR-binding peptide
  MOD_RES (2), (3): Xaa is C or S
  MOD_RES (17), (18), (19), (20), (21): Xaa is A or G
  MOD_RES (22), (23), (24), (25): Xaa is A or G or is absent
PXXAPTQLRSVKVAKVXXXXXXXXXKEVQVNMVVR

SEQ ID NO: 54919 - protein, 42 aa, Artificial Sequence; identical to SEQ ID NO: 19398
  GFR-binding peptide
  MOD_RES (4), (41): Xaa is C or S

SEQ ID NO: 54920 - protein, 34 aa, Artificial Sequence
  GFR-binding peptide
  MOD_RES (2), (2): Xaa is C or S
  MOD_RES (16), (17), (18), (19), (20): Xaa is A or G
  MOD_RES (21), (22), (23), (24): Xaa is A or G or is absent
TXAPTKLSNITVQIMXXXXXXXXXIGEMSNMVVR

SEQ ID NO: 54921 - protein, 36 aa, Artificial Sequence; identical to SEQ ID NO: 39850
  GFR-binding peptide
  MOD_RES (1), (2), (35): Xaa is C or S
  MOD_RES (16), (17), (18), (19), (20): Xaa is A or G
  MOD_RES (21), (22), (23), (24): Xaa is A or G or is absent

SEQ ID NO: 54922 - protein, 35 aa, Artificial Sequence
  GFR-binding peptide
  MOD_RES (1), (1): Xaa is C or S
  MOD_RES (17), (18), (19), (20), (21): Xaa is A or G
  MOD_RES (22), (23), (24), (25): Xaa is A or G or is absent
XRPTQVQLEPLTVLYYXXXXXXXXXEQLSNTLEDH

SEQ ID NO: 54923 - protein, 38 aa, Artificial Sequence
  GFR-binding peptide
  MOD_RES (1), (2), (36), (38): Xaa is C or S
  MOD_RES (16), (17), (18), (19), (20): Xaa is A or G
  MOD_RES (21), (22), (23), (24): Xaa is A or G or is absent
XXAPTQLRSVKVAKVXXXXXXXXXKEVQVNMVVRAXGX

SEQ ID NO: 54924 - protein, 35 aa, Artificial Sequence
  GFR-binding peptide
  MOD_RES (1), (2), (35): Xaa is C or S
  MOD_RES (16), (17), (18), (19), (20): Xaa is A or G
  MOD_RES (21), (22), (23), (24): Xaa is A or G or is absent
XXVPQDLRPVQIRKIXXXXXXXXXKKATVMVVKSX

SEQ ID NO: 54925 - protein, 40 aa, Artificial Sequence
  GFR-binding peptide
  MOD_RES (6), (7), (39): Xaa is C or S
YVPKPXXAPTKLRSVKVAKVDDSSNVIKEVQVNMVVRSXG

SEQ ID NO: 54926 - protein, 40 aa, Artificial Sequence
  GFR-binding peptide
  MOD_RES (3), (37), (39): Xaa is C or S
  MOD_RES (17), (18), (19), (20), (21): Xaa is A or G
  MOD_RES (22), (23), (24), (25): Xaa is A or G or is absent
PTXAPTKLSNITVQIMXXXXXXXXXIGEMSNMVVRSXGXH

SEQ ID NO: 54927 - protein, 35 aa, Artificial Sequence
  GFR-binding peptide
  MOD_RES (1), (2), (34): Xaa is C or S
XXVPTELSNITMQIMDENEKVVIGEMSDMVVEGXG

SEQ ID NO: 54928 - protein, 40 aa, Artificial Sequence
  GFR-binding peptide
  MOD_RES (3), (4), (38), (40): Xaa is C or S
  MOD_RES (18), (19), (20), (21), (22): Xaa is A or G
  MOD_RES (23), (24), (25), (26): Xaa is A or G or is absent
KPXXAPTKLRPVQVRKIXXXXXXXXXKKATVNMVVRSXGX

SEQ ID NO: 54929 - protein, 35 aa, Artificial Sequence
  GFR-binding peptide
  MOD_RES (34), (34): Xaa is C or S
  MOD_RES (14), (15), (16), (17), (18): Xaa is A or G
  MOD_RES (19), (20), (21), (22): Xaa is A or G or is absent
APTKLRSVKVAKVXXXXXXXXXKEVQVNMVVRSXG

SEQ ID NO: 54930 - protein, 42 aa, Artificial Sequence
  GFR-binding peptide
  MOD_RES (5), (6), (39), (41): Xaa is C or S
  MOD_RES (20), (21), (22), (23), (24): Xaa is A or G
  MOD_RES (25), (26), (27), (28): Xaa is A or G or is absent
SASPXXVPQDLRPVQIRKIXXXXXXXXXKKATVMVVKSXKXS

SEQ ID NO: 54931 - protein, 37 aa, Artificial Sequence
  GFR-binding peptide
  MOD_RES (3), (37): Xaa is C or S
LEXVPTEEEPLTMLYYRIKPHQGQHEQLSNFLQHNKX

SEQ ID NO: 54932 - protein, 40 aa, Artificial Sequence; identical to SEQ ID NO: 39874
  GFR-binding peptide
  MOD_RES (6), (7), (40): Xaa is C or S
  MOD_RES (21), (22), (23), (24), (25): Xaa is A or G
  MOD_RES (26), (27), (28), (29): Xaa is A or G or is absent

SEQ ID NO: 54933 - protein, 39 aa, Artificial Sequence; identical to SEQ ID NO: 16165
  GFR-binding peptide
  MOD_RES (2), (3), (37), (39): Xaa is C or S
  MOD_RES (17), (18), (19), (20), (21): Xaa is A or G
  MOD_RES (22), (23), (24), (25): Xaa is A or G or is absent

SEQ ID NO: 54934 - protein, 35 aa, Artificial Sequence
  GFR-binding peptide
  MOD_RES (2), (3): Xaa is C or S
  MOD_RES (17), (18), (19), (20), (21): Xaa is A or G
  MOD_RES (22), (23), (24), (25): Xaa is A or G or is absent
PXXAPTQLRPVQVRKIXXXXXXXXXKKATVNMVVR

SEQ ID NO: 54935 - protein, 36 aa, Artificial Sequence
  GFR-binding peptide
  MOD_RES (3), (3): Xaa is C or S
  MOD_RES (17), (18), (19), (20), (21): Xaa is A or G
  MOD_RES (22), (23), (24), (25): Xaa is A or G or is absent
LEXVPTEEEPLPMVYYXXXXXXXXXEQLSNFLQHNK

SEQ ID NO: 54936 - protein, 40 aa, Artificial Sequence
  GFR-binding peptide
  MOD_RES (6), (7), (38), (40): Xaa is C or S
ASAAPXXVPQALSNITIQIMVGRKPKVIGEMSMIVRSXKX

SEQ ID NO: 54937 - protein, 38 aa, Artificial Sequence
  GFR-binding peptide
  MOD_RES (5), (6), (38): Xaa is C or S
IPKAXXVPTELRSVKMAKVDEYDKVVKEVQVEMVVEGX

SEQ ID NO: 54938 - protein, 33 aa, Artificial Sequence
  GFR-binding peptide
  MOD_RES (2), (3): Xaa is C or S
AXXVPTELSNITMQIMDENEKVVIGEMSDMVVE

SEQ ID NO: 54939 - protein, 38 aa, Artificial Sequence; identical to SEQ ID NO: 16170
  GFR-binding peptide
  MOD_RES (5), (6): Xaa is C or S
  MOD_RES (20), (21), (22), (23), (24): Xaa is A or G
  MOD_RES (25), (26), (27), (28): Xaa is A or G or is absent

SEQ ID NO: 54940 - protein, 39 aa, Artificial Sequence; identical to SEQ ID NO: 16172
  GFR-binding peptide
  MOD_RES (6), (7): Xaa is C or S
  MOD_RES (21), (22), (23), (24), (25): Xaa is A or G
  MOD_RES (26), (27), (28), (29): Xaa is A or G or is absent

SEQ ID NO: 54941 - protein, 40 aa, Artificial Sequence
  GFR-binding peptide
  MOD_RES (4), (5), (39): Xaa is C or S
  MOD_RES (19), (20), (21), (22), (23): Xaa is A or G
  MOD_RES (24), (25), (26), (27): Xaa is A or G or is absent
PKAXXVPTELRSVKMAKVXXXXXXXXXKEVQVEMVVEGXG

SEQ ID NO: 54942 - protein, 34 aa, Artificial Sequence; identical to SEQ ID NO: 19411
  GFR-binding peptide
  MOD_RES (14), (15), (16), (17), (18): Xaa is A or G
  MOD_RES (19), (20), (21), (22): Xaa is A or G or is absent

SEQ ID NO: 54943 - protein, 41 aa, Artificial Sequence
  GFR-binding peptide
  MOD_RES (6), (7), (38), (40): Xaa is C or S
ASASPXXVPQDLRSVKIAKVVGRTPKVKEVQVMVVKSXKXS

SEQ ID NO: 54944 - protein, 39 aa, Artificial Sequence
  GFR-binding peptide
  MOD_RES (7), (39): Xaa is C or S
HVTKPTXAPTKLRPVQVRKIDDSSNVIKKATVNMVVRSX

SEQ ID NO: 54945 - protein, 37 aa, Artificial Sequence
  GFR-binding peptide
  MOD_RES (3), (4), (37): Xaa is C or S
  MOD_RES (18), (19), (20), (21), (22): Xaa is A or G
  MOD_RES (23), (24), (25), (26): Xaa is A or G or is absent
SPXXVPQDLSNITIQIMXXXXXXXXXIGEMSMVVKSX

SEQ ID NO: 54946 - protein, 36 aa, Artificial Sequence; identical to SEQ ID NO: 19412
  GFR-binding peptide
  MOD_RES (16), (17), (18), (19), (20): Xaa is A or G
  MOD_RES (21), (22), (23), (24): Xaa is A or G or is absent

SEQ ID NO: 54947 - protein, 34 aa, Artificial Sequence; identical to SEQ ID NO: 19413
  GFR-binding peptide
  MOD_RES (1), (1): Xaa is C or S
  MOD_RES (15), (16), (17), (18), (19): Xaa is A or G
  MOD_RES (20), (21), (22), (23): Xaa is A or G or is absent

SEQ ID NO: 54948 - protein, 41 aa, Artificial Sequence
  GFR-binding peptide
  MOD_RES (5), (6), (38), (40): Xaa is C or S
IPKAXXVPTELRSVKMAKVDEYDKVVKEVQVEMVVEGXGXR

SEQ ID NO: 54949 - protein, 40 aa, Artificial Sequence; identical to SEQ ID NO: 19414
  GFR-binding peptide
  MOD_RES (1), (38), (40): Xaa is C or S
  MOD_RES (17), (18), (19), (20), (21): Xaa is A or G
  MOD_RES (22), (23), (24), (25): Xaa is A or G or is absent

SEQ ID NO: 54950 - protein, 35 aa, Artificial Sequence
  GFR-binding peptide
  MOD_RES (2), (3): Xaa is C or S
  MOD_RES (17), (18), (19), (20), (21): Xaa is A or G
  MOD_RES (22), (23), (24), (25): Xaa is A or G or is absent
AXXVPTELRPVQMRKIXXXXXXXXXKKATVEMVVE

SEQ ID NO: 54951 - protein, 39 aa, Artificial Sequence; identical to SEQ ID NO: 16175
  GFR-binding peptide
  MOD_RES (6), (7), (39): Xaa is C or S

SEQ ID NO: 54952 - protein, 38 aa, Artificial Sequence
  GFR-binding peptide
  MOD_RES (4), (5), (37): Xaa is C or S
PKAXXVPTELSNITMQIMDENEKVVIGEMSDMVVEGXG

SEQ ID NO: 54953 - protein, 43 aa, Artificial Sequence; identical to SEQ ID NO: 16177
  GFR-binding peptide
  MOD_RES (6), (7), (41), (43): Xaa is C or S
  MOD_RES (21), (22), (23), (24), (25): Xaa is A or G
  MOD_RES (26), (27), (28), (29): Xaa is A or G or is absent

SEQ ID NO: 54954 - protein, 34 aa, Artificial Sequence
  GFR-binding peptide
  MOD_RES (2), (3): Xaa is C or S
AXXVPTELSNITMQIMDEYDKVVIGEMSEMVVEG

SEQ ID NO: 54955 - protein, 36 aa, Artificial Sequence
  GFR-binding peptide
  MOD_RES (2), (3), (35): Xaa is C or S
AXXVPTELRPVQMRKIDEYDKVVKKATVEMVVEGXG

SEQ ID NO: 54956 - protein, 37 aa, Artificial Sequence
  GFR-binding peptide
  MOD_RES (3), (4): Xaa is C or S
  MOD_RES (18), (19), (20), (21), (22): Xaa is A or G
  MOD_RES (23), (24), (25), (26): Xaa is A or G or is absent
KAXXVPTELSNITMQIMXXXXXXXXXIGEMSEMVVEG

SEQ ID NO: 54957 - protein, 36 aa, Artificial Sequence
  GFR-binding peptide
  MOD_RES (1), (2), (35): Xaa is C or S
  MOD_RES (16), (17), (18), (19), (20): Xaa is A or G
  MOD_RES (21), (22), (23), (24): Xaa is A or G or is absent
XXVSQDLRSVKIAKVXXXXXXXXXKEVQVMIVKSXK

SEQ ID NO: 54958 - protein, 39 aa, Artificial Sequence
  GFR-binding peptide
  MOD_RES (3), (4), (36), (38): Xaa is C or S
KAXXVPTELSNITMQIMDEYDKVVIGEMSEMVVEGXGXR

SEQ ID NO: 54959 - protein, 41 aa, Artificial Sequence
  GFR-binding peptide
  MOD_RES (1), (38), (40): Xaa is C or S
XRPTQVQLEPLTVLYYEIVRKKPIFEQLSNTLEDHLAXKXE

SEQ ID NO: 54960 - protein, 40 aa, Artificial Sequence; identical to SEQ ID NO: 16183
  GFR-binding peptide
  MOD_RES (4), (5), (37), (39): Xaa is C or S

SEQ ID NO: 54961 - protein, 36 aa, Artificial Sequence
  GFR-binding peptide
  MOD_RES (1), (2), (36): Xaa is C or S
  MOD_RES (16), (17), (18), (19), (20): Xaa is A or G
  MOD_RES (21), (22), (23), (24): Xaa is A or G or is absent
XXVPTELRPVQMRKIXXXXXXXXXKKATVEMVVEGX

SEQ ID NO: 54962 - protein, 34 aa, Artificial Sequence
  GFR-binding peptide
  MOD_RES (32), (34): Xaa is C or S
APTQLSNITVQIMDDSSNVIIGEMSNMVVRAXGX

SEQ ID NO: 54963 - protein, 35 aa, Artificial Sequence; identical to SEQ ID NO: 16185
  GFR-binding peptide
  MOD_RES (1), (34): Xaa is C or S
  MOD_RES (15), (16), (17), (18), (19): Xaa is A or G
  MOD_RES (20), (21), (22), (23): Xaa is A or G or is absent

SEQ ID NO: 54964 - protein, 32 aa, Artificial Sequence
  GFR-binding peptide
  MOD_RES (1), (1): Xaa is C or S
XAPTKLRPVQVRKIDDSSNVIKKATVNMVVRS

SEQ ID NO: 54965 - protein, 40 aa, Artificial Sequence; identical to SEQ ID NO: 16187
  GFR-binding peptide
  MOD_RES (2), (3), (37), (39): Xaa is C or S
  MOD_RES (17), (18), (19), (20), (21): Xaa is A or G
  MOD_RES (22), (23), (24), (25): Xaa is A or G or is absent

SEQ ID NO: 54966 - protein, 41 aa, Artificial Sequence
  GFR-binding peptide
  MOD_RES (5), (6), (39), (41): Xaa is C or S
  MOD_RES (20), (21), (22), (23), (24): Xaa is A or G
  MOD_RES (25), (26), (27), (28): Xaa is A or G or is absent
SASPXXVPQDLRPVQIRKIXXXXXXXXXKKATVMVVKSXKX

SEQ ID NO: 54967 - protein, 40 aa, Artificial Sequence; identical to SEQ ID NO: 16188
  GFR-binding peptide
  MOD_RES (4), (38), (40): Xaa is C or S
  MOD_RES (18), (19), (20), (21), (22): Xaa is A or G
  MOD_RES (23), (24), (25), (26): Xaa is A or G or is absent

SEQ ID NO: 54968 - protein, 37 aa, Artificial Sequence
  GFR-binding peptide
  MOD_RES (34), (36): Xaa is C or S
  MOD_RES (14), (15), (16), (17), (18): Xaa is A or G
  MOD_RES (19), (20), (21), (22): Xaa is A or G or is absent
APTKLRPVQVRKIXXXXXXXXXKKATVNMVVRSXGXH

SEQ ID NO: 54969 - protein, 36 aa, Artificial Sequence; identical to SEQ ID NO: 19421
  GFR-binding peptide
  MOD_RES (1), (35): Xaa is C or S
  MOD_RES (15), (16), (17), (18), (19): Xaa is A or G
  MOD_RES (20), (21), (22), (23): Xaa is A or G or is absent

SEQ ID NO: 54970 - protein, 32 aa, Artificial Sequence
  GFR-binding peptide
  MOD_RES (1), (2): Xaa is C or S
XXVPTELSNITMQIMDEYDKVVIGEMSEMVVE

SEQ ID NO: 54971 - protein, 34 aa, Artificial Sequence; identical to SEQ ID NO: 16190
  GFR-binding peptide
  MOD_RES (1), (2): Xaa is C or S
  MOD_RES (16), (17), (18), (19), (20): Xaa is A or G
  MOD_RES (21), (22), (23), (24): Xaa is A or G or is absent

SEQ ID NO: 54972 - protein, 33 aa, Artificial Sequence; identical to SEQ ID NO: 16191
  GFR-binding peptide
  MOD_RES (1), (1): Xaa is C or S
  MOD_RES (15), (16), (17), (18), (19): Xaa is A or G
  MOD_RES (20), (21), (22), (23): Xaa is A or G or is absent

SEQ ID NO: 54973 - protein, 37 aa, Artificial Sequence; identical to SEQ ID NO: 16192
  GFR-binding peptide
  MOD_RES (2), (3), (37): Xaa is C or S
  MOD_RES (17), (18), (19), (20), (21): Xaa is A or G
  MOD_RES (22), (23), (24), (25): Xaa is A or G or is absent

SEQ ID NO: 54974 - protein, 37 aa, Artificial Sequence
  GFR-binding peptide
  MOD_RES (1), (1): Xaa is C or S
XQPSRVHHEPLTVLYYEYVRKKPKLEQLSNRLEEHLE

SEQ ID NO: 54975 - protein, 36 aa, Artificial Sequence; identical to SEQ ID NO: 16194
  GFR-binding peptide
  MOD_RES (4), (5), (36): Xaa is C or S

SEQ ID NO: 54976 - protein, 37 aa, Artificial Sequence; identical to SEQ ID NO: 16196
  GFR-binding peptide
  MOD_RES (2), (36): Xaa is C or S
  MOD_RES (16), (17), (18), (19), (20): Xaa is A or G
  MOD_RES (21), (22), (23), (24): Xaa is A or G or is absent

SEQ ID NO: 54977 - protein, 36 aa, Artificial Sequence
  GFR-binding peptide
  MOD_RES (1), (35): Xaa is C or S
  MOD_RES (15), (16), (17), (18), (19): Xaa is A or G
  MOD_RES (20), (21), (22), (23): Xaa is A or G or is absent
XVPTELRSVKMAKVXXXXXXXXXKEVQVDMVVEGXG

SEQ ID NO: 54978 - protein, 40 aa, Artificial Sequence
  GFR-binding peptide
  MOD_RES (6), (7), (38), (40): Xaa is C or S
ASASPXXVSQDLSNITIQIMIGKTPKIIGEMSMIVKSXKX

SEQ ID NO: 54979 - protein, 32 aa, Artificial Sequence; identical to SEQ ID NO: 16200
  GFR-binding peptide
  MOD_RES (14), (15), (16), (17), (18): Xaa is A or G
  MOD_RES (19), (20), (21), (22): Xaa is A or G or is absent

SEQ ID NO: 54980 - protein, 40 aa, Artificial Sequence
  GFR-binding peptide
  MOD_RES (5), (39): Xaa is C or S
EGLEXVPTEEEPLPMVYYRIKPHQGQHEQLSNFLQHNKXE

SEQ ID NO: 54981 - protein, 40 aa, Artificial Sequence; identical to SEQ ID NO: 19427
  GFR-binding peptide
  MOD_RES (1), (38), (40): Xaa is C or S
  MOD_RES (17), (18), (19), (20), (21): Xaa is A or G
  MOD_RES (22), (23), (24), (25): Xaa is A or G or is absent

SEQ ID NO: 54982 - protein, 38 aa, Artificial Sequence
  GFR-binding peptide
  MOD_RES (3), (4), (36), (38): Xaa is C or S
KAXXVPTELRPVQMRKIDENEKVVKKATVDMVVEGXGX

SEQ ID NO: 54983 - protein, 31 aa, Artificial Sequence; identical to SEQ ID NO: 16205
  GFR-binding peptide

SEQ ID NO: 54984 - protein, 37 aa, Artificial Sequence
  GFR-binding peptide
  MOD_RES (34), (36): Xaa is C or S
  MOD_RES (14), (15), (16), (17), (18): Xaa is A or G
  MOD_RES (19), (20), (21), (22): Xaa is A or G or is absent
APTKLRSVKVAKVXXXXXXXXXKEVQVNMVVRSXGXH

SEQ ID NO: 54985 - protein, 42 aa, Artificial Sequence; identical to SEQ ID NO: 19432
  GFR-binding peptide
  MOD_RES (5), (42): Xaa is C or S

SEQ ID NO: 54986 - protein, 35 aa, Artificial Sequence
  GFR-binding peptide
  MOD_RES (2), (2): Xaa is C or S
EXVPTEEEPLPMVYYRIKPHQGQHEQLSNFLQHNK

SEQ ID NO: 54987 - protein, 33 aa, Artificial Sequence
  GFR-binding peptide
  MOD_RES (1), (33): Xaa is C or S
XVPTELSNITMQIMDEYDKVVIGEMSEMVVEGX

SEQ ID NO: 54988 - protein, 36 aa, Artificial Sequence
  GFR-binding peptide
  MOD_RES (33), (35): Xaa is C or S
  MOD_RES (14), (15), (16), (17), (18): Xaa is A or G
  MOD_RES (19), (20), (21), (22): Xaa is A or G or is absent
VPQALRSVKIAKVXXXXXXXXXKEVQVMIVRSXKXS

SEQ ID NO: 54989 - protein, 38 aa, Artificial Sequence; identical to SEQ ID NO: 19434
  GFR-binding peptide
  MOD_RES (1), (35), (37): Xaa is C or S
  MOD_RES (15), (16), (17), (18), (19): Xaa is A or G
  MOD_RES (20), (21), (22), (23): Xaa is A or G or is absent

SEQ ID NO: 54990 - protein, 34 aa, Artificial Sequence; identical to SEQ ID NO: 16206
  GFR-binding peptide
  MOD_RES (32), (34): Xaa is C or S

SEQ ID NO: 54991 - protein, 34 aa, Artificial Sequence
  GFR-binding peptide
  MOD_RES (1), (1): Xaa is C or S
XVPTEEEPLTMLYYRIKPHQGQHEQLSNFLQHNK

SEQ ID NO: 54992 - protein, 34 aa, Artificial Sequence
  GFR-binding peptide
  MOD_RES (1), (2), (33): Xaa is C or S
XXVPQDLRSVKIAKVVGRTPKVKEVQVMVVKSXK

SEQ ID NO: 54993 - protein, 39 aa, Artificial Sequence
  GFR-binding peptide
  MOD_RES (7), (39): Xaa is C or S
HVTKPTXAPTKLRSVKVAKVDDSSNVIKEVQVNMVVRSX

SEQ ID NO: 54994 - protein, 36 aa, Artificial Sequence; identical to SEQ ID NO: 19436
  GFR-binding peptide
  MOD_RES (2), (2): Xaa is C or S

SEQ ID NO: 54995 - protein, 36 aa, Artificial Sequence
  GFR-binding peptide
  MOD_RES (33), (35): Xaa is C or S
  MOD_RES (14), (15), (16), (17), (18): Xaa is A or G
  MOD_RES (19), (20), (21), (22): Xaa is A or G or is absent
VSQDLSNITIQIMXXXXXXXXXIGEMSMIVKSXKXS

SEQ ID NO: 54996 - protein, 35 aa, Artificial Sequence
  GFR-binding peptide
  MOD_RES (3), (4), (35): Xaa is C or S
SPXXVPQDLRSVKIAKVVGRTPKVKEVQVMVVKSX

SEQ ID NO: 54997 - protein, 36 aa, Artificial Sequence
  GFR-binding peptide
  MOD_RES (2), (2): Xaa is C or S
  MOD_RES (18), (19), (20), (21), (22): Xaa is A or G
  MOD_RES (23), (24), (25), (26): Xaa is A or G or is absent
KXQPSRVHHEPLTVLYYXXXXXXXXXEQLSNRLEEH

SEQ ID NO: 54998 - protein, 37 aa, Artificial Sequence; identical to SEQ ID NO: 39945
  GFR-binding peptide
  MOD_RES (3), (4), (37): Xaa is C or S
  MOD_RES (18), (19), (20), (21), (22): Xaa is A or G
  MOD_RES (23), (24), (25), (26): Xaa is A or G or is absent

SEQ ID NO: 54999 - protein, 35 aa, Artificial Sequence; identical to SEQ ID NO: 19440
  GFR-binding peptide

SEQ ID NO: 55000 - protein, 37 aa, Artificial Sequence
  GFR-binding peptide
  MOD_RES (36), (36): Xaa is C or S
PSRVHHEPLTVLYYEYVRKKPKLEQLSNRLEEHLEXA

SEQ ID NO: 55001 - protein, 33 aa, Artificial Sequence
  GFR-binding peptide
  MOD_RES (1), (2), (33): Xaa is C or S
XXVPQALRPVQIRKIVGRKPKVKKATVMIVRSX

SEQ ID NO: 55002 - protein, 40 aa, Artificial Sequence; identical to SEQ ID NO: 16211
  GFR-binding peptide
  MOD_RES (3), (4), (37), (39): Xaa is C or S
  MOD_RES (18), (19), (20), (21), (22): Xaa is A or G
  MOD_RES (23), (24), (25), (26): Xaa is A or G or is absent

SEQ ID NO: 55003 - protein, 35 aa, Artificial Sequence
  GFR-binding peptide
  MOD_RES (1), (35): Xaa is C or S
  MOD_RES (15), (16), (17), (18), (19): Xaa is A or G
  MOD_RES (20), (21), (22), (23): Xaa is A or G or is absent
XVPTELRPVQMRKIXXXXXXXXXKKATVEMVVEGX

SEQ ID NO: 55004 - protein, 37 aa, Artificial Sequence; identical to SEQ ID NO: 19444
  GFR-binding peptide
  MOD_RES (35), (37): Xaa is C or S

SEQ ID NO: 55005 - protein, 39 aa, Artificial Sequence; identical to SEQ ID NO: 19446
  GFR-binding peptide
  MOD_RES (1), (38): Xaa is C or S
  MOD_RES (17), (18), (19), (20), (21): Xaa is A or G
  MOD_RES (22), (23), (24), (25): Xaa is A or G or is absent

SEQ ID NO: 55006 - protein, 37 aa, Artificial Sequence; identical to SEQ ID NO: 19447
  GFR-binding peptide
  MOD_RES (36), (36): Xaa is C or S
  MOD_RES (15), (16), (17), (18), (19): Xaa is A or G
  MOD_RES (20), (21), (22), (23): Xaa is A or G or is absent

SEQ ID NO: 55007 - protein, 39 aa, Artificial Sequence; identical to SEQ ID NO: 16213
  GFR-binding peptide
  MOD_RES (6), (7): Xaa is C or S
  MOD_RES (21), (22), (23), (24), (25): Xaa is A or G
  MOD_RES (26), (27), (28), (29): Xaa is A or G or is absent

SEQ ID NO: 55008 - protein, 41 aa, Artificial Sequence
  GFR-binding peptide
  MOD_RES (5), (5): Xaa is C or S
SSVKXQPSRVHHEPLTVLYYEYVRKKPKLEQLSNRLEEHLE

SEQ ID NO: 55009 - protein, 39 aa, Artificial Sequence; identical to SEQ ID NO: 19448
  GFR-binding peptide
  MOD_RES (2), (39): Xaa is C or S

SEQ ID NO: 55010 - protein, 41 aa, Artificial Sequence
  GFR-binding peptide
  MOD_RES (7), (41): Xaa is C or S
  MOD_RES (21), (22), (23), (24), (25): Xaa is A or G
  MOD_RES (26), (27), (28), (29): Xaa is A or G or is absent
HVTKPTXAPTKLSNITVQIMXXXXXXXXXIGEMSNMVVRSX

SEQ ID NO: 55011 - protein, 37 aa, Artificial Sequence; identical to SEQ ID NO: 19450
  GFR-binding peptide
  MOD_RES (35), (37): Xaa is C or S

SEQ ID NO: 55012 - protein, 34 aa, Artificial Sequence
  GFR-binding peptide
  MOD_RES (1), (32), (34): Xaa is C or S
XVSQDLRSVKIAKVIGKTPKIKEVQVMIVKSXKX

SEQ ID NO: 55013 - protein, 42 aa, Artificial Sequence
  GFR-binding peptide
  MOD_RES (4), (5), (39), (41): Xaa is C or S
  MOD_RES (19), (20), (21), (22), (23): Xaa is A or G
  MOD_RES (24), (25), (26), (27): Xaa is A or G or is absent
PKPXXAPTKLSNITVQIMXXXXXXXXXIGEMSNMVVRSXGXH

SEQ ID NO: 55014 - protein, 32 aa, Artificial Sequence
  GFR-binding peptide
  MOD_RES (1), (32): Xaa is C or S
XVPQALRPVQIRKIVGRKPKVKKATVMIVRSX

SEQ ID NO: 55015 - protein, 42 aa, Artificial Sequence; identical to SEQ ID NO: 19455
  GFR-binding peptide
  MOD_RES (5), (42): Xaa is C or S
  MOD_RES (21), (22), (23), (24), (25): Xaa is A or G
  MOD_RES (26), (27), (28), (29): Xaa is A or G or is absent

SEQ ID NO: 55016 - protein, 39 aa, Artificial Sequence
  GFR-binding peptide
  MOD_RES (5), (6), (37), (39): Xaa is C or S
SASPXXVPQDLSNITIQIMVGRTPKVIGEMSMVVKSXKX

SEQ ID NO: 55017 - protein, 36 aa, Artificial Sequence
  GFR-binding peptide
  MOD_RES (1), (2), (35): Xaa is C or S
  MOD_RES (16), (17), (18), (19), (20): Xaa is A or G
  MOD_RES (21), (22), (23), (24): Xaa is A or G or is absent
XXVPQDLRPVQIRKIXXXXXXXXXKKATVMVVKSXK

SEQ ID NO: 55018 - protein, 38 aa, Artificial Sequence; identical to SEQ ID NO: 16221
  GFR-binding peptide
  MOD_RES (4), (5): Xaa is C or S
  MOD_RES (19), (20), (21), (22), (23): Xaa is A or G
  MOD_RES (24), (25), (26), (27): Xaa is A or G or is absent

SEQ ID NO: 55019 - protein, 33 aa, Artificial Sequence
  GFR-binding peptide
  MOD_RES (31), (33): Xaa is C or S
VSQDLRPVQIRKIIGKTPKIKKATVMIVKSXKX

SEQ ID NO: 55020 - protein, 38 aa, Artificial Sequence
  GFR-binding peptide
  MOD_RES (4), (38): Xaa is C or S
  MOD_RES (18), (19), (20), (21), (22): Xaa is A or G
  MOD_RES (23), (24), (25), (26): Xaa is A or G or is absent
KPTXAPTKLSNITVQIMXXXXXXXXXIGEMSNMVVRSX

SEQ ID NO: 55021 - protein, 41 aa, Artificial Sequence
  GFR-binding peptide
  MOD_RES (3), (4), (38), (40): Xaa is C or S
  MOD_RES (18), (19), (20), (21), (22): Xaa is A or G
  MOD_RES (23), (24), (25), (26): Xaa is A or G or is absent
KAXXVPTELRSVKMAKVXXXXXXXXXKEVQVDMVVEGXGXR

SEQ ID NO: 55022 - protein, 33 aa, Artificial Sequence; identical to SEQ ID NO: 16223
  GFR-binding peptide
  MOD_RES (1), (33): Xaa is C or S

SEQ ID NO: 55023 - protein, 33 aa, Artificial Sequence; identical to SEQ ID NO: 16226
  GFR-binding peptide
  MOD_RES (31), (33): Xaa is C or S

SEQ ID NO: 55024 - protein, 39 aa, Artificial Sequence
  GFR-binding peptide
  MOD_RES (5), (6), (38): Xaa is C or S
VPKPXXAPTKLRSVKVAKVDDSSNVIKEVQVNMVVRSXG

SEQ ID NO: 55025 - protein, 43 aa, Artificial Sequence; identical to SEQ ID NO: 19460
  GFR-binding peptide
  MOD_RES (5), (42): Xaa is C or S

SEQ ID NO: 55026 - protein, 40 aa, Artificial Sequence
  GFR-binding peptide
  MOD_RES (7), (39): Xaa is C or S
HVTKPTXAPTKLSNITVQIMDDSSNVIIGEMSNMVVRSXG

SEQ ID NO: 55027 - protein, 33 aa, Artificial Sequence; identical to SEQ ID NO: 16230
  GFR-binding peptide
  MOD_RES (2), (3): Xaa is C or S

SEQ ID NO: 55028 - protein, 34 aa, Artificial Sequence; identical to SEQ ID NO: 16231
  GFR-binding peptide
  MOD_RES (1), (2): Xaa is C or S
  MOD_RES (16), (17), (18), (19), (20): Xaa is A or G
  MOD_RES (21), (22), (23), (24): Xaa is A or G or is absent

SEQ ID NO: 55029 - protein, 38 aa, Artificial Sequence; identical to SEQ ID NO: 19461
  GFR-binding peptide
  MOD_RES (3), (3): Xaa is C or S

SEQ ID NO: 55030 - protein, 43 aa, Artificial Sequence; identical to SEQ ID NO: 16232
  GFR-binding peptide
  MOD_RES (5), (6), (40), (42): Xaa is C or S
  MOD_RES (20), (21), (22), (23), (24): Xaa is A or G
  MOD_RES (25), (26), (27), (28): Xaa is A or G or is absent

SEQ ID NO: 55031 - protein, 33 aa, Artificial Sequence
  GFR-binding peptide
  MOD_RES (32), (32): Xaa is C or S
APTQLRSVKVAKVDDSSNVIKEVQVNMVVRAXG

SEQ ID NO: 55032 - protein, 38 aa, Artificial Sequence
  GFR-binding peptide
  MOD_RES (3), (4), (35), (37): Xaa is C or S
SPXXVPQDLRSVKIAKVVGRTPKVKEVQVMVVKSXKXS

SEQ ID NO: 55033 - protein, 39 aa, Artificial Sequence; identical to SEQ ID NO: 16235
  GFR-binding peptide
  MOD_RES (4), (5), (39): Xaa is C or S
  MOD_RES (19), (20), (21), (22), (23): Xaa is A or G
  MOD_RES (24), (25), (26), (27): Xaa is A or G or is absent

SEQ ID NO: 55034 - protein, 44 aa, Artificial Sequence; identical to SEQ ID NO: 19466
  GFR-binding peptide
  MOD_RES (4), (41), (43): Xaa is C or S
  MOD_RES (20), (21), (22), (23), (24): Xaa is A or G
  MOD_RES (25), (26), (27), (28): Xaa is A or G or is absent

SEQ ID NO: 55035 - protein, 38 aa, Artificial Sequence; identical to SEQ ID NO: 16236
  GFR-binding peptide
  MOD_RES (1), (35), (37): Xaa is C or S
  MOD_RES (15), (16), (17), (18), (19): Xaa is A or G
  MOD_RES (20), (21), (22), (23): Xaa is A or G or is absent

SEQ ID NO: 55036 - protein, 40 aa, Artificial Sequence; identical to SEQ ID NO: 19468
  GFR-binding peptide
  MOD_RES (7), (7): Xaa is C or S
  MOD_RES (21), (22), (23), (24), (25): Xaa is A or G
  MOD_RES (26), (27), (28), (29): Xaa is A or G or is absent

SEQ ID NO: 55037 - protein, 37 aa, Artificial Sequence
  GFR-binding peptide
  MOD_RES (4), (5): Xaa is C or S
  MOD_RES (19), (20), (21), (22), (23): Xaa is A or G
  MOD_RES (24), (25), (26), (27): Xaa is A or G or is absent
PKPXXAPTKLRSVKVAKVXXXXXXXXXKEVQVNMVVR

SEQ ID NO: 55038 - protein, 36 aa, Artificial Sequence; identical to SEQ ID NO: 16238
  GFR-binding peptide
  MOD_RES (4), (5): Xaa is C or S

SEQ ID NO: 55039 - protein, 34 aa, Artificial Sequence; identical to SEQ ID NO: 19469
  GFR-binding peptide
  MOD_RES (15), (16), (17), (18), (19): Xaa is A or G
  MOD_RES (20), (21), (22), (23): Xaa is A or G or is absent

SEQ ID NO: 55040 - protein, 40 aa, Artificial Sequence
  GFR-binding peptide
  MOD_RES (3), (4), (37), (39): Xaa is C or S
  MOD_RES (18), (19), (20), (21), (22): Xaa is A or G
  MOD_RES (23), (24), (25), (26): Xaa is A or G or is absent
APXXVPQALSNITIQIMXXXXXXXXXIGEMSMIVRSXKXS

SEQ ID NO: 55041 - protein, 42 aa, Artificial Sequence; identical to SEQ ID NO: 19471
  GFR-binding peptide
  MOD_RES (4), (41): Xaa is C or S
  MOD_RES (20), (21), (22), (23), (24): Xaa is A or G
  MOD_RES (25), (26), (27), (28): Xaa is A or G or is absent

SEQ ID NO: 55042 - protein, 35 aa, Artificial Sequence; identical to SEQ ID NO: 16240
  GFR-binding peptide
  MOD_RES (3), (35): Xaa is C or S

SEQ ID NO: 55043 - protein, 41 aa, Artificial Sequence
  GFR-binding peptide
  MOD_RES (4), (41): Xaa is C or S
SVKXQPSRVHHEPLPVVYYEYVRKKPKLEQLSNRLEEHLEX

SEQ ID NO: 55044 - protein, 37 aa, Artificial Sequence
  GFR-binding peptide
  MOD_RES (2), (3), (34), (36): Xaa is C or S
PXXVSQDLRSVKIAKVIGKTPKIKEVQVMIVKSXKXS

SEQ ID NO: 55045 - protein, 42 aa, Artificial Sequence; identical to SEQ ID NO: 16242
  GFR-binding peptide
  MOD_RES (6), (7), (39), (41): Xaa is C or S

SEQ ID NO: 55046 - protein, 33 aa, Artificial Sequence
  GFR-binding peptide
  MOD_RES (14), (15), (16), (17), (18): Xaa is A or G
  MOD_RES (19), (20), (21), (22): Xaa is A or G or is absent
APTKLRPVQVRKIXXXXXXXXXKKATVNMVVRS

SEQ ID NO: 55047 - protein, 34 aa, Artificial Sequence
  GFR-binding peptide
  MOD_RES (3), (4): Xaa is C or S
KAXXVPTELRPVQMRKIDEYDKVVKKATVEMVVE

SEQ ID NO: 55048 - protein, 38 aa, Artificial Sequence; identical to SEQ ID NO: 19479
  GFR-binding peptide
  MOD_RES (37), (37): Xaa is C or S
  MOD_RES (16), (17), (18), (19), (20): Xaa is A or G
  MOD_RES (21), (22), (23), (24): Xaa is A or G or is absent

SEQ ID NO: 55049 - protein, 38 aa, Artificial Sequence; identical to SEQ ID NO: 19480
  GFR-binding peptide
  MOD_RES (36), (38): Xaa is C or S
  MOD_RES (15), (16), (17), (18), (19): Xaa is A or G
  MOD_RES (20), (21), (22), (23): Xaa is A or G or is absent

SEQ ID NO: 55050 - protein, 36 aa, Artificial Sequence
  GFR-binding peptide
  MOD_RES (3), (35): Xaa is C or S
PTXAPTKLSNITVQIMDDSSNVIIGEMSNMVVRSXG

SEQ ID NO: 55051 - protein, 37 aa, Artificial Sequence; identical to SEQ ID NO: 19482
  GFR-binding peptide
  MOD_RES (4), (4): Xaa is C or S
  MOD_RES (18), (19), (20), (21), (22): Xaa is A or G
  MOD_RES (23), (24), (25), (26): Xaa is A or G or is absent

SEQ ID NO: 55052 - protein, 36 aa, Artificial Sequence
  GFR-binding peptide
  MOD_RES (3), (4): Xaa is C or S
  MOD_RES (18), (19), (20), (21), (22): Xaa is A or G
  MOD_RES (23), (24), (25), (26): Xaa is A or G or is absent
KAXXVPTELRPVQMRKIXXXXXXXXXKKATVEMVVE

SEQ ID NO: 55053 - protein, 36 aa, Artificial Sequence
  GFR-binding peptide
  MOD_RES (4), (5), (36): Xaa is C or S
AAPXXVPQALRPVQIRKIVGRKPKVKKATVMIVRSX

SEQ ID NO: 55054 - protein, 41 aa, Artificial Sequence
  GFR-binding peptide
  MOD_RES (6), (7), (38), (40): Xaa is C or S
ASAAPXXVPQALSNITIQIMVGRKPKVIGEMSMIVRSXKXS

SEQ ID NO: 55055 - protein, 39 aa, Artificial Sequence; identical to SEQ ID NO: 16248
  GFR-binding peptide
  MOD_RES (3), (4), (36), (38): Xaa is C or S

SEQ ID NO: 55056 - protein, 38 aa, Artificial Sequence; identical to SEQ ID NO: 19486
  GFR-binding peptide
  MOD_RES (6), (6): Xaa is C or S

SEQ ID NO: 55057 - protein, 36 aa, Artificial Sequence
  GFR-binding peptide
  MOD_RES (2), (3), (36): Xaa is C or S
  MOD_RES (17), (18), (19), (20), (21): Xaa is A or G
  MOD_RES (22), (23), (24), (25): Xaa is A or G or is absent
PXXVPQDLRPVQIRKIXXXXXXXXXKKATVMVVKSX

SEQ ID NO: 55058 - protein, 38 aa, Artificial Sequence; identical to SEQ ID NO: 16255
  GFR-binding peptide
  MOD_RES (6), (7), (38): Xaa is C or S

SEQ ID NO: 55059 - protein, 41 aa, Artificial Sequence; identical to SEQ ID NO: 19491
  GFR-binding peptide
  MOD_RES (1), (38), (40): Xaa is C or S
  MOD_RES (17), (18), (19), (20), (21): Xaa is A or G
  MOD_RES (22), (23), (24), (25): Xaa is A or G or is absent

SEQ ID NO: 55060 - protein, 40 aa, Artificial Sequence; identical to SEQ ID NO: 19494
  GFR-binding peptide
  MOD_RES (3), (40): Xaa is C or S
  MOD_RES (19), (20), (21), (22), (23): Xaa is A or G
  MOD_RES (24), (25), (26), (27): Xaa is A or G or is absent

SEQ ID NO: 55061 - protein, 38 aa, Artificial Sequence
  GFR-binding peptide
  MOD_RES (3), (37): Xaa is C or S
LEXVPTEEEPLPMVYYRIKPHQGQHEQLSNFLQHNKXE

SEQ ID NO: 55062 - protein, 35 aa, Artificial Sequence
  GFR-binding peptide
  MOD_RES (1), (32), (34): Xaa is C or S
XVPQALSNITIQIMVGRKPKVIGEMSMIVRSXKXS

SEQ ID NO: 55063 - protein, 34 aa, Artificial Sequence
  GFR-binding peptide
  MOD_RES (1), (32), (34): Xaa is C or S
XVPQDLRPVQIRKIVGRTPKVKKATVMVVKSXKX

SEQ ID NO: 55064 - protein, 35 aa, Artificial Sequence
  GFR-binding peptide
  MOD_RES (34), (34): Xaa is C or S
  MOD_RES (14), (15), (16), (17), (18): Xaa is A or G
  MOD_RES (19), (20), (21), (22): Xaa is A or G or is absent
APTKLSNITVQIMXXXXXXXXXIGEMSNMVVRSXG

SEQ ID NO: 55065 - protein, 43 aa, Artificial Sequence
  GFR-binding peptide
  MOD_RES (3), (40), (42): Xaa is C or S
VKXQPSRVHHEPLPVVYYEYVRKKPKLEQLSNRLEEHLEXAXA

SEQ ID NO: 55066 - protein, 40 aa, Artificial Sequence
  GFR-binding peptide
  MOD_RES (4), (5), (37), (39): Xaa is C or S
PKAXXVPTELRSVKMAKVDENEKVVKEVQVDMVVEGXGXR

SEQ ID NO: 55067 - protein, 36 aa, Artificial Sequence
  GFR-binding peptide
  MOD_RES (33), (35): Xaa is C or S
  MOD_RES (14), (15), (16), (17), (18): Xaa is A or G
  MOD_RES (19), (20), (21), (22): Xaa is A or G or is absent
VPQALRPVQIRKIXXXXXXXXXKKATVMIVRSXKXS

SEQ ID NO: 55068 - protein, 35 aa, Artificial Sequence
  GFR-binding peptide
  MOD_RES (3), (4): Xaa is C or S
KPXXAPTQLRSVKVAKVDDSSNVIKEVQVNMVVRA

SEQ ID NO: 55069 - protein, 39 aa, Artificial Sequence; identical to SEQ ID NO: 19495
  GFR-binding peptide
  MOD_RES (4), (4): Xaa is C or S
  MOD_RES (20), (21), (22), (23), (24): Xaa is A or G
  MOD_RES (25), (26), (27), (28): Xaa is A or G or is absent

SEQ ID NO: 55070 - protein, 40 aa, Artificial Sequence; identical to SEQ ID NO: 16260
  GFR-binding peptide
  MOD_RES (5), (37), (39): Xaa is C or S

SEQ ID NO: 55071 - protein, 41 aa, Artificial Sequence; identical to SEQ ID NO: 16261
  GFR-binding peptide
  MOD_RES (4), (5), (38), (40): Xaa is C or S
  MOD_RES (19), (20), (21), (22), (23): Xaa is A or G
  MOD_RES (24), (25), (26), (27): Xaa is A or G or is absent

SEQ ID NO: 55072 - protein, 35 aa, Artificial Sequence
  GFR-binding peptide
  MOD_RES (2), (2): Xaa is C or S
  MOD_RES (16), (17), (18), (19), (20): Xaa is A or G
  MOD_RES (21), (22), (23), (24): Xaa is A or G or is absent
TXAPTKLRPVQVRKIXXXXXXXXXKKATVNMVVRS

SEQ ID NO: 55073 - protein, 32 aa, Artificial Sequence; identical to SEQ ID NO: 19496
  GFR-binding peptide
  MOD_RES (14), (15), (16), (17), (18): Xaa is A or G
  MOD_RES (19), (20), (21), (22): Xaa is A or G or is absent

SEQ ID NO: 55074 - protein, 33 aa, Artificial Sequence
  GFR-binding peptide
  MOD_RES (1), (2): Xaa is C or S
XXVPTELRSVKMAKVDEYDKVVKEVQVEMVVEG

SEQ ID NO: 55075 - protein, 37 aa, Artificial Sequence; identical to SEQ ID NO: 19497
  GFR-binding peptide
  MOD_RES (2), (2): Xaa is C or S

SEQ ID NO: 55076 - protein, 41 aa, Artificial Sequence; identical to SEQ ID NO: 16266
  GFR-binding peptide
  MOD_RES (6), (7), (39), (41): Xaa is C or S

SEQ ID NO: 55077 - protein, 33 aa, Artificial Sequence
  GFR-binding peptide
  MOD_RES (2), (3): Xaa is C or S
PXXVPQDLSNITIQIMVGRTPKVIGEMSMVVKS

SEQ ID NO: 55078 - protein, 42 aa, Artificial Sequence; identical to SEQ ID NO: 19501
  GFR-binding peptide
  MOD_RES (4), (41): Xaa is C or S

SEQ ID NO: 55079 - protein, 44 aa, Artificial Sequence
  GFR-binding peptide
  MOD_RES (4), (41), (43): Xaa is C or S
SVKXQPSRVHHEPLPVVYYEYVRKKPKLEQLSNRLEEHLEXAXA

SEQ ID NO: 55080 - protein, 40 aa, Artificial Sequence; identical to SEQ ID NO: 19502
  GFR-binding peptide
  MOD_RES (5), (39): Xaa is C or S

SEQ ID NO: 55081 - protein, 36 aa, Artificial Sequence
  GFR-binding peptide
  MOD_RES (3), (4), (35): Xaa is C or S
APXXVPQALRPVQIRKIVGRKPKVKKATVMIVRSXK

SEQ ID NO: 55082 - protein, 42 aa, Artificial Sequence; identical to SEQ ID NO: 19504
  GFR-binding peptide
  MOD_RES (2), (39), (41): Xaa is C or S

SEQ ID NO: 55083 - protein, 44 aa, Artificial Sequence
  GFR-binding peptide
  MOD_RES (6), (7), (41), (43): Xaa is C or S
  MOD_RES (21), (22), (23), (24), (25): Xaa is A or G
  MOD_RES (26), (27), (28), (29): Xaa is A or G or is absent
KIPKAXXVPTELSNITMQIMXXXXXXXXXIGEMSDMVVEGXGXR

SEQ ID NO: 55084 - protein, 41 aa, Artificial Sequence
  GFR-binding peptide
  MOD_RES (4), (5), (38), (40): Xaa is C or S
  MOD_RES (19), (20), (21), (22), (23): Xaa is A or G
  MOD_RES (24), (25), (26), (27): Xaa is A or G or is absent
AAPXXVPQALSNITIQIMXXXXXXXXXIGEMSMIVRSXKXS

SEQ ID NO: 55085 - protein, 37 aa, Artificial Sequence
  GFR-binding peptide
  MOD_RES (6), (6): Xaa is C or S
VTKPTXAPTKLSNITVQIMDDSSNVIIGEMSNMVVRS

SEQ ID NO: 55086 - protein, 38 aa, Artificial Sequence; identical to SEQ ID NO: 16273
  GFR-binding peptide
  MOD_RES (2), (3), (36), (38): Xaa is C or S
  MOD_RES (17), (18), (19), (20), (21): Xaa is A or G
  MOD_RES (22), (23), (24), (25): Xaa is A or G or is absent

SEQ ID NO: 55087 - protein, 39 aa, Artificial Sequence
  GFR-binding peptide
  MOD_RES (3), (4), (38): Xaa is C or S
  MOD_RES (18), (19), (20), (21), (22): Xaa is A or G
  MOD_RES (23), (24), (25), (26): Xaa is A or G or is absent
KPXXAPTQLRSVKVAKVXXXXXXXXXKEVQVNMVVRAXG

SEQ ID NO: 55088 - protein, 36 aa, Artificial Sequence
  GFR-binding peptide
  MOD_RES (3), (3): Xaa is C or S
LEXVPTEEEPLTMLYYRIKPHQGQHEQLSNFLQHNK

SEQ ID NO: 55089 - protein, 40 aa, Artificial Sequence
  GFR-binding peptide
  MOD_RES (5), (6), (38), (40): Xaa is C or S
VPKPXXAPTKLRPVQVRKIDDSSNVIKKATVNMVVRSXGX

SEQ ID NO: 55090 - protein, 37 aa, Artificial Sequence; identical to SEQ ID NO: 16274
  GFR-binding peptide
  MOD_RES (1), (34), (36): Xaa is C or S
  MOD_RES (15), (16), (17), (18), (19): Xaa is A or G
  MOD_RES (20), (21), (22), (23): Xaa is A or G or is absent

SEQ ID NO: 55091 - protein, 37 aa, Artificial Sequence
  GFR-binding peptide
  MOD_RES (3), (4), (37): Xaa is C or S
  MOD_RES (18), (19), (20), (21), (22): Xaa is A or G
  MOD_RES (23), (24), (25), (26): Xaa is A or G or is absent
SPXXVSQDLSNITIQIMXXXXXXXXXIGEMSMIVKSX

SEQ ID NO: 55092 - protein, 39 aa, Artificial Sequence; identical to SEQ ID NO: 19507
  GFR-binding peptide
  MOD_RES (36), (38): Xaa is C or S
  MOD_RES (15), (16), (17), (18), (19): Xaa is A or G
  MOD_RES (20), (21), (22), (23): Xaa is A or G or is absent

SEQ ID NO: 55093 - protein, 44 aa, Artificial Sequence; identical to SEQ ID NO: 19510
  GFR-binding peptide
  MOD_RES (5), (42), (44): Xaa is C or S
  MOD_RES (21), (22), (23), (24), (25): Xaa is A or G
  MOD_RES (26), (27), (28), (29): Xaa is A or G or is absent

SEQ ID NO: 55094 - protein, 34 aa, Artificial Sequence
  GFR-binding peptide
  MOD_RES (1), (1): Xaa is C or S
  MOD_RES (15), (16), (17), (18), (19): Xaa is A or G
  MOD_RES (20), (21), (22), (23): Xaa is A or G or is absent
XAPTKLRSVKVAKVXXXXXXXXXKEVQVNMVVRS

SEQ ID NO: 55095 - protein, 34 aa, Artificial Sequence
  GFR-binding peptide
  MOD_RES (34), (34): Xaa is C or S
  MOD_RES (14), (15), (16), (17), (18): Xaa is A or G
  MOD_RES (19), (20), (21), (22): Xaa is A or G or is absent
APTQLRPVQVRKIXXXXXXXXXKKATVNMVVRAX

SEQ ID NO: 55096 - protein, 39 aa, Artificial Sequence
  GFR-binding peptide
  MOD_RES (2), (36), (38): Xaa is C or S
  MOD_RES (16), (17), (18), (19), (20): Xaa is A or G
  MOD_RES (21), (22), (23), (24): Xaa is A or G or is absent
TXAPTKLRPVQVRKIXXXXXXXXXKKATVNMVVRSXGXH

SEQ ID NO: 55097 - protein, 34 aa, Artificial Sequence
  GFR-binding peptide
  MOD_RES (1), (2): Xaa is C or S
  MOD_RES (16), (17), (18), (19), (20): Xaa is A or G
  MOD_RES (21), (22), (23), (24): Xaa is A or G or is absent
XXVPTELSNITMQIMXXXXXXXXXIGEMSDMVVE

SEQ ID NO: 55098 - protein, 44 aa, Artificial Sequence
  GFR-binding peptide
  MOD_RES (6), (7), (41), (43): Xaa is C or S
  MOD_RES (21), (22), (23), (24), (25): Xaa is A or G
  MOD_RES (26), (27), (28), (29): Xaa is A or G or is absent
TVPKPXXAPTQLSNITVQIMXXXXXXXXXIGEMSNMVVRAXGXH

SEQ ID NO: 55099 - protein, 44 aa, Artificial Sequence; identical to SEQ ID NO: 19511
  GFR-binding peptide
  MOD_RES (5), (42), (44): Xaa is C or S

SEQ ID NO: 55100 - protein, 34 aa, Artificial Sequence
  GFR-binding peptide
PTQVQLEPLTVLYYEIVRKKPIFEQLSNTLEDHL

SEQ ID NO: 55101 - protein, 39 aa, Artificial Sequence; identical to SEQ ID NO: 16280
  GFR-binding peptide
  MOD_RES (5), (6), (37), (39): Xaa is C or S

SEQ ID NO: 55102 - protein, 41 aa, Artificial Sequence; identical to SEQ ID NO: 19515
  GFR-binding peptide
  MOD_RES (5), (5): Xaa is C or S

SEQ ID NO: 55103 - protein, 39 aa, Artificial Sequence; identical to SEQ ID NO: 16282
  GFR-binding peptide
  MOD_RES (2), (3), (36), (38): Xaa is C or S
  MOD_RES (17), (18), (19), (20), (21): Xaa is A or G
  MOD_RES (22), (23), (24), (25): Xaa is A or G or is absent

SEQ ID NO: 55104 - protein, 37 aa, Artificial Sequence
  GFR-binding peptide
  MOD_RES (1), (35), (37): Xaa is C or S
  MOD_RES (15), (16), (17), (18), (19): Xaa is A or G
  MOD_RES (20), (21), (22), (23): Xaa is A or G or is absent
XAPTKLRPVQVRKIXXXXXXXXXKKATVNMVVRSXGX

SEQ ID NO: 55105 - protein, 37 aa, Artificial Sequence; identical to SEQ ID NO: 19517
  GFR-binding peptide
  MOD_RES (2), (2): Xaa is C or S
  MOD_RES (18), (19), (20), (21), (22): Xaa is A or G
  MOD_RES (23), (24), (25), (26): Xaa is A or G or is absent

SEQ ID NO: 55106 - protein, 38 aa, Artificial Sequence; identical to SEQ ID NO: 16284
  GFR-binding peptide
  MOD_RES (3), (4), (38): Xaa is C or S
  MOD_RES (18), (19), (20), (21), (22): Xaa is A or G
  MOD_RES (23), (24), (25), (26): Xaa is A or G or is absent

SEQ ID NO: 55107 - protein, 37 aa, Artificial Sequence
  GFR-binding peptide
  MOD_RES (35), (37): Xaa is C or S
  MOD_RES (14), (15), (16), (17), (18): Xaa is A or G
  MOD_RES (19), (20), (21), (22): Xaa is A or G or is absent
TQVQLEPLPVVYYXXXXXXXXXEQLSNTLEDHLAXKX

SEQ ID NO: 55108 - protein, 34 aa, Artificial Sequence
  GFR-binding peptide
  MOD_RES (34), (34): Xaa is C or S
  MOD_RES (14), (15), (16), (17), (18): Xaa is A or G
  MOD_RES (19), (20), (21), (22): Xaa is A or G or is absent
APTKLSNITVQIMXXXXXXXXXIGEMSNMVVRSX

SEQ ID NO: 55109 - protein, 36 aa, Artificial Sequence; identical to SEQ ID NO: 19520
  GFR-binding peptide
  MOD_RES (34), (36): Xaa is C or S
  MOD_RES (14), (15), (16), (17), (18): Xaa is A or G
  MOD_RES (19), (20), (21), (22): Xaa is A or G or is absent

SEQ ID NO: 55110 - protein, 34 aa, Artificial Sequence
  GFR-binding peptide
  MOD_RES (34), (34): Xaa is C or S
  MOD_RES (14), (15), (16), (17), (18): Xaa is A or G
  MOD_RES (19), (20), (21), (22): Xaa is A or G or is absent
VPTELRSVKMAKVXXXXXXXXXKEVQVEMVVEGX

SEQ ID NO: 55111 - protein, 36 aa, Artificial Sequence; identical to SEQ ID NO: 19521
  GFR-binding peptide
  MOD_RES (3), (3): Xaa is C or S
  MOD_RES (17), (18), (19), (20), (21): Xaa is A or G
  MOD_RES (22), (23), (24), (25): Xaa is A or G or is absent

SEQ ID NO: 55112 - protein, 38 aa, Artificial Sequence
  GFR-binding peptide
  MOD_RES (1), (38): Xaa is C or S
XRPTQVQLEPLPVVYYEIVRKKPIFEQLSNTLEDHLAX

SEQ ID NO: 55113 - protein, 35 aa, Artificial Sequence
  GFR-binding peptide
  MOD_RES (1), (2): Xaa is C or S
  MOD_RES (16), (17), (18), (19), (20): Xaa is A or G
  MOD_RES (21), (22), (23), (24): Xaa is A or G or is absent
XXVPTELRPVQMRKIXXXXXXXXXKKATVEMVVEG

SEQ ID NO: 55114 - protein, 41 aa, Artificial Sequence
  GFR-binding peptide
  MOD_RES (5), (6), (39), (41): Xaa is C or S
  MOD_RES (20), (21), (22), (23), (24): Xaa is A or G
  MOD_RES (25), (26), (27), (28): Xaa is A or G or is absent
SASPXXVSQDLRPVQIRKIXXXXXXXXXKKATVMIVKSXKX

SEQ ID NO: 55115 - protein, 35 aa, Artificial Sequence
  GFR-binding peptide
  MOD_RES (1), (2), (34): Xaa is C or S
XXAPTKLRPVQVRKIDDSSNVIKKATVNMVVRSXG

SEQ ID NO: 55116 - protein, 38 aa, Artificial Sequence
  GFR-binding peptide
  MOD_RES (5), (5): Xaa is C or S
  MOD_RES (19), (20), (21), (22), (23): Xaa is A or G
  MOD_RES (24), (25), (26), (27): Xaa is A or G or is absent
TKPTXAPTKLRPVQVRKIXXXXXXXXXKKATVNMVVRS

SEQ ID NO: 55117 - protein, 33 aa, Artificial Sequence
  GFR-binding peptide
  MOD_RES (1), (2), (33): Xaa is C or S
XXVSQDLRPVQIRKIIGKTPKIKKATVMIVKSX

SEQ ID NO: 55118 - protein, 34 aa, Artificial Sequence; identical to SEQ ID NO: 16290
  GFR-binding peptide
  MOD_RES (33), (33): Xaa is C or S
  MOD_RES (14), (15), (16), (17), (18): Xaa is A or G
  MOD_RES (19), (20), (21), (22): Xaa is A or G or is absent

SEQ ID NO: 55119 - protein, 35 aa, Artificial Sequence
  GFR-binding peptide
  MOD_RES (4), (4): Xaa is C or S
KPTXAPTKLSNITVQIMDDSSNVIIGEMSNMVVRS

SEQ ID NO: 55120 - protein, 43 aa, Artificial Sequence; identical to SEQ ID NO: 19524
  GFR-binding peptide
  MOD_RES (4), (41), (43): Xaa is C or S

SEQ ID NO: 55121 - protein, 41 aa, Artificial Sequence; identical to SEQ ID NO: 19525
  GFR-binding peptide
  MOD_RES (2), (39), (41): Xaa is C or S
  MOD_RES (18), (19), (20), (21), (22): Xaa is A or G
  MOD_RES (23), (24), (25), (26): Xaa is A or G or is absent

SEQ ID NO: 55122 - protein, 40 aa, Artificial Sequence
  GFR-binding peptide
  MOD_RES (5), (6), (40): Xaa is C or S
  MOD_RES (20), (21), (22), (23), (24): Xaa is A or G
  MOD_RES (25), (26), (27), (28): Xaa is A or G or is absent
VPKPXXAPTKLRPVQVRKIXXXXXXXXXKKATVNMVVRSX

SEQ ID NO: 55123 - protein, 41 aa, Artificial Sequence; identical to SEQ ID NO: 19527
  GFR-binding peptide
  MOD_RES (6), (40): Xaa is C or S
  MOD_RES (20), (21), (22), (23), (24): Xaa is A or G
  MOD_RES (25), (26), (27), (28): Xaa is A or G or is absent

SEQ ID NO: 55124 - protein, 36 aa, Artificial Sequence
  GFR-binding peptide
  MOD_RES (3), (4): Xaa is C or S
  MOD_RES (18), (19), (20), (21), (22): Xaa is A or G
  MOD_RES (23), (24), (25), (26): Xaa is A or G or is absent
SPXXVPQDLSNITIQIMXXXXXXXXXIGEMSMVVKS

SEQ ID NO: 55125 - protein, 38 aa, Artificial Sequence
  GFR-binding peptide
  MOD_RES (6), (7): Xaa is C or S
SIPKAXXVPTELRPVQMRKIDEYDKVVKKATVEMVVEG

SEQ ID NO: 55126 - protein, 37 aa, Artificial Sequence; identical to SEQ ID NO: 16292
  GFR-binding peptide
  MOD_RES (6), (7): Xaa is C or S

SEQ ID NO: 55127 - protein, 38 aa, Artificial Sequence
  GFR-binding peptide
  MOD_RES (1), (38): Xaa is C or S
  MOD_RES (17), (18), (19), (20), (21): Xaa is A or G
  MOD_RES (22), (23), (24), (25): Xaa is A or G or is absent
XRPTQVQLEPLTVLYYXXXXXXXXXEQLSNTLEDHLAX

SEQ ID NO: 55128 - protein, 33 aa, Artificial Sequence; identical to SEQ ID NO: 16293
  GFR-binding peptide
  MOD_RES (1), (2): Xaa is C or S

SEQ ID NO: 55129 - protein, 38 aa, Artificial Sequence
  GFR-binding peptide
  MOD_RES (3), (4), (36), (38): Xaa is C or S
KAXXVPTELRPVQMRKIDEYDKVVKKATVEMVVEGXGX

SEQ ID NO: 55130 - protein, 38 aa, Artificial Sequence; identical to SEQ ID NO: 16294
  GFR-binding peptide
  MOD_RES (5), (5): Xaa is C or S
  MOD_RES (19), (20), (21), (22), (23): Xaa is A or G
  MOD_RES (24), (25), (26), (27): Xaa is A or G or is absent

SEQ ID NO: 55131 - protein, 39 aa, Artificial Sequence; identical to SEQ ID NO: 19534
  GFR-binding peptide
  MOD_RES (1), (38): Xaa is C or S
  MOD_RES (17), (18), (19), (20), (21): Xaa is A or G
  MOD_RES (22), (23), (24), (25): Xaa is A or G or is absent

SEQ ID NO: 55132 - protein, 40 aa, Artificial Sequence; identical to SEQ ID NO: 19535
  GFR-binding peptide
  MOD_RES (6), (40): Xaa is C or S
  MOD_RES (20), (21), (22), (23), (24): Xaa is A or G
  MOD_RES (25), (26), (27), (28): Xaa is A or G or is absent

SEQ ID NO: 55133 - protein, 37 aa, Artificial Sequence
  GFR-binding peptide
  MOD_RES (2), (3), (36): Xaa is C or S
  MOD_RES (17), (18), (19), (20), (21): Xaa is A or G
  MOD_RES (22), (23), (24), (25): Xaa is A or G or is absent
PXXVPQALSNITIQIMXXXXXXXXXIGEMSMIVRSXK

SEQ ID NO: 55134 - protein, 40 aa, Artificial Sequence
  GFR-binding peptide
  MOD_RES (3), (4), (38), (40): Xaa is C or S
  MOD_RES (18), (19), (20), (21), (22): Xaa is A or G
  MOD_RES (23), (24), (25), (26): Xaa is A or G or is absent
KAXXVPTELSNITMQIMXXXXXXXXXIGEMSEMVVEGXGX

SEQ ID NO: 55135 - protein, 41 aa, Artificial Sequence; identical to SEQ ID NO: 16302
  GFR-binding peptide
  MOD_RES (6), (7), (41): Xaa is C or S
  MOD_RES (21), (22), (23), (24), (25): Xaa is A or G
  MOD_RES (26), (27), (28), (29): Xaa is A or G or is absent

SEQ ID NO: 55136 - protein, 36 aa, Artificial Sequence
  GFR-binding peptide
  MOD_RES (2), (36): Xaa is C or S
  MOD_RES (16), (17), (18), (19), (20): Xaa is A or G
  MOD_RES (21), (22), (23), (24): Xaa is A or G or is absent
TXAPTKLSNITVQIMXXXXXXXXXIGEMSNMVVRSX

SEQ ID NO: 55137 - protein, 37 aa, Artificial Sequence
  GFR-binding peptide
  MOD_RES (1), (2), (34), (36): Xaa is C or S
XXAPTKLRPVQVRKIDDSSNVIKKATVNMVVRSXGXH

SEQ ID NO: 55138 - protein, 37 aa, Artificial Sequence
  GFR-binding peptide
  MOD_RES (4), (5): Xaa is C or S
  MOD_RES (19), (20), (21), (22), (23): Xaa is A or G
  MOD_RES (24), (25), (26), (27): Xaa is A or G or is absent
PKPXXAPTQLSNITVQIMXXXXXXXXXIGEMSNMVVR

SEQ ID NO: 55139 - protein, 36 aa, Artificial Sequence; identical to SEQ ID NO: 16305
  GFR-binding peptide
  MOD_RES (1), (2), (33), (35): Xaa is C or S

SEQ ID NO: 55140 - protein, 38 aa, Artificial Sequence
  GFR-binding peptide
  MOD_RES (35), (37): Xaa is C or S
  MOD_RES (14), (15), (16), (17), (18): Xaa is A or G
  MOD_RES (19), (20), (21), (22): Xaa is A or G or is absent
SRVHHEPLPVVYYXXXXXXXXXEQLSNRLEEHLEXAXA

SEQ ID NO: 55141 - protein, 43 aa, Artificial Sequence; identical to SEQ ID NO: 19536
  GFR-binding peptide
  MOD_RES (3), (40), (42): Xaa is C or S
  MOD_RES (19), (20), (21), (22), (23): Xaa is A or G
  MOD_RES (24), (25), (26), (27): Xaa is A or G or is absent

SEQ ID NO: 55142 - protein, 33 aa, Artificial Sequence; identical to SEQ ID NO: 16310
  GFR-binding peptide
  MOD_RES (1), (33): Xaa is C or S

SEQ ID NO: 55143 - protein, 39 aa, Artificial Sequence; identical to SEQ ID NO: 16311
  GFR-binding peptide
  MOD_RES (7), (39): Xaa is C or S

SEQ ID NO: 55144 - protein, 36 aa, Artificial Sequence
  GFR-binding peptide
  MOD_RES (1), (2), (33), (35): Xaa is C or S
XXVSQDLRPVQIRKIIGKTPKIKKATVMIVKSXKXS

SEQ ID NO: 55145 - protein, 36 aa, Artificial Sequence; identical to SEQ ID NO: 16317
  GFR-binding peptide
  MOD_RES (5), (6): Xaa is C or S

SEQ ID NO: 55146 - protein, 38 aa, Artificial Sequence; identical to SEQ ID NO: 16320
  GFR-binding peptide
  MOD_RES (6), (7): Xaa is C or S

SEQ ID NO: 55147 - protein, 37 aa, Artificial Sequence; identical to SEQ ID NO: 16322
  GFR-binding peptide
  MOD_RES (4), (5), (37): Xaa is C or S

SEQ ID NO: 55148 - protein, 37 aa, Artificial Sequence
  GFR-binding peptide
  MOD_RES (4), (5), (37): Xaa is C or S
PKPXXAPTQLRSVKVAKVDDSSNVIKEVQVNMVVRAX

SEQ ID NO: 55149 - protein, 41 aa, Artificial Sequence
  GFR-binding peptide
  MOD_RES (5), (39), (41): Xaa is C or S
  MOD_RES (19), (20), (21), (22), (23): Xaa is A or G
  MOD_RES (24), (25), (26), (27): Xaa is A or G or is absent
EGLEXVPTEEEPLPMVYYXXXXXXXXXEQLSNFLQHNKXEX

SEQ ID NO: 55150 - protein, 37 aa, Artificial Sequence; identical to SEQ ID NO: 16324
  GFR-binding peptide
  MOD_RES (3), (4), (35), (37): Xaa is C or S

SEQ ID NO: 55151 - protein, 44 aa, Artificial Sequence; identical to SEQ ID NO: 19539
  GFR-binding peptide
  MOD_RES (5), (42), (44): Xaa is C or S

SEQ ID NO: 55152 - protein, 36 aa, Artificial Sequence
  GFR-binding peptide
  MOD_RES (3), (4): Xaa is C or S
  MOD_RES (18), (19), (20), (21), (22): Xaa is A or G
  MOD_RES (23), (24), (25), (26): Xaa is A or G or is absent
KAXXVPTELRSVKMAKVXXXXXXXXXKEVQVEMVVE

SEQ ID NO: 55153 - protein, 42 aa, Artificial Sequence; identical to SEQ ID NO: 19540
  GFR-binding peptide
  MOD_RES (5), (42): Xaa is C or S
  MOD_RES (21), (22), (23), (24), (25): Xaa is A or G
  MOD_RES (26), (27), (28), (29): Xaa is A or G or is absent

SEQ ID NO: 55154 - protein, 38 aa, Artificial Sequence; identical to SEQ ID NO: 19541
  GFR-binding peptide
  MOD_RES (3), (3): Xaa is C or S

SEQ ID NO: 55155 - protein, 38 aa, Artificial Sequence; identical to SEQ ID NO: 19542
  GFR-binding peptide
  MOD_RES (35), (37): Xaa is C or S
  MOD_RES (14), (15), (16), (17), (18): Xaa is A or G
  MOD_RES (19), (20), (21), (22): Xaa is A or G or is absent

SEQ ID NO: 55156 - protein, 41 aa, Artificial Sequence
  GFR-binding peptide
  MOD_RES (1), (38), (40): Xaa is C or S
  MOD_RES (17), (18), (19), (20), (21): Xaa is A or G
  MOD_RES (22), (23), (24), (25): Xaa is A or G or is absent
XQPSRVHHEPLTVLYYXXXXXXXXXEQLSNRLEEHLEXAXA

SEQ ID NO: 55157 - protein, 38 aa, Artificial Sequence; identical to SEQ ID NO: 16325
  GFR-binding peptide
  MOD_RES (1), (2), (35), (37): Xaa is C or S
  MOD_RES (16), (17), (18), (19), (20): Xaa is A or G
  MOD_RES (21), (22), (23), (24): Xaa is A or G or is absent

SEQ ID NO: 55158 - protein, 41 aa, Artificial Sequence; identical to SEQ ID NO: 16326
  GFR-binding peptide
  MOD_RES (3), (4), (38), (40): Xaa is C or S
  MOD_RES (18), (19), (20), (21), (22): Xaa is A or G
  MOD_RES (23), (24), (25), (26): Xaa is A or G or is absent

SEQ ID NO: 55159 - protein, 33 aa, Artificial Sequence; identical to SEQ ID NO: 16327
  GFR-binding peptide
  MOD_RES (14), (15), (16), (17), (18): Xaa is A or G
  MOD_RES (19), (20), (21), (22): Xaa is A or G or is absent

SEQ ID NO: 55160 - protein, 42 aa, Artificial Sequence
  GFR-binding peptide
  MOD_RES (5), (6), (40), (42): Xaa is C or S
  MOD_RES (20), (21), (22), (23), (24): Xaa is A or G
  MOD_RES (25), (26), (27), (28): Xaa is A or G or is absent
VPKPXXAPTKLRSVKVAKVXXXXXXXXXKEVQVNMVVRSXGX

SEQ ID NO: 55161 - protein, 30 aa, Artificial Sequence
  GFR-binding peptide
VPQALRSVKIAKVVGRKPKVKEVQVMIVRS

SEQ ID NO: 55162 - protein, 34 aa, Artificial Sequence; identical to SEQ ID NO: 19544
  GFR-binding peptide

SEQ ID NO: 55163 - protein, 37 aa, Artificial Sequence
  GFR-binding peptide
  MOD_RES (4), (4): Xaa is C or S
  MOD_RES (18), (19), (20), (21), (22): Xaa is A or G
  MOD_RES (23), (24), (25), (26): Xaa is A or G or is absent
KPTXAPTKLRSVKVAKVXXXXXXXXXKEVQVNMVVRS

SEQ ID NO: 55164 - protein, 33 aa, Artificial Sequence
  GFR-binding peptide
  MOD_RES (1), (2): Xaa is C or S
XXAPTQLRSVKVAKVDDSSNVIKEVQVNMVVRA

SEQ ID NO: 55165 - protein, 39 aa, Artificial Sequence
  GFR-binding peptide
  MOD_RES (5), (6): Xaa is C or S
  MOD_RES (20), (21), (22), (23), (24): Xaa is A or G
  MOD_RES (25), (26), (27), (28): Xaa is A or G or is absent
IPKAXXVPTELSNITMQIMXXXXXXXXXIGEMSDMVVEG

SEQ ID NO: 55166 - protein, 35 aa, Artificial Sequence
  GFR-binding peptide
  MOD_RES (34), (34): Xaa is C or S
  MOD_RES (14), (15), (16), (17), (18): Xaa is A or G
  MOD_RES (19), (20), (21), (22): Xaa is A or G or is absent
APTQLRPVQVRKIXXXXXXXXXKKATVNMVVRAXG

SEQ ID NO: 55167 - protein, 37 aa, Artificial Sequence
  GFR-binding peptide
  MOD_RES (4), (5), (37): Xaa is C or S
PKPXXAPTKLRPVQVRKIDDSSNVIKKATVNMVVRSX

SEQ ID NO: 55168 - protein, 35 aa, Artificial Sequence; identical to SEQ ID NO: 19548
  GFR-binding peptide
  MOD_RES (1), (1): Xaa is C or S
  MOD_RES (17), (18), (19), (20), (21): Xaa is A or G
  MOD_RES (22), (23), (24), (25): Xaa is A or G or is absent

SEQ ID NO: 55169 - protein, 41 aa, Artificial Sequence
  GFR-binding peptide
  MOD_RES (4), (41): Xaa is C or S
  MOD_RES (20), (21), (22), (23), (24): Xaa is A or G
  MOD_RES (25), (26), (27), (28): Xaa is A or G or is absent
NVQXRPTQVQLEPLPVVYYXXXXXXXXXEQLSNTLEDHLAX

SEQ ID NO: 55170 - protein, 36 aa, Artificial Sequence; identical to SEQ ID NO: 19549
  GFR-binding peptide
  MOD_RES (35), (35): Xaa is C or S
  MOD_RES (14), (15), (16), (17), (18): Xaa is A or G
  MOD_RES (19), (20), (21), (22): Xaa is A or G or is absent

SEQ ID NO: 55171 - protein, 39 aa, Artificial Sequence; identical to SEQ ID NO: 16331
  GFR-binding peptide
  MOD_RES (4), (36), (38): Xaa is C or S

SEQ ID NO: 55172 - protein, 38 aa, Artificial Sequence
  GFR-binding peptide
  MOD_RES (6), (6): Xaa is C or S
  MOD_RES (20), (21), (22), (23), (24): Xaa is A or G
  MOD_RES (25), (26), (27), (28): Xaa is A or G or is absent
DEGLEXVPTEEEPLPMVYYXXXXXXXXXEQLSNFLQHN

SEQ ID NO: 55173 - protein, 33 aa, Artificial Sequence
  GFR-binding peptide
  MOD_RES (2), (3): Xaa is C or S
PXXVPQDLRSVKIAKVVGRTPKVKEVQVMVVKS

SEQ ID NO: 55174 - protein, 37 aa, Artificial Sequence
  GFR-binding peptide
  MOD_RES (4), (5), (36): Xaa is C or S
ASPXXVPQDLRSVKIAKVVGRTPKVKEVQVMVVKSXK

SEQ ID NO: 55175 - protein, 41 aa, Artificial Sequence
  GFR-binding peptide
  MOD_RES (5), (6), (39), (41): Xaa is C or S
  MOD_RES (20), (21), (22), (23), (24): Xaa is A or G
  MOD_RES (25), (26), (27), (28): Xaa is A or G or is absent
SAAPXXVPQALRPVQIRKIXXXXXXXXXKKATVMIVRSXKX

SEQ ID NO: 55176 - protein, 36 aa, Artificial Sequence; identical to SEQ ID NO: 16334
  GFR-binding peptide
  MOD_RES (5), (6): Xaa is C or S

SEQ ID NO: 55177 - protein, 34 aa, Artificial Sequence; identical to SEQ ID NO: 19551
  GFR-binding peptide
  MOD_RES (15), (16), (17), (18), (19): Xaa is A or G
  MOD_RES (20), (21), (22), (23): Xaa is A or G or is absent

SEQ ID NO: 55178 - protein, 35 aa, Artificial Sequence; identical to SEQ ID NO: 19552
  GFR-binding peptide
  MOD_RES (1), (1): Xaa is C or S
  MOD_RES (17), (18), (19), (20), (21): Xaa is A or G
  MOD_RES (22), (23), (24), (25): Xaa is A or G or is absent

SEQ ID NO: 55179 - protein, 35 aa, Artificial Sequence; identical to SEQ ID NO: 16335
  GFR-binding peptide
  MOD_RES (1), (2): Xaa is C or S
  MOD_RES (16), (17), (18), (19), (20): Xaa is A or G
  MOD_RES (21), (22), (23), (24): Xaa is A or G or is absent

SEQ ID NO: 55180 - protein, 41 aa, Artificial Sequence
  GFR-binding peptide
  MOD_RES (3), (40): Xaa is C or S
  MOD_RES (19), (20), (21), (22), (23): Xaa is A or G
  MOD_RES (24), (25), (26), (27): Xaa is A or G or is absent
VKXQPSRVHHEPLTVLYYXXXXXXXXXEQLSNRLEEHLEXA

SEQ ID NO: 55181 - protein, 31 aa, Artificial Sequence
  GFR-binding peptide
APTQLRPVQVRKIDDSSNVIKKATVNMVVRA

SEQ ID NO: 55182 - protein, 33 aa, Artificial Sequence; identical to SEQ ID NO: 19553
  GFR-binding peptide

SEQ ID NO: 55183 - protein, 42 aa, Artificial Sequence; identical to SEQ ID NO: 19554
  GFR-binding peptide
  MOD_RES (3), (40), (42): Xaa is C or S
  MOD_RES (19), (20), (21), (22), (23): Xaa is A or G
  MOD_RES (24), (25), (26), (27): Xaa is A or G or is absent

SEQ ID NO: 55184 - protein, 39 aa, Artificial Sequence
  GFR-binding peptide
  MOD_RES (1), (2), (36), (38): Xaa is C or S
  MOD_RES (16), (17), (18), (19), (20): Xaa is A or G
  MOD_RES (21), (22), (23), (24): Xaa is A or G or is absent
XXAPTKLSNITVQIMXXXXXXXXXIGEMSNMVVRSXGXH

SEQ ID NO: 55185 - protein, 41 aa, Artificial Sequence
  GFR-binding peptide
  MOD_RES (6), (40): Xaa is C or S
  MOD_RES (20), (21), (22), (23), (24): Xaa is A or G
  MOD_RES (25), (26), (27), (28): Xaa is A or G or is absent
DEGLEXVPTEEEPLTMLYYXXXXXXXXXEQLSNFLQHNKXE

SEQ ID NO: 55186 - protein, 39 aa, Artificial Sequence
  GFR-binding peptide
  MOD_RES (6), (7): Xaa is C or S
  MOD_RES (21), (22), (23), (24), (25): Xaa is A or G
  MOD_RES (26), (27), (28), (29): Xaa is A or G or is absent
ASASPXXVSQDLRPVQIRKIXXXXXXXXXKKATVMIVKS

SEQ ID NO: 55187 - protein, 40 aa, Artificial Sequence; identical to SEQ ID NO: 16341
  GFR-binding peptide
  MOD_RES (3), (4), (38), (40): Xaa is C or S
  MOD_RES (18), (19), (20), (21), (22): Xaa is A or G
  MOD_RES (23), (24), (25), (26): Xaa is A or G or is absent

SEQ ID NO: 55188 - protein, 38 aa, Artificial Sequence; identical to SEQ ID NO: 19555
  GFR-binding peptide
  MOD_RES (1), (38): Xaa is C or S
  MOD_RES (17), (18), (19), (20), (21): Xaa is A or G
  MOD_RES (22), (23), (24), (25): Xaa is A or G or is absent

SEQ ID NO: 55189 - protein, 38 aa, Artificial Sequence
  GFR-binding peptide
  MOD_RES (37), (37): Xaa is C or S
RPTQVQLEPLTVLYYEIVRKKPIFEQLSNTLEDHLAXK

SEQ ID NO: 55190 - protein, 35 aa, Artificial Sequence
  GFR-binding peptide
  MOD_RES (3), (4): Xaa is C or S
KAXXVPTELRSVKMAKVDEYDKVVKEVQVEMVVEG

SEQ ID NO: 55191 - protein, 32 aa, Artificial Sequence; identical to SEQ ID NO: 16342
  GFR-binding peptide
  MOD_RES (1), (2): Xaa is C or S

SEQ ID NO: 55192 - protein, 36 aa, Artificial Sequence; identical to SEQ ID NO: 19556
  GFR-binding peptide
  MOD_RES (4), (4): Xaa is C or S
  MOD_RES (18), (19), (20), (21), (22): Xaa is A or G
  MOD_RES (23), (24), (25), (26): Xaa is A or G or is absent

SEQ ID NO: 55193 - protein, 39 aa, Artificial Sequence; identical to SEQ ID NO: 19558
  GFR-binding peptide
  MOD_RES (2), (36), (38): Xaa is C or S
  MOD_RES (16), (17), (18), (19), (20): Xaa is A or G
  MOD_RES (21), (22), (23), (24): Xaa is A or G or is absent

SEQ ID NO: 55194 - protein, 37 aa, Artificial Sequence
  GFR-binding peptide
  MOD_RES (3), (4), (35), (37): Xaa is C or S
APXXVPQALSNITIQIMVGRKPKVIGEMSMIVRSXKX

SEQ ID NO: 55195 - protein, 39 aa, Artificial Sequence; identical to SEQ ID NO: 16345
  GFR-binding peptide
  MOD_RES (3), (4), (36), (38): Xaa is C or S

SEQ ID NO: 55196 - protein, 40 aa, Artificial Sequence
  GFR-binding peptide
  MOD_RES (5), (6), (37), (39): Xaa is C or S
SASPXXVPQDLRPVQIRKIVGRTPKVKKATVMVVKSXKXS

SEQ ID NO: 55197 - protein, 41 aa, Artificial Sequence; identical to SEQ ID NO: 19562
  GFR-binding peptide
  MOD_RES (4), (38), (40): Xaa is C or S
  MOD_RES (18), (19), (20), (21), (22): Xaa is A or G
  MOD_RES (23), (24), (25), (26): Xaa is A or G or is absent

SEQ ID NO: 55198 - protein, 35 aa, Artificial Sequence; identical to SEQ ID NO: 16347
  GFR-binding peptide
  MOD_RES (32), (34): Xaa is C or S

SEQ ID NO: 55199 - protein, 36 aa, Artificial Sequence
  GFR-binding peptide
  MOD_RES (3), (4): Xaa is C or S
  MOD_RES (18), (19), (20), (21), (22): Xaa is A or G
  MOD_RES (23), (24), (25), (26): Xaa is A or G or is absent
KPXXAPTQLRSVKVAKVXXXXXXXXXKEVQVNMVVR

SEQ ID NO: 55200 - protein, 38 aa, Artificial Sequence; identical to SEQ ID NO: 19564
  GFR-binding peptide
  MOD_RES (1), (35), (37): Xaa is C or S

SEQ ID NO: 55201 - protein, 38 aa, Artificial Sequence; identical to SEQ ID NO: 16349
  GFR-binding peptide
  MOD_RES (4), (5), (38): Xaa is C or S
  MOD_RES (19), (20), (21), (22), (23): Xaa is A or G
  MOD_RES (24), (25), (26), (27): Xaa is A or G or is absent

SEQ ID NO: 55202 - protein, 45 aa, Artificial Sequence
  GFR-binding peptide
  MOD_RES (5), (42), (44): Xaa is C or S
SSVKXQPSRVHHEPLTVLYYEYVRKKPKLEQLSNRLEEHLEXAXA

SEQ ID NO: 55203 - protein, 36 aa, Artificial Sequence; identical to SEQ ID NO: 16350
  GFR-binding peptide
  MOD_RES (1), (35): Xaa is C or S
  MOD_RES (15), (16), (17), (18), (19): Xaa is A or G
  MOD_RES (20), (21), (22), (23): Xaa is A or G or is absent

SEQ ID NO: 55204 - protein, 34 aa, Artificial Sequence
  GFR-binding peptide
  MOD_RES (1), (2), (33): Xaa is C or S
XXVSQDLRSVKIAKVIGKTPKIKEVQVMIVKSXK

SEQ ID NO: 55205 - protein, 37 aa, Artificial Sequence
  GFR-binding peptide
  MOD_RES (5), (6), (37): Xaa is C or S
SAAPXXVPQALRSVKIAKVVGRKPKVKEVQVMIVRSX

SEQ ID NO: 55206 - protein, 39 aa, Artificial Sequence
  GFR-binding peptide
  MOD_RES (3), (37), (39): Xaa is C or S
  MOD_RES (17), (18), (19), (20), (21): Xaa is A or G
  MOD_RES (22), (23), (24), (25): Xaa is A or G or is absent
LEXVPTEEEPLPMVYYXXXXXXXXXEQLSNFLQHNKXEX

SEQ ID NO: 55207 - protein, 36 aa, Artificial Sequence; identical to SEQ ID NO: 16357
  GFR-binding peptide
  MOD_RES (1), (33), (35): Xaa is C or S

SEQ ID NO: 55208 - protein, 40 aa, Artificial Sequence; identical to SEQ ID NO: 19566
  GFR-binding peptide
  MOD_RES (37), (39): Xaa is C or S
  MOD_RES (16), (17), (18), (19), (20): Xaa is A or G
  MOD_RES (21), (22), (23), (24): Xaa is A or G or is absent

SEQ ID NO: 55209 - protein, 41 aa, Artificial Sequence
  GFR-binding peptide
  MOD_RES (6), (7), (39), (41): Xaa is C or S
KIPKAXXVPTELRSVKMAKVDENEKVVKEVQVDMVVEGXGX

SEQ ID NO: 55210 - protein, 43 aa, Artificial Sequence
  GFR-binding peptide
  MOD_RES (4), (41), (43): Xaa is C or S
  MOD_RES (20), (21), (22), (23), (24): Xaa is A or G
  MOD_RES (25), (26), (27), (28): Xaa is A or G or is absent
NVQXRPTQVQLEPLPVVYYXXXXXXXXXEQLSNTLEDHLAXKX

SEQ ID NO: 55211 - protein, 40 aa, Artificial Sequence
  GFR-binding peptide
  MOD_RES (5), (6), (37), (39): Xaa is C or S
SAAPXXVPQALSNITIQIMVGRKPKVIGEMSMIVRSXKXS

SEQ ID NO: 55212 - protein, 37 aa, Artificial Sequence; identical to SEQ ID NO: 16358
  GFR-binding peptide
  MOD_RES (5), (6), (37): Xaa is C or S

SEQ ID NO: 55213 - protein, 31 aa, Artificial Sequence
  GFR-binding peptide
  MOD_RES (1), (1): Xaa is C or S
XVPTELRSVKMAKVDENEKVVKEVQVDMVVE

SEQ ID NO: 55214 - protein, 31 aa, Artificial Sequence; identical to SEQ ID NO: 16359
  GFR-binding peptide
  MOD_RES (1), (1): Xaa is C or S

SEQ ID NO: 55215 - protein, 37 aa, Artificial Sequence; identical to SEQ ID NO: 16360
  GFR-binding peptide
  MOD_RES (1), (2), (36): Xaa is C or S
  MOD_RES (16), (17), (18), (19), (20): Xaa is A or G
  MOD_RES (21), (22), (23), (24): Xaa is A or G or is absent

SEQ ID NO: 55216 - protein, 34 aa, Artificial Sequence
  GFR-binding peptide
  MOD_RES (32), (34): Xaa is C or S
VPTELSNITMQIMDENEKVVIGEMSDMVVEGXGX

SEQ ID NO: 55217 - protein, 38 aa, Artificial Sequence; identical to SEQ ID NO: 16362
  GFR-binding peptide
  MOD_RES (5), (6): Xaa is C or S
  MOD_RES (20), (21), (22), (23), (24): Xaa is A or G
  MOD_RES (25), (26), (27), (28): Xaa is A or G or is absent

SEQ ID NO: 55218 - protein, 35 aa, Artificial Sequence; identical to SEQ ID NO: 16363
  GFR-binding peptide
  MOD_RES (32), (34): Xaa is C or S

SEQ ID NO: 55219 - protein, 42 aa, Artificial Sequence
  GFR-binding peptide
  MOD_RES (2), (39), (41): Xaa is C or S
  MOD_RES (18), (19), (20), (21), (22): Xaa is A or G
  MOD_RES (23), (24), (25), (26): Xaa is A or G or is absent
KXQPSRVHHEPLTVLYYXXXXXXXXXEQLSNRLEEHLEXAXA

SEQ ID NO: 55220 - protein, 39 aa, Artificial Sequence
  GFR-binding peptide
  MOD_RES (6), (7): Xaa is C or S
  MOD_RES (21), (22), (23), (24), (25): Xaa is A or G
  MOD_RES (26), (27), (28), (29): Xaa is A or G or is absent
TVPKPXXAPTQLRPVQVRKIXXXXXXXXXKKATVNMVVR

SEQ ID NO: 55221 - protein, 32 aa, Artificial Sequence; identical to SEQ ID NO: 16365
  GFR-binding peptide
  MOD_RES (1), (2): Xaa is C or S

SEQ ID NO: 55222 - protein, 37 aa, Artificial Sequence
  GFR-binding peptide
  MOD_RES (4), (5): Xaa is C or S
  MOD_RES (19), (20), (21), (22), (23): Xaa is A or G
  MOD_RES (24), (25), (26), (27): Xaa is A or G or is absent
PKAXXVPTELSNITMQIMXXXXXXXXXIGEMSEMVVE

SEQ ID NO: 55223 - protein, 37 aa, Artificial Sequence; identical to SEQ ID NO: 40177
  GFR-binding peptide
  MOD_RES (1), (34), (36): Xaa is C or S
  MOD_RES (15), (16), (17), (18), (19): Xaa is A or G
  MOD_RES (20), (21), (22), (23): Xaa is A or G or is absent

SEQ ID NO: 55224 - protein, 34 aa, Artificial Sequence
  GFR-binding peptide
  MOD_RES (1), (34): Xaa is C or S
  MOD_RES (15), (16), (17), (18), (19): Xaa is A or G
  MOD_RES (20), (21), (22), (23): Xaa is A or G or is absent
XVPQDLRPVQIRKIXXXXXXXXXKKATVMVVKSX

SEQ ID NO: 55225 - protein, 38 aa, Artificial Sequence
  GFR-binding peptide
  MOD_RES (37), (37): Xaa is C or S
  MOD_RES (16), (17), (18), (19), (20): Xaa is A or G
  MOD_RES (21), (22), (23), (24): Xaa is A or G or is absent
RPTQVQLEPLTVLYYXXXXXXXXXEQLSNTLEDHLAXK

SEQ ID NO: 55226 - protein, 39 aa, Artificial Sequence; identical to SEQ ID NO: 19573
  GFR-binding peptide
  MOD_RES (3), (3): Xaa is C or S
  MOD_RES (19), (20), (21), (22), (23): Xaa is A or G
  MOD_RES (24), (25), (26), (27): Xaa is A or G or is absent

SEQ ID NO: 55227 - protein, 35 aa, Artificial Sequence
  GFR-binding peptide
  MOD_RES (3), (3): Xaa is C or S
LEXVPTEEEPLPMVYYRIKPHQGQHEQLSNFLQHN

SEQ ID NO: 55228 - protein, 43 aa, Artificial Sequence
  GFR-binding peptide
  MOD_RES (6), (40), (42): Xaa is C or S
  MOD_RES (20), (21), (22), (23), (24): Xaa is A or G
  MOD_RES (25), (26), (27), (28): Xaa is A or G or is absent
DEGLEXVPTEEEPLTMLYYXXXXXXXXXEQLSNFLQHNKXEXR

SEQ ID NO: 55229 - protein, 40 aa, Artificial Sequence; identical to SEQ ID NO: 19576
  GFR-binding peptide
  MOD_RES (2), (39): Xaa is C or S

SEQ ID NO: 55230 - protein, 41 aa, Artificial Sequence
  GFR-binding peptide
  MOD_RES (5), (6), (40): Xaa is C or S
  MOD_RES (20), (21), (22), (23), (24): Xaa is A or G
  MOD_RES (25), (26), (27), (28): Xaa is A or G or is absent
IPKAXXVPTELRSVKMAKVXXXXXXXXXKEVQVDMVVEGXG

SEQ ID NO: 55231 - protein, 39 aa, Artificial Sequence; identical to SEQ ID NO: 16371
  GFR-binding peptide
  MOD_RES (4), (5), (37), (39): Xaa is C or S

SEQ ID NO: 55232 - protein, 36 aa, Artificial Sequence
  GFR-binding peptide
  MOD_RES (34), (36): Xaa is C or S
  MOD_RES (14), (15), (16), (17), (18): Xaa is A or G
  MOD_RES (19), (20), (21), (22): Xaa is A or G or is absent
VPTELRSVKMAKVXXXXXXXXXKEVQVDMVVEGXGX

SEQ ID NO: 55233 - protein, 38 aa, Artificial Sequence; identical to SEQ ID NO: 19579
  GFR-binding peptide
  MOD_RES (4), (4): Xaa is C or S
  MOD_RES (20), (21), (22), (23), (24): Xaa is A or G
  MOD_RES (25), (26), (27), (28): Xaa is A or G or is absent

SEQ ID NO: 55234 - protein, 36 aa, Artificial Sequence; identical to SEQ ID NO: 16372
  GFR-binding peptide
  MOD_RES (5), (5): Xaa is C or S

SEQ ID NO: 55235 - protein, 36 aa, Artificial Sequence
  GFR-binding peptide
  MOD_RES (2), (34), (36): Xaa is C or S
TXAPTKLSNITVQIMDDSSNVIIGEMSNMVVRSXGX

SEQ ID NO: 55236 - protein, 34 aa, Artificial Sequence
  GFR-binding peptide
  MOD_RES (2), (3), (34): Xaa is C or S
PXXVPQDLRPVQIRKIVGRTPKVKKATVMVVKSX

SEQ ID NO: 55237 - protein, 39 aa, Artificial Sequence; identical to SEQ ID NO: 19585
  GFR-binding peptide
  MOD_RES (2), (39): Xaa is C or S
  MOD_RES (18), (19), (20), (21), (22): Xaa is A or G
  MOD_RES (23), (24), (25), (26): Xaa is A or G or is absent

SEQ ID NO: 55238 - protein, 34 aa, Artificial Sequence
  GFR-binding peptide
  MOD_RES (33), (33): Xaa is C or S
  MOD_RES (14), (15), (16), (17), (18): Xaa is A or G
  MOD_RES (19), (20), (21), (22): Xaa is A or G or is absent
VPQDLRSVKIAKVXXXXXXXXXKEVQVMVVKSXK

SEQ ID NO: 55239 - protein, 44 aa, Artificial Sequence; identical to SEQ ID NO: 19587
  GFR-binding peptide
  MOD_RES (4), (41), (43): Xaa is C or S

SEQ ID NO: 55240 - protein, 43 aa, Artificial Sequence
  GFR-binding peptide
  MOD_RES (6), (7), (40), (42): Xaa is C or S
  MOD_RES (21), (22), (23), (24), (25): Xaa is A or G
  MOD_RES (26), (27), (28), (29): Xaa is A or G or is absent
ASASPXXVPQDLSNITIQIMXXXXXXXXXIGEMSMVVKSXKXS

SEQ ID NO: 55241 - protein, 42 aa, Artificial Sequence
  GFR-binding peptide
  MOD_RES (4), (41): Xaa is C or S
NVQXRPTQVQLEPLTVLYYEIVRKKPIFEQLSNTLEDHLAXK

SEQ ID NO: 55242 - protein, 39 aa, Artificial Sequence
  GFR-binding peptide
  MOD_RES (6), (7): Xaa is C or S
  MOD_RES (21), (22), (23), (24), (25): Xaa is A or G
  MOD_RES (26), (27), (28), (29): Xaa is A or G or is absent
TVPKPXXAPTQLRSVKVAKVXXXXXXXXXKEVQVNMVVR

SEQ ID NO: 55243 - protein, 33 aa, Artificial Sequence; identical to SEQ ID NO: 19589
  GFR-binding peptide
  MOD_RES (14), (15), (16), (17), (18): Xaa is A or G
  MOD_RES (19), (20), (21), (22): Xaa is A or G or is absent

SEQ ID NO: 55244 - protein, 36 aa, Artificial Sequence; identical to SEQ ID NO: 19591
  GFR-binding peptide
  MOD_RES (16), (17), (18), (19), (20): Xaa is A or G
  MOD_RES (21), (22), (23), (24): Xaa is A or G or is absent

SEQ ID NO: 55245 - protein, 34 aa, Artificial Sequence; identical to SEQ ID NO: 16376
  GFR-binding peptide
  MOD_RES (2), (34): Xaa is C or S

SEQ ID NO: 55246 - protein, 35 aa, Artificial Sequence; identical to SEQ ID NO: 16377
  GFR-binding peptide
  MOD_RES (4), (5): Xaa is C or S

SEQ ID NO: 55247 - protein, 37 aa, Artificial Sequence
  GFR-binding peptide
  MOD_RES (4), (4): Xaa is C or S
  MOD_RES (18), (19), (20), (21), (22): Xaa is A or G
  MOD_RES (23), (24), (25), (26): Xaa is A or G or is absent
GLEXVPTEEEPLPMVYYXXXXXXXXXEQLSNFLQHNK

SEQ ID NO: 55248 - protein, 39 aa, Artificial Sequence
  GFR-binding peptide
  MOD_RES (4), (5), (38): Xaa is C or S
  MOD_RES (19), (20), (21), (22), (23): Xaa is A or G
  MOD_RES (24), (25), (26), (27): Xaa is A or G or is absent
ASPXXVPQDLRSVKIAKVXXXXXXXXXKEVQVMVVKSXK

SEQ ID NO: 55249 - protein, 37 aa, Artificial Sequence
  GFR-binding peptide
  MOD_RES (4), (5): Xaa is C or S
  MOD_RES (19), (20), (21), (22), (23): Xaa is A or G
  MOD_RES (24), (25), (26), (27): Xaa is A or G or is absent
ASPXXVSQDLSNITIQIMXXXXXXXXXIGEMSMIVKS

SEQ ID NO: 55250 - protein, 42 aa, Artificial Sequence; identical to SEQ ID NO: 19597
  GFR-binding peptide
  MOD_RES (2), (39), (41): Xaa is C or S
  MOD_RES (18), (19), (20), (21), (22): Xaa is A or G
  MOD_RES (23), (24), (25), (26): Xaa is A or G or is absent

SEQ ID NO: 55251 - protein, 31 aa, Artificial Sequence
  GFR-binding peptide
APTKLSNITVQIMDDSSNVIIGEMSNMVVRS

SEQ ID NO: 55252 - protein, 33 aa, Artificial Sequence; identical to SEQ ID NO: 16380
  GFR-binding peptide
  MOD_RES (14), (15), (16), (17), (18): Xaa is A or G
  MOD_RES (19), (20), (21), (22): Xaa is A or G or is absent

SEQ ID NO: 55253 - protein, 40 aa, Artificial Sequence
  GFR-binding peptide
  MOD_RES (2), (3), (37), (39): Xaa is C or S
  MOD_RES (17), (18), (19), (20), (21): Xaa is A or G
  MOD_RES (22), (23), (24), (25): Xaa is A or G or is absent
AXXVPTELSNITMQIMXXXXXXXXXIGEMSDMVVEGXGXR

SEQ ID NO: 55254 - protein, 37 aa, Artificial Sequence
  GFR-binding peptide
  MOD_RES (1), (2), (35), (37): Xaa is C or S
  MOD_RES (16), (17), (18), (19), (20): Xaa is A or G
  MOD_RES (21), (22), (23), (24): Xaa is A or G or is absent
XXVPQALSNITIQIMXXXXXXXXXIGEMSMIVRSXKX

SEQ ID NO: 55255 - protein, 38 aa, Artificial Sequence
  GFR-binding peptide
  MOD_RES (2), (36), (38): Xaa is C or S
  MOD_RES (16), (17), (18), (19), (20): Xaa is A or G
  MOD_RES (21), (22), (23), (24): Xaa is A or G or is absent
TXAPTKLSNITVQIMXXXXXXXXXIGEMSNMVVRSXGX

SEQ ID NO: 55256 - protein, 38 aa, Artificial Sequence
  GFR-binding peptide
  MOD_RES (5), (6): Xaa is C or S
  MOD_RES (20), (21), (22), (23), (24): Xaa is A or G
  MOD_RES (25), (26), (27), (28): Xaa is A or G or is absent
SAAPXXVPQALSNITIQIMXXXXXXXXXIGEMSMIVRS

SEQ ID NO: 55257 - protein, 41 aa, Artificial Sequence
  GFR-binding peptide
  MOD_RES (6), (38), (40): Xaa is C or S
VTKPTXAPTKLRPVQVRKIDDSSNVIKKATVNMVVRSXGXH

SEQ ID NO: 55258 - protein, 37 aa, Artificial Sequence
  GFR-binding peptide
  MOD_RES (3), (4), (36): Xaa is C or S
KPXXAPTKLSNITVQIMDDSSNVIIGEMSNMVVRSXG

SEQ ID NO: 55259 - protein, 38 aa, Artificial Sequence; identical to SEQ ID NO: 19598
  GFR-binding peptide
  MOD_RES (4), (4): Xaa is C or S
  MOD_RES (20), (21), (22), (23), (24): Xaa is A or G
  MOD_RES (25), (26), (27), (28): Xaa is A or G or is absent

SEQ ID NO: 55260 - protein, 39 aa, Artificial Sequence; identical to SEQ ID NO: 16386
  GFR-binding peptide
  MOD_RES (2), (3), (37), (39): Xaa is C or S
  MOD_RES (17), (18), (19), (20), (21): Xaa is A or G
  MOD_RES (22), (23), (24), (25): Xaa is A or G or is absent

SEQ ID NO: 55261 - protein, 35 aa, Artificial Sequence
  GFR-binding peptide
  MOD_RES (1), (2): Xaa is C or S
  MOD_RES (16), (17), (18), (19), (20): Xaa is A or G
  MOD_RES (21), (22), (23), (24): Xaa is A or G or is absent
XXVPTELSNITMQIMXXXXXXXXXIGEMSDMVVEG

SEQ ID NO: 55262 - protein, 39 aa, Artificial Sequence
  GFR-binding peptide
  MOD_RES (1), (2), (36), (38): Xaa is C or S
  MOD_RES (16), (17), (18), (19), (20): Xaa is A or G
  MOD_RES (21), (22), (23), (24): Xaa is A or G or is absent
XXVPTELRSVKMAKVXXXXXXXXXKEVQVDMVVEGXGXR

SEQ ID NO: 55263 - protein, 36 aa, Artificial Sequence
  GFR-binding peptide
  MOD_RES (1), (2), (33), (35): Xaa is C or S
XXVPQDLRSVKIAKVVGRTPKVKEVQVMVVKSXKXS

SEQ ID NO: 55264 - protein, 32 aa, Artificial Sequence
  GFR-binding peptide
  MOD_RES (1), (2): Xaa is C or S
XXVPTELRSVKMAKVDENEKVVKEVQVDMVVE

SEQ ID NO: 55265 - protein, 38 aa, Artificial Sequence
  GFR-binding peptide
  MOD_RES (3), (4), (38): Xaa is C or S
  MOD_RES (18), (19), (20), (21), (22): Xaa is A or G
  MOD_RES (23), (24), (25), (26): Xaa is A or G or is absent
KPXXAPTKLSNITVQIMXXXXXXXXXIGEMSNMVVRSX

SEQ ID NO: 55266 - protein, 32 aa, Artificial Sequence
  GFR-binding peptide
  MOD_RES (31), (31): Xaa is C or S
VSQDLRSVKIAKVIGKTPKIKEVQVMIVKSXK

SEQ ID NO: 55267 - protein, 34 aa, Artificial Sequence
  GFR-binding peptide
  MOD_RES (2), (3): Xaa is C or S
AXXVPTELRSVKMAKVDENEKVVKEVQVDMVVEG

SEQ ID NO: 55268 - protein, 36 aa, Artificial Sequence; identical to SEQ ID NO: 16395
  GFR-binding peptide
  MOD_RES (34), (36): Xaa is C or S
  MOD_RES (14), (15), (16), (17), (18): Xaa is A or G
  MOD_RES (19), (20), (21), (22): Xaa is A or G or is absent

SEQ ID NO: 55269 - protein, 36 aa, Artificial Sequence; identical to SEQ ID NO: 16396
  GFR-binding peptide
  MOD_RES (5), (6): Xaa is C or S

SEQ ID NO: 55270 - protein, 39 aa, Artificial Sequence
  GFR-binding peptide
  MOD_RES (3), (4), (36), (38): Xaa is C or S
KAXXVPTELSNITMQIMDENEKVVIGEMSDMVVEGXGXR

SEQ ID NO: 55271 - protein, 35 aa, Artificial Sequence
  GFR-binding peptide
  MOD_RES (1), (34): Xaa is C or S
  MOD_RES (15), (16), (17), (18), (19): Xaa is A or G
  MOD_RES (20), (21), (22), (23): Xaa is A or G or is absent
XVPQDLRSVKIAKVXXXXXXXXXKEVQVMVVKSXK

SEQ ID NO: 55272 - protein, 39 aa, Artificial Sequence
  GFR-binding peptide
  MOD_RES (2), (3), (37), (39): Xaa is C or S
  MOD_RES (17), (18), (19), (20), (21): Xaa is A or G
  MOD_RES (22), (23), (24), (25): Xaa is A or G or is absent
PXXAPTQLSNITVQIMXXXXXXXXXIGEMSNMVVRAXGX

SEQ ID NO: 55273 - protein, 33 aa, Artificial Sequence; identical to SEQ ID NO: 16399
  GFR-binding peptide
  MOD_RES (2), (2): Xaa is C or S

SEQ ID NO: 55274 - protein, 40 aa, Artificial Sequence
  GFR-binding peptide
  MOD_RES (2), (3), (37), (39): Xaa is C or S
  MOD_RES (17), (18), (19), (20), (21): Xaa is A or G
  MOD_RES (22), (23), (24), (25): Xaa is A or G or is absent
PXXAPTQLRSVKVAKVXXXXXXXXXKEVQVNMVVRAXGXH

SEQ ID NO: 55275 - protein, 40 aa, Artificial Sequence
  GFR-binding peptide
  MOD_RES (2), (39): Xaa is C or S
  MOD_RES (18), (19), (20), (21), (22): Xaa is A or G
  MOD_RES (23), (24), (25), (26): Xaa is A or G or is absent
KXQPSRVHHEPLPVVYYXXXXXXXXXEQLSNRLEEHLEXA

SEQ ID NO: 55276 - protein, 40 aa, Artificial Sequence; identical to SEQ ID NO: 19604
  GFR-binding peptide
  MOD_RES (4), (38), (40): Xaa is C or S

SEQ ID NO: 55277 - protein, 44 aa, Artificial Sequence
  GFR-binding peptide
  MOD_RES (5), (42), (44): Xaa is C or S
  MOD_RES (21), (22), (23), (24), (25): Xaa is A or G
  MOD_RES (26), (27), (28), (29): Xaa is A or G or is absent
RNVQXRPTQVQLEPLPVVYYXXXXXXXXXEQLSNTLEDHLAXKX

SEQ ID NO: 55278 - protein, 32 aa, Artificial Sequence
  GFR-binding peptide
  MOD_RES (1), (2): Xaa is C or S
XXVPTELRSVKMAKVDEYDKVVKEVQVEMVVE

SEQ ID NO: 55279 - protein, 37 aa, Artificial Sequence
  GFR-binding peptide
  MOD_RES (7), (7): Xaa is C or S
HVTKPTXAPTKLSNITVQIMDDSSNVIIGEMSNMVVR

SEQ ID NO: 55280 - protein, 36 aa, Artificial Sequence; identical to SEQ ID NO: 16400
  GFR-binding peptide
  MOD_RES (4), (36): Xaa is C or S

SEQ ID NO: 55281 - protein, 40 aa, Artificial Sequence
  GFR-binding peptide
  MOD_RES (4), (5), (37), (39): Xaa is C or S
PKAXXVPTELSNITMQIMDENEKVVIGEMSDMVVEGXGXR

SEQ ID NO: 55282 - protein, 35 aa, Artificial Sequence
  GFR-binding peptide
  MOD_RES (2), (3): Xaa is C or S
  MOD_RES (17), (18), (19), (20), (21): Xaa is A or G
  MOD_RES (22), (23), (24), (25): Xaa is A or G or is absent
AXXVPTELRSVKMAKVXXXXXXXXXKEVQVEMVVE

SEQ ID NO: 55283 - protein, 41 aa, Artificial Sequence
  GFR-binding peptide
  MOD_RES (5), (6), (40): Xaa is C or S
  MOD_RES (20), (21), (22), (23), (24): Xaa is A or G
  MOD_RES (25), (26), (27), (28): Xaa is A or G or is absent
VPKPXXAPTKLRPVQVRKIXXXXXXXXXKKATVNMVVRSXG

SEQ ID NO: 55284 - protein, 34 aa, Artificial Sequence
  GFR-binding peptide
  MOD_RES (2), (2): Xaa is C or S
  MOD_RES (16), (17), (18), (19), (20): Xaa is A or G
  MOD_RES (21), (22), (23), (24): Xaa is A or G or is absent
EXVPTEEEPLTMLYYXXXXXXXXXEQLSNFLQHN

SEQ ID NO: 55285 - protein, 38 aa, Artificial Sequence; identical to SEQ ID NO: 19608
  GFR-binding peptide
  MOD_RES (37), (37): Xaa is C or S

SEQ ID NO: 55286 - protein, 34 aa, Artificial Sequence
  GFR-binding peptide
  MOD_RES (3), (4): Xaa is C or S
APXXVPQALRPVQIRKIVGRKPKVKKATVMIVRS

SEQ ID NO: 55287 - protein, 38 aa, Artificial Sequence; identical to SEQ ID NO: 16404
  GFR-binding peptide
  MOD_RES (5), (37): Xaa is C or S

SEQ ID NO: 55288 - protein, 36 aa, Artificial Sequence
  GFR-binding peptide
  MOD_RES (3), (4): Xaa is C or S
  MOD_RES (18), (19), (20), (21), (22): Xaa is A or G
  MOD_RES (23), (24), (25), (26): Xaa is A or G or is absent
APXXVPQALRSVKIAKVXXXXXXXXXKEVQVMIVRS

SEQ ID NO: 55289 - protein, 37 aa, Artificial Sequence
  GFR-binding peptide
  MOD_RES (2), (3), (37): Xaa is C or S
  MOD_RES (17), (18), (19), (20), (21): Xaa is A or G
  MOD_RES (22), (23), (24), (25): Xaa is A or G or is absent
PXXAPTQLSNITVQIMXXXXXXXXXIGEMSNMVVRAX

SEQ ID NO: 55290 - protein, 33 aa, Artificial Sequence
  GFR-binding peptide
  MOD_RES (2), (3): Xaa is C or S
PXXAPTKLRSVKVAKVDDSSNVIKEVQVNMVVR

SEQ ID NO: 55291 - protein, 36 aa, Artificial Sequence
  GFR-binding peptide
  MOD_RES (1), (34), (36): Xaa is C or S
  MOD_RES (15), (16), (17), (18), (19): Xaa is A or G
  MOD_RES (20), (21), (22), (23): Xaa is A or G or is absent
XVPQALSNITIQIMXXXXXXXXXIGEMSMIVRSXKX

SEQ ID NO: 55292 - protein, 34 aa, Artificial Sequence; identical to SEQ ID NO: 19615
  GFR-binding peptide
  MOD_RES (2), (2): Xaa is C or S

SEQ ID NO: 55293 - protein, 33 aa, Artificial Sequence
  GFR-binding peptide
  MOD_RES (14), (15), (16), (17), (18): Xaa is A or G
  MOD_RES (19), (20), (21), (22): Xaa is A or G or is absent
SRVHHEPLTVLYYXXXXXXXXXEQLSNRLEEHL

SEQ ID NO: 55294 - protein, 38 aa, Artificial Sequence; identical to SEQ ID NO: 19616
  GFR-binding peptide
  MOD_RES (36), (38): Xaa is C or S
  MOD_RES (15), (16), (17), (18), (19): Xaa is A or G
  MOD_RES (20), (21), (22), (23): Xaa is A or G or is absent

SEQ ID NO: 55295 - protein, 37 aa, Artificial Sequence
  GFR-binding peptide
  MOD_RES (6), (7): Xaa is C or S
KIPKAXXVPTELSNITMQIMDENEKVVIGEMSDMVVE

SEQ ID NO: 55296 - protein, 40 aa, Artificial Sequence; identical to SEQ ID NO: 16410
  GFR-binding peptide
  MOD_RES (5), (6), (38), (40): Xaa is C or S

SEQ ID NO: 55297 - protein, 33 aa, Artificial Sequence
  GFR-binding peptide
  MOD_RES (33), (33): Xaa is C or S
  MOD_RES (14), (15), (16), (17), (18): Xaa is A or G
  MOD_RES (19), (20), (21), (22): Xaa is A or G or is absent
VSQDLRPVQIRKIXXXXXXXXXKKATVMIVKSX

SEQ ID NO: 55298 - protein, 33 aa, Artificial Sequence; identical to SEQ ID NO: 16413
  GFR-binding peptide
  MOD_RES (14), (15), (16), (17), (18): Xaa is A or G
  MOD_RES (19), (20), (21), (22): Xaa is A or G or is absent

SEQ ID NO: 55299 - protein, 33 aa, Artificial Sequence; identical to SEQ ID NO: 19621
  GFR-binding peptide

SEQ ID NO: 55300 - protein, 39 aa, Artificial Sequence; identical to SEQ ID NO: 19622
  GFR-binding peptide
  MOD_RES (6), (6): Xaa is C or S
  MOD_RES (20), (21), (22), (23), (24): Xaa is A or G
  MOD_RES (25), (26), (27), (28): Xaa is A or G or is absent

SEQ ID NO: 55301 - protein, 39 aa, Artificial Sequence
  GFR-binding peptide
  MOD_RES (4), (4): Xaa is C or S
  MOD_RES (20), (21), (22), (23), (24): Xaa is A or G
  MOD_RES (25), (26), (27), (28): Xaa is A or G or is absent
SVKXQPSRVHHEPLPVVYYXXXXXXXXXEQLSNRLEEHL

SEQ ID NO: 55302 - protein, 39 aa, Artificial Sequence; identical to SEQ ID NO: 16416
  GFR-binding peptide
  MOD_RES (5), (6), (39): Xaa is C or S
  MOD_RES (20), (21), (22), (23), (24): Xaa is A or G
  MOD_RES (25), (26), (27), (28): Xaa is A or G or is absent

SEQ ID NO: 55303 - protein, 40 aa, Artificial Sequence
  GFR-binding peptide
  MOD_RES (5), (6), (38), (40): Xaa is C or S
IPKAXXVPTELRPVQMRKIDENEKVVKKATVDMVVEGXGX

SEQ ID NO: 55304 - protein, 38 aa, Artificial Sequence; identical to SEQ ID NO: 16419
  GFR-binding peptide
  MOD_RES (4), (5), (36), (38): Xaa is C or S

SEQ ID NO: 55305 - protein, 38 aa, Artificial Sequence
  GFR-binding peptide
  MOD_RES (4), (5), (36), (38): Xaa is C or S
ASPXXVSQDLRPVQIRKIIGKTPKIKKATVMIVKSXKX

SEQ ID NO: 55306 - protein, 36 aa, Artificial Sequence
  GFR-binding peptide
  MOD_RES (4), (4): Xaa is C or S
  MOD_RES (18), (19), (20), (21), (22): Xaa is A or G
  MOD_RES (23), (24), (25), (26): Xaa is A or G or is absent
KPTXAPTKLRPVQVRKIXXXXXXXXXKKATVNMVVR

SEQ ID NO: 55307 - protein, 39 aa, Artificial Sequence
  GFR-binding peptide
  MOD_RES (4), (5), (38): Xaa is C or S
  MOD_RES (19), (20), (21), (22), (23): Xaa is A or G
  MOD_RES (24), (25), (26), (27): Xaa is A or G or is absent
ASPXXVPQDLRPVQIRKIXXXXXXXXXKKATVMVVKSXK

SEQ ID NO: 55308 - protein, 38 aa, Artificial Sequence
  GFR-binding peptide
  MOD_RES (3), (4), (38): Xaa is C or S
  MOD_RES (18), (19), (20), (21), (22): Xaa is A or G
  MOD_RES (23), (24), (25), (26): Xaa is A or G or is absent
KAXXVPTELRSVKMAKVXXXXXXXXXKEVQVEMVVEGX

SEQ ID NO: 55309 - protein, 40 aa, Artificial Sequence
  GFR-binding peptide
  MOD_RES (4), (5), (39): Xaa is C or S
  MOD_RES (19), (20), (21), (22), (23): Xaa is A or G
  MOD_RES (24), (25), (26), (27): Xaa is A or G or is absent
PKPXXAPTKLRSVKVAKVXXXXXXXXXKEVQVNMVVRSXG

SEQ ID NO: 55310 - protein, 37 aa, Artificial Sequence; identical to SEQ ID NO: 16424
  GFR-binding peptide
  MOD_RES (4), (5), (37): Xaa is C or S

SEQ ID NO: 55311 - protein, 36 aa, Artificial Sequence
  GFR-binding peptide
  MOD_RES (36), (36): Xaa is C or S
PTQVQLEPLPVVYYEIVRKKPIFEQLSNTLEDHLAX

SEQ ID NO: 55312 - protein, 34 aa, Artificial Sequence
  GFR-binding peptide
  MOD_RES (1), (2), (33): Xaa is C or S
XXVSQDLRPVQIRKIIGKTPKIKKATVMIVKSXK

SEQ ID NO: 55313 - protein, 35 aa, Artificial Sequence; identical to SEQ ID NO: 19626
  GFR-binding peptide
  MOD_RES (35), (35): Xaa is C or S
  MOD_RES (14), (15), (16), (17), (18): Xaa is A or G
  MOD_RES (19), (20), (21), (22): Xaa is A or G or is absent

SEQ ID NO: 55314 - protein, 39 aa, Artificial Sequence
  GFR-binding peptide
  MOD_RES (5), (6), (39): Xaa is C or S
  MOD_RES (20), (21), (22), (23), (24): Xaa is A or G
  MOD_RES (25), (26), (27), (28): Xaa is A or G or is absent
SAAPXXVPQALRPVQIRKIXXXXXXXXXKKATVMIVRSX

SEQ ID NO: 55315 - protein, 43 aa, Artificial Sequence
  GFR-binding peptide
  MOD_RES (3), (40), (42): Xaa is C or S
  MOD_RES (19), (20), (21), (22), (23): Xaa is A or G
  MOD_RES (24), (25), (26), (27): Xaa is A or G or is absent
VQXRPTQVQLEPLTVLYYXXXXXXXXXEQLSNTLEDHLAXKXE

SEQ ID NO: 55316 - protein, 36 aa, Artificial Sequence; identical to SEQ ID NO: 16427
  GFR-binding peptide
  MOD_RES (2), (3): Xaa is C or S
  MOD_RES (17), (18), (19), (20), (21): Xaa is A or G
  MOD_RES (22), (23), (24), (25): Xaa is A or G or is absent

SEQ ID NO: 55317 - protein, 39 aa, Artificial Sequence
  GFR-binding peptide
  MOD_RES (5), (6), (39): Xaa is C or S
  MOD_RES (20), (21), (22), (23), (24): Xaa is A or G
  MOD_RES (25), (26), (27), (28): Xaa is A or G or is absent
SASPXXVSQDLRSVKIAKVXXXXXXXXXKEVQVMIVKSX

SEQ ID NO: 55318 - protein, 32 aa, Artificial Sequence
  GFR-binding peptide
  MOD_RES (31), (31): Xaa is C or S
VSQDLRPVQIRKIIGKTPKIKKATVMIVKSXK

SEQ ID NO: 55319 - protein, 35 aa, Artificial Sequence; identical to SEQ ID NO: 16429
  GFR-binding peptide
  MOD_RES (34), (34): Xaa is C or S
  MOD_RES (14), (15), (16), (17), (18): Xaa is A or G
  MOD_RES (19), (20), (21), (22): Xaa is A or G or is absent

SEQ ID NO: 55320 - protein, 36 aa, Artificial Sequence; identical to SEQ ID NO: 40280
  GFR-binding peptide
  MOD_RES (3), (4): Xaa is C or S
  MOD_RES (18), (19), (20), (21), (22): Xaa is A or G
  MOD_RES (23), (24), (25), (26): Xaa is A or G or is absent

SEQ ID NO: 55321 - protein, 42 aa, Artificial Sequence; identical to SEQ ID NO: 16431
  GFR-binding peptide
  MOD_RES (7), (41): Xaa is C or S
  MOD_RES (21), (22), (23), (24), (25): Xaa is A or G
  MOD_RES (26), (27), (28), (29): Xaa is A or G or is absent

SEQ ID NO: 55322 - protein, 38 aa, Artificial Sequence; identical to SEQ ID NO: 16433
  GFR-binding peptide
  MOD_RES (6), (7): Xaa is C or S

SEQ ID NO: 55323 - protein, 39 aa, Artificial Sequence; identical to SEQ ID NO: 16434
  GFR-binding peptide
  MOD_RES (6), (7): Xaa is C or S
  MOD_RES (21), (22), (23), (24), (25): Xaa is A or G
  MOD_RES (26), (27), (28), (29): Xaa is A or G or is absent

SEQ ID NO: 55324 - protein, 43 aa, Artificial Sequence; identical to SEQ ID NO: 19630
  GFR-binding peptide
  MOD_RES (5), (42): Xaa is C or S
  MOD_RES (21), (22), (23), (24), (25): Xaa is A or G
  MOD_RES (26), (27), (28), (29): Xaa is A or G or is absent

SEQ ID NO: 55325 - protein, 40 aa, Artificial Sequence; identical to SEQ ID NO: 16435
  GFR-binding peptide
  MOD_RES (5), (6), (40): Xaa is C or S
  MOD_RES (20), (21), (22), (23), (24): Xaa is A or G
  MOD_RES (25), (26), (27), (28): Xaa is A or G or is absent

SEQ ID NO: 55326 - protein, 35 aa, Artificial Sequence
  GFR-binding peptide
  MOD_RES (1), (35): Xaa is C or S
  MOD_RES (15), (16), (17), (18), (19): Xaa is A or G
  MOD_RES (20), (21), (22), (23): Xaa is A or G or is absent
XAPTKLRPVQVRKIXXXXXXXXXKKATVNMVVRSX

SEQ ID NO: 55327 - protein, 37 aa, Artificial Sequence
  GFR-binding peptide
  MOD_RES (2), (3), (35), (37): Xaa is C or S
PXXAPTQLRPVQVRKIDDSSNVIKKATVNMVVRAXGX

SEQ ID NO: 55328 - protein, 35 aa, Artificial Sequence
  GFR-binding peptide
  MOD_RES (2), (3), (34): Xaa is C or S
PXXVSQDLSNITIQIMIGKTPKIIGEMSMIVKSXK

SEQ ID NO: 55329 - protein, 39 aa, Artificial Sequence
  GFR-binding peptide
  MOD_RES (5), (39): Xaa is C or S
  MOD_RES (19), (20), (21), (22), (23): Xaa is A or G
  MOD_RES (24), (25), (26), (27): Xaa is A or G or is absent
TKPTXAPTKLRPVQVRKIXXXXXXXXXKKATVNMVVRSX

SEQ ID NO: 55330 - protein, 36 aa, Artificial Sequence; identical to SEQ ID NO: 19636
  GFR-binding peptide
  MOD_RES (34), (36): Xaa is C or S
  MOD_RES (14), (15), (16), (17), (18): Xaa is A or G
  MOD_RES (19), (20), (21), (22): Xaa is A or G or is absent

SEQ ID NO: 55331 - protein, 37 aa, Artificial Sequence; identical to SEQ ID NO: 16440
  GFR-binding peptide
  MOD_RES (4), (5), (37): Xaa is C or S

SEQ ID NO: 55332 - protein, 38 aa, Artificial Sequence
  GFR-binding peptide
  MOD_RES (3), (4), (37): Xaa is C or S
  MOD_RES (18), (19), (20), (21), (22): Xaa is A or G
  MOD_RES (23), (24), (25), (26): Xaa is A or G or is absent
SPXXVSQDLSNITIQIMXXXXXXXXXIGEMSMIVKSXK

SEQ ID NO: 55333 - protein, 38 aa, Artificial Sequence; identical to SEQ ID NO: 16443
  GFR-binding peptide
  MOD_RES (5), (6), (38): Xaa is C or S

SEQ ID NO: 55334 - protein, 38 aa, Artificial Sequence
  GFR-binding peptide
  MOD_RES (3), (4), (38): Xaa is C or S
  MOD_RES (18), (19), (20), (21), (22): Xaa is A or G
  MOD_RES (23), (24), (25), (26): Xaa is A or G or is absent
KPXXAPTQLRPVQVRKIXXXXXXXXXKKATVNMVVRAX

SEQ ID NO: 55335 - protein, 38 aa, Artificial Sequence; identical to SEQ ID NO: 16448
  GFR-binding peptide
  MOD_RES (4), (5), (38): Xaa is C or S
  MOD_RES (19), (20), (21), (22), (23): Xaa is A or G
  MOD_RES (24), (25), (26), (27): Xaa is A or G or is absent

SEQ ID NO: 55336 - protein, 42 aa, Artificial Sequence
  GFR-binding peptide
  MOD_RES (6), (7), (40), (42): Xaa is C or S
  MOD_RES (21), (22), (23), (24), (25): Xaa is A or G
  MOD_RES (26), (27), (28), (29): Xaa is A or G or is absent
ASASPXXVPQDLSNITIQIMXXXXXXXXXIGEMSMVVKSXKX

SEQ ID NO: 55337 - protein, 38 aa, Artificial Sequence; identical to SEQ ID NO: 19642
  GFR-binding peptide
  MOD_RES (6), (6): Xaa is C or S

SEQ ID NO: 55338 - protein, 34 aa, Artificial Sequence
  GFR-binding peptide
  MOD_RES (1), (2): Xaa is C or S
  MOD_RES (16), (17), (18), (19), (20): Xaa is A or G
  MOD_RES (21), (22), (23), (24): Xaa is A or G or is absent
XXVSQDLSNITIQIMXXXXXXXXXIGEMSMIVKS

SEQ ID NO: 55339 - protein, 39 aa, Artificial Sequence
  GFR-binding peptide
  MOD_RES (2), (3), (37), (39): Xaa is C or S
  MOD_RES (17), (18), (19), (20), (21): Xaa is A or G
  MOD_RES (22), (23), (24), (25): Xaa is A or G or is absent
AXXVPTELRSVKMAKVXXXXXXXXXKEVQVEMVVEGXGX

SEQ ID NO: 55340 - protein, 36 aa, Artificial Sequence; identical to SEQ ID NO: 16452
  GFR-binding peptide
  MOD_RES (2), (3), (35): Xaa is C or S

SEQ ID NO: 55341 - protein, 32 aa, Artificial Sequence
  GFR-binding peptide
  MOD_RES (2), (2): Xaa is C or S
TXAPTKLRPVQVRKIDDSSNVIKKATVNMVVR

SEQ ID NO: 55342 - protein, 34 aa, Artificial Sequence
  GFR-binding peptide
  MOD_RES (32), (34): Xaa is C or S
VPTELSNITMQIMDEYDKVVIGEMSEMVVEGXGX

SEQ ID NO: 55343 - protein, 38 aa, Artificial Sequence
  GFR-binding peptide
  MOD_RES (5), (6): Xaa is C or S
  MOD_RES (20), (21), (22), (23), (24): Xaa is A or G
  MOD_RES (25), (26), (27), (28): Xaa is A or G or is absent
VPKPXXAPTKLSNITVQIMXXXXXXXXXIGEMSNMVVR

SEQ ID NO: 55344 - protein, 37 aa, Artificial Sequence
  GFR-binding peptide
  MOD_RES (1), (1): Xaa is C or S
  MOD_RES (17), (18), (19), (20), (21): Xaa is A or G
  MOD_RES (22), (23), (24), (25): Xaa is A or G or is absent
XQPSRVHHEPLTVLYYXXXXXXXXXEQLSNRLEEHLE

SEQ ID NO: 55345 - protein, 42 aa, Artificial Sequence
  GFR-binding peptide
  MOD_RES (6), (40), (42): Xaa is C or S
  MOD_RES (20), (21), (22), (23), (24): Xaa is A or G
  MOD_RES (25), (26), (27), (28): Xaa is A or G or is absent
DEGLEXVPTEEEPLTMLYYXXXXXXXXXEQLSNFLQHNKXEX

SEQ ID NO: 55346 - protein, 38 aa, Artificial Sequence
  GFR-binding peptide
  MOD_RES (6), (6): Xaa is C or S
  MOD_RES (20), (21), (22), (23), (24): Xaa is A or G
  MOD_RES (25), (26), (27), (28): Xaa is A or G or is absent
DEGLEXVPTEEEPLTMLYYXXXXXXXXXEQLSNFLQHN

SEQ ID NO: 55347 - protein, 40 aa, Artificial Sequence
  GFR-binding peptide
  MOD_RES (4), (5), (37), (39): Xaa is C or S
PKPXXAPTQLRPVQVRKIDDSSNVIKKATVNMVVRAXGXH

SEQ ID NO: 55348 - protein, 44 aa, Artificial Sequence; identical to SEQ ID NO: 19646
  GFR-binding peptide
  MOD_RES (4), (41), (43): Xaa is C or S
  MOD_RES (20), (21), (22), (23), (24): Xaa is A or G
  MOD_RES (25), (26), (27), (28): Xaa is A or G or is absent

SEQ ID NO: 55349 - protein, 37 aa, Artificial Sequence
  GFR-binding peptide
  MOD_RES (2), (3), (37): Xaa is C or S
  MOD_RES (17), (18), (19), (20), (21): Xaa is A or G
  MOD_RES (22), (23), (24), (25): Xaa is A or G or is absent
AXXVPTELRSVKMAKVXXXXXXXXXKEVQVDMVVEGX

SEQ ID NO: 55350 - protein, 34 aa, Artificial Sequence; identical to SEQ ID NO: 16457
  GFR-binding peptide
  MOD_RES (1), (2): Xaa is C or S
  MOD_RES (16), (17), (18), (19), (20): Xaa is A or G
  MOD_RES (21), (22), (23), (24): Xaa is A or G or is absent

SEQ ID NO: 55351 - protein, 38 aa, Artificial Sequence
  GFR-binding peptide
  MOD_RES (4), (5), (36), (38): Xaa is C or S
ASPXXVSQDLRSVKIAKVIGKTPKIKEVQVMIVKSXKX

SEQ ID NO: 55352 - protein, 38 aa, Artificial Sequence
  GFR-binding peptide
  MOD_RES (1), (2), (36), (38): Xaa is C or S
  MOD_RES (16), (17), (18), (19), (20): Xaa is A or G
  MOD_RES (21), (22), (23), (24): Xaa is A or G or is absent
XXAPTQLRPVQVRKIXXXXXXXXXKKATVNMVVRAXGX

SEQ ID NO: 55353 - protein, 39 aa, Artificial Sequence
  GFR-binding peptide
  MOD_RES (5), (6), (38): Xaa is C or S
VPKPXXAPTQLRPVQVRKIDDSSNVIKKATVNMVVRAXG

SEQ ID NO: 55354 - protein, 43 aa, Artificial Sequence
  GFR-binding peptide
  MOD_RES (5), (6), (40), (42): Xaa is C or S
  MOD_RES (20), (21), (22), (23), (24): Xaa is A or G
  MOD_RES (25), (26), (27), (28): Xaa is A or G or is absent
IPKAXXVPTELRPVQMRKIXXXXXXXXXKKATVEMVVEGXGXR

SEQ ID NO: 55355 - protein, 36 aa, Artificial Sequence
  GFR-binding peptide
  MOD_RES (4), (5): Xaa is C or S
PKAXXVPTELSNITMQIMDENEKVVIGEMSDMVVEG

SEQ ID NO: 55356 - protein, 31 aa, Artificial Sequence; identical to SEQ ID NO: 16461
  GFR-binding peptide

SEQ ID NO: 55357 - protein, 43 aa, Artificial Sequence; identical to SEQ ID NO: 16462
  GFR-binding peptide
  MOD_RES (6), (7), (40), (42): Xaa is C or S
  MOD_RES (21), (22), (23), (24), (25): Xaa is A or G
  MOD_RES (26), (27), (28), (29): Xaa is A or G or is absent

SEQ ID NO: 55358 - protein, 36 aa, Artificial Sequence; identical to SEQ ID NO: 19650
  GFR-binding peptide
  MOD_RES (36), (36): Xaa is C or S
  MOD_RES (15), (16), (17), (18), (19): Xaa is A or G
  MOD_RES (20), (21), (22), (23): Xaa is A or G or is absent

SEQ ID NO: 55359 - protein, 36 aa, Artificial Sequence
  GFR-binding peptide
  MOD_RES (1), (34), (36): Xaa is C or S
  MOD_RES (15), (16), (17), (18), (19): Xaa is A or G
  MOD_RES (20), (21), (22), (23): Xaa is A or G or is absent
XVPQDLRPVQIRKIXXXXXXXXXKKATVMVVKSXKX

SEQ ID NO: 55360 - protein, 39 aa, Artificial Sequence; identical to SEQ ID NO: 16463
  GFR-binding peptide
  MOD_RES (6), (7): Xaa is C or S
  MOD_RES (21), (22), (23), (24), (25): Xaa is A or G
  MOD_RES (26), (27), (28), (29): Xaa is A or G or is absent

SEQ ID NO: 55361 - protein, 37 aa, Artificial Sequence
  GFR-binding peptide
  MOD_RES (4), (5), (36): Xaa is C or S
ASPXXVSQDLRPVQIRKIIGKTPKIKKATVMIVKSXK

SEQ ID NO: 55362 - protein, 38 aa, Artificial Sequence
  GFR-binding peptide
  MOD_RES (4), (4): Xaa is C or S
NVQXRPTQVQLEPLTVLYYEIVRKKPIFEQLSNTLEDH

SEQ ID NO: 55363 - protein, 36 aa, Artificial Sequence
  GFR-binding peptide
  MOD_RES (35), (35): Xaa is C or S
  MOD_RES (14), (15), (16), (17), (18): Xaa is A or G
  MOD_RES (19), (20), (21), (22): Xaa is A or G or is absent
SRVHHEPLTVLYYXXXXXXXXXEQLSNRLEEHLEXA

SEQ ID NO: 55364 - protein, 44 aa, Artificial Sequence
  GFR-binding peptide
  MOD_RES (6), (7), (41), (43): Xaa is C or S
  MOD_RES (21), (22), (23), (24), (25): Xaa is A or G
  MOD_RES (26), (27), (28), (29): Xaa is A or G or is absent
TVPKPXXAPTQLRPVQVRKIXXXXXXXXXKKATVNMVVRAXGXH

SEQ ID NO: 55365 - protein, 36 aa, Artificial Sequence; identical to SEQ ID NO: 19652
  GFR-binding peptide
  MOD_RES (1), (35): Xaa is C or S
  MOD_RES (15), (16), (17), (18), (19): Xaa is A or G
  MOD_RES (20), (21), (22), (23): Xaa is A or G or is absent

SEQ ID NO: 55366 - protein, 35 aa, Artificial Sequence
  GFR-binding peptide
  MOD_RES (4), (5): Xaa is C or S
ASPXXVPQDLRPVQIRKIVGRTPKVKKATVMVVKS

SEQ ID NO: 55367 - protein, 39 aa, Artificial Sequence
  GFR-binding peptide
  MOD_RES (3), (4), (36), (38): Xaa is C or S
KAXXVPTELRSVKMAKVDEYDKVVKEVQVEMVVEGXGXR

SEQ ID NO: 55368 - protein, 43 aa, Artificial Sequence; identical to SEQ ID NO: 19658
  GFR-binding peptide
  MOD_RES (4), (41), (43): Xaa is C or S
  MOD_RES (20), (21), (22), (23), (24): Xaa is A or G
  MOD_RES (25), (26), (27), (28): Xaa is A or G or is absent

SEQ ID NO: 55369 - protein, 31 aa, Artificial Sequence; identical to SEQ ID NO: 16470
  GFR-binding peptide
  MOD_RES (1), (1): Xaa is C or S

SEQ ID NO: 55370 - protein, 38 aa, Artificial Sequence; identical to SEQ ID NO: 16471
  GFR-binding peptide
  MOD_RES (1), (2), (36), (38): Xaa is C or S
  MOD_RES (16), (17), (18), (19), (20): Xaa is A or G
  MOD_RES (21), (22), (23), (24): Xaa is A or G or is absent

SEQ ID NO: 55371 - protein, 36 aa, Artificial Sequence; identical to SEQ ID NO: 16472
  GFR-binding peptide
  MOD_RES (1), (2), (34), (36): Xaa is C or S

SEQ ID NO: 55372 - protein, 41 aa, Artificial Sequence; identical to SEQ ID NO: 16473
  GFR-binding peptide
  MOD_RES (5), (39), (41): Xaa is C or S
  MOD_RES (19), (20), (21), (22), (23): Xaa is A or G
  MOD_RES (24), (25), (26), (27): Xaa is A or G or is absent

SEQ ID NO: 55373 - protein, 36 aa, Artificial Sequence; identical to SEQ ID NO: 19661
  GFR-binding peptide
  MOD_RES (1), (1): Xaa is C or S
  MOD_RES (17), (18), (19), (20), (21): Xaa is A or G
  MOD_RES (22), (23), (24), (25): Xaa is A or G or is absent

SEQ ID NO: 55374 - protein, 39 aa, Artificial Sequence
  GFR-binding peptide
  MOD_RES (1), (38): Xaa is C or S
XQPSRVHHEPLTVLYYEYVRKKPKLEQLSNRLEEHLEXA

SEQ ID NO: 55375 - protein, 42 aa, Artificial Sequence
  GFR-binding peptide
  MOD_RES (4), (5), (39), (41): Xaa is C or S
  MOD_RES (19), (20), (21), (22), (23): Xaa is A or G
  MOD_RES (24), (25), (26), (27): Xaa is A or G or is absent
PKPXXAPTKLRSVKVAKVXXXXXXXXXKEVQVNMVVRSXGXH

SEQ ID NO: 55376 - protein, 41 aa, Artificial Sequence
  GFR-binding peptide
  MOD_RES (7), (41): Xaa is C or S
NDEGLEXVPTEEEPLPMVYYRIKPHQGQHEQLSNFLQHNKX

SEQ ID NO: 55377 - protein, 33 aa, Artificial Sequence
  GFR-binding peptide
  MOD_RES (14), (15), (16), (17), (18): Xaa is A or G
  MOD_RES (19), (20), (21), (22): Xaa is A or G or is absent
TQVQLEPLTVLYYXXXXXXXXXEQLSNTLEDHL

SEQ ID NO: 55378 - protein, 45 aa, Artificial Sequence
  GFR-binding peptide
  MOD_RES (5), (42), (44): Xaa is C or S
SSVKXQPSRVHHEPLPVVYYEYVRKKPKLEQLSNRLEEHLEXAXA

SEQ ID NO: 55379 - protein, 37 aa, Artificial Sequence
  GFR-binding peptide
  MOD_RES (34), (36): Xaa is C or S
  MOD_RES (14), (15), (16), (17), (18): Xaa is A or G
  MOD_RES (19), (20), (21), (22): Xaa is A or G or is absent
APTKLSNITVQIMXXXXXXXXXIGEMSNMVVRSXGXH

SEQ ID NO: 55380 - protein, 40 aa, Artificial Sequence
  GFR-binding peptide
  MOD_RES (2), (3), (37), (39): Xaa is C or S
  MOD_RES (17), (18), (19), (20), (21): Xaa is A or G
  MOD_RES (22), (23), (24), (25): Xaa is A or G or is absent
AXXVPTELRPVQMRKIXXXXXXXXXKKATVEMVVEGXGXR

SEQ ID NO: 55381 - protein, 38 aa, Artificial Sequence
  GFR-binding peptide
  MOD_RES (6), (7), (38): Xaa is C or S
ASASPXXVPQDLSNITIQIMVGRTPKVIGEMSMVVKSX

SEQ ID NO: 55382 - protein, 32 aa, Artificial Sequence
  GFR-binding peptide
  MOD_RES (1), (1): Xaa is C or S
XVPTELSNITMQIMDEYDKVVIGEMSEMVVEG

SEQ ID NO: 55383 - protein, 35 aa, Artificial Sequence
  GFR-binding peptide
  MOD_RES (34), (34): Xaa is C or S
  MOD_RES (14), (15), (16), (17), (18): Xaa is A or G
  MOD_RES (19), (20), (21), (22): Xaa is A or G or is absent
VPTELRPVQMRKIXXXXXXXXXKKATVEMVVEGXG

SEQ ID NO: 55384 - protein, 34 aa, Artificial Sequence; identical to SEQ ID NO: 16479
  GFR-binding peptide
  MOD_RES (2), (3), (34): Xaa is C or S

SEQ ID NO: 55385 - protein, 37 aa, Artificial Sequence
  GFR-binding peptide
  MOD_RES (1), (1): Xaa is C or S
  MOD_RES (17), (18), (19), (20), (21): Xaa is A or G
  MOD_RES (22), (23), (24), (25): Xaa is A or G or is absent
XRPTQVQLEPLTVLYYXXXXXXXXXEQLSNTLEDHLA

SEQ ID NO: 55386 - protein, 37 aa, Artificial Sequence
  GFR-binding peptide
  MOD_RES (3), (4), (35), (37): Xaa is C or S
SPXXVSQDLRPVQIRKIIGKTPKIKKATVMIVKSXKX

SEQ ID NO: 55387 - protein, 40 aa, Artificial Sequence; identical to SEQ ID NO: 19672
  GFR-binding peptide
  MOD_RES (1), (38), (40): Xaa is C or S
  MOD_RES (17), (18), (19), (20), (21): Xaa is A or G
  MOD_RES (22), (23), (24), (25): Xaa is A or G or is absent

SEQ ID NO: 55388 - protein, 39 aa, Artificial Sequence; identical to SEQ ID NO: 16483
  GFR-binding peptide
  MOD_RES (5), (6), (39): Xaa is C or S
  MOD_RES (20), (21), (22), (23), (24): Xaa is A or G
  MOD_RES (25), (26), (27), (28): Xaa is A or G or is absent

SEQ ID NO: 55389 - protein, 44 aa, Artificial Sequence; identical to SEQ ID NO: 19673
  GFR-binding peptide
  MOD_RES (5), (42), (44): Xaa is C or S
  MOD_RES (21), (22), (23), (24), (25): Xaa is A or G
  MOD_RES (26), (27), (28), (29): Xaa is A or G or is absent

SEQ ID NO: 55390 - protein, 37 aa, Artificial Sequence
  GFR-binding peptide
  MOD_RES (5), (37): Xaa is C or S
TKPTXAPTKLRSVKVAKVDDSSNVIKEVQVNMVVRSX

SEQ ID NO: 55391 - protein, 41 aa, Artificial Sequence
  GFR-binding peptide
  MOD_RES (3), (4), (38), (40): Xaa is C or S
  MOD_RES (18), (19), (20), (21), (22): Xaa is A or G
  MOD_RES (23), (24), (25), (26): Xaa is A or G or is absent
KAXXVPTELSNITMQIMXXXXXXXXXIGEMSDMVVEGXGXR

SEQ ID NO: 55392 - protein, 36 aa, Artificial Sequence; identical to SEQ ID NO: 16484
  GFR-binding peptide
  MOD_RES (1), (35): Xaa is C or S
  MOD_RES (15), (16), (17), (18), (19): Xaa is A or G
  MOD_RES (20), (21), (22), (23): Xaa is A or G or is absent

SEQ ID NO: 55393 - protein, 37 aa, Artificial Sequence; identical to SEQ ID NO: 16486
  GFR-binding peptide
  MOD_RES (1), (2), (34), (36): Xaa is C or S

SEQ ID NO: 55394 - protein, 34 aa, Artificial Sequence
  GFR-binding peptide
  MOD_RES (33), (33): Xaa is C or S
  MOD_RES (14), (15), (16), (17), (18): Xaa is A or G
  MOD_RES (19), (20), (21), (22): Xaa is A or G or is absent
VPQALRPVQIRKIXXXXXXXXXKKATVMIVRSXK

SEQ ID NO: 55395 - protein, 30 aa, Artificial Sequence
  GFR-binding peptide
APTKLSNITVQIMDDSSNVIIGEMSNMVVR

SEQ ID NO: 55396 - protein, 42 aa, Artificial Sequence
  GFR-binding peptide
  MOD_RES (5), (39), (41): Xaa is C or S
  MOD_RES (19), (20), (21), (22), (23): Xaa is A or G
  MOD_RES (24), (25), (26), (27): Xaa is A or G or is absent
TKPTXAPTKLRPVQVRKIXXXXXXXXXKKATVNMVVRSXGXH

SEQ ID NO: 55397 - protein, 37 aa, Artificial Sequence; identical to SEQ ID NO: 16489
  GFR-binding peptide
  MOD_RES (1), (2), (36): Xaa is C or S
  MOD_RES (16), (17), (18), (19), (20): Xaa is A or G
  MOD_RES (21), (22), (23), (24): Xaa is A or G or is absent

SEQ ID NO: 55398 - protein, 36 aa, Artificial Sequence
  GFR-binding peptide
  MOD_RES (5), (6): Xaa is C or S
VPKPXXAPTKLRSVKVAKVDDSSNVIKEVQVNMVVR

SEQ ID NO: 55399 - protein, 38 aa, Artificial Sequence
  GFR-binding peptide
  MOD_RES (4), (5), (36), (38): Xaa is C or S
ASPXXVPQDLRPVQIRKIVGRTPKVKKATVMVVKSXKX

SEQ ID NO: 55400 - protein, 38 aa, Artificial Sequence; identical to SEQ ID NO: 16491
  GFR-binding peptide
  MOD_RES (5), (6), (38): Xaa is C or S

SEQ ID NO: 55401 - protein, 35 aa, Artificial Sequence
  GFR-binding peptide
  MOD_RES (1), (2), (35): Xaa is C or S
  MOD_RES (16), (17), (18), (19), (20): Xaa is A or G
  MOD_RES (21), (22), (23), (24): Xaa is A or G or is absent
XXVPQALSNITIQIMXXXXXXXXXIGEMSMIVRSX

SEQ ID NO: 55402 - protein, 42 aa, Artificial Sequence
  GFR-binding peptide
  MOD_RES (3), (40), (42): Xaa is C or S
VKXQPSRVHHEPLPVVYYEYVRKKPKLEQLSNRLEEHLEXAX

SEQ ID NO: 55403 - protein, 41 aa, Artificial Sequence
  GFR-binding peptide
  MOD_RES (6), (7), (39), (41): Xaa is C or S
KIPKAXXVPTELRPVQMRKIDENEKVVKKATVDMVVEGXGX

SEQ ID NO: 55404 - protein, 34 aa, Artificial Sequence
  GFR-binding peptide
  MOD_RES (1), (1): Xaa is C or S
  MOD_RES (15), (16), (17), (18), (19): Xaa is A or G
  MOD_RES (20), (21), (22), (23): Xaa is A or G or is absent
XVPTELRSVKMAKVXXXXXXXXXKEVQVEMVVEG

SEQ ID NO: 55405 - protein, 39 aa, Artificial Sequence
  GFR-binding peptide
  MOD_RES (36), (38): Xaa is C or S
  MOD_RES (15), (16), (17), (18), (19): Xaa is A or G
  MOD_RES (20), (21), (22), (23): Xaa is A or G or is absent
PSRVHHEPLPVVYYXXXXXXXXXEQLSNRLEEHLEXAXA

SEQ ID NO: 55406 - protein, 44 aa, Artificial Sequence
  GFR-binding peptide
  MOD_RES (6), (7), (41), (43): Xaa is C or S
  MOD_RES (21), (22), (23), (24), (25): Xaa is A or G
  MOD_RES (26), (27), (28), (29): Xaa is A or G or is absent
SIPKAXXVPTELRPVQMRKIXXXXXXXXXKKATVEMVVEGXGXR

SEQ ID NO: 55407 - protein, 32 aa, Artificial Sequence
  GFR-binding peptide
  MOD_RES (31), (31): Xaa is C or S
VSQDLSNITIQIMIGKTPKIIGEMSMIVKSXK

SEQ ID NO: 55408 - protein, 39 aa, Artificial Sequence; identical to SEQ ID NO: 16493
  GFR-binding peptide
  MOD_RES (2), (3), (36), (38): Xaa is C or S
  MOD_RES (17), (18), (19), (20), (21): Xaa is A or G
  MOD_RES (22), (23), (24), (25): Xaa is A or G or is absent

SEQ ID NO: 55409 - protein, 34 aa, Artificial Sequence; identical to SEQ ID NO: 16494
  GFR-binding peptide
  MOD_RES (1), (33): Xaa is C or S

SEQ ID NO: 55410 - protein, 40 aa, Artificial Sequence
  GFR-binding peptide
  MOD_RES (5), (6), (39): Xaa is C or S
  MOD_RES (20), (21), (22), (23), (24): Xaa is A or G
  MOD_RES (25), (26), (27), (28): Xaa is A or G or is absent
SASPXXVSQDLSNITIQIMXXXXXXXXXIGEMSMIVKSXK

SEQ ID NO: 55411 - protein, 36 aa, Artificial Sequence
  GFR-binding peptide
  MOD_RES (34), (36): Xaa is C or S
  MOD_RES (14), (15), (16), (17), (18): Xaa is A or G
  MOD_RES (19), (20), (21), (22): Xaa is A or G or is absent
APTQLSNITVQIMXXXXXXXXXIGEMSNMVVRAXGX

SEQ ID NO: 55412 - protein, 37 aa, Artificial Sequence
  GFR-binding peptide
  MOD_RES (3), (37): Xaa is C or S
LEXVPTEEEPLPMVYYRIKPHQGQHEQLSNFLQHNKX

SEQ ID NO: 55413 - protein, 37 aa, Artificial Sequence; identical to SEQ ID NO: 19681
  GFR-binding peptide
  MOD_RES (2), (36): Xaa is C or S
  MOD_RES (16), (17), (18), (19), (20): Xaa is A or G
  MOD_RES (21), (22), (23), (24): Xaa is A or G or is absent

SEQ ID NO: 55414 - protein, 37 aa, Artificial Sequence
  GFR-binding peptide
  MOD_RES (2), (3), (34), (36): Xaa is C or S
PXXVSQDLRPVQIRKIIGKTPKIKKATVMIVKSXKXS

SEQ ID NO: 55415 - protein, 35 aa, Artificial Sequence
  GFR-binding peptide
  MOD_RES (1), (34): Xaa is C or S
  MOD_RES (15), (16), (17), (18), (19): Xaa is A or G
  MOD_RES (20), (21), (22), (23): Xaa is A or G or is absent
XVSQDLRPVQIRKIXXXXXXXXXKKATVMIVKSXK

SEQ ID NO: 55416 - protein, 36 aa, Artificial Sequence
  GFR-binding peptide
  MOD_RES (5), (6): Xaa is C or S
VPKPXXAPTKLSNITVQIMDDSSNVIIGEMSNMVVR

SEQ ID NO: 55417 - protein, 34 aa, Artificial Sequence
  GFR-binding peptide
  MOD_RES (1), (33): Xaa is C or S
XVPTELRSVKMAKVDENEKVVKEVQVDMVVEGXG

SEQ ID NO: 55418 - protein, 38 aa, Artificial Sequence
  GFR-binding peptide
  MOD_RES (2), (3), (37): Xaa is C or S
  MOD_RES (17), (18), (19), (20), (21): Xaa is A or G
  MOD_RES (22), (23), (24), (25): Xaa is A or G or is absent
AXXVPTELSNITMQIMXXXXXXXXXIGEMSEMVVEGXG

SEQ ID NO: 55419 - protein, 39 aa, Artificial Sequence
  GFR-binding peptide
  MOD_RES (5), (37), (39): Xaa is C or S
TKPTXAPTKLSNITVQIMDDSSNVIIGEMSNMVVRSXGX

SEQ ID NO: 55420 - protein, 37 aa, Artificial Sequence; identical to SEQ ID NO: 19684
  GFR-binding peptide
  MOD_RES (37), (37): Xaa is C or S
  MOD_RES (16), (17), (18), (19), (20): Xaa is A or G
  MOD_RES (21), (22), (23), (24): Xaa is A or G or is absent

SEQ ID NO: 55421 - protein, 37 aa, Artificial Sequence
  GFR-binding peptide
  MOD_RES (4), (5), (37): Xaa is C or S
PKPXXAPTQLRPVQVRKIDDSSNVIKKATVNMVVRAX

SEQ ID NO: 55422 - protein, 36 aa, Artificial Sequence; identical to SEQ ID NO: 16504
  GFR-binding peptide
  MOD_RES (2), (3): Xaa is C or S
  MOD_RES (17), (18), (19), (20), (21): Xaa is A or G
  MOD_RES (22), (23), (24), (25): Xaa is A or G or is absent

SEQ ID NO: 55423 - protein, 40 aa, Artificial Sequence
  GFR-binding peptide
  MOD_RES (2), (3), (37), (39): Xaa is C or S
  MOD_RES (17), (18), (19), (20), (21): Xaa is A or G
  MOD_RES (22), (23), (24), (25): Xaa is A or G or is absent
AXXVPTELRSVKMAKVXXXXXXXXXKEVQVDMVVEGXGXR

SEQ ID NO: 55424 - protein, 39 aa, Artificial Sequence; identical to SEQ ID NO: 16506
  GFR-binding peptide
  MOD_RES (3), (4), (38): Xaa is C or S
  MOD_RES (18), (19), (20), (21), (22): Xaa is A or G
  MOD_RES (23), (24), (25), (26): Xaa is A or G or is absent

SEQ ID NO: 55425 - protein, 43 aa, Artificial Sequence; identical to SEQ ID NO: 16507
  GFR-binding peptide
  MOD_RES (6), (40), (42): Xaa is C or S
  MOD_RES (20), (21), (22), (23), (24): Xaa is A or G
  MOD_RES (25), (26), (27), (28): Xaa is A or G or is absent

SEQ ID NO: 55426 - protein, 37 aa, Artificial Sequence
  GFR-binding peptide
  MOD_RES (5), (6), (37): Xaa is C or S
SASPXXVSQDLSNITIQIMIGKTPKIIGEMSMIVKSX

SEQ ID NO: 55427 - protein, 40 aa, Artificial Sequence
  GFR-binding peptide
  MOD_RES (4), (4): Xaa is C or S
SVKXQPSRVHHEPLTVLYYEYVRKKPKLEQLSNRLEEHLE

SEQ ID NO: 55428 - protein, 39 aa, Artificial Sequence; identical to SEQ ID NO: 19690
  GFR-binding peptide
  MOD_RES (5), (5): Xaa is C or S

SEQ ID NO: 55429 - protein, 38 aa, Artificial Sequence; identical to SEQ ID NO: 19692
  GFR-binding peptide
  MOD_RES (37), (37): Xaa is C or S

SEQ ID NO: 55430 - protein, 39 aa, Artificial Sequence; identical to SEQ ID NO: 16512
  GFR-binding peptide
  MOD_RES (5), (6), (38): Xaa is C or S

SEQ ID NO: 55431 - protein, 38 aa, Artificial Sequence; identical to SEQ ID NO: 16513
  GFR-binding peptide
  MOD_RES (4), (5): Xaa is C or S
  MOD_RES (19), (20), (21), (22), (23): Xaa is A or G
  MOD_RES (24), (25), (26), (27): Xaa is A or G or is absent

SEQ ID NO: 55432 - protein, 39 aa, Artificial Sequence; identical to SEQ ID NO: 19694
  GFR-binding peptide
  MOD_RES (2), (39): Xaa is C or S
  MOD_RES (18), (19), (20), (21), (22): Xaa is A or G
  MOD_RES (23), (24), (25), (26): Xaa is A or G or is absent

SEQ ID NO: 55433 - protein, 35 aa, Artificial Sequence; identical to SEQ ID NO: 19695
  GFR-binding peptide
  MOD_RES (1), (35): Xaa is C or S
  MOD_RES (15), (16), (17), (18), (19): Xaa is A or G
  MOD_RES (20), (21), (22), (23): Xaa is A or G or is absent

SEQ ID NO: 55434 - protein, 34 aa, Artificial Sequence
  GFR-binding peptide
  MOD_RES (15), (16), (17), (18), (19): Xaa is A or G
  MOD_RES (20), (21), (22), (23): Xaa is A or G or is absent
PTQVQLEPLPVVYYXXXXXXXXXEQLSNTLEDHL

SEQ ID NO: 55435 - protein, 39 aa, Artificial Sequence; identical to SEQ ID NO: 19696
  GFR-binding peptide
  MOD_RES (5), (5): Xaa is C or S

SEQ ID NO: 55436 - protein, 41 aa, Artificial Sequence
  GFR-binding peptide
  MOD_RES (6), (7), (41): Xaa is C or S
  MOD_RES (21), (22), (23), (24), (25): Xaa is A or G
  MOD_RES (26), (27), (28), (29): Xaa is A or G or is absent
TVPKPXXAPTQLSNITVQIMXXXXXXXXXIGEMSNMVVRAX

SEQ ID NO: 55437 - protein, 34 aa, Artificial Sequence
  GFR-binding peptide
  MOD_RES (31), (33): Xaa is C or S
VSQDLRSVKIAKVIGKTPKIKEVQVMIVKSXKXS

SEQ ID NO: 55438 - protein, 38 aa, Artificial Sequence; identical to SEQ ID NO: 16518
  GFR-binding peptide
  MOD_RES (1), (2), (36), (38): Xaa is C or S
  MOD_RES (16), (17), (18), (19), (20): Xaa is A or G
  MOD_RES (21), (22), (23), (24): Xaa is A or G or is absent

SEQ ID NO: 55439 - protein, 30 aa, Artificial Sequence
  GFR-binding peptide
VPQDLSNITIQIMVGRTPKVIGEMSMVVKS

SEQ ID NO: 55440 - protein, 40 aa, Artificial Sequence
  GFR-binding peptide
  MOD_RES (3), (37), (39): Xaa is C or S
  MOD_RES (17), (18), (19), (20), (21): Xaa is A or G
  MOD_RES (22), (23), (24), (25): Xaa is A or G or is absent
LEXVPTEEEPLTMLYYXXXXXXXXXEQLSNFLQHNKXEXR

SEQ ID NO: 55441 - protein, 35 aa, Artificial Sequence; identical to SEQ ID NO: 16523
  GFR-binding peptide
  MOD_RES (1), (34): Xaa is C or S
  MOD_RES (15), (16), (17), (18), (19): Xaa is A or G
  MOD_RES (20), (21), (22), (23): Xaa is A or G or is absent

SEQ ID NO: 55442 - protein, 39 aa, Artificial Sequence; identical to SEQ ID NO: 16525
  GFR-binding peptide
  MOD_RES (6), (7): Xaa is C or S
  MOD_RES (21), (22), (23), (24), (25): Xaa is A or G
  MOD_RES (26), (27), (28), (29): Xaa is A or G or is absent

SEQ ID NO: 55443 - protein, 41 aa, Artificial Sequence
  GFR-binding peptide
  MOD_RES (4), (41): Xaa is C or S
NVQXRPTQVQLEPLPVVYYEIVRKKPIFEQLSNTLEDHLAX

SEQ ID NO: 55444 - protein, 42 aa, Artificial Sequence; identical to SEQ ID NO: 19705
  GFR-binding peptide
  MOD_RES (7), (41): Xaa is C or S

SEQ ID NO: 55445 - protein, 36 aa, Artificial Sequence
  GFR-binding peptide
  MOD_RES (1), (35): Xaa is C or S
  MOD_RES (15), (16), (17), (18), (19): Xaa is A or G
  MOD_RES (20), (21), (22), (23): Xaa is A or G or is absent
XVPTELRPVQMRKIXXXXXXXXXKKATVDMVVEGXG

SEQ ID NO: 55446 - protein, 34 aa, Artificial Sequence
  GFR-binding peptide
  MOD_RES (1), (1): Xaa is C or S
  MOD_RES (15), (16), (17), (18), (19): Xaa is A or G
  MOD_RES (20), (21), (22), (23): Xaa is A or G or is absent
XVPTELSNITMQIMXXXXXXXXXIGEMSDMVVEG

SEQ ID NO: 55447 - protein, 41 aa, Artificial Sequence
  GFR-binding peptide
  MOD_RES (6), (7), (39), (41): Xaa is C or S
SIPKAXXVPTELRSVKMAKVDEYDKVVKEVQVEMVVEGXGX

SEQ ID NO: 55448 - protein, 35 aa, Artificial Sequence; identical to SEQ ID NO: 16528
  GFR-binding peptide
  MOD_RES (1), (35): Xaa is C or S
  MOD_RES (15), (16), (17), (18), (19): Xaa is A or G
  MOD_RES (20), (21), (22), (23): Xaa is A or G or is absent

SEQ ID NO: 55449 - protein, 34 aa, Artificial Sequence; identical to SEQ ID NO: 16531
  GFR-binding peptide
  MOD_RES (1), (2), (34): Xaa is C or S

SEQ ID NO: 55450 - protein, 36 aa, Artificial Sequence
  GFR-binding peptide
  MOD_RES (34), (36): Xaa is C or S
  MOD_RES (14), (15), (16), (17), (18): Xaa is A or G
  MOD_RES (19), (20), (21), (22): Xaa is A or G or is absent
VPTELRPVQMRKIXXXXXXXXXKKATVDMVVEGXGX

SEQ ID NO: 55451 - protein, 35 aa, Artificial Sequence
  GFR-binding peptide
  MOD_RES (1), (2), (35): Xaa is C or S
  MOD_RES (16), (17), (18), (19), (20): Xaa is A or G
  MOD_RES (21), (22), (23), (24): Xaa is A or G or is absent
XXVPQALRSVKIAKVXXXXXXXXXKEVQVMIVRSX

SEQ ID NO: 55452 - protein, 41 aa, Artificial Sequence
  GFR-binding peptide
  MOD_RES (1), (38), (40): Xaa is C or S
  MOD_RES (17), (18), (19), (20), (21): Xaa is A or G
  MOD_RES (22), (23), (24), (25): Xaa is A or G or is absent
XRPTQVQLEPLTVLYYXXXXXXXXXEQLSNTLEDHLAXKXE

SEQ ID NO: 55453 - protein, 41 aa, Artificial Sequence
  GFR-binding peptide
  MOD_RES (1), (38), (40): Xaa is C or S
XRPTQVQLEPLPVVYYEIVRKKPIFEQLSNTLEDHLAXKXE

SEQ ID NO: 55454 - protein, 38 aa, Artificial Sequence
  GFR-binding peptide
  MOD_RES (5), (6), (37): Xaa is C or S
SASPXXVPQDLSNITIQIMVGRTPKVIGEMSMVVKSXK

SEQ ID NO: 55455 - protein, 35 aa, Artificial Sequence
  GFR-binding peptide
  MOD_RES (3), (4): Xaa is C or S
KAXXVPTELRPVQMRKIDEYDKVVKKATVEMVVEG

SEQ ID NO: 55456 - protein, 43 aa, Artificial Sequence; identical to SEQ ID NO: 16536
  GFR-binding peptide
  MOD_RES (6), (7), (41), (43): Xaa is C or S
  MOD_RES (21), (22), (23), (24), (25): Xaa is A or G
  MOD_RES (26), (27), (28), (29): Xaa is A or G or is absent

SEQ ID NO: 55457 - protein, 36 aa, Artificial Sequence
  GFR-binding peptide
  MOD_RES (3), (4), (36): Xaa is C or S
KPXXAPTQLRPVQVRKIDDSSNVIKKATVNMVVRAX

SEQ ID NO: 55458 - protein, 41 aa, Artificial Sequence; identical to SEQ ID NO: 16540
  GFR-binding peptide
  MOD_RES (6), (7), (39), (41): Xaa is C or S

SEQ ID NO: 55459 - protein, 37 aa, Artificial Sequence
  GFR-binding peptide
  MOD_RES (4), (5), (37): Xaa is C or S
PKAXXVPTELRSVKMAKVDENEKVVKEVQVDMVVEGX

SEQ ID NO: 55460 - protein, 41 aa, Artificial Sequence; identical to SEQ ID NO: 19712
  GFR-binding peptide
  MOD_RES (2), (39), (41): Xaa is C or S

SEQ ID NO: 55461 - protein, 39 aa, Artificial Sequence; identical to SEQ ID NO: 19713
  GFR-binding peptide
  MOD_RES (2), (39): Xaa is C or S
  MOD_RES (18), (19), (20), (21), (22): Xaa is A or G
  MOD_RES (23), (24), (25), (26): Xaa is A or G or is absent

SEQ ID NO: 55462 - protein, 37 aa, Artificial Sequence
  GFR-binding peptide
  MOD_RES (2), (3), (35), (37): Xaa is C or S
PXXAPTQLRSVKVAKVDDSSNVIKEVQVNMVVRAXGX

SEQ ID NO: 55463 - protein, 37 aa, Artificial Sequence
  GFR-binding peptide
  MOD_RES (2), (3), (36): Xaa is C or S
  MOD_RES (17), (18), (19), (20), (21): Xaa is A or G
  MOD_RES (22), (23), (24), (25): Xaa is A or G or is absent
PXXVPQDLRPVQIRKIXXXXXXXXXKKATVMVVKSXK

SEQ ID NO: 55464 - protein, 34 aa, Artificial Sequence; identical to SEQ ID NO: 19718
  GFR-binding peptide

SEQ ID NO: 55465 - protein, 32 aa, Artificial Sequence; identical to SEQ ID NO: 16544
  GFR-binding peptide
  MOD_RES (1), (2): Xaa is C or S

SEQ ID NO: 55466 - protein, 42 aa, Artificial Sequence; identical to SEQ ID NO: 19720
  GFR-binding peptide
  MOD_RES (2), (39), (41): Xaa is C or S
  MOD_RES (18), (19), (20), (21), (22): Xaa is A or G
  MOD_RES (23), (24), (25), (26): Xaa is A or G or is absent

SEQ ID NO: 55467 - protein, 38 aa, Artificial Sequence; identical to SEQ ID NO: 16545
  GFR-binding peptide
  MOD_RES (6), (38): Xaa is C or S

SEQ ID NO: 55468 - protein, 36 aa, Artificial Sequence
  GFR-binding peptide
  MOD_RES (2), (36): Xaa is C or S
  MOD_RES (16), (17), (18), (19), (20): Xaa is A or G
  MOD_RES (21), (22), (23), (24): Xaa is A or G or is absent
EXVPTEEEPLTMLYYXXXXXXXXXEQLSNFLQHNKX

SEQ ID NO: 55469 - protein, 33 aa, Artificial Sequence
  GFR-binding peptide
  MOD_RES (33), (33): Xaa is C or S
  MOD_RES (14), (15), (16), (17), (18): Xaa is A or G
  MOD_RES (19), (20), (21), (22): Xaa is A or G or is absent
VPQDLRPVQIRKIXXXXXXXXXKKATVMVVKSX

SEQ ID NO: 55470 - protein, 36 aa, Artificial Sequence
  GFR-binding peptide
  MOD_RES (1), (35): Xaa is C or S
  MOD_RES (15), (16), (17), (18), (19): Xaa is A or G
  MOD_RES (20), (21), (22), (23): Xaa is A or G or is absent
XVPTEEEPLTMLYYXXXXXXXXXEQLSNFLQHNKXE

SEQ ID NO: 55471 - protein, 40 aa, Artificial Sequence
  GFR-binding peptide
  MOD_RES (5), (6), (38), (40): Xaa is C or S
IPKAXXVPTELRPVQMRKIDEYDKVVKKATVEMVVEGXGX

SEQ ID NO: 55472 - protein, 33 aa, Artificial Sequence
  GFR-binding peptide
  MOD_RES (32), (32): Xaa is C or S
VPTELRPVQMRKIDENEKVVKKATVDMVVEGXG

SEQ ID NO: 55473 - protein, 34 aa, Artificial Sequence
  GFR-binding peptide
  MOD_RES (15), (16), (17), (18), (19): Xaa is A or G
  MOD_RES (20), (21), (22), (23): Xaa is A or G or is absent
PSRVHHEPLPVVYYXXXXXXXXXEQLSNRLEEHL

SEQ ID NO: 55474 - protein, 40 aa, Artificial Sequence
  GFR-binding peptide
  MOD_RES (6), (40): Xaa is C or S
  MOD_RES (20), (21), (22), (23), (24): Xaa is A or G
  MOD_RES (25), (26), (27), (28): Xaa is A or G or is absent
DEGLEXVPTEEEPLPMVYYXXXXXXXXXEQLSNFLQHNKX

SEQ ID NO: 55475 - protein, 40 aa, Artificial Sequence; identical to SEQ ID NO: 16548
  GFR-binding peptide
  MOD_RES (4), (5), (39): Xaa is C or S
  MOD_RES (19), (20), (21), (22), (23): Xaa is A or G
  MOD_RES (24), (25), (26), (27): Xaa is A or G or is absent

SEQ ID NO: 55476 - protein, 38 aa, Artificial Sequence; identical to SEQ ID NO: 19722
  GFR-binding peptide
  MOD_RES (1), (38): Xaa is C or S

SEQ ID NO: 55477 - protein, 39 aa, Artificial Sequence
  GFR-binding peptide
  MOD_RES (2), (39): Xaa is C or S
  MOD_RES (18), (19), (20), (21), (22): Xaa is A or G
  MOD_RES (23), (24), (25), (26): Xaa is A or G or is absent
KXQPSRVHHEPLTVLYYXXXXXXXXXEQLSNRLEEHLEX

SEQ ID NO: 55478 - protein, 32 aa, Artificial Sequence
  GFR-binding peptide
  MOD_RES (1), (1): Xaa is C or S
XAPTQLSNITVQIMDDSSNVIIGEMSNMVVRA

SEQ ID NO: 55479 - protein, 36 aa, Artificial Sequence; identical to SEQ ID NO: 16552
  GFR-binding peptide
  MOD_RES (3), (4), (36): Xaa is C or S

SEQ ID NO: 55480 - protein, 39 aa, Artificial Sequence; identical to SEQ ID NO: 19725
  GFR-binding peptide
  MOD_RES (1), (38): Xaa is C or S

SEQ ID NO: 55481 - protein, 30 aa, Artificial Sequence; identical to SEQ ID NO: 16553
  GFR-binding peptide

SEQ ID NO: 55482 - protein, 34 aa, Artificial Sequence
  GFR-binding peptide
QPSRVHHEPLPVVYYEYVRKKPKLEQLSNRLEEH

SEQ ID NO: 55483 - protein, 42 aa, Artificial Sequence; identical to SEQ ID NO: 19728
  GFR-binding peptide
  MOD_RES (5), (39), (41): Xaa is C or S

SEQ ID NO: 55484 - protein, 44 aa, Artificial Sequence; identical to SEQ ID NO: 16555
  GFR-binding peptide
  MOD_RES (6), (7), (41), (43): Xaa is C or S
  MOD_RES (21), (22), (23), (24), (25): Xaa is A or G
  MOD_RES (26), (27), (28), (29): Xaa is A or G or is absent

SEQ ID NO: 55485 - protein, 38 aa, Artificial Sequence
  GFR-binding peptide
  MOD_RES (6), (7), (38): Xaa is C or S
ASASPXXVSQDLSNITIQIMIGKTPKIIGEMSMIVKSX

SEQ ID NO: 55486 - protein, 31 aa, Artificial Sequence
  GFR-binding peptide
  MOD_RES (1), (1): Xaa is C or S
XVPTELSNITMQIMDEYDKVVIGEMSEMVVE

SEQ ID NO: 55487 - protein, 36 aa, Artificial Sequence; identical to SEQ ID NO: 19729
  GFR-binding peptide
  MOD_RES (2), (2): Xaa is C or S
  MOD_RES (18), (19), (20), (21), (22): Xaa is A or G
  MOD_RES (23), (24), (25), (26): Xaa is A or G or is absent

SEQ ID NO: 55488 - protein, 40 aa, Artificial Sequence; identical to SEQ ID NO: 16560
  GFR-binding peptide
  MOD_RES (5), (6), (39): Xaa is C or S
  MOD_RES (20), (21), (22), (23), (24): Xaa is A or G
  MOD_RES (25), (26), (27), (28): Xaa is A or G or is absent

SEQ ID NO: 55489 - protein, 40 aa, Artificial Sequence; identical to SEQ ID NO: 19730
  GFR-binding peptide
  MOD_RES (5), (5): Xaa is C or S
  MOD_RES (21), (22), (23), (24), (25): Xaa is A or G
  MOD_RES (26), (27), (28), (29): Xaa is A or G or is absent

SEQ ID NO: 55490 - protein, 41 aa, Artificial Sequence; identical to SEQ ID NO: 19732
  GFR-binding peptide
  MOD_RES (2), (39), (41): Xaa is C or S

SEQ ID NO: 55491 - protein, 33 aa, Artificial Sequence; identical to SEQ ID NO: 16562
  GFR-binding peptide
  MOD_RES (1), (33): Xaa is C or S

SEQ ID NO: 55492 - protein, 33 aa, Artificial Sequence; identical to SEQ ID NO: 16565
  GFR-binding peptide
  MOD_RES (31), (33): Xaa is C or S

SEQ ID NO: 55493 - protein, 31 aa, Artificial Sequence; identical to SEQ ID NO: 16567
  GFR-binding peptide

SEQ ID NO: 55494 - protein, 34 aa, Artificial Sequence; identical to SEQ ID NO: 19737
  GFR-binding peptide
  MOD_RES (34), (34): Xaa is C or S
  MOD_RES (14), (15), (16), (17), (18): Xaa is A or G
  MOD_RES (19), (20), (21), (22): Xaa is A or G or is absent

SEQ ID NO: 55495 - protein, 38 aa, Artificial Sequence
  GFR-binding peptide
  MOD_RES (3), (4), (37): Xaa is C or S
  MOD_RES (18), (19), (20), (21), (22): Xaa is A or G
  MOD_RES (23), (24), (25), (26): Xaa is A or G or is absent
SPXXVPQDLRSVKIAKVXXXXXXXXXKEVQVMVVKSXK

SEQ ID NO: 55496 - protein, 34 aa, Artificial Sequence; identical to SEQ ID NO: 16569
  GFR-binding peptide
  MOD_RES (34), (34): Xaa is C or S
  MOD_RES (14), (15), (16), (17), (18): Xaa is A or G
  MOD_RES (19), (20), (21), (22): Xaa is A or G or is absent

SEQ ID NO: 55497 - protein, 37 aa, Artificial Sequence; identical to SEQ ID NO: 16570
  GFR-binding peptide
  MOD_RES (2), (3), (34), (36): Xaa is C or S

SEQ ID NO: 55498 - protein, 35 aa, Artificial Sequence
  GFR-binding peptide
  MOD_RES (1), (2), (35): Xaa is C or S
  MOD_RES (16), (17), (18), (19), (20): Xaa is A or G
  MOD_RES (21), (22), (23), (24): Xaa is A or G or is absent
XXVPQDLSNITIQIMXXXXXXXXXIGEMSMVVKSX

SEQ ID NO: 55499 - protein, 38 aa, Artificial Sequence; identical to SEQ ID NO: 19740
  GFR-binding peptide
  MOD_RES (2), (36), (38): Xaa is C or S

SEQ ID NO: 55500 - protein, 41 aa, Artificial Sequence; identical to SEQ ID NO: 16571
  GFR-binding peptide
  MOD_RES (5), (39), (41): Xaa is C or S
  MOD_RES (19), (20), (21), (22), (23): Xaa is A or G
  MOD_RES (24), (25), (26), (27): Xaa is A or G or is absent

SEQ ID NO: 55501 - protein, 43 aa, Artificial Sequence; identical to SEQ ID NO: 19741
  GFR-binding peptide
  MOD_RES (5), (42): Xaa is C or S
  MOD_RES (21), (22), (23), (24), (25): Xaa is A or G
  MOD_RES (26), (27), (28), (29): Xaa is A or G or is absent

SEQ ID NO: 55502 - protein, 35 aa, Artificial Sequence
  GFR-binding peptide
  MOD_RES (35), (35): Xaa is C or S
SRVHHEPLPVVYYEYVRKKPKLEQLSNRLEEHLEX

SEQ ID NO: 55503 - protein, 41 aa, Artificial Sequence
  GFR-binding peptide
  MOD_RES (2), (39), (41): Xaa is C or S
QXRPTQVQLEPLPVVYYEIVRKKPIFEQLSNTLEDHLAXKX

SEQ ID NO: 55504 - protein, 42 aa, Artificial Sequence; identical to SEQ ID NO: 19743
  GFR-binding peptide
  MOD_RES (5), (42): Xaa is C or S

SEQ ID NO: 55505 - protein, 34 aa, Artificial Sequence; identical to SEQ ID NO: 16579
  GFR-binding peptide
  MOD_RES (34), (34): Xaa is C or S
  MOD_RES (14), (15), (16), (17), (18): Xaa is A or G
  MOD_RES (19), (20), (21), (22): Xaa is A or G or is absent

SEQ ID NO: 55506 - protein, 37 aa, Artificial Sequence; identical to SEQ ID NO: 16580
  GFR-binding peptide
  MOD_RES (4), (5), (36): Xaa is C or S

SEQ ID NO: 55507 - protein, 37 aa, Artificial Sequence
  GFR-binding peptide
  MOD_RES (6), (7): Xaa is C or S
KIPKAXXVPTELRSVKMAKVDENEKVVKEVQVDMVVE

SEQ ID NO: 55508 - protein, 45 aa, Artificial Sequence; identical to SEQ ID NO: 19744
  GFR-binding peptide
  MOD_RES (5), (42), (44): Xaa is C or S
  MOD_RES (21), (22), (23), (24), (25): Xaa is A or G
  MOD_RES (26), (27), (28), (29): Xaa is A or G or is absent

SEQ ID NO: 55509 - protein, 37 aa, Artificial Sequence
  GFR-binding peptide
  MOD_RES (3), (4), (35), (37): Xaa is C or S
SPXXVSQDLSNITIQIMIGKTPKIIGEMSMIVKSXKX

SEQ ID NO: 55510 - protein, 37 aa, Artificial Sequence
  GFR-binding peptide
  MOD_RES (2), (2): Xaa is C or S
KXQPSRVHHEPLTVLYYEYVRKKPKLEQLSNRLEEHL

SEQ ID NO: 55511 - protein, 37 aa, Artificial Sequence; identical to SEQ ID NO: 19745
  GFR-binding peptide
  MOD_RES (37), (37): Xaa is C or S
  MOD_RES (16), (17), (18), (19), (20): Xaa is A or G
  MOD_RES (21), (22), (23), (24): Xaa is A or G or is absent

SEQ ID NO: 55512 - protein, 40 aa, Artificial Sequence; identical to SEQ ID NO: 16589
  GFR-binding peptide
  MOD_RES (5), (6), (38), (40): Xaa is C or S

SEQ ID NO: 55513 - protein, 41 aa, Artificial Sequence
  GFR-binding peptide
  MOD_RES (3), (4), (38), (40): Xaa is C or S
  MOD_RES (18), (19), (20), (21), (22): Xaa is A or G
  MOD_RES (23), (24), (25), (26): Xaa is A or G or is absent
KAXXVPTELRPVQMRKIXXXXXXXXXKKATVEMVVEGXGXR

SEQ ID NO: 55514 - protein, 38 aa, Artificial Sequence
  GFR-binding peptide
  MOD_RES (37), (37): Xaa is C or S
QPSRVHHEPLTVLYYEYVRKKPKLEQLSNRLEEHLEXA

SEQ ID NO: 55515 - protein, 38 aa, Artificial Sequence
  GFR-binding peptide
  MOD_RES (6), (6): Xaa is C or S
  MOD_RES (20), (21), (22), (23), (24): Xaa is A or G
  MOD_RES (25), (26), (27), (28): Xaa is A or G or is absent
VTKPTXAPTKLSNITVQIMXXXXXXXXXIGEMSNMVVR

SEQ ID NO: 55516 - protein, 42 aa, Artificial Sequence
  GFR-binding peptide
  MOD_RES (7), (41): Xaa is C or S
  MOD_RES (21), (22), (23), (24), (25): Xaa is A or G
  MOD_RES (26), (27), (28), (29): Xaa is A or G or is absent
HVTKPTXAPTKLRSVKVAKVXXXXXXXXXKEVQVNMVVRSXG

SEQ ID NO: 55517 - protein, 40 aa, Artificial Sequence
  GFR-binding peptide
  MOD_RES (4), (5), (37), (39): Xaa is C or S
PKAXXVPTELRPVQMRKIDEYDKVVKKATVEMVVEGXGXR

SEQ ID NO: 55518 - protein, 37 aa, Artificial Sequence
  GFR-binding peptide
  MOD_RES (3), (4), (35), (37): Xaa is C or S
SPXXVPQDLSNITIQIMVGRTPKVIGEMSMVVKSXKX

SEQ ID NO: 55519 - protein, 38 aa, Artificial Sequence
  GFR-binding peptide
  MOD_RES (3), (4), (35), (37): Xaa is C or S
SPXXVSQDLRPVQIRKIIGKTPKIKKATVMIVKSXKXS

SEQ ID NO: 55520 - protein, 41 aa, Artificial Sequence; identical to SEQ ID NO: 19748
  GFR-binding peptide
  MOD_RES (5), (39), (41): Xaa is C or S
  MOD_RES (19), (20), (21), (22), (23): Xaa is A or G
  MOD_RES (24), (25), (26), (27): Xaa is A or G or is absent

SEQ ID NO: 55521 - protein, 37 aa, Artificial Sequence; identical to SEQ ID NO: 16598
  GFR-binding peptide
  MOD_RES (3), (37): Xaa is C or S
  MOD_RES (17), (18), (19), (20), (21): Xaa is A or G
  MOD_RES (22), (23), (24), (25): Xaa is A or G or is absent

SEQ ID NO: 55522 - protein, 36 aa, Artificial Sequence
  GFR-binding peptide
  MOD_RES (5), (6): Xaa is C or S
SASPXXVSQDLRPVQIRKIIGKTPKIKKATVMIVKS

SEQ ID NO: 55523 - protein, 38 aa, Artificial Sequence; identical to SEQ ID NO: 16600
  GFR-binding peptide
  MOD_RES (5), (6): Xaa is C or S
  MOD_RES (20), (21), (22), (23), (24): Xaa is A or G
  MOD_RES (25), (26), (27), (28): Xaa is A or G or is absent

SEQ ID NO: 55524 - protein, 41 aa, Artificial Sequence; identical to SEQ ID NO: 19749
  GFR-binding peptide
  MOD_RES (3), (40): Xaa is C or S
  MOD_RES (19), (20), (21), (22), (23): Xaa is A or G
  MOD_RES (24), (25), (26), (27): Xaa is A or G or is absent

SEQ ID NO: 55525 - protein, 35 aa, Artificial Sequence; identical to SEQ ID NO: 19751
  GFR-binding peptide
  MOD_RES (15), (16), (17), (18), (19): Xaa is A or G
  MOD_RES (20), (21), (22), (23): Xaa is A or G or is absent

SEQ ID NO: 55526 - protein, 41 aa, Artificial Sequence; identical to SEQ ID NO: 19752
  GFR-binding peptide
  MOD_RES (4), (38), (40): Xaa is C or S
  MOD_RES (18), (19), (20), (21), (22): Xaa is A or G
  MOD_RES (23), (24), (25), (26): Xaa is A or G or is absent

SEQ ID NO: 55527 - protein, 36 aa, Artificial Sequence
  GFR-binding peptide
  MOD_RES (1), (33), (35): Xaa is C or S
XAPTKLRSVKVAKVDDSSNVIKEVQVNMVVRSXGXH

SEQ ID NO: 55528 - protein, 34 aa, Artificial Sequence; identical to SEQ ID NO: 16602
  GFR-binding peptide
  MOD_RES (1), (2), (34): Xaa is C or S

SEQ ID NO: 55529 - protein, 35 aa, Artificial Sequence
  GFR-binding peptide
  MOD_RES (4), (5): Xaa is C or S
PKAXXVPTELRPVQMRKIDENEKVVKKATVDMVVE

SEQ ID NO: 55530 - protein, 32 aa, Artificial Sequence
  GFR-binding peptide
SRVHHEPLPVVYYEYVRKKPKLEQLSNRLEEH

SEQ ID NO: 55531 - protein, 39 aa, Artificial Sequence; identical to SEQ ID NO: 16606
  GFR-binding peptide
  MOD_RES (5), (6), (38): Xaa is C or S

SEQ ID NO: 55532 - protein, 38 aa, Artificial Sequence; identical to SEQ ID NO: 16607
  GFR-binding peptide
  MOD_RES (2), (3), (35), (37): Xaa is C or S

SEQ ID NO: 55533 - protein, 36 aa, Artificial Sequence
  GFR-binding peptide
  MOD_RES (2), (3): Xaa is C or S
  MOD_RES (17), (18), (19), (20), (21): Xaa is A or G
  MOD_RES (22), (23), (24), (25): Xaa is A or G or is absent
AXXVPTELRSVKMAKVXXXXXXXXXKEVQVDMVVEG

SEQ ID NO: 55534 - protein, 38 aa, Artificial Sequence
  GFR-binding peptide
  MOD_RES (2), (3), (36), (38): Xaa is C or S
  MOD_RES (17), (18), (19), (20), (21): Xaa is A or G
  MOD_RES (22), (23), (24), (25): Xaa is A or G or is absent
PXXVSQDLSNITIQIMXXXXXXXXXIGEMSMIVKSXKX

SEQ ID NO: 55535 - protein, 38 aa, Artificial Sequence; identical to SEQ ID NO: 16610
  GFR-binding peptide
  MOD_RES (5), (6): Xaa is C or S
  MOD_RES (20), (21), (22), (23), (24): Xaa is A or G
  MOD_RES (25), (26), (27), (28): Xaa is A or G or is absent

SEQ ID NO: 55536 - protein, 36 aa, Artificial Sequence; identical to SEQ ID NO: 19754
  GFR-binding peptide
  MOD_RES (3), (3): Xaa is C or S

SEQ ID NO: 55537 - protein, 40 aa, Artificial Sequence
  GFR-binding peptide
  MOD_RES (4), (5), (39): Xaa is C or S
  MOD_RES (19), (20), (21), (22), (23): Xaa is A or G
  MOD_RES (24), (25), (26), (27): Xaa is A or G or is absent
PKAXXVPTELSNITMQIMXXXXXXXXXIGEMSDMVVEGXG

SEQ ID NO: 55538 - protein, 42 aa, Artificial Sequence
  GFR-binding peptide
  MOD_RES (2), (39), (41): Xaa is C or S
  MOD_RES (18), (19), (20), (21), (22): Xaa is A or G
  MOD_RES (23), (24), (25), (26): Xaa is A or G or is absent
QXRPTQVQLEPLTVLYYXXXXXXXXXEQLSNTLEDHLAXKXE

SEQ ID NO: 55539 - protein, 40 aa, Artificial Sequence
  GFR-binding peptide
  MOD_RES (3), (37), (39): Xaa is C or S
LEXVPTEEEPLPMVYYRIKPHQGQHEQLSNFLQHNKXEXR

SEQ ID NO: 55540 - protein, 35 aa, Artificial Sequence; identical to SEQ ID NO: 19760
  GFR-binding peptide
  MOD_RES (35), (35): Xaa is C or S

SEQ ID NO: 55541 - protein, 38 aa, Artificial Sequence; identical to SEQ ID NO: 19761
  GFR-binding peptide
  MOD_RES (5), (5): Xaa is C or S

SEQ ID NO: 55542 - protein, 36 aa, Artificial Sequence
  GFR-binding peptide
  MOD_RES (4), (5), (36): Xaa is C or S
ASPXXVPQDLSNITIQIMVGRTPKVIGEMSMVVKSX

SEQ ID NO: 55543 - protein, 40 aa, Artificial Sequence; identical to SEQ ID NO: 16615
  GFR-binding peptide
  MOD_RES (4), (5), (38), (40): Xaa is C or S
  MOD_RES (19), (20), (21), (22), (23): Xaa is A or G
  MOD_RES (24), (25), (26), (27): Xaa is A or G or is absent

SEQ ID NO: 55544 - protein, 36 aa, Artificial Sequence
  GFR-binding peptide
  MOD_RES (1), (2), (36): Xaa is C or S
  MOD_RES (16), (17), (18), (19), (20): Xaa is A or G
  MOD_RES (21), (22), (23), (24): Xaa is A or G or is absent
XXAPTKLRSVKVAKVXXXXXXXXXKEVQVNMVVRSX

SEQ ID NO: 55545 - protein, 33 aa, Artificial Sequence
  GFR-binding peptide
  MOD_RES (14), (15), (16), (17), (18): Xaa is A or G
  MOD_RES (19), (20), (21), (22): Xaa is A or G or is absent
VPTELRPVQMRKIXXXXXXXXXKKATVEMVVEG

SEQ ID NO: 55546 - protein, 39 aa, Artificial Sequence; identical to SEQ ID NO: 19763
  GFR-binding peptide
  MOD_RES (36), (38): Xaa is C or S
  MOD_RES (15), (16), (17), (18), (19): Xaa is A or G
  MOD_RES (20), (21), (22), (23): Xaa is A or G or is absent

SEQ ID NO: 55547 - protein, 39 aa, Artificial Sequence; identical to SEQ ID NO: 16620
  GFR-binding peptide
  MOD_RES (4), (38): Xaa is C or S
  MOD_RES (18), (19), (20), (21), (22): Xaa is A or G
  MOD_RES (23), (24), (25), (26): Xaa is A or G or is absent

SEQ ID NO: 55548 - protein, 42 aa, Artificial Sequence
  GFR-binding peptide
  MOD_RES (5), (6), (40), (42): Xaa is C or S
  MOD_RES (20), (21), (22), (23), (24): Xaa is A or G
  MOD_RES (25), (26), (27), (28): Xaa is A or G or is absent
VPKPXXAPTKLRPVQVRKIXXXXXXXXXKKATVNMVVRSXGX

SEQ ID NO: 55549 - protein, 42 aa, Artificial Sequence
  GFR-binding peptide
  MOD_RES (5), (42): Xaa is C or S
RNVQXRPTQVQLEPLTVLYYEIVRKKPIFEQLSNTLEDHLAX

SEQ ID NO: 55550 - protein, 41 aa, Artificial Sequence; identical to SEQ ID NO: 16621
  GFR-binding peptide
  MOD_RES (4), (5), (39), (41): Xaa is C or S
  MOD_RES (19), (20), (21), (22), (23): Xaa is A or G
  MOD_RES (24), (25), (26), (27): Xaa is A or G or is absent

SEQ ID NO: 55551 - protein, 39 aa, Artificial Sequence; identical to SEQ ID NO: 19766
  GFR-binding peptide
  MOD_RES (2), (36), (38): Xaa is C or S
  MOD_RES (16), (17), (18), (19), (20): Xaa is A or G
  MOD_RES (21), (22), (23), (24): Xaa is A or G or is absent

SEQ ID NO: 55552 - protein, 38 aa, Artificial Sequence
  GFR-binding peptide
  MOD_RES (4), (5), (36), (38): Xaa is C or S
AAPXXVPQALSNITIQIMVGRKPKVIGEMSMIVRSXKX

SEQ ID NO: 55553 - protein, 39 aa, Artificial Sequence
  GFR-binding peptide
  MOD_RES (3), (4), (38): Xaa is C or S
  MOD_RES (18), (19), (20), (21), (22): Xaa is A or G
  MOD_RES (23), (24), (25), (26): Xaa is A or G or is absent
KAXXVPTELRSVKMAKVXXXXXXXXXKEVQVDMVVEGXG

SEQ ID NO: 55554 - protein, 35 aa, Artificial Sequence; identical to SEQ ID NO: 19769
  GFR-binding peptide
  MOD_RES (2), (2): Xaa is C or S

SEQ ID NO: 55555 - protein, 39 aa, Artificial Sequence
  GFR-binding peptide
  MOD_RES (3), (37), (39): Xaa is C or S
  MOD_RES (17), (18), (19), (20), (21): Xaa is A or G
  MOD_RES (22), (23), (24), (25): Xaa is A or G or is absent
PTXAPTKLRPVQVRKIXXXXXXXXXKKATVNMVVRSXGX

SEQ ID NO: 55556 - protein, 44 aa, Artificial Sequence
  GFR-binding peptide
  MOD_RES (7), (41), (43): Xaa is C or S
NDEGLEXVPTEEEPLPMVYYRIKPHQGQHEQLSNFLQHNKXEXR

SEQ ID NO: 55557 - protein, 32 aa, Artificial Sequence
  GFR-binding peptide
SRVHHEPLTVLYYEYVRKKPKLEQLSNRLEEH

SEQ ID NO: 55558 - protein, 33 aa, Artificial Sequence
  GFR-binding peptide
  MOD_RES (2), (2): Xaa is C or S
TXAPTKLSNITVQIMDDSSNVIIGEMSNMVVRS

SEQ ID NO: 55559 - protein, 41 aa, Artificial Sequence
  GFR-binding peptide
  MOD_RES (3), (4), (38), (40): Xaa is C or S
  MOD_RES (18), (19), (20), (21), (22): Xaa is A or G
  MOD_RES (23), (24), (25), (26): Xaa is A or G or is absent
KPXXAPTKLSNITVQIMXXXXXXXXXIGEMSNMVVRSXGXH

SEQ ID NO: 55560 - protein, 35 aa, Artificial Sequence; identical to SEQ ID NO: 16628
  GFR-binding peptide
  MOD_RES (33), (35): Xaa is C or S
  MOD_RES (14), (15), (16), (17), (18): Xaa is A or G
  MOD_RES (19), (20), (21), (22): Xaa is A or G or is absent

SEQ ID NO: 55561 - protein, 35 aa, Artificial Sequence; identical to SEQ ID NO: 19774
  GFR-binding peptide
  MOD_RES (1), (1): Xaa is C or S

SEQ ID NO: 55562 - protein, 35 aa, Artificial Sequence; identical to SEQ ID NO: 16630
  GFR-binding peptide
  MOD_RES (2), (3): Xaa is C or S
  MOD_RES (17), (18), (19), (20), (21): Xaa is A or G
  MOD_RES (22), (23), (24), (25): Xaa is A or G or is absent

SEQ ID NO: 55563 - protein, 37 aa, Artificial Sequence; identical to SEQ ID NO: 19775
  GFR-binding peptide
  MOD_RES (36), (36): Xaa is C or S
  MOD_RES (15), (16), (17), (18), (19): Xaa is A or G
  MOD_RES (20), (21), (22), (23): Xaa is A or G or is absent

SEQ ID NO: 55564 - protein, 44 aa, Artificial Sequence
  GFR-binding peptide
  MOD_RES (4), (41), (43): Xaa is C or S
  MOD_RES (20), (21), (22), (23), (24): Xaa is A or G
  MOD_RES (25), (26), (27), (28): Xaa is A or G or is absent
SVKXQPSRVHHEPLPVVYYXXXXXXXXXEQLSNRLEEHLEXAXA

SEQ ID NO: 55565 - protein, 36 aa, Artificial Sequence
  GFR-binding peptide
  MOD_RES (5), (6): Xaa is C or S
IPKAXXVPTELRPVQMRKIDEYDKVVKKATVEMVVE

SEQ ID NO: 55566 - protein, 38 aa, Artificial Sequence
  GFR-binding peptide
  MOD_RES (1), (2), (36), (38): Xaa is C or S
  MOD_RES (16), (17), (18), (19), (20): Xaa is A or G
  MOD_RES (21), (22), (23), (24): Xaa is A or G or is absent
XXVPTELSNITMQIMXXXXXXXXXIGEMSDMVVEGXGX

SEQ ID NO: 55567 - protein, 40 aa, Artificial Sequence
  GFR-binding peptide
  MOD_RES (3), (40): Xaa is C or S
VKXQPSRVHHEPLPVVYYEYVRKKPKLEQLSNRLEEHLEX

SEQ ID NO: 55568 - protein, 37 aa, Artificial Sequence
  GFR-binding peptide
  MOD_RES (4), (36): Xaa is C or S
KPTXAPTKLRPVQVRKIDDSSNVIKKATVNMVVRSXG

SEQ ID NO: 55569 - protein, 33 aa, Artificial Sequence
  GFR-binding peptide
  MOD_RES (1), (1): Xaa is C or S
  MOD_RES (15), (16), (17), (18), (19): Xaa is A or G
  MOD_RES (20), (21), (22), (23): Xaa is A or G or is absent
XAPTQLRSVKVAKVXXXXXXXXXKEVQVNMVVR

SEQ ID NO: 55570 - protein, 35 aa, Artificial Sequence
  GFR-binding peptide
  MOD_RES (1), (2), (35): Xaa is C or S
  MOD_RES (16), (17), (18), (19), (20): Xaa is A or G
  MOD_RES (21), (22), (23), (24): Xaa is A or G or is absent
XXVSQDLRPVQIRKIXXXXXXXXXKKATVMIVKSX

SEQ ID NO: 55571 - protein, 33 aa, Artificial Sequence; identical to SEQ ID NO: 16642
  GFR-binding peptide
  MOD_RES (1), (1): Xaa is C or S
  MOD_RES (15), (16), (17), (18), (19): Xaa is A or G
  MOD_RES (20), (21), (22), (23): Xaa is A or G or is absent

SEQ ID NO: 55572 - protein, 43 aa, Artificial Sequence
  GFR-binding peptide
  MOD_RES (6), (7), (40), (42): Xaa is C or S
  MOD_RES (21), (22), (23), (24), (25): Xaa is A or G
  MOD_RES (26), (27), (28), (29): Xaa is A or G or is absent
ASAAPXXVPQALRPVQIRKIXXXXXXXXXKKATVMIVRSXKXS

SEQ ID NO: 55573 - protein, 39 aa, Artificial Sequence
  GFR-binding peptide
  MOD_RES (1), (2), (36), (38): Xaa is C or S
  MOD_RES (16), (17), (18), (19), (20): Xaa is A or G
  MOD_RES (21), (22), (23), (24): Xaa is A or G or is absent
XXAPTKLRSVKVAKVXXXXXXXXXKEVQVNMVVRSXGXH

SEQ ID NO: 55574 - protein, 38 aa, Artificial Sequence; identical to SEQ ID NO: 16645
  GFR-binding peptide
  MOD_RES (2), (3), (37): Xaa is C or S
  MOD_RES (17), (18), (19), (20), (21): Xaa is A or G
  MOD_RES (22), (23), (24), (25): Xaa is A or G or is absent

SEQ ID NO: 55575 - protein, 36 aa, Artificial Sequence
  GFR-binding peptide
  MOD_RES (34), (36): Xaa is C or S
  MOD_RES (14), (15), (16), (17), (18): Xaa is A or G
  MOD_RES (19), (20), (21), (22): Xaa is A or G or is absent
VPTEEEPLTMLYYXXXXXXXXXEQLSNFLQHNKXEX

SEQ ID NO: 55576 - protein, 36 aa, Artificial Sequence; identical to SEQ ID NO: 19790
  GFR-binding peptide
  MOD_RES (35), (35): Xaa is C or S
  MOD_RES (14), (15), (16), (17), (18): Xaa is A or G
  MOD_RES (19), (20), (21), (22): Xaa is A or G or is absent

SEQ ID NO: 55577 - protein, 44 aa, Artificial Sequence; identical to SEQ ID NO: 19791
  GFR-binding peptide
  MOD_RES (4), (41), (43): Xaa is C or S
  MOD_RES (20), (21), (22), (23), (24): Xaa is A or G
  MOD_RES (25), (26), (27), (28): Xaa is A or G or is absent

SEQ ID NO: 55578 - protein, 41 aa, Artificial Sequence; identical to SEQ ID NO: 16646
  GFR-binding peptide
  MOD_RES (6), (7), (39), (41): Xaa is C or S

SEQ ID NO: 55579 - protein, 40 aa, Artificial Sequence; identical to SEQ ID NO: 16647
  GFR-binding peptide
  MOD_RES (5), (6), (40): Xaa is C or S
  MOD_RES (20), (21), (22), (23), (24): Xaa is A or G
  MOD_RES (25), (26), (27), (28): Xaa is A or G or is absent

SEQ ID NO: 55580 - protein, 39 aa, Artificial Sequence; identical to SEQ ID NO: 16649
  GFR-binding peptide
  MOD_RES (3), (4), (36), (38): Xaa is C or S

SEQ ID NO: 55581 - protein, 37 aa, Artificial Sequence
  GFR-binding peptide
  MOD_RES (6), (7): Xaa is C or S
SIPKAXXVPTELSNITMQIMDEYDKVVIGEMSEMVVE

SEQ ID NO: 55582 - protein, 36 aa, Artificial Sequence
  GFR-binding peptide
  MOD_RES (3), (3): Xaa is C or S
LEXVPTEEEPLPMVYYRIKPHQGQHEQLSNFLQHNK

SEQ ID NO: 55583 - protein, 36 aa, Artificial Sequence
  GFR-binding peptide
  MOD_RES (3), (4): Xaa is C or S
  MOD_RES (18), (19), (20), (21), (22): Xaa is A or G
  MOD_RES (23), (24), (25), (26): Xaa is A or G or is absent
APXXVPQALRPVQIRKIXXXXXXXXXKKATVMIVRS

SEQ ID NO: 55584 - protein, 38 aa, Artificial Sequence
  GFR-binding peptide
  MOD_RES (3), (37): Xaa is C or S
  MOD_RES (17), (18), (19), (20), (21): Xaa is A or G
  MOD_RES (22), (23), (24), (25): Xaa is A or G or is absent
LEXVPTEEEPLPMVYYXXXXXXXXXEQLSNFLQHNKXE

SEQ ID NO: 55585 - protein, 41 aa, Artificial Sequence
  GFR-binding peptide
  MOD_RES (5), (6), (40): Xaa is C or S
  MOD_RES (20), (21), (22), (23), (24): Xaa is A or G
  MOD_RES (25), (26), (27), (28): Xaa is A or G or is absent
VPKPXXAPTQLSNITVQIMXXXXXXXXXIGEMSNMVVRAXG

SEQ ID NO: 55586 - protein, 35 aa, Artificial Sequence
  GFR-binding peptide
  MOD_RES (15), (16), (17), (18), (19): Xaa is A or G
  MOD_RES (20), (21), (22), (23): Xaa is A or G or is absent
PTQVQLEPLPVVYYXXXXXXXXXEQLSNTLEDHLA

SEQ ID NO: 55587 - protein, 39 aa, Artificial Sequence
  GFR-binding peptide
  MOD_RES (4), (5), (38): Xaa is C or S
  MOD_RES (19), (20), (21), (22), (23): Xaa is A or G
  MOD_RES (24), (25), (26), (27): Xaa is A or G or is absent
AAPXXVPQALSNITIQIMXXXXXXXXXIGEMSMIVRSXK

SEQ ID NO: 55588 - protein, 33 aa, Artificial Sequence
  GFR-binding peptide
  MOD_RES (1), (1): Xaa is C or S
  MOD_RES (15), (16), (17), (18), (19): Xaa is A or G
  MOD_RES (20), (21), (22), (23): Xaa is A or G or is absent
XVPQDLRPVQIRKIXXXXXXXXXKKATVMVVKS

SEQ ID NO: 55589 - protein, 33 aa, Artificial Sequence; identical to SEQ ID NO: 16652
  GFR-binding peptide
  MOD_RES (2), (3): Xaa is C or S

SEQ ID NO: 55590 - protein, 41 aa, Artificial Sequence
  GFR-binding peptide
  MOD_RES (4), (38), (40): Xaa is C or S
  MOD_RES (18), (19), (20), (21), (22): Xaa is A or G
  MOD_RES (23), (24), (25), (26): Xaa is A or G or is absent
KPTXAPTKLRSVKVAKVXXXXXXXXXKEVQVNMVVRSXGXH

SEQ ID NO: 55591 - protein, 36 aa, Artificial Sequence
  GFR-binding peptide
  MOD_RES (3), (4): Xaa is C or S
  MOD_RES (18), (19), (20), (21), (22): Xaa is A or G
  MOD_RES (23), (24), (25), (26): Xaa is A or G or is absent
SPXXVSQDLRSVKIAKVXXXXXXXXXKEVQVMIVKS

SEQ ID NO: 55592 - protein, 39 aa, Artificial Sequence; identical to SEQ ID NO: 19795
  GFR-binding peptide
  MOD_RES (4), (4): Xaa is C or S
  MOD_RES (20), (21), (22), (23), (24): Xaa is A or G
  MOD_RES (25), (26), (27), (28): Xaa is A or G or is absent

SEQ ID NO: 55593 - protein, 37 aa, Artificial Sequence
  GFR-binding peptide
  MOD_RES (4), (5): Xaa is C or S
  MOD_RES (19), (20), (21), (22), (23): Xaa is A or G
  MOD_RES (24), (25), (26), (27): Xaa is A or G or is absent
PKAXXVPTELRPVQMRKIXXXXXXXXXKKATVDMVVE

SEQ ID NO: 55594 - protein, 38 aa, Artificial Sequence
  GFR-binding peptide
  MOD_RES (2), (3), (37): Xaa is C or S
  MOD_RES (17), (18), (19), (20), (21): Xaa is A or G
  MOD_RES (22), (23), (24), (25): Xaa is A or G or is absent
PXXAPTQLSNITVQIMXXXXXXXXXIGEMSNMVVRAXG

SEQ ID NO: 55595 - protein, 40 aa, Artificial Sequence; identical to SEQ ID NO: 16655
  GFR-binding peptide
  MOD_RES (5), (6), (38), (40): Xaa is C or S

SEQ ID NO: 55596 - protein, 37 aa, Artificial Sequence
  GFR-binding peptide
  MOD_RES (3), (4), (36): Xaa is C or S
KPXXAPTQLSNITVQIMDDSSNVIIGEMSNMVVRAXG

SEQ ID NO: 55597 - protein, 39 aa, Artificial Sequence; identical to SEQ ID NO: 16656
  GFR-binding peptide
  MOD_RES (6), (7), (39): Xaa is C or S

SEQ ID NO: 55598 - protein, 34 aa, Artificial Sequence; identical to SEQ ID NO: 19796
  GFR-binding peptide
  MOD_RES (2), (2): Xaa is C or S
  MOD_RES (16), (17), (18), (19), (20): Xaa is A or G
  MOD_RES (21), (22), (23), (24): Xaa is A or G or is absent

SEQ ID NO: 55599 - protein, 35 aa, Artificial Sequence
  GFR-binding peptide
  MOD_RES (4), (5): Xaa is C or S
PKAXXVPTELSNITMQIMDEYDKVVIGEMSEMVVE

SEQ ID NO: 55600 - protein, 36 aa, Artificial Sequence; identical to SEQ ID NO: 16659
  GFR-binding peptide
  MOD_RES (1), (2), (33), (35): Xaa is C or S

SEQ ID NO: 55601 - protein, 44 aa, Artificial Sequence
  GFR-binding peptide
  MOD_RES (7), (41), (43): Xaa is C or S
  MOD_RES (21), (22), (23), (24), (25): Xaa is A or G
  MOD_RES (26), (27), (28), (29): Xaa is A or G or is absent
HVTKPTXAPTKLSNITVQIMXXXXXXXXXIGEMSNMVVRSXGXH

SEQ ID NO: 55602 - protein, 38 aa, Artificial Sequence
  GFR-binding peptide
  MOD_RES (1), (2), (36), (38): Xaa is C or S
  MOD_RES (16), (17), (18), (19), (20): Xaa is A or G
  MOD_RES (21), (22), (23), (24): Xaa is A or G or is absent
XXVPTELRPVQMRKIXXXXXXXXXKKATVDMVVEGXGX

SEQ ID NO: 55603 - protein, 36 aa, Artificial Sequence; identical to SEQ ID NO: 16661
  GFR-binding peptide
  MOD_RES (1), (33), (35): Xaa is C or S

SEQ ID NO: 55604 - protein, 43 aa, Artificial Sequence
  GFR-binding peptide
  MOD_RES (5), (42): Xaa is C or S
  MOD_RES (21), (22), (23), (24), (25): Xaa is A or G
  MOD_RES (26), (27), (28), (29): Xaa is A or G or is absent
SSVKXQPSRVHHEPLPVVYYXXXXXXXXXEQLSNRLEEHLEXA

SEQ ID NO: 55605 - protein, 43 aa, Artificial Sequence; identical to SEQ ID NO: 19798
  GFR-binding peptide
  MOD_RES (3), (40), (42): Xaa is C or S
  MOD_RES (19), (20), (21), (22), (23): Xaa is A or G
  MOD_RES (24), (25), (26), (27): Xaa is A or G or is absent

SEQ ID NO: 55606 - protein, 38 aa, Artificial Sequence
  GFR-binding peptide
  MOD_RES (36), (38): Xaa is C or S
PTQVQLEPLTVLYYEIVRKKPIFEQLSNTLEDHLAXKX

SEQ ID NO: 55607 - protein, 38 aa, Artificial Sequence
  GFR-binding peptide
  MOD_RES (3), (4), (35), (37): Xaa is C or S
APXXVPQALRPVQIRKIVGRKPKVKKATVMIVRSXKXS

SEQ ID NO: 55608 - protein, 40 aa, Artificial Sequence
  GFR-binding peptide
  MOD_RES (6), (38), (40): Xaa is C or S
VTKPTXAPTKLSNITVQIMDDSSNVIIGEMSNMVVRSXGX

SEQ ID NO: 55609 - protein, 42 aa, Artificial Sequence; identical to SEQ ID NO: 16663
  GFR-binding peptide
  MOD_RES (4), (5), (39), (41): Xaa is C or S
  MOD_RES (19), (20), (21), (22), (23): Xaa is A or G
  MOD_RES (24), (25), (26), (27): Xaa is A or G or is absent

SEQ ID NO: 55610 - protein, 34 aa, Artificial Sequence
  GFR-binding peptide
  MOD_RES (33), (33): Xaa is C or S
  MOD_RES (14), (15), (16), (17), (18): Xaa is A or G
  MOD_RES (19), (20), (21), (22): Xaa is A or G or is absent
VPQALRSVKIAKVXXXXXXXXXKEVQVMIVRSXK

SEQ ID NO: 55611 - protein, 40 aa, Artificial Sequence; identical to SEQ ID NO: 19799
  GFR-binding peptide
  MOD_RES (5), (39): Xaa is C or S
  MOD_RES (19), (20), (21), (22), (23): Xaa is A or G
  MOD_RES (24), (25), (26), (27): Xaa is A or G or is absent

SEQ ID NO: 55612 - protein, 38 aa, Artificial Sequence
  GFR-binding peptide
  MOD_RES (2), (3), (37): Xaa is C or S
  MOD_RES (17), (18), (19), (20), (21): Xaa is A or G
  MOD_RES (22), (23), (24), (25): Xaa is A or G or is absent
AXXVPTELSNITMQIMXXXXXXXXXIGEMSDMVVEGXG

SEQ ID NO: 55613 - protein, 36 aa, Artificial Sequence
  GFR-binding peptide
  MOD_RES (36), (36): Xaa is C or S
  MOD_RES (15), (16), (17), (18), (19): Xaa is A or G
  MOD_RES (20), (21), (22), (23): Xaa is A or G or is absent
PTQVQLEPLTVLYYXXXXXXXXXEQLSNTLEDHLAX

SEQ ID NO: 55614 - protein, 38 aa, Artificial Sequence; identical to SEQ ID NO: 16667
  GFR-binding peptide
  MOD_RES (5), (6): Xaa is C or S
  MOD_RES (20), (21), (22), (23), (24): Xaa is A or G
  MOD_RES (25), (26), (27), (28): Xaa is A or G or is absent

SEQ ID NO: 55615 - protein, 31 aa, Artificial Sequence
  GFR-binding peptide
  MOD_RES (1), (1): Xaa is C or S
XVPQALRPVQIRKIVGRKPKVKKATVMIVRS

SEQ ID NO: 55616 - protein, 33 aa, Artificial Sequence
  GFR-binding peptide
  MOD_RES (32), (32): Xaa is C or S
VPTELRSVKMAKVDENEKVVKEVQVDMVVEGXG

SEQ ID NO: 55617 - protein, 39 aa, Artificial Sequence
  GFR-binding peptide
  MOD_RES (6), (6): Xaa is C or S
  MOD_RES (20), (21), (22), (23), (24): Xaa is A or G
  MOD_RES (25), (26), (27), (28): Xaa is A or G or is absent
VTKPTXAPTKLSNITVQIMXXXXXXXXXIGEMSNMVVRS

SEQ ID NO: 55618 - protein, 41 aa, Artificial Sequence
  GFR-binding peptide
  MOD_RES (5), (6), (39), (41): Xaa is C or S
  MOD_RES (20), (21), (22), (23), (24): Xaa is A or G
  MOD_RES (25), (26), (27), (28): Xaa is A or G or is absent
SAAPXXVPQALRSVKIAKVXXXXXXXXXKEVQVMIVRSXKX

SEQ ID NO: 55619 - protein, 40 aa, Artificial Sequence
  GFR-binding peptide
  MOD_RES (2), (3), (37), (39): Xaa is C or S
  MOD_RES (17), (18), (19), (20), (21): Xaa is A or G
  MOD_RES (22), (23), (24), (25): Xaa is A or G or is absent
PXXAPTQLSNITVQIMXXXXXXXXXIGEMSNMVVRAXGXH

SEQ ID NO: 55620 - protein, 33 aa, Artificial Sequence; identical to SEQ ID NO: 16671
  GFR-binding peptide
  MOD_RES (32), (32): Xaa is C or S

SEQ ID NO: 55621 - protein, 36 aa, Artificial Sequence; identical to SEQ ID NO: 19805
  GFR-binding peptide
  MOD_RES (16), (17), (18), (19), (20): Xaa is A or G
  MOD_RES (21), (22), (23), (24): Xaa is A or G or is absent

SEQ ID NO: 55622 - protein, 45 aa, Artificial Sequence
  GFR-binding peptide
  MOD_RES (5), (42), (44): Xaa is C or S
  MOD_RES (21), (22), (23), (24), (25): Xaa is A or G
  MOD_RES (26), (27), (28), (29): Xaa is A or G or is absent
SSVKXQPSRVHHEPLTVLYYXXXXXXXXXEQLSNRLEEHLEXAXA

SEQ ID NO: 55623 - protein, 41 aa, Artificial Sequence
  GFR-binding peptide
  MOD_RES (5), (6), (38), (40): Xaa is C or S
VPKPXXAPTKLRPVQVRKIDDSSNVIKKATVNMVVRSXGXH

SEQ ID NO: 55624 - protein, 36 aa, Artificial Sequence; identical to SEQ ID NO: 19806
  GFR-binding peptide
  MOD_RES (2), (36): Xaa is C or S
  MOD_RES (16), (17), (18), (19), (20): Xaa is A or G
  MOD_RES (21), (22), (23), (24): Xaa is A or G or is absent

SEQ ID NO: 55625 - protein, 42 aa, Artificial Sequence; identical to SEQ ID NO: 16674
  GFR-binding peptide
  MOD_RES (4), (5), (39), (41): Xaa is C or S
  MOD_RES (19), (20), (21), (22), (23): Xaa is A or G
  MOD_RES (24), (25), (26), (27): Xaa is A or G or is absent

SEQ ID NO: 55626 - protein, 36 aa, Artificial Sequence; identical to SEQ ID NO: 16676
  GFR-binding peptide
  MOD_RES (33), (35): Xaa is C or S
  MOD_RES (14), (15), (16), (17), (18): Xaa is A or G
  MOD_RES (19), (20), (21), (22): Xaa is A or G or is absent

SEQ ID NO: 55627 - protein, 33 aa, Artificial Sequence; identical to SEQ ID NO: 16678
  GFR-binding peptide
  MOD_RES (1), (2), (33): Xaa is C or S

SEQ ID NO: 55628 - protein, 35 aa, Artificial Sequence; identical to SEQ ID NO: 19810
  GFR-binding peptide
  MOD_RES (16), (17), (18), (19), (20): Xaa is A or G
  MOD_RES (21), (22), (23), (24): Xaa is A or G or is absent

SEQ ID NO: 55629 - protein, 34 aa, Artificial Sequence
  GFR-binding peptide
PSRVHHEPLTVLYYEYVRKKPKLEQLSNRLEEHL

SEQ ID NO: 55630 - protein, 41 aa, Artificial Sequence; identical to SEQ ID NO: 16680
  GFR-binding peptide
  MOD_RES (5), (6), (38), (40): Xaa is C or S

SEQ ID NO: 55631 - protein, 44 aa, Artificial Sequence; identical to SEQ ID NO: 19812
  GFR-binding peptide
  MOD_RES (7), (41), (43): Xaa is C or S

SEQ ID NO: 55632 - protein, 39 aa, Artificial Sequence; identical to SEQ ID NO: 19814
  GFR-binding peptide
  MOD_RES (37), (39): Xaa is C or S
  MOD_RES (16), (17), (18), (19), (20): Xaa is A or G
  MOD_RES (21), (22), (23), (24): Xaa is A or G or is absent

SEQ ID NO: 55633 - protein, 39 aa, Artificial Sequence
  GFR-binding peptide
  MOD_RES (3), (4), (38): Xaa is C or S
  MOD_RES (18), (19), (20), (21), (22): Xaa is A or G
  MOD_RES (23), (24), (25), (26): Xaa is A or G or is absent
KPXXAPTKLRPVQVRKIXXXXXXXXXKKATVNMVVRSXG

SEQ ID NO: 55634 - protein, 37 aa, Artificial Sequence
  GFR-binding peptide
  MOD_RES (3), (4): Xaa is C or S
  MOD_RES (18), (19), (20), (21), (22): Xaa is A or G
  MOD_RES (23), (24), (25), (26): Xaa is A or G or is absent
KPXXAPTKLSNITVQIMXXXXXXXXXIGEMSNMVVRS

SEQ ID NO: 55635 - protein, 39 aa, Artificial Sequence
  GFR-binding peptide
  MOD_RES (3), (4), (37), (39): Xaa is C or S
  MOD_RES (18), (19), (20), (21), (22): Xaa is A or G
  MOD_RES (23), (24), (25), (26): Xaa is A or G or is absent
SPXXVSQDLSNITIQIMXXXXXXXXXIGEMSMIVKSXKX

SEQ ID NO: 55636 - protein, 30 aa, Artificial Sequence
  GFR-binding peptide
VPTELRSVKMAKVDEYDKVVKEVQVEMVVE

SEQ ID NO: 55637 - protein, 36 aa, Artificial Sequence
  GFR-binding peptide
  MOD_RES (35), (35): Xaa is C or S
  MOD_RES (14), (15), (16), (17), (18): Xaa is A or G
  MOD_RES (19), (20), (21), (22): Xaa is A or G or is absent
TQVQLEPLPVVYYXXXXXXXXXEQLSNTLEDHLAXK

SEQ ID NO: 55638 - protein, 40 aa, Artificial Sequence
  GFR-binding peptide
  MOD_RES (4), (4): Xaa is C or S
SVKXQPSRVHHEPLPVVYYEYVRKKPKLEQLSNRLEEHLE

SEQ ID NO: 55639 - protein, 43 aa, Artificial Sequence
  GFR-binding peptide
  MOD_RES (3), (40), (42): Xaa is C or S
  MOD_RES (19), (20), (21), (22), (23): Xaa is A or G
  MOD_RES (24), (25), (26), (27): Xaa is A or G or is absent
VKXQPSRVHHEPLPVVYYXXXXXXXXXEQLSNRLEEHLEXAXA

SEQ ID NO: 55640 - protein, 39 aa, Artificial Sequence; identical to SEQ ID NO: 19824
  GFR-binding peptide
  MOD_RES (1), (38): Xaa is C or S
  MOD_RES (17), (18), (19), (20), (21): Xaa is A or G
  MOD_RES (22), (23), (24), (25): Xaa is A or G or is absent

SEQ ID NO: 55641 - protein, 32 aa, Artificial Sequence
  GFR-binding peptide
  MOD_RES (1), (2): Xaa is C or S
XXVPQALRSVKIAKVVGRKPKVKEVQVMIVRS

SEQ ID NO: 55642 - protein, 40 aa, Artificial Sequence; identical to SEQ ID NO: 16688
  GFR-binding peptide
  MOD_RES (5), (39): Xaa is C or S
  MOD_RES (19), (20), (21), (22), (23): Xaa is A or G
  MOD_RES (24), (25), (26), (27): Xaa is A or G or is absent

SEQ ID NO: 55643 - protein, 34 aa, Artificial Sequence
  GFR-binding peptide
  MOD_RES (31), (33): Xaa is C or S
VPQALRSVKIAKVVGRKPKVKEVQVMIVRSXKXS

SEQ ID NO: 55644 - protein, 42 aa, Artificial Sequence
  GFR-binding peptide
  MOD_RES (5), (42): Xaa is C or S
  MOD_RES (21), (22), (23), (24), (25): Xaa is A or G
  MOD_RES (26), (27), (28), (29): Xaa is A or G or is absent
SSVKXQPSRVHHEPLPVVYYXXXXXXXXXEQLSNRLEEHLEX

SEQ ID NO: 55645 - protein, 36 aa, Artificial Sequence
  GFR-binding peptide
  MOD_RES (3), (4), (36): Xaa is C or S
KAXXVPTELSNITMQIMDENEKVVIGEMSDMVVEGX

SEQ ID NO: 55646 - protein, 33 aa, Artificial Sequence; identical to SEQ ID NO: 16693
  GFR-binding peptide
  MOD_RES (2), (3): Xaa is C or S

SEQ ID NO: 55647 - protein, 40 aa, Artificial Sequence
  GFR-binding peptide
  MOD_RES (4), (5), (39): Xaa is C or S
  MOD_RES (19), (20), (21), (22), (23): Xaa is A or G
  MOD_RES (24), (25), (26), (27): Xaa is A or G or is absent
PKAXXVPTELSNITMQIMXXXXXXXXXIGEMSEMVVEGXG

SEQ ID NO: 55648 - protein, 43 aa, Artificial Sequence; identical to SEQ ID NO: 19828
  GFR-binding peptide
  MOD_RES (4), (41), (43): Xaa is C or S
  MOD_RES (20), (21), (22), (23), (24): Xaa is A or G
  MOD_RES (25), (26), (27), (28): Xaa is A or G or is absent

SEQ ID NO: 55649 - protein, 35 aa, Artificial Sequence
  GFR-binding peptide
  MOD_RES (1), (2), (34): Xaa is C or S
XXAPTQLRPVQVRKIDDSSNVIKKATVNMVVRAXG

SEQ ID NO: 55650 - protein, 39 aa, Artificial Sequence; identical to SEQ ID NO: 16696
  GFR-binding peptide
  MOD_RES (6), (7): Xaa is C or S
  MOD_RES (21), (22), (23), (24), (25): Xaa is A or G
  MOD_RES (26), (27), (28), (29): Xaa is A or G or is absent

SEQ ID NO: 55651 - protein, 41 aa, Artificial Sequence
  GFR-binding peptide
  MOD_RES (3), (4), (38), (40): Xaa is C or S
  MOD_RES (18), (19), (20), (21), (22): Xaa is A or G
  MOD_RES (23), (24), (25), (26): Xaa is A or G or is absent
KPXXAPTQLRPVQVRKIXXXXXXXXXKKATVNMVVRAXGXH

SEQ ID NO: 55652 - protein, 41 aa, Artificial Sequence
  GFR-binding peptide
  MOD_RES (5), (6), (40): Xaa is C or S
  MOD_RES (20), (21), (22), (23), (24): Xaa is A or G
  MOD_RES (25), (26), (27), (28): Xaa is A or G or is absent
VPKPXXAPTKLRSVKVAKVXXXXXXXXXKEVQVNMVVRSXG

SEQ ID NO: 55653 - protein, 38 aa, Artificial Sequence; identical to SEQ ID NO: 19830
  GFR-binding peptide
  MOD_RES (3), (37): Xaa is C or S
  MOD_RES (17), (18), (19), (20), (21): Xaa is A or G
  MOD_RES (22), (23), (24), (25): Xaa is A or G or is absent

SEQ ID NO: 55654 - protein, 32 aa, Artificial Sequence
  GFR-binding peptide
  MOD_RES (14), (15), (16), (17), (18): Xaa is A or G
  MOD_RES (19), (20), (21), (22): Xaa is A or G or is absent
APTQLRPVQVRKIXXXXXXXXXKKATVNMVVR

SEQ ID NO: 55655 - protein, 41 aa, Artificial Sequence
  GFR-binding peptide
  MOD_RES (6), (7), (41): Xaa is C or S
  MOD_RES (21), (22), (23), (24), (25): Xaa is A or G
  MOD_RES (26), (27), (28), (29): Xaa is A or G or is absent
SIPKAXXVPTELRSVKMAKVXXXXXXXXXKEVQVEMVVEGX

SEQ ID NO: 55656 - protein, 37 aa, Artificial Sequence; identical to SEQ ID NO: 16700
  GFR-binding peptide
  MOD_RES (2), (3), (35), (37): Xaa is C or S

SEQ ID NO: 55657 - protein, 36 aa, Artificial Sequence
  GFR-binding peptide
  MOD_RES (4), (4): Xaa is C or S
  MOD_RES (18), (19), (20), (21), (22): Xaa is A or G
  MOD_RES (23), (24), (25), (26): Xaa is A or G or is absent
KPTXAPTKLRSVKVAKVXXXXXXXXXKEVQVNMVVR

SEQ ID NO: 55658 - protein, 34 aa, Artificial Sequence
  GFR-binding peptide
  MOD_RES (2), (3), (34): Xaa is C or S
PXXVSQDLSNITIQIMIGKTPKIIGEMSMIVKSX

SEQ ID NO: 55659 - protein, 36 aa, Artificial Sequence; identical to SEQ ID NO: 19834
  GFR-binding peptide
  MOD_RES (2), (2): Xaa is C or S
  MOD_RES (18), (19), (20), (21), (22): Xaa is A or G
  MOD_RES (23), (24), (25), (26): Xaa is A or G or is absent

SEQ ID NO: 55660 - protein, 42 aa, Artificial Sequence; identical to SEQ ID NO: 19836
  GFR-binding peptide
  MOD_RES (6), (40), (42): Xaa is C or S
  MOD_RES (20), (21), (22), (23), (24): Xaa is A or G
  MOD_RES (25), (26), (27), (28): Xaa is A or G or is absent

SEQ ID NO: 55661 - protein, 39 aa, Artificial Sequence; identical to SEQ ID NO: 16703
  GFR-binding peptide
  MOD_RES (5), (6), (39): Xaa is C or S
  MOD_RES (20), (21), (22), (23), (24): Xaa is A or G
  MOD_RES (25), (26), (27), (28): Xaa is A or G or is absent

SEQ ID NO: 55662 - protein, 40 aa, Artificial Sequence; identical to SEQ ID NO: 19838
  GFR-binding peptide
  MOD_RES (2), (39): Xaa is C or S
  MOD_RES (18), (19), (20), (21), (22): Xaa is A or G
  MOD_RES (23), (24), (25), (26): Xaa is A or G or is absent

SEQ ID NO: 55663 - protein, 35 aa, Artificial Sequence; identical to SEQ ID NO: 16706
  GFR-binding peptide
  MOD_RES (3), (4): Xaa is C or S

SEQ ID NO: 55664 - protein, 42 aa, Artificial Sequence; identical to SEQ ID NO: 19839
  GFR-binding peptide
  MOD_RES (3), (40), (42): Xaa is C or S
  MOD_RES (19), (20), (21), (22), (23): Xaa is A or G
  MOD_RES (24), (25), (26), (27): Xaa is A or G or is absent

SEQ ID NO: 55665 - protein, 39 aa, Artificial Sequence
  GFR-binding peptide
  MOD_RES (3), (37), (39): Xaa is C or S
  MOD_RES (17), (18), (19), (20), (21): Xaa is A or G
  MOD_RES (22), (23), (24), (25): Xaa is A or G or is absent
LEXVPTEEEPLTMLYYXXXXXXXXXEQLSNFLQHNKXEX

SEQ ID NO: 55666 - protein, 33 aa, Artificial Sequence; identical to SEQ ID NO: 16708
  GFR-binding peptide
  MOD_RES (32), (32): Xaa is C or S

SEQ ID NO: 55667 - protein, 33 aa, Artificial Sequence
  GFR-binding peptide
  MOD_RES (32), (32): Xaa is C or S
APTKLRPVQVRKIDDSSNVIKKATVNMVVRSXG

SEQ ID NO: 55668 - protein, 38 aa, Artificial Sequence
  GFR-binding peptide
  MOD_RES (1), (2), (36), (38): Xaa is C or S
  MOD_RES (16), (17), (18), (19), (20): Xaa is A or G
  MOD_RES (21), (22), (23), (24): Xaa is A or G or is absent
XXVPTELRSVKMAKVXXXXXXXXXKEVQVDMVVEGXGX

SEQ ID NO: 55669 - protein, 38 aa, Artificial Sequence; identical to SEQ ID NO: 16713
  GFR-binding peptide
  MOD_RES (5), (6): Xaa is C or S
  MOD_RES (20), (21), (22), (23), (24): Xaa is A or G
  MOD_RES (25), (26), (27), (28): Xaa is A or G or is absent

SEQ ID NO: 55670 - protein, 34 aa, Artificial Sequence
  GFR-binding peptide
  MOD_RES (1), (32), (34): Xaa is C or S
XVSQDLRPVQIRKIIGKTPKIKKATVMIVKSXKX

SEQ ID NO: 55671 - protein, 39 aa, Artificial Sequence
  GFR-binding peptide
  MOD_RES (2), (3), (37), (39): Xaa is C or S
  MOD_RES (17), (18), (19), (20), (21): Xaa is A or G
  MOD_RES (22), (23), (24), (25): Xaa is A or G or is absent
AXXVPTELSNITMQIMXXXXXXXXXIGEMSEMVVEGXGX

SEQ ID NO: 55672 - protein, 37 aa, Artificial Sequence; identical to SEQ ID NO: 19842
  GFR-binding peptide
  MOD_RES (35), (37): Xaa is C or S
  MOD_RES (14), (15), (16), (17), (18): Xaa is A or G
  MOD_RES (19), (20), (21), (22): Xaa is A or G or is absent

SEQ ID NO: 55673 - protein, 34 aa, Artificial Sequence
  GFR-binding peptide
  MOD_RES (1), (34): Xaa is C or S
  MOD_RES (15), (16), (17), (18), (19): Xaa is A or G
  MOD_RES (20), (21), (22), (23): Xaa is A or G or is absent
XVPQALRPVQIRKIXXXXXXXXXKKATVMIVRSX

SEQ ID NO: 55674 - protein, 39 aa, Artificial Sequence; identical to SEQ ID NO: 19849
  GFR-binding peptide
  MOD_RES (3), (3): Xaa is C or S

SEQ ID NO: 55675 - protein, 35 aa, Artificial Sequence
  GFR-binding peptide
  MOD_RES (2), (2): Xaa is C or S
EXVPTEEEPLTMLYYRIKPHQGQHEQLSNFLQHNK

SEQ ID NO: 55676 - protein, 35 aa, Artificial Sequence
  GFR-binding peptide
  MOD_RES (2), (2): Xaa is C or S
  MOD_RES (16), (17), (18), (19), (20): Xaa is A or G
  MOD_RES (21), (22), (23), (24): Xaa is A or G or is absent
TXAPTKLRSVKVAKVXXXXXXXXXKEVQVNMVVRS

SEQ ID NO: 55677 - protein, 37 aa, Artificial Sequence; identical to SEQ ID NO: 19854
  GFR-binding peptide
  MOD_RES (37), (37): Xaa is C or S

SEQ ID NO: 55678 - protein, 38 aa, Artificial Sequence
  GFR-binding peptide
  MOD_RES (4), (5): Xaa is C or S
  MOD_RES (19), (20), (21), (22), (23): Xaa is A or G
  MOD_RES (24), (25), (26), (27): Xaa is A or G or is absent
PKAXXVPTELSNITMQIMXXXXXXXXXIGEMSEMVVEG

SEQ ID NO: 55679 - protein, 39 aa, Artificial Sequence; identical to SEQ ID NO: 40752
  GFR-binding peptide
  MOD_RES (6), (7): Xaa is C or S
  MOD_RES (21), (22), (23), (24), (25): Xaa is A or G
  MOD_RES (26), (27), (28), (29): Xaa is A or G or is absent

SEQ ID NO: 55680 - protein, 36 aa, Artificial Sequence; identical to SEQ ID NO: 19855
  GFR-binding peptide
  MOD_RES (1), (35): Xaa is C or S

SEQ ID NO: 55681 - protein, 38 aa, Artificial Sequence
  GFR-binding peptide
  MOD_RES (4), (4): Xaa is C or S
  MOD_RES (20), (21), (22), (23), (24): Xaa is A or G
  MOD_RES (25), (26), (27), (28): Xaa is A or G or is absent
NVQXRPTQVQLEPLTVLYYXXXXXXXXXEQLSNTLEDH

SEQ ID NO: 55682 - protein, 36 aa, Artificial Sequence
  GFR-binding peptide
  MOD_RES (1), (2), (34), (36): Xaa is C or S
XXAPTQLRPVQVRKIDDSSNVIKKATVNMVVRAXGX

SEQ ID NO: 55683 - protein, 43 aa, Artificial Sequence; identical to SEQ ID NO: 16723
  GFR-binding peptide
  MOD_RES (5), (6), (40), (42): Xaa is C or S
  MOD_RES (20), (21), (22), (23), (24): Xaa is A or G
  MOD_RES (25), (26), (27), (28): Xaa is A or G or is absent

SEQ ID NO: 55684 - protein, 37 aa, Artificial Sequence; identical to SEQ ID NO: 16724
  GFR-binding peptide
  MOD_RES (3), (35), (37): Xaa is C or S

SEQ ID NO: 55685 - protein, 33 aa, Artificial Sequence
  GFR-binding peptide
  MOD_RES (33), (33): Xaa is C or S
  MOD_RES (14), (15), (16), (17), (18): Xaa is A or G
  MOD_RES (19), (20), (21), (22): Xaa is A or G or is absent
VPQDLRSVKIAKVXXXXXXXXXKEVQVMVVKSX

SEQ ID NO: 55686 - protein, 34 aa, Artificial Sequence; identical to SEQ ID NO: 16725
  GFR-binding peptide
  MOD_RES (1), (2), (34): Xaa is C or S

SEQ ID NO: 55687 - protein, 37 aa, Artificial Sequence
  GFR-binding peptide
  MOD_RES (3), (35), (37): Xaa is C or S
PTXAPTKLSNITVQIMDDSSNVIIGEMSNMVVRSXGX

SEQ ID NO: 55688 - protein, 35 aa, Artificial Sequence; identical to SEQ ID NO: 19862
  GFR-binding peptide

SEQ ID NO: 55689 - protein, 35 aa, Artificial Sequence
  GFR-binding peptide
  MOD_RES (1), (2): Xaa is C or S
  MOD_RES (16), (17), (18), (19), (20): Xaa is A or G
  MOD_RES (21), (22), (23), (24): Xaa is A or G or is absent
XXAPTKLRPVQVRKIXXXXXXXXXKKATVNMVVRS

SEQ ID NO: 55690 - protein, 37 aa, Artificial Sequence
  GFR-binding peptide
  MOD_RES (3), (3): Xaa is C or S
VKXQPSRVHHEPLTVLYYEYVRKKPKLEQLSNRLEEH

SEQ ID NO: 55691 - protein, 33 aa, Artificial Sequence
  GFR-binding peptide
  MOD_RES (31), (33): Xaa is C or S
VPQDLRPVQIRKIVGRTPKVKKATVMVVKSXKX

SEQ ID NO: 55692 - protein, 37 aa, Artificial Sequence; identical to SEQ ID NO: 16728
  GFR-binding peptide
  MOD_RES (1), (2), (36): Xaa is C or S
  MOD_RES (16), (17), (18), (19), (20): Xaa is A or G
  MOD_RES (21), (22), (23), (24): Xaa is A or G or is absent

SEQ ID NO: 55693 - protein, 40 aa, Artificial Sequence; identical to SEQ ID NO: 19867
  GFR-binding peptide
  MOD_RES (1), (38), (40): Xaa is C or S

SEQ ID NO: 55694 - protein, 44 aa, Artificial Sequence; identical to SEQ ID NO: 19868
  GFR-binding peptide
  MOD_RES (7), (41), (43): Xaa is C or S
  MOD_RES (21), (22), (23), (24), (25): Xaa is A or G
  MOD_RES (26), (27), (28), (29): Xaa is A or G or is absent

SEQ ID NO: 55695 - protein, 41 aa, Artificial Sequence
  GFR-binding peptide
  MOD_RES (5), (39), (41): Xaa is C or S
  MOD_RES (19), (20), (21), (22), (23): Xaa is A or G
  MOD_RES (24), (25), (26), (27): Xaa is A or G or is absent
EGLEXVPTEEEPLTMLYYXXXXXXXXXEQLSNFLQHNKXEX

SEQ ID NO: 55696 - protein, 33 aa, Artificial Sequence
  GFR-binding peptide
  MOD_RES (1), (1): Xaa is C or S
  MOD_RES (15), (16), (17), (18), (19): Xaa is A or G
  MOD_RES (20), (21), (22), (23): Xaa is A or G or is absent
XAPTKLSNITVQIMXXXXXXXXXIGEMSNMVVR

SEQ ID NO: 55697 - protein, 36 aa, Artificial Sequence; identical to SEQ ID NO: 19870
  GFR-binding peptide
  MOD_RES (1), (1): Xaa is C or S

SEQ ID NO: 55698 - protein, 31 aa, Artificial Sequence; identical to SEQ ID NO: 16732
  GFR-binding peptide

SEQ ID NO: 55699 - protein, 38 aa, Artificial Sequence; identical to SEQ ID NO: 16733
  GFR-binding peptide
  MOD_RES (6), (7): Xaa is C or S

SEQ ID NO: 55700 - protein, 39 aa, Artificial Sequence; identical to SEQ ID NO: 16734
  GFR-binding peptide
  MOD_RES (4), (5), (39): Xaa is C or S
  MOD_RES (19), (20), (21), (22), (23): Xaa is A or G
  MOD_RES (24), (25), (26), (27): Xaa is A or G or is absent

SEQ ID NO: 55701 - protein, 38 aa, Artificial Sequence; identical to SEQ ID NO: 16737
  GFR-binding peptide
  MOD_RES (3), (4), (37): Xaa is C or S
  MOD_RES (18), (19), (20), (21), (22): Xaa is A or G
  MOD_RES (23), (24), (25), (26): Xaa is A or G or is absent

SEQ ID NO: 55702 - protein, 34 aa, Artificial Sequence
  GFR-binding peptide
  MOD_RES (1), (2), (34): Xaa is C or S
XXVPTELSNITMQIMDEYDKVVIGEMSEMVVEGX

SEQ ID NO: 55703 - protein, 34 aa, Artificial Sequence
  GFR-binding peptide
  MOD_RES (32), (34): Xaa is C or S
APTKLRSVKVAKVDDSSNVIKEVQVNMVVRSXGX

SEQ ID NO: 55704 - protein, 37 aa, Artificial Sequence
  GFR-binding peptide
  MOD_RES (4), (5), (37): Xaa is C or S
PKAXXVPTELRPVQMRKIDENEKVVKKATVDMVVEGX

SEQ ID NO: 55705 - protein, 40 aa, Artificial Sequence; identical to SEQ ID NO: 19874
  GFR-binding peptide
  MOD_RES (4), (4): Xaa is C or S

SEQ ID NO: 55706 - protein, 36 aa, Artificial Sequence
  GFR-binding peptide
  MOD_RES (2), (34), (36): Xaa is C or S
TXAPTKLRSVKVAKVDDSSNVIKEVQVNMVVRSXGX

SEQ ID NO: 55707 - protein, 35 aa, Artificial Sequence; identical to SEQ ID NO: 19875
  GFR-binding peptide
  MOD_RES (15), (16), (17), (18), (19): Xaa is A or G
  MOD_RES (20), (21), (22), (23): Xaa is A or G or is absent

SEQ ID NO: 55708 - protein, 39 aa, Artificial Sequence
  GFR-binding peptide
  MOD_RES (5), (6), (37), (39): Xaa is C or S
SASPXXVSQDLSNITIQIMIGKTPKIIGEMSMIVKSXKX

SEQ ID NO: 55709 - protein, 43 aa, Artificial Sequence; identical to SEQ ID NO: 19876
  GFR-binding peptide
  MOD_RES (4), (41), (43): Xaa is C or S
  MOD_RES (20), (21), (22), (23), (24): Xaa is A or G
  MOD_RES (25), (26), (27), (28): Xaa is A or G or is absent

SEQ ID NO: 55710 - protein, 40 aa, Artificial Sequence
  GFR-binding peptide
  MOD_RES (6), (7), (38), (40): Xaa is C or S
ASASPXXVPQDLSNITIQIMVGRTPKVIGEMSMVVKSXKX

SEQ ID NO: 55711 - protein, 41 aa, Artificial Sequence; identical to SEQ ID NO: 19877
  GFR-binding peptide
  MOD_RES (5), (39), (41): Xaa is C or S
  MOD_RES (19), (20), (21), (22), (23): Xaa is A or G
  MOD_RES (24), (25), (26), (27): Xaa is A or G or is absent

SEQ ID NO: 55712 - protein, 38 aa, Artificial Sequence
  GFR-binding peptide
  MOD_RES (4), (4): Xaa is C or S
NVQXRPTQVQLEPLPVVYYEIVRKKPIFEQLSNTLEDH

SEQ ID NO: 55713 - protein, 36 aa, Artificial Sequence; identical to SEQ ID NO: 19879
  GFR-binding peptide
  MOD_RES (2), (2): Xaa is C or S

SEQ ID NO: 55714 - protein, 42 aa, Artificial Sequence
  GFR-binding peptide
  MOD_RES (7), (41): Xaa is C or S
  MOD_RES (21), (22), (23), (24), (25): Xaa is A or G
  MOD_RES (26), (27), (28), (29): Xaa is A or G or is absent
HVTKPTXAPTKLRPVQVRKIXXXXXXXXXKKATVNMVVRSXG

SEQ ID NO: 55715 - protein, 31 aa, Artificial Sequence; identical to SEQ ID NO: 16754
  GFR-binding peptide
  MOD_RES (1), (1): Xaa is C or S

SEQ ID NO: 55716 - protein, 42 aa, Artificial Sequence; identical to SEQ ID NO: 16755
  GFR-binding peptide
  MOD_RES (5), (6), (40), (42): Xaa is C or S
  MOD_RES (20), (21), (22), (23), (24): Xaa is A or G
  MOD_RES (25), (26), (27), (28): Xaa is A or G or is absent

SEQ ID NO: 55717 - protein, 36 aa, Artificial Sequence
  GFR-binding peptide
  MOD_RES (5), (5): Xaa is C or S
TKPTXAPTKLRPVQVRKIDDSSNVIKKATVNMVVRS

SEQ ID NO: 55718 - protein, 39 aa, Artificial Sequence
  GFR-binding peptide
  MOD_RES (6), (6): Xaa is C or S
DEGLEXVPTEEEPLPMVYYRIKPHQGQHEQLSNFLQHNK

SEQ ID NO: 55719 - protein, 35 aa, Artificial Sequence; identical to SEQ ID NO: 19886
  GFR-binding peptide
  MOD_RES (3), (3): Xaa is C or S
  MOD_RES (17), (18), (19), (20), (21): Xaa is A or G
  MOD_RES (22), (23), (24), (25): Xaa is A or G or is absent

SEQ ID NO: 55720 - protein, 38 aa, Artificial Sequence; identical to SEQ ID NO: 16757
  GFR-binding peptide
  MOD_RES (3), (4), (35), (37): Xaa is C or S

SEQ ID NO: 55721 - protein, 34 aa, Artificial Sequence; identical to SEQ ID NO: 19888
  GFR-binding peptide
  MOD_RES (14), (15), (16), (17), (18): Xaa is A or G
  MOD_RES (19), (20), (21), (22): Xaa is A or G or is absent

SEQ ID NO: 55722 - protein, 41 aa, Artificial Sequence; identical to SEQ ID NO: 16760
  GFR-binding peptide
  MOD_RES (5), (6), (38), (40): Xaa is C or S

SEQ ID NO: 55723 - protein, 37 aa, Artificial Sequence
  GFR-binding peptide
  MOD_RES (3), (37): Xaa is C or S
  MOD_RES (17), (18), (19), (20), (21): Xaa is A or G
  MOD_RES (22), (23), (24), (25): Xaa is A or G or is absent
PTXAPTKLRPVQVRKIXXXXXXXXXKKATVNMVVRSX

SEQ ID NO: 55724 - protein, 38 aa, Artificial Sequence
  GFR-binding peptide
  MOD_RES (1), (2), (35), (37): Xaa is C or S
  MOD_RES (16), (17), (18), (19), (20): Xaa is A or G
  MOD_RES (21), (22), (23), (24): Xaa is A or G or is absent
XXVPQALRSVKIAKVXXXXXXXXXKEVQVMIVRSXKXS

SEQ ID NO: 55725 - protein, 40 aa, Artificial Sequence
  GFR-binding peptide
  MOD_RES (6), (7), (40): Xaa is C or S
  MOD_RES (21), (22), (23), (24), (25): Xaa is A or G
  MOD_RES (26), (27), (28), (29): Xaa is A or G or is absent
ASASPXXVSQDLRPVQIRKIXXXXXXXXXKKATVMIVKSX

SEQ ID NO: 55726 - protein, 44 aa, Artificial Sequence; identical to SEQ ID NO: 19892
  GFR-binding peptide
  MOD_RES (5), (42), (44): Xaa is C or S
  MOD_RES (21), (22), (23), (24), (25): Xaa is A or G
  MOD_RES (26), (27), (28), (29): Xaa is A or G or is absent

SEQ ID NO: 55727 - protein, 35 aa, Artificial Sequence; identical to SEQ ID NO: 16764
  GFR-binding peptide
  MOD_RES (1), (2), (35): Xaa is C or S
  MOD_RES (16), (17), (18), (19), (20): Xaa is A or G
  MOD_RES (21), (22), (23), (24): Xaa is A or G or is absent

SEQ ID NO: 55728 - protein, 34 aa, Artificial Sequence
  GFR-binding peptide
  MOD_RES (34), (34): Xaa is C or S
  MOD_RES (14), (15), (16), (17), (18): Xaa is A or G
  MOD_RES (19), (20), (21), (22): Xaa is A or G or is absent
APTQLRSVKVAKVXXXXXXXXXKEVQVNMVVRAX

SEQ ID NO: 55729 - protein, 38 aa, Artificial Sequence
  GFR-binding peptide
  MOD_RES (5), (6): Xaa is C or S
  MOD_RES (20), (21), (22), (23), (24): Xaa is A or G
  MOD_RES (25), (26), (27), (28): Xaa is A or G or is absent
IPKAXXVPTELRSVKMAKVXXXXXXXXXKEVQVEMVVE

SEQ ID NO: 55730 - protein, 38 aa, Artificial Sequence
  GFR-binding peptide
  MOD_RES (5), (6), (38): Xaa is C or S
IPKAXXVPTELRPVQMRKIDENEKVVKKATVDMVVEGX

SEQ ID NO: 55731 - protein, 34 aa, Artificial Sequence; identical to SEQ ID NO: 16766
  GFR-binding peptide
  MOD_RES (3), (4): Xaa is C or S

SEQ ID NO: 55732 - protein, 35 aa, Artificial Sequence
  GFR-binding peptide
  MOD_RES (16), (17), (18), (19), (20): Xaa is A or G
  MOD_RES (21), (22), (23), (24): Xaa is A or G or is absent
RPTQVQLEPLPVVYYXXXXXXXXXEQLSNTLEDHL

SEQ ID NO: 55733 - protein, 34 aa, Artificial Sequence
  GFR-binding peptide
  MOD_RES (1), (2): Xaa is C or S
  MOD_RES (16), (17), (18), (19), (20): Xaa is A or G
  MOD_RES (21), (22), (23), (24): Xaa is A or G or is absent
XXVPQDLRPVQIRKIXXXXXXXXXKKATVMVVKS

SEQ ID NO: 55734 - protein, 34 aa, Artificial Sequence
  GFR-binding peptide
  MOD_RES (1), (33): Xaa is C or S
XVPTELRSVKMAKVDEYDKVVKEVQVEMVVEGXG

SEQ ID NO: 55735 - protein, 37 aa, Artificial Sequence
  GFR-binding peptide
  MOD_RES (5), (6): Xaa is C or S
VPKPXXAPTQLSNITVQIMDDSSNVIIGEMSNMVVRA

SEQ ID NO: 55736 - protein, 39 aa, Artificial Sequence
  GFR-binding peptide
  MOD_RES (5), (6): Xaa is C or S
  MOD_RES (20), (21), (22), (23), (24): Xaa is A or G
  MOD_RES (25), (26), (27), (28): Xaa is A or G or is absent
VPKPXXAPTKLRSVKVAKVXXXXXXXXXKEVQVNMVVRS

SEQ ID NO: 55737 - protein, 40 aa, Artificial Sequence
  GFR-binding peptide
  MOD_RES (5), (6), (40): Xaa is C or S
  MOD_RES (20), (21), (22), (23), (24): Xaa is A or G
  MOD_RES (25), (26), (27), (28): Xaa is A or G or is absent
IPKAXXVPTELRSVKMAKVXXXXXXXXXKEVQVEMVVEGX

SEQ ID NO: 55738 - protein, 40 aa, Artificial Sequence
  GFR-binding peptide
  MOD_RES (4), (5), (39): Xaa is C or S
  MOD_RES (19), (20), (21), (22), (23): Xaa is A or G
  MOD_RES (24), (25), (26), (27): Xaa is A or G or is absent
PKPXXAPTKLRPVQVRKIXXXXXXXXXKKATVNMVVRSXG

SEQ ID NO: 55739 - protein, 34 aa, Artificial Sequence
  GFR-binding peptide
  MOD_RES (1), (33): Xaa is C or S
XVPTELRPVQMRKIDENEKVVKKATVDMVVEGXG

SEQ ID NO: 55740 - protein, 44 aa, Artificial Sequence
  GFR-binding peptide
  MOD_RES (6), (7), (41), (43): Xaa is C or S
  MOD_RES (21), (22), (23), (24), (25): Xaa is A or G
  MOD_RES (26), (27), (28), (29): Xaa is A or G or is absent
KIPKAXXVPTELRSVKMAKVXXXXXXXXXKEVQVDMVVEGXGXR

SEQ ID NO: 55741 - protein, 39 aa, Artificial Sequence
  GFR-binding peptide
  MOD_RES (3), (3): Xaa is C or S
VQXRPTQVQLEPLTVLYYEIVRKKPIFEQLSNTLEDHLA

SEQ ID NO: 55742 - protein, 43 aa, Artificial Sequence; identical to SEQ ID NO: 19899
  GFR-binding peptide
  MOD_RES (3), (40), (42): Xaa is C or S

SEQ ID NO: 55743 - protein, 33 aa, Artificial Sequence
  GFR-binding peptide
  MOD_RES (1), (1): Xaa is C or S
  MOD_RES (15), (16), (17), (18), (19): Xaa is A or G
  MOD_RES (20), (21), (22), (23): Xaa is A or G or is absent
XVSQDLSNITIQIMXXXXXXXXXIGEMSMIVKS

SEQ ID NO: 55744 - protein, 35 aa, Artificial Sequence; identical to SEQ ID NO: 16773
  GFR-binding peptide
  MOD_RES (2), (3): Xaa is C or S
  MOD_RES (17), (18), (19), (20), (21): Xaa is A or G
  MOD_RES (22), (23), (24), (25): Xaa is A or G or is absent

SEQ ID NO: 55745 - protein, 40 aa, Artificial Sequence; identical to SEQ ID NO: 16774
  GFR-binding peptide
  MOD_RES (6), (38), (40): Xaa is C or S

SEQ ID NO: 55746 - protein, 32 aa, Artificial Sequence
  GFR-binding peptide
  MOD_RES (32), (32): Xaa is C or S
VPTELRPVQMRKIDEYDKVVKKATVEMVVEGX

SEQ ID NO: 55747 - protein, 35 aa, Artificial Sequence
  GFR-binding peptide
  MOD_RES (3), (4), (35): Xaa is C or S
SPXXVSQDLRSVKIAKVIGKTPKIKEVQVMIVKSX

SEQ ID NO: 55748 - protein, 37 aa, Artificial Sequence
  GFR-binding peptide
  MOD_RES (3), (4), (35), (37): Xaa is C or S
SPXXVPQDLRPVQIRKIVGRTPKVKKATVMVVKSXKX

SEQ ID NO: 55749 - protein, 38 aa, Artificial Sequence; identical to SEQ ID NO: 19900
  GFR-binding peptide
  MOD_RES (6), (6): Xaa is C or S
  MOD_RES (20), (21), (22), (23), (24): Xaa is A or G
  MOD_RES (25), (26), (27), (28): Xaa is A or G or is absent

SEQ ID NO: 55750 - protein, 34 aa, Artificial Sequence; identical to SEQ ID NO: 16778
  GFR-binding peptide
  MOD_RES (1), (33): Xaa is C or S

SEQ ID NO: 55751 - protein, 37 aa, Artificial Sequence; identical to SEQ ID NO: 16779
  GFR-binding peptide
  MOD_RES (3), (4), (37): Xaa is C or S
  MOD_RES (18), (19), (20), (21), (22): Xaa is A or G
  MOD_RES (23), (24), (25), (26): Xaa is A or G or is absent

SEQ ID NO: 55752 - protein, 37 aa, Artificial Sequence
  GFR-binding peptide
  MOD_RES (2), (3), (35), (37): Xaa is C or S
AXXVPTELRPVQMRKIDEYDKVVKKATVEMVVEGXGX

SEQ ID NO: 55753 - protein, 38 aa, Artificial Sequence
  GFR-binding peptide
  MOD_RES (5), (6): Xaa is C or S
  MOD_RES (20), (21), (22), (23), (24): Xaa is A or G
  MOD_RES (25), (26), (27), (28): Xaa is A or G or is absent
IPKAXXVPTELRPVQMRKIXXXXXXXXXKKATVEMVVE

SEQ ID NO: 55754 - protein, 41 aa, Artificial Sequence; identical to SEQ ID NO: 19904
  GFR-binding peptide
  MOD_RES (4), (38), (40): Xaa is C or S

SEQ ID NO: 55755 - protein, 42 aa, Artificial Sequence
  GFR-binding peptide
  MOD_RES (6), (7), (40), (42): Xaa is C or S
  MOD_RES (21), (22), (23), (24), (25): Xaa is A or G
  MOD_RES (26), (27), (28), (29): Xaa is A or G or is absent
ASASPXXVSQDLSNITIQIMXXXXXXXXXIGEMSMIVKSXKX

SEQ ID NO: 55756 - protein, 42 aa, Artificial Sequence
  GFR-binding peptide
  MOD_RES (7), (39), (41): Xaa is C or S
HVTKPTXAPTKLSNITVQIMDDSSNVIIGEMSNMVVRSXGXH

SEQ ID NO: 55757 - protein, 42 aa, Artificial Sequence; identical to SEQ ID NO: 16780
  GFR-binding peptide
  MOD_RES (5), (6), (40), (42): Xaa is C or S
  MOD_RES (20), (21), (22), (23), (24): Xaa is A or G
  MOD_RES (25), (26), (27), (28): Xaa is A or G or is absent

SEQ ID NO: 55758 - protein, 36 aa, Artificial Sequence
  GFR-binding peptide
  MOD_RES (2), (3), (34), (36): Xaa is C or S
PXXVPQALSNITIQIMVGRKPKVIGEMSMIVRSXKX

SEQ ID NO: 55759 - protein, 37 aa, Artificial Sequence; identical to SEQ ID NO: 19907
  GFR-binding peptide
  MOD_RES (36), (36): Xaa is C or S
  MOD_RES (15), (16), (17), (18), (19): Xaa is A or G
  MOD_RES (20), (21), (22), (23): Xaa is A or G or is absent

SEQ ID NO: 55760 - protein, 34 aa, Artificial Sequence
  GFR-binding peptide
  MOD_RES (1), (2): Xaa is C or S
  MOD_RES (16), (17), (18), (19), (20): Xaa is A or G
  MOD_RES (21), (22), (23), (24): Xaa is A or G or is absent
XXVPQDLRSVKIAKVXXXXXXXXXKEVQVMVVKS

SEQ ID NO: 55761 - protein, 36 aa, Artificial Sequence
  GFR-binding peptide
  MOD_RES (1), (2), (34), (36): Xaa is C or S
XXVPTELRPVQMRKIDEYDKVVKKATVEMVVEGXGX

SEQ ID NO: 55762 - protein, 39 aa, Artificial Sequence; identical to SEQ ID NO: 19910
  GFR-binding peptide
  MOD_RES (4), (38): Xaa is C or S

SEQ ID NO: 55763 - protein, 35 aa, Artificial Sequence
  GFR-binding peptide
  MOD_RES (34), (34): Xaa is C or S
  MOD_RES (14), (15), (16), (17), (18): Xaa is A or G
  MOD_RES (19), (20), (21), (22): Xaa is A or G or is absent
VPTEEEPLPMVYYXXXXXXXXXEQLSNFLQHNKXE

SEQ ID NO: 55764 - protein, 41 aa, Artificial Sequence
  GFR-binding peptide
  MOD_RES (4), (5), (39), (41): Xaa is C or S
  MOD_RES (19), (20), (21), (22), (23): Xaa is A or G
  MOD_RES (24), (25), (26), (27): Xaa is A or G or is absent
PKPXXAPTKLRPVQVRKIXXXXXXXXXKKATVNMVVRSXGX

SEQ ID NO: 55765 - protein, 35 aa, Artificial Sequence
  GFR-binding peptide
  MOD_RES (2), (3), (34): Xaa is C or S
PXXVPQDLSNITIQIMVGRTPKVIGEMSMVVKSXK

SEQ ID NO: 55766 - protein, 35 aa, Artificial Sequence; identical to SEQ ID NO: 19912
  GFR-binding peptide
  MOD_RES (3), (3): Xaa is C or S
  MOD_RES (17), (18), (19), (20), (21): Xaa is A or G
  MOD_RES (22), (23), (24), (25): Xaa is A or G or is absent

SEQ ID NO: 55767 - protein, 37 aa, Artificial Sequence; identical to SEQ ID NO: 16784
  GFR-binding peptide
  MOD_RES (4), (5): Xaa is C or S
  MOD_RES (19), (20), (21), (22), (23): Xaa is A or G
  MOD_RES (24), (25), (26), (27): Xaa is A or G or is absent

SEQ ID NO: 55768 - protein, 30 aa, Artificial Sequence
  GFR-binding peptide
VSQDLSNITIQIMIGKTPKIIGEMSMIVKS

SEQ ID NO: 55769 - protein, 39 aa, Artificial Sequence
  GFR-binding peptide
  MOD_RES (6), (7), (38): Xaa is C or S
ASASPXXVPQDLSNITIQIMVGRTPKVIGEMSMVVKSXK

SEQ ID NO: 55770 - protein, 39 aa, Artificial Sequence
  GFR-binding peptide
  MOD_RES (3), (4), (38): Xaa is C or S
  MOD_RES (18), (19), (20), (21), (22): Xaa is A or G
  MOD_RES (23), (24), (25), (26): Xaa is A or G or is absent
KAXXVPTELSNITMQIMXXXXXXXXXIGEMSEMVVEGXG

SEQ ID NO: 55771 - protein, 36 aa, Artificial Sequence; identical to SEQ ID NO: 16789
  GFR-binding peptide
  MOD_RES (1), (2), (36): Xaa is C or S
  MOD_RES (16), (17), (18), (19), (20): Xaa is A or G
  MOD_RES (21), (22), (23), (24): Xaa is A or G or is absent

SEQ ID NO: 55772 - protein, 39 aa, Artificial Sequence; identical to SEQ ID NO: 16792
  GFR-binding peptide
  MOD_RES (3), (37), (39): Xaa is C or S
  MOD_RES (17), (18), (19), (20), (21): Xaa is A or G
  MOD_RES (22), (23), (24), (25): Xaa is A or G or is absent

SEQ ID NO: 55773 - protein, 39 aa, Artificial Sequence
  GFR-binding peptide
  MOD_RES (4), (5), (39): Xaa is C or S
  MOD_RES (19), (20), (21), (22), (23): Xaa is A or G
  MOD_RES (24), (25), (26), (27): Xaa is A or G or is absent
PKAXXVPTELSNITMQIMXXXXXXXXXIGEMSEMVVEGX

SEQ ID NO: 55774 - protein, 40 aa, Artificial Sequence
  GFR-binding peptide
  MOD_RES (3), (40): Xaa is C or S
  MOD_RES (19), (20), (21), (22), (23): Xaa is A or G
  MOD_RES (24), (25), (26), (27): Xaa is A or G or is absent
VQXRPTQVQLEPLPVVYYXXXXXXXXXEQLSNTLEDHLAX

SEQ ID NO: 55775 - protein, 37 aa, Artificial Sequence; identical to SEQ ID NO: 16793
  GFR-binding peptide
  MOD_RES (3), (4): Xaa is C or S
  MOD_RES (18), (19), (20), (21), (22): Xaa is A or G
  MOD_RES (23), (24), (25), (26): Xaa is A or G or is absent

SEQ ID NO: 55776 - protein, 42 aa, Artificial Sequence
  GFR-binding peptide
  MOD_RES (6), (7), (40), (42): Xaa is C or S
  MOD_RES (21), (22), (23), (24), (25): Xaa is A or G
  MOD_RES (26), (27), (28), (29): Xaa is A or G or is absent
ASAAPXXVPQALSNITIQIMXXXXXXXXXIGEMSMIVRSXKX

SEQ ID NO: 55777 - protein, 33 aa, Artificial Sequence
  GFR-binding peptide
  MOD_RES (2), (3): Xaa is C or S
PXXVSQDLRPVQIRKIIGKTPKIKKATVMIVKS

SEQ ID NO: 55778 - protein, 37 aa, Artificial Sequence
  GFR-binding peptide
  MOD_RES (3), (3): Xaa is C or S
VKXQPSRVHHEPLPVVYYEYVRKKPKLEQLSNRLEEH

SEQ ID NO: 55779 - protein, 36 aa, Artificial Sequence
  GFR-binding peptide
  MOD_RES (3), (3): Xaa is C or S
  MOD_RES (17), (18), (19), (20), (21): Xaa is A or G
  MOD_RES (22), (23), (24), (25): Xaa is A or G or is absent
PTXAPTKLRPVQVRKIXXXXXXXXXKKATVNMVVRS

SEQ ID NO: 55780 - protein, 34 aa, Artificial Sequence
  GFR-binding peptide
RPTQVQLEPLPVVYYEIVRKKPIFEQLSNTLEDH

SEQ ID NO: 55781 - protein, 38 aa, Artificial Sequence; identical to SEQ ID NO: 19921
  GFR-binding peptide
  MOD_RES (1), (38): Xaa is C or S
  MOD_RES (17), (18), (19), (20), (21): Xaa is A or G
  MOD_RES (22), (23), (24), (25): Xaa is A or G or is absent

SEQ ID NO: 55782 - protein, 34 aa, Artificial Sequence
  GFR-binding peptide
  MOD_RES (3), (4): Xaa is C or S
SPXXVPQDLSNITIQIMVGRTPKVIGEMSMVVKS

SEQ ID NO: 55783 - protein, 43 aa, Artificial Sequence
  GFR-binding peptide
  MOD_RES (5), (6), (40), (42): Xaa is C or S
  MOD_RES (20), (21), (22), (23), (24): Xaa is A or G
  MOD_RES (25), (26), (27), (28): Xaa is A or G or is absent
IPKAXXVPTELSNITMQIMXXXXXXXXXIGEMSDMVVEGXGXR

SEQ ID NO: 55784 - protein, 41 aa, Artificial Sequence
  GFR-binding peptide
  MOD_RES (4), (5), (39), (41): Xaa is C or S
  MOD_RES (19), (20), (21), (22), (23): Xaa is A or G
  MOD_RES (24), (25), (26), (27): Xaa is A or G or is absent
PKPXXAPTKLSNITVQIMXXXXXXXXXIGEMSNMVVRSXGX

SEQ ID NO: 55785 - protein, 36 aa, Artificial Sequence; identical to SEQ ID NO: 19922
  GFR-binding peptide
  MOD_RES (2), (36): Xaa is C or S

SEQ ID NO: 55786 - protein, 33 aa, Artificial Sequence
  GFR-binding peptide
  MOD_RES (1), (32): Xaa is C or S
XVPQDLRSVKIAKVVGRTPKVKEVQVMVVKSXK

SEQ ID NO: 55787 - protein, 39 aa, Artificial Sequence
  GFR-binding peptide
  MOD_RES (4), (36), (38): Xaa is C or S
KPTXAPTKLSNITVQIMDDSSNVIIGEMSNMVVRSXGXH

SEQ ID NO: 55788 - protein, 35 aa, Artificial Sequence; identical to SEQ ID NO: 19923
  GFR-binding peptide
  MOD_RES (15), (16), (17), (18), (19): Xaa is A or G
  MOD_RES (20), (21), (22), (23): Xaa is A or G or is absent

SEQ ID NO: 55789 - protein, 37 aa, Artificial Sequence; identical to SEQ ID NO: 19924
  GFR-binding peptide
  MOD_RES (1), (1): Xaa is C or S
  MOD_RES (17), (18), (19), (20), (21): Xaa is A or G
  MOD_RES (22), (23), (24), (25): Xaa is A or G or is absent

SEQ ID NO: 55790 - protein, 36 aa, Artificial Sequence
  GFR-binding peptide
  MOD_RES (3), (4), (36): Xaa is C or S
KPXXAPTKLRPVQVRKIDDSSNVIKKATVNMVVRSX

SEQ ID NO: 55791 - protein, 40 aa, Artificial Sequence; identical to SEQ ID NO: 19925
  GFR-binding peptide
  MOD_RES (1), (38), (40): Xaa is C or S

SEQ ID NO: 55792 - protein, 34 aa, Artificial Sequence
  GFR-binding peptide
  MOD_RES (2), (3), (34): Xaa is C or S
PXXVPQDLSNITIQIMVGRTPKVIGEMSMVVKSX

SEQ ID NO: 55793 - protein, 40 aa, Artificial Sequence; identical to SEQ ID NO: 19926
  GFR-binding peptide
  MOD_RES (5), (5): Xaa is C or S

SEQ ID NO: 55794 - protein, 36 aa, Artificial Sequence
  GFR-binding peptide
  MOD_RES (3), (4), (36): Xaa is C or S
KPXXAPTQLRSVKVAKVDDSSNVIKEVQVNMVVRAX

SEQ ID NO: 55795 - protein, 35 aa, Artificial Sequence; identical to SEQ ID NO: 16801
  GFR-binding peptide
  MOD_RES (2), (3): Xaa is C or S
  MOD_RES (17), (18), (19), (20), (21): Xaa is A or G
  MOD_RES (22), (23), (24), (25): Xaa is A or G or is absent

SEQ ID NO: 55796 - protein, 39 aa, Artificial Sequence
  GFR-binding peptide
  MOD_RES (2), (3), (36), (38): Xaa is C or S
  MOD_RES (17), (18), (19), (20), (21): Xaa is A or G
  MOD_RES (22), (23), (24), (25): Xaa is A or G or is absent
PXXVPQALRSVKIAKVXXXXXXXXXKEVQVMIVRSXKXS

SEQ ID NO: 55797 - protein, 41 aa, Artificial Sequence; identical to SEQ ID NO: 16804
  GFR-binding peptide
  MOD_RES (7), (39), (41): Xaa is C or S

SEQ ID NO: 55798 - protein, 37 aa, Artificial Sequence; identical to SEQ ID NO: 16805
  GFR-binding peptide
  MOD_RES (1), (35), (37): Xaa is C or S
  MOD_RES (15), (16), (17), (18), (19): Xaa is A or G
  MOD_RES (20), (21), (22), (23): Xaa is A or G or is absent

SEQ ID NO: 55799 - protein, 38 aa, Artificial Sequence; identical to SEQ ID NO: 16806
  GFR-binding peptide
  MOD_RES (3), (4), (38): Xaa is C or S
  MOD_RES (18), (19), (20), (21), (22): Xaa is A or G
  MOD_RES (23), (24), (25), (26): Xaa is A or G or is absent

SEQ ID NO: 55800 - protein, 39 aa, Artificial Sequence
  GFR-binding peptide
  MOD_RES (5), (6), (39): Xaa is C or S
  MOD_RES (20), (21), (22), (23), (24): Xaa is A or G
  MOD_RES (25), (26), (27), (28): Xaa is A or G or is absent
SASPXXVSQDLSNITIQIMXXXXXXXXXIGEMSMIVKSX

SEQ ID NO: 55801 - protein, 35 aa, Artificial Sequence
  GFR-binding peptide
  MOD_RES (5), (5): Xaa is C or S
TKPTXAPTKLRSVKVAKVDDSSNVIKEVQVNMVVR

SEQ ID NO: 55802 - protein, 37 aa, Artificial Sequence; identical to SEQ ID NO: 19929
  GFR-binding peptide
  MOD_RES (1), (35), (37): Xaa is C or S

SEQ ID NO: 55803 - protein, 41 aa, Artificial Sequence
  GFR-binding peptide
  MOD_RES (6), (40): Xaa is C or S
  MOD_RES (20), (21), (22), (23), (24): Xaa is A or G
  MOD_RES (25), (26), (27), (28): Xaa is A or G or is absent
VTKPTXAPTKLSNITVQIMXXXXXXXXXIGEMSNMVVRSXG

SEQ ID NO: 55804 - protein, 37 aa, Artificial Sequence
  GFR-binding peptide
  MOD_RES (2), (3), (35), (37): Xaa is C or S
AXXVPTELRPVQMRKIDENEKVVKKATVDMVVEGXGX

SEQ ID NO: 55805 - protein, 43 aa, Artificial Sequence
  GFR-binding peptide
  MOD_RES (5), (6), (40), (42): Xaa is C or S
  MOD_RES (20), (21), (22), (23), (24): Xaa is A or G
  MOD_RES (25), (26), (27), (28): Xaa is A or G or is absent
VPKPXXAPTKLRPVQVRKIXXXXXXXXXKKATVNMVVRSXGXH

SEQ ID NO: 55806 - protein, 34 aa, Artificial Sequence; identical to SEQ ID NO: 16808
  GFR-binding peptide
  MOD_RES (33), (33): Xaa is C or S
  MOD_RES (14), (15), (16), (17), (18): Xaa is A or G
  MOD_RES (19), (20), (21), (22): Xaa is A or G or is absent

SEQ ID NO: 55807 - protein, 34 aa, Artificial Sequence; identical to SEQ ID NO: 19931
  GFR-binding peptide
  MOD_RES (2), (2): Xaa is C or S

SEQ ID NO: 55808 - protein, 36 aa, Artificial Sequence
  GFR-binding peptide
  MOD_RES (3), (4): Xaa is C or S
  MOD_RES (18), (19), (20), (21), (22): Xaa is A or G
  MOD_RES (23), (24), (25), (26): Xaa is A or G or is absent
KPXXAPTQLRPVQVRKIXXXXXXXXXKKATVNMVVR

SEQ ID NO: 55809 - protein, 36 aa, Artificial Sequence
  GFR-binding peptide
  MOD_RES (5), (6): Xaa is C or S
SASPXXVSQDLRSVKIAKVIGKTPKIKEVQVMIVKS

SEQ ID NO: 55810 - protein, 38 aa, Artificial Sequence
  GFR-binding peptide
  MOD_RES (4), (5), (36), (38): Xaa is C or S
ASPXXVPQDLSNITIQIMVGRTPKVIGEMSMVVKSXKX

SEQ ID NO: 55811 - protein, 38 aa, Artificial Sequence
  GFR-binding peptide
  MOD_RES (4), (5), (36), (38): Xaa is C or S
ASPXXVPQDLRSVKIAKVVGRTPKVKEVQVMVVKSXKX

SEQ ID NO: 55812 - protein, 42 aa, Artificial Sequence; identical to SEQ ID NO: 19934
  GFR-binding peptide
  MOD_RES (2), (39), (41): Xaa is C or S

SEQ ID NO: 55813 - protein, 38 aa, Artificial Sequence
  GFR-binding peptide
  MOD_RES (3), (37): Xaa is C or S
  MOD_RES (17), (18), (19), (20), (21): Xaa is A or G
  MOD_RES (22), (23), (24), (25): Xaa is A or G or is absent
PTXAPTKLSNITVQIMXXXXXXXXXIGEMSNMVVRSXG

SEQ ID NO: 55814 - protein, 41 aa, Artificial Sequence; identical to SEQ ID NO: 19936
  GFR-binding peptide
  MOD_RES (1), (38), (40): Xaa is C or S

SEQ ID NO: 55815 - protein, 36 aa, Artificial Sequence
  GFR-binding peptide
  MOD_RES (1), (2), (34), (36): Xaa is C or S
XXVPTELRPVQMRKIDENEKVVKKATVDMVVEGXGX

SEQ ID NO: 55816 - protein, 40 aa, Artificial Sequence; identical to SEQ ID NO: 16813
  GFR-binding peptide
  MOD_RES (5), (6), (38), (40): Xaa is C or S

SEQ ID NO: 55817 - protein, 33 aa, Artificial Sequence
  GFR-binding peptide
  MOD_RES (1), (33): Xaa is C or S
XVPTELRSVKMAKVDEYDKVVKEVQVEMVVEGX

SEQ ID NO: 55818 - protein, 38 aa, Artificial Sequence; identical to SEQ ID NO: 16815
  GFR-binding peptide
  MOD_RES (4), (5): Xaa is C or S
  MOD_RES (19), (20), (21), (22), (23): Xaa is A or G
  MOD_RES (24), (25), (26), (27): Xaa is A or G or is absent

SEQ ID NO: 55819 - protein, 34 aa, Artificial Sequence
  GFR-binding peptide
  MOD_RES (15), (16), (17), (18), (19): Xaa is A or G
  MOD_RES (20), (21), (22), (23): Xaa is A or G or is absent
PSRVHHEPLTVLYYXXXXXXXXXEQLSNRLEEHL

SEQ ID NO: 55820 - protein, 35 aa, Artificial Sequence; identical to SEQ ID NO: 16816
  GFR-binding peptide
  MOD_RES (32), (34): Xaa is C or S

SEQ ID NO: 55821 - protein, 33 aa, Artificial Sequence
  GFR-binding peptide
  MOD_RES (1), (32): Xaa is C or S
XVSQDLRSVKIAKVIGKTPKIKEVQVMIVKSXK

SEQ ID NO: 55822 - protein, 33 aa, Artificial Sequence; identical to SEQ ID NO: 16819
  GFR-binding peptide
  MOD_RES (1), (33): Xaa is C or S

SEQ ID NO: 55823 - protein, 34 aa, Artificial Sequence; identical to SEQ ID NO: 16821
  GFR-binding peptide
  MOD_RES (2), (3): Xaa is C or S

SEQ ID NO: 55824 - protein, 36 aa, Artificial Sequence; identical to SEQ ID NO: 16822
  GFR-binding peptide
  MOD_RES (34), (36): Xaa is C or S
  MOD_RES (14), (15), (16), (17), (18): Xaa is A or G
  MOD_RES (19), (20), (21), (22): Xaa is A or G or is absent

SEQ ID NO: 55825 - protein, 38 aa, Artificial Sequence; identical to SEQ ID NO: 19944
  GFR-binding peptide
  MOD_RES (35), (37): Xaa is C or S
  MOD_RES (14), (15), (16), (17), (18): Xaa is A or G
  MOD_RES (19), (20), (21), (22): Xaa is A or G or is absent

SEQ ID NO: 55826 - protein, 37 aa, Artificial Sequence
  GFR-binding peptide
  MOD_RES (1), (34), (36): Xaa is C or S
  MOD_RES (15), (16), (17), (18), (19): Xaa is A or G
  MOD_RES (20), (21), (22), (23): Xaa is A or G or is absent
XVSQDLRSVKIAKVXXXXXXXXXKEVQVMIVKSXKXS

SEQ ID NO: 55827 - protein, 35 aa, Artificial Sequence; identical to SEQ ID NO: 16827
  GFR-binding peptide
  MOD_RES (3), (4): Xaa is C or S

SEQ ID NO: 55828 - protein, 35 aa, Artificial Sequence
  GFR-binding peptide
  MOD_RES (32), (34): Xaa is C or S
VPTELRPVQMRKIDENEKVVKKATVDMVVEGXGXR

SEQ ID NO: 55829 - protein, 39 aa, Artificial Sequence
  GFR-binding peptide
  MOD_RES (6), (7), (38): Xaa is C or S
ASASPXXVSQDLSNITIQIMIGKTPKIIGEMSMIVKSXK

SEQ ID NO: 55830 - protein, 36 aa, Artificial Sequence
  GFR-binding peptide
  MOD_RES (1), (2), (34), (36): Xaa is C or S
XXAPTKLRPVQVRKIDDSSNVIKKATVNMVVRSXGX

SEQ ID NO: 55831 - protein, 38 aa, Artificial Sequence
  GFR-binding peptide
  MOD_RES (2), (3), (36), (38): Xaa is C or S
  MOD_RES (17), (18), (19), (20), (21): Xaa is A or G
  MOD_RES (22), (23), (24), (25): Xaa is A or G or is absent
PXXVPQALRSVKIAKVXXXXXXXXXKEVQVMIVRSXKX

SEQ ID NO: 55832 - protein, 33 aa, Artificial Sequence; identical to SEQ ID NO: 16834
  GFR-binding peptide
  MOD_RES (1), (2): Xaa is C or S

SEQ ID NO: 55833 - protein, 34 aa, Artificial Sequence
  GFR-binding peptide
  MOD_RES (16), (17), (18), (19), (20): Xaa is A or G
  MOD_RES (21), (22), (23), (24): Xaa is A or G or is absent
RPTQVQLEPLTVLYYXXXXXXXXXEQLSNTLEDH

SEQ ID NO: 55834 - protein, 37 aa, Artificial Sequence
  GFR-binding peptide
  MOD_RES (4), (5), (37): Xaa is C or S
PKPXXAPTQLSNITVQIMDDSSNVIIGEMSNMVVRAX

SEQ ID NO: 55835 - protein, 40 aa, Artificial Sequence
  GFR-binding peptide
  MOD_RES (4), (38), (40): Xaa is C or S
  MOD_RES (18), (19), (20), (21), (22): Xaa is A or G
  MOD_RES (23), (24), (25), (26): Xaa is A or G or is absent
KPTXAPTKLRSVKVAKVXXXXXXXXXKEVQVNMVVRSXGX

SEQ ID NO: 55836 - protein, 34 aa, Artificial Sequence
  GFR-binding peptide
  MOD_RES (16), (17), (18), (19), (20): Xaa is A or G
  MOD_RES (21), (22), (23), (24): Xaa is A or G or is absent
RPTQVQLEPLPVVYYXXXXXXXXXEQLSNTLEDH

SEQ ID NO: 55837 - protein, 38 aa, Artificial Sequence
  GFR-binding peptide
  MOD_RES (5), (37): Xaa is C or S
TKPTXAPTKLRSVKVAKVDDSSNVIKEVQVNMVVRSXG

SEQ ID NO: 55838 - protein, 40 aa, Artificial Sequence
  GFR-binding peptide
  MOD_RES (5), (6), (40): Xaa is C or S
  MOD_RES (20), (21), (22), (23), (24): Xaa is A or G
  MOD_RES (25), (26), (27), (28): Xaa is A or G or is absent
IPKAXXVPTELSNITMQIMXXXXXXXXXIGEMSDMVVEGX

SEQ ID NO: 55839 - protein, 41 aa, Artificial Sequence
  GFR-binding peptide
  MOD_RES (1), (38), (40): Xaa is C or S
XQPSRVHHEPLTVLYYEYVRKKPKLEQLSNRLEEHLEXAXA

SEQ ID NO: 55840 - protein, 36 aa, Artificial Sequence
  GFR-binding peptide
  MOD_RES (1), (33), (35): Xaa is C or S
XVPTELSNITMQIMDENEKVVIGEMSDMVVEGXGXR

SEQ ID NO: 55841 - protein, 41 aa, Artificial Sequence; identical to SEQ ID NO: 16840
  GFR-binding peptide
  MOD_RES (3), (4), (38), (40): Xaa is C or S
  MOD_RES (18), (19), (20), (21), (22): Xaa is A or G
  MOD_RES (23), (24), (25), (26): Xaa is A or G or is absent

SEQ ID NO: 55842 - protein, 36 aa, Artificial Sequence; identical to SEQ ID NO: 16842
  GFR-binding peptide
  MOD_RES (4), (4): Xaa is C or S
  MOD_RES (18), (19), (20), (21), (22): Xaa is A or G
  MOD_RES (23), (24), (25), (26): Xaa is A or G or is absent

SEQ ID NO: 55843 - protein, 37 aa, Artificial Sequence
  GFR-binding peptide
  MOD_RES (1), (1): Xaa is C or S
  MOD_RES (17), (18), (19), (20), (21): Xaa is A or G
  MOD_RES (22), (23), (24), (25): Xaa is A or G or is absent
XQPSRVHHEPLPVVYYXXXXXXXXXEQLSNRLEEHLE

SEQ ID NO: 55844 - protein, 37 aa, Artificial Sequence
  GFR-binding peptide
  MOD_RES (1), (2), (36): Xaa is C or S
  MOD_RES (16), (17), (18), (19), (20): Xaa is A or G
  MOD_RES (21), (22), (23), (24): Xaa is A or G or is absent
XXAPTQLSNITVQIMXXXXXXXXXIGEMSNMVVRAXG

SEQ ID NO: 55845 - protein, 36 aa, Artificial Sequence; identical to SEQ ID NO: 19958
  GFR-binding peptide
  MOD_RES (36), (36): Xaa is C or S

SEQ ID NO: 55846 - protein, 39 aa, Artificial Sequence
  GFR-binding peptide
  MOD_RES (5), (6): Xaa is C or S
  MOD_RES (20), (21), (22), (23), (24): Xaa is A or G
  MOD_RES (25), (26), (27), (28): Xaa is A or G or is absent
IPKAXXVPTELSNITMQIMXXXXXXXXXIGEMSEMVVEG

SEQ ID NO: 55847 - protein, 37 aa, Artificial Sequence
  GFR-binding peptide
  MOD_RES (2), (3), (37): Xaa is C or S
  MOD_RES (17), (18), (19), (20), (21): Xaa is A or G
  MOD_RES (22), (23), (24), (25): Xaa is A or G or is absent
AXXVPTELRPVQMRKIXXXXXXXXXKKATVEMVVEGX

SEQ ID NO: 55848 - protein, 35 aa, Artificial Sequence; identical to SEQ ID NO: 16845
  GFR-binding peptide
  MOD_RES (5), (5): Xaa is C or S

SEQ ID NO: 55849 - protein, 39 aa, Artificial Sequence
  GFR-binding peptide
  MOD_RES (4), (5), (39): Xaa is C or S
  MOD_RES (19), (20), (21), (22), (23): Xaa is A or G
  MOD_RES (24), (25), (26), (27): Xaa is A or G or is absent
PKPXXAPTKLRPVQVRKIXXXXXXXXXKKATVNMVVRSX

SEQ ID NO: 55850 - protein, 38 aa, Artificial Sequence; identical to SEQ ID NO: 16847
  GFR-binding peptide
  MOD_RES (1), (35), (37): Xaa is C or S
  MOD_RES (15), (16), (17), (18), (19): Xaa is A or G
  MOD_RES (20), (21), (22), (23): Xaa is A or G or is absent

SEQ ID NO: 55851 - protein, 38 aa, Artificial Sequence; identical to SEQ ID NO: 19962
  GFR-binding peptide
  MOD_RES (4), (4): Xaa is C or S
  MOD_RES (20), (21), (22), (23), (24): Xaa is A or G
  MOD_RES (25), (26), (27), (28): Xaa is A or G or is absent

SEQ ID NO: 55852 - protein, 37 aa, Artificial Sequence; identical to SEQ ID NO: 19963
  GFR-binding peptide
  MOD_RES (4), (4): Xaa is C or S
  MOD_RES (18), (19), (20), (21), (22): Xaa is A or G
  MOD_RES (23), (24), (25), (26): Xaa is A or G or is absent

SEQ ID NO: 55853 - protein, 36 aa, Artificial Sequence
  GFR-binding peptide
  MOD_RES (3), (4): Xaa is C or S
  MOD_RES (18), (19), (20), (21), (22): Xaa is A or G
  MOD_RES (23), (24), (25), (26): Xaa is A or G or is absent
SPXXVSQDLRPVQIRKIXXXXXXXXXKKATVMIVKS

SEQ ID NO: 55854 - protein, 35 aa, Artificial Sequence
  GFR-binding peptide
  MOD_RES (1), (2), (34): Xaa is C or S
XXVPTELSNITMQIMDEYDKVVIGEMSEMVVEGXG

SEQ ID NO: 55855 - protein, 37 aa, Artificial Sequence; identical to SEQ ID NO: 19965
  GFR-binding peptide
  MOD_RES (35), (37): Xaa is C or S
  MOD_RES (14), (15), (16), (17), (18): Xaa is A or G
  MOD_RES (19), (20), (21), (22): Xaa is A or G or is absent

SEQ ID NO: 55856 - protein, 34 aa, Artificial Sequence; identical to SEQ ID NO: 16852
  GFR-binding peptide
  MOD_RES (34), (34): Xaa is C or S
  MOD_RES (14), (15), (16), (17), (18): Xaa is A or G
  MOD_RES (19), (20), (21), (22): Xaa is A or G or is absent

SEQ ID NO: 55857 - protein, 36 aa, Artificial Sequence; identical to SEQ ID NO: 16855
  GFR-binding peptide
  MOD_RES (34), (36): Xaa is C or S
  MOD_RES (14), (15), (16), (17), (18): Xaa is A or G
  MOD_RES (19), (20), (21), (22): Xaa is A or G or is absent

SEQ ID NO: 55858 - protein, 37 aa, Artificial Sequence; identical to SEQ ID NO: 16857
  GFR-binding peptide
  MOD_RES (6), (7): Xaa is C or S

SEQ ID NO: 55859 - protein, 32 aa, Artificial Sequence; identical to SEQ ID NO: 19967
  GFR-binding peptide
  MOD_RES (14), (15), (16), (17), (18): Xaa is A or G
  MOD_RES (19), (20), (21), (22): Xaa is A or G or is absent

SEQ ID NO: 55860 - protein, 33 aa, Artificial Sequence; identical to SEQ ID NO: 16860
  GFR-binding peptide
  MOD_RES (1), (2), (33): Xaa is C or S

SEQ ID NO: 55861 - protein, 41 aa, Artificial Sequence; identical to SEQ ID NO: 16862
  GFR-binding peptide
  MOD_RES (6), (7), (39), (41): Xaa is C or S

SEQ ID NO: 55862 - protein, 33 aa, Artificial Sequence
  GFR-binding peptide
  MOD_RES (1), (1): Xaa is C or S
  MOD_RES (15), (16), (17), (18), (19): Xaa is A or G
  MOD_RES (20), (21), (22), (23): Xaa is A or G or is absent
XAPTQLRPVQVRKIXXXXXXXXXKKATVNMVVR

SEQ ID NO: 55863 - protein, 39 aa, Artificial Sequence
  GFR-binding peptide
  MOD_RES (1), (2), (36), (38): Xaa is C or S
  MOD_RES (16), (17), (18), (19), (20): Xaa is A or G
  MOD_RES (21), (22), (23), (24): Xaa is A or G or is absent
XXAPTQLRPVQVRKIXXXXXXXXXKKATVNMVVRAXGXH

SEQ ID NO: 55864 - protein, 40 aa, Artificial Sequence; identical to SEQ ID NO: 16863
  GFR-binding peptide
  MOD_RES (3), (4), (37), (39): Xaa is C or S
  MOD_RES (18), (19), (20), (21), (22): Xaa is A or G
  MOD_RES (23), (24), (25), (26): Xaa is A or G or is absent

SEQ ID NO: 55865 - protein, 37 aa, Artificial Sequence; identical to SEQ ID NO: 19969
  GFR-binding peptide
  MOD_RES (35), (37): Xaa is C or S
  MOD_RES (14), (15), (16), (17), (18): Xaa is A or G
  MOD_RES (19), (20), (21), (22): Xaa is A or G or is absent

SEQ ID NO: 55866 - protein, 40 aa, Artificial Sequence
  GFR-binding peptide
  MOD_RES (1), (38), (40): Xaa is C or S
XRPTQVQLEPLPVVYYEIVRKKPIFEQLSNTLEDHLAXKX

SEQ ID NO: 55867 - protein, 41 aa, Artificial Sequence
  GFR-binding peptide
  MOD_RES (4), (5), (39), (41): Xaa is C or S
  MOD_RES (19), (20), (21), (22), (23): Xaa is A or G
  MOD_RES (24), (25), (26), (27): Xaa is A or G or is absent
PKPXXAPTKLRSVKVAKVXXXXXXXXXKEVQVNMVVRSXGX

SEQ ID NO: 55868 - protein, 35 aa, Artificial Sequence
  GFR-binding peptide
  MOD_RES (32), (34): Xaa is C or S
APTKLRPVQVRKIDDSSNVIKKATVNMVVRSXGXH

SEQ ID NO: 55869 - protein, 36 aa, Artificial Sequence
  GFR-binding peptide
  MOD_RES (2), (3): Xaa is C or S
  MOD_RES (17), (18), (19), (20), (21): Xaa is A or G
  MOD_RES (22), (23), (24), (25): Xaa is A or G or is absent
AXXVPTELRSVKMAKVXXXXXXXXXKEVQVEMVVEG

SEQ ID NO: 55870 - protein, 36 aa, Artificial Sequence; identical to SEQ ID NO: 16864
  GFR-binding peptide
  MOD_RES (1), (2), (34), (36): Xaa is C or S

SEQ ID NO: 55871 - protein, 32 aa, Artificial Sequence
  GFR-binding peptide
  MOD_RES (31), (31): Xaa is C or S
VPQDLSNITIQIMVGRTPKVIGEMSMVVKSXK

SEQ ID NO: 55872 - protein, 33 aa, Artificial Sequence
  GFR-binding peptide
  MOD_RES (32), (32): Xaa is C or S
APTQLRPVQVRKIDDSSNVIKKATVNMVVRAXG

SEQ ID NO: 55873 - protein, 41 aa, Artificial Sequence
  GFR-binding peptide
  MOD_RES (6), (7), (39), (41): Xaa is C or S
YVPKPXXAPTKLRPVQVRKIDDSSNVIKKATVNMVVRSXGX

SEQ ID NO: 55874 - protein, 35 aa, Artificial Sequence; identical to SEQ ID NO: 16868
  GFR-binding peptide
  MOD_RES (1), (2), (35): Xaa is C or S
  MOD_RES (16), (17), (18), (19), (20): Xaa is A or G
  MOD_RES (21), (22), (23), (24): Xaa is A or G or is absent

SEQ ID NO: 55875 - protein, 34 aa, Artificial Sequence; identical to SEQ ID NO: 19976
  GFR-binding peptide
  MOD_RES (15), (16), (17), (18), (19): Xaa is A or G
  MOD_RES (20), (21), (22), (23): Xaa is A or G or is absent

SEQ ID NO: 55876 - protein, 42 aa, Artificial Sequence
  GFR-binding peptide
  MOD_RES (5), (39), (41): Xaa is C or S
  MOD_RES (19), (20), (21), (22), (23): Xaa is A or G
  MOD_RES (24), (25), (26), (27): Xaa is A or G or is absent
EGLEXVPTEEEPLTMLYYXXXXXXXXXEQLSNFLQHNKXEXR

SEQ ID NO: 55877 - protein, 38 aa, Artificial Sequence; identical to SEQ ID NO: 16872
  GFR-binding peptide
  MOD_RES (6), (38): Xaa is C or S

SEQ ID NO: 55878 - protein, 34 aa, Artificial Sequence; identical to SEQ ID NO: 16873
  GFR-binding peptide
  MOD_RES (34), (34): Xaa is C or S
  MOD_RES (14), (15), (16), (17), (18): Xaa is A or G
  MOD_RES (19), (20), (21), (22): Xaa is A or G or is absent

SEQ ID NO: 55879 - protein, 36 aa, Artificial Sequence; identical to SEQ ID NO: 16874
  GFR-binding peptide
  MOD_RES (3), (4): Xaa is C or S
  MOD_RES (18), (19), (20), (21), (22): Xaa is A or G
  MOD_RES (23), (24), (25), (26): Xaa is A or G or is absent

SEQ ID NO: 55880 - protein, 37 aa, Artificial Sequence
  GFR-binding peptide
  MOD_RES (2), (34), (36): Xaa is C or S
TXAPTKLSNITVQIMDDSSNVIIGEMSNMVVRSXGXH

SEQ ID NO: 55881 - protein, 35 aa, Artificial Sequence; identical to SEQ ID NO: 19977
  GFR-binding peptide
  MOD_RES (16), (17), (18), (19), (20): Xaa is A or G
  MOD_RES (21), (22), (23), (24): Xaa is A or G or is absent

SEQ ID NO: 55882 - protein, 40 aa, Artificial Sequence; identical to SEQ ID NO: 16875
  GFR-binding peptide
  MOD_RES (3), (4), (38), (40): Xaa is C or S
  MOD_RES (18), (19), (20), (21), (22): Xaa is A or G
  MOD_RES (23), (24), (25), (26): Xaa is A or G or is absent

SEQ ID NO: 55883 - protein, 37 aa, Artificial Sequence
  GFR-binding peptide
  MOD_RES (1), (2), (36): Xaa is C or S
  MOD_RES (16), (17), (18), (19), (20): Xaa is A or G
  MOD_RES (21), (22), (23), (24): Xaa is A or G or is absent
XXVPTELSNITMQIMXXXXXXXXXIGEMSDMVVEGXG

SEQ ID NO: 55884 - protein, 37 aa, Artificial Sequence; identical to SEQ ID NO: 16878
  GFR-binding peptide
  MOD_RES (5), (6): Xaa is C or S

SEQ ID NO: 55885 - protein, 35 aa, Artificial Sequence; identical to SEQ ID NO: 19980
  GFR-binding peptide
  MOD_RES (35), (35): Xaa is C or S

SEQ ID NO: 55886 - protein, 32 aa, Artificial Sequence; identical to SEQ ID NO: 16881
  GFR-binding peptide
  MOD_RES (14), (15), (16), (17), (18): Xaa is A or G
  MOD_RES (19), (20), (21), (22): Xaa is A or G or is absent

SEQ ID NO: 55887 - protein, 39 aa, Artificial Sequence
  GFR-binding peptide
  MOD_RES (3), (37), (39): Xaa is C or S
  MOD_RES (17), (18), (19), (20), (21): Xaa is A or G
  MOD_RES (22), (23), (24), (25): Xaa is A or G or is absent
PTXAPTKLRSVKVAKVXXXXXXXXXKEVQVNMVVRSXGX

SEQ ID NO: 55888 - protein, 37 aa, Artificial Sequence
  GFR-binding peptide
  MOD_RES (4), (5): Xaa is C or S
  MOD_RES (19), (20), (21), (22), (23): Xaa is A or G
  MOD_RES (24), (25), (26), (27): Xaa is A or G or is absent
PKAXXVPTELRSVKMAKVXXXXXXXXXKEVQVDMVVE

SEQ ID NO: 55889 - protein, 35 aa, Artificial Sequence
  GFR-binding peptide
  MOD_RES (1), (2): Xaa is C or S
  MOD_RES (16), (17), (18), (19), (20): Xaa is A or G
  MOD_RES (21), (22), (23), (24): Xaa is A or G or is absent
XXAPTKLRSVKVAKVXXXXXXXXXKEVQVNMVVRS

SEQ ID NO: 55890 - protein, 34 aa, Artificial Sequence; identical to SEQ ID NO: 19982
  GFR-binding peptide
  MOD_RES (2), (2): Xaa is C or S
  MOD_RES (16), (17), (18), (19), (20): Xaa is A or G
  MOD_RES (21), (22), (23), (24): Xaa is A or G or is absent

SEQ ID NO: 55891 - protein, 42 aa, Artificial Sequence; identical to SEQ ID NO: 40995
  GFR-binding peptide
  MOD_RES (5), (6), (39), (41): Xaa is C or S
  MOD_RES (20), (21), (22), (23), (24): Xaa is A or G
  MOD_RES (25), (26), (27), (28): Xaa is A or G or is absent

SEQ ID NO: 55892 - protein, 42 aa, Artificial Sequence; identical to SEQ ID NO: 19983
  GFR-binding peptide
  MOD_RES (6), (40), (42): Xaa is C or S
  MOD_RES (20), (21), (22), (23), (24): Xaa is A or G
  MOD_RES (25), (26), (27), (28): Xaa is A or G or is absent

SEQ ID NO: 55893 - protein, 41 aa, Artificial Sequence
  GFR-binding peptide
  MOD_RES (6), (7), (40): Xaa is C or S
  MOD_RES (21), (22), (23), (24), (25): Xaa is A or G
  MOD_RES (26), (27), (28), (29): Xaa is A or G or is absent
ASASPXXVPQDLRPVQIRKIXXXXXXXXXKKATVMVVKSXK

SEQ ID NO: 55894 - protein, 43 aa, Artificial Sequence; identical to SEQ ID NO: 16883
  GFR-binding peptide
  MOD_RES (6), (7), (41), (43): Xaa is C or S
  MOD_RES (21), (22), (23), (24), (25): Xaa is A or G
  MOD_RES (26), (27), (28), (29): Xaa is A or G or is absent

SEQ ID NO: 55895 - protein, 33 aa, Artificial Sequence
  GFR-binding peptide
  MOD_RES (1), (32): Xaa is C or S
XVSQDLSNITIQIMIGKTPKIIGEMSMIVKSXK

SEQ ID NO: 55896 - protein, 39 aa, Artificial Sequence; identical to SEQ ID NO: 16886
  GFR-binding peptide
  MOD_RES (4), (5), (39): Xaa is C or S
  MOD_RES (19), (20), (21), (22), (23): Xaa is A or G
  MOD_RES (24), (25), (26), (27): Xaa is A or G or is absent

SEQ ID NO: 55897 - protein, 38 aa, Artificial Sequence; identical to SEQ ID NO: 16887
  GFR-binding peptide
  MOD_RES (3), (4), (35), (37): Xaa is C or S

SEQ ID NO: 55898 - protein, 36 aa, Artificial Sequence; identical to SEQ ID NO: 19987
  GFR-binding peptide
  MOD_RES (36), (36): Xaa is C or S

SEQ ID NO: 55899 - protein, 39 aa, Artificial Sequence
  GFR-binding peptide
  MOD_RES (3), (3): Xaa is C or S
  MOD_RES (19), (20), (21), (22), (23): Xaa is A or G
  MOD_RES (24), (25), (26), (27): Xaa is A or G or is absent
VKXQPSRVHHEPLPVVYYXXXXXXXXXEQLSNRLEEHLE

SEQ ID NO: 55900 - protein, 38 aa, Artificial Sequence
  GFR-binding peptide
  MOD_RES (5), (5): Xaa is C or S
EGLEXVPTEEEPLPMVYYRIKPHQGQHEQLSNFLQHNK

SEQ ID NO: 55901 - protein, 39 aa, Artificial Sequence
  GFR-binding peptide
  MOD_RES (2), (36), (38): Xaa is C or S
  MOD_RES (16), (17), (18), (19), (20): Xaa is A or G
  MOD_RES (21), (22), (23), (24): Xaa is A or G or is absent
EXVPTEEEPLPMVYYXXXXXXXXXEQLSNFLQHNKXEXR

SEQ ID NO: 55902 - protein, 33 aa, Artificial Sequence; identical to SEQ ID NO: 19992
  GFR-binding peptide

SEQ ID NO: 55903 - protein, 36 aa, Artificial Sequence
  GFR-binding peptide
  MOD_RES (2), (2): Xaa is C or S
QXRPTQVQLEPLTVLYYEIVRKKPIFEQLSNTLEDH

SEQ ID NO: 55904 - protein, 40 aa, Artificial Sequence
  GFR-binding peptide
  MOD_RES (6), (7), (39): Xaa is C or S
KIPKAXXVPTELSNITMQIMDENEKVVIGEMSDMVVEGXG

SEQ ID NO: 55905 - protein, 33 aa, Artificial Sequence; identical to SEQ ID NO: 16892
  GFR-binding peptide
  MOD_RES (1), (1): Xaa is C or S
  MOD_RES (15), (16), (17), (18), (19): Xaa is A or G
  MOD_RES (20), (21), (22), (23): Xaa is A or G or is absent

SEQ ID NO: 55906 - protein, 37 aa, Artificial Sequence; identical to SEQ ID NO: 19994
  GFR-binding peptide
  MOD_RES (3), (37): Xaa is C or S

SEQ ID NO: 55907 - protein, 37 aa, Artificial Sequence
  GFR-binding peptide
  MOD_RES (4), (5), (36): Xaa is C or S
AAPXXVPQALSNITIQIMVGRKPKVIGEMSMIVRSXK

SEQ ID NO: 55908 - protein, 34 aa, Artificial Sequence
  GFR-binding peptide
  MOD_RES (32), (34): Xaa is C or S
VPTELRSVKMAKVDENEKVVKEVQVDMVVEGXGX

SEQ ID NO: 55909 - protein, 37 aa, Artificial Sequence; identical to SEQ ID NO: 19996
  GFR-binding peptide
  MOD_RES (3), (37): Xaa is C or S
  MOD_RES (17), (18), (19), (20), (21): Xaa is A or G
  MOD_RES (22), (23), (24), (25): Xaa is A or G or is absent

SEQ ID NO: 55910 - protein, 37 aa, Artificial Sequence; identical to SEQ ID NO: 16895
  GFR-binding peptide
  MOD_RES (2), (3), (35), (37): Xaa is C or S

SEQ ID NO: 55911 - protein, 36 aa, Artificial Sequence
  GFR-binding peptide
  MOD_RES (35), (35): Xaa is C or S
TQVQLEPLPVVYYEIVRKKPIFEQLSNTLEDHLAXK

SEQ ID NO: 55912 - protein, 37 aa, Artificial Sequence
  GFR-binding peptide
  MOD_RES (34), (36): Xaa is C or S
  MOD_RES (14), (15), (16), (17), (18): Xaa is A or G
  MOD_RES (19), (20), (21), (22): Xaa is A or G or is absent
VPTELRSVKMAKVXXXXXXXXXKEVQVDMVVEGXGXR

SEQ ID NO: 55913 - protein, 33 aa, Artificial Sequence; identical to SEQ ID NO: 16896
  GFR-binding peptide
  MOD_RES (32), (32): Xaa is C or S

SEQ ID NO: 55914 - protein, 35 aa, Artificial Sequence
  GFR-binding peptide
  MOD_RES (4), (5): Xaa is C or S
PKAXXVPTELRSVKMAKVDENEKVVKEVQVDMVVE

SEQ ID NO: 55915 - protein, 30 aa, Artificial Sequence
  GFR-binding peptide
VPTELRPVQMRKIDEYDKVVKKATVEMVVE

SEQ ID NO: 55916 - protein, 32 aa, Artificial Sequence; identical to SEQ ID NO: 16897
  GFR-binding peptide
  MOD_RES (14), (15), (16), (17), (18): Xaa is A or G
  MOD_RES (19), (20), (21), (22): Xaa is A or G or is absent

SEQ ID NO: 55917 - protein, 32 aa, Artificial Sequence
  GFR-binding peptide
  MOD_RES (14), (15), (16), (17), (18): Xaa is A or G
  MOD_RES (19), (20), (21), (22): Xaa is A or G or is absent
VSQDLSNITIQIMXXXXXXXXXIGEMSMIVKS

SEQ ID NO: 55918 - protein, 36 aa, Artificial Sequence; identical to SEQ ID NO: 20000
  GFR-binding peptide
  MOD_RES (1), (1): Xaa is C or S
  MOD_RES (17), (18), (19), (20), (21): Xaa is A or G
  MOD_RES (22), (23), (24), (25): Xaa is A or G or is absent

SEQ ID NO: 55919 - protein, 37 aa, Artificial Sequence
  GFR-binding peptide
  MOD_RES (4), (5): Xaa is C or S
  MOD_RES (19), (20), (21), (22), (23): Xaa is A or G
  MOD_RES (24), (25), (26), (27): Xaa is A or G or is absent
PKPXXAPTKLRPVQVRKIXXXXXXXXXKKATVNMVVR

SEQ ID NO: 55920 - protein, 42 aa, Artificial Sequence
  GFR-binding peptide
  MOD_RES (6), (7), (39), (41): Xaa is C or S
SIPKAXXVPTELRPVQMRKIDEYDKVVKKATVEMVVEGXGXR

SEQ ID NO: 55921 - protein, 38 aa, Artificial Sequence
  GFR-binding peptide
  MOD_RES (1), (2), (35), (37): Xaa is C or S
  MOD_RES (16), (17), (18), (19), (20): Xaa is A or G
  MOD_RES (21), (22), (23), (24): Xaa is A or G or is absent
XXVPQALSNITIQIMXXXXXXXXXIGEMSMIVRSXKXS

SEQ ID NO: 55922 - protein, 40 aa, Artificial Sequence; identical to SEQ ID NO: 20001
  GFR-binding peptide
  MOD_RES (6), (40): Xaa is C or S

SEQ ID NO: 55923 - protein, 37 aa, Artificial Sequence; identical to SEQ ID NO: 16900
  GFR-binding peptide
  MOD_RES (4), (36): Xaa is C or S

SEQ ID NO: 55924 - protein, 36 aa, Artificial Sequence; identical to SEQ ID NO: 20005
  GFR-binding peptide
  MOD_RES (2), (2): Xaa is C or S
  MOD_RES (18), (19), (20), (21), (22): Xaa is A or G
  MOD_RES (23), (24), (25), (26): Xaa is A or G or is absent

SEQ ID NO: 55925 - protein, 35 aa, Artificial Sequence
  GFR-binding peptide
  MOD_RES (1), (35): Xaa is C or S
  MOD_RES (15), (16), (17), (18), (19): Xaa is A or G
  MOD_RES (20), (21), (22), (23): Xaa is A or G or is absent
XVPTELSNITMQIMXXXXXXXXXIGEMSDMVVEGX

SEQ ID NO: 55926 - protein, 34 aa, Artificial Sequence; identical to SEQ ID NO: 20009
  GFR-binding peptide
  MOD_RES (16), (17), (18), (19), (20): Xaa is A or G
  MOD_RES (21), (22), (23), (24): Xaa is A or G or is absent

SEQ ID NO: 55927 - protein, 35 aa, Artificial Sequence
  GFR-binding peptide
  MOD_RES (1), (35): Xaa is C or S
  MOD_RES (15), (16), (17), (18), (19): Xaa is A or G
  MOD_RES (20), (21), (22), (23): Xaa is A or G or is absent
XAPTQLRSVKVAKVXXXXXXXXXKEVQVNMVVRAX

SEQ ID NO: 55928 - protein, 39 aa, Artificial Sequence
  GFR-binding peptide
  MOD_RES (6), (7), (38): Xaa is C or S
ASASPXXVPQDLRSVKIAKVVGRTPKVKEVQVMVVKSXK

SEQ ID NO: 55929 - protein, 38 aa, Artificial Sequence
  GFR-binding peptide
  MOD_RES (4), (5), (37): Xaa is C or S
PKPXXAPTQLSNITVQIMDDSSNVIIGEMSNMVVRAXG

SEQ ID NO: 55930 - protein, 39 aa, Artificial Sequence
  GFR-binding peptide
  MOD_RES (4), (5), (39): Xaa is C or S
  MOD_RES (19), (20), (21), (22), (23): Xaa is A or G
  MOD_RES (24), (25), (26), (27): Xaa is A or G or is absent
PKAXXVPTELRPVQMRKIXXXXXXXXXKKATVDMVVEGX

SEQ ID NO: 55931 - protein, 42 aa, Artificial Sequence; identical to SEQ ID NO: 16905
  GFR-binding peptide
  MOD_RES (7), (39), (41): Xaa is C or S

SEQ ID NO: 55932 - protein, 39 aa, Artificial Sequence; identical to SEQ ID NO: 16906
  GFR-binding peptide
  MOD_RES (1), (2), (36), (38): Xaa is C or S
  MOD_RES (16), (17), (18), (19), (20): Xaa is A or G
  MOD_RES (21), (22), (23), (24): Xaa is A or G or is absent

SEQ ID NO: 55933 - protein, 41 aa, Artificial Sequence; identical to SEQ ID NO: 16907
  GFR-binding peptide
  MOD_RES (6), (7), (41): Xaa is C or S
  MOD_RES (21), (22), (23), (24), (25): Xaa is A or G
  MOD_RES (26), (27), (28), (29): Xaa is A or G or is absent

SEQ ID NO: 55934 - protein, 33 aa, Artificial Sequence
  GFR-binding peptide
  MOD_RES (15), (16), (17), (18), (19): Xaa is A or G
  MOD_RES (20), (21), (22), (23): Xaa is A or G or is absent
PSRVHHEPLPVVYYXXXXXXXXXEQLSNRLEEH

SEQ ID NO: 55935 - protein, 40 aa, Artificial Sequence
  GFR-binding peptide
  MOD_RES (4), (5), (39): Xaa is C or S
  MOD_RES (19), (20), (21), (22), (23): Xaa is A or G
  MOD_RES (24), (25), (26), (27): Xaa is A or G or is absent
PKPXXAPTQLSNITVQIMXXXXXXXXXIGEMSNMVVRAXG

SEQ ID NO: 55936 - protein, 36 aa, Artificial Sequence; identical to SEQ ID NO: 20012
  GFR-binding peptide
  MOD_RES (35), (35): Xaa is C or S

SEQ ID NO: 55937 - protein, 38 aa, Artificial Sequence
  GFR-binding peptide
  MOD_RES (4), (5), (38): Xaa is C or S
  MOD_RES (19), (20), (21), (22), (23): Xaa is A or G
  MOD_RES (24), (25), (26), (27): Xaa is A or G or is absent
AAPXXVPQALRSVKIAKVXXXXXXXXXKEVQVMIVRSX

SEQ ID NO: 55938 - protein, 36 aa, Artificial Sequence
  GFR-binding peptide
  MOD_RES (1), (2), (33), (35): Xaa is C or S
XXVPQALRPVQIRKIVGRKPKVKKATVMIVRSXKXS

SEQ ID NO: 55939 - protein, 40 aa, Artificial Sequence
  GFR-binding peptide
  MOD_RES (5), (37), (39): Xaa is C or S
TKPTXAPTKLRPVQVRKIDDSSNVIKKATVNMVVRSXGXH

SEQ ID NO: 55940 - protein, 45 aa, Artificial Sequence; identical to SEQ ID NO: 20017
  GFR-binding peptide
  MOD_RES (5), (42), (44): Xaa is C or S

SEQ ID NO: 55941 - protein, 38 aa, Artificial Sequence; identical to SEQ ID NO: 16913
  GFR-binding peptide
  MOD_RES (3), (4), (36), (38): Xaa is C or S

SEQ ID NO: 55942 - protein, 36 aa, Artificial Sequence; identical to SEQ ID NO: 20019
  GFR-binding peptide
  MOD_RES (36), (36): Xaa is C or S
  MOD_RES (15), (16), (17), (18), (19): Xaa is A or G
  MOD_RES (20), (21), (22), (23): Xaa is A or G or is absent

SEQ ID NO: 55943 - protein, 32 aa, Artificial Sequence
  GFR-binding peptide
  MOD_RES (14), (15), (16), (17), (18): Xaa is A or G
  MOD_RES (19), (20), (21), (22): Xaa is A or G or is absent
APTQLRSVKVAKVXXXXXXXXXKEVQVNMVVR

SEQ ID NO: 55944 - protein, 38 aa, Artificial Sequence
  GFR-binding peptide
  MOD_RES (5), (6): Xaa is C or S
  MOD_RES (20), (21), (22), (23), (24): Xaa is A or G
  MOD_RES (25), (26), (27), (28): Xaa is A or G or is absent
VPKPXXAPTQLRSVKVAKVXXXXXXXXXKEVQVNMVVR

SEQ ID NO: 55945 - protein, 40 aa, Artificial Sequence
  GFR-binding peptide
  MOD_RES (5), (6), (39): Xaa is C or S
  MOD_RES (20), (21), (22), (23), (24): Xaa is A or G
  MOD_RES (25), (26), (27), (28): Xaa is A or G or is absent
SASPXXVPQDLRPVQIRKIXXXXXXXXXKKATVMVVKSXK

SEQ ID NO: 55946 - protein, 40 aa, Artificial Sequence
  GFR-binding peptide
  MOD_RES (6), (40): Xaa is C or S
DEGLEXVPTEEEPLTMLYYRIKPHQGQHEQLSNFLQHNKX

SEQ ID NO: 55947 - protein, 33 aa, Artificial Sequence; identical to SEQ ID NO: 16915
  GFR-binding peptide
  MOD_RES (1), (1): Xaa is C or S
  MOD_RES (15), (16), (17), (18), (19): Xaa is A or G
  MOD_RES (20), (21), (22), (23): Xaa is A or G or is absent

SEQ ID NO: 55948 - protein, 41 aa, Artificial Sequence; identical to SEQ ID NO: 16917
  GFR-binding peptide
  MOD_RES (4), (38), (40): Xaa is C or S
  MOD_RES (18), (19), (20), (21), (22): Xaa is A or G
  MOD_RES (23), (24), (25), (26): Xaa is A or G or is absent

SEQ ID NO: 55949 - protein, 37 aa, Artificial Sequence
  GFR-binding peptide
  MOD_RES (1), (2), (35), (37): Xaa is C or S
  MOD_RES (16), (17), (18), (19), (20): Xaa is A or G
  MOD_RES (21), (22), (23), (24): Xaa is A or G or is absent
XXVPQDLSNITIQIMXXXXXXXXXIGEMSMVVKSXKX

SEQ ID NO: 55950 - protein, 42 aa, Artificial Sequence; identical to SEQ ID NO: 20025
  GFR-binding peptide
  MOD_RES (6), (40), (42): Xaa is C or S
  MOD_RES (20), (21), (22), (23), (24): Xaa is A or G
  MOD_RES (25), (26), (27), (28): Xaa is A or G or is absent

SEQ ID NO: 55951 - protein, 32 aa, Artificial Sequence
  GFR-binding peptide
  MOD_RES (14), (15), (16), (17), (18): Xaa is A or G
  MOD_RES (19), (20), (21), (22): Xaa is A or G or is absent
VPQALSNITIQIMXXXXXXXXXIGEMSMIVRS

SEQ ID NO: 55952 - protein, 34 aa, Artificial Sequence
  GFR-binding peptide
  MOD_RES (1), (1): Xaa is C or S
  MOD_RES (15), (16), (17), (18), (19): Xaa is A or G
  MOD_RES (20), (21), (22), (23): Xaa is A or G or is absent
XAPTKLRPVQVRKIXXXXXXXXXKKATVNMVVRS

SEQ ID NO: 55953 - protein, 40 aa, Artificial Sequence
  GFR-binding peptide
  MOD_RES (6), (7): Xaa is C or S
  MOD_RES (21), (22), (23), (24), (25): Xaa is A or G
  MOD_RES (26), (27), (28), (29): Xaa is A or G or is absent
SIPKAXXVPTELSNITMQIMXXXXXXXXXIGEMSEMVVEG

SEQ ID NO: 55954 - protein, 39 aa, Artificial Sequence
  GFR-binding peptide
  MOD_RES (3), (3): Xaa is C or S
  MOD_RES (19), (20), (21), (22), (23): Xaa is A or G
  MOD_RES (24), (25), (26), (27): Xaa is A or G or is absent
VQXRPTQVQLEPLTVLYYXXXXXXXXXEQLSNTLEDHLA

SEQ ID NO: 55955 - protein, 37 aa, Artificial Sequence
  GFR-binding peptide
  MOD_RES (4), (5), (36): Xaa is C or S
ASPXXVPQDLRPVQIRKIVGRTPKVKKATVMVVKSXK

SEQ ID NO: 55956 - protein, 36 aa, Artificial Sequence; identical to SEQ ID NO: 16921
  GFR-binding peptide
  MOD_RES (4), (36): Xaa is C or S

SEQ ID NO: 55957 - protein, 42 aa, Artificial Sequence
  GFR-binding peptide
  MOD_RES (6), (7), (39), (41): Xaa is C or S
KIPKAXXVPTELRSVKMAKVDENEKVVKEVQVDMVVEGXGXR

SEQ ID NO: 55958 - protein, 36 aa, Artificial Sequence; identical to SEQ ID NO: 16924
  GFR-binding peptide
  MOD_RES (1), (35): Xaa is C or S
  MOD_RES (15), (16), (17), (18), (19): Xaa is A or G
  MOD_RES (20), (21), (22), (23): Xaa is A or G or is absent

SEQ ID NO: 55959 - protein, 35 aa, Artificial Sequence
  GFR-binding peptide
  MOD_RES (2), (3), (35): Xaa is C or S
AXXVPTELRPVQMRKIDEYDKVVKKATVEMVVEGX

SEQ ID NO: 55960 - protein, 37 aa, Artificial Sequence
  GFR-binding peptide
  MOD_RES (3), (35), (37): Xaa is C or S
PTXAPTKLRSVKVAKVDDSSNVIKEVQVNMVVRSXGX

SEQ ID NO: 55961 - protein, 35 aa, Artificial Sequence
  GFR-binding peptide
  MOD_RES (4), (5): Xaa is C or S
AAPXXVPQALSNITIQIMVGRKPKVIGEMSMIVRS

SEQ ID NO: 55962 - protein, 34 aa, Artificial Sequence
  GFR-binding peptide
  MOD_RES (31), (33): Xaa is C or S
VSQDLSNITIQIMIGKTPKIIGEMSMIVKSXKXS

SEQ ID NO: 55963 - protein, 42 aa, Artificial Sequence; identical to SEQ ID NO: 20030
  GFR-binding peptide
  MOD_RES (7), (41): Xaa is C or S
  MOD_RES (21), (22), (23), (24), (25): Xaa is A or G
  MOD_RES (26), (27), (28), (29): Xaa is A or G or is absent

SEQ ID NO: 55964 - protein, 37 aa, Artificial Sequence; identical to SEQ ID NO: 16925
  GFR-binding peptide
  MOD_RES (6), (7): Xaa is C or S

SEQ ID NO: 55965 - protein, 39 aa, Artificial Sequence
  GFR-binding peptide
  MOD_RES (2), (3), (36), (38): Xaa is C or S
  MOD_RES (17), (18), (19), (20), (21): Xaa is A or G
  MOD_RES (22), (23), (24), (25): Xaa is A or G or is absent
PXXVPQALRPVQIRKIXXXXXXXXXKKATVMIVRSXKXS

SEQ ID NO: 55966 - protein, 37 aa, Artificial Sequence
  GFR-binding peptide
  MOD_RES (37), (37): Xaa is C or S
RPTQVQLEPLTVLYYEIVRKKPIFEQLSNTLEDHLAX

SEQ ID NO: 55967 - protein, 40 aa, Artificial Sequence
  GFR-binding peptide
  MOD_RES (6), (40): Xaa is C or S
  MOD_RES (20), (21), (22), (23), (24): Xaa is A or G
  MOD_RES (25), (26), (27), (28): Xaa is A or G or is absent
DEGLEXVPTEEEPLTMLYYXXXXXXXXXEQLSNFLQHNKX

SEQ ID NO: 55968 - protein, 41 aa, Artificial Sequence
  GFR-binding peptide
  MOD_RES (5), (6), (38), (40): Xaa is C or S
IPKAXXVPTELSNITMQIMDEYDKVVIGEMSEMVVEGXGXR

SEQ ID NO: 55969 - protein, 33 aa, Artificial Sequence
  GFR-binding peptide
  MOD_RES (1), (2): Xaa is C or S
XXVPTELRPVQMRKIDENEKVVKKATVDMVVEG

SEQ ID NO: 55970 - protein, 35 aa, Artificial Sequence
  GFR-binding peptide
  MOD_RES (1), (2), (34): Xaa is C or S
XXAPTQLRSVKVAKVDDSSNVIKEVQVNMVVRAXG

SEQ ID NO: 55971 - protein, 33 aa, Artificial Sequence
  GFR-binding peptide
  MOD_RES (1), (2), (33): Xaa is C or S
XXVPQDLSNITIQIMVGRTPKVIGEMSMVVKSX

SEQ ID NO: 55972 - protein, 38 aa, Artificial Sequence
  GFR-binding peptide
  MOD_RES (5), (5): Xaa is C or S
EGLEXVPTEEEPLTMLYYRIKPHQGQHEQLSNFLQHNK

SEQ ID NO: 55973 - protein, 41 aa, Artificial Sequence; identical to SEQ ID NO: 16931
  GFR-binding peptide
  MOD_RES (4), (5), (38), (40): Xaa is C or S
  MOD_RES (19), (20), (21), (22), (23): Xaa is A or G
  MOD_RES (24), (25), (26), (27): Xaa is A or G or is absent

SEQ ID NO: 55974 - protein, 37 aa, Artificial Sequence; identical to SEQ ID NO: 16932
  GFR-binding peptide
  MOD_RES (3), (4), (35), (37): Xaa is C or S

SEQ ID NO: 55975 - protein, 34 aa, Artificial Sequence; identical to SEQ ID NO: 16933
  GFR-binding peptide
  MOD_RES (31), (33): Xaa is C or S

SEQ ID NO: 55976 - protein, 44 aa, Artificial Sequence
  GFR-binding peptide
  MOD_RES (7), (41), (43): Xaa is C or S
  MOD_RES (21), (22), (23), (24), (25): Xaa is A or G
  MOD_RES (26), (27), (28), (29): Xaa is A or G or is absent
HVTKPTXAPTKLRSVKVAKVXXXXXXXXXKEVQVNMVVRSXGXH

SEQ ID NO: 55977 - protein, 37 aa, Artificial Sequence; identical to SEQ ID NO: 16937
  GFR-binding peptide
  MOD_RES (1), (35), (37): Xaa is C or S
  MOD_RES (15), (16), (17), (18), (19): Xaa is A or G
  MOD_RES (20), (21), (22), (23): Xaa is A or G or is absent

SEQ ID NO: 55978 - protein, 37 aa, Artificial Sequence
  GFR-binding peptide
  MOD_RES (37), (37): Xaa is C or S
QPSRVHHEPLTVLYYEYVRKKPKLEQLSNRLEEHLEX

SEQ ID NO: 55979 - protein, 39 aa, Artificial Sequence
  GFR-binding peptide
  MOD_RES (4), (5), (37), (39): Xaa is C or S
PKPXXAPTQLRPVQVRKIDDSSNVIKKATVNMVVRAXGX

SEQ ID NO: 55980 - protein, 33 aa, Artificial Sequence; identical to SEQ ID NO: 16938
  GFR-binding peptide
  MOD_RES (33), (33): Xaa is C or S
  MOD_RES (14), (15), (16), (17), (18): Xaa is A or G
  MOD_RES (19), (20), (21), (22): Xaa is A or G or is absent

SEQ ID NO: 55981 - protein, 41 aa, Artificial Sequence
  GFR-binding peptide
  MOD_RES (1), (38), (40): Xaa is C or S
  MOD_RES (17), (18), (19), (20), (21): Xaa is A or G
  MOD_RES (22), (23), (24), (25): Xaa is A or G or is absent
XRPTQVQLEPLPVVYYXXXXXXXXXEQLSNTLEDHLAXKXE

SEQ ID NO: 55982 - protein, 33 aa, Artificial Sequence
  GFR-binding peptide
  MOD_RES (15), (16), (17), (18), (19): Xaa is A or G
  MOD_RES (20), (21), (22), (23): Xaa is A or G or is absent
PSRVHHEPLTVLYYXXXXXXXXXEQLSNRLEEH

SEQ ID NO: 55983 - protein, 41 aa, Artificial Sequence; identical to SEQ ID NO: 20035
  GFR-binding peptide
  MOD_RES (3), (40): Xaa is C or S

SEQ ID NO: 55984 - protein, 35 aa, Artificial Sequence; identical to SEQ ID NO: 16941
  GFR-binding peptide
  MOD_RES (1), (35): Xaa is C or S
  MOD_RES (15), (16), (17), (18), (19): Xaa is A or G
  MOD_RES (20), (21), (22), (23): Xaa is A or G or is absent

SEQ ID NO: 55985 - protein, 37 aa, Artificial Sequence
  GFR-binding peptide
  MOD_RES (4), (36): Xaa is C or S
KPTXAPTKLRSVKVAKVDDSSNVIKEVQVNMVVRSXG

SEQ ID NO: 55986 - protein, 34 aa, Artificial Sequence
  GFR-binding peptide
  MOD_RES (1), (2), (33): Xaa is C or S
XXVSQDLSNITIQIMIGKTPKIIGEMSMIVKSXK

SEQ ID NO: 55987 - protein, 35 aa, Artificial Sequence
  GFR-binding peptide
PTQVQLEPLPVVYYEIVRKKPIFEQLSNTLEDHLA

SEQ ID NO: 55988 - protein, 38 aa, Artificial Sequence
  GFR-binding peptide
  MOD_RES (3), (4), (36), (38): Xaa is C or S
KPXXAPTKLRPVQVRKIDDSSNVIKKATVNMVVRSXGX

SEQ ID NO: 55989 - protein, 42 aa, Artificial Sequence
  GFR-binding peptide
  MOD_RES (2), (39), (41): Xaa is C or S
  MOD_RES (18), (19), (20), (21), (22): Xaa is A or G
  MOD_RES (23), (24), (25), (26): Xaa is A or G or is absent
KXQPSRVHHEPLPVVYYXXXXXXXXXEQLSNRLEEHLEXAXA

SEQ ID NO: 55990 - protein, 35 aa, Artificial Sequence; identical to SEQ ID NO: 16943
  GFR-binding peptide
  MOD_RES (1), (2), (34): Xaa is C or S

SEQ ID NO: 55991 - protein, 35 aa, Artificial Sequence; identical to SEQ ID NO: 16944
  GFR-binding peptide
  MOD_RES (1), (34): Xaa is C or S
  MOD_RES (15), (16), (17), (18), (19): Xaa is A or G
  MOD_RES (20), (21), (22), (23): Xaa is A or G or is absent

SEQ ID NO: 55992 - protein, 35 aa, Artificial Sequence; identical to SEQ ID NO: 16945
  GFR-binding peptide
  MOD_RES (1), (35): Xaa is C or S
  MOD_RES (15), (16), (17), (18), (19): Xaa is A or G
  MOD_RES (20), (21), (22), (23): Xaa is A or G or is absent

SEQ ID NO: 55993 - protein, 36 aa, Artificial Sequence
  GFR-binding peptide
  MOD_RES (1), (35): Xaa is C or S
  MOD_RES (15), (16), (17), (18), (19): Xaa is A or G
  MOD_RES (20), (21), (22), (23): Xaa is A or G or is absent
XVPTELRSVKMAKVXXXXXXXXXKEVQVEMVVEGXG

SEQ ID NO: 55994 - protein, 35 aa, Artificial Sequence
  GFR-binding peptide
  MOD_RES (1), (35): Xaa is C or S
  MOD_RES (15), (16), (17), (18), (19): Xaa is A or G
  MOD_RES (20), (21), (22), (23): Xaa is A or G or is absent
XVPTELRSVKMAKVXXXXXXXXXKEVQVEMVVEGX

SEQ ID NO: 55995 - protein, 40 aa, Artificial Sequence; identical to SEQ ID NO: 20045
  GFR-binding peptide
  MOD_RES (4), (38), (40): Xaa is C or S

SEQ ID NO: 55996 - protein, 34 aa, Artificial Sequence; identical to SEQ ID NO: 20046
  GFR-binding peptide

SEQ ID NO: 55997 - protein, 34 aa, Artificial Sequence
  GFR-binding peptide
  MOD_RES (32), (34): Xaa is C or S
VPTELRSVKMAKVDEYDKVVKEVQVEMVVEGXGX

SEQ ID NO: 55998 - protein, 34 aa, Artificial Sequence; identical to SEQ ID NO: 16948
  GFR-binding peptide
  MOD_RES (2), (3): Xaa is C or S

SEQ ID NO: 55999 - protein, 41 aa, Artificial Sequence; identical to SEQ ID NO: 20053
  GFR-binding peptide
  MOD_RES (7), (41): Xaa is C or S

SEQ ID NO: 56000 - protein, 39 aa, Artificial Sequence; identical to SEQ ID NO: 20055
  GFR-binding peptide
  MOD_RES (4), (4): Xaa is C or S
  MOD_RES (20), (21), (22), (23), (24): Xaa is A or G
  MOD_RES (25), (26), (27), (28): Xaa is A or G or is absent

SEQ ID NO: 56001 - protein, 38 aa, Artificial Sequence
  GFR-binding peptide
  MOD_RES (3), (4), (36), (38): Xaa is C or S
KPXXAPTQLRPVQVRKIDDSSNVIKKATVNMVVRAXGX

SEQ ID NO: 56002 - protein, 41 aa, Artificial Sequence
  GFR-binding peptide
  MOD_RES (5), (6), (40): Xaa is C or S
  MOD_RES (20), (21), (22), (23), (24): Xaa is A or G
  MOD_RES (25), (26), (27), (28): Xaa is A or G or is absent
IPKAXXVPTELSNITMQIMXXXXXXXXXIGEMSEMVVEGXG

SEQ ID NO: 56003 - protein, 38 aa, Artificial Sequence; identical to SEQ ID NO: 16954
  GFR-binding peptide
  MOD_RES (2), (3), (36), (38): Xaa is C or S
  MOD_RES (17), (18), (19), (20), (21): Xaa is A or G
  MOD_RES (22), (23), (24), (25): Xaa is A or G or is absent

SEQ ID NO: 56004 - protein, 37 aa, Artificial Sequence
  GFR-binding peptide
  MOD_RES (4), (5): Xaa is C or S
  MOD_RES (19), (20), (21), (22), (23): Xaa is A or G
  MOD_RES (24), (25), (26), (27): Xaa is A or G or is absent
ASPXXVPQDLRSVKIAKVXXXXXXXXXKEVQVMVVKS

SEQ ID NO: 56005 - protein, 38 aa, Artificial Sequence
  GFR-binding peptide
  MOD_RES (4), (5), (37): Xaa is C or S
PKPXXAPTKLSNITVQIMDDSSNVIIGEMSNMVVRSXG

SEQ ID NO: 56006 - protein, 38 aa, Artificial Sequence
  GFR-binding peptide
  MOD_RES (2), (3), (37): Xaa is C or S
  MOD_RES (17), (18), (19), (20), (21): Xaa is A or G
  MOD_RES (22), (23), (24), (25): Xaa is A or G or is absent
PXXAPTKLRSVKVAKVXXXXXXXXXKEVQVNMVVRSXG

SEQ ID NO: 56007 - protein, 32 aa, Artificial Sequence
  GFR-binding peptide
  MOD_RES (31), (31): Xaa is C or S
VPQDLRSVKIAKVVGRTPKVKEVQVMVVKSXK

SEQ ID NO: 56008 - protein, 32 aa, Artificial Sequence
  GFR-binding peptide
  MOD_RES (14), (15), (16), (17), (18): Xaa is A or G
  MOD_RES (19), (20), (21), (22): Xaa is A or G or is absent
VPTELSNITMQIMXXXXXXXXXIGEMSEMVVE

SEQ ID NO: 56009 - protein, 38 aa, Artificial Sequence; identical to SEQ ID NO: 16960
  GFR-binding peptide
  MOD_RES (7), (7): Xaa is C or S

SEQ ID NO: 56010 - protein, 35 aa, Artificial Sequence; identical to SEQ ID NO: 20061
  GFR-binding peptide
  MOD_RES (16), (17), (18), (19), (20): Xaa is A or G
  MOD_RES (21), (22), (23), (24): Xaa is A or G or is absent

SEQ ID NO: 56011 - protein, 43 aa, Artificial Sequence; identical to SEQ ID NO: 20062
  GFR-binding peptide
  MOD_RES (3), (40), (42): Xaa is C or S
  MOD_RES (19), (20), (21), (22), (23): Xaa is A or G
  MOD_RES (24), (25), (26), (27): Xaa is A or G or is absent

SEQ ID NO: 56012 - protein, 35 aa, Artificial Sequence; identical to SEQ ID NO: 16961
  GFR-binding peptide
  MOD_RES (1), (2), (34): Xaa is C or S

SEQ ID NO: 56013 - protein, 37 aa, Artificial Sequence
  GFR-binding peptide
  MOD_RES (5), (6), (37): Xaa is C or S
SASPXXVPQDLRPVQIRKIVGRTPKVKKATVMVVKSX

SEQ ID NO: 56014 - protein, 32 aa, Artificial Sequence; identical to SEQ ID NO: 16962
  GFR-binding peptide
  MOD_RES (1), (1): Xaa is C or S

SEQ ID NO: 56015 - protein, 36 aa, Artificial Sequence; identical to SEQ ID NO: 16963
  GFR-binding peptide
  MOD_RES (1), (34), (36): Xaa is C or S
  MOD_RES (15), (16), (17), (18), (19): Xaa is A or G
  MOD_RES (20), (21), (22), (23): Xaa is A or G or is absent

SEQ ID NO: 56016 - protein, 39 aa, Artificial Sequence; identical to SEQ ID NO: 16964
  GFR-binding peptide
  MOD_RES (4), (5), (38): Xaa is C or S
  MOD_RES (19), (20), (21), (22), (23): Xaa is A or G
  MOD_RES (24), (25), (26), (27): Xaa is A or G or is absent

SEQ ID NO: 56017 - protein, 39 aa, Artificial Sequence; identical to SEQ ID NO: 16966
  GFR-binding peptide
  MOD_RES (6), (7): Xaa is C or S
  MOD_RES (21), (22), (23), (24), (25): Xaa is A or G
  MOD_RES (26), (27), (28), (29): Xaa is A or G or is absent

SEQ ID NO: 56018 - protein, 37 aa, Artificial Sequence; identical to SEQ ID NO: 20067
  GFR-binding peptide
  MOD_RES (34), (36): Xaa is C or S

SEQ ID NO: 56019 - protein, 39 aa, Artificial Sequence; identical to SEQ ID NO: 16969
  GFR-binding peptide
  MOD_RES (6), (7), (39): Xaa is C or S

SEQ ID NO: 56020 - protein, 31 aa, Artificial Sequence
  GFR-binding peptide
  MOD_RES (1), (1): Xaa is C or S
XVPQALRSVKIAKVVGRKPKVKEVQVMIVRS

SEQ ID NO: 56021 - protein, 42 aa, Artificial Sequence; identical to SEQ ID NO: 16972
  GFR-binding peptide
  MOD_RES (6), (7), (41): Xaa is C or S
  MOD_RES (21), (22), (23), (24), (25): Xaa is A or G
  MOD_RES (26), (27), (28), (29): Xaa is A or G or is absent

SEQ ID NO: 56022 - protein, 40 aa, Artificial Sequence; identical to SEQ ID NO: 20070
  GFR-binding peptide
  MOD_RES (1), (38), (40): Xaa is C or S

SEQ ID NO: 56023 - protein, 40 aa, Artificial Sequence; identical to SEQ ID NO: 16973
  GFR-binding peptide
  MOD_RES (6), (7), (40): Xaa is C or S
  MOD_RES (21), (22), (23), (24), (25): Xaa is A or G
  MOD_RES (26), (27), (28), (29): Xaa is A or G or is absent

SEQ ID NO: 56024 - protein, 35 aa, Artificial Sequence
  GFR-binding peptide
  MOD_RES (1), (2), (34): Xaa is C or S
XXAPTKLRSVKVAKVDDSSNVIKEVQVNMVVRSXG

SEQ ID NO: 56025 - protein, 42 aa, Artificial Sequence
  GFR-binding peptide
  MOD_RES (4), (41): Xaa is C or S
SVKXQPSRVHHEPLPVVYYEYVRKKPKLEQLSNRLEEHLEXA

SEQ ID NO: 56026 - protein, 39 aa, Artificial Sequence
  GFR-binding peptide
  MOD_RES (37), (39): Xaa is C or S
  MOD_RES (16), (17), (18), (19), (20): Xaa is A or G
  MOD_RES (21), (22), (23), (24): Xaa is A or G or is absent
QPSRVHHEPLTVLYYXXXXXXXXXEQLSNRLEEHLEXAX

SEQ ID NO: 56027 - protein, 43 aa, Artificial Sequence
  GFR-binding peptide
  MOD_RES (4), (41), (43): Xaa is C or S
NVQXRPTQVQLEPLTVLYYEIVRKKPIFEQLSNTLEDHLAXKX

SEQ ID NO: 56028 - protein, 40 aa, Artificial Sequence
  GFR-binding peptide
  MOD_RES (4), (38), (40): Xaa is C or S
  MOD_RES (18), (19), (20), (21), (22): Xaa is A or G
  MOD_RES (23), (24), (25), (26): Xaa is A or G or is absent
KPTXAPTKLRPVQVRKIXXXXXXXXXKKATVNMVVRSXGX

SEQ ID NO: 56029 - protein, 37 aa, Artificial Sequence; identical to SEQ ID NO: 16980
  GFR-binding peptide
  MOD_RES (1), (2), (35), (37): Xaa is C or S
  MOD_RES (16), (17), (18), (19), (20): Xaa is A or G
  MOD_RES (21), (22), (23), (24): Xaa is A or G or is absent

SEQ ID NO: 56030 - protein, 36 aa, Artificial Sequence
  GFR-binding peptide
  MOD_RES (3), (3): Xaa is C or S
  MOD_RES (17), (18), (19), (20), (21): Xaa is A or G
  MOD_RES (22), (23), (24), (25): Xaa is A or G or is absent
PTXAPTKLRSVKVAKVXXXXXXXXXKEVQVNMVVRS

SEQ ID NO: 56031 - protein, 36 aa, Artificial Sequence; identical to SEQ ID NO: 16982
  GFR-binding peptide
  MOD_RES (1), (2), (34), (36): Xaa is C or S

SEQ ID NO: 56032 - protein, 36 aa, Artificial Sequence; identical to SEQ ID NO: 16983
  GFR-binding peptide
  MOD_RES (3), (4): Xaa is C or S
  MOD_RES (18), (19), (20), (21), (22): Xaa is A or G
  MOD_RES (23), (24), (25), (26): Xaa is A or G or is absent

SEQ ID NO: 56033 - protein, 35 aa, Artificial Sequence
  GFR-binding peptide
  MOD_RES (1), (1): Xaa is C or S
  MOD_RES (17), (18), (19), (20), (21): Xaa is A or G
  MOD_RES (22), (23), (24), (25): Xaa is A or G or is absent
XQPSRVHHEPLPVVYYXXXXXXXXXEQLSNRLEEH

SEQ ID NO: 56034 - protein, 39 aa, Artificial Sequence
  GFR-binding peptide
  MOD_RES (3), (4), (36), (38): Xaa is C or S
KPXXAPTKLRPVQVRKIDDSSNVIKKATVNMVVRSXGXH

SEQ ID NO: 56035 - protein, 39 aa, Artificial Sequence
  GFR-binding peptide
  MOD_RES (1), (38): Xaa is C or S
  MOD_RES (17), (18), (19), (20), (21): Xaa is A or G
  MOD_RES (22), (23), (24), (25): Xaa is A or G or is absent
XQPSRVHHEPLPVVYYXXXXXXXXXEQLSNRLEEHLEXA

SEQ ID NO: 56036 - protein, 34 aa, Artificial Sequence
  GFR-binding peptide
  MOD_RES (3), (4): Xaa is C or S
KAXXVPTELRPVQMRKIDENEKVVKKATVDMVVE

SEQ ID NO: 56037 - protein, 37 aa, Artificial Sequence
  GFR-binding peptide
  MOD_RES (3), (4), (37): Xaa is C or S
  MOD_RES (18), (19), (20), (21), (22): Xaa is A or G
  MOD_RES (23), (24), (25), (26): Xaa is A or G or is absent
APXXVPQALRSVKIAKVXXXXXXXXXKEVQVMIVRSX

SEQ ID NO: 56038 - protein, 35 aa, Artificial Sequence
  GFR-binding peptide
  MOD_RES (1), (1): Xaa is C or S
  MOD_RES (17), (18), (19), (20), (21): Xaa is A or G
  MOD_RES (22), (23), (24), (25): Xaa is A or G or is absent
XQPSRVHHEPLTVLYYXXXXXXXXXEQLSNRLEEH

SEQ ID NO: 56039 - protein, 34 aa, Artificial Sequence; identical to SEQ ID NO: 16988
  GFR-binding peptide
  MOD_RES (32), (34): Xaa is C or S

SEQ ID NO: 56040 - protein, 41 aa, Artificial Sequence
  GFR-binding peptide
  MOD_RES (6), (7), (39), (41): Xaa is C or S
SIPKAXXVPTELSNITMQIMDEYDKVVIGEMSEMVVEGXGX

SEQ ID NO: 56041 - protein, 37 aa, Artificial Sequence; identical to SEQ ID NO: 16990
  GFR-binding peptide
  MOD_RES (2), (34), (36): Xaa is C or S

SEQ ID NO: 56042 - protein, 37 aa, Artificial Sequence
  GFR-binding peptide
  MOD_RES (4), (5): Xaa is C or S
  MOD_RES (19), (20), (21), (22), (23): Xaa is A or G
  MOD_RES (24), (25), (26), (27): Xaa is A or G or is absent
ASPXXVPQDLRPVQIRKIXXXXXXXXXKKATVMVVKS

SEQ ID NO: 56043 - protein, 39 aa, Artificial Sequence; identical to SEQ ID NO: 20085
  GFR-binding peptide
  MOD_RES (37), (39): Xaa is C or S

SEQ ID NO: 56044 - protein, 39 aa, Artificial Sequence; identical to SEQ ID NO: 20087
  GFR-binding peptide
  MOD_RES (3), (3): Xaa is C or S

SEQ ID NO: 56045 - protein, 33 aa, Artificial Sequence
  GFR-binding peptide
  MOD_RES (14), (15), (16), (17), (18): Xaa is A or G
  MOD_RES (19), (20), (21), (22): Xaa is A or G or is absent
TQVQLEPLPVVYYXXXXXXXXXEQLSNTLEDHL

SEQ ID NO: 56046 - protein, 41 aa, Artificial Sequence; identical to SEQ ID NO: 20094
  GFR-binding peptide
  MOD_RES (3), (40): Xaa is C or S
  MOD_RES (19), (20), (21), (22), (23): Xaa is A or G
  MOD_RES (24), (25), (26), (27): Xaa is A or G or is absent

SEQ ID NO: 56047 - protein, 39 aa, Artificial Sequence; identical to SEQ ID NO: 20096
  GFR-binding peptide
  MOD_RES (36), (38): Xaa is C or S
  MOD_RES (15), (16), (17), (18), (19): Xaa is A or G
  MOD_RES (20), (21), (22), (23): Xaa is A or G or is absent

SEQ ID NO: 56048 - protein, 31 aa, Artificial Sequence
  GFR-binding peptide
  MOD_RES (31), (31): Xaa is C or S
VPQALRPVQIRKIVGRKPKVKKATVMIVRSX

SEQ ID NO: 56049 - protein, 35 aa, Artificial Sequence; identical to SEQ ID NO: 20097
  GFR-binding peptide

SEQ ID NO: 56050 - protein, 40 aa, Artificial Sequence; identical to SEQ ID NO: 20098
  GFR-binding peptide
  MOD_RES (5), (5): Xaa is C or S
  MOD_RES (21), (22), (23), (24), (25): Xaa is A or G
  MOD_RES (26), (27), (28), (29): Xaa is A or G or is absent

SEQ ID NO: 56051 - protein, 35 aa, Artificial Sequence
  GFR-binding peptide
  MOD_RES (1), (2), (33), (35): Xaa is C or S
XXVPQALSNITIQIMVGRKPKVIGEMSMIVRSXKX

SEQ ID NO: 56052 - protein, 37 aa, Artificial Sequence; identical to SEQ ID NO: 17001
  GFR-binding peptide
  MOD_RES (1), (2), (34), (36): Xaa is C or S

SEQ ID NO: 56053 - protein, 39 aa, Artificial Sequence
  GFR-binding peptide
  MOD_RES (5), (6): Xaa is C or S
  MOD_RES (20), (21), (22), (23), (24): Xaa is A or G
  MOD_RES (25), (26), (27), (28): Xaa is A or G or is absent
VPKPXXAPTKLRPVQVRKIXXXXXXXXXKKATVNMVVRS

SEQ ID NO: 56054 - protein, 41 aa, Artificial Sequence; identical to SEQ ID NO: 20101
  GFR-binding peptide
  MOD_RES (4), (41): Xaa is C or S
  MOD_RES (20), (21), (22), (23), (24): Xaa is A or G
  MOD_RES (25), (26), (27), (28): Xaa is A or G or is absent

SEQ ID NO: 56055 - protein, 36 aa, Artificial Sequence
  GFR-binding peptide
  MOD_RES (2), (3): Xaa is C or S
  MOD_RES (17), (18), (19), (20), (21): Xaa is A or G
  MOD_RES (22), (23), (24), (25): Xaa is A or G or is absent
AXXVPTELRPVQMRKIXXXXXXXXXKKATVEMVVEG

SEQ ID NO: 56056 - protein, 40 aa, Artificial Sequence
  GFR-binding peptide
  MOD_RES (6), (7): Xaa is C or S
  MOD_RES (21), (22), (23), (24), (25): Xaa is A or G
  MOD_RES (26), (27), (28), (29): Xaa is A or G or is absent
KIPKAXXVPTELSNITMQIMXXXXXXXXXIGEMSDMVVEG

SEQ ID NO: 56057 - protein, 35 aa, Artificial Sequence; identical to SEQ ID NO: 17004
  GFR-binding peptide
  MOD_RES (1), (2), (34): Xaa is C or S

SEQ ID NO: 56058 - protein, 41 aa, Artificial Sequence; identical to SEQ ID NO: 20102
  GFR-binding peptide
  MOD_RES (1), (38), (40): Xaa is C or S
  MOD_RES (17), (18), (19), (20), (21): Xaa is A or G
  MOD_RES (22), (23), (24), (25): Xaa is A or G or is absent

SEQ ID NO: 56059 - protein, 36 aa, Artificial Sequence; identical to SEQ ID NO: 17007
  GFR-binding peptide
  MOD_RES (4), (4): Xaa is C or S
  MOD_RES (18), (19), (20), (21), (22): Xaa is A or G
  MOD_RES (23), (24), (25), (26): Xaa is A or G or is absent

SEQ ID NO: 56060 - protein, 33 aa, Artificial Sequence
  GFR-binding peptide
  MOD_RES (2), (3): Xaa is C or S
PXXVSQDLRSVKIAKVIGKTPKIKEVQVMIVKS

SEQ ID NO: 56061 - protein, 38 aa, Artificial Sequence
  GFR-binding peptide
  MOD_RES (5), (6), (37): Xaa is C or S
SASPXXVSQDLSNITIQIMIGKTPKIIGEMSMIVKSXK

SEQ ID NO: 56062 - protein, 39 aa, Artificial Sequence
  GFR-binding peptide
  MOD_RES (2), (3), (37), (39): Xaa is C or S
  MOD_RES (17), (18), (19), (20), (21): Xaa is A or G
  MOD_RES (22), (23), (24), (25): Xaa is A or G or is absent
AXXVPTELRPVQMRKIXXXXXXXXXKKATVEMVVEGXGX

SEQ ID NO: 56063 - protein, 33 aa, Artificial Sequence
  GFR-binding peptide
  MOD_RES (33), (33): Xaa is C or S
  MOD_RES (14), (15), (16), (17), (18): Xaa is A or G
  MOD_RES (19), (20), (21), (22): Xaa is A or G or is absent
VPQALRSVKIAKVXXXXXXXXXKEVQVMIVRSX

SEQ ID NO: 56064 - protein, 31 aa, Artificial Sequence
  GFR-binding peptide
  MOD_RES (1), (1): Xaa is C or S
XVPTELRPVQMRKIDENEKVVKKATVDMVVE

SEQ ID NO: 56065 - protein, 39 aa, Artificial Sequence
  GFR-binding peptide
  MOD_RES (4), (4): Xaa is C or S
  MOD_RES (20), (21), (22), (23), (24): Xaa is A or G
  MOD_RES (25), (26), (27), (28): Xaa is A or G or is absent
NVQXRPTQVQLEPLPVVYYXXXXXXXXXEQLSNTLEDHL

SEQ ID NO: 56066 - protein, 36 aa, Artificial Sequence
  GFR-binding peptide
  MOD_RES (1), (34), (36): Xaa is C or S
  MOD_RES (15), (16), (17), (18), (19): Xaa is A or G
  MOD_RES (20), (21), (22), (23): Xaa is A or G or is absent
XVSQDLRPVQIRKIXXXXXXXXXKKATVMIVKSXKX

SEQ ID NO: 56067 - protein, 39 aa, Artificial Sequence; identical to SEQ ID NO: 20108
  GFR-binding peptide
  MOD_RES (4), (4): Xaa is C or S

SEQ ID NO: 56068 - protein, 34 aa, Artificial Sequence
  GFR-binding peptide
  MOD_RES (3), (3): Xaa is C or S
PTXAPTKLRSVKVAKVDDSSNVIKEVQVNMVVRS

SEQ ID NO: 56069 - protein, 37 aa, Artificial Sequence
  GFR-binding peptide
  MOD_RES (1), (2), (34), (36): Xaa is C or S
XXVPTELSNITMQIMDEYDKVVIGEMSEMVVEGXGXR

SEQ ID NO: 56070 - protein, 40 aa, Artificial Sequence; identical to SEQ ID NO: 20110
  GFR-binding peptide
  MOD_RES (5), (5): Xaa is C or S

SEQ ID NO: 56071 - protein, 36 aa, Artificial Sequence; identical to SEQ ID NO: 17013
  GFR-binding peptide
  MOD_RES (2), (3): Xaa is C or S
  MOD_RES (17), (18), (19), (20), (21): Xaa is A or G
  MOD_RES (22), (23), (24), (25): Xaa is A or G or is absent

SEQ ID NO: 56072 - protein, 38 aa, Artificial Sequence
  GFR-binding peptide
  MOD_RES (1), (35), (37): Xaa is C or S
  MOD_RES (15), (16), (17), (18), (19): Xaa is A or G
  MOD_RES (20), (21), (22), (23): Xaa is A or G or is absent
XAPTKLRPVQVRKIXXXXXXXXXKKATVNMVVRSXGXH

SEQ ID NO: 56073 - protein, 37 aa, Artificial Sequence; identical to SEQ ID NO: 17016
  GFR-binding peptide
  MOD_RES (3), (37): Xaa is C or S
  MOD_RES (17), (18), (19), (20), (21): Xaa is A or G
  MOD_RES (22), (23), (24), (25): Xaa is A or G or is absent

SEQ ID NO: 56074 - protein, 36 aa, Artificial Sequence
  GFR-binding peptide
  MOD_RES (34), (36): Xaa is C or S
  MOD_RES (14), (15), (16), (17), (18): Xaa is A or G
  MOD_RES (19), (20), (21), (22): Xaa is A or G or is absent
VPTEEEPLPMVYYXXXXXXXXXEQLSNFLQHNKXEX

SEQ ID NO: 56075 - protein, 41 aa, Artificial Sequence; identical to SEQ ID NO: 17017
  GFR-binding peptide
  MOD_RES (4), (5), (38), (40): Xaa is C or S
  MOD_RES (19), (20), (21), (22), (23): Xaa is A or G
  MOD_RES (24), (25), (26), (27): Xaa is A or G or is absent

SEQ ID NO: 56076 - protein, 40 aa, Artificial Sequence
  GFR-binding peptide
  MOD_RES (4), (5), (38), (40): Xaa is C or S
  MOD_RES (19), (20), (21), (22), (23): Xaa is A or G
  MOD_RES (24), (25), (26), (27): Xaa is A or G or is absent
ASPXXVSQDLSNITIQIMXXXXXXXXXIGEMSMIVKSXKX

SEQ ID NO: 56077 - protein, 34 aa, Artificial Sequence
  GFR-binding peptide
SRVHHEPLTVLYYEYVRKKPKLEQLSNRLEEHLE

SEQ ID NO: 56078 - protein, 36 aa, Artificial Sequence
  GFR-binding peptide
  MOD_RES (4), (5): Xaa is C or S
PKPXXAPTQLRSVKVAKVDDSSNVIKEVQVNMVVRA

SEQ ID NO: 56079 - protein, 39 aa, Artificial Sequence
  GFR-binding peptide
  MOD_RES (2), (3), (36), (38): Xaa is C or S
  MOD_RES (17), (18), (19), (20), (21): Xaa is A or G
  MOD_RES (22), (23), (24), (25): Xaa is A or G or is absent
PXXVPQALSNITIQIMXXXXXXXXXIGEMSMIVRSXKXS

SEQ ID NO: 56080 - protein, 35 aa, Artificial Sequence
  GFR-binding peptide
  MOD_RES (3), (4): Xaa is C or S
KPXXAPTKLSNITVQIMDDSSNVIIGEMSNMVVRS

SEQ ID NO: 56081 - protein, 37 aa, Artificial Sequence
  GFR-binding peptide
  MOD_RES (5), (6), (37): Xaa is C or S
SASPXXVSQDLRPVQIRKIIGKTPKIKKATVMIVKSX

SEQ ID NO: 56082 - protein, 36 aa, Artificial Sequence; identical to SEQ ID NO: 17021
  GFR-binding peptide
  MOD_RES (3), (4): Xaa is C or S
  MOD_RES (18), (19), (20), (21), (22): Xaa is A or G
  MOD_RES (23), (24), (25), (26): Xaa is A or G or is absent

SEQ ID NO: 56083 - protein, 37 aa, Artificial Sequence; identical to SEQ ID NO: 20115
  GFR-binding peptide
  MOD_RES (1), (1): Xaa is C or S
  MOD_RES (17), (18), (19), (20), (21): Xaa is A or G
  MOD_RES (22), (23), (24), (25): Xaa is A or G or is absent

SEQ ID NO: 56084 - protein, 39 aa, Artificial Sequence
  GFR-binding peptide
  MOD_RES (4), (5), (37), (39): Xaa is C or S
PKPXXAPTKLRPVQVRKIDDSSNVIKKATVNMVVRSXGX

SEQ ID NO: 56085 - protein, 40 aa, Artificial Sequence; identical to SEQ ID NO: 20118
  GFR-binding peptide
  MOD_RES (1), (38), (40): Xaa is C or S
  MOD_RES (17), (18), (19), (20), (21): Xaa is A or G
  MOD_RES (22), (23), (24), (25): Xaa is A or G or is absent

SEQ ID NO: 56086 - protein, 39 aa, Artificial Sequence; identical to SEQ ID NO: 17025
  GFR-binding peptide
  MOD_RES (6), (7), (39): Xaa is C or S

SEQ ID NO: 56087 - protein, 33 aa, Artificial Sequence
  GFR-binding peptide
  MOD_RES (1), (2): Xaa is C or S
XXAPTKLRPVQVRKIDDSSNVIKKATVNMVVRS

SEQ ID NO: 56088 - protein, 37 aa, Artificial Sequence; identical to SEQ ID NO: 20120
  GFR-binding peptide
  MOD_RES (34), (36): Xaa is C or S
  MOD_RES (14), (15), (16), (17), (18): Xaa is A or G
  MOD_RES (19), (20), (21), (22): Xaa is A or G or is absent

SEQ ID NO: 56089 - protein, 38 aa, Artificial Sequence
  GFR-binding peptide
  MOD_RES (5), (6), (37): Xaa is C or S
SASPXXVSQDLRSVKIAKVIGKTPKIKEVQVMIVKSXK

SEQ ID NO: 56090 - protein, 34 aa, Artificial Sequence
  GFR-binding peptide
  MOD_RES (2), (3), (34): Xaa is C or S
PXXVPQALRSVKIAKVVGRKPKVKEVQVMIVRSX

SEQ ID NO: 56091 - protein, 37 aa, Artificial Sequence; identical to SEQ ID NO: 20122
  GFR-binding peptide
  MOD_RES (35), (37): Xaa is C or S
  MOD_RES (14), (15), (16), (17), (18): Xaa is A or G
  MOD_RES (19), (20), (21), (22): Xaa is A or G or is absent

SEQ ID NO: 56092 - protein, 37 aa, Artificial Sequence
  GFR-binding peptide
  MOD_RES (5), (6): Xaa is C or S
IPKAXXVPTELSNITMQIMDEYDKVVIGEMSEMVVEG

SEQ ID NO: 56093 - protein, 37 aa, Artificial Sequence
  GFR-binding peptide
  MOD_RES (3), (4), (35), (37): Xaa is C or S
SPXXVPQDLRSVKIAKVVGRTPKVKEVQVMVVKSXKX

SEQ ID NO: 56094 - protein, 39 aa, Artificial Sequence; identical to SEQ ID NO: 20124
  GFR-binding peptide
  MOD_RES (5), (5): Xaa is C or S
  MOD_RES (21), (22), (23), (24), (25): Xaa is A or G
  MOD_RES (26), (27), (28), (29): Xaa is A or G or is absent

SEQ ID NO: 56095 - protein, 38 aa, Artificial Sequence; identical to SEQ ID NO: 17030
  GFR-binding peptide
  MOD_RES (2), (3), (37): Xaa is C or S
  MOD_RES (17), (18), (19), (20), (21): Xaa is A or G
  MOD_RES (22), (23), (24), (25): Xaa is A or G or is absent

SEQ ID NO: 56096 - protein, 37 aa, Artificial Sequence
  GFR-binding peptide
  MOD_RES (3), (4), (36): Xaa is C or S
KAXXVPTELSNITMQIMDENEKVVIGEMSDMVVEGXG

SEQ ID NO: 56097 - protein, 39 aa, Artificial Sequence
  GFR-binding peptide
  MOD_RES (6), (38): Xaa is C or S
VTKPTXAPTKLSNITVQIMDDSSNVIIGEMSNMVVRSXG

SEQ ID NO: 56098 - protein, 37 aa, Artificial Sequence
  GFR-binding peptide
  MOD_RES (3), (4), (35), (37): Xaa is C or S
SPXXVSQDLRSVKIAKVIGKTPKIKEVQVMIVKSXKX

SEQ ID NO: 56099 - protein, 32 aa, Artificial Sequence; identical to SEQ ID NO: 17033
  GFR-binding peptide
  MOD_RES (1), (1): Xaa is C or S

SEQ ID NO: 56100 - protein, 35 aa, Artificial Sequence
  GFR-binding peptide
  MOD_RES (34), (34): Xaa is C or S
VPTEEEPLPMVYYRIKPHQGQHEQLSNFLQHNKXE

SEQ ID NO: 56101 - protein, 39 aa, Artificial Sequence; identical to SEQ ID NO: 20131
  GFR-binding peptide
  MOD_RES (4), (38): Xaa is C or S
  MOD_RES (18), (19), (20), (21), (22): Xaa is A or G
  MOD_RES (23), (24), (25), (26): Xaa is A or G or is absent

SEQ ID NO: 56102 - protein, 35 aa, Artificial Sequence
  GFR-binding peptide
  MOD_RES (2), (3), (34): Xaa is C or S
PXXVSQDLRPVQIRKIIGKTPKIKKATVMIVKSXK

SEQ ID NO: 56103 - protein, 41 aa, Artificial Sequence
  GFR-binding peptide
  MOD_RES (6), (7), (41): Xaa is C or S
  MOD_RES (21), (22), (23), (24), (25): Xaa is A or G
  MOD_RES (26), (27), (28), (29): Xaa is A or G or is absent
YVPKPXXAPTKLRPVQVRKIXXXXXXXXXKKATVNMVVRSX

SEQ ID NO: 56104 - protein, 34 aa, Artificial Sequence
  GFR-binding peptide
  MOD_RES (3), (4): Xaa is C or S
SPXXVSQDLSNITIQIMIGKTPKIIGEMSMIVKS

SEQ ID NO: 56105 - protein, 38 aa, Artificial Sequence
  GFR-binding peptide
  MOD_RES (6), (7), (38): Xaa is C or S
ASASPXXVSQDLRPVQIRKIIGKTPKIKKATVMIVKSX

SEQ ID NO: 56106 - protein, 43 aa, Artificial Sequence
  GFR-binding peptide
  MOD_RES (6), (7), (40), (42): Xaa is C or S
  MOD_RES (21), (22), (23), (24), (25): Xaa is A or G
  MOD_RES (26), (27), (28), (29): Xaa is A or G or is absent
ASASPXXVPQDLRSVKIAKVXXXXXXXXXKEVQVMVVKSXKXS

SEQ ID NO: 56107 - protein, 41 aa, Artificial Sequence; identical to SEQ ID NO: 20134
  GFR-binding peptide
  MOD_RES (6), (40): Xaa is C or S
  MOD_RES (20), (21), (22), (23), (24): Xaa is A or G
  MOD_RES (25), (26), (27), (28): Xaa is A or G or is absent

SEQ ID NO: 56108 - protein, 34 aa, Artificial Sequence; identical to SEQ ID NO: 17037
  GFR-binding peptide
  MOD_RES (3), (4): Xaa is C or S

SEQ ID NO: 56109 - protein, 38 aa, Artificial Sequence
  GFR-binding peptide
  MOD_RES (2), (3), (35), (37): Xaa is C or S
AXXVPTELRSVKMAKVDEYDKVVKEVQVEMVVEGXGXR

SEQ ID NO: 56110 - protein, 36 aa, Artificial Sequence; identical to SEQ ID NO: 20137
  GFR-binding peptide
  MOD_RES (1), (1): Xaa is C or S
  MOD_RES (17), (18), (19), (20), (21): Xaa is A or G
  MOD_RES (22), (23), (24), (25): Xaa is A or G or is absent

SEQ ID NO: 56111 - protein, 39 aa, Artificial Sequence
  GFR-binding peptide
  MOD_RES (4), (36), (38): Xaa is C or S
KPTXAPTKLRSVKVAKVDDSSNVIKEVQVNMVVRSXGXH

SEQ ID NO: 56112 - protein, 39 aa, Artificial Sequence
  GFR-binding peptide
  MOD_RES (3), (4), (37), (39): Xaa is C or S
  MOD_RES (18), (19), (20), (21), (22): Xaa is A or G
  MOD_RES (23), (24), (25), (26): Xaa is A or G or is absent
APXXVPQALSNITIQIMXXXXXXXXXIGEMSMIVRSXKX

SEQ ID NO: 56113 - protein, 37 aa, Artificial Sequence; identical to SEQ ID NO: 17038
  GFR-binding peptide
  MOD_RES (1), (2), (34), (36): Xaa is C or S

SEQ ID NO: 56114 - protein, 37 aa, Artificial Sequence
  GFR-binding peptide
  MOD_RES (4), (5), (36): Xaa is C or S
AAPXXVPQALRSVKIAKVVGRKPKVKEVQVMIVRSXK

SEQ ID NO: 56115 - protein, 31 aa, Artificial Sequence
  GFR-binding peptide
VPTELRPVQMRKIDEYDKVVKKATVEMVVEG

SEQ ID NO: 56116 - protein, 38 aa, Artificial Sequence
  GFR-binding peptide
  MOD_RES (5), (37): Xaa is C or S
TKPTXAPTKLRPVQVRKIDDSSNVIKKATVNMVVRSXG

SEQ ID NO: 56117 - protein, 36 aa, Artificial Sequence
  GFR-binding peptide
  MOD_RES (5), (6): Xaa is C or S
VPKPXXAPTQLSNITVQIMDDSSNVIIGEMSNMVVR

SEQ ID NO: 56118 - protein, 38 aa, Artificial Sequence
  GFR-binding peptide
  MOD_RES (1), (2), (35), (37): Xaa is C or S
  MOD_RES (16), (17), (18), (19), (20): Xaa is A or G
  MOD_RES (21), (22), (23), (24): Xaa is A or G or is absent
XXVPQALRPVQIRKIXXXXXXXXXKKATVMIVRSXKXS

SEQ ID NO: 56119 - protein, 39 aa, Artificial Sequence
  GFR-binding peptide
  MOD_RES (4), (5), (38): Xaa is C or S
  MOD_RES (19), (20), (21), (22), (23): Xaa is A or G
  MOD_RES (24), (25), (26), (27): Xaa is A or G or is absent
ASPXXVSQDLSNITIQIMXXXXXXXXXIGEMSMIVKSXK

SEQ ID NO: 56120 - protein, 39 aa, Artificial Sequence
  GFR-binding peptide
  MOD_RES (6), (6): Xaa is C or S
DEGLEXVPTEEEPLTMLYYRIKPHQGQHEQLSNFLQHNK

SEQ ID NO: 56121 - protein, 40 aa, Artificial Sequence
  GFR-binding peptide
  MOD_RES (4), (38), (40): Xaa is C or S
  MOD_RES (18), (19), (20), (21), (22): Xaa is A or G
  MOD_RES (23), (24), (25), (26): Xaa is A or G or is absent
KPTXAPTKLSNITVQIMXXXXXXXXXIGEMSNMVVRSXGX

SEQ ID NO: 56122 - protein, 38 aa, Artificial Sequence; identical to SEQ ID NO: 17043
  GFR-binding peptide
  MOD_RES (5), (5): Xaa is C or S
  MOD_RES (19), (20), (21), (22), (23): Xaa is A or G
  MOD_RES (24), (25), (26), (27): Xaa is A or G or is absent

SEQ ID NO: 56123 - protein, 41 aa, Artificial Sequence; identical to SEQ ID NO: 20144
  GFR-binding peptide
  MOD_RES (7), (41): Xaa is C or S
  MOD_RES (21), (22), (23), (24), (25): Xaa is A or G
  MOD_RES (26), (27), (28), (29): Xaa is A or G or is absent

SEQ ID NO: 56124 - protein, 32 aa, Artificial Sequence
  GFR-binding peptide
  MOD_RES (1), (2): Xaa is C or S
XXVPTELRPVQMRKIDENEKVVKKATVDMVVE

SEQ ID NO: 56125 - protein, 40 aa, Artificial Sequence
  GFR-binding peptide
  MOD_RES (3), (4), (37), (39): Xaa is C or S
  MOD_RES (18), (19), (20), (21), (22): Xaa is A or G
  MOD_RES (23), (24), (25), (26): Xaa is A or G or is absent
APXXVPQALRPVQIRKIXXXXXXXXXKKATVMIVRSXKXS

SEQ ID NO: 56126 - protein, 38 aa, Artificial Sequence; identical to SEQ ID NO: 17044
  GFR-binding peptide
  MOD_RES (3), (4), (36), (38): Xaa is C or S

SEQ ID NO: 56127 - protein, 39 aa, Artificial Sequence; identical to SEQ ID NO: 20147
  GFR-binding peptide
  MOD_RES (5), (39): Xaa is C or S
  MOD_RES (19), (20), (21), (22), (23): Xaa is A or G
  MOD_RES (24), (25), (26), (27): Xaa is A or G or is absent

SEQ ID NO: 56128 - protein, 38 aa, Artificial Sequence; identical to SEQ ID NO: 20148
  GFR-binding peptide
  MOD_RES (4), (4): Xaa is C or S
  MOD_RES (20), (21), (22), (23), (24): Xaa is A or G
  MOD_RES (25), (26), (27), (28): Xaa is A or G or is absent

SEQ ID NO: 56129 - protein, 38 aa, Artificial Sequence; identical to SEQ ID NO: 20150
  GFR-binding peptide
  MOD_RES (37), (37): Xaa is C or S
  MOD_RES (16), (17), (18), (19), (20): Xaa is A or G
  MOD_RES (21), (22), (23), (24): Xaa is A or G or is absent

SEQ ID NO: 56130 - protein, 34 aa, Artificial Sequence; identical to SEQ ID NO: 26309
  GFR-binding peptide
  MOD_RES (2), (34): Xaa is C or S

SEQ ID NO: 56131 - protein, 38 aa, Artificial Sequence; identical to SEQ ID NO: 2269
  GFR-binding peptide
  MOD_RES (32), (33): Xaa is C or S

SEQ ID NO: 56132 - protein, 38 aa, Artificial Sequence; identical to SEQ ID NO: 3274
  GFR-binding peptide
  MOD_RES (1), (3), (37), (38): Xaa is C or S
  MOD_RES (15), (16), (17), (18), (19): Xaa is A or G
  MOD_RES (20), (21), (22), (23): Xaa is A or G or is absent

SEQ ID NO: 56133 - protein, 34 aa, Artificial Sequence; identical to SEQ ID NO: 2272
  GFR-binding peptide
  MOD_RES (13), (14), (15), (16), (17): Xaa is A or G
  MOD_RES (18), (19), (20), (21): Xaa is A or G or is absent

SEQ ID NO: 56134 - protein, 42 aa, Artificial Sequence; identical to SEQ ID NO: 2274
  GFR-binding peptide
  MOD_RES (1), (3), (38), (39): Xaa is C or S
  MOD_RES (16), (17), (18), (19), (20): Xaa is A or G
  MOD_RES (21), (22), (23), (24): Xaa is A or G or is absent

SEQ ID NO: 56135 - protein, 36 aa, Artificial Sequence; identical to SEQ ID NO: 5201
  GFR-binding peptide
  MOD_RES (33), (34): Xaa is C or S

SEQ ID NO: 56136 - protein, 41 aa, Artificial Sequence; identical to SEQ ID NO: 3278
  GFR-binding peptide
  MOD_RES (2), (35), (36): Xaa is C or S

SEQ ID NO: 56137 - protein, 36 aa, Artificial Sequence; identical to SEQ ID NO: 4228
  GFR-binding peptide
  MOD_RES (1), (33), (34): Xaa is C or S

SEQ ID NO: 56138 - protein, 39 aa, Artificial Sequence; identical to SEQ ID NO: 4229
  GFR-binding peptide
  MOD_RES (1), (33), (34): Xaa is C or S

SEQ ID NO: 56139 - protein, 32 aa, Artificial Sequence; identical to SEQ ID NO: 3280
  GFR-binding peptide
  MOD_RES (1), (1): Xaa is C or S

SEQ ID NO: 56140 - protein, 33 aa, Artificial Sequence; identical to SEQ ID NO: 2277
  GFR-binding peptide
  MOD_RES (2), (2): Xaa is C or S

SEQ ID NO: 56141 - protein, 44 aa, Artificial Sequence
  GFR-binding peptide
  MOD_RES (2), (4), (38), (39): Xaa is C or S
  MOD_RES (16), (17), (18), (19), (20): Xaa is A or G
  MOD_RES (21), (22), (23), (24): Xaa is A or G or is absent
HXGXSRVVMNRYKKLXXXXXXXXXFYLVSIANLKTPAXXPKPVH

SEQ ID NO: 56142 - protein, 38 aa, Artificial Sequence
  GFR-binding peptide
  MOD_RES (1), (3), (37), (38): Xaa is C or S
  MOD_RES (15), (16), (17), (18), (19): Xaa is A or G
  MOD_RES (20), (21), (22), (23): Xaa is A or G or is absent
XGXRDVVMGRYKKLXXXXXXXXXFYLMSIANMKTPTXX

SEQ ID NO: 56143 - protein, 38 aa, Artificial Sequence; identical to SEQ ID NO: 25289
  GFR-binding peptide
  MOD_RES (2), (4), (38): Xaa is C or S
  MOD_RES (16), (17), (18), (19), (20): Xaa is A or G
  MOD_RES (21), (22), (23), (24): Xaa is A or G or is absent

SEQ ID NO: 56144 - protein, 38 aa, Artificial Sequence
  GFR-binding peptide
  MOD_RES (32), (33): Xaa is C or S
RDVVMGRYKKLIIQQKDNFYLMSIANMKTPTXXPGASG

SEQ ID NO: 56145 - protein, 35 aa, Artificial Sequence; identical to SEQ ID NO: 3283
  GFR-binding peptide
  MOD_RES (1), (35): Xaa is C or S
  MOD_RES (13), (14), (15), (16), (17): Xaa is A or G
  MOD_RES (18), (19), (20), (21): Xaa is A or G or is absent

SEQ ID NO: 56146 - protein, 38 aa, Artificial Sequence; identical to SEQ ID NO: 4236
  GFR-binding peptide
  MOD_RES (1), (33), (34): Xaa is C or S

SEQ ID NO: 56147 - protein, 36 aa, Artificial Sequence
  GFR-binding peptide
  MOD_RES (33), (34): Xaa is C or S
  MOD_RES (11), (12), (13), (14), (15): Xaa is A or G
  MOD_RES (16), (17), (18), (19): Xaa is A or G or is absent
EEVIMRYKKLXXXXXXXXXFYLMSIANTKVPAXXTS

SEQ ID NO: 56148 - protein, 41 aa, Artificial Sequence
  GFR-binding peptide
  MOD_RES (2), (36), (37): Xaa is C or S
  MOD_RES (14), (15), (16), (17), (18): Xaa is A or G
  MOD_RES (19), (20), (21), (22): Xaa is A or G or is absent
GXRDVVMGRYKKLXXXXXXXXXFYLMSIANMKTPTXXPGAS

SEQ ID NO: 56149 - protein, 39 aa, Artificial Sequence
  GFR-binding peptide
  MOD_RES (1), (3), (36), (37): Xaa is C or S
  MOD_RES (14), (15), (16), (17), (18): Xaa is A or G
  MOD_RES (19), (20), (21), (22): Xaa is A or G or is absent
XGXEEVIMRYKKLXXXXXXXXXFYLMSIANTKVPAXXTS

SEQ ID NO: 56150 - protein, 35 aa, Artificial Sequence; identical to SEQ ID NO: 5219
  GFR-binding peptide
  MOD_RES (2), (34), (35): Xaa is C or S

SEQ ID NO: 56151 - protein, 42 aa, Artificial Sequence; identical to SEQ ID NO: 2293
  GFR-binding peptide
  MOD_RES (2), (4), (36), (37): Xaa is C or S

SEQ ID NO: 56152 - protein, 36 aa, Artificial Sequence; identical to SEQ ID NO: 26332
  GFR-binding peptide
  MOD_RES (31), (32): Xaa is C or S

SEQ ID NO: 56153 - protein, 35 aa, Artificial Sequence; identical to SEQ ID NO: 3299
  GFR-binding peptide
  MOD_RES (2), (2): Xaa is C or S
  MOD_RES (14), (15), (16), (17), (18): Xaa is A or G
  MOD_RES (19), (20), (21), (22): Xaa is A or G or is absent

SEQ ID NO: 56154 - protein, 42 aa, Artificial Sequence; identical to SEQ ID NO: 5224
  GFR-binding peptide
  MOD_RES (2), (37), (38): Xaa is C or S
  MOD_RES (15), (16), (17), (18), (19): Xaa is A or G
  MOD_RES (20), (21), (22), (23): Xaa is A or G or is absent

SEQ ID NO: 56155 - protein, 40 aa, Artificial Sequence; identical to SEQ ID NO: 24290
  GFR-binding peptide
  MOD_RES (34), (35): Xaa is C or S
  MOD_RES (12), (13), (14), (15), (16): Xaa is A or G
  MOD_RES (17), (18), (19), (20): Xaa is A or G or is absent

SEQ ID NO: 56156 - protein, 34 aa, Artificial Sequence; identical to SEQ ID NO: 5225
  GFR-binding peptide
  MOD_RES (33), (33): Xaa is C or S
  MOD_RES (11), (12), (13), (14), (15): Xaa is A or G
  MOD_RES (16), (17), (18), (19): Xaa is A or G or is absent

SEQ ID NO: 56157 - protein, 38 aa, Artificial Sequence; identical to SEQ ID NO: 2298
  GFR-binding peptide
  MOD_RES (1), (35), (36): Xaa is C or S
  MOD_RES (13), (14), (15), (16), (17): Xaa is A or G
  MOD_RES (18), (19), (20), (21): Xaa is A or G or is absent

SEQ ID NO: 56158 - protein, 37 aa, Artificial Sequence; identical to SEQ ID NO: 4250
  GFR-binding peptide
  MOD_RES (2), (36): Xaa is C or S
  MOD_RES (14), (15), (16), (17), (18): Xaa is A or G
  MOD_RES (19), (20), (21), (22): Xaa is A or G or is absent

SEQ ID NO: 56159 - protein, 31 aa, Artificial Sequence
  GFR-binding peptide
  MOD_RES (1), (1): Xaa is C or S
XEEVIMRYKKLLLVRGNDFYLMSIANTKVPA

SEQ ID NO: 56160 - protein, 39 aa, Artificial Sequence; identical to SEQ ID NO: 2299
  GFR-binding peptide
  MOD_RES (1), (3), (35), (36): Xaa is C or S

SEQ ID NO: 56161 - protein, 38 aa, Artificial Sequence; identical to SEQ ID NO: 2301
  GFR-binding peptide
  MOD_RES (1), (33): Xaa is C or S

SEQ ID NO: 56162 - protein, 35 aa, Artificial Sequence; identical to SEQ ID NO: 23287
  GFR-binding peptide
  MOD_RES (33), (34): Xaa is C or S
  MOD_RES (11), (12), (13), (14), (15): Xaa is A or G
  MOD_RES (16), (17), (18), (19): Xaa is A or G or is absent

SEQ ID NO: 56163 - protein, 35 aa, Artificial Sequence; identical to SEQ ID NO: 25301
  GFR-binding peptide
  MOD_RES (1), (3), (35): Xaa is C or S

SEQ ID NO: 56164 - protein, 35 aa, Artificial Sequence; identical to SEQ ID NO: 26339
  GFR-binding peptide
  MOD_RES (2), (34), (35): Xaa is C or S

SEQ ID NO: 56165 - protein, 39 aa, Artificial Sequence
  GFR-binding peptide
  MOD_RES (2), (35), (36): Xaa is C or S
  MOD_RES (13), (14), (15), (16), (17): Xaa is A or G
  MOD_RES (18), (19), (20), (21): Xaa is A or G or is absent
GXEEVIMRYKKLXXXXXXXXXFYLMSIANTKVPAXXTSP

SEQ ID NO: 56166 - protein, 37 aa, Artificial Sequence
  GFR-binding peptide
  MOD_RES (2), (4), (36), (37): Xaa is C or S
SXGXRDVVMGRYKKLIIQQKDNFYLMSIANMKTPTXX

SEQ ID NO: 56167 - protein, 34 aa, Artificial Sequence; identical to SEQ ID NO: 25303
  GFR-binding peptide
  MOD_RES (1), (33), (34): Xaa is C or S

SEQ ID NO: 56168 - protein, 37 aa, Artificial Sequence
  GFR-binding peptide
  MOD_RES (2), (34), (35): Xaa is C or S
GXRDVVMGRYKKLIIQQKDNFYLMSIANMKTPTXXPG

SEQ ID NO: 56169 - protein, 36 aa, Artificial Sequence; identical to SEQ ID NO: 9808
  GFR-binding peptide
  MOD_RES (2), (36): Xaa is C or S
  MOD_RES (14), (15), (16), (17), (18): Xaa is A or G
  MOD_RES (19), (20), (21), (22): Xaa is A or G or is absent

SEQ ID NO: 56170 - protein, 39 aa, Artificial Sequence; identical to SEQ ID NO: 25305
  GFR-binding peptide
  MOD_RES (1), (3), (37), (38): Xaa is C or S
  MOD_RES (15), (16), (17), (18), (19): Xaa is A or G
  MOD_RES (20), (21), (22), (23): Xaa is A or G or is absent

SEQ ID NO: 56171 - protein, 30 aa, Artificial Sequence; identical to SEQ ID NO: 24301
  GFR-binding peptide

SEQ ID NO: 56172 - protein, 41 aa, Artificial Sequence; identical to SEQ ID NO: 4256
  GFR-binding peptide
  MOD_RES (2), (4), (36), (37): Xaa is C or S

SEQ ID NO: 56173 - protein, 32 aa, Artificial Sequence; identical to SEQ ID NO: 25312
  GFR-binding peptide
  MOD_RES (11), (12), (13), (14), (15): Xaa is A or G
  MOD_RES (16), (17), (18), (19): Xaa is A or G or is absent

SEQ ID NO: 56174 - protein, 41 aa, Artificial Sequence; identical to SEQ ID NO: 4257
  GFR-binding peptide
  MOD_RES (1), (3), (35): Xaa is C or S

SEQ ID NO: 56175 - protein, 37 aa, Artificial Sequence; identical to SEQ ID NO: 12669
  GFR-binding peptide
  MOD_RES (1), (3), (35), (36): Xaa is C or S

SEQ ID NO: 56176 - protein, 31 aa, Artificial Sequence; identical to SEQ ID NO: 23296
  GFR-binding peptide
  MOD_RES (31), (31): Xaa is C or S

SEQ ID NO: 56177 - protein, 34 aa, Artificial Sequence; identical to SEQ ID NO: 3316
  GFR-binding peptide
  MOD_RES (2), (2): Xaa is C or S

SEQ ID NO: 56178 - protein, 43 aa, Artificial Sequence; identical to SEQ ID NO: 3317
  GFR-binding peptide
  MOD_RES (1), (3), (37): Xaa is C or S
  MOD_RES (15), (16), (17), (18), (19): Xaa is A or G
  MOD_RES (20), (21), (22), (23): Xaa is A or G or is absent

SEQ ID NO: 56179 - protein, 40 aa, Artificial Sequence
  GFR-binding peptide
  MOD_RES (2), (4), (36), (37): Xaa is C or S
SXGXRDVVMGRYKKLIIQQKDNFYLMSIANMKTPTXXPGA

SEQ ID NO: 56180 - protein, 33 aa, Artificial Sequence; identical to SEQ ID NO: 11675
  GFR-binding peptide
  MOD_RES (1), (33): Xaa is C or S

SEQ ID NO: 56181 - protein, 40 aa, Artificial Sequence; identical to SEQ ID NO: 23297
  GFR-binding peptide
  MOD_RES (1), (35), (36): Xaa is C or S
  MOD_RES (13), (14), (15), (16), (17): Xaa is A or G
  MOD_RES (18), (19), (20), (21): Xaa is A or G or is absent

SEQ ID NO: 56182 - protein, 41 aa, Artificial Sequence
  GFR-binding peptide
  MOD_RES (1), (3), (35), (36): Xaa is C or S
XGXSRVVMNRYKKLIVNSSDDFYLVSIANLKTPAXXPKPVH

SEQ ID NO: 56183 - protein, 41 aa, Artificial Sequence
  GFR-binding peptide
  MOD_RES (1), (3), (35), (36): Xaa is C or S
XGXRDVVMGRYKKLIIQQKDNFYLMSIANMKTPTXXPGASG

SEQ ID NO: 56184 - protein, 37 aa, Artificial Sequence; identical to SEQ ID NO: 2323
  GFR-binding peptide
  MOD_RES (2), (4): Xaa is C or S
  MOD_RES (16), (17), (18), (19), (20): Xaa is A or G
  MOD_RES (21), (22), (23), (24): Xaa is A or G or is absent

SEQ ID NO: 56185 - protein, 40 aa, Artificial Sequence; identical to SEQ ID NO: 3321
  GFR-binding peptide
  MOD_RES (1), (3), (37), (38): Xaa is C or S
  MOD_RES (15), (16), (17), (18), (19): Xaa is A or G
  MOD_RES (20), (21), (22), (23): Xaa is A or G or is absent

SEQ ID NO: 56186 - protein, 43 aa, Artificial Sequence; identical to SEQ ID NO: 26358
  GFR-binding peptide
  MOD_RES (1), (3), (37), (38): Xaa is C or S
  MOD_RES (15), (16), (17), (18), (19): Xaa is A or G
  MOD_RES (20), (21), (22), (23): Xaa is A or G or is absent

SEQ ID NO: 56187 - protein, 32 aa, Artificial Sequence; identical to SEQ ID NO: 2327
  GFR-binding peptide
  MOD_RES (31), (32): Xaa is C or S

SEQ ID NO: 56188 - protein, 36 aa, Artificial Sequence; identical to SEQ ID NO: 11684
  GFR-binding peptide
  MOD_RES (1), (3), (35), (36): Xaa is C or S

SEQ ID NO: 56189 - protein, 39 aa, Artificial Sequence; identical to SEQ ID NO: 3330
  GFR-binding peptide
  MOD_RES (1), (33), (34): Xaa is C or S

SEQ ID NO: 56190 - protein, 34 aa, Artificial Sequence; identical to SEQ ID NO: 26365
  GFR-binding peptide
  MOD_RES (32), (33): Xaa is C or S

SEQ ID NO: 56191 - protein, 36 aa, Artificial Sequence; identical to SEQ ID NO: 12680
  GFR-binding peptide
  MOD_RES (1), (3): Xaa is C or S
  MOD_RES (15), (16), (17), (18), (19): Xaa is A or G
  MOD_RES (20), (21), (22), (23): Xaa is A or G or is absent

SEQ ID NO: 56192 - protein, 34 aa, Artificial Sequence
  GFR-binding peptide
  MOD_RES (1), (32), (33): Xaa is C or S
XEEVIMRYKKLLLVRGNDFYLMSIANTKVPAXXT

SEQ ID NO: 56193 - protein, 40 aa, Artificial Sequence; identical to SEQ ID NO: 5247
  GFR-binding peptide
  MOD_RES (2), (4), (36): Xaa is C or S

SEQ ID NO: 56194 - protein, 40 aa, Artificial Sequence; identical to SEQ ID NO: 25322
  GFR-binding peptide
  MOD_RES (2), (4), (38), (39): Xaa is C or S
  MOD_RES (16), (17), (18), (19), (20): Xaa is A or G
  MOD_RES (21), (22), (23), (24): Xaa is A or G or is absent

SEQ ID NO: 56195 - protein, 33 aa, Artificial Sequence; identical to SEQ ID NO: 12682
  GFR-binding peptide
  MOD_RES (2), (2): Xaa is C or S

SEQ ID NO: 56196 - protein, 35 aa, Artificial Sequence; identical to SEQ ID NO: 11686
  GFR-binding peptide
  MOD_RES (33), (34): Xaa is C or S
  MOD_RES (11), (12), (13), (14), (15): Xaa is A or G
  MOD_RES (16), (17), (18), (19): Xaa is A or G or is absent

SEQ ID NO: 56197 - protein, 35 aa, Artificial Sequence
  GFR-binding peptide
  MOD_RES (2), (34), (35): Xaa is C or S
GXRDVVMGRYKKLIIQQKDNFYLMSIANMKTPTXX

SEQ ID NO: 56198 - protein, 40 aa, Artificial Sequence; identical to SEQ ID NO: 2333
  GFR-binding peptide
  MOD_RES (1), (3), (36), (37): Xaa is C or S

SEQ ID NO: 56199 - protein, 37 aa, Artificial Sequence; identical to SEQ ID NO: 23318
  GFR-binding peptide
  MOD_RES (1), (33), (34): Xaa is C or S

SEQ ID NO: 56200 - protein, 39 aa, Artificial Sequence; identical to SEQ ID NO: 5249
  GFR-binding peptide
  MOD_RES (2), (4), (37), (38): Xaa is C or S

SEQ ID NO: 56201 - protein, 40 aa, Artificial Sequence; identical to SEQ ID NO: 2334
  GFR-binding peptide
  MOD_RES (1), (3), (35): Xaa is C or S

SEQ ID NO: 56202 - protein, 35 aa, Artificial Sequence
  GFR-binding peptide
  MOD_RES (1), (34), (35): Xaa is C or S
  MOD_RES (12), (13), (14), (15), (16): Xaa is A or G
  MOD_RES (17), (18), (19), (20): Xaa is A or G or is absent
XEEVIMRYKKLXXXXXXXXXFYLMSIANTKVPAXX

SEQ ID NO: 56203 - protein, 38 aa, Artificial Sequence; identical to SEQ ID NO: 5250
  GFR-binding peptide
  MOD_RES (1), (3), (35), (36): Xaa is C or S

SEQ ID NO: 56204 - protein, 45 aa, Artificial Sequence; identical to SEQ ID NO: 5252
  GFR-binding peptide
  MOD_RES (2), (4), (39), (40): Xaa is C or S
  MOD_RES (17), (18), (19), (20), (21): Xaa is A or G
  MOD_RES (22), (23), (24), (25): Xaa is A or G or is absent

SEQ ID NO: 56205 - protein, 37 aa, Artificial Sequence; identical to SEQ ID NO: 5253
  GFR-binding peptide
  MOD_RES (1), (34), (35): Xaa is C or S

SEQ ID NO: 56206 - protein, 33 aa, Artificial Sequence; identical to SEQ ID NO: 5255
  GFR-binding peptide
  MOD_RES (33), (33): Xaa is C or S
  MOD_RES (11), (12), (13), (14), (15): Xaa is A or G
  MOD_RES (16), (17), (18), (19): Xaa is A or G or is absent

SEQ ID NO: 56207 - protein, 40 aa, Artificial Sequence; identical to SEQ ID NO: 5256
  GFR-binding peptide
  MOD_RES (1), (3), (35), (36): Xaa is C or S

SEQ ID NO: 56208 - protein, 42 aa, Artificial Sequence; identical to SEQ ID NO: 4274
  GFR-binding peptide
  MOD_RES (2), (4), (37), (38): Xaa is C or S

SEQ ID NO: 56209 - protein, 34 aa, Artificial Sequence; identical to SEQ ID NO: 4277
  GFR-binding peptide
  MOD_RES (1), (1): Xaa is C or S
  MOD_RES (13), (14), (15), (16), (17): Xaa is A or G
  MOD_RES (18), (19), (20), (21): Xaa is A or G or is absent

SEQ ID NO: 56210 - protein, 31 aa, Artificial Sequence; identical to SEQ ID NO: 11698
  GFR-binding peptide
  MOD_RES (31), (31): Xaa is C or S

SEQ ID NO: 56211 - protein, 32 aa, Artificial Sequence
  GFR-binding peptide
  MOD_RES (32), (32): Xaa is C or S
RDVVMGRYKKLIIQQKDNFYLMSIANMKTPTX

SEQ ID NO: 56212 - protein, 35 aa, Artificial Sequence; identical to SEQ ID NO: 24332
  GFR-binding peptide
  MOD_RES (34), (35): Xaa is C or S
  MOD_RES (12), (13), (14), (15), (16): Xaa is A or G
  MOD_RES (17), (18), (19), (20): Xaa is A or G or is absent

SEQ ID NO: 56213 - protein, 42 aa, Artificial Sequence; identical to SEQ ID NO: 3348
  GFR-binding peptide
  MOD_RES (2), (4), (38), (39): Xaa is C or S
  MOD_RES (16), (17), (18), (19), (20): Xaa is A or G
  MOD_RES (21), (22), (23), (24): Xaa is A or G or is absent

SEQ ID NO: 56214 - protein, 40 aa, Artificial Sequence; identical to SEQ ID NO: 5268
  GFR-binding peptide
  MOD_RES (34), (35): Xaa is C or S
  MOD_RES (12), (13), (14), (15), (16): Xaa is A or G
  MOD_RES (17), (18), (19), (20): Xaa is A or G or is absent

SEQ ID NO: 56215 - protein, 37 aa, Artificial Sequence; identical to SEQ ID NO: 5269
  GFR-binding peptide
  MOD_RES (35), (36): Xaa is C or S
  MOD_RES (13), (14), (15), (16), (17): Xaa is A or G
  MOD_RES (18), (19), (20), (21): Xaa is A or G or is absent

SEQ ID NO: 56216 - protein, 38 aa, Artificial Sequence; identical to SEQ ID NO: 25331
  GFR-binding peptide
  MOD_RES (32), (33): Xaa is C or S

SEQ ID NO: 56217 - protein, 39 aa, Artificial Sequence; identical to SEQ ID NO: 5274
  GFR-binding peptide
  MOD_RES (2), (4), (38), (39): Xaa is C or S
  MOD_RES (16), (17), (18), (19), (20): Xaa is A or G
  MOD_RES (21), (22), (23), (24): Xaa is A or G or is absent

SEQ ID NO: 56218 - protein, 43 aa, Artificial Sequence; identical to SEQ ID NO: 3356
  GFR-binding peptide
  MOD_RES (1), (3), (37), (38): Xaa is C or S
  MOD_RES (15), (16), (17), (18), (19): Xaa is A or G
  MOD_RES (20), (21), (22), (23): Xaa is A or G or is absent

SEQ ID NO: 56219 - protein, 35 aa, Artificial Sequence; identical to SEQ ID NO: 24338
  GFR-binding peptide
  MOD_RES (31), (32): Xaa is C or S

SEQ ID NO: 56220 - protein, 33 aa, Artificial Sequence; identical to SEQ ID NO: 5275
  GFR-binding peptide
  MOD_RES (32), (32): Xaa is C or S

SEQ ID NO: 56221 - protein, 37 aa, Artificial Sequence
  GFR-binding peptide
  MOD_RES (34), (35): Xaa is C or S
  MOD_RES (12), (13), (14), (15), (16): Xaa is A or G
  MOD_RES (17), (18), (19), (20): Xaa is A or G or is absent
RDVVMGRYKKLXXXXXXXXXFYLMSIANMKTPTXXPG

SEQ ID NO: 56222 - protein, 38 aa, Artificial Sequence; identical to SEQ ID NO: 2351
  GFR-binding peptide
  MOD_RES (1), (3), (35), (36): Xaa is C or S

SEQ ID NO: 56223 - protein, 39 aa, Artificial Sequence; identical to SEQ ID NO: 24342
  GFR-binding peptide
  MOD_RES (1), (33), (34): Xaa is C or S

SEQ ID NO: 56224 - protein, 38 aa, Artificial Sequence; identical to SEQ ID NO: 5276
  GFR-binding peptide
  MOD_RES (32), (33): Xaa is C or S

SEQ ID NO: 56225 - protein, 33 aa, Artificial Sequence; identical to SEQ ID NO: 3364
  GFR-binding peptide
  MOD_RES (31), (32): Xaa is C or S

SEQ ID NO: 56226 - protein, 43 aa, Artificial Sequence; identical to SEQ ID NO: 2357
  GFR-binding peptide
  MOD_RES (2), (4), (38), (39): Xaa is C or S
  MOD_RES (16), (17), (18), (19), (20): Xaa is A or G
  MOD_RES (21), (22), (23), (24): Xaa is A or G or is absent

SEQ ID NO: 56227 - protein, 42 aa, Artificial Sequence
  GFR-binding peptide
  MOD_RES (2), (36), (37): Xaa is C or S
  MOD_RES (14), (15), (16), (17), (18): Xaa is A or G
  MOD_RES (19), (20), (21), (22): Xaa is A or G or is absent
GXRDVVMGRYKKLXXXXXXXXXFYLMSIANMKTPTXXPGASG

SEQ ID NO: 56228 - protein, 37 aa, Artificial Sequence; identical to SEQ ID NO: 2360
  GFR-binding peptide
  MOD_RES (1), (3), (37): Xaa is C or S
  MOD_RES (15), (16), (17), (18), (19): Xaa is A or G
  MOD_RES (20), (21), (22), (23): Xaa is A or G or is absent

SEQ ID NO: 56229 - protein, 34 aa, Artificial Sequence
  GFR-binding peptide
  MOD_RES (2), (4): Xaa is C or S
LXGXEEVIMRYKKLLLVRGNDFYLMSIANTKVPA

SEQ ID NO: 56230 - protein, 37 aa, Artificial Sequence; identical to SEQ ID NO: 3368
  GFR-binding peptide
  MOD_RES (2), (4), (36), (37): Xaa is C or S

SEQ ID NO: 56231 - protein, 36 aa, Artificial Sequence; identical to SEQ ID NO: 3370
  GFR-binding peptide
  MOD_RES (1), (35), (36): Xaa is C or S
  MOD_RES (13), (14), (15), (16), (17): Xaa is A or G
  MOD_RES (18), (19), (20), (21): Xaa is A or G or is absent

SEQ ID NO: 56232 - protein, 38 aa, Artificial Sequence; identical to SEQ ID NO: 4294
  GFR-binding peptide
  MOD_RES (33), (34): Xaa is C or S
  MOD_RES (11), (12), (13), (14), (15): Xaa is A or G
  MOD_RES (16), (17), (18), (19): Xaa is A or G or is absent

SEQ ID NO: 56233 - protein, 41 aa, Artificial Sequence; identical to SEQ ID NO: 3371
  GFR-binding peptide
  MOD_RES (1), (3), (37): Xaa is C or S
  MOD_RES (15), (16), (17), (18), (19): Xaa is A or G
  MOD_RES (20), (21), (22), (23): Xaa is A or G or is absent

SEQ ID NO: 56234 - protein, 41 aa, Artificial Sequence; identical to SEQ ID NO: 24352
  GFR-binding peptide
  MOD_RES (1), (3), (35), (36): Xaa is C or S

SEQ ID NO: 56235 - protein, 39 aa, Artificial Sequence
  GFR-binding peptide
  MOD_RES (2), (36), (37): Xaa is C or S
  MOD_RES (14), (15), (16), (17), (18): Xaa is A or G
  MOD_RES (19), (20), (21), (22): Xaa is A or G or is absent
GXRDVVMGRYKKLXXXXXXXXXFYLMSIANMKTPTXXPG

SEQ ID NO: 56236 - protein, 37 aa, Artificial Sequence; identical to SEQ ID NO: 3372
  GFR-binding peptide
  MOD_RES (1), (3), (37): Xaa is C or S
  MOD_RES (15), (16), (17), (18), (19): Xaa is A or G
  MOD_RES (20), (21), (22), (23): Xaa is A or G or is absent

SEQ ID NO: 56237 - protein, 35 aa, Artificial Sequence; identical to SEQ ID NO: 5290
  GFR-binding peptide
  MOD_RES (1), (3), (35): Xaa is C or S

SEQ ID NO: 56238 - protein, 39 aa, Artificial Sequence; identical to SEQ ID NO: 4297
  GFR-binding peptide
  MOD_RES (2), (4), (38), (39): Xaa is C or S
  MOD_RES (16), (17), (18), (19), (20): Xaa is A or G
  MOD_RES (21), (22), (23), (24): Xaa is A or G or is absent

SEQ ID NO: 56239 - protein, 37 aa, Artificial Sequence; identical to SEQ ID NO: 4299
  GFR-binding peptide
  MOD_RES (2), (36), (37): Xaa is C or S
  MOD_RES (14), (15), (16), (17), (18): Xaa is A or G
  MOD_RES (19), (20), (21), (22): Xaa is A or G or is absent

SEQ ID NO: 56240 - protein, 42 aa, Artificial Sequence; identical to SEQ ID NO: 3378
  GFR-binding peptide
  MOD_RES (1), (3), (37), (38): Xaa is C or S
  MOD_RES (15), (16), (17), (18), (19): Xaa is A or G
  MOD_RES (20), (21), (22), (23): Xaa is A or G or is absent

SEQ ID NO: 56241 - protein, 36 aa, Artificial Sequence; identical to SEQ ID NO: 26419
  GFR-binding peptide
  MOD_RES (1), (33), (34): Xaa is C or S

SEQ ID NO: 56242 - protein, 40 aa, Artificial Sequence; identical to SEQ ID NO: 4305
  GFR-binding peptide
  MOD_RES (2), (4), (36), (37): Xaa is C or S

SEQ ID NO: 56243 - protein, 35 aa, Artificial Sequence; identical to SEQ ID NO: 5301
  GFR-binding peptide
  MOD_RES (2), (4): Xaa is C or S

SEQ ID NO: 56244 - protein, 39 aa, Artificial Sequence; identical to SEQ ID NO: 2381
  GFR-binding peptide
  MOD_RES (2), (36), (37): Xaa is C or S
  MOD_RES (14), (15), (16), (17), (18): Xaa is A or G
  MOD_RES (19), (20), (21), (22): Xaa is A or G or is absent

SEQ ID NO: 56245 - protein, 32 aa, Artificial Sequence; identical to SEQ ID NO: 4308
  GFR-binding peptide
  MOD_RES (31), (32): Xaa is C or S

SEQ ID NO: 56246 - protein, 32 aa, Artificial Sequence; identical to SEQ ID NO: 4313
  GFR-binding peptide
  MOD_RES (1), (1): Xaa is C or S

SEQ ID NO: 56247 - protein, 40 aa, Artificial Sequence
  GFR-binding peptide
  MOD_RES (1), (3), (35), (36): Xaa is C or S
XGXRDVVMGRYKKLIIQQKDNFYLMSIANMKTPTXXPGAS

SEQ ID NO: 56248 - protein, 40 aa, Artificial Sequence; identical to SEQ ID NO: 10810
  GFR-binding peptide
  MOD_RES (1), (3), (35), (36): Xaa is C or S

SEQ ID NO: 56249 - protein, 36 aa, Artificial Sequence; identical to SEQ ID NO: 3388
  GFR-binding peptide
  MOD_RES (2), (4), (36): Xaa is C or S

SEQ ID NO: 56250 - protein, 44 aa, Artificial Sequence; identical to SEQ ID NO: 2388
  GFR-binding peptide
  MOD_RES (1), (3), (38), (39): Xaa is C or S
  MOD_RES (16), (17), (18), (19), (20): Xaa is A or G
  MOD_RES (21), (22), (23), (24): Xaa is A or G or is absent

SEQ ID NO: 56251 - protein, 37 aa, Artificial Sequence
  GFR-binding peptide
  MOD_RES (1), (3), (37): Xaa is C or S
  MOD_RES (15), (16), (17), (18), (19): Xaa is A or G
  MOD_RES (20), (21), (22), (23): Xaa is A or G or is absent
XGXRDVVMGRYKKLXXXXXXXXXFYLMSIANMKTPTX

SEQ ID NO: 56252 - protein, 33 aa, Artificial Sequence
  GFR-binding peptide
  MOD_RES (12), (13), (14), (15), (16): Xaa is A or G
  MOD_RES (17), (18), (19), (20): Xaa is A or G or is absent
RDVVMGRYKKLXXXXXXXXXFYLMSIANMKTPT

SEQ ID NO: 56253 - protein, 39 aa, Artificial Sequence; identical to SEQ ID NO: 10812
  GFR-binding peptide
  MOD_RES (2), (4), (38), (39): Xaa is C or S
  MOD_RES (16), (17), (18), (19), (20): Xaa is A or G
  MOD_RES (21), (22), (23), (24): Xaa is A or G or is absent

SEQ ID NO: 56254 - protein, 44 aa, Artificial Sequence; identical to SEQ ID NO: 5309
  GFR-binding peptide
  MOD_RES (2), (4), (39), (40): Xaa is C or S
  MOD_RES (17), (18), (19), (20), (21): Xaa is A or G
  MOD_RES (22), (23), (24), (25): Xaa is A or G or is absent

SEQ ID NO: 56255 - protein, 39 aa, Artificial Sequence; identical to SEQ ID NO: 5310
  GFR-binding peptide
  MOD_RES (2), (4), (36), (37): Xaa is C or S

SEQ ID NO: 56256 - protein, 39 aa, Artificial Sequence; identical to SEQ ID NO: 2389
  GFR-binding peptide
  MOD_RES (1), (3), (37), (38): Xaa is C or S
  MOD_RES (15), (16), (17), (18), (19): Xaa is A or G
  MOD_RES (20), (21), (22), (23): Xaa is A or G or is absent

SEQ ID NO: 56257 - protein, 38 aa, Artificial Sequence; identical to SEQ ID NO: 5313
  GFR-binding peptide
  MOD_RES (1), (33), (34): Xaa is C or S

SEQ ID NO: 56258 - protein, 41 aa, Artificial Sequence; identical to SEQ ID NO: 2394
  GFR-binding peptide
  MOD_RES (2), (36), (37): Xaa is C or S
  MOD_RES (14), (15), (16), (17), (18): Xaa is A or G
  MOD_RES (19), (20), (21), (22): Xaa is A or G or is absent

SEQ ID NO: 56259 - protein, 36 aa, Artificial Sequence; identical to SEQ ID NO: 4320
  GFR-binding peptide
  MOD_RES (2), (36): Xaa is C or S
  MOD_RES (14), (15), (16), (17), (18): Xaa is A or G
  MOD_RES (19), (20), (21), (22): Xaa is A or G or is absent

SEQ ID NO: 56260 - protein, 39 aa, Artificial Sequence
  GFR-binding peptide
  MOD_RES (1), (3), (37), (38): Xaa is C or S
  MOD_RES (15), (16), (17), (18), (19): Xaa is A or G
  MOD_RES (20), (21), (22), (23): Xaa is A or G or is absent
XGXRDVVMGRYKKLXXXXXXXXXFYLMSIANMKTPTXXP

SEQ ID NO: 56261 - protein, 37 aa, Artificial Sequence; identical to SEQ ID NO: 2399
  GFR-binding peptide
  MOD_RES (1), (3), (37): Xaa is C or S
  MOD_RES (15), (16), (17), (18), (19): Xaa is A or G
  MOD_RES (20), (21), (22), (23): Xaa is A or G or is absent

SEQ ID NO: 56262 - protein, 36 aa, Artificial Sequence; identical to SEQ ID NO: 12744
  GFR-binding peptide
  MOD_RES (33), (34): Xaa is C or S
  MOD_RES (11), (12), (13), (14), (15): Xaa is A or G
  MOD_RES (16), (17), (18), (19): Xaa is A or G or is absent

SEQ ID NO: 56263 - protein, 38 aa, Artificial Sequence; identical to SEQ ID NO: 4324
  GFR-binding peptide
  MOD_RES (2), (34), (35): Xaa is C or S

SEQ ID NO: 56264 - protein, 30 aa, Artificial Sequence; identical to SEQ ID NO: 12746
  GFR-binding peptide

SEQ ID NO: 56265 - protein, 40 aa, Artificial Sequence
  GFR-binding peptide
  MOD_RES (2), (34), (35): Xaa is C or S
GXSRVVMNRYKKLIVNSSDDFYLVSIANLKTPAXXPKPVH

SEQ ID NO: 56266 - protein, 35 aa, Artificial Sequence; identical to SEQ ID NO: 26447
  GFR-binding peptide
  MOD_RES (2), (2): Xaa is C or S
  MOD_RES (14), (15), (16), (17), (18): Xaa is A or G
  MOD_RES (19), (20), (21), (22): Xaa is A or G or is absent

SEQ ID NO: 56267 - protein, 38 aa, Artificial Sequence; identical to SEQ ID NO: 4329
  GFR-binding peptide
  MOD_RES (1), (33), (34): Xaa is C or S

SEQ ID NO: 56268 - protein, 38 aa, Artificial Sequence; identical to SEQ ID NO: 2402
  GFR-binding peptide
  MOD_RES (2), (4), (36), (37): Xaa is C or S

SEQ ID NO: 56269 - protein, 35 aa, Artificial Sequence; identical to SEQ ID NO: 4331
  GFR-binding peptide
  MOD_RES (34), (35): Xaa is C or S
  MOD_RES (12), (13), (14), (15), (16): Xaa is A or G
  MOD_RES (17), (18), (19), (20): Xaa is A or G or is absent

SEQ ID NO: 56270 - protein, 35 aa, Artificial Sequence; identical to SEQ ID NO: 3404
  GFR-binding peptide
  MOD_RES (2), (34), (35): Xaa is C or S

SEQ ID NO: 56271 - protein, 39 aa, Artificial Sequence; identical to SEQ ID NO: 5323
  GFR-binding peptide
  MOD_RES (2), (4), (39): Xaa is C or S
  MOD_RES (17), (18), (19), (20), (21): Xaa is A or G
  MOD_RES (22), (23), (24), (25): Xaa is A or G or is absent

SEQ ID NO: 56272 - protein, 39 aa, Artificial Sequence; identical to SEQ ID NO: 2406
  GFR-binding peptide
  MOD_RES (2), (4), (38), (39): Xaa is C or S
  MOD_RES (16), (17), (18), (19), (20): Xaa is A or G
  MOD_RES (21), (22), (23), (24): Xaa is A or G or is absent

SEQ ID NO: 56273 - protein, 33 aa, Artificial Sequence; identical to SEQ ID NO: 5330
  GFR-binding peptide
  MOD_RES (1), (33): Xaa is C or S

SEQ ID NO: 56274 - protein, 34 aa, Artificial Sequence; identical to SEQ ID NO: 24385
  GFR-binding peptide
  MOD_RES (1), (1): Xaa is C or S
  MOD_RES (13), (14), (15), (16), (17): Xaa is A or G
  MOD_RES (18), (19), (20), (21): Xaa is A or G or is absent

SEQ ID NO: 56275 - protein, 38 aa, Artificial Sequence
  GFR-binding peptide
  MOD_RES (2), (36), (37): Xaa is C or S
  MOD_RES (14), (15), (16), (17), (18): Xaa is A or G
  MOD_RES (19), (20), (21), (22): Xaa is A or G or is absent
GXRDVVMGRYKKLXXXXXXXXXFYLMSIANMKTPTXXP

SEQ ID NO: 56276 - protein, 34 aa, Artificial Sequence
  GFR-binding peptide
  MOD_RES (31), (32): Xaa is C or S
DVVMGRYKKLIIQQKDNFYLMSIANMKTPTXXPG

SEQ ID NO: 56277 - protein, 40 aa, Artificial Sequence; identical to SEQ ID NO: 9911
  GFR-binding peptide
  MOD_RES (2), (34), (35): Xaa is C or S

SEQ ID NO: 56278 - protein, 36 aa, Artificial Sequence; identical to SEQ ID NO: 5334
  GFR-binding peptide
  MOD_RES (34), (35): Xaa is C or S
  MOD_RES (12), (13), (14), (15), (16): Xaa is A or G
  MOD_RES (17), (18), (19), (20): Xaa is A or G or is absent

SEQ ID NO: 56279 - protein, 37 aa, Artificial Sequence; identical to SEQ ID NO: 23395
  GFR-binding peptide
  MOD_RES (2), (34), (35): Xaa is C or S

SEQ ID NO: 56280 - protein, 38 aa, Artificial Sequence; identical to SEQ ID NO: 23400
  GFR-binding peptide
  MOD_RES (2), (34), (35): Xaa is C or S

SEQ ID NO: 56281 - protein, 33 aa, Artificial Sequence; identical to SEQ ID NO: 4350
  GFR-binding peptide
  MOD_RES (33), (33): Xaa is C or S
  MOD_RES (11), (12), (13), (14), (15): Xaa is A or G
  MOD_RES (16), (17), (18), (19): Xaa is A or G or is absent

SEQ ID NO: 56282 - protein, 39 aa, Artificial Sequence; identical to SEQ ID NO: 3413
  GFR-binding peptide
  MOD_RES (33), (34): Xaa is C or S
  MOD_RES (11), (12), (13), (14), (15): Xaa is A or G
  MOD_RES (16), (17), (18), (19): Xaa is A or G or is absent

SEQ ID NO: 56283 - protein, 40 aa, Artificial Sequence; identical to SEQ ID NO: 3417
  GFR-binding peptide
  MOD_RES (2), (34), (35): Xaa is C or S

SEQ ID NO: 56284 - protein, 37 aa, Artificial Sequence
  GFR-binding peptide
  MOD_RES (1), (34), (35): Xaa is C or S
  MOD_RES (12), (13), (14), (15), (16): Xaa is A or G
  MOD_RES (17), (18), (19), (20): Xaa is A or G or is absent
XEEVIMRYKKLXXXXXXXXXFYLMSIANTKVPAXXTS

SEQ ID NO: 56285 - protein, 36 aa, Artificial Sequence; identical to SEQ ID NO: 4355
  GFR-binding peptide
  MOD_RES (31), (32): Xaa is C or S

SEQ ID NO: 56286 - protein, 35 aa, Artificial Sequence; identical to SEQ ID NO: 2426
  GFR-binding peptide
  MOD_RES (2), (2): Xaa is C or S
  MOD_RES (14), (15), (16), (17), (18): Xaa is A or G
  MOD_RES (19), (20), (21), (22): Xaa is A or G or is absent

SEQ ID NO: 56287 - protein, 37 aa, Artificial Sequence; identical to SEQ ID NO: 4357
  GFR-binding peptide
  MOD_RES (2), (4): Xaa is C or S
  MOD_RES (16), (17), (18), (19), (20): Xaa is A or G
  MOD_RES (21), (22), (23), (24): Xaa is A or G or is absent

SEQ ID NO: 56288 - protein, 38 aa, Artificial Sequence
  GFR-binding peptide
  MOD_RES (2), (34), (35): Xaa is C or S
GXRDVVMGRYKKLIIQQKDNFYLMSIANMKTPTXXPGA

SEQ ID NO: 56289 - protein, 38 aa, Artificial Sequence; identical to SEQ ID NO: 5338
  GFR-binding peptide
  MOD_RES (1), (3), (35), (36): Xaa is C or S

SEQ ID NO: 56290 - protein, 42 aa, Artificial Sequence; identical to SEQ ID NO: 4359
  GFR-binding peptide
  MOD_RES (2), (4), (38), (39): Xaa is C or S
  MOD_RES (16), (17), (18), (19), (20): Xaa is A or G
  MOD_RES (21), (22), (23), (24): Xaa is A or G or is absent

SEQ ID NO: 56291 - protein, 42 aa, Artificial Sequence; identical to SEQ ID NO: 4360
  GFR-binding peptide
  MOD_RES (2), (36), (37): Xaa is C or S
  MOD_RES (14), (15), (16), (17), (18): Xaa is A or G
  MOD_RES (19), (20), (21), (22): Xaa is A or G or is absent

SEQ ID NO: 56292 - protein, 42 aa, Artificial Sequence; identical to SEQ ID NO: 12770
  GFR-binding peptide
  MOD_RES (2), (4), (38), (39): Xaa is C or S
  MOD_RES (16), (17), (18), (19), (20): Xaa is A or G
  MOD_RES (21), (22), (23), (24): Xaa is A or G or is absent

SEQ ID NO: 56293 - protein, 36 aa, Artificial Sequence
  GFR-binding peptide
  MOD_RES (31), (32): Xaa is C or S
EEVIMRYKKLLLVRGNDFYLMSIANTKVPAXXTSPV

SEQ ID NO: 56294 - protein, 36 aa, Artificial Sequence; identical to SEQ ID NO: 25421
  GFR-binding peptide
  MOD_RES (2), (34), (35): Xaa is C or S

SEQ ID NO: 56295 - protein, 41 aa, Artificial Sequence
  GFR-binding peptide
  MOD_RES (1), (3), (36), (37): Xaa is C or S
  MOD_RES (14), (15), (16), (17), (18): Xaa is A or G
  MOD_RES (19), (20), (21), (22): Xaa is A or G or is absent
XGXEEVIMRYKKLXXXXXXXXXFYLMSIANTKVPAXXTSPV

SEQ ID NO: 56296 - protein, 34 aa, Artificial Sequence; identical to SEQ ID NO: 4364
  GFR-binding peptide
  MOD_RES (1), (1): Xaa is C or S
  MOD_RES (13), (14), (15), (16), (17): Xaa is A or G
  MOD_RES (18), (19), (20), (21): Xaa is A or G or is absent

SEQ ID NO: 56297 - protein, 31 aa, Artificial Sequence; identical to SEQ ID NO: 12773
  GFR-binding peptide

SEQ ID NO: 56298 - protein, 33 aa, Artificial Sequence; identical to SEQ ID NO: 23412
  GFR-binding peptide
  MOD_RES (31), (32): Xaa is C or S

SEQ ID NO: 56299 - protein, 33 aa, Artificial Sequence; identical to SEQ ID NO: 5346
  GFR-binding peptide
  MOD_RES (32), (33): Xaa is C or S

SEQ ID NO: 56300 - protein, 38 aa, Artificial Sequence; identical to SEQ ID NO: 25425
  GFR-binding peptide
  MOD_RES (1), (3), (35), (36): Xaa is C or S

SEQ ID NO: 56301 - protein, 44 aa, Artificial Sequence; identical to SEQ ID NO: 5349
  GFR-binding peptide
  MOD_RES (2), (4), (38), (39): Xaa is C or S
  MOD_RES (16), (17), (18), (19), (20): Xaa is A or G
  MOD_RES (21), (22), (23), (24): Xaa is A or G or is absent

SEQ ID NO: 56302 - protein, 42 aa, Artificial Sequence; identical to SEQ ID NO: 2435
  GFR-binding peptide
  MOD_RES (1), (3), (37), (38): Xaa is C or S
  MOD_RES (15), (16), (17), (18), (19): Xaa is A or G
  MOD_RES (20), (21), (22), (23): Xaa is A or G or is absent

SEQ ID NO: 56303 - protein, 37 aa, Artificial Sequence
  GFR-binding peptide
  MOD_RES (1), (35), (36): Xaa is C or S
  MOD_RES (13), (14), (15), (16), (17): Xaa is A or G
  MOD_RES (18), (19), (20), (21): Xaa is A or G or is absent
XRDVVMGRYKKLXXXXXXXXXFYLMSIANMKTPTXXP

SEQ ID NO: 56304 - protein, 36 aa, Artificial Sequence
  GFR-binding peptide
  MOD_RES (2), (4): Xaa is C or S
  MOD_RES (15), (16), (17), (18), (19): Xaa is A or G
  MOD_RES (20), (21), (22), (23): Xaa is A or G or is absent
LXGXEEVIMRYKKLXXXXXXXXXFYLMSIANTKVPA

SEQ ID NO: 56305 - protein, 43 aa, Artificial Sequence; identical to SEQ ID NO: 3427
  GFR-binding peptide
  MOD_RES (2), (4), (38), (39): Xaa is C or S
  MOD_RES (16), (17), (18), (19), (20): Xaa is A or G
  MOD_RES (21), (22), (23), (24): Xaa is A or G or is absent

SEQ ID NO: 56306 - protein, 40 aa, Artificial Sequence; identical to SEQ ID NO: 5355
  GFR-binding peptide
  MOD_RES (1), (35), (36): Xaa is C or S
  MOD_RES (13), (14), (15), (16), (17): Xaa is A or G
  MOD_RES (18), (19), (20), (21): Xaa is A or G or is absent

SEQ ID NO: 56307 - protein, 33 aa, Artificial Sequence; identical to SEQ ID NO: 2439
  GFR-binding peptide
  MOD_RES (31), (32): Xaa is C or S

SEQ ID NO: 56308 - protein, 41 aa, Artificial Sequence; identical to SEQ ID NO: 5357
  GFR-binding peptide
  MOD_RES (1), (3), (35), (36): Xaa is C or S

SEQ ID NO: 56309 - protein, 42 aa, Artificial Sequence; identical to SEQ ID NO: 25430
  GFR-binding peptide
  MOD_RES (2), (4), (36), (37): Xaa is C or S

SEQ ID NO: 56310 - protein, 35 aa, Artificial Sequence; identical to SEQ ID NO: 4369
  GFR-binding peptide
  MOD_RES (33), (34): Xaa is C or S
  MOD_RES (11), (12), (13), (14), (15): Xaa is A or G
  MOD_RES (16), (17), (18), (19): Xaa is A or G or is absent

SEQ ID NO: 56311 - protein, 38 aa, Artificial Sequence; identical to SEQ ID NO: 9939
  GFR-binding peptide
  MOD_RES (33), (34): Xaa is C or S
  MOD_RES (11), (12), (13), (14), (15): Xaa is A or G
  MOD_RES (16), (17), (18), (19): Xaa is A or G or is absent

SEQ ID NO: 56312 - protein, 36 aa, Artificial Sequence
  GFR-binding peptide
  MOD_RES (31), (32): Xaa is C or S
DVVMGRYKKLIIQQKDNFYLMSIANMKTPTXXPGAS

SEQ ID NO: 56313 - protein, 40 aa, Artificial Sequence; identical to SEQ ID NO: 24427
  GFR-binding peptide
  MOD_RES (1), (3), (35), (36): Xaa is C or S

SEQ ID NO: 56314 - protein, 44 aa, Artificial Sequence; identical to SEQ ID NO: 10856
  GFR-binding peptide
  MOD_RES (2), (4), (38), (39): Xaa is C or S
  MOD_RES (16), (17), (18), (19), (20): Xaa is A or G
  MOD_RES (21), (22), (23), (24): Xaa is A or G or is absent

SEQ ID NO: 56315 - protein, 35 aa, Artificial Sequence; identical to SEQ ID NO: 11800
  GFR-binding peptide
  MOD_RES (2), (4): Xaa is C or S

SEQ ID NO: 56316 - protein, 40 aa, Artificial Sequence; identical to SEQ ID NO: 3440
  GFR-binding peptide
  MOD_RES (2), (36), (37): Xaa is C or S
  MOD_RES (14), (15), (16), (17), (18): Xaa is A or G
  MOD_RES (19), (20), (21), (22): Xaa is A or G or is absent

SEQ ID NO: 56317 - protein, 35 aa, Artificial Sequence; identical to SEQ ID NO: 4372
  GFR-binding peptide
  MOD_RES (35), (35): Xaa is C or S
  MOD_RES (13), (14), (15), (16), (17): Xaa is A or G
  MOD_RES (18), (19), (20), (21): Xaa is A or G or is absent

SEQ ID NO: 56318 - protein, 41 aa, Artificial Sequence; identical to SEQ ID NO: 5365
  GFR-binding peptide
  MOD_RES (1), (35), (36): Xaa is C or S
  MOD_RES (13), (14), (15), (16), (17): Xaa is A or G
  MOD_RES (18), (19), (20), (21): Xaa is A or G or is absent

SEQ ID NO: 56319 - protein, 31 aa, Artificial Sequence; identical to SEQ ID NO: 2448
  GFR-binding peptide
  MOD_RES (31), (31): Xaa is C or S

SEQ ID NO: 56320 - protein, 39 aa, Artificial Sequence; identical to SEQ ID NO: 12801
  GFR-binding peptide
  MOD_RES (34), (35): Xaa is C or S
  MOD_RES (12), (13), (14), (15), (16): Xaa is A or G
  MOD_RES (17), (18), (19), (20): Xaa is A or G or is absent

SEQ ID NO: 56321 - protein, 34 aa, Artificial Sequence; identical to SEQ ID NO: 9950
  GFR-binding peptide
  MOD_RES (32), (33): Xaa is C or S

SEQ ID NO: 56322 - protein, 40 aa, Artificial Sequence; identical to SEQ ID NO: 4376
  GFR-binding peptide
  MOD_RES (2), (34), (35): Xaa is C or S

SEQ ID NO: 56323 - protein, 34 aa, Artificial Sequence; identical to SEQ ID NO: 3444
  GFR-binding peptide
  MOD_RES (1), (33): Xaa is C or S

SEQ ID NO: 56324 - protein, 38 aa, Artificial Sequence; identical to SEQ ID NO: 11805
  GFR-binding peptide
  MOD_RES (34), (35): Xaa is C or S
  MOD_RES (12), (13), (14), (15), (16): Xaa is A or G
  MOD_RES (17), (18), (19), (20): Xaa is A or G or is absent

SEQ ID NO: 56325 - protein, 37 aa, Artificial Sequence; identical to SEQ ID NO: 26499
  GFR-binding peptide
  MOD_RES (2), (36), (37): Xaa is C or S
  MOD_RES (14), (15), (16), (17), (18): Xaa is A or G
  MOD_RES (19), (20), (21), (22): Xaa is A or G or is absent

SEQ ID NO: 56326 - protein, 41 aa, Artificial Sequence; identical to SEQ ID NO: 4378
  GFR-binding peptide
  MOD_RES (2), (4), (38): Xaa is C or S
  MOD_RES (16), (17), (18), (19), (20): Xaa is A or G
  MOD_RES (21), (22), (23), (24): Xaa is A or G or is absent

SEQ ID NO: 56327 - protein, 35 aa, Artificial Sequence; identical to SEQ ID NO: 5369
  GFR-binding peptide
  MOD_RES (33), (34): Xaa is C or S

SEQ ID NO: 56328 - protein, 37 aa, Artificial Sequence; identical to SEQ ID NO: 4380
  GFR-binding peptide
  MOD_RES (2), (34), (35): Xaa is C or S

SEQ ID NO: 56329 - protein, 33 aa, Artificial Sequence; identical to SEQ ID NO: 5370
  GFR-binding peptide
  MOD_RES (1), (33): Xaa is C or S

SEQ ID NO: 56330 - protein, 40 aa, Artificial Sequence; identical to SEQ ID NO: 5371
  GFR-binding peptide
  MOD_RES (34), (35): Xaa is C or S
  MOD_RES (12), (13), (14), (15), (16): Xaa is A or G
  MOD_RES (17), (18), (19), (20): Xaa is A or G or is absent

SEQ ID NO: 56331 - protein, 44 aa, Artificial Sequence
  GFR-binding peptide
  MOD_RES (2), (4), (38), (39): Xaa is C or S
  MOD_RES (16), (17), (18), (19), (20): Xaa is A or G
  MOD_RES (21), (22), (23), (24): Xaa is A or G or is absent
SXGXRDVVMGRYKKLXXXXXXXXXFYLMSIANMKTPTXXPGASG

SEQ ID NO: 56332 - protein, 40 aa, Artificial Sequence; identical to SEQ ID NO: 2454
  GFR-binding peptide
  MOD_RES (2), (4), (36), (37): Xaa is C or S

SEQ ID NO: 56333 - protein, 30 aa, Artificial Sequence; identical to SEQ ID NO: 25446
  GFR-binding peptide

SEQ ID NO: 56334 - protein, 42 aa, Artificial Sequence; identical to SEQ ID NO: 4388
  GFR-binding peptide
  MOD_RES (2), (4), (38), (39): Xaa is C or S
  MOD_RES (16), (17), (18), (19), (20): Xaa is A or G
  MOD_RES (21), (22), (23), (24): Xaa is A or G or is absent

SEQ ID NO: 56335 - protein, 36 aa, Artificial Sequence; identical to SEQ ID NO: 11819
  GFR-binding peptide
  MOD_RES (34), (35): Xaa is C or S
  MOD_RES (12), (13), (14), (15), (16): Xaa is A or G
  MOD_RES (17), (18), (19), (20): Xaa is A or G or is absent

SEQ ID NO: 56336 - protein, 33 aa, Artificial Sequence; identical to SEQ ID NO: 2458
  GFR-binding peptide
  MOD_RES (33), (33): Xaa is C or S
  MOD_RES (11), (12), (13), (14), (15): Xaa is A or G
  MOD_RES (16), (17), (18), (19): Xaa is A or G or is absent

SEQ ID NO: 56337 - protein, 35 aa, Artificial Sequence; identical to SEQ ID NO: 26511
  GFR-binding peptide
  MOD_RES (31), (32): Xaa is C or S

SEQ ID NO: 56338 - protein, 41 aa, Artificial Sequence; identical to SEQ ID NO: 23439
  GFR-binding peptide
  MOD_RES (1), (3), (37), (38): Xaa is C or S
  MOD_RES (15), (16), (17), (18), (19): Xaa is A or G
  MOD_RES (20), (21), (22), (23): Xaa is A or G or is absent

SEQ ID NO: 56339 - protein, 32 aa, Artificial Sequence; identical to SEQ ID NO: 24438
  GFR-binding peptide
  MOD_RES (1), (1): Xaa is C or S

SEQ ID NO: 56340 - protein, 40 aa, Artificial Sequence; identical to SEQ ID NO: 24440
  GFR-binding peptide
  MOD_RES (2), (36), (37): Xaa is C or S
  MOD_RES (14), (15), (16), (17), (18): Xaa is A or G
  MOD_RES (19), (20), (21), (22): Xaa is A or G or is absent

SEQ ID NO: 56341 - protein, 39 aa, Artificial Sequence; identical to SEQ ID NO: 3462
  GFR-binding peptide
  MOD_RES (1), (33), (34): Xaa is C or S

SEQ ID NO: 56342 - protein, 42 aa, Artificial Sequence; identical to SEQ ID NO: 23444
  GFR-binding peptide
  MOD_RES (1), (3), (37), (38): Xaa is C or S
  MOD_RES (15), (16), (17), (18), (19): Xaa is A or G
  MOD_RES (20), (21), (22), (23): Xaa is A or G or is absent

SEQ ID NO: 56343 - protein, 37 aa, Artificial Sequence; identical to SEQ ID NO: 23446
  GFR-binding peptide
  MOD_RES (1), (3), (37): Xaa is C or S
  MOD_RES (15), (16), (17), (18), (19): Xaa is A or G
  MOD_RES (20), (21), (22), (23): Xaa is A or G or is absent

SEQ ID NO: 56344 - protein, 37 aa, Artificial Sequence; identical to SEQ ID NO: 5383
  GFR-binding peptide
  MOD_RES (2), (34), (35): Xaa is C or S

SEQ ID NO: 56345 - protein, 34 aa, Artificial Sequence; identical to SEQ ID NO: 4402
  GFR-binding peptide
  MOD_RES (1), (3): Xaa is C or S

SEQ ID NO: 56346 - protein, 40 aa, Artificial Sequence; identical to SEQ ID NO: 23447
  GFR-binding peptide
  MOD_RES (1), (3), (37), (38): Xaa is C or S
  MOD_RES (15), (16), (17), (18), (19): Xaa is A or G
  MOD_RES (20), (21), (22), (23): Xaa is A or G or is absent

SEQ ID NO: 56347 - protein, 34 aa, Artificial Sequence; identical to SEQ ID NO: 3465
  GFR-binding peptide
  MOD_RES (31), (32): Xaa is C or S

SEQ ID NO: 56348 - protein, 35 aa, Artificial Sequence; identical to SEQ ID NO: 4403
  GFR-binding peptide
  MOD_RES (2), (34), (35): Xaa is C or S

SEQ ID NO: 56349 - protein, 32 aa, Artificial Sequence; identical to SEQ ID NO: 2470
  GFR-binding peptide
  MOD_RES (11), (12), (13), (14), (15): Xaa is A or G
  MOD_RES (16), (17), (18), (19): Xaa is A or G or is absent

SEQ ID NO: 56350 - protein, 43 aa, Artificial Sequence; identical to SEQ ID NO: 2473
  GFR-binding peptide
  MOD_RES (2), (4), (39), (40): Xaa is C or S
  MOD_RES (17), (18), (19), (20), (21): Xaa is A or G
  MOD_RES (22), (23), (24), (25): Xaa is A or G or is absent

SEQ ID NO: 56351 - protein, 39 aa, Artificial Sequence; identical to SEQ ID NO: 3468
  GFR-binding peptide
  MOD_RES (2), (34), (35): Xaa is C or S

SEQ ID NO: 56352 - protein, 43 aa, Artificial Sequence; identical to SEQ ID NO: 5393
  GFR-binding peptide
  MOD_RES (2), (4), (38), (39): Xaa is C or S
  MOD_RES (16), (17), (18), (19), (20): Xaa is A or G
  MOD_RES (21), (22), (23), (24): Xaa is A or G or is absent

SEQ ID NO: 56353 - protein, 42 aa, Artificial Sequence; identical to SEQ ID NO: 5396
  GFR-binding peptide
  MOD_RES (2), (36), (37): Xaa is C or S
  MOD_RES (14), (15), (16), (17), (18): Xaa is A or G
  MOD_RES (19), (20), (21), (22): Xaa is A or G or is absent

SEQ ID NO: 56354 - protein, 39 aa, Artificial Sequence; identical to SEQ ID NO: 2476
  GFR-binding peptide
  MOD_RES (2), (36), (37): Xaa is C or S
  MOD_RES (14), (15), (16), (17), (18): Xaa is A or G
  MOD_RES (19), (20), (21), (22): Xaa is A or G or is absent

SEQ ID NO: 56355 - protein, 42 aa, Artificial Sequence; identical to SEQ ID NO: 12830
  GFR-binding peptide
  MOD_RES (2), (4), (36), (37): Xaa is C or S

SEQ ID NO: 56356 - protein, 38 aa, Artificial Sequence; identical to SEQ ID NO: 2477
  GFR-binding peptide
  MOD_RES (2), (4): Xaa is C or S
  MOD_RES (17), (18), (19), (20), (21): Xaa is A or G
  MOD_RES (22), (23), (24), (25): Xaa is A or G or is absent

SEQ ID NO: 56357 - protein, 42 aa, Artificial Sequence; identical to SEQ ID NO: 10888
  GFR-binding peptide
  MOD_RES (1), (3), (37), (38): Xaa is C or S
  MOD_RES (15), (16), (17), (18), (19): Xaa is A or G
  MOD_RES (20), (21), (22), (23): Xaa is A or G or is absent

SEQ ID NO: 56358 - protein, 40 aa, Artificial Sequence; identical to SEQ ID NO: 4406
  GFR-binding peptide
  MOD_RES (2), (4), (36), (37): Xaa is C or S

SEQ ID NO: 56359 - protein, 43 aa, Artificial Sequence; identical to SEQ ID NO: 4407
  GFR-binding peptide
  MOD_RES (2), (37), (38): Xaa is C or S
  MOD_RES (15), (16), (17), (18), (19): Xaa is A or G
  MOD_RES (20), (21), (22), (23): Xaa is A or G or is absent

SEQ ID NO: 56360 - protein, 34 aa, Artificial Sequence; identical to SEQ ID NO: 24452
  GFR-binding peptide
  MOD_RES (32), (33): Xaa is C or S

SEQ ID NO: 56361 - protein, 33 aa, Artificial Sequence; identical to SEQ ID NO: 3472
  GFR-binding peptide
  MOD_RES (2), (2): Xaa is C or S

SEQ ID NO: 56362 - protein, 35 aa, Artificial Sequence
  GFR-binding peptide
  MOD_RES (2), (4): Xaa is C or S
SXGXRDVVMGRYKKLIIQQKDNFYLMSIANMKTPT

SEQ ID NO: 56363 - protein, 34 aa, Artificial Sequence; identical to SEQ ID NO: 4409
  GFR-binding peptide
  MOD_RES (2), (34): Xaa is C or S

SEQ ID NO: 56364 - protein, 33 aa, Artificial Sequence; identical to SEQ ID NO: 26525
  GFR-binding peptide
  MOD_RES (2), (2): Xaa is C or S

SEQ ID NO: 56365 - protein, 35 aa, Artificial Sequence; identical to SEQ ID NO: 2482
  GFR-binding peptide
  MOD_RES (1), (1): Xaa is C or S
  MOD_RES (14), (15), (16), (17), (18): Xaa is A or G
  MOD_RES (19), (20), (21), (22): Xaa is A or G or is absent

SEQ ID NO: 56366 - protein, 37 aa, Artificial Sequence; identical to SEQ ID NO: 3475
  GFR-binding peptide
  MOD_RES (34), (35): Xaa is C or S
  MOD_RES (12), (13), (14), (15), (16): Xaa is A or G
  MOD_RES (17), (18), (19), (20): Xaa is A or G or is absent

SEQ ID NO: 56367 - protein, 33 aa, Artificial Sequence; identical to SEQ ID NO: 24456
  GFR-binding peptide
  MOD_RES (12), (13), (14), (15), (16): Xaa is A or G
  MOD_RES (17), (18), (19), (20): Xaa is A or G or is absent

SEQ ID NO: 56368 - protein, 41 aa, Artificial Sequence; identical to SEQ ID NO: 2483
  GFR-binding peptide
  MOD_RES (2), (4), (36), (37): Xaa is C or S

SEQ ID NO: 56369 - protein, 42 aa, Artificial Sequence; identical to SEQ ID NO: 3476
  GFR-binding peptide
  MOD_RES (1), (3), (37), (38): Xaa is C or S
  MOD_RES (15), (16), (17), (18), (19): Xaa is A or G
  MOD_RES (20), (21), (22), (23): Xaa is A or G or is absent

SEQ ID NO: 56370 - protein, 35 aa, Artificial Sequence
  GFR-binding peptide
  MOD_RES (32), (33): Xaa is C or S
RDVVMGRYKKLIIQQKDNFYLMSIANMKTPTXXPG

SEQ ID NO: 56371 - protein, 41 aa, Artificial Sequence; identical to SEQ ID NO: 25475
  GFR-binding peptide
  MOD_RES (2), (4), (36), (37): Xaa is C or S

SEQ ID NO: 56372 - protein, 33 aa, Artificial Sequence; identical to SEQ ID NO: 2486
  GFR-binding peptide
  MOD_RES (1), (33): Xaa is C or S

SEQ ID NO: 56373 - protein, 35 aa, Artificial Sequence; identical to SEQ ID NO: 4415
  GFR-binding peptide
  MOD_RES (31), (32): Xaa is C or S

SEQ ID NO: 56374 - protein, 42 aa, Artificial Sequence; identical to SEQ ID NO: 10896
  GFR-binding peptide
  MOD_RES (2), (36), (37): Xaa is C or S
  MOD_RES (14), (15), (16), (17), (18): Xaa is A or G
  MOD_RES (19), (20), (21), (22): Xaa is A or G or is absent

SEQ ID NO: 56375 - protein, 37 aa, Artificial Sequence; identical to SEQ ID NO: 2488
  GFR-binding peptide
  MOD_RES (34), (34): Xaa is C or S
  MOD_RES (12), (13), (14), (15), (16): Xaa is A or G
  MOD_RES (17), (18), (19), (20): Xaa is A or G or is absent

SEQ ID NO: 56376 - protein, 35 aa, Artificial Sequence; identical to SEQ ID NO: 3481
  GFR-binding peptide
  MOD_RES (31), (32): Xaa is C or S

SEQ ID NO: 56377 - protein, 34 aa, Artificial Sequence
  GFR-binding peptide
  MOD_RES (31), (32): Xaa is C or S
EEVIMRYKKLLLVRGNDFYLMSIANTKVPAXXTS

SEQ ID NO: 56378 - protein, 39 aa, Artificial Sequence; identical to SEQ ID NO: 2489
  GFR-binding peptide
  MOD_RES (34), (35): Xaa is C or S
  MOD_RES (12), (13), (14), (15), (16): Xaa is A or G
  MOD_RES (17), (18), (19), (20): Xaa is A or G or is absent

SEQ ID NO: 56379 - protein, 35 aa, Artificial Sequence
  GFR-binding peptide
  MOD_RES (2), (35): Xaa is C or S
  MOD_RES (13), (14), (15), (16), (17): Xaa is A or G
  MOD_RES (18), (19), (20), (21): Xaa is A or G or is absent
GXEEVIMRYKKLXXXXXXXXXFYLMSIANTKVPAX

SEQ ID NO: 56380 - protein, 41 aa, Artificial Sequence
  GFR-binding peptide
  MOD_RES (2), (35), (36): Xaa is C or S
  MOD_RES (13), (14), (15), (16), (17): Xaa is A or G
  MOD_RES (18), (19), (20), (21): Xaa is A or G or is absent
GXEEVIMRYKKLXXXXXXXXXFYLMSIANTKVPAXXTSPVR

SEQ ID NO: 56381 - protein, 34 aa, Artificial Sequence; identical to SEQ ID NO: 3483
  GFR-binding peptide
  MOD_RES (31), (31): Xaa is C or S

SEQ ID NO: 56382 - protein, 37 aa, Artificial Sequence; identical to SEQ ID NO: 3486
  GFR-binding peptide
  MOD_RES (1), (33): Xaa is C or S

SEQ ID NO: 56383 - protein, 35 aa, Artificial Sequence; identical to SEQ ID NO: 3487
  GFR-binding peptide
  MOD_RES (34), (35): Xaa is C or S
  MOD_RES (12), (13), (14), (15), (16): Xaa is A or G
  MOD_RES (17), (18), (19), (20): Xaa is A or G or is absent

SEQ ID NO: 56384 - protein, 30 aa, Artificial Sequence
  GFR-binding peptide
EEVIMRYKKLLLVRGNDFYLMSIANTKVPA

SEQ ID NO: 56385 - protein, 32 aa, Artificial Sequence; identical to SEQ ID NO: 10902
  GFR-binding peptide
  MOD_RES (1), (1): Xaa is C or S

SEQ ID NO: 56386 - protein, 36 aa, Artificial Sequence; identical to SEQ ID NO: 4425
  GFR-binding peptide
  MOD_RES (2), (4): Xaa is C or S

SEQ ID NO: 56387 - protein, 35 aa, Artificial Sequence; identical to SEQ ID NO: 5413
  GFR-binding peptide
  MOD_RES (1), (35): Xaa is C or S
  MOD_RES (13), (14), (15), (16), (17): Xaa is A or G
  MOD_RES (18), (19), (20), (21): Xaa is A or G or is absent

SEQ ID NO: 56388 - protein, 39 aa, Artificial Sequence; identical to SEQ ID NO: 3490
  GFR-binding peptide
  MOD_RES (1), (3), (35), (36): Xaa is C or S

SEQ ID NO: 56389 - protein, 41 aa, Artificial Sequence; identical to SEQ ID NO: 10000
  GFR-binding peptide
  MOD_RES (2), (4), (36), (37): Xaa is C or S

SEQ ID NO: 56390 - protein, 40 aa, Artificial Sequence
  GFR-binding peptide
  MOD_RES (2), (35), (36): Xaa is C or S
  MOD_RES (13), (14), (15), (16), (17): Xaa is A or G
  MOD_RES (18), (19), (20), (21): Xaa is A or G or is absent
GXEEVIMRYKKLXXXXXXXXXFYLMSIANTKVPAXXTSPV

SEQ ID NO: 56391 - protein, 36 aa, Artificial Sequence; identical to SEQ ID NO: 4430
  GFR-binding peptide
  MOD_RES (33), (34): Xaa is C or S
  MOD_RES (11), (12), (13), (14), (15): Xaa is A or G
  MOD_RES (16), (17), (18), (19): Xaa is A or G or is absent

SEQ ID NO: 56392 - protein, 37 aa, Artificial Sequence; identical to SEQ ID NO: 23481
  GFR-binding peptide
  MOD_RES (2), (36), (37): Xaa is C or S
  MOD_RES (14), (15), (16), (17), (18): Xaa is A or G
  MOD_RES (19), (20), (21), (22): Xaa is A or G or is absent

SEQ ID NO: 56393 - protein, 39 aa, Artificial Sequence
  GFR-binding peptide
  MOD_RES (1), (35), (36): Xaa is C or S
  MOD_RES (13), (14), (15), (16), (17): Xaa is A or G
  MOD_RES (18), (19), (20), (21): Xaa is A or G or is absent
XRDVVMGRYKKLXXXXXXXXXFYLMSIANMKTPTXXPGA

SEQ ID NO: 56394 - protein, 42 aa, Artificial Sequence; identical to SEQ ID NO: 26544
  GFR-binding peptide
  MOD_RES (2), (36), (37): Xaa is C or S
  MOD_RES (14), (15), (16), (17), (18): Xaa is A or G
  MOD_RES (19), (20), (21), (22): Xaa is A or G or is absent

SEQ ID NO: 56395 - protein, 35 aa, Artificial Sequence; identical to SEQ ID NO: 24481
  GFR-binding peptide
  MOD_RES (1), (33), (34): Xaa is C or S

SEQ ID NO: 56396 - protein, 31 aa, Artificial Sequence; identical to SEQ ID NO: 5422
  GFR-binding peptide
  MOD_RES (31), (31): Xaa is C or S

SEQ ID NO: 56397 - protein, 37 aa, Artificial Sequence
  GFR-binding peptide
  MOD_RES (1), (33), (34): Xaa is C or S
XRDVVMGRYKKLIIQQKDNFYLMSIANMKTPTXXPGA

SEQ ID NO: 56398 - protein, 38 aa, Artificial Sequence; identical to SEQ ID NO: 4437
  GFR-binding peptide
  MOD_RES (1), (3), (36), (37): Xaa is C or S

SEQ ID NO: 56399 - protein, 34 aa, Artificial Sequence
  GFR-binding peptide
  MOD_RES (32), (33): Xaa is C or S
RDVVMGRYKKLIIQQKDNFYLMSIANMKTPTXXP

SEQ ID NO: 56400 - protein, 42 aa, Artificial Sequence; identical to SEQ ID NO: 25516
  GFR-binding peptide
  MOD_RES (2), (36), (37): Xaa is C or S
  MOD_RES (14), (15), (16), (17), (18): Xaa is A or G
  MOD_RES (19), (20), (21), (22): Xaa is A or G or is absent

SEQ ID NO: 56401 - protein, 40 aa, Artificial Sequence; identical to SEQ ID NO: 3503
  GFR-binding peptide
  MOD_RES (1), (3), (35), (36): Xaa is C or S

SEQ ID NO: 56402 - protein, 43 aa, Artificial Sequence; identical to SEQ ID NO: 26554
  GFR-binding peptide
  MOD_RES (1), (3), (37), (38): Xaa is C or S
  MOD_RES (15), (16), (17), (18), (19): Xaa is A or G
  MOD_RES (20), (21), (22), (23): Xaa is A or G or is absent

SEQ ID NO: 56403 - protein, 41 aa, Artificial Sequence; identical to SEQ ID NO: 25518
  GFR-binding peptide
  MOD_RES (2), (4), (38), (39): Xaa is C or S
  MOD_RES (16), (17), (18), (19), (20): Xaa is A or G
  MOD_RES (21), (22), (23), (24): Xaa is A or G or is absent

SEQ ID NO: 56404 - protein, 39 aa, Artificial Sequence; identical to SEQ ID NO: 2514
  GFR-binding peptide
  MOD_RES (35), (36): Xaa is C or S
  MOD_RES (13), (14), (15), (16), (17): Xaa is A or G
  MOD_RES (18), (19), (20), (21): Xaa is A or G or is absent

SEQ ID NO: 56405 - protein, 35 aa, Artificial Sequence; identical to SEQ ID NO: 10917
  GFR-binding peptide
  MOD_RES (31), (32): Xaa is C or S

SEQ ID NO: 56406 - protein, 44 aa, Artificial Sequence; identical to SEQ ID NO: 25519
  GFR-binding peptide
  MOD_RES (2), (4), (38), (39): Xaa is C or S
  MOD_RES (16), (17), (18), (19), (20): Xaa is A or G
  MOD_RES (21), (22), (23), (24): Xaa is A or G or is absent

SEQ ID NO: 56407 - protein, 34 aa, Artificial Sequence
  GFR-binding peptide
  MOD_RES (33), (34): Xaa is C or S
  MOD_RES (11), (12), (13), (14), (15): Xaa is A or G
  MOD_RES (16), (17), (18), (19): Xaa is A or G or is absent
DVVMGRYKKLXXXXXXXXXFYLMSIANMKTPTXX

SEQ ID NO: 56408 - protein, 38 aa, Artificial Sequence
  GFR-binding peptide
  MOD_RES (34), (35): Xaa is C or S
  MOD_RES (12), (13), (14), (15), (16): Xaa is A or G
  MOD_RES (17), (18), (19), (20): Xaa is A or G or is absent
RDVVMGRYKKLXXXXXXXXXFYLMSIANMKTPTXXPGA

SEQ ID NO: 56409 - protein, 39 aa, Artificial Sequence; identical to SEQ ID NO: 3508
  GFR-binding peptide
  MOD_RES (1), (35): Xaa is C or S
  MOD_RES (13), (14), (15), (16), (17): Xaa is A or G
  MOD_RES (18), (19), (20), (21): Xaa is A or G or is absent

SEQ ID NO: 56410 - protein, 38 aa, Artificial Sequence; identical to SEQ ID NO: 4446
  GFR-binding peptide
  MOD_RES (34), (35): Xaa is C or S
  MOD_RES (12), (13), (14), (15), (16): Xaa is A or G
  MOD_RES (17), (18), (19), (20): Xaa is A or G or is absent

SEQ ID NO: 56411 - protein, 38 aa, Artificial Sequence
  GFR-binding peptide
  MOD_RES (1), (3), (35), (36): Xaa is C or S
XGXRDVVMGRYKKLIIQQKDNFYLMSIANMKTPTXXPG

SEQ ID NO: 56412 - protein, 35 aa, Artificial Sequence
  GFR-binding peptide
  MOD_RES (33), (34): Xaa is C or S
  MOD_RES (11), (12), (13), (14), (15): Xaa is A or G
  MOD_RES (16), (17), (18), (19): Xaa is A or G or is absent
EEVIMRYKKLXXXXXXXXXFYLMSIANTKVPAXXT

SEQ ID NO: 56413 - protein, 40 aa, Artificial Sequence; identical to SEQ ID NO: 5439
  GFR-binding peptide
  MOD_RES (1), (3), (37): Xaa is C or S
  MOD_RES (15), (16), (17), (18), (19): Xaa is A or G
  MOD_RES (20), (21), (22), (23): Xaa is A or G or is absent

SEQ ID NO: 56414 - protein, 35 aa, Artificial Sequence; identical to SEQ ID NO: 4451
  GFR-binding peptide
  MOD_RES (33), (34): Xaa is C or S
  MOD_RES (11), (12), (13), (14), (15): Xaa is A or G
  MOD_RES (16), (17), (18), (19): Xaa is A or G or is absent

SEQ ID NO: 56415 - protein, 36 aa, Artificial Sequence; identical to SEQ ID NO: 24497
  GFR-binding peptide
  MOD_RES (1), (3): Xaa is C or S
  MOD_RES (15), (16), (17), (18), (19): Xaa is A or G
  MOD_RES (20), (21), (22), (23): Xaa is A or G or is absent

SEQ ID NO: 56416 - protein, 39 aa, Artificial Sequence; identical to SEQ ID NO: 24498
  GFR-binding peptide
  MOD_RES (1), (35), (36): Xaa is C or S
  MOD_RES (13), (14), (15), (16), (17): Xaa is A or G
  MOD_RES (18), (19), (20), (21): Xaa is A or G or is absent

SEQ ID NO: 56417 - protein, 34 aa, Artificial Sequence; identical to SEQ ID NO: 3514
  GFR-binding peptide
  MOD_RES (34), (34): Xaa is C or S
  MOD_RES (12), (13), (14), (15), (16): Xaa is A or G
  MOD_RES (17), (18), (19), (20): Xaa is A or G or is absent

SEQ ID NO: 56418 - protein, 43 aa, Artificial Sequence
  GFR-binding peptide
  MOD_RES (1), (3), (37), (38): Xaa is C or S
  MOD_RES (15), (16), (17), (18), (19): Xaa is A or G
  MOD_RES (20), (21), (22), (23): Xaa is A or G or is absent
XGXSRVVMNRYKKLXXXXXXXXXFYLVSIANLKTPAXXPKPVH

SEQ ID NO: 56419 - protein, 37 aa, Artificial Sequence; identical to SEQ ID NO: 3518
  GFR-binding peptide
  MOD_RES (1), (35): Xaa is C or S
  MOD_RES (13), (14), (15), (16), (17): Xaa is A or G
  MOD_RES (18), (19), (20), (21): Xaa is A or G or is absent

SEQ ID NO: 56420 - protein, 34 aa, Artificial Sequence; identical to SEQ ID NO: 10019
  GFR-binding peptide
  MOD_RES (1), (3): Xaa is C or S

SEQ ID NO: 56421 - protein, 32 aa, Artificial Sequence; identical to SEQ ID NO: 4453
  GFR-binding peptide
  MOD_RES (11), (12), (13), (14), (15): Xaa is A or G
  MOD_RES (16), (17), (18), (19): Xaa is A or G or is absent

SEQ ID NO: 56422 - protein, 32 aa, Artificial Sequence; identical to SEQ ID NO: 3520
  GFR-binding peptide
  MOD_RES (1), (1): Xaa is C or S

SEQ ID NO: 56423 - protein, 42 aa, Artificial Sequence; identical to SEQ ID NO: 3521
  GFR-binding peptide
  MOD_RES (2), (4), (36): Xaa is C or S

SEQ ID NO: 56424 - protein, 40 aa, Artificial Sequence; identical to SEQ ID NO: 3523
  GFR-binding peptide
  MOD_RES (2), (34), (35): Xaa is C or S

SEQ ID NO: 56425 - protein, 33 aa, Artificial Sequence; identical to SEQ ID NO: 12868
  GFR-binding peptide
  MOD_RES (12), (13), (14), (15), (16): Xaa is A or G
  MOD_RES (17), (18), (19), (20): Xaa is A or G or is absent

SEQ ID NO: 56426 - protein, 33 aa, Artificial Sequence; identical to SEQ ID NO: 5451
  GFR-binding peptide
  MOD_RES (12), (13), (14), (15), (16): Xaa is A or G
  MOD_RES (17), (18), (19), (20): Xaa is A or G or is absent

SEQ ID NO: 56427 - protein, 35 aa, Artificial Sequence; identical to SEQ ID NO: 10025
  GFR-binding peptide
  MOD_RES (1), (33), (34): Xaa is C or S

SEQ ID NO: 56428 - protein, 38 aa, Artificial Sequence; identical to SEQ ID NO: 24513
  GFR-binding peptide
  MOD_RES (2), (4), (36), (37): Xaa is C or S

SEQ ID NO: 56429 - protein, 36 aa, Artificial Sequence; identical to SEQ ID NO: 5454
  GFR-binding peptide
  MOD_RES (32), (33): Xaa is C or S

SEQ ID NO: 56430 - protein, 35 aa, Artificial Sequence; identical to SEQ ID NO: 24517
  GFR-binding peptide
  MOD_RES (1), (33), (34): Xaa is C or S

SEQ ID NO: 56431 - protein, 34 aa, Artificial Sequence
  GFR-binding peptide
  MOD_RES (1), (33), (34): Xaa is C or S
XRDVVMGRYKKLIIQQKDNFYLMSIANMKTPTXX

SEQ ID NO: 56432 - protein, 32 aa, Artificial Sequence
  GFR-binding peptide
  MOD_RES (11), (12), (13), (14), (15): Xaa is A or G
  MOD_RES (16), (17), (18), (19): Xaa is A or G or is absent
EEVIMRYKKLXXXXXXXXXFYLMSIANTKVPA

SEQ ID NO: 56433 - protein, 38 aa, Artificial Sequence; identical to SEQ ID NO: 25549
  GFR-binding peptide
  MOD_RES (32), (33): Xaa is C or S

SEQ ID NO: 56434 - protein, 38 aa, Artificial Sequence; identical to SEQ ID NO: 3532
  GFR-binding peptide
  MOD_RES (34), (35): Xaa is C or S
  MOD_RES (12), (13), (14), (15), (16): Xaa is A or G
  MOD_RES (17), (18), (19), (20): Xaa is A or G or is absent

SEQ ID NO: 56435 - protein, 33 aa, Artificial Sequence; identical to SEQ ID NO: 2537
  GFR-binding peptide
  MOD_RES (2), (2): Xaa is C or S

SEQ ID NO: 56436 - protein, 34 aa, Artificial Sequence; identical to SEQ ID NO: 24523
  GFR-binding peptide
  MOD_RES (31), (32): Xaa is C or S

SEQ ID NO: 56437 - protein, 38 aa, Artificial Sequence
  GFR-binding peptide
  MOD_RES (2), (4), (35), (36): Xaa is C or S
LXGXEEVIMRYKKLLLVRGNDFYLMSIANTKVPAXXTS

SEQ ID NO: 56438 - protein, 36 aa, Artificial Sequence; identical to SEQ ID NO: 2538
  GFR-binding peptide
  MOD_RES (1), (3), (35), (36): Xaa is C or S

SEQ ID NO: 56439 - protein, 38 aa, Artificial Sequence; identical to SEQ ID NO: 24526
  GFR-binding peptide
  MOD_RES (2), (34), (35): Xaa is C or S

SEQ ID NO: 56440 - protein, 34 aa, Artificial Sequence
  GFR-binding peptide
  MOD_RES (1), (1): Xaa is C or S
  MOD_RES (13), (14), (15), (16), (17): Xaa is A or G
  MOD_RES (18), (19), (20), (21): Xaa is A or G or is absent
XRDVVMGRYKKLXXXXXXXXXFYLMSIANMKTPT

SEQ ID NO: 56441 - protein, 32 aa, Artificial Sequence; identical to SEQ ID NO: 10038
  GFR-binding peptide
  MOD_RES (31), (32): Xaa is C or S

SEQ ID NO: 56442 - protein, 39 aa, Artificial Sequence
  GFR-binding peptide
  MOD_RES (2), (4), (35), (36): Xaa is C or S
LXGXEEVIMRYKKLLLVRGNDFYLMSIANTKVPAXXTSP

SEQ ID NO: 56443 - protein, 31 aa, Artificial Sequence
  GFR-binding peptide
RDVVMGRYKKLIIQQKDNFYLMSIANMKTPT

SEQ ID NO: 56444 - protein, 41 aa, Artificial Sequence; identical to SEQ ID NO: 2543
  GFR-binding peptide
  MOD_RES (1), (3), (37), (38): Xaa is C or S
  MOD_RES (15), (16), (17), (18), (19): Xaa is A or G
  MOD_RES (20), (21), (22), (23): Xaa is A or G or is absent

SEQ ID NO: 56445 - protein, 41 aa, Artificial Sequence; identical to SEQ ID NO: 2544
  GFR-binding peptide
  MOD_RES (2), (4), (36), (37): Xaa is C or S

SEQ ID NO: 56446 - protein, 40 aa, Artificial Sequence; identical to SEQ ID NO: 12885
  GFR-binding peptide
  MOD_RES (34), (35): Xaa is C or S
  MOD_RES (12), (13), (14), (15), (16): Xaa is A or G
  MOD_RES (17), (18), (19), (20): Xaa is A or G or is absent

SEQ ID NO: 56447 - protein, 39 aa, Artificial Sequence; identical to SEQ ID NO: 5471
  GFR-binding peptide
  MOD_RES (1), (36), (37): Xaa is C or S
  MOD_RES (14), (15), (16), (17), (18): Xaa is A or G
  MOD_RES (19), (20), (21), (22): Xaa is A or G or is absent

SEQ ID NO: 56448 - protein, 38 aa, Artificial Sequence; identical to SEQ ID NO: 24531
  GFR-binding peptide
  MOD_RES (1), (3), (37), (38): Xaa is C or S
  MOD_RES (15), (16), (17), (18), (19): Xaa is A or G
  MOD_RES (20), (21), (22), (23): Xaa is A or G or is absent

SEQ ID NO: 56449 - protein, 34 aa, Artificial Sequence; identical to SEQ ID NO: 26585
  GFR-binding peptide
  MOD_RES (33), (34): Xaa is C or S
  MOD_RES (11), (12), (13), (14), (15): Xaa is A or G
  MOD_RES (16), (17), (18), (19): Xaa is A or G or is absent

SEQ ID NO: 56450 - protein, 43 aa, Artificial Sequence; identical to SEQ ID NO: 10947
  GFR-binding peptide
  MOD_RES (1), (3), (37), (38): Xaa is C or S
  MOD_RES (15), (16), (17), (18), (19): Xaa is A or G
  MOD_RES (20), (21), (22), (23): Xaa is A or G or is absent

SEQ ID NO: 56451 - protein, 40 aa, Artificial Sequence; identical to SEQ ID NO: 4474
  GFR-binding peptide
  MOD_RES (2), (4), (39), (40): Xaa is C or S
  MOD_RES (17), (18), (19), (20), (21): Xaa is A or G
  MOD_RES (22), (23), (24), (25): Xaa is A or G or is absent

SEQ ID NO: 56452 - protein, 32 aa, Artificial Sequence; identical to SEQ ID NO: 25563
  GFR-binding peptide
  MOD_RES (31), (32): Xaa is C or S

SEQ ID NO: 56453 - protein, 44 aa, Artificial Sequence; identical to SEQ ID NO: 5477
  GFR-binding peptide
  MOD_RES (2), (4), (38), (39): Xaa is C or S
  MOD_RES (16), (17), (18), (19), (20): Xaa is A or G
  MOD_RES (21), (22), (23), (24): Xaa is A or G or is absent

SEQ ID NO: 56454 - protein, 41 aa, Artificial Sequence; identical to SEQ ID NO: 2551
  GFR-binding peptide
  MOD_RES (2), (4), (38), (39): Xaa is C or S
  MOD_RES (16), (17), (18), (19), (20): Xaa is A or G
  MOD_RES (21), (22), (23), (24): Xaa is A or G or is absent

SEQ ID NO: 56455 - protein, 33 aa, Artificial Sequence
  GFR-binding peptide
  MOD_RES (1), (3): Xaa is C or S
XGXEEVIMRYKKLLLVRGNDFYLMSIANTKVPA

SEQ ID NO: 56456 - protein, 33 aa, Artificial Sequence
  GFR-binding peptide
  MOD_RES (31), (32): Xaa is C or S
DVVMGRYKKLIIQQKDNFYLMSIANMKTPTXXP

SEQ ID NO: 56457 - protein, 38 aa, Artificial Sequence; identical to SEQ ID NO: 3543
  GFR-binding peptide
  MOD_RES (1), (3), (35), (36): Xaa is C or S

SEQ ID NO: 56458 - protein, 36 aa, Artificial Sequence
  GFR-binding peptide
  MOD_RES (33), (34): Xaa is C or S
  MOD_RES (11), (12), (13), (14), (15): Xaa is A or G
  MOD_RES (16), (17), (18), (19): Xaa is A or G or is absent
DVVMGRYKKLXXXXXXXXXFYLMSIANMKTPTXXPG

SEQ ID NO: 56459 - protein, 36 aa, Artificial Sequence; identical to SEQ ID NO: 2554
  GFR-binding peptide
  MOD_RES (32), (33): Xaa is C or S

SEQ ID NO: 56460 - protein, 38 aa, Artificial Sequence; identical to SEQ ID NO: 11913
  GFR-binding peptide
  MOD_RES (1), (3), (35), (36): Xaa is C or S

SEQ ID NO: 56461 - protein, 38 aa, Artificial Sequence
  GFR-binding peptide
  MOD_RES (2), (4), (37), (38): Xaa is C or S
  MOD_RES (15), (16), (17), (18), (19): Xaa is A or G
  MOD_RES (20), (21), (22), (23): Xaa is A or G or is absent
LXGXEEVIMRYKKLXXXXXXXXXFYLMSIANTKVPAXX

SEQ ID NO: 56462 - protein, 36 aa, Artificial Sequence; identical to SEQ ID NO: 11916
  GFR-binding peptide
  MOD_RES (2), (4), (36): Xaa is C or S

SEQ ID NO: 56463 - protein, 43 aa, Artificial Sequence; identical to SEQ ID NO: 5487
  GFR-binding peptide
  MOD_RES (2), (4), (38), (39): Xaa is C or S
  MOD_RES (16), (17), (18), (19), (20): Xaa is A or G
  MOD_RES (21), (22), (23), (24): Xaa is A or G or is absent

SEQ ID NO: 56464 - protein, 38 aa, Artificial Sequence; identical to SEQ ID NO: 26596
  GFR-binding peptide
  MOD_RES (1), (33), (34): Xaa is C or S

SEQ ID NO: 56465 - protein, 40 aa, Artificial Sequence; identical to SEQ ID NO: 2563
  GFR-binding peptide
  MOD_RES (1), (3), (35), (36): Xaa is C or S

SEQ ID NO: 56466 - protein, 36 aa, Artificial Sequence
  GFR-binding peptide
  MOD_RES (1), (33), (34): Xaa is C or S
XRDVVMGRYKKLIIQQKDNFYLMSIANMKTPTXXPG

SEQ ID NO: 56467 - protein, 40 aa, Artificial Sequence; identical to SEQ ID NO: 25580
  GFR-binding peptide
  MOD_RES (2), (36), (37): Xaa is C or S
  MOD_RES (14), (15), (16), (17), (18): Xaa is A or G
  MOD_RES (19), (20), (21), (22): Xaa is A or G or is absent

SEQ ID NO: 56468 - protein, 40 aa, Artificial Sequence; identical to SEQ ID NO: 3550
  GFR-binding peptide
  MOD_RES (2), (4), (38), (39): Xaa is C or S
  MOD_RES (16), (17), (18), (19), (20): Xaa is A or G
  MOD_RES (21), (22), (23), (24): Xaa is A or G or is absent

SEQ ID NO: 56469 - protein, 34 aa, Artificial Sequence; identical to SEQ ID NO: 26599
  GFR-binding peptide
  MOD_RES (1), (3): Xaa is C or S

SEQ ID NO: 56470 - protein, 35 aa, Artificial Sequence; identical to SEQ ID NO: 2569
  GFR-binding peptide
  MOD_RES (1), (33), (34): Xaa is C or S

SEQ ID NO: 56471 - protein, 37 aa, Artificial Sequence; identical to SEQ ID NO: 23565
  GFR-binding peptide
  MOD_RES (1), (3), (37): Xaa is C or S
  MOD_RES (15), (16), (17), (18), (19): Xaa is A or G
  MOD_RES (20), (21), (22), (23): Xaa is A or G or is absent

SEQ ID NO: 56472 - protein, 39 aa, Artificial Sequence; identical to SEQ ID NO: 24554
  GFR-binding peptide
  MOD_RES (2), (36), (37): Xaa is C or S
  MOD_RES (14), (15), (16), (17), (18): Xaa is A or G
  MOD_RES (19), (20), (21), (22): Xaa is A or G or is absent

SEQ ID NO: 56473 - protein, 39 aa, Artificial Sequence; identical to SEQ ID NO: 5501
  GFR-binding peptide
  MOD_RES (1), (35), (36): Xaa is C or S
  MOD_RES (13), (14), (15), (16), (17): Xaa is A or G
  MOD_RES (18), (19), (20), (21): Xaa is A or G or is absent

SEQ ID NO: 56474 - protein, 38 aa, Artificial Sequence; identical to SEQ ID NO: 25584
  GFR-binding peptide
  MOD_RES (2), (36), (37): Xaa is C or S
  MOD_RES (14), (15), (16), (17), (18): Xaa is A or G
  MOD_RES (19), (20), (21), (22): Xaa is A or G or is absent

SEQ ID NO: 56475 - protein, 35 aa, Artificial Sequence; identical to SEQ ID NO: 2572
  GFR-binding peptide
  MOD_RES (31), (31): Xaa is C or S

SEQ ID NO: 56476 - protein, 37 aa, Artificial Sequence; identical to SEQ ID NO: 3552
  GFR-binding peptide
  MOD_RES (2), (4), (37): Xaa is C or S

SEQ ID NO: 56477 - protein, 40 aa, Artificial Sequence; identical to SEQ ID NO: 5502
  GFR-binding peptide
  MOD_RES (1), (3), (38), (39): Xaa is C or S
  MOD_RES (16), (17), (18), (19), (20): Xaa is A or G
  MOD_RES (21), (22), (23), (24): Xaa is A or G or is absent

SEQ ID NO: 56478 - protein, 35 aa, Artificial Sequence; identical to SEQ ID NO: 5503
  GFR-binding peptide
  MOD_RES (2), (2): Xaa is C or S
  MOD_RES (14), (15), (16), (17), (18): Xaa is A or G
  MOD_RES (19), (20), (21), (22): Xaa is A or G or is absent

SEQ ID NO: 56479 - protein, 37 aa, Artificial Sequence
  GFR-binding peptide
  MOD_RES (1), (3), (35), (36): Xaa is C or S
XGXRDVVMGRYKKLIIQQKDNFYLMSIANMKTPTXXP

SEQ ID NO: 56480 - protein, 37 aa, Artificial Sequence; identical to SEQ ID NO: 4499
  GFR-binding peptide
  MOD_RES (2), (34), (35): Xaa is C or S

SEQ ID NO: 56481 - protein, 37 aa, Artificial Sequence; identical to SEQ ID NO: 23574
  GFR-binding peptide
  MOD_RES (34), (35): Xaa is C or S
  MOD_RES (12), (13), (14), (15), (16): Xaa is A or G
  MOD_RES (17), (18), (19), (20): Xaa is A or G or is absent

SEQ ID NO: 56482 - protein, 35 aa, Artificial Sequence; identical to SEQ ID NO: 24568
  GFR-binding peptide
  MOD_RES (34), (35): Xaa is C or S
  MOD_RES (12), (13), (14), (15), (16): Xaa is A or G
  MOD_RES (17), (18), (19), (20): Xaa is A or G or is absent

SEQ ID NO: 56483 - protein, 35 aa, Artificial Sequence; identical to SEQ ID NO: 3562
  GFR-binding peptide
  MOD_RES (2), (4): Xaa is C or S

SEQ ID NO: 56484 - protein, 35 aa, Artificial Sequence; identical to SEQ ID NO: 23578
  GFR-binding peptide
  MOD_RES (1), (35): Xaa is C or S
  MOD_RES (13), (14), (15), (16), (17): Xaa is A or G
  MOD_RES (18), (19), (20), (21): Xaa is A or G or is absent

SEQ ID NO: 56485 - protein, 36 aa, Artificial Sequence; identical to SEQ ID NO: 26616
  GFR-binding peptide
  MOD_RES (1), (33), (34): Xaa is C or S

SEQ ID NO: 56486 - protein, 36 aa, Artificial Sequence; identical to SEQ ID NO: 2582
  GFR-binding peptide
  MOD_RES (1), (3): Xaa is C or S
  MOD_RES (15), (16), (17), (18), (19): Xaa is A or G
  MOD_RES (20), (21), (22), (23): Xaa is A or G or is absent

SEQ ID NO: 56487 - protein, 39 aa, Artificial Sequence; identical to SEQ ID NO: 23580
  GFR-binding peptide
  MOD_RES (1), (3), (37), (38): Xaa is C or S
  MOD_RES (15), (16), (17), (18), (19): Xaa is A or G
  MOD_RES (20), (21), (22), (23): Xaa is A or G or is absent

SEQ ID NO: 56488 - protein, 33 aa, Artificial Sequence; identical to SEQ ID NO: 10982
  GFR-binding peptide
  MOD_RES (32), (33): Xaa is C or S

SEQ ID NO: 56489 - protein, 42 aa, Artificial Sequence; identical to SEQ ID NO: 3565
  GFR-binding peptide
  MOD_RES (2), (4), (38): Xaa is C or S
  MOD_RES (16), (17), (18), (19), (20): Xaa is A or G
  MOD_RES (21), (22), (23), (24): Xaa is A or G or is absent

SEQ ID NO: 56490 - protein, 36 aa, Artificial Sequence
  GFR-binding peptide
  MOD_RES (1), (32), (33): Xaa is C or S
XEEVIMRYKKLLLVRGNDFYLMSIANTKVPAXXTSP

SEQ ID NO: 56491 - protein, 38 aa, Artificial Sequence
  GFR-binding peptide
  MOD_RES (33), (34): Xaa is C or S
  MOD_RES (11), (12), (13), (14), (15): Xaa is A or G
  MOD_RES (16), (17), (18), (19): Xaa is A or G or is absent
DVVMGRYKKLXXXXXXXXXFYLMSIANMKTPTXXPGAS

SEQ ID NO: 56492 - protein, 35 aa, Artificial Sequence; identical to SEQ ID NO: 5518
  GFR-binding peptide
  MOD_RES (32), (32): Xaa is C or S

SEQ ID NO: 56493 - protein, 32 aa, Artificial Sequence
  GFR-binding peptide
  MOD_RES (31), (32): Xaa is C or S
DVVMGRYKKLIIQQKDNFYLMSIANMKTPTXX

SEQ ID NO: 56494 - protein, 37 aa, Artificial Sequence; identical to SEQ ID NO: 11946
  GFR-binding peptide
  MOD_RES (2), (4), (36), (37): Xaa is C or S

SEQ ID NO: 56495 - protein, 35 aa, Artificial Sequence; identical to SEQ ID NO: 5519
  GFR-binding peptide
  MOD_RES (31), (32): Xaa is C or S

SEQ ID NO: 56496 - protein, 39 aa, Artificial Sequence
  GFR-binding peptide
  MOD_RES (1), (3), (35), (36): Xaa is C or S
XGXRDVVMGRYKKLIIQQKDNFYLMSIANMKTPTXXPGA

SEQ ID NO: 56497 - protein, 37 aa, Artificial Sequence; identical to SEQ ID NO: 5520
  GFR-binding peptide
  MOD_RES (1), (35), (36): Xaa is C or S
  MOD_RES (13), (14), (15), (16), (17): Xaa is A or G
  MOD_RES (18), (19), (20), (21): Xaa is A or G or is absent

SEQ ID NO: 56498 - protein, 39 aa, Artificial Sequence; identical to SEQ ID NO: 5522
  GFR-binding peptide
  MOD_RES (1), (3), (36), (37): Xaa is C or S

SEQ ID NO: 56499 - protein, 36 aa, Artificial Sequence; identical to SEQ ID NO: 2596
  GFR-binding peptide
  MOD_RES (1), (35): Xaa is C or S
  MOD_RES (13), (14), (15), (16), (17): Xaa is A or G
  MOD_RES (18), (19), (20), (21): Xaa is A or G or is absent

SEQ ID NO: 56500 - protein, 41 aa, Artificial Sequence; identical to SEQ ID NO: 2597
  GFR-binding peptide
  MOD_RES (2), (36), (37): Xaa is C or S
  MOD_RES (14), (15), (16), (17), (18): Xaa is A or G
  MOD_RES (19), (20), (21), (22): Xaa is A or G or is absent

SEQ ID NO: 56501 - protein, 40 aa, Artificial Sequence; identical to SEQ ID NO: 24582
  GFR-binding peptide
  MOD_RES (2), (34), (35): Xaa is C or S

SEQ ID NO: 56502 - protein, 35 aa, Artificial Sequence; identical to SEQ ID NO: 4513
  GFR-binding peptide
  MOD_RES (34), (35): Xaa is C or S
  MOD_RES (12), (13), (14), (15), (16): Xaa is A or G
  MOD_RES (17), (18), (19), (20): Xaa is A or G or is absent

SEQ ID NO: 56503 - protein, 39 aa, Artificial Sequence; identical to SEQ ID NO: 4514
  GFR-binding peptide
  MOD_RES (2), (36), (37): Xaa is C or S
  MOD_RES (14), (15), (16), (17), (18): Xaa is A or G
  MOD_RES (19), (20), (21), (22): Xaa is A or G or is absent

SEQ ID NO: 56504 - protein, 40 aa, Artificial Sequence; identical to SEQ ID NO: 3576
  GFR-binding peptide
  MOD_RES (2), (36), (37): Xaa is C or S
  MOD_RES (14), (15), (16), (17), (18): Xaa is A or G
  MOD_RES (19), (20), (21), (22): Xaa is A or G or is absent

SEQ ID NO: 56505 - protein, 37 aa, Artificial Sequence
  GFR-binding peptide
  MOD_RES (31), (32): Xaa is C or S
EEVIMRYKKLLLVRGNDFYLMSIANTKVPAXXTSPVR

SEQ ID NO: 56506 - protein, 38 aa, Artificial Sequence; identical to SEQ ID NO: 12943
  GFR-binding peptide
  MOD_RES (2), (34), (35): Xaa is C or S

SEQ ID NO: 56507 - protein, 37 aa, Artificial Sequence; identical to SEQ ID NO: 3582
  GFR-binding peptide
  MOD_RES (34), (35): Xaa is C or S
  MOD_RES (12), (13), (14), (15), (16): Xaa is A or G
  MOD_RES (17), (18), (19), (20): Xaa is A or G or is absent

SEQ ID NO: 56508 - protein, 32 aa, Artificial Sequence
  GFR-binding peptide
  MOD_RES (1), (1): Xaa is C or S
XRDVVMGRYKKLIIQQKDNFYLMSIANMKTPT

SEQ ID NO: 56509 - protein, 39 aa, Artificial Sequence; identical to SEQ ID NO: 26642
  GFR-binding peptide
  MOD_RES (33), (34): Xaa is C or S
  MOD_RES (11), (12), (13), (14), (15): Xaa is A or G
  MOD_RES (16), (17), (18), (19): Xaa is A or G or is absent

SEQ ID NO: 56510 - protein, 41 aa, Artificial Sequence; identical to SEQ ID NO: 3593
  GFR-binding peptide
  MOD_RES (1), (3), (36), (37): Xaa is C or S

SEQ ID NO: 56511 - protein, 32 aa, Artificial Sequence; identical to SEQ ID NO: 2604
  GFR-binding peptide
  MOD_RES (11), (12), (13), (14), (15): Xaa is A or G
  MOD_RES (16), (17), (18), (19): Xaa is A or G or is absent

SEQ ID NO: 56512 - protein, 37 aa, Artificial Sequence; identical to SEQ ID NO: 2605
  GFR-binding peptide
  MOD_RES (1), (3), (35), (36): Xaa is C or S

SEQ ID NO: 56513 - protein, 38 aa, Artificial Sequence; identical to SEQ ID NO: 5532
  GFR-binding peptide
  MOD_RES (33), (34): Xaa is C or S
  MOD_RES (11), (12), (13), (14), (15): Xaa is A or G
  MOD_RES (16), (17), (18), (19): Xaa is A or G or is absent

SEQ ID NO: 56514 - protein, 33 aa, Artificial Sequence; identical to SEQ ID NO: 23612
  GFR-binding peptide
  MOD_RES (33), (33): Xaa is C or S
  MOD_RES (11), (12), (13), (14), (15): Xaa is A or G
  MOD_RES (16), (17), (18), (19): Xaa is A or G or is absent

SEQ ID NO: 56515 - protein, 39 aa, Artificial Sequence; identical to SEQ ID NO: 2606
  GFR-binding peptide
  MOD_RES (1), (3), (37): Xaa is C or S
  MOD_RES (15), (16), (17), (18), (19): Xaa is A or G
  MOD_RES (20), (21), (22), (23): Xaa is A or G or is absent

SEQ ID NO: 56516 - protein, 41 aa, Artificial Sequence
  GFR-binding peptide
  MOD_RES (2), (4), (37), (38): Xaa is C or S
  MOD_RES (15), (16), (17), (18), (19): Xaa is A or G
  MOD_RES (20), (21), (22), (23): Xaa is A or G or is absent
LXGXEEVIMRYKKLXXXXXXXXXFYLMSIANTKVPAXXTSP

SEQ ID NO: 56517 - protein, 36 aa, Artificial Sequence; identical to SEQ ID NO: 24607
  GFR-binding peptide
  MOD_RES (32), (33): Xaa is C or S

SEQ ID NO: 56518 - protein, 32 aa, Artificial Sequence; identical to SEQ ID NO: 2610
  GFR-binding peptide
  MOD_RES (11), (12), (13), (14), (15): Xaa is A or G
  MOD_RES (16), (17), (18), (19): Xaa is A or G or is absent

SEQ ID NO: 56519 - protein, 36 aa, Artificial Sequence; identical to SEQ ID NO: 4534
  GFR-binding peptide
  MOD_RES (32), (33): Xaa is C or S

SEQ ID NO: 56520 - protein, 35 aa, Artificial Sequence; identical to SEQ ID NO: 5540
  GFR-binding peptide
  MOD_RES (2), (2): Xaa is C or S
  MOD_RES (14), (15), (16), (17), (18): Xaa is A or G
  MOD_RES (19), (20), (21), (22): Xaa is A or G or is absent

SEQ ID NO: 56521 - protein, 34 aa, Artificial Sequence; identical to SEQ ID NO: 24613
  GFR-binding peptide
  MOD_RES (1), (1): Xaa is C or S
  MOD_RES (13), (14), (15), (16), (17): Xaa is A or G
  MOD_RES (18), (19), (20), (21): Xaa is A or G or is absent

SEQ ID NO: 56522 - protein, 41 aa, Artificial Sequence
  GFR-binding peptide
  MOD_RES (2), (4), (35), (36): Xaa is C or S
LXGXEEVIMRYKKLLLVRGNDFYLMSIANTKVPAXXTSPVR

SEQ ID NO: 56523 - protein, 34 aa, Artificial Sequence; identical to SEQ ID NO: 4540
  GFR-binding peptide
  MOD_RES (2), (34): Xaa is C or S

SEQ ID NO: 56524 - protein, 36 aa, Artificial Sequence
  GFR-binding peptide
  MOD_RES (1), (34), (35): Xaa is C or S
  MOD_RES (12), (13), (14), (15), (16): Xaa is A or G
  MOD_RES (17), (18), (19), (20): Xaa is A or G or is absent
XEEVIMRYKKLXXXXXXXXXFYLMSIANTKVPAXXT

SEQ ID NO: 56525 - protein, 37 aa, Artificial Sequence; identical to SEQ ID NO: 25637
  GFR-binding peptide
  MOD_RES (2), (4), (36), (37): Xaa is C or S

SEQ ID NO: 56526 - protein, 40 aa, Artificial Sequence; identical to SEQ ID NO: 5544
  GFR-binding peptide
  MOD_RES (1), (3), (37), (38): Xaa is C or S
  MOD_RES (15), (16), (17), (18), (19): Xaa is A or G
  MOD_RES (20), (21), (22), (23): Xaa is A or G or is absent

SEQ ID NO: 56527 - protein, 34 aa, Artificial Sequence; identical to SEQ ID NO: 24615
  GFR-binding peptide
  MOD_RES (34), (34): Xaa is C or S
  MOD_RES (12), (13), (14), (15), (16): Xaa is A or G
  MOD_RES (17), (18), (19), (20): Xaa is A or G or is absent

SEQ ID NO: 56528 - protein, 34 aa, Artificial Sequence; identical to SEQ ID NO: 2621
  GFR-binding peptide
  MOD_RES (31), (32): Xaa is C or S

SEQ ID NO: 56529 - protein, 38 aa, Artificial Sequence; identical to SEQ ID NO: 3607
  GFR-binding peptide
  MOD_RES (1), (34), (35): Xaa is C or S

SEQ ID NO: 56530 - protein, 41 aa, Artificial Sequence; identical to SEQ ID NO: 3608
  GFR-binding peptide
  MOD_RES (1), (3), (35), (36): Xaa is C or S

SEQ ID NO: 56531 - protein, 34 aa, Artificial Sequence; identical to SEQ ID NO: 4544
  GFR-binding peptide
  MOD_RES (32), (32): Xaa is C or S

SEQ ID NO: 56532 - protein, 37 aa, Artificial Sequence; identical to SEQ ID NO: 23627
  GFR-binding peptide
  MOD_RES (1), (35), (36): Xaa is C or S
  MOD_RES (13), (14), (15), (16), (17): Xaa is A or G
  MOD_RES (18), (19), (20), (21): Xaa is A or G or is absent

SEQ ID NO: 56533 - protein, 39 aa, Artificial Sequence; identical to SEQ ID NO: 25644
  GFR-binding peptide
  MOD_RES (1), (3), (35), (36): Xaa is C or S

SEQ ID NO: 56534 - protein, 31 aa, Artificial Sequence; identical to SEQ ID NO: 2628
  GFR-binding peptide
  MOD_RES (31), (31): Xaa is C or S

SEQ ID NO: 56535 - protein, 31 aa, Artificial Sequence; identical to SEQ ID NO: 3611
  GFR-binding peptide

SEQ ID NO: 56536 - protein, 34 aa, Artificial Sequence
  GFR-binding peptide
  MOD_RES (1), (3), (34): Xaa is C or S
XGXEEVIMRYKKLLLVRGNDFYLMSIANTKVPAX

SEQ ID NO: 56537 - protein, 36 aa, Artificial Sequence; identical to SEQ ID NO: 26665
  GFR-binding peptide
  MOD_RES (32), (33): Xaa is C or S

SEQ ID NO: 56538 - protein, 37 aa, Artificial Sequence; identical to SEQ ID NO: 26666
  GFR-binding peptide
  MOD_RES (2), (4): Xaa is C or S
  MOD_RES (16), (17), (18), (19), (20): Xaa is A or G
  MOD_RES (21), (22), (23), (24): Xaa is A or G or is absent

SEQ ID NO: 56539 - protein, 40 aa, Artificial Sequence; identical to SEQ ID NO: 4553
  GFR-binding peptide
  MOD_RES (34), (35): Xaa is C or S
  MOD_RES (12), (13), (14), (15), (16): Xaa is A or G
  MOD_RES (17), (18), (19), (20): Xaa is A or G or is absent

SEQ ID NO: 56540 - protein, 36 aa, Artificial Sequence; identical to SEQ ID NO: 4555
  GFR-binding peptide
  MOD_RES (2), (34): Xaa is C or S

SEQ ID NO: 56541 - protein, 32 aa, Artificial Sequence; identical to SEQ ID NO: 26668
  GFR-binding peptide
  MOD_RES (32), (32): Xaa is C or S

SEQ ID NO: 56542 - protein, 36 aa, Artificial Sequence; identical to SEQ ID NO: 4556
  GFR-binding peptide
  MOD_RES (1), (33), (34): Xaa is C or S

SEQ ID NO: 56543 - protein, 35 aa, Artificial Sequence; identical to SEQ ID NO: 4558
  GFR-binding peptide
  MOD_RES (2), (2): Xaa is C or S
  MOD_RES (14), (15), (16), (17), (18): Xaa is A or G
  MOD_RES (19), (20), (21), (22): Xaa is A or G or is absent

SEQ ID NO: 56544 - protein, 37 aa, Artificial Sequence; identical to SEQ ID NO: 23636
  GFR-binding peptide
  MOD_RES (34), (35): Xaa is C or S
  MOD_RES (12), (13), (14), (15), (16): Xaa is A or G
  MOD_RES (17), (18), (19), (20): Xaa is A or G or is absent

SEQ ID NO: 56545 - protein, 38 aa, Artificial Sequence; identical to SEQ ID NO: 24625
  GFR-binding peptide
  MOD_RES (1), (3), (37), (38): Xaa is C or S
  MOD_RES (15), (16), (17), (18), (19): Xaa is A or G
  MOD_RES (20), (21), (22), (23): Xaa is A or G or is absent

SEQ ID NO: 56546 - protein, 37 aa, Artificial Sequence; identical to SEQ ID NO: 11036
  GFR-binding peptide
  MOD_RES (1), (35), (36): Xaa is C or S
  MOD_RES (13), (14), (15), (16), (17): Xaa is A or G
  MOD_RES (18), (19), (20), (21): Xaa is A or G or is absent

SEQ ID NO: 56547 - protein, 42 aa, Artificial Sequence; identical to SEQ ID NO: 5559
  GFR-binding peptide
  MOD_RES (2), (4), (39), (40): Xaa is C or S
  MOD_RES (17), (18), (19), (20), (21): Xaa is A or G
  MOD_RES (22), (23), (24), (25): Xaa is A or G or is absent

SEQ ID NO: 56548 - protein, 31 aa, Artificial Sequence; identical to SEQ ID NO: 23644
  GFR-binding peptide

SEQ ID NO: 56549 - protein, 36 aa, Artificial Sequence; identical to SEQ ID NO: 24629
  GFR-binding peptide
  MOD_RES (31), (32): Xaa is C or S

SEQ ID NO: 56550 - protein, 36 aa, Artificial Sequence; identical to SEQ ID NO: 5563
  GFR-binding peptide
  MOD_RES (2), (36): Xaa is C or S
  MOD_RES (14), (15), (16), (17), (18): Xaa is A or G
  MOD_RES (19), (20), (21), (22): Xaa is A or G or is absent

SEQ ID NO: 56551 - protein, 37 aa, Artificial Sequence
  GFR-binding peptide
  MOD_RES (2), (4), (35), (36): Xaa is C or S
LXGXEEVIMRYKKLLLVRGNDFYLMSIANTKVPAXXT

SEQ ID NO: 56552 - protein, 37 aa, Artificial Sequence; identical to SEQ ID NO: 2642
  GFR-binding peptide
  MOD_RES (31), (32): Xaa is C or S

SEQ ID NO: 56553 - protein, 35 aa, Artificial Sequence
  GFR-binding peptide
  MOD_RES (1), (3), (34), (35): Xaa is C or S
XGXEEVIMRYKKLLLVRGNDFYLMSIANTKVPAXX

SEQ ID NO: 56554 - protein, 35 aa, Artificial Sequence; identical to SEQ ID NO: 3622
  GFR-binding peptide
  MOD_RES (2), (35): Xaa is C or S

SEQ ID NO: 56555 - protein, 33 aa, Artificial Sequence; identical to SEQ ID NO: 3626
  GFR-binding peptide
  MOD_RES (1), (33): Xaa is C or S

SEQ ID NO: 56556 - protein, 39 aa, Artificial Sequence; identical to SEQ ID NO: 4570
  GFR-binding peptide
  MOD_RES (1), (3), (35), (36): Xaa is C or S

SEQ ID NO: 56557 - protein, 43 aa, Artificial Sequence; identical to SEQ ID NO: 3628
  GFR-binding peptide
  MOD_RES (1), (3), (37), (38): Xaa is C or S
  MOD_RES (15), (16), (17), (18), (19): Xaa is A or G
  MOD_RES (20), (21), (22), (23): Xaa is A or G or is absent

SEQ ID NO: 56558 - protein, 36 aa, Artificial Sequence
  GFR-binding peptide
  MOD_RES (2), (4), (35), (36): Xaa is C or S
LXGXEEVIMRYKKLLLVRGNDFYLMSIANTKVPAXX

SEQ ID NO: 56559 - protein, 40 aa, Artificial Sequence; identical to SEQ ID NO: 4576
  GFR-binding peptide
  MOD_RES (2), (4), (38): Xaa is C or S
  MOD_RES (16), (17), (18), (19), (20): Xaa is A or G
  MOD_RES (21), (22), (23), (24): Xaa is A or G or is absent

SEQ ID NO: 56560 - protein, 38 aa, Artificial Sequence; identical to SEQ ID NO: 3630
  GFR-binding peptide
  MOD_RES (33), (34): Xaa is C or S
  MOD_RES (11), (12), (13), (14), (15): Xaa is A or G
  MOD_RES (16), (17), (18), (19): Xaa is A or G or is absent

SEQ ID NO: 56561 - protein, 36 aa, Artificial Sequence; identical to SEQ ID NO: 10135
  GFR-binding peptide
  MOD_RES (2), (34), (35): Xaa is C or S

SEQ ID NO: 56562 - protein, 34 aa, Artificial Sequence; identical to SEQ ID NO: 3631
  GFR-binding peptide
  MOD_RES (1), (33), (34): Xaa is C or S

SEQ ID NO: 56563 - protein, 36 aa, Artificial Sequence
  GFR-binding peptide
  MOD_RES (1), (3): Xaa is C or S
  MOD_RES (15), (16), (17), (18), (19): Xaa is A or G
  MOD_RES (20), (21), (22), (23): Xaa is A or G or is absent
XGXRDVVMGRYKKLXXXXXXXXXFYLMSIANMKTPT

SEQ ID NO: 56564 - protein, 39 aa, Artificial Sequence; identical to SEQ ID NO: 3632
  GFR-binding peptide
  MOD_RES (33), (34): Xaa is C or S

SEQ ID NO: 56565 - protein, 33 aa, Artificial Sequence; identical to SEQ ID NO: 5571
  GFR-binding peptide
  MOD_RES (12), (13), (14), (15), (16): Xaa is A or G
  MOD_RES (17), (18), (19), (20): Xaa is A or G or is absent

SEQ ID NO: 56566 - protein, 38 aa, Artificial Sequence; identical to SEQ ID NO: 2658
  GFR-binding peptide
  MOD_RES (1), (3), (37), (38): Xaa is C or S
  MOD_RES (15), (16), (17), (18), (19): Xaa is A or G
  MOD_RES (20), (21), (22), (23): Xaa is A or G or is absent

SEQ ID NO: 56567 - protein, 36 aa, Artificial Sequence
  GFR-binding peptide
  MOD_RES (2), (35), (36): Xaa is C or S
  MOD_RES (13), (14), (15), (16), (17): Xaa is A or G
  MOD_RES (18), (19), (20), (21): Xaa is A or G or is absent
GXEEVIMRYKKLXXXXXXXXXFYLMSIANTKVPAXX

SEQ ID NO: 56568 - protein, 36 aa, Artificial Sequence; identical to SEQ ID NO: 5573
  GFR-binding peptide
  MOD_RES (34), (35): Xaa is C or S
  MOD_RES (12), (13), (14), (15), (16): Xaa is A or G
  MOD_RES (17), (18), (19), (20): Xaa is A or G or is absent

SEQ ID NO: 56569 - protein, 42 aa, Artificial Sequence; identical to SEQ ID NO: 5575
  GFR-binding peptide
  MOD_RES (1), (3), (37), (38): Xaa is C or S
  MOD_RES (15), (16), (17), (18), (19): Xaa is A or G
  MOD_RES (20), (21), (22), (23): Xaa is A or G or is absent

SEQ ID NO: 56570 - protein, 42 aa, Artificial Sequence; identical to SEQ ID NO: 25670
  GFR-binding peptide
  MOD_RES (2), (4), (38), (39): Xaa is C or S
  MOD_RES (16), (17), (18), (19), (20): Xaa is A or G
  MOD_RES (21), (22), (23), (24): Xaa is A or G or is absent

SEQ ID NO: 56571 - protein, 38 aa, Artificial Sequence; identical to SEQ ID NO: 2662
  GFR-binding peptide
  MOD_RES (1), (3), (37), (38): Xaa is C or S
  MOD_RES (15), (16), (17), (18), (19): Xaa is A or G
  MOD_RES (20), (21), (22), (23): Xaa is A or G or is absent

SEQ ID NO: 56572 - protein, 35 aa, Artificial Sequence; identical to SEQ ID NO: 4582
  GFR-binding peptide
  MOD_RES (34), (34): Xaa is C or S
  MOD_RES (12), (13), (14), (15), (16): Xaa is A or G
  MOD_RES (17), (18), (19), (20): Xaa is A or G or is absent

SEQ ID NO: 56573 - protein, 34 aa, Artificial Sequence; identical to SEQ ID NO: 25672
  GFR-binding peptide
  MOD_RES (34), (34): Xaa is C or S
  MOD_RES (12), (13), (14), (15), (16): Xaa is A or G
  MOD_RES (17), (18), (19), (20): Xaa is A or G or is absent

SEQ ID NO: 56574 - protein, 38 aa, Artificial Sequence; identical to SEQ ID NO: 5578
  GFR-binding peptide
  MOD_RES (1), (3), (37), (38): Xaa is C or S
  MOD_RES (15), (16), (17), (18), (19): Xaa is A or G
  MOD_RES (20), (21), (22), (23): Xaa is A or G or is absent

SEQ ID NO: 56575 - protein, 37 aa, Artificial Sequence; identical to SEQ ID NO: 2663
  GFR-binding peptide
  MOD_RES (33), (34): Xaa is C or S
  MOD_RES (11), (12), (13), (14), (15): Xaa is A or G
  MOD_RES (16), (17), (18), (19): Xaa is A or G or is absent

SEQ ID NO: 56576 - protein, 36 aa, Artificial Sequence; identical to SEQ ID NO: 2664
  GFR-binding peptide
  MOD_RES (2), (36): Xaa is C or S
  MOD_RES (14), (15), (16), (17), (18): Xaa is A or G
  MOD_RES (19), (20), (21), (22): Xaa is A or G or is absent

SEQ ID NO: 56577 - protein, 38 aa, Artificial Sequence
  GFR-binding peptide
  MOD_RES (1), (33), (34): Xaa is C or S
XRDVVMGRYKKLIIQQKDNFYLMSIANMKTPTXXPGAS

SEQ ID NO: 56578 - protein, 35 aa, Artificial Sequence; identical to SEQ ID NO: 10150
  GFR-binding peptide
  MOD_RES (1), (35): Xaa is C or S
  MOD_RES (13), (14), (15), (16), (17): Xaa is A or G
  MOD_RES (18), (19), (20), (21): Xaa is A or G or is absent

SEQ ID NO: 56579 - protein, 40 aa, Artificial Sequence
  GFR-binding peptide
  MOD_RES (2), (36), (37): Xaa is C or S
  MOD_RES (14), (15), (16), (17), (18): Xaa is A or G
  MOD_RES (19), (20), (21), (22): Xaa is A or G or is absent
GXRDVVMGRYKKLXXXXXXXXXFYLMSIANMKTPTXXPGA

SEQ ID NO: 56580 - protein, 36 aa, Artificial Sequence; identical to SEQ ID NO: 3640
  GFR-binding peptide
  MOD_RES (1), (35), (36): Xaa is C or S
  MOD_RES (13), (14), (15), (16), (17): Xaa is A or G
  MOD_RES (18), (19), (20), (21): Xaa is A or G or is absent

SEQ ID NO: 56581 - protein, 39 aa, Artificial Sequence; identical to SEQ ID NO: 23667
  GFR-binding peptide
  MOD_RES (33), (34): Xaa is C or S
  MOD_RES (11), (12), (13), (14), (15): Xaa is A or G
  MOD_RES (16), (17), (18), (19): Xaa is A or G or is absent

SEQ ID NO: 56582 - protein, 34 aa, Artificial Sequence
  GFR-binding peptide
  MOD_RES (2), (34): Xaa is C or S
GXRDVVMGRYKKLIIQQKDNFYLMSIANMKTPTX

SEQ ID NO: 56583 - protein, 37 aa, Artificial Sequence; identical to SEQ ID NO: 4589
  GFR-binding peptide
  MOD_RES (1), (35), (36): Xaa is C or S
  MOD_RES (13), (14), (15), (16), (17): Xaa is A or G
  MOD_RES (18), (19), (20), (21): Xaa is A or G or is absent

SEQ ID NO: 56584 - protein, 38 aa, Artificial Sequence; identical to SEQ ID NO: 3644
  GFR-binding peptide
  MOD_RES (1), (33), (34): Xaa is C or S

SEQ ID NO: 56585 - protein, 39 aa, Artificial Sequence; identical to SEQ ID NO: 5593
  GFR-binding peptide
  MOD_RES (1), (3), (37), (38): Xaa is C or S
  MOD_RES (15), (16), (17), (18), (19): Xaa is A or G
  MOD_RES (20), (21), (22), (23): Xaa is A or G or is absent

SEQ ID NO: 56586 - protein, 38 aa, Artificial Sequence; identical to SEQ ID NO: 3648
  GFR-binding peptide
  MOD_RES (2), (36), (37): Xaa is C or S
  MOD_RES (14), (15), (16), (17), (18): Xaa is A or G
  MOD_RES (19), (20), (21), (22): Xaa is A or G or is absent

SEQ ID NO: 56587 - protein, 38 aa, Artificial Sequence; identical to SEQ ID NO: 2675
  GFR-binding peptide
  MOD_RES (2), (4), (38): Xaa is C or S
  MOD_RES (16), (17), (18), (19), (20): Xaa is A or G
  MOD_RES (21), (22), (23), (24): Xaa is A or G or is absent

SEQ ID NO: 56588 - protein, 37 aa, Artificial Sequence
  GFR-binding peptide
  MOD_RES (2), (33), (34): Xaa is C or S
GXEEVIMRYKKLLLVRGNDFYLMSIANTKVPAXXTSP

SEQ ID NO: 56589 - protein, 42 aa, Artificial Sequence
  GFR-binding peptide
  MOD_RES (2), (4), (38), (39): Xaa is C or S
  MOD_RES (16), (17), (18), (19), (20): Xaa is A or G
  MOD_RES (21), (22), (23), (24): Xaa is A or G or is absent
SXGXRDVVMGRYKKLXXXXXXXXXFYLMSIANMKTPTXXPGA

SEQ ID NO: 56590 - protein, 37 aa, Artificial Sequence
  GFR-binding peptide
  MOD_RES (2), (36), (37): Xaa is C or S
  MOD_RES (14), (15), (16), (17), (18): Xaa is A or G
  MOD_RES (19), (20), (21), (22): Xaa is A or G or is absent
GXRDVVMGRYKKLXXXXXXXXXFYLMSIANMKTPTXX

SEQ ID NO: 56591 - protein, 36 aa, Artificial Sequence; identical to SEQ ID NO: 4597
  GFR-binding peptide
  MOD_RES (33), (34): Xaa is C or S
  MOD_RES (11), (12), (13), (14), (15): Xaa is A or G
  MOD_RES (16), (17), (18), (19): Xaa is A or G or is absent

SEQ ID NO: 56592 - protein, 34 aa, Artificial Sequence; identical to SEQ ID NO: 13009
  GFR-binding peptide
  MOD_RES (2), (34): Xaa is C or S

SEQ ID NO: 56593 - protein, 41 aa, Artificial Sequence; identical to SEQ ID NO: 5597
  GFR-binding peptide
  MOD_RES (1), (3), (38), (39): Xaa is C or S
  MOD_RES (16), (17), (18), (19), (20): Xaa is A or G
  MOD_RES (21), (22), (23), (24): Xaa is A or G or is absent

SEQ ID NO: 56594 - protein, 38 aa, Artificial Sequence; identical to SEQ ID NO: 4600
  GFR-binding peptide
  MOD_RES (2), (4), (36), (37): Xaa is C or S

SEQ ID NO: 56595 - protein, 40 aa, Artificial Sequence
  GFR-binding peptide
  MOD_RES (34), (35): Xaa is C or S
  MOD_RES (12), (13), (14), (15), (16): Xaa is A or G
  MOD_RES (17), (18), (19), (20): Xaa is A or G or is absent
SRVVMNRYKKLXXXXXXXXXFYLVSIANLKTPAXXPKPVH

SEQ ID NO: 56596 - protein, 34 aa, Artificial Sequence
  GFR-binding peptide
  MOD_RES (34), (34): Xaa is C or S
  MOD_RES (12), (13), (14), (15), (16): Xaa is A or G
  MOD_RES (17), (18), (19), (20): Xaa is A or G or is absent
RDVVMGRYKKLXXXXXXXXXFYLMSIANMKTPTX

SEQ ID NO: 56597 - protein, 39 aa, Artificial Sequence; identical to SEQ ID NO: 4606
  GFR-binding peptide
  MOD_RES (2), (34), (35): Xaa is C or S

SEQ ID NO: 56598 - protein, 34 aa, Artificial Sequence
  GFR-binding peptide
  MOD_RES (2), (33), (34): Xaa is C or S
GXEEVIMRYKKLLLVRGNDFYLMSIANTKVPAXX

SEQ ID NO: 56599 - protein, 39 aa, Artificial Sequence; identical to SEQ ID NO: 4608
  GFR-binding peptide
  MOD_RES (1), (3), (35): Xaa is C or S

SEQ ID NO: 56600 - protein, 40 aa, Artificial Sequence; identical to SEQ ID NO: 2688
  GFR-binding peptide
  MOD_RES (2), (34): Xaa is C or S

SEQ ID NO: 56601 - protein, 37 aa, Artificial Sequence; identical to SEQ ID NO: 2690
  GFR-binding peptide
  MOD_RES (2), (4), (36), (37): Xaa is C or S

SEQ ID NO: 56602 - protein, 33 aa, Artificial Sequence
  GFR-binding peptide
  MOD_RES (32), (33): Xaa is C or S
RDVVMGRYKKLIIQQKDNFYLMSIANMKTPTXX

SEQ ID NO: 56603 - protein, 36 aa, Artificial Sequence; identical to SEQ ID NO: 5606
  GFR-binding peptide
  MOD_RES (34), (35): Xaa is C or S
  MOD_RES (12), (13), (14), (15), (16): Xaa is A or G
  MOD_RES (17), (18), (19), (20): Xaa is A or G or is absent

SEQ ID NO: 56604 - protein, 36 aa, Artificial Sequence
  GFR-binding peptide
  MOD_RES (32), (33): Xaa is C or S
RDVVMGRYKKLIIQQKDNFYLMSIANMKTPTXXPGA

SEQ ID NO: 56605 - protein, 43 aa, Artificial Sequence; identical to SEQ ID NO: 23694
  GFR-binding peptide
  MOD_RES (2), (4), (38), (39): Xaa is C or S
  MOD_RES (16), (17), (18), (19), (20): Xaa is A or G
  MOD_RES (21), (22), (23), (24): Xaa is A or G or is absent

SEQ ID NO: 56606 - protein, 41 aa, Artificial Sequence; identical to SEQ ID NO: 26720
  GFR-binding peptide
  MOD_RES (1), (35), (36): Xaa is C or S
  MOD_RES (13), (14), (15), (16), (17): Xaa is A or G
  MOD_RES (18), (19), (20), (21): Xaa is A or G or is absent

SEQ ID NO: 56607 - protein, 36 aa, Artificial Sequence; identical to SEQ ID NO: 2695
  GFR-binding peptide
  MOD_RES (32), (33): Xaa is C or S

SEQ ID NO: 56608 - protein, 33 aa, Artificial Sequence; identical to SEQ ID NO: 12037
  GFR-binding peptide
  MOD_RES (33), (33): Xaa is C or S
  MOD_RES (11), (12), (13), (14), (15): Xaa is A or G
  MOD_RES (16), (17), (18), (19): Xaa is A or G or is absent

SEQ ID NO: 56609 - protein, 34 aa, Artificial Sequence; identical to SEQ ID NO: 3662
  GFR-binding peptide
  MOD_RES (33), (34): Xaa is C or S
  MOD_RES (11), (12), (13), (14), (15): Xaa is A or G
  MOD_RES (16), (17), (18), (19): Xaa is A or G or is absent

SEQ ID NO: 56610 - protein, 37 aa, Artificial Sequence; identical to SEQ ID NO: 25707
  GFR-binding peptide
  MOD_RES (2), (4): Xaa is C or S
  MOD_RES (16), (17), (18), (19), (20): Xaa is A or G
  MOD_RES (21), (22), (23), (24): Xaa is A or G or is absent

SEQ ID NO: 56611 - protein, 36 aa, Artificial Sequence; identical to SEQ ID NO: 5609
  GFR-binding peptide
  MOD_RES (2), (4), (36): Xaa is C or S

SEQ ID NO: 56612 - protein, 40 aa, Artificial Sequence; identical to SEQ ID NO: 24684
  GFR-binding peptide
  MOD_RES (2), (34), (35): Xaa is C or S

SEQ ID NO: 56613 - protein, 43 aa, Artificial Sequence; identical to SEQ ID NO: 2696
  GFR-binding peptide
  MOD_RES (1), (3), (38), (39): Xaa is C or S
  MOD_RES (16), (17), (18), (19), (20): Xaa is A or G
  MOD_RES (21), (22), (23), (24): Xaa is A or G or is absent

SEQ ID NO: 56614 - protein, 39 aa, Artificial Sequence
  GFR-binding peptide
  MOD_RES (34), (35): Xaa is C or S
  MOD_RES (12), (13), (14), (15), (16): Xaa is A or G
  MOD_RES (17), (18), (19), (20): Xaa is A or G or is absent
RDVVMGRYKKLXXXXXXXXXFYLMSIANMKTPTXXPGAS

SEQ ID NO: 56615 - protein, 37 aa, Artificial Sequence; identical to SEQ ID NO: 5614
  GFR-binding peptide
  MOD_RES (31), (32): Xaa is C or S

SEQ ID NO: 56616 - protein, 41 aa, Artificial Sequence; identical to SEQ ID NO: 3668
  GFR-binding peptide
  MOD_RES (1), (3), (35), (36): Xaa is C or S

SEQ ID NO: 56617 - protein, 34 aa, Artificial Sequence; identical to SEQ ID NO: 3669
  GFR-binding peptide
  MOD_RES (33), (34): Xaa is C or S
  MOD_RES (11), (12), (13), (14), (15): Xaa is A or G
  MOD_RES (16), (17), (18), (19): Xaa is A or G or is absent

SEQ ID NO: 56618 - protein, 37 aa, Artificial Sequence; identical to SEQ ID NO: 3672
  GFR-binding peptide
  MOD_RES (2), (4), (36): Xaa is C or S

SEQ ID NO: 56619 - protein, 32 aa, Artificial Sequence; identical to SEQ ID NO: 26737
  GFR-binding peptide
  MOD_RES (11), (12), (13), (14), (15): Xaa is A or G
  MOD_RES (16), (17), (18), (19): Xaa is A or G or is absent

SEQ ID NO: 56620 - protein, 38 aa, Artificial Sequence
  GFR-binding peptide
  MOD_RES (1), (34), (35): Xaa is C or S
  MOD_RES (12), (13), (14), (15), (16): Xaa is A or G
  MOD_RES (17), (18), (19), (20): Xaa is A or G or is absent
XEEVIMRYKKLXXXXXXXXXFYLMSIANTKVPAXXTSP

SEQ ID NO: 56621 - protein, 33 aa, Artificial Sequence
  GFR-binding peptide
  MOD_RES (1), (33): Xaa is C or S
XRDVVMGRYKKLIIQQKDNFYLMSIANMKTPTX

SEQ ID NO: 56622 - protein, 36 aa, Artificial Sequence; identical to SEQ ID NO: 24701
  GFR-binding peptide
  MOD_RES (33), (34): Xaa is C or S
  MOD_RES (11), (12), (13), (14), (15): Xaa is A or G
  MOD_RES (16), (17), (18), (19): Xaa is A or G or is absent

SEQ ID NO: 56623 - protein, 34 aa, Artificial Sequence
  GFR-binding peptide
  MOD_RES (33), (34): Xaa is C or S
  MOD_RES (11), (12), (13), (14), (15): Xaa is A or G
  MOD_RES (16), (17), (18), (19): Xaa is A or G or is absent
EEVIMRYKKLXXXXXXXXXFYLMSIANTKVPAXX

SEQ ID NO: 56624 - protein, 42 aa, Artificial Sequence; identical to SEQ ID NO: 4632
  GFR-binding peptide
  MOD_RES (1), (3), (37), (38): Xaa is C or S
  MOD_RES (15), (16), (17), (18), (19): Xaa is A or G
  MOD_RES (20), (21), (22), (23): Xaa is A or G or is absent

SEQ ID NO: 56625 - protein, 41 aa, Artificial Sequence; identical to SEQ ID NO: 25720
  GFR-binding peptide
  MOD_RES (2), (36), (37): Xaa is C or S
  MOD_RES (14), (15), (16), (17), (18): Xaa is A or G
  MOD_RES (19), (20), (21), (22): Xaa is A or G or is absent

SEQ ID NO: 56626 - protein, 34 aa, Artificial Sequence; identical to SEQ ID NO: 25721
  GFR-binding peptide
  MOD_RES (33), (34): Xaa is C or S
  MOD_RES (11), (12), (13), (14), (15): Xaa is A or G
  MOD_RES (16), (17), (18), (19): Xaa is A or G or is absent

SEQ ID NO: 56627 - protein, 33 aa, Artificial Sequence; identical to SEQ ID NO: 26745
  GFR-binding peptide
  MOD_RES (33), (33): Xaa is C or S
  MOD_RES (11), (12), (13), (14), (15): Xaa is A or G
  MOD_RES (16), (17), (18), (19): Xaa is A or G or is absent

SEQ ID NO: 56628 - protein, 38 aa, Artificial Sequence; identical to SEQ ID NO: 3687
  GFR-binding peptide
  MOD_RES (1), (3), (37), (38): Xaa is C or S
  MOD_RES (15), (16), (17), (18), (19): Xaa is A or G
  MOD_RES (20), (21), (22), (23): Xaa is A or G or is absent

SEQ ID NO: 56629 - protein, 39 aa, Artificial Sequence
  GFR-binding peptide
  MOD_RES (2), (4), (36), (37): Xaa is C or S
SXGXRDVVMGRYKKLIIQQKDNFYLMSIANMKTPTXXPG

SEQ ID NO: 56630 - protein, 37 aa, Artificial Sequence; identical to SEQ ID NO: 5633
  GFR-binding peptide
  MOD_RES (2), (36), (37): Xaa is C or S
  MOD_RES (14), (15), (16), (17), (18): Xaa is A or G
  MOD_RES (19), (20), (21), (22): Xaa is A or G or is absent

SEQ ID NO: 56631 - protein, 42 aa, Artificial Sequence; identical to SEQ ID NO: 5634
  GFR-binding peptide
  MOD_RES (2), (36), (37): Xaa is C or S
  MOD_RES (14), (15), (16), (17), (18): Xaa is A or G
  MOD_RES (19), (20), (21), (22): Xaa is A or G or is absent

SEQ ID NO: 56632 - protein, 34 aa, Artificial Sequence; identical to SEQ ID NO: 3692
  GFR-binding peptide
  MOD_RES (2), (34): Xaa is C or S

SEQ ID NO: 56633 - protein, 32 aa, Artificial Sequence; identical to SEQ ID NO: 10203
  GFR-binding peptide
  MOD_RES (32), (32): Xaa is C or S

SEQ ID NO: 56634 - protein, 41 aa, Artificial Sequence; identical to SEQ ID NO: 4639
  GFR-binding peptide
  MOD_RES (2), (4), (36), (37): Xaa is C or S

SEQ ID NO: 56635 - protein, 34 aa, Artificial Sequence; identical to SEQ ID NO: 3696
  GFR-binding peptide
  MOD_RES (1), (33), (34): Xaa is C or S

SEQ ID NO: 56636 - protein, 36 aa, Artificial Sequence; identical to SEQ ID NO: 3698
  GFR-binding peptide
  MOD_RES (1), (36): Xaa is C or S
  MOD_RES (14), (15), (16), (17), (18): Xaa is A or G
  MOD_RES (19), (20), (21), (22): Xaa is A or G or is absent

SEQ ID NO: 56637 - protein, 41 aa, Artificial Sequence; identical to SEQ ID NO: 3699
  GFR-binding peptide
  MOD_RES (2), (4), (37), (38): Xaa is C or S

SEQ ID NO: 56638 - protein, 37 aa, Artificial Sequence
  GFR-binding peptide
  MOD_RES (31), (32): Xaa is C or S
DVVMGRYKKLIIQQKDNFYLMSIANMKTPTXXPGASG

SEQ ID NO: 56639 - protein, 33 aa, Artificial Sequence; identical to SEQ ID NO: 2723
  GFR-binding peptide
  MOD_RES (32), (33): Xaa is C or S

SEQ ID NO: 56640 - protein, 38 aa, Artificial Sequence
  GFR-binding peptide
  MOD_RES (2), (33), (34): Xaa is C or S
GXEEVIMRYKKLLLVRGNDFYLMSIANTKVPAXXTSPV

SEQ ID NO: 56641 - protein, 34 aa, Artificial Sequence
  GFR-binding peptide
  MOD_RES (1), (34): Xaa is C or S
  MOD_RES (12), (13), (14), (15), (16): Xaa is A or G
  MOD_RES (17), (18), (19), (20): Xaa is A or G or is absent
XEEVIMRYKKLXXXXXXXXXFYLMSIANTKVPAX

SEQ ID NO: 56642 - protein, 38 aa, Artificial Sequence
  GFR-binding peptide
  MOD_RES (1), (35), (36): Xaa is C or S
  MOD_RES (13), (14), (15), (16), (17): Xaa is A or G
  MOD_RES (18), (19), (20), (21): Xaa is A or G or is absent
XRDVVMGRYKKLXXXXXXXXXFYLMSIANMKTPTXXPG

SEQ ID NO: 56643 - protein, 34 aa, Artificial Sequence; identical to SEQ ID NO: 25734
  GFR-binding peptide
  MOD_RES (31), (32): Xaa is C or S

SEQ ID NO: 56644 - protein, 37 aa, Artificial Sequence; identical to SEQ ID NO: 5638
  GFR-binding peptide
  MOD_RES (33), (34): Xaa is C or S
  MOD_RES (11), (12), (13), (14), (15): Xaa is A or G
  MOD_RES (16), (17), (18), (19): Xaa is A or G or is absent

SEQ ID NO: 56645 - protein, 33 aa, Artificial Sequence; identical to SEQ ID NO: 25738
  GFR-binding peptide
  MOD_RES (1), (33): Xaa is C or S

SEQ ID NO: 56646 - protein, 40 aa, Artificial Sequence; identical to SEQ ID NO: 11129
  GFR-binding peptide
  MOD_RES (2), (4), (38), (39): Xaa is C or S
  MOD_RES (16), (17), (18), (19), (20): Xaa is A or G
  MOD_RES (21), (22), (23), (24): Xaa is A or G or is absent

SEQ ID NO: 56647 - protein, 33 aa, Artificial Sequence; identical to SEQ ID NO: 3706
  GFR-binding peptide
  MOD_RES (32), (33): Xaa is C or S

SEQ ID NO: 56648 - protein, 39 aa, Artificial Sequence
  GFR-binding peptide
  MOD_RES (1), (33), (34): Xaa is C or S
XRDVVMGRYKKLIIQQKDNFYLMSIANMKTPTXXPGASG

SEQ ID NO: 56649 - protein, 40 aa, Artificial Sequence; identical to SEQ ID NO: 5640
  GFR-binding peptide
  MOD_RES (1), (3), (35), (36): Xaa is C or S

SEQ ID NO: 56650 - protein, 35 aa, Artificial Sequence; identical to SEQ ID NO: 23722
  GFR-binding peptide
  MOD_RES (1), (3), (35): Xaa is C or S

SEQ ID NO: 56651 - protein, 41 aa, Artificial Sequence; identical to SEQ ID NO: 24728
  GFR-binding peptide
  MOD_RES (1), (3), (37), (38): Xaa is C or S
  MOD_RES (15), (16), (17), (18), (19): Xaa is A or G
  MOD_RES (20), (21), (22), (23): Xaa is A or G or is absent

SEQ ID NO: 56652 - protein, 34 aa, Artificial Sequence; identical to SEQ ID NO: 13069
  GFR-binding peptide
  MOD_RES (1), (1): Xaa is C or S
  MOD_RES (13), (14), (15), (16), (17): Xaa is A or G
  MOD_RES (18), (19), (20), (21): Xaa is A or G or is absent

SEQ ID NO: 56653 - protein, 35 aa, Artificial Sequence; identical to SEQ ID NO: 4652
  GFR-binding peptide
  MOD_RES (33), (34): Xaa is C or S
  MOD_RES (11), (12), (13), (14), (15): Xaa is A or G
  MOD_RES (16), (17), (18), (19): Xaa is A or G or is absent

SEQ ID NO: 56654 - protein, 37 aa, Artificial Sequence; identical to SEQ ID NO: 2733
  GFR-binding peptide
  MOD_RES (33), (34): Xaa is C or S
  MOD_RES (11), (12), (13), (14), (15): Xaa is A or G
  MOD_RES (16), (17), (18), (19): Xaa is A or G or is absent

SEQ ID NO: 56655 - protein, 37 aa, Artificial Sequence; identical to SEQ ID NO: 11136
  GFR-binding peptide
  MOD_RES (2), (36), (37): Xaa is C or S
  MOD_RES (14), (15), (16), (17), (18): Xaa is A or G
  MOD_RES (19), (20), (21), (22): Xaa is A or G or is absent

SEQ ID NO: 56656 - protein, 37 aa, Artificial Sequence; identical to SEQ ID NO: 3710
  GFR-binding peptide
  MOD_RES (2), (4), (36), (37): Xaa is C or S

SEQ ID NO: 56657 - protein, 40 aa, Artificial Sequence
  GFR-binding peptide
  MOD_RES (2), (4), (38), (39): Xaa is C or S
  MOD_RES (16), (17), (18), (19), (20): Xaa is A or G
  MOD_RES (21), (22), (23), (24): Xaa is A or G or is absent
SXGXRDVVMGRYKKLXXXXXXXXXFYLMSIANMKTPTXXP

SEQ ID NO: 56658 - protein, 36 aa, Artificial Sequence; identical to SEQ ID NO: 25749
  GFR-binding peptide
  MOD_RES (1), (35), (36): Xaa is C or S
  MOD_RES (13), (14), (15), (16), (17): Xaa is A or G
  MOD_RES (18), (19), (20), (21): Xaa is A or G or is absent

SEQ ID NO: 56659 - protein, 44 aa, Artificial Sequence; identical to SEQ ID NO: 5647
  GFR-binding peptide
  MOD_RES (2), (4), (38), (39): Xaa is C or S
  MOD_RES (16), (17), (18), (19), (20): Xaa is A or G
  MOD_RES (21), (22), (23), (24): Xaa is A or G or is absent

SEQ ID NO: 56660 - protein, 31 aa, Artificial Sequence; identical to SEQ ID NO: 26778
  GFR-binding peptide
  MOD_RES (31), (31): Xaa is C or S

SEQ ID NO: 56661 - protein, 34 aa, Artificial Sequence; identical to SEQ ID NO: 4658
  GFR-binding peptide
  MOD_RES (34), (34): Xaa is C or S
  MOD_RES (12), (13), (14), (15), (16): Xaa is A or G
  MOD_RES (17), (18), (19), (20): Xaa is A or G or is absent

SEQ ID NO: 56662 - protein, 39 aa, Artificial Sequence; identical to SEQ ID NO: 5651
  GFR-binding peptide
  MOD_RES (1), (3), (38), (39): Xaa is C or S
  MOD_RES (16), (17), (18), (19), (20): Xaa is A or G
  MOD_RES (21), (22), (23), (24): Xaa is A or G or is absent

SEQ ID NO: 56663 - protein, 41 aa, Artificial Sequence; identical to SEQ ID NO: 5652
  GFR-binding peptide
  MOD_RES (1), (3), (37), (38): Xaa is C or S
  MOD_RES (15), (16), (17), (18), (19): Xaa is A or G
  MOD_RES (20), (21), (22), (23): Xaa is A or G or is absent

SEQ ID NO: 56664 - protein, 39 aa, Artificial Sequence; identical to SEQ ID NO: 4659
  GFR-binding peptide
  MOD_RES (2), (37), (38): Xaa is C or S
  MOD_RES (15), (16), (17), (18), (19): Xaa is A or G
  MOD_RES (20), (21), (22), (23): Xaa is A or G or is absent

SEQ ID NO: 56665 - protein, 40 aa, Artificial Sequence; identical to SEQ ID NO: 26780
  GFR-binding peptide
  MOD_RES (1), (35), (36): Xaa is C or S
  MOD_RES (13), (14), (15), (16), (17): Xaa is A or G
  MOD_RES (18), (19), (20), (21): Xaa is A or G or is absent

SEQ ID NO: 56666 - protein, 32 aa, Artificial Sequence; identical to SEQ ID NO: 10224
  GFR-binding peptide
  MOD_RES (11), (12), (13), (14), (15): Xaa is A or G
  MOD_RES (16), (17), (18), (19): Xaa is A or G or is absent

SEQ ID NO: 56667 - protein, 31 aa, Artificial Sequence; identical to SEQ ID NO: 4662
  GFR-binding peptide

SEQ ID NO: 56668 - protein, 40 aa, Artificial Sequence; identical to SEQ ID NO: 26784
  GFR-binding peptide
  MOD_RES (1), (3), (35), (36): Xaa is C or S

SEQ ID NO: 56669 - protein, 35 aa, Artificial Sequence; identical to SEQ ID NO: 2745
  GFR-binding peptide
  MOD_RES (1), (33), (34): Xaa is C or S

SEQ ID NO: 56670 - protein, 36 aa, Artificial Sequence
  GFR-binding peptide
  MOD_RES (1), (3), (34), (35): Xaa is C or S
XGXEEVIMRYKKLLLVRGNDFYLMSIANTKVPAXXT

SEQ ID NO: 56671 - protein, 39 aa, Artificial Sequence; identical to SEQ ID NO: 26789
  GFR-binding peptide
  MOD_RES (2), (4), (36), (37): Xaa is C or S

SEQ ID NO: 56672 - protein, 42 aa, Artificial Sequence; identical to SEQ ID NO: 4672
  GFR-binding peptide
  MOD_RES (1), (3), (37): Xaa is C or S
  MOD_RES (15), (16), (17), (18), (19): Xaa is A or G
  MOD_RES (20), (21), (22), (23): Xaa is A or G or is absent

SEQ ID NO: 56673 - protein, 38 aa, Artificial Sequence
  GFR-binding peptide
  MOD_RES (2), (35), (36): Xaa is C or S
  MOD_RES (13), (14), (15), (16), (17): Xaa is A or G
  MOD_RES (18), (19), (20), (21): Xaa is A or G or is absent
GXEEVIMRYKKLXXXXXXXXXFYLMSIANTKVPAXXTS

SEQ ID NO: 56674 - protein, 39 aa, Artificial Sequence
  GFR-binding peptide
  MOD_RES (2), (4), (38), (39): Xaa is C or S
  MOD_RES (16), (17), (18), (19), (20): Xaa is A or G
  MOD_RES (21), (22), (23), (24): Xaa is A or G or is absent
SXGXRDVVMGRYKKLXXXXXXXXXFYLMSIANMKTPTXX

SEQ ID NO: 56675 - protein, 40 aa, Artificial Sequence
  GFR-binding peptide
  MOD_RES (1), (3), (37), (38): Xaa is C or S
  MOD_RES (15), (16), (17), (18), (19): Xaa is A or G
  MOD_RES (20), (21), (22), (23): Xaa is A or G or is absent
XGXRDVVMGRYKKLXXXXXXXXXFYLMSIANMKTPTXXPG

SEQ ID NO: 56676 - protein, 38 aa, Artificial Sequence; identical to SEQ ID NO: 4676
  GFR-binding peptide
  MOD_RES (34), (34): Xaa is C or S
  MOD_RES (12), (13), (14), (15), (16): Xaa is A or G
  MOD_RES (17), (18), (19), (20): Xaa is A or G or is absent

SEQ ID NO: 56677 - protein, 38 aa, Artificial Sequence; identical to SEQ ID NO: 26796
  GFR-binding peptide
  MOD_RES (1), (3), (35), (36): Xaa is C or S

SEQ ID NO: 56678 - protein, 37 aa, Artificial Sequence; identical to SEQ ID NO: 2755
  GFR-binding peptide
  MOD_RES (1), (33), (34): Xaa is C or S

SEQ ID NO: 56679 - protein, 37 aa, Artificial Sequence; identical to SEQ ID NO: 2756
  GFR-binding peptide
  MOD_RES (2), (35), (36): Xaa is C or S

SEQ ID NO: 56680 - protein, 36 aa, Artificial Sequence; identical to SEQ ID NO: 4678
  GFR-binding peptide
  MOD_RES (1), (33): Xaa is C or S

SEQ ID NO: 56681 - protein, 33 aa, Artificial Sequence; identical to SEQ ID NO: 2757
  GFR-binding peptide
  MOD_RES (1), (33): Xaa is C or S

SEQ ID NO: 56682 - protein, 36 aa, Artificial Sequence; identical to SEQ ID NO: 3728
  GFR-binding peptide
  MOD_RES (1), (3), (35), (36): Xaa is C or S

SEQ ID NO: 56683 - protein, 38 aa, Artificial Sequence; identical to SEQ ID NO: 5666
  GFR-binding peptide
  MOD_RES (1), (3), (37): Xaa is C or S
  MOD_RES (15), (16), (17), (18), (19): Xaa is A or G
  MOD_RES (20), (21), (22), (23): Xaa is A or G or is absent

SEQ ID NO: 56684 - protein, 38 aa, Artificial Sequence; identical to SEQ ID NO: 3731
  GFR-binding peptide
  MOD_RES (1), (35), (36): Xaa is C or S
  MOD_RES (13), (14), (15), (16), (17): Xaa is A or G
  MOD_RES (18), (19), (20), (21): Xaa is A or G or is absent

SEQ ID NO: 56685 - protein, 39 aa, Artificial Sequence; identical to SEQ ID NO: 3732
  GFR-binding peptide
  MOD_RES (33), (34): Xaa is C or S
  MOD_RES (11), (12), (13), (14), (15): Xaa is A or G
  MOD_RES (16), (17), (18), (19): Xaa is A or G or is absent

SEQ ID NO: 56686 - protein, 37 aa, Artificial Sequence; identical to SEQ ID NO: 3734
  GFR-binding peptide
  MOD_RES (1), (3), (35): Xaa is C or S

SEQ ID NO: 56687 - protein, 40 aa, Artificial Sequence; identical to SEQ ID NO: 3735
  GFR-binding peptide
  MOD_RES (2), (36), (37): Xaa is C or S
  MOD_RES (14), (15), (16), (17), (18): Xaa is A or G
  MOD_RES (19), (20), (21), (22): Xaa is A or G or is absent

SEQ ID NO: 56688 - protein, 38 aa, Artificial Sequence
  GFR-binding peptide
  MOD_RES (1), (32), (33): Xaa is C or S
XEEVIMRYKKLLLVRGNDFYLMSIANTKVPAXXTSPVR

SEQ ID NO: 56689 - protein, 33 aa, Artificial Sequence; identical to SEQ ID NO: 3737
  GFR-binding peptide
  MOD_RES (1), (1): Xaa is C or S

SEQ ID NO: 56690 - protein, 39 aa, Artificial Sequence; identical to SEQ ID NO: 3738
  GFR-binding peptide
  MOD_RES (34), (35): Xaa is C or S
  MOD_RES (12), (13), (14), (15), (16): Xaa is A or G
  MOD_RES (17), (18), (19), (20): Xaa is A or G or is absent

SEQ ID NO: 56691 - protein, 31 aa, Artificial Sequence; identical to SEQ ID NO: 5672
  GFR-binding peptide
  MOD_RES (31), (31): Xaa is C or S

SEQ ID NO: 56692 - protein, 33 aa, Artificial Sequence; identical to SEQ ID NO: 2763
  GFR-binding peptide
  MOD_RES (31), (32): Xaa is C or S

SEQ ID NO: 56693 - protein, 37 aa, Artificial Sequence; identical to SEQ ID NO: 24770
  GFR-binding peptide
  MOD_RES (31), (32): Xaa is C or S

SEQ ID NO: 56694 - protein, 32 aa, Artificial Sequence; identical to SEQ ID NO: 4688
  GFR-binding peptide
  MOD_RES (31), (32): Xaa is C or S

SEQ ID NO: 56695 - protein, 37 aa, Artificial Sequence; identical to SEQ ID NO: 12118
  GFR-binding peptide
  MOD_RES (1), (3), (37): Xaa is C or S
  MOD_RES (15), (16), (17), (18), (19): Xaa is A or G
  MOD_RES (20), (21), (22), (23): Xaa is A or G or is absent

SEQ ID NO: 56696 - protein, 40 aa, Artificial Sequence
  GFR-binding peptide
  MOD_RES (34), (35): Xaa is C or S
  MOD_RES (12), (13), (14), (15), (16): Xaa is A or G
  MOD_RES (17), (18), (19), (20): Xaa is A or G or is absent
RDVVMGRYKKLXXXXXXXXXFYLMSIANMKTPTXXPGASG

SEQ ID NO: 56697 - protein, 35 aa, Artificial Sequence; identical to SEQ ID NO: 5679
  GFR-binding peptide
  MOD_RES (1), (3), (35): Xaa is C or S

SEQ ID NO: 56698 - protein, 38 aa, Artificial Sequence; identical to SEQ ID NO: 4689
  GFR-binding peptide
  MOD_RES (1), (33), (34): Xaa is C or S

SEQ ID NO: 56699 - protein, 39 aa, Artificial Sequence; identical to SEQ ID NO: 5680
  GFR-binding peptide
  MOD_RES (34), (35): Xaa is C or S
  MOD_RES (12), (13), (14), (15), (16): Xaa is A or G
  MOD_RES (17), (18), (19), (20): Xaa is A or G or is absent

SEQ ID NO: 56700 - protein, 35 aa, Artificial Sequence
  GFR-binding peptide
  MOD_RES (31), (32): Xaa is C or S
DVVMGRYKKLIIQQKDNFYLMSIANMKTPTXXPGA

SEQ ID NO: 56701 - protein, 36 aa, Artificial Sequence; identical to SEQ ID NO: 4691
  GFR-binding peptide
  MOD_RES (1), (35), (36): Xaa is C or S
  MOD_RES (13), (14), (15), (16), (17): Xaa is A or G
  MOD_RES (18), (19), (20), (21): Xaa is A or G or is absent

SEQ ID NO: 56702 - protein, 31 aa, Artificial Sequence; identical to SEQ ID NO: 24774
  GFR-binding peptide

SEQ ID NO: 56703 - protein, 37 aa, Artificial Sequence; identical to SEQ ID NO: 5683
  GFR-binding peptide
  MOD_RES (2), (34), (35): Xaa is C or S

SEQ ID NO: 56704 - protein, 37 aa, Artificial Sequence; identical to SEQ ID NO: 2766
  GFR-binding peptide
  MOD_RES (1), (35), (36): Xaa is C or S
  MOD_RES (13), (14), (15), (16), (17): Xaa is A or G
  MOD_RES (18), (19), (20), (21): Xaa is A or G or is absent

SEQ ID NO: 56705 - protein, 38 aa, Artificial Sequence; identical to SEQ ID NO: 3748
  GFR-binding peptide
  MOD_RES (35), (36): Xaa is C or S
  MOD_RES (13), (14), (15), (16), (17): Xaa is A or G
  MOD_RES (18), (19), (20), (21): Xaa is A or G or is absent

SEQ ID NO: 56706 - protein, 35 aa, Artificial Sequence
  GFR-binding peptide
  MOD_RES (33), (34): Xaa is C or S
  MOD_RES (11), (12), (13), (14), (15): Xaa is A or G
  MOD_RES (16), (17), (18), (19): Xaa is A or G or is absent
DVVMGRYKKLXXXXXXXXXFYLMSIANMKTPTXXP

SEQ ID NO: 56707 - protein, 36 aa, Artificial Sequence; identical to SEQ ID NO: 5685
  GFR-binding peptide
  MOD_RES (1), (3): Xaa is C or S
  MOD_RES (15), (16), (17), (18), (19): Xaa is A or G
  MOD_RES (20), (21), (22), (23): Xaa is A or G or is absent

SEQ ID NO: 56708 - protein, 33 aa, Artificial Sequence
  GFR-binding peptide
  MOD_RES (2), (33): Xaa is C or S
GXEEVIMRYKKLLLVRGNDFYLMSIANTKVPAX

SEQ ID NO: 56709 - protein, 33 aa, Artificial Sequence; identical to SEQ ID NO: 4697
  GFR-binding peptide
  MOD_RES (33), (33): Xaa is C or S
  MOD_RES (11), (12), (13), (14), (15): Xaa is A or G
  MOD_RES (16), (17), (18), (19): Xaa is A or G or is absent

SEQ ID NO: 56710 - protein, 35 aa, Artificial Sequence; identical to SEQ ID NO: 24780
  GFR-binding peptide
  MOD_RES (33), (34): Xaa is C or S
  MOD_RES (11), (12), (13), (14), (15): Xaa is A or G
  MOD_RES (16), (17), (18), (19): Xaa is A or G or is absent

SEQ ID NO: 56711 - protein, 39 aa, Artificial Sequence; identical to SEQ ID NO: 4698
  GFR-binding peptide
  MOD_RES (1), (33), (34): Xaa is C or S

SEQ ID NO: 56712 - protein, 33 aa, Artificial Sequence; identical to SEQ ID NO: 23765
  GFR-binding peptide
  MOD_RES (12), (13), (14), (15), (16): Xaa is A or G
  MOD_RES (17), (18), (19), (20): Xaa is A or G or is absent

SEQ ID NO: 56713 - protein, 30 aa, Artificial Sequence
  GFR-binding peptide
DVVMGRYKKLIIQQKDNFYLMSIANMKTPT

SEQ ID NO: 56714 - protein, 37 aa, Artificial Sequence; identical to SEQ ID NO: 13132
  GFR-binding peptide
  MOD_RES (31), (32): Xaa is C or S

SEQ ID NO: 56715 - protein, 38 aa, Artificial Sequence; identical to SEQ ID NO: 3755
  GFR-binding peptide
  MOD_RES (2), (36), (37): Xaa is C or S
  MOD_RES (14), (15), (16), (17), (18): Xaa is A or G
  MOD_RES (19), (20), (21), (22): Xaa is A or G or is absent

SEQ ID NO: 56716 - protein, 43 aa, Artificial Sequence; identical to SEQ ID NO: 4703
  GFR-binding peptide
  MOD_RES (1), (3), (37), (38): Xaa is C or S
  MOD_RES (15), (16), (17), (18), (19): Xaa is A or G
  MOD_RES (20), (21), (22), (23): Xaa is A or G or is absent

SEQ ID NO: 56717 - protein, 34 aa, Artificial Sequence
  GFR-binding peptide
  MOD_RES (1), (3): Xaa is C or S
XGXRDVVMGRYKKLIIQQKDNFYLMSIANMKTPT

SEQ ID NO: 56718 - protein, 40 aa, Artificial Sequence
  GFR-binding peptide
  MOD_RES (1), (3), (36), (37): Xaa is C or S
  MOD_RES (14), (15), (16), (17), (18): Xaa is A or G
  MOD_RES (19), (20), (21), (22): Xaa is A or G or is absent
XGXEEVIMRYKKLXXXXXXXXXFYLMSIANTKVPAXXTSP

SEQ ID NO: 56719 - protein, 40 aa, Artificial Sequence; identical to SEQ ID NO: 3757
  GFR-binding peptide
  MOD_RES (1), (3), (37), (38): Xaa is C or S
  MOD_RES (15), (16), (17), (18), (19): Xaa is A or G
  MOD_RES (20), (21), (22), (23): Xaa is A or G or is absent

SEQ ID NO: 56720 - protein, 37 aa, Artificial Sequence; identical to SEQ ID NO: 24788
  GFR-binding peptide
  MOD_RES (32), (33): Xaa is C or S

SEQ ID NO: 56721 - protein, 38 aa, Artificial Sequence; identical to SEQ ID NO: 3758
  GFR-binding peptide
  MOD_RES (2), (4), (38): Xaa is C or S
  MOD_RES (16), (17), (18), (19), (20): Xaa is A or G
  MOD_RES (21), (22), (23), (24): Xaa is A or G or is absent

SEQ ID NO: 56722 - protein, 37 aa, Artificial Sequence; identical to SEQ ID NO: 3761
  GFR-binding peptide
  MOD_RES (31), (32): Xaa is C or S

SEQ ID NO: 56723 - protein, 37 aa, Artificial Sequence; identical to SEQ ID NO: 3762
  GFR-binding peptide
  MOD_RES (34), (35): Xaa is C or S
  MOD_RES (12), (13), (14), (15), (16): Xaa is A or G
  MOD_RES (17), (18), (19), (20): Xaa is A or G or is absent

SEQ ID NO: 56724 - protein, 33 aa, Artificial Sequence; identical to SEQ ID NO: 5699
  GFR-binding peptide
  MOD_RES (12), (13), (14), (15), (16): Xaa is A or G
  MOD_RES (17), (18), (19), (20): Xaa is A or G or is absent

SEQ ID NO: 56725 - protein, 35 aa, Artificial Sequence; identical to SEQ ID NO: 3763
  GFR-binding peptide
  MOD_RES (2), (4): Xaa is C or S

SEQ ID NO: 56726 - protein, 40 aa, Artificial Sequence
  GFR-binding peptide
  MOD_RES (1), (35), (36): Xaa is C or S
  MOD_RES (13), (14), (15), (16), (17): Xaa is A or G
  MOD_RES (18), (19), (20), (21): Xaa is A or G or is absent
XRDVVMGRYKKLXXXXXXXXXFYLMSIANMKTPTXXPGAS

SEQ ID NO: 56727 - protein, 36 aa, Artificial Sequence; identical to SEQ ID NO: 4708
  GFR-binding peptide
  MOD_RES (1), (35), (36): Xaa is C or S
  MOD_RES (13), (14), (15), (16), (17): Xaa is A or G
  MOD_RES (18), (19), (20), (21): Xaa is A or G or is absent

SEQ ID NO: 56728 - protein, 41 aa, Artificial Sequence; identical to SEQ ID NO: 3765
  GFR-binding peptide
  MOD_RES (2), (36), (37): Xaa is C or S
  MOD_RES (14), (15), (16), (17), (18): Xaa is A or G
  MOD_RES (19), (20), (21), (22): Xaa is A or G or is absent

SEQ ID NO: 56729 - protein, 34 aa, Artificial Sequence; identical to SEQ ID NO: 4712
  GFR-binding peptide
  MOD_RES (1), (33), (34): Xaa is C or S

SEQ ID NO: 56730 - protein, 32 aa, Artificial Sequence; identical to SEQ ID NO: 2782
  GFR-binding peptide
  MOD_RES (32), (32): Xaa is C or S

SEQ ID NO: 56731 - protein, 31 aa, Artificial Sequence; identical to SEQ ID NO: 5701
  GFR-binding peptide

SEQ ID NO: 56732 - protein, 39 aa, Artificial Sequence
  GFR-binding peptide
  MOD_RES (2), (4), (37), (38): Xaa is C or S
  MOD_RES (15), (16), (17), (18), (19): Xaa is A or G
  MOD_RES (20), (21), (22), (23): Xaa is A or G or is absent
LXGXEEVIMRYKKLXXXXXXXXXFYLMSIANTKVPAXXT

SEQ ID NO: 56733 - protein, 31 aa, Artificial Sequence
  GFR-binding peptide
  MOD_RES (31), (31): Xaa is C or S
DVVMGRYKKLIIQQKDNFYLMSIANMKTPTX

SEQ ID NO: 56734 - protein, 41 aa, Artificial Sequence; identical to SEQ ID NO: 26827
  GFR-binding peptide
  MOD_RES (1), (35), (36): Xaa is C or S
  MOD_RES (13), (14), (15), (16), (17): Xaa is A or G
  MOD_RES (18), (19), (20), (21): Xaa is A or G or is absent

SEQ ID NO: 56735 - protein, 35 aa, Artificial Sequence; identical to SEQ ID NO: 2785
  GFR-binding peptide
  MOD_RES (2), (4): Xaa is C or S

SEQ ID NO: 56736 - protein, 38 aa, Artificial Sequence; identical to SEQ ID NO: 4716
  GFR-binding peptide
  MOD_RES (2), (37), (38): Xaa is C or S
  MOD_RES (15), (16), (17), (18), (19): Xaa is A or G
  MOD_RES (20), (21), (22), (23): Xaa is A or G or is absent

SEQ ID NO: 56737 - protein, 35 aa, Artificial Sequence; identical to SEQ ID NO: 25797
  GFR-binding peptide
  MOD_RES (2), (4): Xaa is C or S

SEQ ID NO: 56738 - protein, 32 aa, Artificial Sequence; identical to SEQ ID NO: 25798
  GFR-binding peptide
  MOD_RES (31), (32): Xaa is C or S

SEQ ID NO: 56739 - protein, 36 aa, Artificial Sequence; identical to SEQ ID NO: 4719
  GFR-binding peptide
  MOD_RES (1), (3), (35), (36): Xaa is C or S

SEQ ID NO: 56740 - protein, 35 aa, Artificial Sequence; identical to SEQ ID NO: 26829
  GFR-binding peptide
  MOD_RES (2), (4): Xaa is C or S

SEQ ID NO: 56741 - protein, 36 aa, Artificial Sequence; identical to SEQ ID NO: 2792
  GFR-binding peptide
  MOD_RES (32), (33): Xaa is C or S

SEQ ID NO: 56742 - protein, 41 aa, Artificial Sequence; identical to SEQ ID NO: 4720
  GFR-binding peptide
  MOD_RES (1), (3), (37), (38): Xaa is C or S
  MOD_RES (15), (16), (17), (18), (19): Xaa is A or G
  MOD_RES (20), (21), (22), (23): Xaa is A or G or is absent

SEQ ID NO: 56743 - protein, 38 aa, Artificial Sequence; identical to SEQ ID NO: 4722
  GFR-binding peptide
  MOD_RES (2), (4), (38): Xaa is C or S
  MOD_RES (16), (17), (18), (19), (20): Xaa is A or G
  MOD_RES (21), (22), (23), (24): Xaa is A or G or is absent

SEQ ID NO: 56744 - protein, 37 aa, Artificial Sequence; identical to SEQ ID NO: 25802
  GFR-binding peptide
  MOD_RES (31), (32): Xaa is C or S

SEQ ID NO: 56745 - protein, 43 aa, Artificial Sequence; identical to SEQ ID NO: 2795
  GFR-binding peptide
  MOD_RES (2), (4), (38), (39): Xaa is C or S
  MOD_RES (16), (17), (18), (19), (20): Xaa is A or G
  MOD_RES (21), (22), (23), (24): Xaa is A or G or is absent

SEQ ID NO: 56746 - protein, 33 aa, Artificial Sequence; identical to SEQ ID NO: 4724
  GFR-binding peptide
  MOD_RES (33), (33): Xaa is C or S
  MOD_RES (11), (12), (13), (14), (15): Xaa is A or G
  MOD_RES (16), (17), (18), (19): Xaa is A or G or is absent

SEQ ID NO: 56747 - protein, 37 aa, Artificial Sequence; identical to SEQ ID NO: 25806
  GFR-binding peptide
  MOD_RES (1), (3), (35), (36): Xaa is C or S

SEQ ID NO: 56748 - protein, 36 aa, Artificial Sequence; identical to SEQ ID NO: 25809
  GFR-binding peptide
  MOD_RES (2), (36): Xaa is C or S
  MOD_RES (14), (15), (16), (17), (18): Xaa is A or G
  MOD_RES (19), (20), (21), (22): Xaa is A or G or is absent

SEQ ID NO: 56749 - protein, 34 aa, Artificial Sequence; identical to SEQ ID NO: 3783
  GFR-binding peptide
  MOD_RES (1), (34): Xaa is C or S

SEQ ID NO: 56750 - protein, 34 aa, Artificial Sequence; identical to SEQ ID NO: 2801
  GFR-binding peptide
  MOD_RES (2), (34): Xaa is C or S

SEQ ID NO: 56751 - protein, 39 aa, Artificial Sequence; identical to SEQ ID NO: 5712
  GFR-binding peptide
  MOD_RES (2), (34), (35): Xaa is C or S

SEQ ID NO: 56752 - protein, 37 aa, Artificial Sequence; identical to SEQ ID NO: 2802
  GFR-binding peptide
  MOD_RES (33), (34): Xaa is C or S

SEQ ID NO: 56753 - protein, 33 aa, Artificial Sequence; identical to SEQ ID NO: 25813
  GFR-binding peptide
  MOD_RES (32), (33): Xaa is C or S

SEQ ID NO: 56754 - protein, 36 aa, Artificial Sequence; identical to SEQ ID NO: 3786
  GFR-binding peptide
  MOD_RES (1), (3): Xaa is C or S
  MOD_RES (15), (16), (17), (18), (19): Xaa is A or G
  MOD_RES (20), (21), (22), (23): Xaa is A or G or is absent

SEQ ID NO: 56755 - protein, 38 aa, Artificial Sequence
  GFR-binding peptide
  MOD_RES (1), (3), (36), (37): Xaa is C or S
  MOD_RES (14), (15), (16), (17), (18): Xaa is A or G
  MOD_RES (19), (20), (21), (22): Xaa is A or G or is absent
XGXEEVIMRYKKLXXXXXXXXXFYLMSIANTKVPAXXT

SEQ ID NO: 56756 - protein, 40 aa, Artificial Sequence; identical to SEQ ID NO: 11215
  GFR-binding peptide
  MOD_RES (1), (35), (36): Xaa is C or S
  MOD_RES (13), (14), (15), (16), (17): Xaa is A or G
  MOD_RES (18), (19), (20), (21): Xaa is A or G or is absent

SEQ ID NO: 56757 - protein, 38 aa, Artificial Sequence; identical to SEQ ID NO: 3790
  GFR-binding peptide
  MOD_RES (2), (36): Xaa is C or S
  MOD_RES (14), (15), (16), (17), (18): Xaa is A or G
  MOD_RES (19), (20), (21), (22): Xaa is A or G or is absent

SEQ ID NO: 56758 - protein, 32 aa, Artificial Sequence; identical to SEQ ID NO: 4735
  GFR-binding peptide
  MOD_RES (31), (32): Xaa is C or S

SEQ ID NO: 56759 - protein, 34 aa, Artificial Sequence; identical to SEQ ID NO: 4737
  GFR-binding peptide
  MOD_RES (1), (3): Xaa is C or S

SEQ ID NO: 56760 - protein, 40 aa, Artificial Sequence; identical to SEQ ID NO: 2809
  GFR-binding peptide
  MOD_RES (1), (35), (36): Xaa is C or S
  MOD_RES (13), (14), (15), (16), (17): Xaa is A or G
  MOD_RES (18), (19), (20), (21): Xaa is A or G or is absent

SEQ ID NO: 56761 - protein, 38 aa, Artificial Sequence; identical to SEQ ID NO: 5721
  GFR-binding peptide
  MOD_RES (1), (35), (36): Xaa is C or S
  MOD_RES (13), (14), (15), (16), (17): Xaa is A or G
  MOD_RES (18), (19), (20), (21): Xaa is A or G or is absent

SEQ ID NO: 56762 - protein, 34 aa, Artificial Sequence; identical to SEQ ID NO: 4738
  GFR-binding peptide
  MOD_RES (34), (34): Xaa is C or S
  MOD_RES (12), (13), (14), (15), (16): Xaa is A or G
  MOD_RES (17), (18), (19), (20): Xaa is A or G or is absent

SEQ ID NO: 56763 - protein, 35 aa, Artificial Sequence; identical to SEQ ID NO: 2810
  GFR-binding peptide
  MOD_RES (32), (33): Xaa is C or S

SEQ ID NO: 56764 - protein, 38 aa, Artificial Sequence; identical to SEQ ID NO: 3793
  GFR-binding peptide
  MOD_RES (33), (34): Xaa is C or S
  MOD_RES (11), (12), (13), (14), (15): Xaa is A or G
  MOD_RES (16), (17), (18), (19): Xaa is A or G or is absent

SEQ ID NO: 56765 - protein, 38 aa, Artificial Sequence; identical to SEQ ID NO: 12169
  GFR-binding peptide
  MOD_RES (1), (35), (36): Xaa is C or S
  MOD_RES (13), (14), (15), (16), (17): Xaa is A or G
  MOD_RES (18), (19), (20), (21): Xaa is A or G or is absent

SEQ ID NO: 56766 - protein, 36 aa, Artificial Sequence; identical to SEQ ID NO: 2811
  GFR-binding peptide
  MOD_RES (2), (36): Xaa is C or S
  MOD_RES (14), (15), (16), (17), (18): Xaa is A or G
  MOD_RES (19), (20), (21), (22): Xaa is A or G or is absent

SEQ ID NO: 56767 - protein, 40 aa, Artificial Sequence; identical to SEQ ID NO: 3795
  GFR-binding peptide
  MOD_RES (2), (36), (37): Xaa is C or S
  MOD_RES (14), (15), (16), (17), (18): Xaa is A or G
  MOD_RES (19), (20), (21), (22): Xaa is A or G or is absent

SEQ ID NO: 56768 - protein, 37 aa, Artificial Sequence; identical to SEQ ID NO: 26850
  GFR-binding peptide
  MOD_RES (1), (35), (36): Xaa is C or S
  MOD_RES (13), (14), (15), (16), (17): Xaa is A or G
  MOD_RES (18), (19), (20), (21): Xaa is A or G or is absent

SEQ ID NO: 56769 - protein, 39 aa, Artificial Sequence; identical to SEQ ID NO: 4744
  GFR-binding peptide
  MOD_RES (2), (34), (35): Xaa is C or S

SEQ ID NO: 56770 - protein, 39 aa, Artificial Sequence; identical to SEQ ID NO: 23807
  GFR-binding peptide
  MOD_RES (1), (35), (36): Xaa is C or S
  MOD_RES (13), (14), (15), (16), (17): Xaa is A or G
  MOD_RES (18), (19), (20), (21): Xaa is A or G or is absent

SEQ ID NO: 56771 - protein, 37 aa, Artificial Sequence; identical to SEQ ID NO: 11220
  GFR-binding peptide
  MOD_RES (33), (34): Xaa is C or S
  MOD_RES (11), (12), (13), (14), (15): Xaa is A or G
  MOD_RES (16), (17), (18), (19): Xaa is A or G or is absent

SEQ ID NO: 56772 - protein, 40 aa, Artificial Sequence; identical to SEQ ID NO: 26856
  GFR-binding peptide
  MOD_RES (1), (3), (37), (38): Xaa is C or S
  MOD_RES (15), (16), (17), (18), (19): Xaa is A or G
  MOD_RES (20), (21), (22), (23): Xaa is A or G or is absent

SEQ ID NO: 56773 - protein, 36 aa, Artificial Sequence
  GFR-binding peptide
  MOD_RES (34), (35): Xaa is C or S
  MOD_RES (12), (13), (14), (15), (16): Xaa is A or G
  MOD_RES (17), (18), (19), (20): Xaa is A or G or is absent
RDVVMGRYKKLXXXXXXXXXFYLMSIANMKTPTXXP

SEQ ID NO: 56774 - protein, 39 aa, Artificial Sequence; identical to SEQ ID NO: 3801
  GFR-binding peptide
  MOD_RES (33), (34): Xaa is C or S
  MOD_RES (11), (12), (13), (14), (15): Xaa is A or G
  MOD_RES (16), (17), (18), (19): Xaa is A or G or is absent

SEQ ID NO: 56775 - protein, 33 aa, Artificial Sequence; identical to SEQ ID NO: 2819
  GFR-binding peptide
  MOD_RES (32), (33): Xaa is C or S

SEQ ID NO: 56776 - protein, 35 aa, Artificial Sequence
  GFR-binding peptide
  MOD_RES (1), (3): Xaa is C or S
  MOD_RES (14), (15), (16), (17), (18): Xaa is A or G
  MOD_RES (19), (20), (21), (22): Xaa is A or G or is absent
XGXEEVIMRYKKLXXXXXXXXXFYLMSIANTKVPA

SEQ ID NO: 56777 - protein, 39 aa, Artificial Sequence; identical to SEQ ID NO: 25827
  GFR-binding peptide
  MOD_RES (2), (4), (38), (39): Xaa is C or S
  MOD_RES (16), (17), (18), (19), (20): Xaa is A or G
  MOD_RES (21), (22), (23), (24): Xaa is A or G or is absent

SEQ ID NO: 56778 - protein, 41 aa, Artificial Sequence; identical to SEQ ID NO: 5731
  GFR-binding peptide
  MOD_RES (1), (3), (35), (36): Xaa is C or S

SEQ ID NO: 56779 - protein, 38 aa, Artificial Sequence; identical to SEQ ID NO: 5734
  GFR-binding peptide
  MOD_RES (2), (4), (36), (37): Xaa is C or S

SEQ ID NO: 56780 - protein, 39 aa, Artificial Sequence; identical to SEQ ID NO: 4751
  GFR-binding peptide
  MOD_RES (1), (3), (37), (38): Xaa is C or S
  MOD_RES (15), (16), (17), (18), (19): Xaa is A or G
  MOD_RES (20), (21), (22), (23): Xaa is A or G or is absent

SEQ ID NO: 56781 - protein, 37 aa, Artificial Sequence
  GFR-binding peptide
  MOD_RES (33), (34): Xaa is C or S
  MOD_RES (11), (12), (13), (14), (15): Xaa is A or G
  MOD_RES (16), (17), (18), (19): Xaa is A or G or is absent
DVVMGRYKKLXXXXXXXXXFYLMSIANMKTPTXXPGA

SEQ ID NO: 56782 - protein, 37 aa, Artificial Sequence; identical to SEQ ID NO: 4757
  GFR-binding peptide
  MOD_RES (1), (3), (35), (36): Xaa is C or S

SEQ ID NO: 56783 - protein, 34 aa, Artificial Sequence; identical to SEQ ID NO: 4758
  GFR-binding peptide
  MOD_RES (1), (3): Xaa is C or S

SEQ ID NO: 56784 - protein, 35 aa, Artificial Sequence; identical to SEQ ID NO: 5742
  GFR-binding peptide
  MOD_RES (2), (4): Xaa is C or S

SEQ ID NO: 56785 - protein, 36 aa, Artificial Sequence; identical to SEQ ID NO: 25841
  GFR-binding peptide
  MOD_RES (2), (4), (36): Xaa is C or S

SEQ ID NO: 56786 - protein, 38 aa, Artificial Sequence; identical to SEQ ID NO: 25842
  GFR-binding peptide
  MOD_RES (33), (34): Xaa is C or S
  MOD_RES (11), (12), (13), (14), (15): Xaa is A or G
  MOD_RES (16), (17), (18), (19): Xaa is A or G or is absent

SEQ ID NO: 56787 - protein, 34 aa, Artificial Sequence; identical to SEQ ID NO: 4761
  GFR-binding peptide
  MOD_RES (31), (32): Xaa is C or S

SEQ ID NO: 56788 - protein, 40 aa, Artificial Sequence; identical to SEQ ID NO: 2847
  GFR-binding peptide
  MOD_RES (2), (36): Xaa is C or S
  MOD_RES (14), (15), (16), (17), (18): Xaa is A or G
  MOD_RES (19), (20), (21), (22): Xaa is A or G or is absent

SEQ ID NO: 56789 - protein, 31 aa, Artificial Sequence; identical to SEQ ID NO: 3821
  GFR-binding peptide

SEQ ID NO: 56790 - protein, 40 aa, Artificial Sequence; identical to SEQ ID NO: 2850
  GFR-binding peptide
  MOD_RES (1), (3), (37), (38): Xaa is C or S
  MOD_RES (15), (16), (17), (18), (19): Xaa is A or G
  MOD_RES (20), (21), (22), (23): Xaa is A or G or is absent

SEQ ID NO: 56791 - protein, 39 aa, Artificial Sequence; identical to SEQ ID NO: 5750
  GFR-binding peptide
  MOD_RES (1), (35), (36): Xaa is C or S
  MOD_RES (13), (14), (15), (16), (17): Xaa is A or G
  MOD_RES (18), (19), (20), (21): Xaa is A or G or is absent

SEQ ID NO: 56792 - protein, 36 aa, Artificial Sequence; identical to SEQ ID NO: 3823
  GFR-binding peptide
  MOD_RES (2), (4), (36): Xaa is C or S

SEQ ID NO: 56793 - protein, 42 aa, Artificial Sequence
  GFR-binding peptide
  MOD_RES (2), (4), (36), (37): Xaa is C or S
SXGXRDVVMGRYKKLIIQQKDNFYLMSIANMKTPTXXPGASG

SEQ ID NO: 56794 - protein, 35 aa, Artificial Sequence; identical to SEQ ID NO: 3825
  GFR-binding peptide
  MOD_RES (31), (32): Xaa is C or S

SEQ ID NO: 56795 - protein, 43 aa, Artificial Sequence; identical to SEQ ID NO: 2853
  GFR-binding peptide
  MOD_RES (1), (3), (37), (38): Xaa is C or S
  MOD_RES (15), (16), (17), (18), (19): Xaa is A or G
  MOD_RES (20), (21), (22), (23): Xaa is A or G or is absent

SEQ ID NO: 56796 - protein, 36 aa, Artificial Sequence
  GFR-binding peptide
  MOD_RES (1), (3), (36): Xaa is C or S
  MOD_RES (14), (15), (16), (17), (18): Xaa is A or G
  MOD_RES (19), (20), (21), (22): Xaa is A or G or is absent
XGXEEVIMRYKKLXXXXXXXXXFYLMSIANTKVPAX

SEQ ID NO: 56797 - protein, 36 aa, Artificial Sequence
  GFR-binding peptide
  MOD_RES (2), (33), (34): Xaa is C or S
GXEEVIMRYKKLLLVRGNDFYLMSIANTKVPAXXTS

SEQ ID NO: 56798 - protein, 38 aa, Artificial Sequence; identical to SEQ ID NO: 10322
  GFR-binding peptide
  MOD_RES (2), (4), (38): Xaa is C or S
  MOD_RES (16), (17), (18), (19), (20): Xaa is A or G
  MOD_RES (21), (22), (23), (24): Xaa is A or G or is absent

SEQ ID NO: 56799 - protein, 42 aa, Artificial Sequence
  GFR-binding peptide
  MOD_RES (2), (36), (37): Xaa is C or S
  MOD_RES (14), (15), (16), (17), (18): Xaa is A or G
  MOD_RES (19), (20), (21), (22): Xaa is A or G or is absent
GXSRVVMNRYKKLXXXXXXXXXFYLVSIANLKTPAXXPKPVH

SEQ ID NO: 56800 - protein, 37 aa, Artificial Sequence; identical to SEQ ID NO: 5758
  GFR-binding peptide
  MOD_RES (1), (3): Xaa is C or S
  MOD_RES (16), (17), (18), (19), (20): Xaa is A or G
  MOD_RES (21), (22), (23), (24): Xaa is A or G or is absent

SEQ ID NO: 56801 - protein, 38 aa, Artificial Sequence; identical to SEQ ID NO: 5759
  GFR-binding peptide
  MOD_RES (1), (35), (36): Xaa is C or S
  MOD_RES (13), (14), (15), (16), (17): Xaa is A or G
  MOD_RES (18), (19), (20), (21): Xaa is A or G or is absent

SEQ ID NO: 56802 - protein, 33 aa, Artificial Sequence; identical to SEQ ID NO: 5760
  GFR-binding peptide
  MOD_RES (31), (31): Xaa is C or S

SEQ ID NO: 56803 - protein, 38 aa, Artificial Sequence; identical to SEQ ID NO: 2855
  GFR-binding peptide
  MOD_RES (2), (4), (36), (37): Xaa is C or S

SEQ ID NO: 56804 - protein, 37 aa, Artificial Sequence; identical to SEQ ID NO: 12213
  GFR-binding peptide
  MOD_RES (2), (34), (35): Xaa is C or S

SEQ ID NO: 56805 - protein, 32 aa, Artificial Sequence; identical to SEQ ID NO: 3829
  GFR-binding peptide
  MOD_RES (1), (1): Xaa is C or S

SEQ ID NO: 56806 - protein, 37 aa, Artificial Sequence
  GFR-binding peptide
  MOD_RES (2), (35), (36): Xaa is C or S
  MOD_RES (13), (14), (15), (16), (17): Xaa is A or G
  MOD_RES (18), (19), (20), (21): Xaa is A or G or is absent
GXEEVIMRYKKLXXXXXXXXXFYLMSIANTKVPAXXT

SEQ ID NO: 56807 - protein, 35 aa, Artificial Sequence
  GFR-binding peptide
  MOD_RES (2), (2): Xaa is C or S
  MOD_RES (14), (15), (16), (17), (18): Xaa is A or G
  MOD_RES (19), (20), (21), (22): Xaa is A or G or is absent
GXRDVVMGRYKKLXXXXXXXXXFYLMSIANMKTPT

SEQ ID NO: 56808 - protein, 40 aa, Artificial Sequence
  GFR-binding peptide
  MOD_RES (2), (34), (35): Xaa is C or S
GXRDVVMGRYKKLIIQQKDNFYLMSIANMKTPTXXPGASG

SEQ ID NO: 56809 - protein, 39 aa, Artificial Sequence; identical to SEQ ID NO: 26901
  GFR-binding peptide
  MOD_RES (2), (34), (35): Xaa is C or S

SEQ ID NO: 56810 - protein, 33 aa, Artificial Sequence
  GFR-binding peptide
  MOD_RES (33), (33): Xaa is C or S
  MOD_RES (11), (12), (13), (14), (15): Xaa is A or G
  MOD_RES (16), (17), (18), (19): Xaa is A or G or is absent
EEVIMRYKKLXXXXXXXXXFYLMSIANTKVPAX

SEQ ID NO: 56811 - protein, 40 aa, Artificial Sequence; identical to SEQ ID NO: 2862
  GFR-binding peptide
  MOD_RES (1), (3), (37), (38): Xaa is C or S
  MOD_RES (15), (16), (17), (18), (19): Xaa is A or G
  MOD_RES (20), (21), (22), (23): Xaa is A or G or is absent

SEQ ID NO: 56812 - protein, 44 aa, Artificial Sequence; identical to SEQ ID NO: 2864
  GFR-binding peptide
  MOD_RES (2), (4), (38): Xaa is C or S
  MOD_RES (16), (17), (18), (19), (20): Xaa is A or G
  MOD_RES (21), (22), (23), (24): Xaa is A or G or is absent

SEQ ID NO: 56813 - protein, 35 aa, Artificial Sequence; identical to SEQ ID NO: 4789
  GFR-binding peptide
  MOD_RES (1), (35): Xaa is C or S
  MOD_RES (13), (14), (15), (16), (17): Xaa is A or G
  MOD_RES (18), (19), (20), (21): Xaa is A or G or is absent

SEQ ID NO: 56814 - protein, 34 aa, Artificial Sequence; identical to SEQ ID NO: 5769
  GFR-binding peptide
  MOD_RES (1), (33), (34): Xaa is C or S

SEQ ID NO: 56815 - protein, 34 aa, Artificial Sequence; identical to SEQ ID NO: 12224
  GFR-binding peptide
  MOD_RES (31), (32): Xaa is C or S

SEQ ID NO: 56816 - protein, 37 aa, Artificial Sequence; identical to SEQ ID NO: 5772
  GFR-binding peptide
  MOD_RES (33), (33): Xaa is C or S
  MOD_RES (11), (12), (13), (14), (15): Xaa is A or G
  MOD_RES (16), (17), (18), (19): Xaa is A or G or is absent

SEQ ID NO: 56817 - protein, 35 aa, Artificial Sequence
  GFR-binding peptide
  MOD_RES (34), (35): Xaa is C or S
  MOD_RES (12), (13), (14), (15), (16): Xaa is A or G
  MOD_RES (17), (18), (19), (20): Xaa is A or G or is absent
RDVVMGRYKKLXXXXXXXXXFYLMSIANMKTPTXX

SEQ ID NO: 56818 - protein, 39 aa, Artificial Sequence; identical to SEQ ID NO: 4798
  GFR-binding peptide
  MOD_RES (34), (34): Xaa is C or S
  MOD_RES (12), (13), (14), (15), (16): Xaa is A or G
  MOD_RES (17), (18), (19), (20): Xaa is A or G or is absent

SEQ ID NO: 56819 - protein, 39 aa, Artificial Sequence; identical to SEQ ID NO: 23864
  GFR-binding peptide
  MOD_RES (1), (33), (34): Xaa is C or S

SEQ ID NO: 56820 - protein, 36 aa, Artificial Sequence; identical to SEQ ID NO: 5774
  GFR-binding peptide
  MOD_RES (2), (35), (36): Xaa is C or S

SEQ ID NO: 56821 - protein, 34 aa, Artificial Sequence; identical to SEQ ID NO: 2876
  GFR-binding peptide
  MOD_RES (32), (33): Xaa is C or S

SEQ ID NO: 56822 - protein, 42 aa, Artificial Sequence; identical to SEQ ID NO: 23866
  GFR-binding peptide
  MOD_RES (2), (4), (38), (39): Xaa is C or S
  MOD_RES (16), (17), (18), (19), (20): Xaa is A or G
  MOD_RES (21), (22), (23), (24): Xaa is A or G or is absent

SEQ ID NO: 56823 - protein, 38 aa, Artificial Sequence; identical to SEQ ID NO: 24894
  GFR-binding peptide
  MOD_RES (33), (34): Xaa is C or S
  MOD_RES (11), (12), (13), (14), (15): Xaa is A or G
  MOD_RES (16), (17), (18), (19): Xaa is A or G or is absent

SEQ ID NO: 56824 - protein, 37 aa, Artificial Sequence
  GFR-binding peptide
  MOD_RES (31), (32): Xaa is C or S
RVVMNRYKKLIVNSSDDFYLVSIANLKTPAXXPKPVH

SEQ ID NO: 56825 - protein, 38 aa, Artificial Sequence; identical to SEQ ID NO: 24899
  GFR-binding peptide
  MOD_RES (1), (35), (36): Xaa is C or S
  MOD_RES (13), (14), (15), (16), (17): Xaa is A or G
  MOD_RES (18), (19), (20), (21): Xaa is A or G or is absent

SEQ ID NO: 56826 - protein, 39 aa, Artificial Sequence; identical to SEQ ID NO: 25890
  GFR-binding peptide
  MOD_RES (2), (36), (37): Xaa is C or S
  MOD_RES (14), (15), (16), (17), (18): Xaa is A or G
  MOD_RES (19), (20), (21), (22): Xaa is A or G or is absent

SEQ ID NO: 56827 - protein, 32 aa, Artificial Sequence; identical to SEQ ID NO: 5781
  GFR-binding peptide
  MOD_RES (31), (31): Xaa is C or S

SEQ ID NO: 56828 - protein, 36 aa, Artificial Sequence
  GFR-binding peptide
  MOD_RES (1), (3), (35), (36): Xaa is C or S
XGXRDVVMGRYKKLIIQQKDNFYLMSIANMKTPTXX

SEQ ID NO: 56829 - protein, 36 aa, Artificial Sequence; identical to SEQ ID NO: 3849
  GFR-binding peptide
  MOD_RES (33), (34): Xaa is C or S
  MOD_RES (11), (12), (13), (14), (15): Xaa is A or G
  MOD_RES (16), (17), (18), (19): Xaa is A or G or is absent

SEQ ID NO: 56830 - protein, 42 aa, Artificial Sequence; identical to SEQ ID NO: 5785
  GFR-binding peptide
  MOD_RES (2), (36): Xaa is C or S
  MOD_RES (14), (15), (16), (17), (18): Xaa is A or G
  MOD_RES (19), (20), (21), (22): Xaa is A or G or is absent

SEQ ID NO: 56831 - protein, 37 aa, Artificial Sequence; identical to SEQ ID NO: 4813
  GFR-binding peptide
  MOD_RES (1), (3), (35), (36): Xaa is C or S

SEQ ID NO: 56832 - protein, 40 aa, Artificial Sequence; identical to SEQ ID NO: 2883
  GFR-binding peptide
  MOD_RES (2), (4), (38), (39): Xaa is C or S
  MOD_RES (16), (17), (18), (19), (20): Xaa is A or G
  MOD_RES (21), (22), (23), (24): Xaa is A or G or is absent

SEQ ID NO: 56833 - protein, 36 aa, Artificial Sequence; identical to SEQ ID NO: 5788
  GFR-binding peptide
  MOD_RES (34), (35): Xaa is C or S
  MOD_RES (12), (13), (14), (15), (16): Xaa is A or G
  MOD_RES (17), (18), (19), (20): Xaa is A or G or is absent

SEQ ID NO: 56834 - protein, 36 aa, Artificial Sequence; identical to SEQ ID NO: 2886
  GFR-binding peptide
  MOD_RES (1), (3), (35), (36): Xaa is C or S

SEQ ID NO: 56835 - protein, 38 aa, Artificial Sequence; identical to SEQ ID NO: 11278
  GFR-binding peptide
  MOD_RES (2), (36), (37): Xaa is C or S
  MOD_RES (14), (15), (16), (17), (18): Xaa is A or G
  MOD_RES (19), (20), (21), (22): Xaa is A or G or is absent

SEQ ID NO: 56836 - protein, 36 aa, Artificial Sequence; identical to SEQ ID NO: 2889
  GFR-binding peptide
  MOD_RES (1), (3), (35): Xaa is C or S

SEQ ID NO: 56837 - protein, 40 aa, Artificial Sequence; identical to SEQ ID NO: 4824
  GFR-binding peptide
  MOD_RES (1), (36), (37): Xaa is C or S
  MOD_RES (14), (15), (16), (17), (18): Xaa is A or G
  MOD_RES (19), (20), (21), (22): Xaa is A or G or is absent

SEQ ID NO: 56838 - protein, 37 aa, Artificial Sequence; identical to SEQ ID NO: 4825
  GFR-binding peptide
  MOD_RES (32), (33): Xaa is C or S

SEQ ID NO: 56839 - protein, 39 aa, Artificial Sequence; identical to SEQ ID NO: 4826
  GFR-binding peptide
  MOD_RES (2), (35), (36): Xaa is C or S

SEQ ID NO: 56840 - protein, 37 aa, Artificial Sequence; identical to SEQ ID NO: 3854
  GFR-binding peptide
  MOD_RES (1), (35), (36): Xaa is C or S
  MOD_RES (13), (14), (15), (16), (17): Xaa is A or G
  MOD_RES (18), (19), (20), (21): Xaa is A or G or is absent

SEQ ID NO: 56841 - protein, 36 aa, Artificial Sequence; identical to SEQ ID NO: 4829
  GFR-binding peptide
  MOD_RES (2), (34), (35): Xaa is C or S

SEQ ID NO: 56842 - protein, 41 aa, Artificial Sequence
  GFR-binding peptide
  MOD_RES (1), (35), (36): Xaa is C or S
  MOD_RES (13), (14), (15), (16), (17): Xaa is A or G
  MOD_RES (18), (19), (20), (21): Xaa is A or G or is absent
XSRVVMNRYKKLXXXXXXXXXFYLVSIANLKTPAXXPKPVH

SEQ ID NO: 56843 - protein, 36 aa, Artificial Sequence; identical to SEQ ID NO: 2897
  GFR-binding peptide
  MOD_RES (1), (35), (36): Xaa is C or S
  MOD_RES (13), (14), (15), (16), (17): Xaa is A or G
  MOD_RES (18), (19), (20), (21): Xaa is A or G or is absent

SEQ ID NO: 56844 - protein, 39 aa, Artificial Sequence
  GFR-binding peptide
  MOD_RES (2), (33), (34): Xaa is C or S
GXEEVIMRYKKLLLVRGNDFYLMSIANTKVPAXXTSPVR

SEQ ID NO: 56845 - protein, 38 aa, Artificial Sequence; identical to SEQ ID NO: 3859
  GFR-binding peptide
  MOD_RES (34), (35): Xaa is C or S
  MOD_RES (12), (13), (14), (15), (16): Xaa is A or G
  MOD_RES (17), (18), (19), (20): Xaa is A or G or is absent

SEQ ID NO: 56846 - protein, 41 aa, Artificial Sequence; identical to SEQ ID NO: 3860
  GFR-binding peptide
  MOD_RES (2), (4), (38), (39): Xaa is C or S
  MOD_RES (16), (17), (18), (19), (20): Xaa is A or G
  MOD_RES (21), (22), (23), (24): Xaa is A or G or is absent

SEQ ID NO: 56847 - protein, 38 aa, Artificial Sequence; identical to SEQ ID NO: 10361
  GFR-binding peptide
  MOD_RES (32), (33): Xaa is C or S

SEQ ID NO: 56848 - protein, 40 aa, Artificial Sequence; identical to SEQ ID NO: 3861
  GFR-binding peptide
  MOD_RES (34), (35): Xaa is C or S
  MOD_RES (12), (13), (14), (15), (16): Xaa is A or G
  MOD_RES (17), (18), (19), (20): Xaa is A or G or is absent

SEQ ID NO: 56849 - protein, 41 aa, Artificial Sequence; identical to SEQ ID NO: 2899
  GFR-binding peptide
  MOD_RES (2), (4), (36): Xaa is C or S

SEQ ID NO: 56850 - protein, 35 aa, Artificial Sequence; identical to SEQ ID NO: 3863
  GFR-binding peptide
  MOD_RES (1), (33): Xaa is C or S

SEQ ID NO: 56851 - protein, 42 aa, Artificial Sequence; identical to SEQ ID NO: 3864
  GFR-binding peptide
  MOD_RES (2), (36), (37): Xaa is C or S
  MOD_RES (14), (15), (16), (17), (18): Xaa is A or G
  MOD_RES (19), (20), (21), (22): Xaa is A or G or is absent

SEQ ID NO: 56852 - protein, 41 aa, Artificial Sequence; identical to SEQ ID NO: 13238
  GFR-binding peptide
  MOD_RES (1), (3), (35), (36): Xaa is C or S

SEQ ID NO: 56853 - protein, 38 aa, Artificial Sequence
  GFR-binding peptide
  MOD_RES (33), (34): Xaa is C or S
  MOD_RES (11), (12), (13), (14), (15): Xaa is A or G
  MOD_RES (16), (17), (18), (19): Xaa is A or G or is absent
EEVIMRYKKLXXXXXXXXXFYLMSIANTKVPAXXTSPV

SEQ ID NO: 56854 - protein, 39 aa, Artificial Sequence
  GFR-binding peptide
  MOD_RES (33), (34): Xaa is C or S
  MOD_RES (11), (12), (13), (14), (15): Xaa is A or G
  MOD_RES (16), (17), (18), (19): Xaa is A or G or is absent
DVVMGRYKKLXXXXXXXXXFYLMSIANMKTPTXXPGASG

SEQ ID NO: 56855 - protein, 32 aa, Artificial Sequence; identical to SEQ ID NO: 2906
  GFR-binding peptide
  MOD_RES (32), (32): Xaa is C or S

SEQ ID NO: 56856 - protein, 41 aa, Artificial Sequence; identical to SEQ ID NO: 3872
  GFR-binding peptide
  MOD_RES (2), (36), (37): Xaa is C or S
  MOD_RES (14), (15), (16), (17), (18): Xaa is A or G
  MOD_RES (19), (20), (21), (22): Xaa is A or G or is absent

SEQ ID NO: 56857 - protein, 36 aa, Artificial Sequence; identical to SEQ ID NO: 25924
  GFR-binding peptide
  MOD_RES (1), (3): Xaa is C or S
  MOD_RES (15), (16), (17), (18), (19): Xaa is A or G
  MOD_RES (20), (21), (22), (23): Xaa is A or G or is absent

SEQ ID NO: 56858 - protein, 41 aa, Artificial Sequence; identical to SEQ ID NO: 5815
  GFR-binding peptide
  MOD_RES (2), (4), (38), (39): Xaa is C or S
  MOD_RES (16), (17), (18), (19), (20): Xaa is A or G
  MOD_RES (21), (22), (23), (24): Xaa is A or G or is absent

SEQ ID NO: 56859 - protein, 32 aa, Artificial Sequence; identical to SEQ ID NO: 4852
  GFR-binding peptide
  MOD_RES (32), (32): Xaa is C or S

SEQ ID NO: 56860 - protein, 36 aa, Artificial Sequence; identical to SEQ ID NO: 3875
  GFR-binding peptide
  MOD_RES (2), (4), (36): Xaa is C or S

SEQ ID NO: 56861 - protein, 39 aa, Artificial Sequence
  GFR-binding peptide
  MOD_RES (1), (33), (34): Xaa is C or S
XSRVVMNRYKKLIVNSSDDFYLVSIANLKTPAXXPKPVH

SEQ ID NO: 56862 - protein, 33 aa, Artificial Sequence; identical to SEQ ID NO: 3877
  GFR-binding peptide
  MOD_RES (32), (33): Xaa is C or S

SEQ ID NO: 56863 - protein, 38 aa, Artificial Sequence; identical to SEQ ID NO: 25927
  GFR-binding peptide
  MOD_RES (1), (33), (34): Xaa is C or S

SEQ ID NO: 56864 - protein, 36 aa, Artificial Sequence; identical to SEQ ID NO: 10376
  GFR-binding peptide
  MOD_RES (31), (32): Xaa is C or S

SEQ ID NO: 56865 - protein, 39 aa, Artificial Sequence; identical to SEQ ID NO: 5820
  GFR-binding peptide
  MOD_RES (2), (36), (37): Xaa is C or S
  MOD_RES (14), (15), (16), (17), (18): Xaa is A or G
  MOD_RES (19), (20), (21), (22): Xaa is A or G or is absent

SEQ ID NO: 56866 - protein, 37 aa, Artificial Sequence
  GFR-binding peptide
  MOD_RES (1), (3), (34), (35): Xaa is C or S
XGXEEVIMRYKKLLLVRGNDFYLMSIANTKVPAXXTS

SEQ ID NO: 56867 - protein, 41 aa, Artificial Sequence; identical to SEQ ID NO: 4860
  GFR-binding peptide
  MOD_RES (1), (35), (36): Xaa is C or S
  MOD_RES (13), (14), (15), (16), (17): Xaa is A or G
  MOD_RES (18), (19), (20), (21): Xaa is A or G or is absent

SEQ ID NO: 56868 - protein, 35 aa, Artificial Sequence; identical to SEQ ID NO: 10383
  GFR-binding peptide
  MOD_RES (2), (2): Xaa is C or S
  MOD_RES (14), (15), (16), (17), (18): Xaa is A or G
  MOD_RES (19), (20), (21), (22): Xaa is A or G or is absent

SEQ ID NO: 56869 - protein, 33 aa, Artificial Sequence; identical to SEQ ID NO: 2917
  GFR-binding peptide
  MOD_RES (33), (33): Xaa is C or S

SEQ ID NO: 56870 - protein, 32 aa, Artificial Sequence; identical to SEQ ID NO: 4862
  GFR-binding peptide
  MOD_RES (32), (32): Xaa is C or S

SEQ ID NO: 56871 - protein, 35 aa, Artificial Sequence; identical to SEQ ID NO: 2918
  GFR-binding peptide
  MOD_RES (33), (34): Xaa is C or S
  MOD_RES (11), (12), (13), (14), (15): Xaa is A or G
  MOD_RES (16), (17), (18), (19): Xaa is A or G or is absent

SEQ ID NO: 56872 - protein, 40 aa, Artificial Sequence
  GFR-binding peptide
  MOD_RES (2), (4), (37), (38): Xaa is C or S
  MOD_RES (15), (16), (17), (18), (19): Xaa is A or G
  MOD_RES (20), (21), (22), (23): Xaa is A or G or is absent
LXGXEEVIMRYKKLXXXXXXXXXFYLMSIANTKVPAXXTS

SEQ ID NO: 56873 - protein, 36 aa, Artificial Sequence; identical to SEQ ID NO: 3882
  GFR-binding peptide
  MOD_RES (31), (32): Xaa is C or S

SEQ ID NO: 56874 - protein, 34 aa, Artificial Sequence; identical to SEQ ID NO: 5826
  GFR-binding peptide
  MOD_RES (32), (33): Xaa is C or S

SEQ ID NO: 56875 - protein, 33 aa, Artificial Sequence
  GFR-binding peptide
  MOD_RES (31), (32): Xaa is C or S
EEVIMRYKKLLLVRGNDFYLMSIANTKVPAXXT

SEQ ID NO: 56876 - protein, 40 aa, Artificial Sequence; identical to SEQ ID NO: 2919
  GFR-binding peptide
  MOD_RES (1), (35), (36): Xaa is C or S
  MOD_RES (13), (14), (15), (16), (17): Xaa is A or G
  MOD_RES (18), (19), (20), (21): Xaa is A or G or is absent

SEQ ID NO: 56877 - protein, 37 aa, Artificial Sequence; identical to SEQ ID NO: 2920
  GFR-binding peptide
  MOD_RES (32), (33): Xaa is C or S

SEQ ID NO: 56878 - protein, 37 aa, Artificial Sequence; identical to SEQ ID NO: 4867
  GFR-binding peptide
  MOD_RES (2), (4): Xaa is C or S
  MOD_RES (16), (17), (18), (19), (20): Xaa is A or G
  MOD_RES (21), (22), (23), (24): Xaa is A or G or is absent

SEQ ID NO: 56879 - protein, 36 aa, Artificial Sequence; identical to SEQ ID NO: 4869
  GFR-binding peptide
  MOD_RES (1), (3), (36): Xaa is C or S

SEQ ID NO: 56880 - protein, 39 aa, Artificial Sequence; identical to SEQ ID NO: 2922
  GFR-binding peptide
  MOD_RES (2), (4), (38), (39): Xaa is C or S
  MOD_RES (16), (17), (18), (19), (20): Xaa is A or G
  MOD_RES (21), (22), (23), (24): Xaa is A or G or is absent

SEQ ID NO: 56881 - protein, 39 aa, Artificial Sequence; identical to SEQ ID NO: 23921
  GFR-binding peptide
  MOD_RES (34), (35): Xaa is C or S
  MOD_RES (12), (13), (14), (15), (16): Xaa is A or G
  MOD_RES (17), (18), (19), (20): Xaa is A or G or is absent

SEQ ID NO: 56882 - protein, 40 aa, Artificial Sequence; identical to SEQ ID NO: 4870
  GFR-binding peptide
  MOD_RES (2), (34), (35): Xaa is C or S

SEQ ID NO: 56883 - protein, 39 aa, Artificial Sequence; identical to SEQ ID NO: 4871
  GFR-binding peptide
  MOD_RES (2), (4), (36), (37): Xaa is C or S

SEQ ID NO: 56884 - protein, 43 aa, Artificial Sequence
  GFR-binding peptide
  MOD_RES (2), (4), (38), (39): Xaa is C or S
  MOD_RES (16), (17), (18), (19), (20): Xaa is A or G
  MOD_RES (21), (22), (23), (24): Xaa is A or G or is absent
SXGXRDVVMGRYKKLXXXXXXXXXFYLMSIANMKTPTXXPGAS

SEQ ID NO: 56885 - protein, 36 aa, Artificial Sequence; identical to SEQ ID NO: 5831
  GFR-binding peptide
  MOD_RES (2), (2): Xaa is C or S
  MOD_RES (15), (16), (17), (18), (19): Xaa is A or G
  MOD_RES (20), (21), (22), (23): Xaa is A or G or is absent

SEQ ID NO: 56886 - protein, 36 aa, Artificial Sequence; identical to SEQ ID NO: 23928
  GFR-binding peptide
  MOD_RES (1), (3), (35), (36): Xaa is C or S

SEQ ID NO: 56887 - protein, 33 aa, Artificial Sequence; identical to SEQ ID NO: 3886
  GFR-binding peptide
  MOD_RES (2), (2): Xaa is C or S

SEQ ID NO: 56888 - protein, 35 aa, Artificial Sequence
  GFR-binding peptide
  MOD_RES (1), (35): Xaa is C or S
  MOD_RES (13), (14), (15), (16), (17): Xaa is A or G
  MOD_RES (18), (19), (20), (21): Xaa is A or G or is absent
XRDVVMGRYKKLXXXXXXXXXFYLMSIANMKTPTX

SEQ ID NO: 56889 - protein, 40 aa, Artificial Sequence; identical to SEQ ID NO: 3887
  GFR-binding peptide
  MOD_RES (35), (36): Xaa is C or S
  MOD_RES (13), (14), (15), (16), (17): Xaa is A or G
  MOD_RES (18), (19), (20), (21): Xaa is A or G or is absent

SEQ ID NO: 56890 - protein, 36 aa, Artificial Sequence; identical to SEQ ID NO: 5835
  GFR-binding peptide
  MOD_RES (31), (31): Xaa is C or S

SEQ ID NO: 56891 - protein, 41 aa, Artificial Sequence; identical to SEQ ID NO: 26962
  GFR-binding peptide
  MOD_RES (1), (3), (35), (36): Xaa is C or S

SEQ ID NO: 56892 - protein, 41 aa, Artificial Sequence; identical to SEQ ID NO: 25946
  GFR-binding peptide
  MOD_RES (2), (4), (36), (37): Xaa is C or S

SEQ ID NO: 56893 - protein, 34 aa, Artificial Sequence; identical to SEQ ID NO: 13270
  GFR-binding peptide
  MOD_RES (34), (34): Xaa is C or S
  MOD_RES (12), (13), (14), (15), (16): Xaa is A or G
  MOD_RES (17), (18), (19), (20): Xaa is A or G or is absent

SEQ ID NO: 56894 - protein, 37 aa, Artificial Sequence; identical to SEQ ID NO: 2931
  GFR-binding peptide
  MOD_RES (2), (4): Xaa is C or S
  MOD_RES (16), (17), (18), (19), (20): Xaa is A or G
  MOD_RES (21), (22), (23), (24): Xaa is A or G or is absent

SEQ ID NO: 56895 - protein, 38 aa, Artificial Sequence
  GFR-binding peptide
  MOD_RES (1), (3), (34), (35): Xaa is C or S
XGXEEVIMRYKKLLLVRGNDFYLMSIANTKVPAXXTSP

SEQ ID NO: 56896 - protein, 34 aa, Artificial Sequence; identical to SEQ ID NO: 3896
  GFR-binding peptide
  MOD_RES (1), (3): Xaa is C or S

SEQ ID NO: 56897 - protein, 39 aa, Artificial Sequence; identical to SEQ ID NO: 13275
  GFR-binding peptide
  MOD_RES (1), (33), (34): Xaa is C or S

SEQ ID NO: 56898 - protein, 36 aa, Artificial Sequence; identical to SEQ ID NO: 2936
  GFR-binding peptide
  MOD_RES (34), (35): Xaa is C or S
  MOD_RES (12), (13), (14), (15), (16): Xaa is A or G
  MOD_RES (17), (18), (19), (20): Xaa is A or G or is absent

SEQ ID NO: 56899 - protein, 37 aa, Artificial Sequence; identical to SEQ ID NO: 2938
  GFR-binding peptide
  MOD_RES (1), (33), (34): Xaa is C or S

SEQ ID NO: 56900 - protein, 42 aa, Artificial Sequence; identical to SEQ ID NO: 3898
  GFR-binding peptide
  MOD_RES (2), (4), (36), (37): Xaa is C or S

SEQ ID NO: 56901 - protein, 39 aa, Artificial Sequence; identical to SEQ ID NO: 5846
  GFR-binding peptide
  MOD_RES (2), (4), (38): Xaa is C or S
  MOD_RES (16), (17), (18), (19), (20): Xaa is A or G
  MOD_RES (21), (22), (23), (24): Xaa is A or G or is absent

SEQ ID NO: 56902 - protein, 39 aa, Artificial Sequence; identical to SEQ ID NO: 5849
  GFR-binding peptide
  MOD_RES (2), (34), (35): Xaa is C or S

SEQ ID NO: 56903 - protein, 36 aa, Artificial Sequence; identical to SEQ ID NO: 3899
  GFR-binding peptide
  MOD_RES (2), (34), (35): Xaa is C or S

SEQ ID NO: 56904 - protein, 41 aa, Artificial Sequence; identical to SEQ ID NO: 4876
  GFR-binding peptide
  MOD_RES (1), (3), (35), (36): Xaa is C or S

SEQ ID NO: 56905 - protein, 40 aa, Artificial Sequence; identical to SEQ ID NO: 4878
  GFR-binding peptide
  MOD_RES (2), (4), (36), (37): Xaa is C or S

SEQ ID NO: 56906 - protein, 34 aa, Artificial Sequence
  GFR-binding peptide
  MOD_RES (2), (2): Xaa is C or S
  MOD_RES (13), (14), (15), (16), (17): Xaa is A or G
  MOD_RES (18), (19), (20), (21): Xaa is A or G or is absent
GXEEVIMRYKKLXXXXXXXXXFYLMSIANTKVPA

SEQ ID NO: 56907 - protein, 37 aa, Artificial Sequence
  GFR-binding peptide
  MOD_RES (1), (32), (33): Xaa is C or S
XEEVIMRYKKLLLVRGNDFYLMSIANTKVPAXXTSPV

SEQ ID NO: 56908 - protein, 32 aa, Artificial Sequence; identical to SEQ ID NO: 24983
  GFR-binding peptide
  MOD_RES (1), (1): Xaa is C or S

SEQ ID NO: 56909 - protein, 34 aa, Artificial Sequence; identical to SEQ ID NO: 2947
  GFR-binding peptide
  MOD_RES (1), (1): Xaa is C or S
  MOD_RES (13), (14), (15), (16), (17): Xaa is A or G
  MOD_RES (18), (19), (20), (21): Xaa is A or G or is absent

SEQ ID NO: 56910 - protein, 37 aa, Artificial Sequence; identical to SEQ ID NO: 5853
  GFR-binding peptide
  MOD_RES (32), (33): Xaa is C or S

SEQ ID NO: 56911 - protein, 37 aa, Artificial Sequence; identical to SEQ ID NO: 26986
  GFR-binding peptide
  MOD_RES (32), (33): Xaa is C or S

SEQ ID NO: 56912 - protein, 35 aa, Artificial Sequence; identical to SEQ ID NO: 2950
  GFR-binding peptide
  MOD_RES (1), (33), (34): Xaa is C or S

SEQ ID NO: 56913 - protein, 39 aa, Artificial Sequence; identical to SEQ ID NO: 4885
  GFR-binding peptide
  MOD_RES (2), (4), (36), (37): Xaa is C or S

SEQ ID NO: 56914 - protein, 39 aa, Artificial Sequence; identical to SEQ ID NO: 2951
  GFR-binding peptide
  MOD_RES (2), (36): Xaa is C or S
  MOD_RES (14), (15), (16), (17), (18): Xaa is A or G
  MOD_RES (19), (20), (21), (22): Xaa is A or G or is absent

SEQ ID NO: 56915 - protein, 41 aa, Artificial Sequence; identical to SEQ ID NO: 5860
  GFR-binding peptide
  MOD_RES (2), (4), (38), (39): Xaa is C or S
  MOD_RES (16), (17), (18), (19), (20): Xaa is A or G
  MOD_RES (21), (22), (23), (24): Xaa is A or G or is absent

SEQ ID NO: 56916 - protein, 37 aa, Artificial Sequence; identical to SEQ ID NO: 5861
  GFR-binding peptide
  MOD_RES (31), (32): Xaa is C or S

SEQ ID NO: 56917 - protein, 35 aa, Artificial Sequence; identical to SEQ ID NO: 4888
  GFR-binding peptide
  MOD_RES (1), (35): Xaa is C or S
  MOD_RES (13), (14), (15), (16), (17): Xaa is A or G
  MOD_RES (18), (19), (20), (21): Xaa is A or G or is absent

SEQ ID NO: 56918 - protein, 37 aa, Artificial Sequence; identical to SEQ ID NO: 3907
  GFR-binding peptide
  MOD_RES (1), (3), (37): Xaa is C or S
  MOD_RES (15), (16), (17), (18), (19): Xaa is A or G
  MOD_RES (20), (21), (22), (23): Xaa is A or G or is absent

SEQ ID NO: 56919 - protein, 31 aa, Artificial Sequence; identical to SEQ ID NO: 5867
  GFR-binding peptide

SEQ ID NO: 56920 - protein, 37 aa, Artificial Sequence; identical to SEQ ID NO: 26993
  GFR-binding peptide
  MOD_RES (33), (34): Xaa is C or S
  MOD_RES (11), (12), (13), (14), (15): Xaa is A or G
  MOD_RES (16), (17), (18), (19): Xaa is A or G or is absent

SEQ ID NO: 56921 - protein, 40 aa, Artificial Sequence; identical to SEQ ID NO: 5868
  GFR-binding peptide
  MOD_RES (2), (4), (38), (39): Xaa is C or S
  MOD_RES (16), (17), (18), (19), (20): Xaa is A or G
  MOD_RES (21), (22), (23), (24): Xaa is A or G or is absent

SEQ ID NO: 56922 - protein, 34 aa, Artificial Sequence; identical to SEQ ID NO: 3908
  GFR-binding peptide
  MOD_RES (32), (33): Xaa is C or S

SEQ ID NO: 56923 - protein, 41 aa, Artificial Sequence
  GFR-binding peptide
  MOD_RES (2), (4), (36), (37): Xaa is C or S
SXGXRDVVMGRYKKLIIQQKDNFYLMSIANMKTPTXXPGAS

SEQ ID NO: 56924 - protein, 33 aa, Artificial Sequence
  GFR-binding peptide
  MOD_RES (2), (2): Xaa is C or S
GXRDVVMGRYKKLIIQQKDNFYLMSIANMKTPT

SEQ ID NO: 56925 - protein, 37 aa, Artificial Sequence
  GFR-binding peptide
  MOD_RES (32), (33): Xaa is C or S
RDVVMGRYKKLIIQQKDNFYLMSIANMKTPTXXPGAS

SEQ ID NO: 56926 - protein, 41 aa, Artificial Sequence; identical to SEQ ID NO: 11333
  GFR-binding peptide
  MOD_RES (2), (4), (38), (39): Xaa is C or S
  MOD_RES (16), (17), (18), (19), (20): Xaa is A or G
  MOD_RES (21), (22), (23), (24): Xaa is A or G or is absent

SEQ ID NO: 56927 - protein, 40 aa, Artificial Sequence; identical to SEQ ID NO: 3914
  GFR-binding peptide
  MOD_RES (2), (35), (36): Xaa is C or S

SEQ ID NO: 56928 - protein, 37 aa, Artificial Sequence; identical to SEQ ID NO: 5871
  GFR-binding peptide
  MOD_RES (1), (33), (34): Xaa is C or S

SEQ ID NO: 56929 - protein, 39 aa, Artificial Sequence; identical to SEQ ID NO: 5872
  GFR-binding peptide
  MOD_RES (1), (33): Xaa is C or S

SEQ ID NO: 56930 - protein, 32 aa, Artificial Sequence; identical to SEQ ID NO: 5873
  GFR-binding peptide
  MOD_RES (31), (32): Xaa is C or S

SEQ ID NO: 56931 - protein, 37 aa, Artificial Sequence; identical to SEQ ID NO: 3920
  GFR-binding peptide
  MOD_RES (32), (32): Xaa is C or S

SEQ ID NO: 56932 - protein, 43 aa, Artificial Sequence; identical to SEQ ID NO: 3922
  GFR-binding peptide
  MOD_RES (2), (4), (38): Xaa is C or S
  MOD_RES (16), (17), (18), (19), (20): Xaa is A or G
  MOD_RES (21), (22), (23), (24): Xaa is A or G or is absent

SEQ ID NO: 56933 - protein, 34 aa, Artificial Sequence; identical to SEQ ID NO: 5878
  GFR-binding peptide
  MOD_RES (1), (1): Xaa is C or S
  MOD_RES (13), (14), (15), (16), (17): Xaa is A or G
  MOD_RES (18), (19), (20), (21): Xaa is A or G or is absent

SEQ ID NO: 56934 - protein, 37 aa, Artificial Sequence; identical to SEQ ID NO: 25985
  GFR-binding peptide
  MOD_RES (1), (33), (34): Xaa is C or S

SEQ ID NO: 56935 - protein, 38 aa, Artificial Sequence; identical to SEQ ID NO: 3927
  GFR-binding peptide
  MOD_RES (33), (34): Xaa is C or S
  MOD_RES (11), (12), (13), (14), (15): Xaa is A or G
  MOD_RES (16), (17), (18), (19): Xaa is A or G or is absent

SEQ ID NO: 56936 - protein, 35 aa, Artificial Sequence; identical to SEQ ID NO: 5885
  GFR-binding peptide
  MOD_RES (2), (34), (35): Xaa is C or S

SEQ ID NO: 56937 - protein, 32 aa, Artificial Sequence
  GFR-binding peptide
  MOD_RES (2), (2): Xaa is C or S
GXEEVIMRYKKLLLVRGNDFYLMSIANTKVPA

SEQ ID NO: 56938 - protein, 41 aa, Artificial Sequence; identical to SEQ ID NO: 3928
  GFR-binding peptide
  MOD_RES (2), (36): Xaa is C or S
  MOD_RES (14), (15), (16), (17), (18): Xaa is A or G
  MOD_RES (19), (20), (21), (22): Xaa is A or G or is absent

SEQ ID NO: 56939 - protein, 36 aa, Artificial Sequence; identical to SEQ ID NO: 5886
  GFR-binding peptide
  MOD_RES (2), (4), (36): Xaa is C or S

SEQ ID NO: 56940 - protein, 35 aa, Artificial Sequence; identical to SEQ ID NO: 3930
  GFR-binding peptide
  MOD_RES (1), (33), (34): Xaa is C or S

SEQ ID NO: 56941 - protein, 35 aa, Artificial Sequence; identical to SEQ ID NO: 3931
  GFR-binding peptide
  MOD_RES (33), (34): Xaa is C or S
  MOD_RES (11), (12), (13), (14), (15): Xaa is A or G
  MOD_RES (16), (17), (18), (19): Xaa is A or G or is absent

SEQ ID NO: 56942 - protein, 36 aa, Artificial Sequence; identical to SEQ ID NO: 23971
  GFR-binding peptide
  MOD_RES (34), (35): Xaa is C or S
  MOD_RES (12), (13), (14), (15), (16): Xaa is A or G
  MOD_RES (17), (18), (19), (20): Xaa is A or G or is absent

SEQ ID NO: 56943 - protein, 36 aa, Artificial Sequence; identical to SEQ ID NO: 25010
  GFR-binding peptide
  MOD_RES (2), (4), (36): Xaa is C or S

SEQ ID NO: 56944 - protein, 35 aa, Artificial Sequence; identical to SEQ ID NO: 25995
  GFR-binding peptide
  MOD_RES (1), (35): Xaa is C or S
  MOD_RES (13), (14), (15), (16), (17): Xaa is A or G
  MOD_RES (18), (19), (20), (21): Xaa is A or G or is absent

SEQ ID NO: 56945 - protein, 36 aa, Artificial Sequence; identical to SEQ ID NO: 10433
  GFR-binding peptide
  MOD_RES (32), (33): Xaa is C or S

SEQ ID NO: 56946 - protein, 35 aa, Artificial Sequence; identical to SEQ ID NO: 11350
  GFR-binding peptide
  MOD_RES (32), (33): Xaa is C or S

SEQ ID NO: 56947 - protein, 41 aa, Artificial Sequence; identical to SEQ ID NO: 13317
  GFR-binding peptide
  MOD_RES (1), (3), (37), (38): Xaa is C or S
  MOD_RES (15), (16), (17), (18), (19): Xaa is A or G
  MOD_RES (20), (21), (22), (23): Xaa is A or G or is absent

SEQ ID NO: 56948 - protein, 42 aa, Artificial Sequence
  GFR-binding peptide
  MOD_RES (1), (3), (37), (38): Xaa is C or S
  MOD_RES (15), (16), (17), (18), (19): Xaa is A or G
  MOD_RES (20), (21), (22), (23): Xaa is A or G or is absent
XGXRDVVMGRYKKLXXXXXXXXXFYLMSIANMKTPTXXPGAS

SEQ ID NO: 56949 - protein, 40 aa, Artificial Sequence
  GFR-binding peptide
  MOD_RES (1), (34), (35): Xaa is C or S
  MOD_RES (12), (13), (14), (15), (16): Xaa is A or G
  MOD_RES (17), (18), (19), (20): Xaa is A or G or is absent
XEEVIMRYKKLXXXXXXXXXFYLMSIANTKVPAXXTSPVR

SEQ ID NO: 56950 - protein, 44 aa, Artificial Sequence; identical to SEQ ID NO: 26002
  GFR-binding peptide
  MOD_RES (2), (4), (38), (39): Xaa is C or S
  MOD_RES (16), (17), (18), (19), (20): Xaa is A or G
  MOD_RES (21), (22), (23), (24): Xaa is A or G or is absent

SEQ ID NO: 56951 - protein, 30 aa, Artificial Sequence; identical to SEQ ID NO: 2986
  GFR-binding peptide

SEQ ID NO: 56952 - protein, 39 aa, Artificial Sequence; identical to SEQ ID NO: 25023
  GFR-binding peptide
  MOD_RES (34), (35): Xaa is C or S
  MOD_RES (12), (13), (14), (15), (16): Xaa is A or G
  MOD_RES (17), (18), (19), (20): Xaa is A or G or is absent

SEQ ID NO: 56953 - protein, 40 aa, Artificial Sequence; identical to SEQ ID NO: 2989
  GFR-binding peptide
  MOD_RES (1), (35), (36): Xaa is C or S
  MOD_RES (13), (14), (15), (16), (17): Xaa is A or G
  MOD_RES (18), (19), (20), (21): Xaa is A or G or is absent

SEQ ID NO: 56954 - protein, 42 aa, Artificial Sequence; identical to SEQ ID NO: 5901
  GFR-binding peptide
  MOD_RES (2), (4), (38), (39): Xaa is C or S
  MOD_RES (16), (17), (18), (19), (20): Xaa is A or G
  MOD_RES (21), (22), (23), (24): Xaa is A or G or is absent

SEQ ID NO: 56955 - protein, 39 aa, Artificial Sequence; identical to SEQ ID NO: 4920
  GFR-binding peptide
  MOD_RES (2), (4), (38), (39): Xaa is C or S
  MOD_RES (16), (17), (18), (19), (20): Xaa is A or G
  MOD_RES (21), (22), (23), (24): Xaa is A or G or is absent

SEQ ID NO: 56956 - protein, 36 aa, Artificial Sequence; identical to SEQ ID NO: 10446
  GFR-binding peptide
  MOD_RES (1), (35), (36): Xaa is C or S
  MOD_RES (13), (14), (15), (16), (17): Xaa is A or G
  MOD_RES (18), (19), (20), (21): Xaa is A or G or is absent

SEQ ID NO: 56957 - protein, 36 aa, Artificial Sequence
  GFR-binding peptide
  MOD_RES (2), (34), (35): Xaa is C or S
GXRDVVMGRYKKLIIQQKDNFYLMSIANMKTPTXXP

SEQ ID NO: 56958 - protein, 37 aa, Artificial Sequence; identical to SEQ ID NO: 26017
  GFR-binding peptide
  MOD_RES (33), (34): Xaa is C or S
  MOD_RES (11), (12), (13), (14), (15): Xaa is A or G
  MOD_RES (16), (17), (18), (19): Xaa is A or G or is absent

SEQ ID NO: 56959 - protein, 34 aa, Artificial Sequence; identical to SEQ ID NO: 10448
  GFR-binding peptide
  MOD_RES (33), (34): Xaa is C or S
  MOD_RES (11), (12), (13), (14), (15): Xaa is A or G
  MOD_RES (16), (17), (18), (19): Xaa is A or G or is absent

SEQ ID NO: 56960 - protein, 39 aa, Artificial Sequence; identical to SEQ ID NO: 5907
  GFR-binding peptide
  MOD_RES (2), (4), (36), (37): Xaa is C or S

SEQ ID NO: 56961 - protein, 37 aa, Artificial Sequence; identical to SEQ ID NO: 27026
  GFR-binding peptide
  MOD_RES (2), (4), (36), (37): Xaa is C or S

SEQ ID NO: 56962 - protein, 39 aa, Artificial Sequence; identical to SEQ ID NO: 3949
  GFR-binding peptide
  MOD_RES (2), (36), (37): Xaa is C or S
  MOD_RES (14), (15), (16), (17), (18): Xaa is A or G
  MOD_RES (19), (20), (21), (22): Xaa is A or G or is absent

SEQ ID NO: 56963 - protein, 34 aa, Artificial Sequence; identical to SEQ ID NO: 3950
  GFR-binding peptide
  MOD_RES (1), (3): Xaa is C or S

SEQ ID NO: 56964 - protein, 40 aa, Artificial Sequence; identical to SEQ ID NO: 5912
  GFR-binding peptide
  MOD_RES (2), (4), (38), (39): Xaa is C or S
  MOD_RES (16), (17), (18), (19), (20): Xaa is A or G
  MOD_RES (21), (22), (23), (24): Xaa is A or G or is absent

SEQ ID NO: 56965 - protein, 37 aa, Artificial Sequence; identical to SEQ ID NO: 23996
  GFR-binding peptide
  MOD_RES (2), (34), (35): Xaa is C or S

SEQ ID NO: 56966 - protein, 37 aa, Artificial Sequence
  GFR-binding peptide
  MOD_RES (2), (4), (37): Xaa is C or S
  MOD_RES (15), (16), (17), (18), (19): Xaa is A or G
  MOD_RES (20), (21), (22), (23): Xaa is A or G or is absent
LXGXEEVIMRYKKLXXXXXXXXXFYLMSIANTKVPAX

SEQ ID NO: 56967 - protein, 38 aa, Artificial Sequence; identical to SEQ ID NO: 26024
  GFR-binding peptide
  MOD_RES (2), (4), (38): Xaa is C or S
  MOD_RES (16), (17), (18), (19), (20): Xaa is A or G
  MOD_RES (21), (22), (23), (24): Xaa is A or G or is absent

SEQ ID NO: 56968 - protein, 39 aa, Artificial Sequence; identical to SEQ ID NO: 3955
  GFR-binding peptide
  MOD_RES (2), (4), (36), (37): Xaa is C or S

SEQ ID NO: 56969 - protein, 38 aa, Artificial Sequence; identical to SEQ ID NO: 5916
  GFR-binding peptide
  MOD_RES (32), (33): Xaa is C or S

SEQ ID NO: 56970 - protein, 39 aa, Artificial Sequence; identical to SEQ ID NO: 5917
  GFR-binding peptide
  MOD_RES (34), (35): Xaa is C or S
  MOD_RES (12), (13), (14), (15), (16): Xaa is A or G
  MOD_RES (17), (18), (19), (20): Xaa is A or G or is absent

SEQ ID NO: 56971 - protein, 40 aa, Artificial Sequence
  GFR-binding peptide
  MOD_RES (2), (4), (35), (36): Xaa is C or S
LXGXEEVIMRYKKLLLVRGNDFYLMSIANTKVPAXXTSPV

SEQ ID NO: 56972 - protein, 37 aa, Artificial Sequence; identical to SEQ ID NO: 11377
  GFR-binding peptide
  MOD_RES (2), (4): Xaa is C or S
  MOD_RES (16), (17), (18), (19), (20): Xaa is A or G
  MOD_RES (21), (22), (23), (24): Xaa is A or G or is absent

SEQ ID NO: 56973 - protein, 38 aa, Artificial Sequence
  GFR-binding peptide
  MOD_RES (2), (4), (38): Xaa is C or S
  MOD_RES (16), (17), (18), (19), (20): Xaa is A or G
  MOD_RES (21), (22), (23), (24): Xaa is A or G or is absent
SXGXRDVVMGRYKKLXXXXXXXXXFYLMSIANMKTPTX

SEQ ID NO: 56974 - protein, 38 aa, Artificial Sequence; identical to SEQ ID NO: 4934
  GFR-binding peptide
  MOD_RES (1), (3), (38): Xaa is C or S
  MOD_RES (16), (17), (18), (19), (20): Xaa is A or G
  MOD_RES (21), (22), (23), (24): Xaa is A or G or is absent

SEQ ID NO: 56975 - protein, 36 aa, Artificial Sequence; identical to SEQ ID NO: 4935
  GFR-binding peptide
  MOD_RES (1), (3): Xaa is C or S
  MOD_RES (15), (16), (17), (18), (19): Xaa is A or G
  MOD_RES (20), (21), (22), (23): Xaa is A or G or is absent

SEQ ID NO: 56976 - protein, 38 aa, Artificial Sequence; identical to SEQ ID NO: 3959
  GFR-binding peptide
  MOD_RES (2), (4), (36): Xaa is C or S

SEQ ID NO: 56977 - protein, 40 aa, Artificial Sequence; identical to SEQ ID NO: 5921
  GFR-binding peptide
  MOD_RES (2), (36), (37): Xaa is C or S
  MOD_RES (14), (15), (16), (17), (18): Xaa is A or G
  MOD_RES (19), (20), (21), (22): Xaa is A or G or is absent

SEQ ID NO: 56978 - protein, 38 aa, Artificial Sequence; identical to SEQ ID NO: 25048
  GFR-binding peptide
  MOD_RES (34), (35): Xaa is C or S
  MOD_RES (12), (13), (14), (15), (16): Xaa is A or G
  MOD_RES (17), (18), (19), (20): Xaa is A or G or is absent

SEQ ID NO: 56979 - protein, 34 aa, Artificial Sequence; identical to SEQ ID NO: 3969
  GFR-binding peptide
  MOD_RES (1), (33), (34): Xaa is C or S

SEQ ID NO: 56980 - protein, 33 aa, Artificial Sequence; identical to SEQ ID NO: 3013
  GFR-binding peptide
  MOD_RES (2), (2): Xaa is C or S

SEQ ID NO: 56981 - protein, 41 aa, Artificial Sequence; identical to SEQ ID NO: 11391
  GFR-binding peptide
  MOD_RES (1), (35), (36): Xaa is C or S
  MOD_RES (13), (14), (15), (16), (17): Xaa is A or G
  MOD_RES (18), (19), (20), (21): Xaa is A or G or is absent

SEQ ID NO: 56982 - protein, 35 aa, Artificial Sequence; identical to SEQ ID NO: 27041
  GFR-binding peptide
  MOD_RES (2), (34), (35): Xaa is C or S

SEQ ID NO: 56983 - protein, 37 aa, Artificial Sequence; identical to SEQ ID NO: 5928
  GFR-binding peptide
  MOD_RES (1), (3), (36), (37): Xaa is C or S

SEQ ID NO: 56984 - protein, 39 aa, Artificial Sequence
  GFR-binding peptide
  MOD_RES (33), (34): Xaa is C or S
  MOD_RES (11), (12), (13), (14), (15): Xaa is A or G
  MOD_RES (16), (17), (18), (19): Xaa is A or G or is absent
EEVIMRYKKLXXXXXXXXXFYLMSIANTKVPAXXTSPVR

SEQ ID NO: 56985 - protein, 38 aa, Artificial Sequence; identical to SEQ ID NO: 3973
  GFR-binding peptide
  MOD_RES (2), (34): Xaa is C or S

SEQ ID NO: 56986 - protein, 36 aa, Artificial Sequence; identical to SEQ ID NO: 13356
  GFR-binding peptide
  MOD_RES (1), (33), (34): Xaa is C or S

SEQ ID NO: 56987 - protein, 41 aa, Artificial Sequence; identical to SEQ ID NO: 5932
  GFR-binding peptide
  MOD_RES (2), (4), (36), (37): Xaa is C or S

SEQ ID NO: 56988 - protein, 40 aa, Artificial Sequence; identical to SEQ ID NO: 5934
  GFR-binding peptide
  MOD_RES (1), (34), (35): Xaa is C or S

SEQ ID NO: 56989 - protein, 37 aa, Artificial Sequence; identical to SEQ ID NO: 5936
  GFR-binding peptide
  MOD_RES (1), (36), (37): Xaa is C or S
  MOD_RES (14), (15), (16), (17), (18): Xaa is A or G
  MOD_RES (19), (20), (21), (22): Xaa is A or G or is absent

SEQ ID NO: 56990 - protein, 32 aa, Artificial Sequence; identical to SEQ ID NO: 5937
  GFR-binding peptide
  MOD_RES (32), (32): Xaa is C or S

SEQ ID NO: 56991 - protein, 40 aa, Artificial Sequence; identical to SEQ ID NO: 12387
  GFR-binding peptide
  MOD_RES (2), (36), (37): Xaa is C or S
  MOD_RES (14), (15), (16), (17), (18): Xaa is A or G
  MOD_RES (19), (20), (21), (22): Xaa is A or G or is absent

SEQ ID NO: 56992 - protein, 39 aa, Artificial Sequence
  GFR-binding peptide
  MOD_RES (2), (34), (35): Xaa is C or S
GXRDVVMGRYKKLIIQQKDNFYLMSIANMKTPTXXPGAS

SEQ ID NO: 56993 - protein, 37 aa, Artificial Sequence; identical to SEQ ID NO: 4955
  GFR-binding peptide
  MOD_RES (2), (34), (35): Xaa is C or S

SEQ ID NO: 56994 - protein, 41 aa, Artificial Sequence; identical to SEQ ID NO: 3981
  GFR-binding peptide
  MOD_RES (1), (3), (37), (38): Xaa is C or S
  MOD_RES (15), (16), (17), (18), (19): Xaa is A or G
  MOD_RES (20), (21), (22), (23): Xaa is A or G or is absent

SEQ ID NO: 56995 - protein, 33 aa, Artificial Sequence
  GFR-binding peptide
  MOD_RES (1), (1): Xaa is C or S
  MOD_RES (12), (13), (14), (15), (16): Xaa is A or G
  MOD_RES (17), (18), (19), (20): Xaa is A or G or is absent
XEEVIMRYKKLXXXXXXXXXFYLMSIANTKVPA

SEQ ID NO: 56996 - protein, 39 aa, Artificial Sequence
  GFR-binding peptide
  MOD_RES (1), (3), (34), (35): Xaa is C or S
XGXEEVIMRYKKLLLVRGNDFYLMSIANTKVPAXXTSPV

SEQ ID NO: 56997 - protein, 36 aa, Artificial Sequence; identical to SEQ ID NO: 24023
  GFR-binding peptide
  MOD_RES (1), (35), (36): Xaa is C or S
  MOD_RES (13), (14), (15), (16), (17): Xaa is A or G
  MOD_RES (18), (19), (20), (21): Xaa is A or G or is absent

SEQ ID NO: 56998 - protein, 41 aa, Artificial Sequence
  GFR-binding peptide
  MOD_RES (1), (35), (36): Xaa is C or S
  MOD_RES (13), (14), (15), (16), (17): Xaa is A or G
  MOD_RES (18), (19), (20), (21): Xaa is A or G or is absent
XRDVVMGRYKKLXXXXXXXXXFYLMSIANMKTPTXXPGASG

SEQ ID NO: 56999 - protein, 35 aa, Artificial Sequence; identical to SEQ ID NO: 12395
  GFR-binding peptide
  MOD_RES (2), (34), (35): Xaa is C or S

SEQ ID NO: 57000 - protein, 43 aa, Artificial Sequence; identical to SEQ ID NO: 13372
  GFR-binding peptide
  MOD_RES (2), (4), (38), (39): Xaa is C or S
  MOD_RES (16), (17), (18), (19), (20): Xaa is A or G
  MOD_RES (21), (22), (23), (24): Xaa is A or G or is absent

SEQ ID NO: 57001 - protein, 35 aa, Artificial Sequence; identical to SEQ ID NO: 5948
  GFR-binding peptide
  MOD_RES (2), (34): Xaa is C or S

SEQ ID NO: 57002 - protein, 38 aa, Artificial Sequence; identical to SEQ ID NO: 4964
  GFR-binding peptide
  MOD_RES (34), (35): Xaa is C or S
  MOD_RES (12), (13), (14), (15), (16): Xaa is A or G
  MOD_RES (17), (18), (19), (20): Xaa is A or G or is absent

SEQ ID NO: 57003 - protein, 30 aa, Artificial Sequence; identical to SEQ ID NO: 4966
  GFR-binding peptide

SEQ ID NO: 57004 - protein, 37 aa, Artificial Sequence
  GFR-binding peptide
  MOD_RES (2), (4): Xaa is C or S
  MOD_RES (16), (17), (18), (19), (20): Xaa is A or G
  MOD_RES (21), (22), (23), (24): Xaa is A or G or is absent
SXGXRDVVMGRYKKLXXXXXXXXXFYLMSIANMKTPT

SEQ ID NO: 57005 - protein, 35 aa, Artificial Sequence
  GFR-binding peptide
  MOD_RES (1), (33), (34): Xaa is C or S
XRDVVMGRYKKLIIQQKDNFYLMSIANMKTPTXXP

SEQ ID NO: 57006 - protein, 42 aa, Artificial Sequence; identical to SEQ ID NO: 25076
  GFR-binding peptide
  MOD_RES (2), (4), (36), (37): Xaa is C or S

SEQ ID NO: 57007 - protein, 35 aa, Artificial Sequence; identical to SEQ ID NO: 3035
  GFR-binding peptide
  MOD_RES (33), (33): Xaa is C or S
  MOD_RES (11), (12), (13), (14), (15): Xaa is A or G
  MOD_RES (16), (17), (18), (19): Xaa is A or G or is absent

SEQ ID NO: 57008 - protein, 36 aa, Artificial Sequence; identical to SEQ ID NO: 26069
  GFR-binding peptide
  MOD_RES (34), (35): Xaa is C or S
  MOD_RES (12), (13), (14), (15), (16): Xaa is A or G
  MOD_RES (17), (18), (19), (20): Xaa is A or G or is absent

SEQ ID NO: 57009 - protein, 38 aa, Artificial Sequence; identical to SEQ ID NO: 4980
  GFR-binding peptide
  MOD_RES (32), (33): Xaa is C or S

SEQ ID NO: 57010 - protein, 43 aa, Artificial Sequence; identical to SEQ ID NO: 4981
  GFR-binding peptide
  MOD_RES (1), (3), (37), (38): Xaa is C or S
  MOD_RES (15), (16), (17), (18), (19): Xaa is A or G
  MOD_RES (20), (21), (22), (23): Xaa is A or G or is absent

SEQ ID NO: 57011 - protein, 35 aa, Artificial Sequence
  GFR-binding peptide
  MOD_RES (2), (33), (34): Xaa is C or S
GXEEVIMRYKKLLLVRGNDFYLMSIANTKVPAXXT

SEQ ID NO: 57012 - protein, 38 aa, Artificial Sequence; identical to SEQ ID NO: 13382
  GFR-binding peptide
  MOD_RES (1), (33), (34): Xaa is C or S

SEQ ID NO: 57013 - protein, 36 aa, Artificial Sequence; identical to SEQ ID NO: 4000
  GFR-binding peptide
  MOD_RES (31), (32): Xaa is C or S

SEQ ID NO: 57014 - protein, 35 aa, Artificial Sequence; identical to SEQ ID NO: 3042
  GFR-binding peptide
  MOD_RES (32), (33): Xaa is C or S

SEQ ID NO: 57015 - protein, 36 aa, Artificial Sequence; identical to SEQ ID NO: 5961
  GFR-binding peptide
  MOD_RES (32), (32): Xaa is C or S

SEQ ID NO: 57016 - protein, 38 aa, Artificial Sequence; identical to SEQ ID NO: 27078
  GFR-binding peptide
  MOD_RES (1), (35), (36): Xaa is C or S
  MOD_RES (13), (14), (15), (16), (17): Xaa is A or G
  MOD_RES (18), (19), (20), (21): Xaa is A or G or is absent

SEQ ID NO: 57017 - protein, 38 aa, Artificial Sequence; identical to SEQ ID NO: 5963
  GFR-binding peptide
  MOD_RES (1), (3), (35): Xaa is C or S

SEQ ID NO: 57018 - protein, 38 aa, Artificial Sequence; identical to SEQ ID NO: 5964
  GFR-binding peptide
  MOD_RES (2), (34), (35): Xaa is C or S

SEQ ID NO: 57019 - protein, 38 aa, Artificial Sequence; identical to SEQ ID NO: 4984
  GFR-binding peptide
  MOD_RES (2), (36), (37): Xaa is C or S
  MOD_RES (14), (15), (16), (17), (18): Xaa is A or G
  MOD_RES (19), (20), (21), (22): Xaa is A or G or is absent

SEQ ID NO: 57020 - protein, 34 aa, Artificial Sequence; identical to SEQ ID NO: 5966
  GFR-binding peptide
  MOD_RES (31), (32): Xaa is C or S

SEQ ID NO: 57021 - protein, 41 aa, Artificial Sequence; identical to SEQ ID NO: 5967
  GFR-binding peptide
  MOD_RES (1), (35), (36): Xaa is C or S
  MOD_RES (13), (14), (15), (16), (17): Xaa is A or G
  MOD_RES (18), (19), (20), (21): Xaa is A or G or is absent

SEQ ID NO: 57022 - protein, 37 aa, Artificial Sequence; identical to SEQ ID NO: 5968
  GFR-binding peptide
  MOD_RES (33), (34): Xaa is C or S
  MOD_RES (11), (12), (13), (14), (15): Xaa is A or G
  MOD_RES (16), (17), (18), (19): Xaa is A or G or is absent

SEQ ID NO: 57023 - protein, 32 aa, Artificial Sequence
  GFR-binding peptide
  MOD_RES (1), (32): Xaa is C or S
XEEVIMRYKKLLLVRGNDFYLMSIANTKVPAX

SEQ ID NO: 57024 - protein, 39 aa, Artificial Sequence; identical to SEQ ID NO: 25087
  GFR-binding peptide
  MOD_RES (2), (34), (35): Xaa is C or S

SEQ ID NO: 57025 - protein, 36 aa, Artificial Sequence
  GFR-binding peptide
  MOD_RES (2), (36): Xaa is C or S
  MOD_RES (14), (15), (16), (17), (18): Xaa is A or G
  MOD_RES (19), (20), (21), (22): Xaa is A or G or is absent
GXRDVVMGRYKKLXXXXXXXXXFYLMSIANMKTPTX

SEQ ID NO: 57026 - protein, 39 aa, Artificial Sequence; identical to SEQ ID NO: 5973
  GFR-binding peptide
  MOD_RES (1), (34), (35): Xaa is C or S

SEQ ID NO: 57027 - protein, 38 aa, Artificial Sequence; identical to SEQ ID NO: 26081
  GFR-binding peptide
  MOD_RES (34), (35): Xaa is C or S
  MOD_RES (12), (13), (14), (15), (16): Xaa is A or G
  MOD_RES (17), (18), (19), (20): Xaa is A or G or is absent

SEQ ID NO: 57028 - protein, 36 aa, Artificial Sequence; identical to SEQ ID NO: 4988
  GFR-binding peptide
  MOD_RES (35), (36): Xaa is C or S
  MOD_RES (13), (14), (15), (16), (17): Xaa is A or G
  MOD_RES (18), (19), (20), (21): Xaa is A or G or is absent

SEQ ID NO: 57029 - protein, 38 aa, Artificial Sequence
  GFR-binding peptide
  MOD_RES (32), (33): Xaa is C or S
SRVVMNRYKKLIVNSSDDFYLVSIANLKTPAXXPKPVH

SEQ ID NO: 57030 - protein, 40 aa, Artificial Sequence; identical to SEQ ID NO: 5981
  GFR-binding peptide
  MOD_RES (1), (35), (36): Xaa is C or S
  MOD_RES (13), (14), (15), (16), (17): Xaa is A or G
  MOD_RES (18), (19), (20), (21): Xaa is A or G or is absent

SEQ ID NO: 57031 - protein, 35 aa, Artificial Sequence; identical to SEQ ID NO: 24056
  GFR-binding peptide
  MOD_RES (32), (33): Xaa is C or S

SEQ ID NO: 57032 - protein, 40 aa, Artificial Sequence; identical to SEQ ID NO: 5982
  GFR-binding peptide
  MOD_RES (1), (35): Xaa is C or S
  MOD_RES (13), (14), (15), (16), (17): Xaa is A or G
  MOD_RES (18), (19), (20), (21): Xaa is A or G or is absent

SEQ ID NO: 57033 - protein, 41 aa, Artificial Sequence; identical to SEQ ID NO: 4010
  GFR-binding peptide
  MOD_RES (2), (4), (39), (40): Xaa is C or S
  MOD_RES (17), (18), (19), (20), (21): Xaa is A or G
  MOD_RES (22), (23), (24), (25): Xaa is A or G or is absent

SEQ ID NO: 57034 - protein, 39 aa, Artificial Sequence; identical to SEQ ID NO: 12430
  GFR-binding peptide
  MOD_RES (2), (36), (37): Xaa is C or S
  MOD_RES (14), (15), (16), (17), (18): Xaa is A or G
  MOD_RES (19), (20), (21), (22): Xaa is A or G or is absent

SEQ ID NO: 57035 - protein, 37 aa, Artificial Sequence; identical to SEQ ID NO: 27099
  GFR-binding peptide
  MOD_RES (1), (3), (35), (36): Xaa is C or S

SEQ ID NO: 57036 - protein, 36 aa, Artificial Sequence; identical to SEQ ID NO: 4011
  GFR-binding peptide
  MOD_RES (2), (34), (35): Xaa is C or S

SEQ ID NO: 57037 - protein, 37 aa, Artificial Sequence; identical to SEQ ID NO: 3057
  GFR-binding peptide
  MOD_RES (34), (35): Xaa is C or S
  MOD_RES (12), (13), (14), (15), (16): Xaa is A or G
  MOD_RES (17), (18), (19), (20): Xaa is A or G or is absent

SEQ ID NO: 57038 - protein, 40 aa, Artificial Sequence; identical to SEQ ID NO: 3058
  GFR-binding peptide
  MOD_RES (2), (4), (38), (39): Xaa is C or S
  MOD_RES (16), (17), (18), (19), (20): Xaa is A or G
  MOD_RES (21), (22), (23), (24): Xaa is A or G or is absent

SEQ ID NO: 57039 - protein, 41 aa, Artificial Sequence; identical to SEQ ID NO: 25094
  GFR-binding peptide
  MOD_RES (2), (4), (38), (39): Xaa is C or S
  MOD_RES (16), (17), (18), (19), (20): Xaa is A or G
  MOD_RES (21), (22), (23), (24): Xaa is A or G or is absent

SEQ ID NO: 57040 - protein, 39 aa, Artificial Sequence; identical to SEQ ID NO: 12433
  GFR-binding peptide
  MOD_RES (1), (3), (35), (36): Xaa is C or S

SEQ ID NO: 57041 - protein, 34 aa, Artificial Sequence; identical to SEQ ID NO: 4992
  GFR-binding peptide
  MOD_RES (31), (32): Xaa is C or S

SEQ ID NO: 57042 - protein, 42 aa, Artificial Sequence
  GFR-binding peptide
  MOD_RES (1), (3), (36), (37): Xaa is C or S
  MOD_RES (14), (15), (16), (17), (18): Xaa is A or G
  MOD_RES (19), (20), (21), (22): Xaa is A or G or is absent
XGXEEVIMRYKKLXXXXXXXXXFYLMSIANTKVPAXXTSPVR

SEQ ID NO: 57043 - protein, 32 aa, Artificial Sequence; identical to SEQ ID NO: 3061
  GFR-binding peptide
  MOD_RES (11), (12), (13), (14), (15): Xaa is A or G
  MOD_RES (16), (17), (18), (19): Xaa is A or G or is absent

SEQ ID NO: 57044 - protein, 39 aa, Artificial Sequence; identical to SEQ ID NO: 4017
  GFR-binding peptide
  MOD_RES (1), (35), (36): Xaa is C or S
  MOD_RES (13), (14), (15), (16), (17): Xaa is A or G
  MOD_RES (18), (19), (20), (21): Xaa is A or G or is absent

SEQ ID NO: 57045 - protein, 39 aa, Artificial Sequence; identical to SEQ ID NO: 11445
  GFR-binding peptide
  MOD_RES (2), (4), (36), (37): Xaa is C or S

SEQ ID NO: 57046 - protein, 35 aa, Artificial Sequence; identical to SEQ ID NO: 3064
  GFR-binding peptide
  MOD_RES (32), (33): Xaa is C or S

SEQ ID NO: 57047 - protein, 35 aa, Artificial Sequence; identical to SEQ ID NO: 5992
  GFR-binding peptide
  MOD_RES (31), (32): Xaa is C or S

SEQ ID NO: 57048 - protein, 35 aa, Artificial Sequence
  GFR-binding peptide
  MOD_RES (2), (4), (35): Xaa is C or S
LXGXEEVIMRYKKLLLVRGNDFYLMSIANTKVPAX

SEQ ID NO: 57049 - protein, 33 aa, Artificial Sequence; identical to SEQ ID NO: 27106
  GFR-binding peptide
  MOD_RES (2), (2): Xaa is C or S

SEQ ID NO: 57050 - protein, 41 aa, Artificial Sequence
  GFR-binding peptide
  MOD_RES (1), (3), (37), (38): Xaa is C or S
  MOD_RES (15), (16), (17), (18), (19): Xaa is A or G
  MOD_RES (20), (21), (22), (23): Xaa is A or G or is absent
XGXRDVVMGRYKKLXXXXXXXXXFYLMSIANMKTPTXXPGA

SEQ ID NO: 57051 - protein, 33 aa, Artificial Sequence; identical to SEQ ID NO: 26093
  GFR-binding peptide
  MOD_RES (1), (33): Xaa is C or S

SEQ ID NO: 57052 - protein, 37 aa, Artificial Sequence; identical to SEQ ID NO: 4024
  GFR-binding peptide
  MOD_RES (1), (3), (35), (36): Xaa is C or S

SEQ ID NO: 57053 - protein, 35 aa, Artificial Sequence; identical to SEQ ID NO: 5000
  GFR-binding peptide
  MOD_RES (2), (34), (35): Xaa is C or S

SEQ ID NO: 57054 - protein, 37 aa, Artificial Sequence; identical to SEQ ID NO: 4025
  GFR-binding peptide
  MOD_RES (2), (36), (37): Xaa is C or S
  MOD_RES (14), (15), (16), (17), (18): Xaa is A or G
  MOD_RES (19), (20), (21), (22): Xaa is A or G or is absent

SEQ ID NO: 57055 - protein, 36 aa, Artificial Sequence; identical to SEQ ID NO: 3070
  GFR-binding peptide
  MOD_RES (2), (34), (35): Xaa is C or S

SEQ ID NO: 57056 - protein, 39 aa, Artificial Sequence; identical to SEQ ID NO: 5004
  GFR-binding peptide
  MOD_RES (1), (3), (35), (36): Xaa is C or S

SEQ ID NO: 57057 - protein, 37 aa, Artificial Sequence; identical to SEQ ID NO: 10532
  GFR-binding peptide
  MOD_RES (34), (35): Xaa is C or S
  MOD_RES (12), (13), (14), (15), (16): Xaa is A or G
  MOD_RES (17), (18), (19), (20): Xaa is A or G or is absent

SEQ ID NO: 57058 - protein, 41 aa, Artificial Sequence; identical to SEQ ID NO: 3075
  GFR-binding peptide
  MOD_RES (2), (37), (38): Xaa is C or S
  MOD_RES (15), (16), (17), (18), (19): Xaa is A or G
  MOD_RES (20), (21), (22), (23): Xaa is A or G or is absent

SEQ ID NO: 57059 - protein, 36 aa, Artificial Sequence; identical to SEQ ID NO: 26101
  GFR-binding peptide
  MOD_RES (33), (34): Xaa is C or S
  MOD_RES (11), (12), (13), (14), (15): Xaa is A or G
  MOD_RES (16), (17), (18), (19): Xaa is A or G or is absent

SEQ ID NO: 57060 - protein, 39 aa, Artificial Sequence; identical to SEQ ID NO: 6002
  GFR-binding peptide
  MOD_RES (2), (34): Xaa is C or S

SEQ ID NO: 57061 - protein, 41 aa, Artificial Sequence; identical to SEQ ID NO: 4033
  GFR-binding peptide
  MOD_RES (1), (3), (37), (38): Xaa is C or S
  MOD_RES (15), (16), (17), (18), (19): Xaa is A or G
  MOD_RES (20), (21), (22), (23): Xaa is A or G or is absent

SEQ ID NO: 57062 - protein, 38 aa, Artificial Sequence; identical to SEQ ID NO: 11464
  GFR-binding peptide
  MOD_RES (2), (4), (36), (37): Xaa is C or S

SEQ ID NO: 57063 - protein, 42 aa, Artificial Sequence
  GFR-binding peptide
  MOD_RES (2), (4), (36), (37): Xaa is C or S
HXGXSRVVMNRYKKLIVNSSDDFYLVSIANLKTPAXXPKPVH

SEQ ID NO: 57064 - protein, 42 aa, Artificial Sequence; identical to SEQ ID NO: 6005
  GFR-binding peptide
  MOD_RES (2), (36), (37): Xaa is C or S
  MOD_RES (14), (15), (16), (17), (18): Xaa is A or G
  MOD_RES (19), (20), (21), (22): Xaa is A or G or is absent

SEQ ID NO: 57065 - protein, 35 aa, Artificial Sequence; identical to SEQ ID NO: 13417
  GFR-binding peptide
  MOD_RES (34), (35): Xaa is C or S
  MOD_RES (12), (13), (14), (15), (16): Xaa is A or G
  MOD_RES (17), (18), (19), (20): Xaa is A or G or is absent

SEQ ID NO: 57066 - protein, 35 aa, Artificial Sequence; identical to SEQ ID NO: 6008
  GFR-binding peptide
  MOD_RES (1), (3), (35): Xaa is C or S

SEQ ID NO: 57067 - protein, 39 aa, Artificial Sequence; identical to SEQ ID NO: 5016
  GFR-binding peptide
  MOD_RES (1), (35), (36): Xaa is C or S
  MOD_RES (13), (14), (15), (16), (17): Xaa is A or G
  MOD_RES (18), (19), (20), (21): Xaa is A or G or is absent

SEQ ID NO: 57068 - protein, 35 aa, Artificial Sequence
  GFR-binding peptide
  MOD_RES (31), (32): Xaa is C or S
EEVIMRYKKLLLVRGNDFYLMSIANTKVPAXXTSP

SEQ ID NO: 57069 - protein, 43 aa, Artificial Sequence; identical to SEQ ID NO: 26109
  GFR-binding peptide
  MOD_RES (2), (4), (38), (39): Xaa is C or S
  MOD_RES (16), (17), (18), (19), (20): Xaa is A or G
  MOD_RES (21), (22), (23), (24): Xaa is A or G or is absent

SEQ ID NO: 57070 - protein, 43 aa, Artificial Sequence
  GFR-binding peptide
  MOD_RES (1), (3), (37), (38): Xaa is C or S
  MOD_RES (15), (16), (17), (18), (19): Xaa is A or G
  MOD_RES (20), (21), (22), (23): Xaa is A or G or is absent
XGXRDVVMGRYKKLXXXXXXXXXFYLMSIANMKTPTXXPGASG

SEQ ID NO: 57071 - protein, 40 aa, Artificial Sequence; identical to SEQ ID NO: 26111
  GFR-binding peptide
  MOD_RES (2), (4), (36), (37): Xaa is C or S

SEQ ID NO: 57072 - protein, 35 aa, Artificial Sequence; identical to SEQ ID NO: 6013
  GFR-binding peptide
  MOD_RES (34), (35): Xaa is C or S
  MOD_RES (12), (13), (14), (15), (16): Xaa is A or G
  MOD_RES (17), (18), (19), (20): Xaa is A or G or is absent

SEQ ID NO: 57073 - protein, 36 aa, Artificial Sequence; identical to SEQ ID NO: 25118
  GFR-binding peptide
  MOD_RES (2), (36): Xaa is C or S
  MOD_RES (14), (15), (16), (17), (18): Xaa is A or G
  MOD_RES (19), (20), (21), (22): Xaa is A or G or is absent

SEQ ID NO: 57074 - protein, 39 aa, Artificial Sequence; identical to SEQ ID NO: 25121
  GFR-binding peptide
  MOD_RES (1), (3), (35), (36): Xaa is C or S

SEQ ID NO: 57075 - protein, 39 aa, Artificial Sequence; identical to SEQ ID NO: 13426
  GFR-binding peptide
  MOD_RES (1), (35), (36): Xaa is C or S
  MOD_RES (13), (14), (15), (16), (17): Xaa is A or G
  MOD_RES (18), (19), (20), (21): Xaa is A or G or is absent

SEQ ID NO: 57076 - protein, 39 aa, Artificial Sequence; identical to SEQ ID NO: 3096
  GFR-binding peptide
  MOD_RES (2), (4), (36): Xaa is C or S

SEQ ID NO: 57077 - protein, 36 aa, Artificial Sequence; identical to SEQ ID NO: 5030
  GFR-binding peptide
  MOD_RES (33), (34): Xaa is C or S
  MOD_RES (11), (12), (13), (14), (15): Xaa is A or G
  MOD_RES (16), (17), (18), (19): Xaa is A or G or is absent

SEQ ID NO: 57078 - protein, 42 aa, Artificial Sequence
  GFR-binding peptide
  MOD_RES (2), (4), (37), (38): Xaa is C or S
  MOD_RES (15), (16), (17), (18), (19): Xaa is A or G
  MOD_RES (20), (21), (22), (23): Xaa is A or G or is absent
LXGXEEVIMRYKKLXXXXXXXXXFYLMSIANTKVPAXXTSPV

SEQ ID NO: 57079 - protein, 37 aa, Artificial Sequence; identical to SEQ ID NO: 3099
  GFR-binding peptide
  MOD_RES (31), (31): Xaa is C or S

SEQ ID NO: 57080 - protein, 37 aa, Artificial Sequence; identical to SEQ ID NO: 3101
  GFR-binding peptide
  MOD_RES (1), (3), (35), (36): Xaa is C or S

SEQ ID NO: 57081 - protein, 41 aa, Artificial Sequence; identical to SEQ ID NO: 5035
  GFR-binding peptide
  MOD_RES (2), (4), (38), (39): Xaa is C or S
  MOD_RES (16), (17), (18), (19), (20): Xaa is A or G
  MOD_RES (21), (22), (23), (24): Xaa is A or G or is absent

SEQ ID NO: 57082 - protein, 39 aa, Artificial Sequence; identical to SEQ ID NO: 4054
  GFR-binding peptide
  MOD_RES (33), (34): Xaa is C or S
  MOD_RES (11), (12), (13), (14), (15): Xaa is A or G
  MOD_RES (16), (17), (18), (19): Xaa is A or G or is absent

SEQ ID NO: 57083 - protein, 42 aa, Artificial Sequence; identical to SEQ ID NO: 4055
  GFR-binding peptide
  MOD_RES (1), (36), (37): Xaa is C or S
  MOD_RES (14), (15), (16), (17), (18): Xaa is A or G
  MOD_RES (19), (20), (21), (22): Xaa is A or G or is absent

SEQ ID NO: 57084 - protein, 43 aa, Artificial Sequence
  GFR-binding peptide
  MOD_RES (2), (4), (37), (38): Xaa is C or S
  MOD_RES (15), (16), (17), (18), (19): Xaa is A or G
  MOD_RES (20), (21), (22), (23): Xaa is A or G or is absent
LXGXEEVIMRYKKLXXXXXXXXXFYLMSIANTKVPAXXTSPVR

SEQ ID NO: 57085 - protein, 37 aa, Artificial Sequence; identical to SEQ ID NO: 3104
  GFR-binding peptide
  MOD_RES (31), (32): Xaa is C or S

SEQ ID NO: 57086 - protein, 38 aa, Artificial Sequence; identical to SEQ ID NO: 4058
  GFR-binding peptide
  MOD_RES (2), (4), (36), (37): Xaa is C or S

SEQ ID NO: 57087 - protein, 38 aa, Artificial Sequence; identical to SEQ ID NO: 5040
  GFR-binding peptide
  MOD_RES (2), (4), (37), (38): Xaa is C or S

SEQ ID NO: 57088 - protein, 39 aa, Artificial Sequence; identical to SEQ ID NO: 3110
  GFR-binding peptide
  MOD_RES (1), (3), (35), (36): Xaa is C or S

SEQ ID NO: 57089 - protein, 34 aa, Artificial Sequence; identical to SEQ ID NO: 6037
  GFR-binding peptide
  MOD_RES (34), (34): Xaa is C or S
  MOD_RES (12), (13), (14), (15), (16): Xaa is A or G
  MOD_RES (17), (18), (19), (20): Xaa is A or G or is absent

SEQ ID NO: 57090 - protein, 41 aa, Artificial Sequence; identical to SEQ ID NO: 6038
  GFR-binding peptide
  MOD_RES (1), (35): Xaa is C or S
  MOD_RES (13), (14), (15), (16), (17): Xaa is A or G
  MOD_RES (18), (19), (20), (21): Xaa is A or G or is absent

SEQ ID NO: 57091 - protein, 37 aa, Artificial Sequence; identical to SEQ ID NO: 5044
  GFR-binding peptide
  MOD_RES (32), (33): Xaa is C or S

SEQ ID NO: 57092 - protein, 39 aa, Artificial Sequence; identical to SEQ ID NO: 6040
  GFR-binding peptide
  MOD_RES (1), (3), (37), (38): Xaa is C or S
  MOD_RES (15), (16), (17), (18), (19): Xaa is A or G
  MOD_RES (20), (21), (22), (23): Xaa is A or G or is absent

SEQ ID NO: 57093 - protein, 38 aa, Artificial Sequence; identical to SEQ ID NO: 5046
  GFR-binding peptide
  MOD_RES (33), (33): Xaa is C or S
  MOD_RES (11), (12), (13), (14), (15): Xaa is A or G
  MOD_RES (16), (17), (18), (19): Xaa is A or G or is absent

SEQ ID NO: 57094 - protein, 35 aa, Artificial Sequence
  GFR-binding peptide
  MOD_RES (1), (32), (33): Xaa is C or S
XEEVIMRYKKLLLVRGNDFYLMSIANTKVPAXXTS

SEQ ID NO: 57095 - protein, 42 aa, Artificial Sequence; identical to SEQ ID NO: 26139
  GFR-binding peptide
  MOD_RES (1), (3), (37), (38): Xaa is C or S
  MOD_RES (15), (16), (17), (18), (19): Xaa is A or G
  MOD_RES (20), (21), (22), (23): Xaa is A or G or is absent

SEQ ID NO: 57096 - protein, 37 aa, Artificial Sequence; identical to SEQ ID NO: 13448
  GFR-binding peptide
  MOD_RES (1), (33), (34): Xaa is C or S

SEQ ID NO: 57097 - protein, 39 aa, Artificial Sequence; identical to SEQ ID NO: 4073
  GFR-binding peptide
  MOD_RES (1), (35), (36): Xaa is C or S
  MOD_RES (13), (14), (15), (16), (17): Xaa is A or G
  MOD_RES (18), (19), (20), (21): Xaa is A or G or is absent

SEQ ID NO: 57098 - protein, 41 aa, Artificial Sequence; identical to SEQ ID NO: 6049
  GFR-binding peptide
  MOD_RES (1), (35), (36): Xaa is C or S
  MOD_RES (13), (14), (15), (16), (17): Xaa is A or G
  MOD_RES (18), (19), (20), (21): Xaa is A or G or is absent

SEQ ID NO: 57099 - protein, 38 aa, Artificial Sequence; identical to SEQ ID NO: 3132
  GFR-binding peptide
  MOD_RES (1), (35): Xaa is C or S
  MOD_RES (13), (14), (15), (16), (17): Xaa is A or G
  MOD_RES (18), (19), (20), (21): Xaa is A or G or is absent

SEQ ID NO: 57100 - protein, 33 aa, Artificial Sequence; identical to SEQ ID NO: 27171
  GFR-binding peptide
  MOD_RES (32), (33): Xaa is C or S

SEQ ID NO: 57101 - protein, 38 aa, Artificial Sequence; identical to SEQ ID NO: 25154
  GFR-binding peptide
  MOD_RES (2), (36), (37): Xaa is C or S
  MOD_RES (14), (15), (16), (17), (18): Xaa is A or G
  MOD_RES (19), (20), (21), (22): Xaa is A or G or is absent

SEQ ID NO: 57102 - protein, 36 aa, Artificial Sequence; identical to SEQ ID NO: 6055
  GFR-binding peptide
  MOD_RES (1), (33), (34): Xaa is C or S

SEQ ID NO: 57103 - protein, 39 aa, Artificial Sequence
  GFR-binding peptide
  MOD_RES (1), (34), (35): Xaa is C or S
  MOD_RES (12), (13), (14), (15), (16): Xaa is A or G
  MOD_RES (17), (18), (19), (20): Xaa is A or G or is absent
XEEVIMRYKKLXXXXXXXXXFYLMSIANTKVPAXXTSPV

SEQ ID NO: 57104 - protein, 41 aa, Artificial Sequence; identical to SEQ ID NO: 25157
  GFR-binding peptide
  MOD_RES (2), (36), (37): Xaa is C or S
  MOD_RES (14), (15), (16), (17), (18): Xaa is A or G
  MOD_RES (19), (20), (21), (22): Xaa is A or G or is absent

SEQ ID NO: 57105 - protein, 41 aa, Artificial Sequence; identical to SEQ ID NO: 4080
  GFR-binding peptide
  MOD_RES (35), (36): Xaa is C or S
  MOD_RES (13), (14), (15), (16), (17): Xaa is A or G
  MOD_RES (18), (19), (20), (21): Xaa is A or G or is absent

SEQ ID NO: 57106 - protein, 40 aa, Artificial Sequence; identical to SEQ ID NO: 4081
  GFR-binding peptide
  MOD_RES (2), (4), (36), (37): Xaa is C or S

SEQ ID NO: 57107 - protein, 38 aa, Artificial Sequence; identical to SEQ ID NO: 3138
  GFR-binding peptide
  MOD_RES (34), (35): Xaa is C or S
  MOD_RES (12), (13), (14), (15), (16): Xaa is A or G
  MOD_RES (17), (18), (19), (20): Xaa is A or G or is absent

SEQ ID NO: 57108 - protein, 40 aa, Artificial Sequence; identical to SEQ ID NO: 12488
  GFR-binding peptide
  MOD_RES (2), (4), (36), (37): Xaa is C or S

SEQ ID NO: 57109 - protein, 36 aa, Artificial Sequence; identical to SEQ ID NO: 5060
  GFR-binding peptide
  MOD_RES (31), (32): Xaa is C or S

SEQ ID NO: 57110 - protein, 36 aa, Artificial Sequence; identical to SEQ ID NO: 4086
  GFR-binding peptide
  MOD_RES (1), (3): Xaa is C or S
  MOD_RES (15), (16), (17), (18), (19): Xaa is A or G
  MOD_RES (20), (21), (22), (23): Xaa is A or G or is absent

SEQ ID NO: 57111 - protein, 36 aa, Artificial Sequence
  GFR-binding peptide
  MOD_RES (2), (4), (36): Xaa is C or S
SXGXRDVVMGRYKKLIIQQKDNFYLMSIANMKTPTX

SEQ ID NO: 57112 - protein, 36 aa, Artificial Sequence; identical to SEQ ID NO: 5069
  GFR-binding peptide
  MOD_RES (1), (33), (34): Xaa is C or S

SEQ ID NO: 57113 - protein, 32 aa, Artificial Sequence
  GFR-binding peptide
  MOD_RES (31), (32): Xaa is C or S
EEVIMRYKKLLLVRGNDFYLMSIANTKVPAXX

SEQ ID NO: 57114 - protein, 34 aa, Artificial Sequence; identical to SEQ ID NO: 12502
  GFR-binding peptide
  MOD_RES (1), (33), (34): Xaa is C or S

SEQ ID NO: 57115 - protein, 37 aa, Artificial Sequence; identical to SEQ ID NO: 6068
  GFR-binding peptide
  MOD_RES (2), (4): Xaa is C or S
  MOD_RES (16), (17), (18), (19), (20): Xaa is A or G
  MOD_RES (21), (22), (23), (24): Xaa is A or G or is absent

SEQ ID NO: 57116 - protein, 37 aa, Artificial Sequence; identical to SEQ ID NO: 4102
  GFR-binding peptide
  MOD_RES (2), (37): Xaa is C or S
  MOD_RES (15), (16), (17), (18), (19): Xaa is A or G
  MOD_RES (20), (21), (22), (23): Xaa is A or G or is absent

SEQ ID NO: 57117 - protein, 41 aa, Artificial Sequence; identical to SEQ ID NO: 5070
  GFR-binding peptide
  MOD_RES (1), (36), (37): Xaa is C or S
  MOD_RES (14), (15), (16), (17), (18): Xaa is A or G
  MOD_RES (19), (20), (21), (22): Xaa is A or G or is absent

SEQ ID NO: 57118 - protein, 38 aa, Artificial Sequence; identical to SEQ ID NO: 4105
  GFR-binding peptide
  MOD_RES (2), (35), (36): Xaa is C or S

SEQ ID NO: 57119 - protein, 36 aa, Artificial Sequence; identical to SEQ ID NO: 6072
  GFR-binding peptide
  MOD_RES (34), (34): Xaa is C or S
  MOD_RES (12), (13), (14), (15), (16): Xaa is A or G
  MOD_RES (17), (18), (19), (20): Xaa is A or G or is absent

SEQ ID NO: 57120 - protein, 40 aa, Artificial Sequence; identical to SEQ ID NO: 24141
  GFR-binding peptide
  MOD_RES (34), (35): Xaa is C or S
  MOD_RES (12), (13), (14), (15), (16): Xaa is A or G
  MOD_RES (17), (18), (19), (20): Xaa is A or G or is absent

SEQ ID NO: 57121 - protein, 35 aa, Artificial Sequence; identical to SEQ ID NO: 26177
  GFR-binding peptide
  MOD_RES (32), (33): Xaa is C or S

SEQ ID NO: 57122 - protein, 41 aa, Artificial Sequence; identical to SEQ ID NO: 4111
  GFR-binding peptide
  MOD_RES (2), (36), (37): Xaa is C or S
  MOD_RES (14), (15), (16), (17), (18): Xaa is A or G
  MOD_RES (19), (20), (21), (22): Xaa is A or G or is absent

SEQ ID NO: 57123 - protein, 38 aa, Artificial Sequence; identical to SEQ ID NO: 5081
  GFR-binding peptide
  MOD_RES (32), (33): Xaa is C or S

SEQ ID NO: 57124 - protein, 36 aa, Artificial Sequence; identical to SEQ ID NO: 6078
  GFR-binding peptide
  MOD_RES (31), (32): Xaa is C or S

SEQ ID NO: 57125 - protein, 38 aa, Artificial Sequence; identical to SEQ ID NO: 6079
  GFR-binding peptide
  MOD_RES (2), (34), (35): Xaa is C or S

SEQ ID NO: 57126 - protein, 38 aa, Artificial Sequence; identical to SEQ ID NO: 13487
  GFR-binding peptide
  MOD_RES (1), (3), (37), (38): Xaa is C or S
  MOD_RES (15), (16), (17), (18), (19): Xaa is A or G
  MOD_RES (20), (21), (22), (23): Xaa is A or G or is absent

SEQ ID NO: 57127 - protein, 34 aa, Artificial Sequence; identical to SEQ ID NO: 26189
  GFR-binding peptide
  MOD_RES (1), (33), (34): Xaa is C or S

SEQ ID NO: 57128 - protein, 36 aa, Artificial Sequence; identical to SEQ ID NO: 4120
  GFR-binding peptide
  MOD_RES (1), (33), (34): Xaa is C or S

SEQ ID NO: 57129 - protein, 35 aa, Artificial Sequence
  GFR-binding peptide
  MOD_RES (1), (3), (35): Xaa is C or S
XGXRDVVMGRYKKLIIQQKDNFYLMSIANMKTPTX

SEQ ID NO: 57130 - protein, 37 aa, Artificial Sequence; identical to SEQ ID NO: 4134
  GFR-binding peptide
  MOD_RES (1), (33), (34): Xaa is C or S

SEQ ID NO: 57131 - protein, 37 aa, Artificial Sequence; identical to SEQ ID NO: 4136
  GFR-binding peptide
  MOD_RES (2), (36), (37): Xaa is C or S
  MOD_RES (14), (15), (16), (17), (18): Xaa is A or G
  MOD_RES (19), (20), (21), (22): Xaa is A or G or is absent

SEQ ID NO: 57132 - protein, 36 aa, Artificial Sequence; identical to SEQ ID NO: 4138
  GFR-binding peptide
  MOD_RES (33), (33): Xaa is C or S
  MOD_RES (11), (12), (13), (14), (15): Xaa is A or G
  MOD_RES (16), (17), (18), (19): Xaa is A or G or is absent

SEQ ID NO: 57133 - protein, 42 aa, Artificial Sequence; identical to SEQ ID NO: 6088
  GFR-binding peptide
  MOD_RES (1), (3), (36), (37): Xaa is C or S

SEQ ID NO: 57134 - protein, 40 aa, Artificial Sequence; identical to SEQ ID NO: 3172
  GFR-binding peptide
  MOD_RES (2), (4), (37), (38): Xaa is C or S

SEQ ID NO: 57135 - protein, 40 aa, Artificial Sequence; identical to SEQ ID NO: 4140
  GFR-binding peptide
  MOD_RES (2), (37), (38): Xaa is C or S
  MOD_RES (15), (16), (17), (18), (19): Xaa is A or G
  MOD_RES (20), (21), (22), (23): Xaa is A or G or is absent

SEQ ID NO: 57136 - protein, 40 aa, Artificial Sequence
  GFR-binding peptide
  MOD_RES (1), (3), (34), (35): Xaa is C or S
XGXEEVIMRYKKLLLVRGNDFYLMSIANTKVPAXXTSPVR

SEQ ID NO: 57137 - protein, 38 aa, Artificial Sequence; identical to SEQ ID NO: 5102
  GFR-binding peptide
  MOD_RES (1), (35), (36): Xaa is C or S
  MOD_RES (13), (14), (15), (16), (17): Xaa is A or G
  MOD_RES (18), (19), (20), (21): Xaa is A or G or is absent

SEQ ID NO: 57138 - protein, 35 aa, Artificial Sequence; identical to SEQ ID NO: 25198
  GFR-binding peptide
  MOD_RES (2), (2): Xaa is C or S
  MOD_RES (14), (15), (16), (17), (18): Xaa is A or G
  MOD_RES (19), (20), (21), (22): Xaa is A or G or is absent

SEQ ID NO: 57139 - protein, 30 aa, Artificial Sequence; identical to SEQ ID NO: 5105
  GFR-binding peptide

SEQ ID NO: 57140 - protein, 30 aa, Artificial Sequence; identical to SEQ ID NO: 6091
  GFR-binding peptide

SEQ ID NO: 57141 - protein, 31 aa, Artificial Sequence; identical to SEQ ID NO: 6093
  GFR-binding peptide
  MOD_RES (31), (31): Xaa is C or S

SEQ ID NO: 57142 - protein, 37 aa, Artificial Sequence; identical to SEQ ID NO: 13509
  GFR-binding peptide
  MOD_RES (32), (33): Xaa is C or S

SEQ ID NO: 57143 - protein, 37 aa, Artificial Sequence; identical to SEQ ID NO: 3181
  GFR-binding peptide
  MOD_RES (2), (4), (36), (37): Xaa is C or S

SEQ ID NO: 57144 - protein, 44 aa, Artificial Sequence; identical to SEQ ID NO: 6096
  GFR-binding peptide
  MOD_RES (2), (4), (38), (39): Xaa is C or S
  MOD_RES (16), (17), (18), (19), (20): Xaa is A or G
  MOD_RES (21), (22), (23), (24): Xaa is A or G or is absent

SEQ ID NO: 57145 - protein, 36 aa, Artificial Sequence; identical to SEQ ID NO: 26210
  GFR-binding peptide
  MOD_RES (2), (34), (35): Xaa is C or S

SEQ ID NO: 57146 - protein, 36 aa, Artificial Sequence; identical to SEQ ID NO: 3182
  GFR-binding peptide
  MOD_RES (1), (34), (35): Xaa is C or S

SEQ ID NO: 57147 - protein, 34 aa, Artificial Sequence; identical to SEQ ID NO: 24177
  GFR-binding peptide
  MOD_RES (2), (34): Xaa is C or S

SEQ ID NO: 57148 - protein, 37 aa, Artificial Sequence; identical to SEQ ID NO: 6099
  GFR-binding peptide
  MOD_RES (33), (34): Xaa is C or S
  MOD_RES (11), (12), (13), (14), (15): Xaa is A or G
  MOD_RES (16), (17), (18), (19): Xaa is A or G or is absent

SEQ ID NO: 57149 - protein, 38 aa, Artificial Sequence; identical to SEQ ID NO: 27230
  GFR-binding peptide
  MOD_RES (2), (4), (36), (37): Xaa is C or S

SEQ ID NO: 57150 - protein, 35 aa, Artificial Sequence; identical to SEQ ID NO: 5113
  GFR-binding peptide
  MOD_RES (1), (3): Xaa is C or S

SEQ ID NO: 57151 - protein, 34 aa, Artificial Sequence; identical to SEQ ID NO: 3184
  GFR-binding peptide
  MOD_RES (1), (1): Xaa is C or S
  MOD_RES (13), (14), (15), (16), (17): Xaa is A or G
  MOD_RES (18), (19), (20), (21): Xaa is A or G or is absent

SEQ ID NO: 57152 - protein, 35 aa, Artificial Sequence; identical to SEQ ID NO: 5116
  GFR-binding peptide
  MOD_RES (32), (33): Xaa is C or S

SEQ ID NO: 57153 - protein, 35 aa, Artificial Sequence; identical to SEQ ID NO: 4151
  GFR-binding peptide
  MOD_RES (1), (3), (35): Xaa is C or S

SEQ ID NO: 57154 - protein, 38 aa, Artificial Sequence; identical to SEQ ID NO: 6102
  GFR-binding peptide
  MOD_RES (1), (36), (37): Xaa is C or S
  MOD_RES (14), (15), (16), (17), (18): Xaa is A or G
  MOD_RES (19), (20), (21), (22): Xaa is A or G or is absent

SEQ ID NO: 57155 - protein, 36 aa, Artificial Sequence; identical to SEQ ID NO: 3187
  GFR-binding peptide
  MOD_RES (2), (36): Xaa is C or S
  MOD_RES (14), (15), (16), (17), (18): Xaa is A or G
  MOD_RES (19), (20), (21), (22): Xaa is A or G or is absent

SEQ ID NO: 57156 - protein, 39 aa, Artificial Sequence; identical to SEQ ID NO: 12547
  GFR-binding peptide
  MOD_RES (2), (34), (35): Xaa is C or S

SEQ ID NO: 57157 - protein, 36 aa, Artificial Sequence; identical to SEQ ID NO: 3189
  GFR-binding peptide
  MOD_RES (1), (3), (35), (36): Xaa is C or S

SEQ ID NO: 57158 - protein, 42 aa, Artificial Sequence; identical to SEQ ID NO: 3190
  GFR-binding peptide
  MOD_RES (2), (4), (38), (39): Xaa is C or S
  MOD_RES (16), (17), (18), (19), (20): Xaa is A or G
  MOD_RES (21), (22), (23), (24): Xaa is A or G or is absent

SEQ ID NO: 57159 - protein, 39 aa, Artificial Sequence; identical to SEQ ID NO: 6107
  GFR-binding peptide
  MOD_RES (33), (34): Xaa is C or S
  MOD_RES (11), (12), (13), (14), (15): Xaa is A or G
  MOD_RES (16), (17), (18), (19): Xaa is A or G or is absent

SEQ ID NO: 57160 - protein, 35 aa, Artificial Sequence; identical to SEQ ID NO: 6108
  GFR-binding peptide
  MOD_RES (1), (3), (35): Xaa is C or S

SEQ ID NO: 57161 - protein, 33 aa, Artificial Sequence; identical to SEQ ID NO: 4158
  GFR-binding peptide
  MOD_RES (31), (32): Xaa is C or S

SEQ ID NO: 57162 - protein, 36 aa, Artificial Sequence; identical to SEQ ID NO: 5122
  GFR-binding peptide
  MOD_RES (33), (34): Xaa is C or S
  MOD_RES (11), (12), (13), (14), (15): Xaa is A or G
  MOD_RES (16), (17), (18), (19): Xaa is A or G or is absent

SEQ ID NO: 57163 - protein, 39 aa, Artificial Sequence; identical to SEQ ID NO: 26225
  GFR-binding peptide
  MOD_RES (2), (4), (36), (37): Xaa is C or S

SEQ ID NO: 57164 - protein, 38 aa, Artificial Sequence; identical to SEQ ID NO: 4160
  GFR-binding peptide
  MOD_RES (2), (36), (37): Xaa is C or S
  MOD_RES (14), (15), (16), (17), (18): Xaa is A or G
  MOD_RES (19), (20), (21), (22): Xaa is A or G or is absent

SEQ ID NO: 57165 - protein, 38 aa, Artificial Sequence; identical to SEQ ID NO: 3203
  GFR-binding peptide
  MOD_RES (33), (34): Xaa is C or S

SEQ ID NO: 57166 - protein, 44 aa, Artificial Sequence; identical to SEQ ID NO: 5130
  GFR-binding peptide
  MOD_RES (2), (4), (38), (39): Xaa is C or S
  MOD_RES (16), (17), (18), (19), (20): Xaa is A or G
  MOD_RES (21), (22), (23), (24): Xaa is A or G or is absent

SEQ ID NO: 57167 - protein, 34 aa, Artificial Sequence; identical to SEQ ID NO: 6120
  GFR-binding peptide
  MOD_RES (32), (33): Xaa is C or S

SEQ ID NO: 57168 - protein, 37 aa, Artificial Sequence; identical to SEQ ID NO: 5133
  GFR-binding peptide
  MOD_RES (32), (33): Xaa is C or S

SEQ ID NO: 57169 - protein, 39 aa, Artificial Sequence; identical to SEQ ID NO: 3207
  GFR-binding peptide
  MOD_RES (34), (35): Xaa is C or S
  MOD_RES (12), (13), (14), (15), (16): Xaa is A or G
  MOD_RES (17), (18), (19), (20): Xaa is A or G or is absent

SEQ ID NO: 57170 - protein, 34 aa, Artificial Sequence; identical to SEQ ID NO: 3208
  GFR-binding peptide
  MOD_RES (33), (34): Xaa is C or S
  MOD_RES (11), (12), (13), (14), (15): Xaa is A or G
  MOD_RES (16), (17), (18), (19): Xaa is A or G or is absent

SEQ ID NO: 57171 - protein, 40 aa, Artificial Sequence; identical to SEQ ID NO: 5134
  GFR-binding peptide
  MOD_RES (34), (35): Xaa is C or S
  MOD_RES (12), (13), (14), (15), (16): Xaa is A or G
  MOD_RES (17), (18), (19), (20): Xaa is A or G or is absent

SEQ ID NO: 57172 - protein, 34 aa, Artificial Sequence; identical to SEQ ID NO: 4170
  GFR-binding peptide
  MOD_RES (33), (34): Xaa is C or S

SEQ ID NO: 57173 - protein, 33 aa, Artificial Sequence; identical to SEQ ID NO: 27252
  GFR-binding peptide
  MOD_RES (31), (32): Xaa is C or S

SEQ ID NO: 57174 - protein, 37 aa, Artificial Sequence; identical to SEQ ID NO: 6123
  GFR-binding peptide
  MOD_RES (1), (33), (34): Xaa is C or S

SEQ ID NO: 57175 - protein, 40 aa, Artificial Sequence; identical to SEQ ID NO: 26238
  GFR-binding peptide
  MOD_RES (2), (4), (38), (39): Xaa is C or S
  MOD_RES (16), (17), (18), (19), (20): Xaa is A or G
  MOD_RES (21), (22), (23), (24): Xaa is A or G or is absent

SEQ ID NO: 57176 - protein, 35 aa, Artificial Sequence; identical to SEQ ID NO: 4171
  GFR-binding peptide
  MOD_RES (32), (33): Xaa is C or S

SEQ ID NO: 57177 - protein, 38 aa, Artificial Sequence; identical to SEQ ID NO: 6126
  GFR-binding peptide
  MOD_RES (32), (32): Xaa is C or S

SEQ ID NO: 57178 - protein, 38 aa, Artificial Sequence; identical to SEQ ID NO: 5139
  GFR-binding peptide
  MOD_RES (2), (34), (35): Xaa is C or S

SEQ ID NO: 57179 - protein, 33 aa, Artificial Sequence; identical to SEQ ID NO: 5140
  GFR-binding peptide
  MOD_RES (12), (13), (14), (15), (16): Xaa is A or G
  MOD_RES (17), (18), (19), (20): Xaa is A or G or is absent

SEQ ID NO: 57180 - protein, 34 aa, Artificial Sequence; identical to SEQ ID NO: 6127
  GFR-binding peptide
  MOD_RES (33), (34): Xaa is C or S
  MOD_RES (11), (12), (13), (14), (15): Xaa is A or G
  MOD_RES (16), (17), (18), (19): Xaa is A or G or is absent

SEQ ID NO: 57181 - protein, 40 aa, Artificial Sequence; identical to SEQ ID NO: 4173
  GFR-binding peptide
  MOD_RES (34), (34): Xaa is C or S
  MOD_RES (12), (13), (14), (15), (16): Xaa is A or G
  MOD_RES (17), (18), (19), (20): Xaa is A or G or is absent

SEQ ID NO: 57182 - protein, 32 aa, Artificial Sequence; identical to SEQ ID NO: 5141
  GFR-binding peptide
  MOD_RES (1), (1): Xaa is C or S

SEQ ID NO: 57183 - protein, 38 aa, Artificial Sequence; identical to SEQ ID NO: 4174
  GFR-binding peptide
  MOD_RES (2), (4), (38): Xaa is C or S
  MOD_RES (16), (17), (18), (19), (20): Xaa is A or G
  MOD_RES (21), (22), (23), (24): Xaa is A or G or is absent

SEQ ID NO: 57184 - protein, 39 aa, Artificial Sequence; identical to SEQ ID NO: 10657
  GFR-binding peptide
  MOD_RES (33), (34): Xaa is C or S
  MOD_RES (11), (12), (13), (14), (15): Xaa is A or G
  MOD_RES (16), (17), (18), (19): Xaa is A or G or is absent

SEQ ID NO: 57185 - protein, 32 aa, Artificial Sequence; identical to SEQ ID NO: 24211
  GFR-binding peptide
  MOD_RES (32), (32): Xaa is C or S

SEQ ID NO: 57186 - protein, 36 aa, Artificial Sequence
  GFR-binding peptide
  MOD_RES (1), (35), (36): Xaa is C or S
  MOD_RES (13), (14), (15), (16), (17): Xaa is A or G
  MOD_RES (18), (19), (20), (21): Xaa is A or G or is absent
XRDVVMGRYKKLXXXXXXXXXFYLMSIANMKTPTXX

SEQ ID NO: 57187 - protein, 35 aa, Artificial Sequence; identical to SEQ ID NO: 3218
  GFR-binding peptide
  MOD_RES (1), (34), (35): Xaa is C or S

SEQ ID NO: 57188 - protein, 40 aa, Artificial Sequence; identical to SEQ ID NO: 3219
  GFR-binding peptide
  MOD_RES (1), (3), (35), (36): Xaa is C or S

SEQ ID NO: 57189 - protein, 41 aa, Artificial Sequence; identical to SEQ ID NO: 4180
  GFR-binding peptide
  MOD_RES (1), (35), (36): Xaa is C or S
  MOD_RES (13), (14), (15), (16), (17): Xaa is A or G
  MOD_RES (18), (19), (20), (21): Xaa is A or G or is absent

SEQ ID NO: 57190 - protein, 37 aa, Artificial Sequence; identical to SEQ ID NO: 3223
  GFR-binding peptide
  MOD_RES (2), (4), (36), (37): Xaa is C or S

SEQ ID NO: 57191 - protein, 40 aa, Artificial Sequence; identical to SEQ ID NO: 6134
  GFR-binding peptide
  MOD_RES (2), (34), (35): Xaa is C or S

SEQ ID NO: 57192 - protein, 35 aa, Artificial Sequence; identical to SEQ ID NO: 4183
  GFR-binding peptide
  MOD_RES (1), (33), (34): Xaa is C or S

SEQ ID NO: 57193 - protein, 37 aa, Artificial Sequence; identical to SEQ ID NO: 4185
  GFR-binding peptide
  MOD_RES (2), (34): Xaa is C or S

SEQ ID NO: 57194 - protein, 40 aa, Artificial Sequence; identical to SEQ ID NO: 12587
  GFR-binding peptide
  MOD_RES (1), (3), (37), (38): Xaa is C or S
  MOD_RES (15), (16), (17), (18), (19): Xaa is A or G
  MOD_RES (20), (21), (22), (23): Xaa is A or G or is absent

SEQ ID NO: 57195 - protein, 39 aa, Artificial Sequence; identical to SEQ ID NO: 5147
  GFR-binding peptide
  MOD_RES (1), (33), (34): Xaa is C or S

SEQ ID NO: 57196 - protein, 34 aa, Artificial Sequence; identical to SEQ ID NO: 4189
  GFR-binding peptide
  MOD_RES (32), (33): Xaa is C or S

SEQ ID NO: 57197 - protein, 42 aa, Artificial Sequence; identical to SEQ ID NO: 3231
  GFR-binding peptide
  MOD_RES (2), (4), (36), (37): Xaa is C or S

SEQ ID NO: 57198 - protein, 33 aa, Artificial Sequence; identical to SEQ ID NO: 12596
  GFR-binding peptide
  MOD_RES (31), (32): Xaa is C or S

SEQ ID NO: 57199 - protein, 34 aa, Artificial Sequence; identical to SEQ ID NO: 6149
  GFR-binding peptide
  MOD_RES (34), (34): Xaa is C or S
  MOD_RES (12), (13), (14), (15), (16): Xaa is A or G
  MOD_RES (17), (18), (19), (20): Xaa is A or G or is absent

SEQ ID NO: 57200 - protein, 36 aa, Artificial Sequence; identical to SEQ ID NO: 5154
  GFR-binding peptide
  MOD_RES (2), (34), (35): Xaa is C or S

SEQ ID NO: 57201 - protein, 39 aa, Artificial Sequence; identical to SEQ ID NO: 5156
  GFR-binding peptide
  MOD_RES (33), (33): Xaa is C or S
  MOD_RES (11), (12), (13), (14), (15): Xaa is A or G
  MOD_RES (16), (17), (18), (19): Xaa is A or G or is absent

SEQ ID NO: 57202 - protein, 34 aa, Artificial Sequence; identical to SEQ ID NO: 5159
  GFR-binding peptide
  MOD_RES (2), (34): Xaa is C or S

SEQ ID NO: 57203 - protein, 36 aa, Artificial Sequence; identical to SEQ ID NO: 26269
  GFR-binding peptide
  MOD_RES (1), (3), (35), (36): Xaa is C or S

SEQ ID NO: 57204 - protein, 33 aa, Artificial Sequence
  GFR-binding peptide
  MOD_RES (33), (33): Xaa is C or S
  MOD_RES (11), (12), (13), (14), (15): Xaa is A or G
  MOD_RES (16), (17), (18), (19): Xaa is A or G or is absent
DVVMGRYKKLXXXXXXXXXFYLMSIANMKTPTX

SEQ ID NO: 57205 - protein, 40 aa, Artificial Sequence; identical to SEQ ID NO: 27290
  GFR-binding peptide
  MOD_RES (2), (4), (36), (37): Xaa is C or S

SEQ ID NO: 57206 - protein, 37 aa, Artificial Sequence
  GFR-binding peptide
  MOD_RES (1), (3), (36), (37): Xaa is C or S
  MOD_RES (14), (15), (16), (17), (18): Xaa is A or G
  MOD_RES (19), (20), (21), (22): Xaa is A or G or is absent
XGXEEVIMRYKKLXXXXXXXXXFYLMSIANTKVPAXX

SEQ ID NO: 57207 - protein, 38 aa, Artificial Sequence; identical to SEQ ID NO: 6159
  GFR-binding peptide
  MOD_RES (2), (4), (38): Xaa is C or S
  MOD_RES (16), (17), (18), (19), (20): Xaa is A or G
  MOD_RES (21), (22), (23), (24): Xaa is A or G or is absent

SEQ ID NO: 57208 - protein, 37 aa, Artificial Sequence; identical to SEQ ID NO: 5168
  GFR-binding peptide
  MOD_RES (34), (35): Xaa is C or S
  MOD_RES (12), (13), (14), (15), (16): Xaa is A or G
  MOD_RES (17), (18), (19), (20): Xaa is A or G or is absent

SEQ ID NO: 57209 - protein, 38 aa, Artificial Sequence
  GFR-binding peptide
  MOD_RES (2), (4), (36), (37): Xaa is C or S
SXGXRDVVMGRYKKLIIQQKDNFYLMSIANMKTPTXXP

SEQ ID NO: 57210 - protein, 33 aa, Artificial Sequence
  GFR-binding peptide
  MOD_RES (1), (32), (33): Xaa is C or S
XEEVIMRYKKLLLVRGNDFYLMSIANTKVPAXX

SEQ ID NO: 57211 - protein, 39 aa, Artificial Sequence
  GFR-binding peptide
  MOD_RES (33), (34): Xaa is C or S
  MOD_RES (11), (12), (13), (14), (15): Xaa is A or G
  MOD_RES (16), (17), (18), (19): Xaa is A or G or is absent
RVVMNRYKKLXXXXXXXXXFYLVSIANLKTPAXXPKPVH

SEQ ID NO: 57212 - protein, 39 aa, Artificial Sequence; identical to SEQ ID NO: 27298
  GFR-binding peptide
  MOD_RES (2), (4), (38), (39): Xaa is C or S
  MOD_RES (16), (17), (18), (19), (20): Xaa is A or G
  MOD_RES (21), (22), (23), (24): Xaa is A or G or is absent

SEQ ID NO: 57213 - protein, 37 aa, Artificial Sequence; identical to SEQ ID NO: 4205
  GFR-binding peptide
  MOD_RES (1), (3), (37): Xaa is C or S
  MOD_RES (15), (16), (17), (18), (19): Xaa is A or G
  MOD_RES (20), (21), (22), (23): Xaa is A or G or is absent

SEQ ID NO: 57214 - protein, 38 aa, Artificial Sequence; identical to SEQ ID NO: 4207
  GFR-binding peptide
  MOD_RES (2), (36), (37): Xaa is C or S
  MOD_RES (14), (15), (16), (17), (18): Xaa is A or G
  MOD_RES (19), (20), (21), (22): Xaa is A or G or is absent

SEQ ID NO: 57215 - protein, 34 aa, Artificial Sequence; identical to SEQ ID NO: 27299
  GFR-binding peptide
  MOD_RES (1), (3): Xaa is C or S

SEQ ID NO: 57216 - protein, 41 aa, Artificial Sequence; identical to SEQ ID NO: 13560
  GFR-binding peptide
  MOD_RES (2), (36), (37): Xaa is C or S
  MOD_RES (14), (15), (16), (17), (18): Xaa is A or G
  MOD_RES (19), (20), (21), (22): Xaa is A or G or is absent

SEQ ID NO: 57217 - protein, 35 aa, Artificial Sequence; identical to SEQ ID NO: 3257
  GFR-binding peptide
  MOD_RES (1), (35): Xaa is C or S
  MOD_RES (13), (14), (15), (16), (17): Xaa is A or G
  MOD_RES (18), (19), (20), (21): Xaa is A or G or is absent

SEQ ID NO: 57218 - protein, 39 aa, Artificial Sequence; identical to SEQ ID NO: 11618
  GFR-binding peptide
  MOD_RES (1), (3), (37), (38): Xaa is C or S
  MOD_RES (15), (16), (17), (18), (19): Xaa is A or G
  MOD_RES (20), (21), (22), (23): Xaa is A or G or is absent

SEQ ID NO: 57219 - protein, 35 aa, Artificial Sequence; identical to SEQ ID NO: 11621
  GFR-binding peptide
  MOD_RES (1), (3), (35): Xaa is C or S

SEQ ID NO: 57220 - protein, 38 aa, Artificial Sequence; identical to SEQ ID NO: 3260
  GFR-binding peptide
  MOD_RES (1), (3), (35), (36): Xaa is C or S

SEQ ID NO: 57221 - protein, 34 aa, Artificial Sequence; identical to SEQ ID NO: 5177
  GFR-binding peptide
  MOD_RES (33), (34): Xaa is C or S
  MOD_RES (11), (12), (13), (14), (15): Xaa is A or G
  MOD_RES (16), (17), (18), (19): Xaa is A or G or is absent

SEQ ID NO: 57222 - protein, 37 aa, Artificial Sequence
  GFR-binding peptide
  MOD_RES (33), (34): Xaa is C or S
  MOD_RES (11), (12), (13), (14), (15): Xaa is A or G
  MOD_RES (16), (17), (18), (19): Xaa is A or G or is absent
EEVIMRYKKLXXXXXXXXXFYLMSIANTKVPAXXTSP

SEQ ID NO: 57223 - protein, 33 aa, Artificial Sequence; identical to SEQ ID NO: 5180
  GFR-binding peptide
  MOD_RES (12), (13), (14), (15), (16): Xaa is A or G
  MOD_RES (17), (18), (19), (20): Xaa is A or G or is absent

SEQ ID NO: 57224 - protein, 37 aa, Artificial Sequence; identical to SEQ ID NO: 4215
  GFR-binding peptide
  MOD_RES (1), (35), (36): Xaa is C or S
  MOD_RES (13), (14), (15), (16), (17): Xaa is A or G
  MOD_RES (18), (19), (20), (21): Xaa is A or G or is absent

SEQ ID NO: 57225 - protein, 38 aa, Artificial Sequence; identical to SEQ ID NO: 6167
  GFR-binding peptide
  MOD_RES (2), (34), (35): Xaa is C or S

SEQ ID NO: 57226 - protein, 32 aa, Artificial Sequence
  GFR-binding peptide
  MOD_RES (11), (12), (13), (14), (15): Xaa is A or G
  MOD_RES (16), (17), (18), (19): Xaa is A or G or is absent
DVVMGRYKKLXXXXXXXXXFYLMSIANMKTPT

SEQ ID NO: 57227 - protein, 35 aa, Artificial Sequence; identical to SEQ ID NO: 6171
  GFR-binding peptide
  MOD_RES (34), (35): Xaa is C or S
  MOD_RES (12), (13), (14), (15), (16): Xaa is A or G
  MOD_RES (17), (18), (19), (20): Xaa is A or G or is absent

SEQ ID NO: 57228 - protein, 41 aa, Artificial Sequence
  GFR-binding peptide
  MOD_RES (2), (4), (38), (39): Xaa is C or S
  MOD_RES (16), (17), (18), (19), (20): Xaa is A or G
  MOD_RES (21), (22), (23), (24): Xaa is A or G or is absent
SXGXRDVVMGRYKKLXXXXXXXXXFYLMSIANMKTPTXXPG

SEQ ID NO: 57229 - protein, 37 aa, Artificial Sequence; identical to SEQ ID NO: 4223
  GFR-binding peptide
  MOD_RES (2), (36), (37): Xaa is C or S
  MOD_RES (14), (15), (16), (17), (18): Xaa is A or G
  MOD_RES (19), (20), (21), (22): Xaa is A or G or is absent

SEQ ID NO: 57230 - protein, 33 aa, Artificial Sequence; identical to SEQ ID NO: 6179
  GFR-binding peptide
  MOD_RES (31), (32): Xaa is C or S

SEQ ID NO: 57231 - protein, 31 aa, Artificial Sequence
  GFR-binding peptide
  MOD_RES (31), (31): Xaa is C or S
EEVIMRYKKLLLVRGNDFYLMSIANTKVPAX

SEQ ID NO: 57232 - protein, 42 aa, Artificial Sequence; identical to SEQ ID NO: 3272
  GFR-binding peptide
  MOD_RES (2), (4), (36), (37): Xaa is C or S

SEQ ID NO: 57233 - protein, 39 aa, Artificial Sequence; identical to SEQ ID NO: 5197
  GFR-binding peptide
  MOD_RES (1), (3), (37), (38): Xaa is C or S
  MOD_RES (15), (16), (17), (18), (19): Xaa is A or G
  MOD_RES (20), (21), (22), (23): Xaa is A or G or is absent

SEQ ID NO: 57234 - protein, 34 aa, Artificial Sequence; identical to SEQ ID NO: 30234
  GFR-binding peptide
  MOD_RES (1), (33): Xaa is C or S

SEQ ID NO: 57235 - protein, 38 aa, Artificial Sequence; identical to SEQ ID NO: 6181
  GFR-binding peptide
  MOD_RES (6), (7): Xaa is C or S

SEQ ID NO: 57236 - protein, 38 aa, Artificial Sequence; identical to SEQ ID NO: 7104
  GFR-binding peptide
  MOD_RES (1), (2), (36), (38): Xaa is C or S
  MOD_RES (16), (17), (18), (19), (20): Xaa is A or G
  MOD_RES (21), (22), (23), (24): Xaa is A or G or is absent

SEQ ID NO: 57237 - protein, 34 aa, Artificial Sequence; identical to SEQ ID NO: 6184
  GFR-binding peptide
  MOD_RES (14), (15), (16), (17), (18): Xaa is A or G
  MOD_RES (19), (20), (21), (22): Xaa is A or G or is absent

SEQ ID NO: 57238 - protein, 42 aa, Artificial Sequence; identical to SEQ ID NO: 6186
  GFR-binding peptide
  MOD_RES (4), (5), (40), (42): Xaa is C or S
  MOD_RES (19), (20), (21), (22), (23): Xaa is A or G
  MOD_RES (24), (25), (26), (27): Xaa is A or G or is absent

SEQ ID NO: 57239 - protein, 36 aa, Artificial Sequence; identical to SEQ ID NO: 8874
  GFR-binding peptide
  MOD_RES (3), (4): Xaa is C or S

SEQ ID NO: 57240 - protein, 41 aa, Artificial Sequence; identical to SEQ ID NO: 7108
  GFR-binding peptide
  MOD_RES (6), (7), (40): Xaa is C or S

SEQ ID NO: 57241 - protein, 33 aa, Artificial Sequence; identical to SEQ ID NO: 6189
  GFR-binding peptide
  MOD_RES (32), (32): Xaa is C or S

SEQ ID NO: 57242 - protein, 44 aa, Artificial Sequence
  GFR-binding peptide
  MOD_RES (6), (7), (41), (43): Xaa is C or S
  MOD_RES (21), (22), (23), (24), (25): Xaa is A or G
  MOD_RES (26), (27), (28), (29): Xaa is A or G or is absent
HVPKPXXAPTKLNAISVLYFXXXXXXXXXLKKYRNMVVRSXGXH

SEQ ID NO: 57243 - protein, 38 aa, Artificial Sequence
  GFR-binding peptide
  MOD_RES (1), (2), (36), (38): Xaa is C or S
  MOD_RES (16), (17), (18), (19), (20): Xaa is A or G
  MOD_RES (21), (22), (23), (24): Xaa is A or G or is absent
XXTPTKMNAISMLYFXXXXXXXXXLKKYRGMVVDRXGX

SEQ ID NO: 57244 - protein, 38 aa, Artificial Sequence; identical to SEQ ID NO: 29257
  GFR-binding peptide
  MOD_RES (1), (35), (37): Xaa is C or S
  MOD_RES (15), (16), (17), (18), (19): Xaa is A or G
  MOD_RES (20), (21), (22), (23): Xaa is A or G or is absent

SEQ ID NO: 57245 - protein, 38 aa, Artificial Sequence
  GFR-binding peptide
  MOD_RES (6), (7): Xaa is C or S
GSAGPXXTPTKMNAISMLYFNDKQQIILKKYRGMVVDR

SEQ ID NO: 57246 - protein, 35 aa, Artificial Sequence; identical to SEQ ID NO: 7112
  GFR-binding peptide
  MOD_RES (1), (35): Xaa is C or S
  MOD_RES (15), (16), (17), (18), (19): Xaa is A or G
  MOD_RES (20), (21), (22), (23): Xaa is A or G or is absent

SEQ ID NO: 57247 - protein, 38 aa, Artificial Sequence; identical to SEQ ID NO: 7979
  GFR-binding peptide
  MOD_RES (5), (6), (38): Xaa is C or S

SEQ ID NO: 57248 - protein, 36 aa, Artificial Sequence
  GFR-binding peptide
  MOD_RES (3), (4): Xaa is C or S
  MOD_RES (18), (19), (20), (21), (22): Xaa is A or G
  MOD_RES (23), (24), (25), (26): Xaa is A or G or is absent
STXXAPVKTNAISMLYFXXXXXXXXXLKKYRMIVEE

SEQ ID NO: 57249 - protein, 41 aa, Artificial Sequence
  GFR-binding peptide
  MOD_RES (5), (6), (40): Xaa is C or S
  MOD_RES (20), (21), (22), (23), (24): Xaa is A or G
  MOD_RES (25), (26), (27), (28): Xaa is A or G or is absent
SAGPXXTPTKMNAISMLYFXXXXXXXXXLKKYRGMVVDRXG

SEQ ID NO: 57250 - protein, 39 aa, Artificial Sequence
  GFR-binding peptide
  MOD_RES (3), (4), (37), (39): Xaa is C or S
  MOD_RES (18), (19), (20), (21), (22): Xaa is A or G
  MOD_RES (23), (24), (25), (26): Xaa is A or G or is absent
STXXAPVKTNAISMLYFXXXXXXXXXLKKYRMIVEEXGX

SEQ ID NO: 57251 - protein, 35 aa, Artificial Sequence; identical to SEQ ID NO: 8891
  GFR-binding peptide
  MOD_RES (1), (2), (34): Xaa is C or S

SEQ ID NO: 57252 - protein, 36 aa, Artificial Sequence; identical to SEQ ID NO: 30257
  GFR-binding peptide
  MOD_RES (5), (6): Xaa is C or S

SEQ ID NO: 57253 - protein, 35 aa, Artificial Sequence; identical to SEQ ID NO: 7128
  GFR-binding peptide
  MOD_RES (34), (34): Xaa is C or S
  MOD_RES (14), (15), (16), (17), (18): Xaa is A or G
  MOD_RES (19), (20), (21), (22): Xaa is A or G or is absent

SEQ ID NO: 57254 - protein, 42 aa, Artificial Sequence; identical to SEQ ID NO: 8896
  GFR-binding peptide
  MOD_RES (5), (6), (41): Xaa is C or S
  MOD_RES (20), (21), (22), (23), (24): Xaa is A or G
  MOD_RES (25), (26), (27), (28): Xaa is A or G or is absent

SEQ ID NO: 57255 - protein, 40 aa, Artificial Sequence; identical to SEQ ID NO: 28306
  GFR-binding peptide
  MOD_RES (6), (7): Xaa is C or S
  MOD_RES (21), (22), (23), (24), (25): Xaa is A or G
  MOD_RES (26), (27), (28), (29): Xaa is A or G or is absent

SEQ ID NO: 57256 - protein, 34 aa, Artificial Sequence; identical to SEQ ID NO: 8897
  GFR-binding peptide
  MOD_RES (2), (2): Xaa is C or S
  MOD_RES (16), (17), (18), (19), (20): Xaa is A or G
  MOD_RES (21), (22), (23), (24): Xaa is A or G or is absent

SEQ ID NO: 57257 - protein, 38 aa, Artificial Sequence; identical to SEQ ID NO: 6207
  GFR-binding peptide
  MOD_RES (3), (4), (38): Xaa is C or S
  MOD_RES (18), (19), (20), (21), (22): Xaa is A or G
  MOD_RES (23), (24), (25), (26): Xaa is A or G or is absent

SEQ ID NO: 57258 - protein, 37 aa, Artificial Sequence; identical to SEQ ID NO: 7993
  GFR-binding peptide
  MOD_RES (2), (36): Xaa is C or S
  MOD_RES (16), (17), (18), (19), (20): Xaa is A or G
  MOD_RES (21), (22), (23), (24): Xaa is A or G or is absent

SEQ ID NO: 57259 - protein, 31 aa, Artificial Sequence
  GFR-binding peptide
  MOD_RES (31), (31): Xaa is C or S
APVKTNAISMLYFDNGRVLLLKKYRMIVEEX

SEQ ID NO: 57260 - protein, 39 aa, Artificial Sequence; identical to SEQ ID NO: 6208
  GFR-binding peptide
  MOD_RES (4), (5), (37), (39): Xaa is C or S

SEQ ID NO: 57261 - protein, 35 aa, Artificial Sequence; identical to SEQ ID NO: 27350
  GFR-binding peptide
  MOD_RES (2), (3): Xaa is C or S
  MOD_RES (17), (18), (19), (20), (21): Xaa is A or G
  MOD_RES (22), (23), (24), (25): Xaa is A or G or is absent

SEQ ID NO: 57262 - protein, 35 aa, Artificial Sequence; identical to SEQ ID NO: 29269
  GFR-binding peptide
  MOD_RES (1), (33), (35): Xaa is C or S

SEQ ID NO: 57263 - protein, 35 aa, Artificial Sequence; identical to SEQ ID NO: 30264
  GFR-binding peptide
  MOD_RES (1), (2), (34): Xaa is C or S

SEQ ID NO: 57264 - protein, 39 aa, Artificial Sequence
  GFR-binding peptide
  MOD_RES (4), (5), (38): Xaa is C or S
  MOD_RES (19), (20), (21), (22), (23): Xaa is A or G
  MOD_RES (24), (25), (26), (27): Xaa is A or G or is absent
PSTXXAPVKTNAISMLYFXXXXXXXXXLKKYRMIVEEXG

SEQ ID NO: 57265 - protein, 37 aa, Artificial Sequence
  GFR-binding peptide
  MOD_RES (1), (2), (34), (36): Xaa is C or S
XXTPTKMNAISMLYFNDKQQIILKKYRGMVVDRXGXS

SEQ ID NO: 57266 - protein, 34 aa, Artificial Sequence; identical to SEQ ID NO: 29271
  GFR-binding peptide
  MOD_RES (1), (2), (34): Xaa is C or S

SEQ ID NO: 57267 - protein, 37 aa, Artificial Sequence
  GFR-binding peptide
  MOD_RES (3), (4), (36): Xaa is C or S
GPXXTPTKMNAISMLYFNDKQQIILKKYRGMVVDRXG

SEQ ID NO: 57268 - protein, 36 aa, Artificial Sequence; identical to SEQ ID NO: 13601
  GFR-binding peptide
  MOD_RES (1), (35): Xaa is C or S
  MOD_RES (15), (16), (17), (18), (19): Xaa is A or G
  MOD_RES (20), (21), (22), (23): Xaa is A or G or is absent

SEQ ID NO: 57269 - protein, 39 aa, Artificial Sequence; identical to SEQ ID NO: 29273
  GFR-binding peptide
  MOD_RES (2), (3), (37), (39): Xaa is C or S
  MOD_RES (17), (18), (19), (20), (21): Xaa is A or G
  MOD_RES (22), (23), (24), (25): Xaa is A or G or is absent

SEQ ID NO: 57270 - protein, 30 aa, Artificial Sequence; identical to SEQ ID NO: 28317
  GFR-binding peptide

SEQ ID NO: 57271 - protein, 41 aa, Artificial Sequence; identical to SEQ ID NO: 7999
  GFR-binding peptide
  MOD_RES (5), (6), (38), (40): Xaa is C or S

SEQ ID NO: 57272 - protein, 32 aa, Artificial Sequence; identical to SEQ ID NO: 29279
  GFR-binding peptide
  MOD_RES (14), (15), (16), (17), (18): Xaa is A or G
  MOD_RES (19), (20), (21), (22): Xaa is A or G or is absent

SEQ ID NO: 57273 - protein, 37 aa, Artificial Sequence; identical to SEQ ID NO: 16207
  GFR-binding peptide
  MOD_RES (2), (3), (35), (37): Xaa is C or S

SEQ ID NO: 57274 - protein, 31 aa, Artificial Sequence; identical to SEQ ID NO: 27359
  GFR-binding peptide
  MOD_RES (1), (1): Xaa is C or S

SEQ ID NO: 57275 - protein, 34 aa, Artificial Sequence; identical to SEQ ID NO: 7145
  GFR-binding peptide
  MOD_RES (33), (33): Xaa is C or S

SEQ ID NO: 57276 - protein, 43 aa, Artificial Sequence; identical to SEQ ID NO: 7146
  GFR-binding peptide
  MOD_RES (7), (41), (43): Xaa is C or S
  MOD_RES (21), (22), (23), (24), (25): Xaa is A or G
  MOD_RES (26), (27), (28), (29): Xaa is A or G or is absent

SEQ ID NO: 57277 - protein, 40 aa, Artificial Sequence
  GFR-binding peptide
  MOD_RES (4), (5), (37), (39): Xaa is C or S
AGPXXTPTKMNAISMLYFNDKQQIILKKYRGMVVDRXGXS

SEQ ID NO: 57278 - protein, 33 aa, Artificial Sequence; identical to SEQ ID NO: 15294
  GFR-binding peptide
  MOD_RES (1), (33): Xaa is C or S

SEQ ID NO: 57279 - protein, 40 aa, Artificial Sequence; identical to SEQ ID NO: 27360
  GFR-binding peptide
  MOD_RES (5), (6), (40): Xaa is C or S
  MOD_RES (20), (21), (22), (23), (24): Xaa is A or G
  MOD_RES (25), (26), (27), (28): Xaa is A or G or is absent

SEQ ID NO: 57280 - protein, 41 aa, Artificial Sequence
  GFR-binding peptide
  MOD_RES (6), (7), (39), (41): Xaa is C or S
GSAGPXXTPTKMNAISMLYFNDKQQIILKKYRGMVVDRXGX

SEQ ID NO: 57281 - protein, 37 aa, Artificial Sequence; identical to SEQ ID NO: 6230
  GFR-binding peptide
  MOD_RES (34), (36): Xaa is C or S
  MOD_RES (14), (15), (16), (17), (18): Xaa is A or G
  MOD_RES (19), (20), (21), (22): Xaa is A or G or is absent

SEQ ID NO: 57282 - protein, 40 aa, Artificial Sequence; identical to SEQ ID NO: 7150
  GFR-binding peptide
  MOD_RES (3), (4), (38), (40): Xaa is C or S
  MOD_RES (18), (19), (20), (21), (22): Xaa is A or G
  MOD_RES (23), (24), (25), (26): Xaa is A or G or is absent

SEQ ID NO: 57283 - protein, 43 aa, Artificial Sequence; identical to SEQ ID NO: 30282
  GFR-binding peptide
  MOD_RES (6), (7), (41), (43): Xaa is C or S
  MOD_RES (21), (22), (23), (24), (25): Xaa is A or G
  MOD_RES (26), (27), (28), (29): Xaa is A or G or is absent

SEQ ID NO: 57284 - protein, 36 aa, Artificial Sequence; identical to SEQ ID NO: 15303
  GFR-binding peptide
  MOD_RES (1), (2), (34), (36): Xaa is C or S

SEQ ID NO: 57285 - protein, 39 aa, Artificial Sequence; identical to SEQ ID NO: 7159
  GFR-binding peptide
  MOD_RES (6), (7), (39): Xaa is C or S

SEQ ID NO: 57286 - protein, 34 aa, Artificial Sequence; identical to SEQ ID NO: 30289
  GFR-binding peptide
  MOD_RES (2), (3): Xaa is C or S

SEQ ID NO: 57287 - protein, 36 aa, Artificial Sequence; identical to SEQ ID NO: 16218
  GFR-binding peptide
  MOD_RES (34), (36): Xaa is C or S
  MOD_RES (14), (15), (16), (17), (18): Xaa is A or G
  MOD_RES (19), (20), (21), (22): Xaa is A or G or is absent

SEQ ID NO: 57288 - protein, 34 aa, Artificial Sequence
  GFR-binding peptide
  MOD_RES (2), (3), (34): Xaa is C or S
TXXAPVKTNAISMLYFDNGRVLLLKKYRMIVEEX

SEQ ID NO: 57289 - protein, 40 aa, Artificial Sequence; identical to SEQ ID NO: 29289
  GFR-binding peptide
  MOD_RES (2), (3), (37), (39): Xaa is C or S
  MOD_RES (17), (18), (19), (20), (21): Xaa is A or G
  MOD_RES (22), (23), (24), (25): Xaa is A or G or is absent

SEQ ID NO: 57290 - protein, 33 aa, Artificial Sequence; identical to SEQ ID NO: 16220
  GFR-binding peptide
  MOD_RES (32), (32): Xaa is C or S

SEQ ID NO: 57291 - protein, 35 aa, Artificial Sequence; identical to SEQ ID NO: 15305
  GFR-binding peptide
  MOD_RES (2), (3): Xaa is C or S
  MOD_RES (17), (18), (19), (20), (21): Xaa is A or G
  MOD_RES (22), (23), (24), (25): Xaa is A or G or is absent

SEQ ID NO: 57292 - protein, 35 aa, Artificial Sequence
  GFR-binding peptide
  MOD_RES (1), (2), (34): Xaa is C or S
XXTPTKMNAISMLYFNDKQQIILKKYRGMVVDRXG

SEQ ID NO: 57293 - protein, 40 aa, Artificial Sequence; identical to SEQ ID NO: 6239
  GFR-binding peptide
  MOD_RES (4), (5), (38), (40): Xaa is C or S

SEQ ID NO: 57294 - protein, 37 aa, Artificial Sequence; identical to SEQ ID NO: 27379
  GFR-binding peptide
  MOD_RES (4), (5), (37): Xaa is C or S

SEQ ID NO: 57295 - protein, 39 aa, Artificial Sequence; identical to SEQ ID NO: 8919
  GFR-binding peptide
  MOD_RES (2), (3), (36), (38): Xaa is C or S

SEQ ID NO: 57296 - protein, 35 aa, Artificial Sequence
  GFR-binding peptide
  MOD_RES (1), (2), (35): Xaa is C or S
  MOD_RES (16), (17), (18), (19), (20): Xaa is A or G
  MOD_RES (21), (22), (23), (24): Xaa is A or G or is absent
XXAPVKTNAISMLYFXXXXXXXXXLKKYRMIVEEX

SEQ ID NO: 57297 - protein, 38 aa, Artificial Sequence; identical to SEQ ID NO: 8920
  GFR-binding peptide
  MOD_RES (3), (4), (36), (38): Xaa is C or S

SEQ ID NO: 57298 - protein, 45 aa, Artificial Sequence; identical to SEQ ID NO: 8922
  GFR-binding peptide
  MOD_RES (6), (7), (42), (44): Xaa is C or S
  MOD_RES (21), (22), (23), (24), (25): Xaa is A or G
  MOD_RES (26), (27), (28), (29): Xaa is A or G or is absent

SEQ ID NO: 57299 - protein, 37 aa, Artificial Sequence; identical to SEQ ID NO: 8923
  GFR-binding peptide
  MOD_RES (3), (4), (37): Xaa is C or S

SEQ ID NO: 57300 - protein, 33 aa, Artificial Sequence; identical to SEQ ID NO: 8925
  GFR-binding peptide
  MOD_RES (1), (1): Xaa is C or S
  MOD_RES (15), (16), (17), (18), (19): Xaa is A or G
  MOD_RES (20), (21), (22), (23): Xaa is A or G or is absent

SEQ ID NO: 57301 - protein, 40 aa, Artificial Sequence; identical to SEQ ID NO: 8926
  GFR-binding peptide
  MOD_RES (5), (6), (38), (40): Xaa is C or S

SEQ ID NO: 57302 - protein, 42 aa, Artificial Sequence; identical to SEQ ID NO: 8016
  GFR-binding peptide
  MOD_RES (5), (6), (39), (41): Xaa is C or S

SEQ ID NO: 57303 - protein, 34 aa, Artificial Sequence; identical to SEQ ID NO: 8019
  GFR-binding peptide
  MOD_RES (34), (34): Xaa is C or S
  MOD_RES (14), (15), (16), (17), (18): Xaa is A or G
  MOD_RES (19), (20), (21), (22): Xaa is A or G or is absent

SEQ ID NO: 57304 - protein, 31 aa, Artificial Sequence; identical to SEQ ID NO: 15316
  GFR-binding peptide
  MOD_RES (1), (1): Xaa is C or S

SEQ ID NO: 57305 - protein, 32 aa, Artificial Sequence
  GFR-binding peptide
  MOD_RES (1), (1): Xaa is C or S
XTPTKMNAISMLYFNDKQQIILKKYRGMVVDR

SEQ ID NO: 57306 - protein, 35 aa, Artificial Sequence; identical to SEQ ID NO: 28346
  GFR-binding peptide
  MOD_RES (1), (2): Xaa is C or S
  MOD_RES (16), (17), (18), (19), (20): Xaa is A or G
  MOD_RES (21), (22), (23), (24): Xaa is A or G or is absent

SEQ ID NO: 57307 - protein, 42 aa, Artificial Sequence; identical to SEQ ID NO: 7177
  GFR-binding peptide
  MOD_RES (4), (5), (39), (41): Xaa is C or S
  MOD_RES (19), (20), (21), (22), (23): Xaa is A or G
  MOD_RES (24), (25), (26), (27): Xaa is A or G or is absent

SEQ ID NO: 57308 - protein, 40 aa, Artificial Sequence; identical to SEQ ID NO: 8938
  GFR-binding peptide
  MOD_RES (6), (7): Xaa is C or S
  MOD_RES (21), (22), (23), (24), (25): Xaa is A or G
  MOD_RES (26), (27), (28), (29): Xaa is A or G or is absent

SEQ ID NO: 57309 - protein, 37 aa, Artificial Sequence; identical to SEQ ID NO: 8939
  GFR-binding peptide
  MOD_RES (2), (3): Xaa is C or S
  MOD_RES (17), (18), (19), (20), (21): Xaa is A or G
  MOD_RES (22), (23), (24), (25): Xaa is A or G or is absent

SEQ ID NO: 57310 - protein, 38 aa, Artificial Sequence; identical to SEQ ID NO: 29297
  GFR-binding peptide
  MOD_RES (6), (7): Xaa is C or S

SEQ ID NO: 57311 - protein, 39 aa, Artificial Sequence; identical to SEQ ID NO: 8944
  GFR-binding peptide
  MOD_RES (1), (2), (36), (38): Xaa is C or S
  MOD_RES (16), (17), (18), (19), (20): Xaa is A or G
  MOD_RES (21), (22), (23), (24): Xaa is A or G or is absent

SEQ ID NO: 57312 - protein, 43 aa, Artificial Sequence; identical to SEQ ID NO: 7185
  GFR-binding peptide
  MOD_RES (6), (7), (41), (43): Xaa is C or S
  MOD_RES (21), (22), (23), (24), (25): Xaa is A or G
  MOD_RES (26), (27), (28), (29): Xaa is A or G or is absent

SEQ ID NO: 57313 - protein, 35 aa, Artificial Sequence; identical to SEQ ID NO: 28352
  GFR-binding peptide
  MOD_RES (4), (5): Xaa is C or S

SEQ ID NO: 57314 - protein, 37 aa, Artificial Sequence
  GFR-binding peptide
  MOD_RES (3), (4): Xaa is C or S
  MOD_RES (18), (19), (20), (21), (22): Xaa is A or G
  MOD_RES (23), (24), (25), (26): Xaa is A or G or is absent
GPXXTPTKMNAISMLYFXXXXXXXXXLKKYRGMVVDR

SEQ ID NO: 57315 - protein, 39 aa, Artificial Sequence; identical to SEQ ID NO: 28356
  GFR-binding peptide
  MOD_RES (6), (7), (39): Xaa is C or S

SEQ ID NO: 57316 - protein, 33 aa, Artificial Sequence; identical to SEQ ID NO: 7193
  GFR-binding peptide
  MOD_RES (2), (3): Xaa is C or S

SEQ ID NO: 57317 - protein, 43 aa, Artificial Sequence; identical to SEQ ID NO: 6260
  GFR-binding peptide
  MOD_RES (5), (6), (40), (42): Xaa is C or S
  MOD_RES (20), (21), (22), (23), (24): Xaa is A or G
  MOD_RES (25), (26), (27), (28): Xaa is A or G or is absent

SEQ ID NO: 57318 - protein, 42 aa, Artificial Sequence
  GFR-binding peptide
  MOD_RES (6), (7), (41): Xaa is C or S
  MOD_RES (21), (22), (23), (24), (25): Xaa is A or G
  MOD_RES (26), (27), (28), (29): Xaa is A or G or is absent
GSAGPXXTPTKMNAISMLYFXXXXXXXXXLKKYRGMVVDRXG

SEQ ID NO: 57319 - protein, 37 aa, Artificial Sequence; identical to SEQ ID NO: 6263
  GFR-binding peptide
  MOD_RES (1), (35), (37): Xaa is C or S
  MOD_RES (15), (16), (17), (18), (19): Xaa is A or G
  MOD_RES (20), (21), (22), (23): Xaa is A or G or is absent

SEQ ID NO: 57320 - protein, 34 aa, Artificial Sequence
  GFR-binding peptide
  MOD_RES (31), (33): Xaa is C or S
APVKTNAISMLYFDNGRVLLLKKYRMIVEEXGXL

SEQ ID NO: 57321 - protein, 37 aa, Artificial Sequence; identical to SEQ ID NO: 7195
  GFR-binding peptide
  MOD_RES (1), (2), (34), (36): Xaa is C or S

SEQ ID NO: 57322 - protein, 36 aa, Artificial Sequence; identical to SEQ ID NO: 7197
  GFR-binding peptide
  MOD_RES (1), (2), (36): Xaa is C or S
  MOD_RES (16), (17), (18), (19), (20): Xaa is A or G
  MOD_RES (21), (22), (23), (24): Xaa is A or G or is absent

SEQ ID NO: 57323 - protein, 38 aa, Artificial Sequence; identical to SEQ ID NO: 8036
  GFR-binding peptide
  MOD_RES (5), (6): Xaa is C or S
  MOD_RES (20), (21), (22), (23), (24): Xaa is A or G
  MOD_RES (25), (26), (27), (28): Xaa is A or G or is absent

SEQ ID NO: 57324 - protein, 41 aa, Artificial Sequence; identical to SEQ ID NO: 7198
  GFR-binding peptide
  MOD_RES (5), (39), (41): Xaa is C or S
  MOD_RES (19), (20), (21), (22), (23): Xaa is A or G
  MOD_RES (24), (25), (26), (27): Xaa is A or G or is absent

SEQ ID NO: 57325 - protein, 41 aa, Artificial Sequence; identical to SEQ ID NO: 28366
  GFR-binding peptide
  MOD_RES (6), (7), (39), (41): Xaa is C or S

SEQ ID NO: 57326 - protein, 39 aa, Artificial Sequence
  GFR-binding peptide
  MOD_RES (3), (4), (38): Xaa is C or S
  MOD_RES (18), (19), (20), (21), (22): Xaa is A or G
  MOD_RES (23), (24), (25), (26): Xaa is A or G or is absent
GPXXTPTKMNAISMLYFXXXXXXXXXLKKYRGMVVDRXG

SEQ ID NO: 57327 - protein, 37 aa, Artificial Sequence; identical to SEQ ID NO: 7199
  GFR-binding peptide
  MOD_RES (1), (35), (37): Xaa is C or S
  MOD_RES (15), (16), (17), (18), (19): Xaa is A or G
  MOD_RES (20), (21), (22), (23): Xaa is A or G or is absent

SEQ ID NO: 57328 - protein, 35 aa, Artificial Sequence; identical to SEQ ID NO: 8957
  GFR-binding peptide
  MOD_RES (1), (33), (35): Xaa is C or S

SEQ ID NO: 57329 - protein, 39 aa, Artificial Sequence; identical to SEQ ID NO: 8038
  GFR-binding peptide
  MOD_RES (1), (2), (36), (38): Xaa is C or S
  MOD_RES (16), (17), (18), (19), (20): Xaa is A or G
  MOD_RES (21), (22), (23), (24): Xaa is A or G or is absent

SEQ ID NO: 57330 - protein, 37 aa, Artificial Sequence; identical to SEQ ID NO: 8040
  GFR-binding peptide
  MOD_RES (1), (2), (36): Xaa is C or S
  MOD_RES (16), (17), (18), (19), (20): Xaa is A or G
  MOD_RES (21), (22), (23), (24): Xaa is A or G or is absent

SEQ ID NO: 57331 - protein, 42 aa, Artificial Sequence; identical to SEQ ID NO: 7204
  GFR-binding peptide
  MOD_RES (5), (6), (40), (42): Xaa is C or S
  MOD_RES (20), (21), (22), (23), (24): Xaa is A or G
  MOD_RES (25), (26), (27), (28): Xaa is A or G or is absent

SEQ ID NO: 57332 - protein, 36 aa, Artificial Sequence; identical to SEQ ID NO: 30338
  GFR-binding peptide
  MOD_RES (3), (4), (36): Xaa is C or S

SEQ ID NO: 57333 - protein, 40 aa, Artificial Sequence; identical to SEQ ID NO: 8045
  GFR-binding peptide
  MOD_RES (4), (5), (37), (39): Xaa is C or S

SEQ ID NO: 57334 - protein, 35 aa, Artificial Sequence; identical to SEQ ID NO: 8968
  GFR-binding peptide
  MOD_RES (32), (34): Xaa is C or S

SEQ ID NO: 57335 - protein, 39 aa, Artificial Sequence; identical to SEQ ID NO: 6282
  GFR-binding peptide
  MOD_RES (3), (4), (38): Xaa is C or S
  MOD_RES (18), (19), (20), (21), (22): Xaa is A or G
  MOD_RES (23), (24), (25), (26): Xaa is A or G or is absent

SEQ ID NO: 57336 - protein, 32 aa, Artificial Sequence; identical to SEQ ID NO: 8048
  GFR-binding peptide
  MOD_RES (1), (2): Xaa is C or S

SEQ ID NO: 57337 - protein, 32 aa, Artificial Sequence; identical to SEQ ID NO: 8053
  GFR-binding peptide
  MOD_RES (32), (32): Xaa is C or S

SEQ ID NO: 57338 - protein, 40 aa, Artificial Sequence
  GFR-binding peptide
  MOD_RES (5), (6), (38), (40): Xaa is C or S
SAGPXXTPTKMNAISMLYFNDKQQIILKKYRGMVVDRXGX

SEQ ID NO: 57339 - protein, 40 aa, Artificial Sequence; identical to SEQ ID NO: 14516
  GFR-binding peptide
  MOD_RES (5), (6), (38), (40): Xaa is C or S

SEQ ID NO: 57340 - protein, 36 aa, Artificial Sequence; identical to SEQ ID NO: 7214
  GFR-binding peptide
  MOD_RES (1), (33), (35): Xaa is C or S

SEQ ID NO: 57341 - protein, 44 aa, Artificial Sequence; identical to SEQ ID NO: 6288
  GFR-binding peptide
  MOD_RES (6), (7), (42), (44): Xaa is C or S
  MOD_RES (21), (22), (23), (24), (25): Xaa is A or G
  MOD_RES (26), (27), (28), (29): Xaa is A or G or is absent

SEQ ID NO: 57342 - protein, 37 aa, Artificial Sequence
  GFR-binding peptide
  MOD_RES (1), (35), (37): Xaa is C or S
  MOD_RES (15), (16), (17), (18), (19): Xaa is A or G
  MOD_RES (20), (21), (22), (23): Xaa is A or G or is absent
XTPTKMNAISMLYFXXXXXXXXXLKKYRGMVVDRXGX

SEQ ID NO: 57343 - protein, 33 aa, Artificial Sequence
  GFR-binding peptide
  MOD_RES (14), (15), (16), (17), (18): Xaa is A or G
  MOD_RES (19), (20), (21), (22): Xaa is A or G or is absent
TPTKMNAISMLYFXXXXXXXXXLKKYRGMVVDR

SEQ ID NO: 57344 - protein, 39 aa, Artificial Sequence; identical to SEQ ID NO: 14518
  GFR-binding peptide
  MOD_RES (1), (2), (36), (38): Xaa is C or S
  MOD_RES (16), (17), (18), (19), (20): Xaa is A or G
  MOD_RES (21), (22), (23), (24): Xaa is A or G or is absent

SEQ ID NO: 57345 - protein, 44 aa, Artificial Sequence; identical to SEQ ID NO: 8976
  GFR-binding peptide
  MOD_RES (5), (6), (41), (43): Xaa is C or S
  MOD_RES (20), (21), (22), (23), (24): Xaa is A or G
  MOD_RES (25), (26), (27), (28): Xaa is A or G or is absent

SEQ ID NO: 57346 - protein, 39 aa, Artificial Sequence; identical to SEQ ID NO: 8977
  GFR-binding peptide
  MOD_RES (3), (4), (36), (38): Xaa is C or S

SEQ ID NO: 57347 - protein, 39 aa, Artificial Sequence; identical to SEQ ID NO: 6289
  GFR-binding peptide
  MOD_RES (2), (3), (37), (39): Xaa is C or S
  MOD_RES (17), (18), (19), (20), (21): Xaa is A or G
  MOD_RES (22), (23), (24), (25): Xaa is A or G or is absent

SEQ ID NO: 57348 - protein, 38 aa, Artificial Sequence; identical to SEQ ID NO: 8980
  GFR-binding peptide
  MOD_RES (5), (6), (38): Xaa is C or S

SEQ ID NO: 57349 - protein, 41 aa, Artificial Sequence; identical to SEQ ID NO: 6294
  GFR-binding peptide
  MOD_RES (5), (6), (40): Xaa is C or S
  MOD_RES (20), (21), (22), (23), (24): Xaa is A or G
  MOD_RES (25), (26), (27), (28): Xaa is A or G or is absent

SEQ ID NO: 57350 - protein, 36 aa, Artificial Sequence; identical to SEQ ID NO: 8059
  GFR-binding peptide
  MOD_RES (1), (35): Xaa is C or S
  MOD_RES (15), (16), (17), (18), (19): Xaa is A or G
  MOD_RES (20), (21), (22), (23): Xaa is A or G or is absent

SEQ ID NO: 57351 - protein, 39 aa, Artificial Sequence
  GFR-binding peptide
  MOD_RES (2), (3), (37), (39): Xaa is C or S
  MOD_RES (17), (18), (19), (20), (21): Xaa is A or G
  MOD_RES (22), (23), (24), (25): Xaa is A or G or is absent
PXXTPTKMNAISMLYFXXXXXXXXXLKKYRGMVVDRXGX

SEQ ID NO: 57352 - protein, 37 aa, Artificial Sequence; identical to SEQ ID NO: 6299
  GFR-binding peptide
  MOD_RES (1), (35), (37): Xaa is C or S
  MOD_RES (15), (16), (17), (18), (19): Xaa is A or G
  MOD_RES (20), (21), (22), (23): Xaa is A or G or is absent

SEQ ID NO: 57353 - protein, 36 aa, Artificial Sequence; identical to SEQ ID NO: 16277
  GFR-binding peptide
  MOD_RES (3), (4): Xaa is C or S
  MOD_RES (18), (19), (20), (21), (22): Xaa is A or G
  MOD_RES (23), (24), (25), (26): Xaa is A or G or is absent

SEQ ID NO: 57354 - protein, 38 aa, Artificial Sequence; identical to SEQ ID NO: 8063
  GFR-binding peptide
  MOD_RES (4), (5), (37): Xaa is C or S

SEQ ID NO: 57355 - protein, 30 aa, Artificial Sequence; identical to SEQ ID NO: 16279
  GFR-binding peptide

SEQ ID NO: 57356 - protein, 35 aa, Artificial Sequence; identical to SEQ ID NO: 30366
  GFR-binding peptide
  MOD_RES (34), (34): Xaa is C or S
  MOD_RES (14), (15), (16), (17), (18): Xaa is A or G
  MOD_RES (19), (20), (21), (22): Xaa is A or G or is absent

SEQ ID NO: 57357 - protein, 38 aa, Artificial Sequence; identical to SEQ ID NO: 6302
  GFR-binding peptide
  MOD_RES (2), (3), (35), (37): Xaa is C or S

SEQ ID NO: 57358 - protein, 35 aa, Artificial Sequence; identical to SEQ ID NO: 8069
  GFR-binding peptide
  MOD_RES (1), (2): Xaa is C or S
  MOD_RES (16), (17), (18), (19), (20): Xaa is A or G
  MOD_RES (21), (22), (23), (24): Xaa is A or G or is absent

SEQ ID NO: 57359 - protein, 39 aa, Artificial Sequence; identical to SEQ ID NO: 8990
  GFR-binding peptide
  MOD_RES (1), (36), (38): Xaa is C or S
  MOD_RES (15), (16), (17), (18), (19): Xaa is A or G
  MOD_RES (20), (21), (22), (23): Xaa is A or G or is absent

SEQ ID NO: 57360 - protein, 39 aa, Artificial Sequence; identical to SEQ ID NO: 6306
  GFR-binding peptide
  MOD_RES (1), (2), (36), (38): Xaa is C or S
  MOD_RES (16), (17), (18), (19), (20): Xaa is A or G
  MOD_RES (21), (22), (23), (24): Xaa is A or G or is absent

SEQ ID NO: 57361 - protein, 33 aa, Artificial Sequence; identical to SEQ ID NO: 8997
  GFR-binding peptide
  MOD_RES (1), (33): Xaa is C or S

SEQ ID NO: 57362 - protein, 34 aa, Artificial Sequence; identical to SEQ ID NO: 28397
  GFR-binding peptide
  MOD_RES (34), (34): Xaa is C or S
  MOD_RES (14), (15), (16), (17), (18): Xaa is A or G
  MOD_RES (19), (20), (21), (22): Xaa is A or G or is absent

SEQ ID NO: 57363 - protein, 38 aa, Artificial Sequence
  GFR-binding peptide
  MOD_RES (2), (3), (37): Xaa is C or S
  MOD_RES (17), (18), (19), (20), (21): Xaa is A or G
  MOD_RES (22), (23), (24), (25): Xaa is A or G or is absent
PXXTPTKMNAISMLYFXXXXXXXXXLKKYRGMVVDRXG

SEQ ID NO: 57364 - protein, 34 aa, Artificial Sequence
  GFR-binding peptide
  MOD_RES (3), (4): Xaa is C or S
GPXXTPTKMNAISMLYFNDKQQIILKKYRGMVVD

SEQ ID NO: 57365 - protein, 40 aa, Artificial Sequence; identical to SEQ ID NO: 13695
  GFR-binding peptide
  MOD_RES (6), (7), (39): Xaa is C or S

SEQ ID NO: 57366 - protein, 36 aa, Artificial Sequence; identical to SEQ ID NO: 9001
  GFR-binding peptide
  MOD_RES (2), (3): Xaa is C or S
  MOD_RES (17), (18), (19), (20), (21): Xaa is A or G
  MOD_RES (22), (23), (24), (25): Xaa is A or G or is absent

SEQ ID NO: 57367 - protein, 37 aa, Artificial Sequence; identical to SEQ ID NO: 27454
  GFR-binding peptide
  MOD_RES (3), (4), (36): Xaa is C or S

SEQ ID NO: 57368 - protein, 38 aa, Artificial Sequence; identical to SEQ ID NO: 27459
  GFR-binding peptide
  MOD_RES (4), (5), (37): Xaa is C or S

SEQ ID NO: 57369 - protein, 33 aa, Artificial Sequence; identical to SEQ ID NO: 8088
  GFR-binding peptide
  MOD_RES (1), (1): Xaa is C or S
  MOD_RES (15), (16), (17), (18), (19): Xaa is A or G
  MOD_RES (20), (21), (22), (23): Xaa is A or G or is absent

SEQ ID NO: 57370 - protein, 39 aa, Artificial Sequence; identical to SEQ ID NO: 7236
  GFR-binding peptide
  MOD_RES (6), (7): Xaa is C or S
  MOD_RES (21), (22), (23), (24), (25): Xaa is A or G
  MOD_RES (26), (27), (28), (29): Xaa is A or G or is absent

SEQ ID NO: 57371 - protein, 37 aa, Artificial Sequence
  GFR-binding peptide
  MOD_RES (3), (4), (37): Xaa is C or S
  MOD_RES (18), (19), (20), (21), (22): Xaa is A or G
  MOD_RES (23), (24), (25), (26): Xaa is A or G or is absent
STXXAPVKTNAISMLYFXXXXXXXXXLKKYRMIVEEX

SEQ ID NO: 57372 - protein, 35 aa, Artificial Sequence; identical to SEQ ID NO: 6325
  GFR-binding peptide
  MOD_RES (34), (34): Xaa is C or S
  MOD_RES (14), (15), (16), (17), (18): Xaa is A or G
  MOD_RES (19), (20), (21), (22): Xaa is A or G or is absent

SEQ ID NO: 57373 - protein, 37 aa, Artificial Sequence; identical to SEQ ID NO: 8094
  GFR-binding peptide
  MOD_RES (34), (36): Xaa is C or S
  MOD_RES (14), (15), (16), (17), (18): Xaa is A or G
  MOD_RES (19), (20), (21), (22): Xaa is A or G or is absent

SEQ ID NO: 57374 - protein, 38 aa, Artificial Sequence
  GFR-binding peptide
  MOD_RES (4), (5), (37): Xaa is C or S
AGPXXTPTKMNAISMLYFNDKQQIILKKYRGMVVDRXG

SEQ ID NO: 57375 - protein, 38 aa, Artificial Sequence; identical to SEQ ID NO: 9005
  GFR-binding peptide
  MOD_RES (3), (4), (36), (38): Xaa is C or S

SEQ ID NO: 57376 - protein, 42 aa, Artificial Sequence; identical to SEQ ID NO: 8096
  GFR-binding peptide
  MOD_RES (4), (5), (39), (41): Xaa is C or S
  MOD_RES (19), (20), (21), (22), (23): Xaa is A or G
  MOD_RES (24), (25), (26), (27): Xaa is A or G or is absent

SEQ ID NO: 57377 - protein, 42 aa, Artificial Sequence; identical to SEQ ID NO: 8097
  GFR-binding peptide
  MOD_RES (6), (7), (41): Xaa is C or S
  MOD_RES (21), (22), (23), (24), (25): Xaa is A or G
  MOD_RES (26), (27), (28), (29): Xaa is A or G or is absent

SEQ ID NO: 57378 - protein, 42 aa, Artificial Sequence; identical to SEQ ID NO: 16301
  GFR-binding peptide
  MOD_RES (4), (5), (39), (41): Xaa is C or S
  MOD_RES (19), (20), (21), (22), (23): Xaa is A or G
  MOD_RES (24), (25), (26), (27): Xaa is A or G or is absent

SEQ ID NO: 57379 - protein, 36 aa, Artificial Sequence
  GFR-binding peptide
  MOD_RES (5), (6): Xaa is C or S
VPSTXXAPVKTNAISMLYFDNGRVLLLKKYRMIVEE

SEQ ID NO: 57380 - protein, 36 aa, Artificial Sequence; identical to SEQ ID NO: 29383
  GFR-binding peptide
  MOD_RES (2), (3), (35): Xaa is C or S

SEQ ID NO: 57381 - protein, 41 aa, Artificial Sequence
  GFR-binding peptide
  MOD_RES (5), (6), (39), (41): Xaa is C or S
  MOD_RES (20), (21), (22), (23), (24): Xaa is A or G
  MOD_RES (25), (26), (27), (28): Xaa is A or G or is absent
VPSTXXAPVKTNAISMLYFXXXXXXXXXLKKYRMIVEEXGX

SEQ ID NO: 57382 - protein, 34 aa, Artificial Sequence; identical to SEQ ID NO: 8101
  GFR-binding peptide
  MOD_RES (34), (34): Xaa is C or S
  MOD_RES (14), (15), (16), (17), (18): Xaa is A or G
  MOD_RES (19), (20), (21), (22): Xaa is A or G or is absent

SEQ ID NO: 57383 - protein, 31 aa, Artificial Sequence; identical to SEQ ID NO: 16304
  GFR-binding peptide

SEQ ID NO: 57384 - protein, 33 aa, Artificial Sequence; identical to SEQ ID NO: 27471
  GFR-binding peptide
  MOD_RES (2), (3): Xaa is C or S

SEQ ID NO: 57385 - protein, 33 aa, Artificial Sequence; identical to SEQ ID NO: 9011
  GFR-binding peptide
  MOD_RES (1), (2): Xaa is C or S

SEQ ID NO: 57386 - protein, 38 aa, Artificial Sequence; identical to SEQ ID NO: 29387
  GFR-binding peptide
  MOD_RES (3), (4), (36), (38): Xaa is C or S

SEQ ID NO: 57387 - protein, 44 aa, Artificial Sequence; identical to SEQ ID NO: 9014
  GFR-binding peptide
  MOD_RES (6), (7), (41), (43): Xaa is C or S
  MOD_RES (21), (22), (23), (24), (25): Xaa is A or G
  MOD_RES (26), (27), (28), (29): Xaa is A or G or is absent

SEQ ID NO: 57388 - protein, 42 aa, Artificial Sequence; identical to SEQ ID NO: 6334
  GFR-binding peptide
  MOD_RES (5), (6), (40), (42): Xaa is C or S
  MOD_RES (20), (21), (22), (23), (24): Xaa is A or G
  MOD_RES (25), (26), (27), (28): Xaa is A or G or is absent

SEQ ID NO: 57389 - protein, 37 aa, Artificial Sequence
  GFR-binding peptide
  MOD_RES (2), (3), (37): Xaa is C or S
  MOD_RES (17), (18), (19), (20), (21): Xaa is A or G
  MOD_RES (22), (23), (24), (25): Xaa is A or G or is absent
PXXTPTKMNAISMLYFXXXXXXXXXLKKYRGMVVDRX

SEQ ID NO: 57390 - protein, 36 aa, Artificial Sequence
  GFR-binding peptide
  MOD_RES (33), (35): Xaa is C or S
  MOD_RES (14), (15), (16), (17), (18): Xaa is A or G
  MOD_RES (19), (20), (21), (22): Xaa is A or G or is absent
APVKTNAISMLYFXXXXXXXXXLKKYRMIVEEXGXL

SEQ ID NO: 57391 - protein, 43 aa, Artificial Sequence; identical to SEQ ID NO: 7248
  GFR-binding peptide
  MOD_RES (5), (6), (40), (42): Xaa is C or S
  MOD_RES (20), (21), (22), (23), (24): Xaa is A or G
  MOD_RES (25), (26), (27), (28): Xaa is A or G or is absent

SEQ ID NO: 57392 - protein, 40 aa, Artificial Sequence; identical to SEQ ID NO: 9020
  GFR-binding peptide
  MOD_RES (5), (6), (40): Xaa is C or S
  MOD_RES (20), (21), (22), (23), (24): Xaa is A or G
  MOD_RES (25), (26), (27), (28): Xaa is A or G or is absent

SEQ ID NO: 57393 - protein, 33 aa, Artificial Sequence; identical to SEQ ID NO: 6338
  GFR-binding peptide
  MOD_RES (2), (3): Xaa is C or S

SEQ ID NO: 57394 - protein, 42 aa, Artificial Sequence; identical to SEQ ID NO: 29392
  GFR-binding peptide
  MOD_RES (6), (7), (39), (41): Xaa is C or S

SEQ ID NO: 57395 - protein, 35 aa, Artificial Sequence; identical to SEQ ID NO: 8106
  GFR-binding peptide
  MOD_RES (2), (3): Xaa is C or S
  MOD_RES (17), (18), (19), (20), (21): Xaa is A or G
  MOD_RES (22), (23), (24), (25): Xaa is A or G or is absent

SEQ ID NO: 57396 - protein, 38 aa, Artificial Sequence; identical to SEQ ID NO: 13721
  GFR-binding peptide
  MOD_RES (5), (6): Xaa is C or S
  MOD_RES (20), (21), (22), (23), (24): Xaa is A or G
  MOD_RES (25), (26), (27), (28): Xaa is A or G or is absent

SEQ ID NO: 57397 - protein, 36 aa, Artificial Sequence
  GFR-binding peptide
  MOD_RES (5), (6): Xaa is C or S
SAGPXXTPTKMNAISMLYFNDKQQIILKKYRGMVVD

SEQ ID NO: 57398 - protein, 40 aa, Artificial Sequence; identical to SEQ ID NO: 28438
  GFR-binding peptide
  MOD_RES (5), (6), (38), (40): Xaa is C or S

SEQ ID NO: 57399 - protein, 44 aa, Artificial Sequence; identical to SEQ ID NO: 14555
  GFR-binding peptide
  MOD_RES (6), (7), (41), (43): Xaa is C or S
  MOD_RES (21), (22), (23), (24), (25): Xaa is A or G
  MOD_RES (26), (27), (28), (29): Xaa is A or G or is absent

SEQ ID NO: 57400 - protein, 35 aa, Artificial Sequence; identical to SEQ ID NO: 15410
  GFR-binding peptide
  MOD_RES (32), (34): Xaa is C or S

SEQ ID NO: 57401 - protein, 40 aa, Artificial Sequence; identical to SEQ ID NO: 7257
  GFR-binding peptide
  MOD_RES (4), (5), (39): Xaa is C or S
  MOD_RES (19), (20), (21), (22), (23): Xaa is A or G
  MOD_RES (24), (25), (26), (27): Xaa is A or G or is absent

SEQ ID NO: 57402 - protein, 35 aa, Artificial Sequence; identical to SEQ ID NO: 8109
  GFR-binding peptide
  MOD_RES (1), (1): Xaa is C or S
  MOD_RES (15), (16), (17), (18), (19): Xaa is A or G
  MOD_RES (20), (21), (22), (23): Xaa is A or G or is absent

SEQ ID NO: 57403 - protein, 41 aa, Artificial Sequence; identical to SEQ ID NO: 9027
  GFR-binding peptide
  MOD_RES (6), (7), (41): Xaa is C or S
  MOD_RES (21), (22), (23), (24), (25): Xaa is A or G
  MOD_RES (26), (27), (28), (29): Xaa is A or G or is absent

SEQ ID NO: 57404 - protein, 31 aa, Artificial Sequence; identical to SEQ ID NO: 6347
  GFR-binding peptide
  MOD_RES (1), (1): Xaa is C or S

SEQ ID NO: 57405 - protein, 39 aa, Artificial Sequence; identical to SEQ ID NO: 16329
  GFR-binding peptide
  MOD_RES (5), (6): Xaa is C or S
  MOD_RES (20), (21), (22), (23), (24): Xaa is A or G
  MOD_RES (25), (26), (27), (28): Xaa is A or G or is absent

SEQ ID NO: 57406 - protein, 34 aa, Artificial Sequence; identical to SEQ ID NO: 13732
  GFR-binding peptide
  MOD_RES (2), (3): Xaa is C or S

SEQ ID NO: 57407 - protein, 38 aa, Artificial Sequence; identical to SEQ ID NO: 15413
  GFR-binding peptide
  MOD_RES (4), (5): Xaa is C or S
  MOD_RES (19), (20), (21), (22), (23): Xaa is A or G
  MOD_RES (24), (25), (26), (27): Xaa is A or G or is absent

SEQ ID NO: 57408 - protein, 37 aa, Artificial Sequence; identical to SEQ ID NO: 30415
  GFR-binding peptide
  MOD_RES (1), (2), (36): Xaa is C or S
  MOD_RES (16), (17), (18), (19), (20): Xaa is A or G
  MOD_RES (21), (22), (23), (24): Xaa is A or G or is absent

SEQ ID NO: 57409 - protein, 41 aa, Artificial Sequence; identical to SEQ ID NO: 8114
  GFR-binding peptide
  MOD_RES (4), (38), (40): Xaa is C or S
  MOD_RES (18), (19), (20), (21), (22): Xaa is A or G
  MOD_RES (23), (24), (25), (26): Xaa is A or G or is absent

SEQ ID NO: 57410 - protein, 35 aa, Artificial Sequence; identical to SEQ ID NO: 9031
  GFR-binding peptide
  MOD_RES (2), (3): Xaa is C or S

SEQ ID NO: 57411 - protein, 33 aa, Artificial Sequence; identical to SEQ ID NO: 9032
  GFR-binding peptide
  MOD_RES (1), (33): Xaa is C or S

SEQ ID NO: 57412 - protein, 40 aa, Artificial Sequence; identical to SEQ ID NO: 9033
  GFR-binding peptide
  MOD_RES (6), (7): Xaa is C or S
  MOD_RES (21), (22), (23), (24), (25): Xaa is A or G
  MOD_RES (26), (27), (28), (29): Xaa is A or G or is absent

SEQ ID NO: 57413 - protein, 44 aa, Artificial Sequence
  GFR-binding peptide
  MOD_RES (6), (7), (41), (43): Xaa is C or S
  MOD_RES (21), (22), (23), (24), (25): Xaa is A or G
  MOD_RES (26), (27), (28), (29): Xaa is A or G or is absent
GSAGPXXTPTKMNAISMLYFXXXXXXXXXLKKYRGMVVDRXGXS

SEQ ID NO: 57414 - protein, 40 aa, Artificial Sequence; identical to SEQ ID NO: 6352
  GFR-binding peptide
  MOD_RES (4), (5), (37), (39): Xaa is C or S

SEQ ID NO: 57415 - protein, 30 aa, Artificial Sequence; identical to SEQ ID NO: 29405
  GFR-binding peptide

SEQ ID NO: 57416 - protein, 42 aa, Artificial Sequence; identical to SEQ ID NO: 8123
  GFR-binding peptide
  MOD_RES (4), (5), (39), (41): Xaa is C or S
  MOD_RES (19), (20), (21), (22), (23): Xaa is A or G
  MOD_RES (24), (25), (26), (27): Xaa is A or G or is absent

SEQ ID NO: 57417 - protein, 36 aa, Artificial Sequence; identical to SEQ ID NO: 15425
  GFR-binding peptide
  MOD_RES (2), (3): Xaa is C or S
  MOD_RES (17), (18), (19), (20), (21): Xaa is A or G
  MOD_RES (22), (23), (24), (25): Xaa is A or G or is absent

SEQ ID NO: 57418 - protein, 33 aa, Artificial Sequence; identical to SEQ ID NO: 6355
  GFR-binding peptide
  MOD_RES (1), (1): Xaa is C or S
  MOD_RES (15), (16), (17), (18), (19): Xaa is A or G
  MOD_RES (20), (21), (22), (23): Xaa is A or G or is absent

SEQ ID NO: 57419 - protein, 35 aa, Artificial Sequence; identical to SEQ ID NO: 30427
  GFR-binding peptide
  MOD_RES (4), (5): Xaa is C or S

SEQ ID NO: 57420 - protein, 41 aa, Artificial Sequence; identical to SEQ ID NO: 27494
  GFR-binding peptide
  MOD_RES (4), (5), (39), (41): Xaa is C or S
  MOD_RES (19), (20), (21), (22), (23): Xaa is A or G
  MOD_RES (24), (25), (26), (27): Xaa is A or G or is absent

SEQ ID NO: 57421 - protein, 32 aa, Artificial Sequence; identical to SEQ ID NO: 28449
  GFR-binding peptide
  MOD_RES (32), (32): Xaa is C or S

SEQ ID NO: 57422 - protein, 40 aa, Artificial Sequence; identical to SEQ ID NO: 28451
  GFR-binding peptide
  MOD_RES (4), (5), (39): Xaa is C or S
  MOD_RES (19), (20), (21), (22), (23): Xaa is A or G
  MOD_RES (24), (25), (26), (27): Xaa is A or G or is absent

SEQ ID NO: 57423 - protein, 42 aa, Artificial Sequence; identical to SEQ ID NO: 27499
  GFR-binding peptide
  MOD_RES (5), (6), (40), (42): Xaa is C or S
  MOD_RES (20), (21), (22), (23), (24): Xaa is A or G
  MOD_RES (25), (26), (27), (28): Xaa is A or G or is absent

SEQ ID NO: 57424 - protein, 37 aa, Artificial Sequence; identical to SEQ ID NO: 27501
  GFR-binding peptide
  MOD_RES (1), (35), (37): Xaa is C or S
  MOD_RES (15), (16), (17), (18), (19): Xaa is A or G
  MOD_RES (20), (21), (22), (23): Xaa is A or G or is absent

SEQ ID NO: 57425 - protein, 34 aa, Artificial Sequence; identical to SEQ ID NO: 8137
  GFR-binding peptide
  MOD_RES (32), (34): Xaa is C or S

SEQ ID NO: 57426 - protein, 40 aa, Artificial Sequence; identical to SEQ ID NO: 27502
  GFR-binding peptide
  MOD_RES (3), (4), (38), (40): Xaa is C or S
  MOD_RES (18), (19), (20), (21), (22): Xaa is A or G
  MOD_RES (23), (24), (25), (26): Xaa is A or G or is absent

SEQ ID NO: 57427 - protein, 34 aa, Artificial Sequence; identical to SEQ ID NO: 7279
  GFR-binding peptide
  MOD_RES (3), (4): Xaa is C or S

SEQ ID NO: 57428 - protein, 32 aa, Artificial Sequence; identical to SEQ ID NO: 6367
  GFR-binding peptide
  MOD_RES (14), (15), (16), (17), (18): Xaa is A or G
  MOD_RES (19), (20), (21), (22): Xaa is A or G or is absent

SEQ ID NO: 57429 - protein, 43 aa, Artificial Sequence; identical to SEQ ID NO: 6370
  GFR-binding peptide
  MOD_RES (4), (5), (40), (42): Xaa is C or S
  MOD_RES (19), (20), (21), (22), (23): Xaa is A or G
  MOD_RES (24), (25), (26), (27): Xaa is A or G or is absent

SEQ ID NO: 57430 - protein, 39 aa, Artificial Sequence; identical to SEQ ID NO: 7281
  GFR-binding peptide
  MOD_RES (5), (6), (38): Xaa is C or S

SEQ ID NO: 57431 - protein, 43 aa, Artificial Sequence; identical to SEQ ID NO: 9053
  GFR-binding peptide
  MOD_RES (5), (6), (40), (42): Xaa is C or S
  MOD_RES (20), (21), (22), (23), (24): Xaa is A or G
  MOD_RES (25), (26), (27), (28): Xaa is A or G or is absent

SEQ ID NO: 57432 - protein, 42 aa, Artificial Sequence; identical to SEQ ID NO: 9056
  GFR-binding peptide
  MOD_RES (6), (7), (41): Xaa is C or S
  MOD_RES (21), (22), (23), (24), (25): Xaa is A or G
  MOD_RES (26), (27), (28), (29): Xaa is A or G or is absent

SEQ ID NO: 57433 - protein, 39 aa, Artificial Sequence; identical to SEQ ID NO: 6373
  GFR-binding peptide
  MOD_RES (3), (4), (38): Xaa is C or S
  MOD_RES (18), (19), (20), (21), (22): Xaa is A or G
  MOD_RES (23), (24), (25), (26): Xaa is A or G or is absent

SEQ ID NO: 57434 - protein, 42 aa, Artificial Sequence; identical to SEQ ID NO: 16356
  GFR-binding peptide
  MOD_RES (6), (7), (39), (41): Xaa is C or S

SEQ ID NO: 57435 - protein, 38 aa, Artificial Sequence; identical to SEQ ID NO: 6374
  GFR-binding peptide
  MOD_RES (35), (37): Xaa is C or S
  MOD_RES (14), (15), (16), (17), (18): Xaa is A or G
  MOD_RES (19), (20), (21), (22): Xaa is A or G or is absent

SEQ ID NO: 57436 - protein, 42 aa, Artificial Sequence; identical to SEQ ID NO: 14584
  GFR-binding peptide
  MOD_RES (5), (6), (40), (42): Xaa is C or S
  MOD_RES (20), (21), (22), (23), (24): Xaa is A or G
  MOD_RES (25), (26), (27), (28): Xaa is A or G or is absent

SEQ ID NO: 57437 - protein, 43 aa, Artificial Sequence; identical to SEQ ID NO: 8140
  GFR-binding peptide
  MOD_RES (6), (7), (42): Xaa is C or S
  MOD_RES (21), (22), (23), (24), (25): Xaa is A or G
  MOD_RES (26), (27), (28), (29): Xaa is A or G or is absent

SEQ ID NO: 57438 - protein, 34 aa, Artificial Sequence; identical to SEQ ID NO: 28462
  GFR-binding peptide
  MOD_RES (2), (3): Xaa is C or S

SEQ ID NO: 57439 - protein, 35 aa, Artificial Sequence
  GFR-binding peptide
  MOD_RES (32), (34): Xaa is C or S
TPTKMNAISMLYFNDKQQIILKKYRGMVVDRXGXS

SEQ ID NO: 57440 - protein, 34 aa, Artificial Sequence; identical to SEQ ID NO: 8142
  GFR-binding peptide
  MOD_RES (1), (33): Xaa is C or S

SEQ ID NO: 57441 - protein, 33 aa, Artificial Sequence; identical to SEQ ID NO: 30438
  GFR-binding peptide
  MOD_RES (32), (32): Xaa is C or S

SEQ ID NO: 57442 - protein, 35 aa, Artificial Sequence; identical to SEQ ID NO: 6378
  GFR-binding peptide
  MOD_RES (35), (35): Xaa is C or S
  MOD_RES (14), (15), (16), (17), (18): Xaa is A or G
  MOD_RES (19), (20), (21), (22): Xaa is A or G or is absent

SEQ ID NO: 57443 - protein, 37 aa, Artificial Sequence; identical to SEQ ID NO: 7287
  GFR-binding peptide
  MOD_RES (3), (4): Xaa is C or S
  MOD_RES (18), (19), (20), (21), (22): Xaa is A or G
  MOD_RES (23), (24), (25), (26): Xaa is A or G or is absent

SEQ ID NO: 57444 - protein, 33 aa, Artificial Sequence; identical to SEQ ID NO: 28466
  GFR-binding peptide
  MOD_RES (14), (15), (16), (17), (18): Xaa is A or G
  MOD_RES (19), (20), (21), (22): Xaa is A or G or is absent

SEQ ID NO: 57445 - protein, 42 aa, Artificial Sequence; identical to SEQ ID NO: 7288
  GFR-binding peptide
  MOD_RES (5), (6), (40), (42): Xaa is C or S
  MOD_RES (20), (21), (22), (23), (24): Xaa is A or G
  MOD_RES (25), (26), (27), (28): Xaa is A or G or is absent

SEQ ID NO: 57446 - protein, 35 aa, Artificial Sequence
  GFR-binding peptide
  MOD_RES (3), (4): Xaa is C or S
GPXXTPTKMNAISMLYFNDKQQIILKKYRGMVVDR

SEQ ID NO: 57447 - protein, 41 aa, Artificial Sequence; identical to SEQ ID NO: 29433
  GFR-binding peptide
  MOD_RES (5), (6), (38), (40): Xaa is C or S

SEQ ID NO: 57448 - protein, 35 aa, Artificial Sequence; identical to SEQ ID NO: 8148
  GFR-binding peptide
  MOD_RES (4), (5): Xaa is C or S

SEQ ID NO: 57449 - protein, 42 aa, Artificial Sequence; identical to SEQ ID NO: 14591
  GFR-binding peptide
  MOD_RES (6), (7), (41): Xaa is C or S
  MOD_RES (21), (22), (23), (24), (25): Xaa is A or G
  MOD_RES (26), (27), (28), (29): Xaa is A or G or is absent

SEQ ID NO: 57450 - protein, 37 aa, Artificial Sequence; identical to SEQ ID NO: 6382
  GFR-binding peptide
  MOD_RES (4), (4): Xaa is C or S
  MOD_RES (18), (19), (20), (21), (22): Xaa is A or G
  MOD_RES (23), (24), (25), (26): Xaa is A or G or is absent

SEQ ID NO: 57451 - protein, 35 aa, Artificial Sequence; identical to SEQ ID NO: 7293
  GFR-binding peptide
  MOD_RES (4), (5): Xaa is C or S

SEQ ID NO: 57452 - protein, 34 aa, Artificial Sequence
  GFR-binding peptide
  MOD_RES (3), (4): Xaa is C or S
STXXAPVKTNAISMLYFDNGRVLLLKKYRMIVEE

SEQ ID NO: 57453 - protein, 39 aa, Artificial Sequence; identical to SEQ ID NO: 6383
  GFR-binding peptide
  MOD_RES (5), (6): Xaa is C or S
  MOD_RES (20), (21), (22), (23), (24): Xaa is A or G
  MOD_RES (25), (26), (27), (28): Xaa is A or G or is absent

SEQ ID NO: 57454 - protein, 35 aa, Artificial Sequence
  GFR-binding peptide
  MOD_RES (1), (34): Xaa is C or S
  MOD_RES (15), (16), (17), (18), (19): Xaa is A or G
  MOD_RES (20), (21), (22), (23): Xaa is A or G or is absent
XAPVKTNAISMLYFXXXXXXXXXLKKYRMIVEEXG

SEQ ID NO: 57455 - protein, 41 aa, Artificial Sequence
  GFR-binding peptide
  MOD_RES (6), (7), (40): Xaa is C or S
  MOD_RES (21), (22), (23), (24), (25): Xaa is A or G
  MOD_RES (26), (27), (28), (29): Xaa is A or G or is absent
RVPSTXXAPVKTNAISMLYFXXXXXXXXXLKKYRMIVEEXG

SEQ ID NO: 57456 - protein, 35 aa, Artificial Sequence; identical to SEQ ID NO: 7297
  GFR-binding peptide
  MOD_RES (1), (2): Xaa is C or S
  MOD_RES (16), (17), (18), (19), (20): Xaa is A or G
  MOD_RES (21), (22), (23), (24): Xaa is A or G or is absent

SEQ ID NO: 57457 - protein, 30 aa, Artificial Sequence
  GFR-binding peptide
APVKTNAISMLYFDNGRVLLLKKYRMIVEE

SEQ ID NO: 57458 - protein, 32 aa, Artificial Sequence; identical to SEQ ID NO: 14597
  GFR-binding peptide
  MOD_RES (32), (32): Xaa is C or S

SEQ ID NO: 57459 - protein, 36 aa, Artificial Sequence; identical to SEQ ID NO: 8158
  GFR-binding peptide
  MOD_RES (33), (35): Xaa is C or S

SEQ ID NO: 57460 - protein, 35 aa, Artificial Sequence; identical to SEQ ID NO: 9072
  GFR-binding peptide
  MOD_RES (1), (35): Xaa is C or S
  MOD_RES (15), (16), (17), (18), (19): Xaa is A or G
  MOD_RES (20), (21), (22), (23): Xaa is A or G or is absent

SEQ ID NO: 57461 - protein, 41 aa, Artificial Sequence; identical to SEQ ID NO: 13777
  GFR-binding peptide
  MOD_RES (5), (6), (38), (40): Xaa is C or S

SEQ ID NO: 57462 - protein, 40 aa, Artificial Sequence
  GFR-binding peptide
  MOD_RES (5), (6), (39): Xaa is C or S
  MOD_RES (20), (21), (22), (23), (24): Xaa is A or G
  MOD_RES (25), (26), (27), (28): Xaa is A or G or is absent
VPSTXXAPVKTNAISMLYFXXXXXXXXXLKKYRMIVEEXG

SEQ ID NO: 57463 - protein, 36 aa, Artificial Sequence; identical to SEQ ID NO: 8163
  GFR-binding peptide
  MOD_RES (3), (4): Xaa is C or S
  MOD_RES (18), (19), (20), (21), (22): Xaa is A or G
  MOD_RES (23), (24), (25), (26): Xaa is A or G or is absent

SEQ ID NO: 57464 - protein, 37 aa, Artificial Sequence; identical to SEQ ID NO: 27536
  GFR-binding peptide
  MOD_RES (1), (2), (36): Xaa is C or S
  MOD_RES (16), (17), (18), (19), (20): Xaa is A or G
  MOD_RES (21), (22), (23), (24): Xaa is A or G or is absent

SEQ ID NO: 57465 - protein, 39 aa, Artificial Sequence
  GFR-binding peptide
  MOD_RES (4), (5), (39): Xaa is C or S
  MOD_RES (19), (20), (21), (22), (23): Xaa is A or G
  MOD_RES (24), (25), (26), (27): Xaa is A or G or is absent
AGPXXTPTKMNAISMLYFXXXXXXXXXLKKYRGMVVDRX

SEQ ID NO: 57466 - protein, 42 aa, Artificial Sequence; identical to SEQ ID NO: 30456
  GFR-binding peptide
  MOD_RES (6), (7), (41): Xaa is C or S
  MOD_RES (21), (22), (23), (24), (25): Xaa is A or G
  MOD_RES (26), (27), (28), (29): Xaa is A or G or is absent

SEQ ID NO: 57467 - protein, 35 aa, Artificial Sequence; identical to SEQ ID NO: 28490
  GFR-binding peptide
  MOD_RES (2), (3), (35): Xaa is C or S

SEQ ID NO: 57468 - protein, 31 aa, Artificial Sequence; identical to SEQ ID NO: 9080
  GFR-binding peptide
  MOD_RES (1), (1): Xaa is C or S

SEQ ID NO: 57469 - protein, 37 aa, Artificial Sequence
  GFR-binding peptide
  MOD_RES (4), (5), (37): Xaa is C or S
AGPXXTPTKMNAISMLYFNDKQQIILKKYRGMVVDRX

SEQ ID NO: 57470 - protein, 38 aa, Artificial Sequence; identical to SEQ ID NO: 8170
  GFR-binding peptide
  MOD_RES (2), (3), (36), (38): Xaa is C or S

SEQ ID NO: 57471 - protein, 34 aa, Artificial Sequence
  GFR-binding peptide
  MOD_RES (2), (3): Xaa is C or S
PXXTPTKMNAISMLYFNDKQQIILKKYRGMVVDR

SEQ ID NO: 57472 - protein, 42 aa, Artificial Sequence; identical to SEQ ID NO: 29473
  GFR-binding peptide
  MOD_RES (6), (7), (41): Xaa is C or S
  MOD_RES (21), (22), (23), (24), (25): Xaa is A or G
  MOD_RES (26), (27), (28), (29): Xaa is A or G or is absent

SEQ ID NO: 57473 - protein, 43 aa, Artificial Sequence; identical to SEQ ID NO: 30466
  GFR-binding peptide
  MOD_RES (6), (7), (41), (43): Xaa is C or S
  MOD_RES (21), (22), (23), (24), (25): Xaa is A or G
  MOD_RES (26), (27), (28), (29): Xaa is A or G or is absent

SEQ ID NO: 57474 - protein, 41 aa, Artificial Sequence; identical to SEQ ID NO: 29474
  GFR-binding peptide
  MOD_RES (3), (4), (38), (40): Xaa is C or S
  MOD_RES (18), (19), (20), (21), (22): Xaa is A or G
  MOD_RES (23), (24), (25), (26): Xaa is A or G or is absent

SEQ ID NO: 57475 - protein, 39 aa, Artificial Sequence; identical to SEQ ID NO: 6408
  GFR-binding peptide
  MOD_RES (4), (5): Xaa is C or S
  MOD_RES (19), (20), (21), (22), (23): Xaa is A or G
  MOD_RES (24), (25), (26), (27): Xaa is A or G or is absent

SEQ ID NO: 57476 - protein, 35 aa, Artificial Sequence; identical to SEQ ID NO: 14610
  GFR-binding peptide
  MOD_RES (4), (5): Xaa is C or S

SEQ ID NO: 57477 - protein, 44 aa, Artificial Sequence; identical to SEQ ID NO: 29475
  GFR-binding peptide
  MOD_RES (6), (7), (41), (43): Xaa is C or S
  MOD_RES (21), (22), (23), (24), (25): Xaa is A or G
  MOD_RES (26), (27), (28), (29): Xaa is A or G or is absent

SEQ ID NO: 57478 - protein, 34 aa, Artificial Sequence
  GFR-binding peptide
  MOD_RES (1), (2): Xaa is C or S
  MOD_RES (16), (17), (18), (19), (20): Xaa is A or G
  MOD_RES (21), (22), (23), (24): Xaa is A or G or is absent
XXTPTKMNAISMLYFXXXXXXXXXLKKYRGMVVD

SEQ ID NO: 57479 - protein, 38 aa, Artificial Sequence
  GFR-binding peptide
  MOD_RES (4), (5): Xaa is C or S
  MOD_RES (19), (20), (21), (22), (23): Xaa is A or G
  MOD_RES (24), (25), (26), (27): Xaa is A or G or is absent
AGPXXTPTKMNAISMLYFXXXXXXXXXLKKYRGMVVDR

SEQ ID NO: 57480 - protein, 39 aa, Artificial Sequence; identical to SEQ ID NO: 7315
  GFR-binding peptide
  MOD_RES (5), (39): Xaa is C or S
  MOD_RES (19), (20), (21), (22), (23): Xaa is A or G
  MOD_RES (24), (25), (26), (27): Xaa is A or G or is absent

SEQ ID NO: 57481 - protein, 38 aa, Artificial Sequence; identical to SEQ ID NO: 8178
  GFR-binding peptide
  MOD_RES (4), (5): Xaa is C or S
  MOD_RES (19), (20), (21), (22), (23): Xaa is A or G
  MOD_RES (24), (25), (26), (27): Xaa is A or G or is absent

SEQ ID NO: 57482 - protein, 38 aa, Artificial Sequence
  GFR-binding peptide
  MOD_RES (3), (4), (36), (38): Xaa is C or S
GPXXTPTKMNAISMLYFNDKQQIILKKYRGMVVDRXGX

SEQ ID NO: 57483 - protein, 35 aa, Artificial Sequence
  GFR-binding peptide
  MOD_RES (2), (3): Xaa is C or S
  MOD_RES (17), (18), (19), (20), (21): Xaa is A or G
  MOD_RES (22), (23), (24), (25): Xaa is A or G or is absent
TXXAPVKTNAISMLYFXXXXXXXXXLKKYRMIVEE

SEQ ID NO: 57484 - protein, 40 aa, Artificial Sequence; identical to SEQ ID NO: 9096
  GFR-binding peptide
  MOD_RES (4), (38), (40): Xaa is C or S
  MOD_RES (18), (19), (20), (21), (22): Xaa is A or G
  MOD_RES (23), (24), (25), (26): Xaa is A or G or is absent

SEQ ID NO: 57485 - protein, 35 aa, Artificial Sequence; identical to SEQ ID NO: 8183
  GFR-binding peptide
  MOD_RES (2), (3): Xaa is C or S
  MOD_RES (17), (18), (19), (20), (21): Xaa is A or G
  MOD_RES (22), (23), (24), (25): Xaa is A or G or is absent

SEQ ID NO: 57486 - protein, 36 aa, Artificial Sequence; identical to SEQ ID NO: 28506
  GFR-binding peptide
  MOD_RES (34), (36): Xaa is C or S
  MOD_RES (14), (15), (16), (17), (18): Xaa is A or G
  MOD_RES (19), (20), (21), (22): Xaa is A or G or is absent

SEQ ID NO: 57487 - protein, 39 aa, Artificial Sequence; identical to SEQ ID NO: 28507
  GFR-binding peptide
  MOD_RES (4), (5), (39): Xaa is C or S
  MOD_RES (19), (20), (21), (22), (23): Xaa is A or G
  MOD_RES (24), (25), (26), (27): Xaa is A or G or is absent

SEQ ID NO: 57488 - protein, 34 aa, Artificial Sequence; identical to SEQ ID NO: 7321
  GFR-binding peptide
  MOD_RES (1), (1): Xaa is C or S
  MOD_RES (15), (16), (17), (18), (19): Xaa is A or G
  MOD_RES (20), (21), (22), (23): Xaa is A or G or is absent

SEQ ID NO: 57489 - protein, 43 aa, Artificial Sequence
  GFR-binding peptide
  MOD_RES (6), (7), (41), (43): Xaa is C or S
  MOD_RES (21), (22), (23), (24), (25): Xaa is A or G
  MOD_RES (26), (27), (28), (29): Xaa is A or G or is absent
HVPKPXXAPTKLNAISVLYFXXXXXXXXXLKKYRNMVVRSXGX

SEQ ID NO: 57490 - protein, 37 aa, Artificial Sequence; identical to SEQ ID NO: 7325
  GFR-binding peptide
  MOD_RES (3), (37): Xaa is C or S
  MOD_RES (17), (18), (19), (20), (21): Xaa is A or G
  MOD_RES (22), (23), (24), (25): Xaa is A or G or is absent

SEQ ID NO: 57491 - protein, 34 aa, Artificial Sequence; identical to SEQ ID NO: 13795
  GFR-binding peptide
  MOD_RES (32), (34): Xaa is C or S

SEQ ID NO: 57492 - protein, 32 aa, Artificial Sequence; identical to SEQ ID NO: 8185
  GFR-binding peptide
  MOD_RES (14), (15), (16), (17), (18): Xaa is A or G
  MOD_RES (19), (20), (21), (22): Xaa is A or G or is absent

SEQ ID NO: 57493 - protein, 40 aa, Artificial Sequence; identical to SEQ ID NO: 7328
  GFR-binding peptide
  MOD_RES (6), (7), (39): Xaa is C or S

SEQ ID NO: 57494 - protein, 33 aa, Artificial Sequence; identical to SEQ ID NO: 16389
  GFR-binding peptide
  MOD_RES (14), (15), (16), (17), (18): Xaa is A or G
  MOD_RES (19), (20), (21), (22): Xaa is A or G or is absent

SEQ ID NO: 57495 - protein, 33 aa, Artificial Sequence; identical to SEQ ID NO: 9107
  GFR-binding peptide
  MOD_RES (14), (15), (16), (17), (18): Xaa is A or G
  MOD_RES (19), (20), (21), (22): Xaa is A or G or is absent

SEQ ID NO: 57496 - protein, 35 aa, Artificial Sequence; identical to SEQ ID NO: 13800
  GFR-binding peptide
  MOD_RES (2), (3), (35): Xaa is C or S

SEQ ID NO: 57497 - protein, 38 aa, Artificial Sequence; identical to SEQ ID NO: 28520
  GFR-binding peptide
  MOD_RES (2), (3), (35), (37): Xaa is C or S

SEQ ID NO: 57498 - protein, 35 aa, Artificial Sequence; identical to SEQ ID NO: 28524
  GFR-binding peptide
  MOD_RES (2), (3), (35): Xaa is C or S

SEQ ID NO: 57499 - protein, 34 aa, Artificial Sequence
  GFR-binding peptide
  MOD_RES (1), (2), (34): Xaa is C or S
XXTPTKMNAISMLYFNDKQQIILKKYRGMVVDRX

SEQ ID NO: 57500 - protein, 32 aa, Artificial Sequence
  GFR-binding peptide
  MOD_RES (14), (15), (16), (17), (18): Xaa is A or G
  MOD_RES (19), (20), (21), (22): Xaa is A or G or is absent
APVKTNAISMLYFXXXXXXXXXLKKYRMIVEE

SEQ ID NO: 57501 - protein, 38 aa, Artificial Sequence; identical to SEQ ID NO: 29504
  GFR-binding peptide
  MOD_RES (6), (7): Xaa is C or S

SEQ ID NO: 57502 - protein, 38 aa, Artificial Sequence; identical to SEQ ID NO: 7336
  GFR-binding peptide
  MOD_RES (4), (5): Xaa is C or S
  MOD_RES (19), (20), (21), (22), (23): Xaa is A or G
  MOD_RES (24), (25), (26), (27): Xaa is A or G or is absent

SEQ ID NO: 57503 - protein, 33 aa, Artificial Sequence; identical to SEQ ID NO: 6430
  GFR-binding peptide
  MOD_RES (32), (32): Xaa is C or S

SEQ ID NO: 57504 - protein, 34 aa, Artificial Sequence; identical to SEQ ID NO: 28529
  GFR-binding peptide
  MOD_RES (3), (4): Xaa is C or S

SEQ ID NO: 57505 - protein, 38 aa, Artificial Sequence
  GFR-binding peptide
  MOD_RES (3), (4), (35), (37): Xaa is C or S
STXXAPVKTNAISMLYFDNGRVLLLKKYRMIVEEXGXL

SEQ ID NO: 57506 - protein, 36 aa, Artificial Sequence; identical to SEQ ID NO: 6431
  GFR-binding peptide
  MOD_RES (1), (2), (34), (36): Xaa is C or S

SEQ ID NO: 57507 - protein, 38 aa, Artificial Sequence; identical to SEQ ID NO: 28532
  GFR-binding peptide
  MOD_RES (4), (5), (37): Xaa is C or S

SEQ ID NO: 57508 - protein, 34 aa, Artificial Sequence
  GFR-binding peptide
  MOD_RES (34), (34): Xaa is C or S
  MOD_RES (14), (15), (16), (17), (18): Xaa is A or G
  MOD_RES (19), (20), (21), (22): Xaa is A or G or is absent
TPTKMNAISMLYFXXXXXXXXXLKKYRGMVVDRX

SEQ ID NO: 57509 - protein, 32 aa, Artificial Sequence; identical to SEQ ID NO: 13813
  GFR-binding peptide
  MOD_RES (1), (2): Xaa is C or S

SEQ ID NO: 57510 - protein, 39 aa, Artificial Sequence
  GFR-binding peptide
  MOD_RES (4), (5), (36), (38): Xaa is C or S
PSTXXAPVKTNAISMLYFDNGRVLLLKKYRMIVEEXGXL

SEQ ID NO: 57511 - protein, 31 aa, Artificial Sequence
  GFR-binding peptide
TPTKMNAISMLYFNDKQQIILKKYRGMVVDR

SEQ ID NO: 57512 - protein, 41 aa, Artificial Sequence; identical to SEQ ID NO: 6435
  GFR-binding peptide
  MOD_RES (4), (5), (39), (41): Xaa is C or S
  MOD_RES (19), (20), (21), (22), (23): Xaa is A or G
  MOD_RES (24), (25), (26), (27): Xaa is A or G or is absent

SEQ ID NO: 57513 - protein, 41 aa, Artificial Sequence; identical to SEQ ID NO: 6436
  GFR-binding peptide
  MOD_RES (5), (6), (38), (40): Xaa is C or S

SEQ ID NO: 57514 - protein, 40 aa, Artificial Sequence; identical to SEQ ID NO: 16402
  GFR-binding peptide
  MOD_RES (6), (7): Xaa is C or S
  MOD_RES (21), (22), (23), (24), (25): Xaa is A or G
  MOD_RES (26), (27), (28), (29): Xaa is A or G or is absent

SEQ ID NO: 57515 - protein, 39 aa, Artificial Sequence; identical to SEQ ID NO: 9125
  GFR-binding peptide
  MOD_RES (3), (4), (39): Xaa is C or S
  MOD_RES (18), (19), (20), (21), (22): Xaa is A or G
  MOD_RES (23), (24), (25), (26): Xaa is A or G or is absent

SEQ ID NO: 57516 - protein, 38 aa, Artificial Sequence; identical to SEQ ID NO: 28537
  GFR-binding peptide
  MOD_RES (1), (2), (36), (38): Xaa is C or S
  MOD_RES (16), (17), (18), (19), (20): Xaa is A or G
  MOD_RES (21), (22), (23), (24): Xaa is A or G or is absent

SEQ ID NO: 57517 - protein, 34 aa, Artificial Sequence; identical to SEQ ID NO: 30496
  GFR-binding peptide
  MOD_RES (1), (2): Xaa is C or S
  MOD_RES (16), (17), (18), (19), (20): Xaa is A or G
  MOD_RES (21), (22), (23), (24): Xaa is A or G or is absent

SEQ ID NO: 57518 - protein, 43 aa, Artificial Sequence; identical to SEQ ID NO: 14637
  GFR-binding peptide
  MOD_RES (6), (7), (41), (43): Xaa is C or S
  MOD_RES (21), (22), (23), (24), (25): Xaa is A or G
  MOD_RES (26), (27), (28), (29): Xaa is A or G or is absent

SEQ ID NO: 57519 - protein, 40 aa, Artificial Sequence; identical to SEQ ID NO: 8203
  GFR-binding peptide
  MOD_RES (1), (2), (37), (39): Xaa is C or S
  MOD_RES (16), (17), (18), (19), (20): Xaa is A or G
  MOD_RES (21), (22), (23), (24): Xaa is A or G or is absent

SEQ ID NO: 57520 - protein, 32 aa, Artificial Sequence; identical to SEQ ID NO: 29518
  GFR-binding peptide
  MOD_RES (1), (2): Xaa is C or S

SEQ ID NO: 57521 - protein, 44 aa, Artificial Sequence; identical to SEQ ID NO: 9131
  GFR-binding peptide
  MOD_RES (6), (7), (41), (43): Xaa is C or S
  MOD_RES (21), (22), (23), (24), (25): Xaa is A or G
  MOD_RES (26), (27), (28), (29): Xaa is A or G or is absent

SEQ ID NO: 57522 - protein, 41 aa, Artificial Sequence; identical to SEQ ID NO: 6443
  GFR-binding peptide
  MOD_RES (3), (4), (38), (40): Xaa is C or S
  MOD_RES (18), (19), (20), (21), (22): Xaa is A or G
  MOD_RES (23), (24), (25), (26): Xaa is A or G or is absent

SEQ ID NO: 57523 - protein, 33 aa, Artificial Sequence
  GFR-binding peptide
  MOD_RES (31), (33): Xaa is C or S
APVKTNAISMLYFDNGRVLLLKKYRMIVEEXGX

SEQ ID NO: 57524 - protein, 33 aa, Artificial Sequence
  GFR-binding peptide
  MOD_RES (2), (3): Xaa is C or S
PXXTPTKMNAISMLYFNDKQQIILKKYRGMVVD

SEQ ID NO: 57525 - protein, 38 aa, Artificial Sequence; identical to SEQ ID NO: 7347
  GFR-binding peptide
  MOD_RES (3), (4), (36), (38): Xaa is C or S

SEQ ID NO: 57526 - protein, 36 aa, Artificial Sequence
  GFR-binding peptide
  MOD_RES (3), (4): Xaa is C or S
  MOD_RES (18), (19), (20), (21), (22): Xaa is A or G
  MOD_RES (23), (24), (25), (26): Xaa is A or G or is absent
GPXXTPTKMNAISMLYFXXXXXXXXXLKKYRGMVVD

SEQ ID NO: 57527 - protein, 36 aa, Artificial Sequence; identical to SEQ ID NO: 6445
  GFR-binding peptide
  MOD_RES (4), (5): Xaa is C or S

SEQ ID NO: 57528 - protein, 38 aa, Artificial Sequence; identical to SEQ ID NO: 15515
  GFR-binding peptide
  MOD_RES (3), (4), (36), (38): Xaa is C or S

SEQ ID NO: 57529 - protein, 38 aa, Artificial Sequence
  GFR-binding peptide
  MOD_RES (1), (2), (35), (37): Xaa is C or S
  MOD_RES (16), (17), (18), (19), (20): Xaa is A or G
  MOD_RES (21), (22), (23), (24): Xaa is A or G or is absent
XXAPVKTNAISMLYFXXXXXXXXXLKKYRMIVEEXGXL

SEQ ID NO: 57530 - protein, 36 aa, Artificial Sequence; identical to SEQ ID NO: 15518
  GFR-binding peptide
  MOD_RES (1), (33), (35): Xaa is C or S

SEQ ID NO: 57531 - protein, 43 aa, Artificial Sequence; identical to SEQ ID NO: 9141
  GFR-binding peptide
  MOD_RES (5), (6), (40), (42): Xaa is C or S
  MOD_RES (20), (21), (22), (23), (24): Xaa is A or G
  MOD_RES (25), (26), (27), (28): Xaa is A or G or is absent

SEQ ID NO: 57532 - protein, 38 aa, Artificial Sequence; identical to SEQ ID NO: 30507
  GFR-binding peptide
  MOD_RES (5), (6), (38): Xaa is C or S

SEQ ID NO: 57533 - protein, 36 aa, Artificial Sequence
  GFR-binding peptide
  MOD_RES (3), (4), (36): Xaa is C or S
GPXXTPTKMNAISMLYFNDKQQIILKKYRGMVVDRX

SEQ ID NO: 57534 - protein, 40 aa, Artificial Sequence; identical to SEQ ID NO: 29535
  GFR-binding peptide
  MOD_RES (4), (5), (39): Xaa is C or S
  MOD_RES (19), (20), (21), (22), (23): Xaa is A or G
  MOD_RES (24), (25), (26), (27): Xaa is A or G or is absent

SEQ ID NO: 57535 - protein, 40 aa, Artificial Sequence; identical to SEQ ID NO: 7353
  GFR-binding peptide
  MOD_RES (2), (3), (37), (39): Xaa is C or S
  MOD_RES (17), (18), (19), (20), (21): Xaa is A or G
  MOD_RES (22), (23), (24), (25): Xaa is A or G or is absent

SEQ ID NO: 57536 - protein, 34 aa, Artificial Sequence; identical to SEQ ID NO: 30510
  GFR-binding peptide
  MOD_RES (32), (34): Xaa is C or S

SEQ ID NO: 57537 - protein, 35 aa, Artificial Sequence; identical to SEQ ID NO: 6458
  GFR-binding peptide
  MOD_RES (2), (3), (35): Xaa is C or S

SEQ ID NO: 57538 - protein, 37 aa, Artificial Sequence; identical to SEQ ID NO: 27612
  GFR-binding peptide
  MOD_RES (1), (35), (37): Xaa is C or S
  MOD_RES (15), (16), (17), (18), (19): Xaa is A or G
  MOD_RES (20), (21), (22), (23): Xaa is A or G or is absent

SEQ ID NO: 57539 - protein, 39 aa, Artificial Sequence; identical to SEQ ID NO: 28559
  GFR-binding peptide
  MOD_RES (3), (4), (38): Xaa is C or S
  MOD_RES (18), (19), (20), (21), (22): Xaa is A or G
  MOD_RES (23), (24), (25), (26): Xaa is A or G or is absent

SEQ ID NO: 57540 - protein, 39 aa, Artificial Sequence; identical to SEQ ID NO: 9155
  GFR-binding peptide
  MOD_RES (4), (5), (39): Xaa is C or S
  MOD_RES (19), (20), (21), (22), (23): Xaa is A or G
  MOD_RES (24), (25), (26), (27): Xaa is A or G or is absent

SEQ ID NO: 57541 - protein, 38 aa, Artificial Sequence; identical to SEQ ID NO: 29539
  GFR-binding peptide
  MOD_RES (2), (3), (37): Xaa is C or S
  MOD_RES (17), (18), (19), (20), (21): Xaa is A or G
  MOD_RES (22), (23), (24), (25): Xaa is A or G or is absent

SEQ ID NO: 57542 - protein, 37 aa, Artificial Sequence; identical to SEQ ID NO: 7355
  GFR-binding peptide
  MOD_RES (1), (34), (36): Xaa is C or S

SEQ ID NO: 57543 - protein, 40 aa, Artificial Sequence; identical to SEQ ID NO: 9156
  GFR-binding peptide
  MOD_RES (2), (3), (38), (40): Xaa is C or S
  MOD_RES (17), (18), (19), (20), (21): Xaa is A or G
  MOD_RES (22), (23), (24), (25): Xaa is A or G or is absent

SEQ ID NO: 57544 - protein, 35 aa, Artificial Sequence; identical to SEQ ID NO: 9157
  GFR-binding peptide
  MOD_RES (34), (34): Xaa is C or S
  MOD_RES (14), (15), (16), (17), (18): Xaa is A or G
  MOD_RES (19), (20), (21), (22): Xaa is A or G or is absent

SEQ ID NO: 57545 - protein, 37 aa, Artificial Sequence
  GFR-binding peptide
  MOD_RES (2), (3), (35), (37): Xaa is C or S
PXXTPTKMNAISMLYFNDKQQIILKKYRGMVVDRXGX

SEQ ID NO: 57546 - protein, 37 aa, Artificial Sequence; identical to SEQ ID NO: 8227
  GFR-binding peptide
  MOD_RES (3), (4), (36): Xaa is C or S

SEQ ID NO: 57547 - protein, 37 aa, Artificial Sequence; identical to SEQ ID NO: 27620
  GFR-binding peptide
  MOD_RES (3), (4): Xaa is C or S
  MOD_RES (18), (19), (20), (21), (22): Xaa is A or G
  MOD_RES (23), (24), (25), (26): Xaa is A or G or is absent

SEQ ID NO: 57548 - protein, 35 aa, Artificial Sequence; identical to SEQ ID NO: 28572
  GFR-binding peptide
  MOD_RES (1), (2): Xaa is C or S
  MOD_RES (16), (17), (18), (19), (20): Xaa is A or G
  MOD_RES (21), (22), (23), (24): Xaa is A or G or is absent

SEQ ID NO: 57549 - protein, 35 aa, Artificial Sequence; identical to SEQ ID NO: 7365
  GFR-binding peptide
  MOD_RES (32), (34): Xaa is C or S

SEQ ID NO: 57550 - protein, 35 aa, Artificial Sequence; identical to SEQ ID NO: 27624
  GFR-binding peptide
  MOD_RES (1), (35): Xaa is C or S
  MOD_RES (15), (16), (17), (18), (19): Xaa is A or G
  MOD_RES (20), (21), (22), (23): Xaa is A or G or is absent

SEQ ID NO: 57551 - protein, 36 aa, Artificial Sequence; identical to SEQ ID NO: 30526
  GFR-binding peptide
  MOD_RES (3), (4), (36): Xaa is C or S

SEQ ID NO: 57552 - protein, 36 aa, Artificial Sequence; identical to SEQ ID NO: 6470
  GFR-binding peptide
  MOD_RES (34), (36): Xaa is C or S
  MOD_RES (14), (15), (16), (17), (18): Xaa is A or G
  MOD_RES (19), (20), (21), (22): Xaa is A or G or is absent

SEQ ID NO: 57553 - protein, 39 aa, Artificial Sequence; identical to SEQ ID NO: 27626
  GFR-binding peptide
  MOD_RES (2), (3), (37), (39): Xaa is C or S
  MOD_RES (17), (18), (19), (20), (21): Xaa is A or G
  MOD_RES (22), (23), (24), (25): Xaa is A or G or is absent

SEQ ID NO: 57554 - protein, 33 aa, Artificial Sequence; identical to SEQ ID NO: 14670
  GFR-binding peptide
  MOD_RES (1), (2): Xaa is C or S

SEQ ID NO: 57555 - protein, 42 aa, Artificial Sequence; identical to SEQ ID NO: 7368
  GFR-binding peptide
  MOD_RES (5), (39), (41): Xaa is C or S
  MOD_RES (19), (20), (21), (22), (23): Xaa is A or G
  MOD_RES (24), (25), (26), (27): Xaa is A or G or is absent

SEQ ID NO: 57556 - protein, 36 aa, Artificial Sequence
  GFR-binding peptide
  MOD_RES (4), (5), (36): Xaa is C or S
PSTXXAPVKTNAISMLYFDNGRVLLLKKYRMIVEEX

SEQ ID NO: 57557 - protein, 38 aa, Artificial Sequence
  GFR-binding peptide
  MOD_RES (5), (6): Xaa is C or S
  MOD_RES (20), (21), (22), (23), (24): Xaa is A or G
  MOD_RES (25), (26), (27), (28): Xaa is A or G or is absent
SAGPXXTPTKMNAISMLYFXXXXXXXXXLKKYRGMVVD

SEQ ID NO: 57558 - protein, 32 aa, Artificial Sequence
  GFR-binding peptide
  MOD_RES (1), (2): Xaa is C or S
XXTPTKMNAISMLYFNDKQQIILKKYRGMVVD

SEQ ID NO: 57559 - protein, 37 aa, Artificial Sequence; identical to SEQ ID NO: 15547
  GFR-binding peptide
  MOD_RES (1), (2), (34), (36): Xaa is C or S

SEQ ID NO: 57560 - protein, 39 aa, Artificial Sequence
  GFR-binding peptide
  MOD_RES (4), (5), (37), (39): Xaa is C or S
AGPXXTPTKMNAISMLYFNDKQQIILKKYRGMVVDRXGX

SEQ ID NO: 57561 - protein, 37 aa, Artificial Sequence; identical to SEQ ID NO: 9172
  GFR-binding peptide
  MOD_RES (2), (3), (37): Xaa is C or S
  MOD_RES (17), (18), (19), (20), (21): Xaa is A or G
  MOD_RES (22), (23), (24), (25): Xaa is A or G or is absent

SEQ ID NO: 57562 - protein, 39 aa, Artificial Sequence; identical to SEQ ID NO: 9174
  GFR-binding peptide
  MOD_RES (3), (4), (37), (39): Xaa is C or S

SEQ ID NO: 57563 - protein, 36 aa, Artificial Sequence; identical to SEQ ID NO: 6484
  GFR-binding peptide
  MOD_RES (2), (36): Xaa is C or S
  MOD_RES (16), (17), (18), (19), (20): Xaa is A or G
  MOD_RES (21), (22), (23), (24): Xaa is A or G or is absent

SEQ ID NO: 57564 - protein, 41 aa, Artificial Sequence; identical to SEQ ID NO: 6485
  GFR-binding peptide
  MOD_RES (5), (6), (40): Xaa is C or S
  MOD_RES (20), (21), (22), (23), (24): Xaa is A or G
  MOD_RES (25), (26), (27), (28): Xaa is A or G or is absent

SEQ ID NO: 57565 - protein, 40 aa, Artificial Sequence; identical to SEQ ID NO: 28585
  GFR-binding peptide
  MOD_RES (6), (7), (39): Xaa is C or S

SEQ ID NO: 57566 - protein, 35 aa, Artificial Sequence; identical to SEQ ID NO: 8240
  GFR-binding peptide
  MOD_RES (1), (2): Xaa is C or S
  MOD_RES (16), (17), (18), (19), (20): Xaa is A or G
  MOD_RES (21), (22), (23), (24): Xaa is A or G or is absent

SEQ ID NO: 57567 - protein, 39 aa, Artificial Sequence; identical to SEQ ID NO: 8241
  GFR-binding peptide
  MOD_RES (3), (4), (38): Xaa is C or S
  MOD_RES (18), (19), (20), (21), (22): Xaa is A or G
  MOD_RES (23), (24), (25), (26): Xaa is A or G or is absent

SEQ ID NO: 57568 - protein, 40 aa, Artificial Sequence; identical to SEQ ID NO: 7378
  GFR-binding peptide
  MOD_RES (4), (5), (39): Xaa is C or S
  MOD_RES (19), (20), (21), (22), (23): Xaa is A or G
  MOD_RES (24), (25), (26), (27): Xaa is A or G or is absent

SEQ ID NO: 57569 - protein, 37 aa, Artificial Sequence
  GFR-binding peptide
  MOD_RES (6), (7): Xaa is C or S
RVPSTXXAPVKTNAISMLYFDNGRVLLLKKYRMIVEE

SEQ ID NO: 57570 - protein, 38 aa, Artificial Sequence; identical to SEQ ID NO: 16459
  GFR-binding peptide
  MOD_RES (4), (5), (37): Xaa is C or S

SEQ ID NO: 57571 - protein, 37 aa, Artificial Sequence; identical to SEQ ID NO: 7383
  GFR-binding peptide
  MOD_RES (3), (4): Xaa is C or S
  MOD_RES (18), (19), (20), (21), (22): Xaa is A or G
  MOD_RES (23), (24), (25), (26): Xaa is A or G or is absent

SEQ ID NO: 57572 - protein, 32 aa, Artificial Sequence
  GFR-binding peptide
  MOD_RES (32), (32): Xaa is C or S
TPTKMNAISMLYFNDKQQIILKKYRGMVVDRX

SEQ ID NO: 57573 - protein, 39 aa, Artificial Sequence; identical to SEQ ID NO: 30552
  GFR-binding peptide
  MOD_RES (6), (7): Xaa is C or S
  MOD_RES (21), (22), (23), (24), (25): Xaa is A or G
  MOD_RES (26), (27), (28), (29): Xaa is A or G or is absent

SEQ ID NO: 57574 - protein, 41 aa, Artificial Sequence; identical to SEQ ID NO: 7394
  GFR-binding peptide
  MOD_RES (5), (6), (39), (41): Xaa is C or S

SEQ ID NO: 57575 - protein, 32 aa, Artificial Sequence; identical to SEQ ID NO: 6491
  GFR-binding peptide
  MOD_RES (14), (15), (16), (17), (18): Xaa is A or G
  MOD_RES (19), (20), (21), (22): Xaa is A or G or is absent

SEQ ID NO: 57576 - protein, 38 aa, Artificial Sequence; identical to SEQ ID NO: 9184
  GFR-binding peptide
  MOD_RES (5), (6): Xaa is C or S
  MOD_RES (20), (21), (22), (23), (24): Xaa is A or G
  MOD_RES (25), (26), (27), (28): Xaa is A or G or is absent

SEQ ID NO: 57577 - protein, 33 aa, Artificial Sequence; identical to SEQ ID NO: 27656
  GFR-binding peptide
  MOD_RES (1), (1): Xaa is C or S
  MOD_RES (15), (16), (17), (18), (19): Xaa is A or G
  MOD_RES (20), (21), (22), (23): Xaa is A or G or is absent

SEQ ID NO: 57578 - protein, 39 aa, Artificial Sequence; identical to SEQ ID NO: 6492
  GFR-binding peptide
  MOD_RES (3), (37), (39): Xaa is C or S
  MOD_RES (17), (18), (19), (20), (21): Xaa is A or G
  MOD_RES (22), (23), (24), (25): Xaa is A or G or is absent

SEQ ID NO: 57579 - protein, 41 aa, Artificial Sequence
  GFR-binding peptide
  MOD_RES (4), (5), (38), (40): Xaa is C or S
  MOD_RES (19), (20), (21), (22), (23): Xaa is A or G
  MOD_RES (24), (25), (26), (27): Xaa is A or G or is absent
PSTXXAPVKTNAISMLYFXXXXXXXXXLKKYRMIVEEXGXL

SEQ ID NO: 57580 - protein, 36 aa, Artificial Sequence; identical to SEQ ID NO: 28609
  GFR-binding peptide
  MOD_RES (4), (5): Xaa is C or S

SEQ ID NO: 57581 - protein, 32 aa, Artificial Sequence; identical to SEQ ID NO: 6496
  GFR-binding peptide
  MOD_RES (14), (15), (16), (17), (18): Xaa is A or G
  MOD_RES (19), (20), (21), (22): Xaa is A or G or is absent

SEQ ID NO: 57582 - protein, 35 aa, Artificial Sequence; identical to SEQ ID NO: 9191
  GFR-binding peptide
  MOD_RES (34), (34): Xaa is C or S
  MOD_RES (14), (15), (16), (17), (18): Xaa is A or G
  MOD_RES (19), (20), (21), (22): Xaa is A or G or is absent

SEQ ID NO: 57583 - protein, 34 aa, Artificial Sequence; identical to SEQ ID NO: 28615
  GFR-binding peptide
  MOD_RES (34), (34): Xaa is C or S
  MOD_RES (14), (15), (16), (17), (18): Xaa is A or G
  MOD_RES (19), (20), (21), (22): Xaa is A or G or is absent

SEQ ID NO: 57584 - protein, 41 aa, Artificial Sequence
  GFR-binding peptide
  MOD_RES (6), (7), (38), (40): Xaa is C or S
RVPSTXXAPVKTNAISMLYFDNGRVLLLKKYRMIVEEXGXL

SEQ ID NO: 57585 - protein, 34 aa, Artificial Sequence; identical to SEQ ID NO: 8264
  GFR-binding peptide
  MOD_RES (1), (33): Xaa is C or S

SEQ ID NO: 57586 - protein, 36 aa, Artificial Sequence
  GFR-binding peptide
  MOD_RES (2), (3), (36): Xaa is C or S
  MOD_RES (17), (18), (19), (20), (21): Xaa is A or G
  MOD_RES (22), (23), (24), (25): Xaa is A or G or is absent
TXXAPVKTNAISMLYFXXXXXXXXXLKKYRMIVEEX

SEQ ID NO: 57587 - protein, 37 aa, Artificial Sequence; identical to SEQ ID NO: 29588
  GFR-binding peptide
  MOD_RES (1), (2), (34), (36): Xaa is C or S

SEQ ID NO: 57588 - protein, 40 aa, Artificial Sequence; identical to SEQ ID NO: 9195
  GFR-binding peptide
  MOD_RES (3), (4), (38), (40): Xaa is C or S
  MOD_RES (18), (19), (20), (21), (22): Xaa is A or G
  MOD_RES (23), (24), (25), (26): Xaa is A or G or is absent

SEQ ID NO: 57589 - protein, 34 aa, Artificial Sequence; identical to SEQ ID NO: 28617
  GFR-binding peptide
  MOD_RES (1), (1): Xaa is C or S
  MOD_RES (15), (16), (17), (18), (19): Xaa is A or G
  MOD_RES (20), (21), (22), (23): Xaa is A or G or is absent

SEQ ID NO: 57590 - protein, 38 aa, Artificial Sequence; identical to SEQ ID NO: 7407
  GFR-binding peptide
  MOD_RES (4), (5), (38): Xaa is C or S

SEQ ID NO: 57591 - protein, 37 aa, Artificial Sequence; identical to SEQ ID NO: 27670
  GFR-binding peptide
  MOD_RES (2), (3), (37): Xaa is C or S
  MOD_RES (17), (18), (19), (20), (21): Xaa is A or G
  MOD_RES (22), (23), (24), (25): Xaa is A or G or is absent

SEQ ID NO: 57592 - protein, 39 aa, Artificial Sequence; identical to SEQ ID NO: 29595
  GFR-binding peptide
  MOD_RES (4), (5), (37), (39): Xaa is C or S

SEQ ID NO: 57593 - protein, 31 aa, Artificial Sequence; identical to SEQ ID NO: 6513
  GFR-binding peptide
  MOD_RES (1), (1): Xaa is C or S

SEQ ID NO: 57594 - protein, 34 aa, Artificial Sequence
  GFR-binding peptide
  MOD_RES (1), (32), (34): Xaa is C or S
XAPVKTNAISMLYFDNGRVLLLKKYRMIVEEXGX

SEQ ID NO: 57595 - protein, 36 aa, Artificial Sequence; identical to SEQ ID NO: 30575
  GFR-binding peptide
  MOD_RES (4), (5): Xaa is C or S

SEQ ID NO: 57596 - protein, 37 aa, Artificial Sequence; identical to SEQ ID NO: 30576
  GFR-binding peptide
  MOD_RES (34), (36): Xaa is C or S
  MOD_RES (14), (15), (16), (17), (18): Xaa is A or G
  MOD_RES (19), (20), (21), (22): Xaa is A or G or is absent

SEQ ID NO: 57597 - protein, 40 aa, Artificial Sequence; identical to SEQ ID NO: 8275
  GFR-binding peptide
  MOD_RES (6), (7): Xaa is C or S
  MOD_RES (21), (22), (23), (24), (25): Xaa is A or G
  MOD_RES (26), (27), (28), (29): Xaa is A or G or is absent

SEQ ID NO: 57598 - protein, 32 aa, Artificial Sequence; identical to SEQ ID NO: 30578
  GFR-binding peptide
  MOD_RES (1), (1): Xaa is C or S

SEQ ID NO: 57599 - protein, 35 aa, Artificial Sequence; identical to SEQ ID NO: 8278
  GFR-binding peptide
  MOD_RES (34), (34): Xaa is C or S
  MOD_RES (14), (15), (16), (17), (18): Xaa is A or G
  MOD_RES (19), (20), (21), (22): Xaa is A or G or is absent

SEQ ID NO: 57600 - protein, 37 aa, Artificial Sequence; identical to SEQ ID NO: 27679
  GFR-binding peptide
  MOD_RES (3), (4): Xaa is C or S
  MOD_RES (18), (19), (20), (21), (22): Xaa is A or G
  MOD_RES (23), (24), (25), (26): Xaa is A or G or is absent

SEQ ID NO: 57601 - protein, 38 aa, Artificial Sequence; identical to SEQ ID NO: 28627
  GFR-binding peptide
  MOD_RES (1), (2), (36), (38): Xaa is C or S
  MOD_RES (16), (17), (18), (19), (20): Xaa is A or G
  MOD_RES (21), (22), (23), (24): Xaa is A or G or is absent

SEQ ID NO: 57602 - protein, 37 aa, Artificial Sequence; identical to SEQ ID NO: 14715
  GFR-binding peptide
  MOD_RES (2), (3), (37): Xaa is C or S
  MOD_RES (17), (18), (19), (20), (21): Xaa is A or G
  MOD_RES (22), (23), (24), (25): Xaa is A or G or is absent

SEQ ID NO: 57603 - protein, 42 aa, Artificial Sequence; identical to SEQ ID NO: 9210
  GFR-binding peptide
  MOD_RES (3), (4), (39), (41): Xaa is C or S
  MOD_RES (18), (19), (20), (21), (22): Xaa is A or G
  MOD_RES (23), (24), (25), (26): Xaa is A or G or is absent

SEQ ID NO: 57604 - protein, 31 aa, Artificial Sequence; identical to SEQ ID NO: 27687
  GFR-binding peptide

SEQ ID NO: 57605 - protein, 36 aa, Artificial Sequence; identical to SEQ ID NO: 28631
  GFR-binding peptide
  MOD_RES (5), (6): Xaa is C or S

SEQ ID NO: 57606 - protein, 36 aa, Artificial Sequence; identical to SEQ ID NO: 9213
  GFR-binding peptide
  MOD_RES (1), (35): Xaa is C or S
  MOD_RES (15), (16), (17), (18), (19): Xaa is A or G
  MOD_RES (20), (21), (22), (23): Xaa is A or G or is absent

SEQ ID NO: 57607 - protein, 37 aa, Artificial Sequence
  GFR-binding peptide
  MOD_RES (2), (3), (34), (36): Xaa is C or S
TXXAPVKTNAISMLYFDNGRVLLLKKYRMIVEEXGXL

SEQ ID NO: 57608 - protein, 37 aa, Artificial Sequence; identical to SEQ ID NO: 6526
  GFR-binding peptide
  MOD_RES (6), (7): Xaa is C or S

SEQ ID NO: 57609 - protein, 35 aa, Artificial Sequence
  GFR-binding peptide
  MOD_RES (1), (2), (33), (35): Xaa is C or S
XXAPVKTNAISMLYFDNGRVLLLKKYRMIVEEXGX

SEQ ID NO: 57610 - protein, 35 aa, Artificial Sequence; identical to SEQ ID NO: 7420
  GFR-binding peptide
  MOD_RES (1), (34): Xaa is C or S

SEQ ID NO: 57611 - protein, 33 aa, Artificial Sequence; identical to SEQ ID NO: 7423
  GFR-binding peptide
  MOD_RES (1), (33): Xaa is C or S

SEQ ID NO: 57612 - protein, 39 aa, Artificial Sequence; identical to SEQ ID NO: 8290
  GFR-binding peptide
  MOD_RES (4), (5), (37), (39): Xaa is C or S

SEQ ID NO: 57613 - protein, 43 aa, Artificial Sequence; identical to SEQ ID NO: 7425
  GFR-binding peptide
  MOD_RES (6), (7), (41), (43): Xaa is C or S
  MOD_RES (21), (22), (23), (24), (25): Xaa is A or G
  MOD_RES (26), (27), (28), (29): Xaa is A or G or is absent

SEQ ID NO: 57614 - protein, 36 aa, Artificial Sequence
  GFR-binding peptide
  MOD_RES (1), (2), (33), (35): Xaa is C or S
XXAPVKTNAISMLYFDNGRVLLLKKYRMIVEEXGXL

SEQ ID NO: 57615 - protein, 40 aa, Artificial Sequence; identical to SEQ ID NO: 8296
  GFR-binding peptide
  MOD_RES (3), (37), (39): Xaa is C or S
  MOD_RES (17), (18), (19), (20), (21): Xaa is A or G
  MOD_RES (22), (23), (24), (25): Xaa is A or G or is absent

SEQ ID NO: 57616 - protein, 38 aa, Artificial Sequence; identical to SEQ ID NO: 7427
  GFR-binding peptide
  MOD_RES (5), (6): Xaa is C or S
  MOD_RES (20), (21), (22), (23), (24): Xaa is A or G
  MOD_RES (25), (26), (27), (28): Xaa is A or G or is absent

SEQ ID NO: 57617 - protein, 36 aa, Artificial Sequence; identical to SEQ ID NO: 13902
  GFR-binding peptide
  MOD_RES (2), (3), (35): Xaa is C or S

SEQ ID NO: 57618 - protein, 34 aa, Artificial Sequence; identical to SEQ ID NO: 7428
  GFR-binding peptide
  MOD_RES (1), (2), (34): Xaa is C or S

SEQ ID NO: 57619 - protein, 36 aa, Artificial Sequence
  GFR-binding peptide
  MOD_RES (34), (36): Xaa is C or S
  MOD_RES (14), (15), (16), (17), (18): Xaa is A or G
  MOD_RES (19), (20), (21), (22): Xaa is A or G or is absent
TPTKMNAISMLYFXXXXXXXXXLKKYRGMVVDRXGX

SEQ ID NO: 57620 - protein, 39 aa, Artificial Sequence; identical to SEQ ID NO: 7429
  GFR-binding peptide
  MOD_RES (6), (7): Xaa is C or S

SEQ ID NO: 57621 - protein, 33 aa, Artificial Sequence; identical to SEQ ID NO: 9221
  GFR-binding peptide
  MOD_RES (14), (15), (16), (17), (18): Xaa is A or G
  MOD_RES (19), (20), (21), (22): Xaa is A or G or is absent

SEQ ID NO: 57622 - protein, 38 aa, Artificial Sequence; identical to SEQ ID NO: 6541
  GFR-binding peptide
  MOD_RES (1), (2), (36), (38): Xaa is C or S
  MOD_RES (16), (17), (18), (19), (20): Xaa is A or G
  MOD_RES (21), (22), (23), (24): Xaa is A or G or is absent

SEQ ID NO: 57623 - protein, 36 aa, Artificial Sequence
  GFR-binding peptide
  MOD_RES (1), (2), (35): Xaa is C or S
  MOD_RES (16), (17), (18), (19), (20): Xaa is A or G
  MOD_RES (21), (22), (23), (24): Xaa is A or G or is absent
XXAPVKTNAISMLYFXXXXXXXXXLKKYRMIVEEXG

SEQ ID NO: 57624 - protein, 36 aa, Artificial Sequence; identical to SEQ ID NO: 9223
  GFR-binding peptide
  MOD_RES (2), (3): Xaa is C or S
  MOD_RES (17), (18), (19), (20), (21): Xaa is A or G
  MOD_RES (22), (23), (24), (25): Xaa is A or G or is absent

SEQ ID NO: 57625 - protein, 42 aa, Artificial Sequence; identical to SEQ ID NO: 9225
  GFR-binding peptide
  MOD_RES (5), (6), (40), (42): Xaa is C or S
  MOD_RES (20), (21), (22), (23), (24): Xaa is A or G
  MOD_RES (25), (26), (27), (28): Xaa is A or G or is absent

SEQ ID NO: 57626 - protein, 42 aa, Artificial Sequence; identical to SEQ ID NO: 29618
  GFR-binding peptide
  MOD_RES (4), (5), (39), (41): Xaa is C or S
  MOD_RES (19), (20), (21), (22), (23): Xaa is A or G
  MOD_RES (24), (25), (26), (27): Xaa is A or G or is absent

SEQ ID NO: 57627 - protein, 38 aa, Artificial Sequence; identical to SEQ ID NO: 6545
  GFR-binding peptide
  MOD_RES (1), (2), (36), (38): Xaa is C or S
  MOD_RES (16), (17), (18), (19), (20): Xaa is A or G
  MOD_RES (21), (22), (23), (24): Xaa is A or G or is absent

SEQ ID NO: 57628 - protein, 35 aa, Artificial Sequence; identical to SEQ ID NO: 8302
  GFR-binding peptide
  MOD_RES (2), (2): Xaa is C or S
  MOD_RES (16), (17), (18), (19), (20): Xaa is A or G
  MOD_RES (21), (22), (23), (24): Xaa is A or G or is absent

SEQ ID NO: 57629 - protein, 34 aa, Artificial Sequence; identical to SEQ ID NO: 29620
  GFR-binding peptide
  MOD_RES (1), (1): Xaa is C or S
  MOD_RES (15), (16), (17), (18), (19): Xaa is A or G
  MOD_RES (20), (21), (22), (23): Xaa is A or G or is absent

SEQ ID NO: 57630 - protein, 38 aa, Artificial Sequence; identical to SEQ ID NO: 9228
  GFR-binding peptide
  MOD_RES (1), (2), (36), (38): Xaa is C or S
  MOD_RES (16), (17), (18), (19), (20): Xaa is A or G
  MOD_RES (21), (22), (23), (24): Xaa is A or G or is absent

SEQ ID NO: 57631 - protein, 37 aa, Artificial Sequence; identical to SEQ ID NO: 6546
  GFR-binding peptide
  MOD_RES (4), (5): Xaa is C or S
  MOD_RES (19), (20), (21), (22), (23): Xaa is A or G
  MOD_RES (24), (25), (26), (27): Xaa is A or G or is absent

SEQ ID NO: 57632 - protein, 36 aa, Artificial Sequence; identical to SEQ ID NO: 6547
  GFR-binding peptide
  MOD_RES (1), (35): Xaa is C or S
  MOD_RES (15), (16), (17), (18), (19): Xaa is A or G
  MOD_RES (20), (21), (22), (23): Xaa is A or G or is absent

SEQ ID NO: 57633 - protein, 38 aa, Artificial Sequence
  GFR-binding peptide
  MOD_RES (5), (6), (38): Xaa is C or S
SAGPXXTPTKMNAISMLYFNDKQQIILKKYRGMVVDRX

SEQ ID NO: 57634 - protein, 35 aa, Artificial Sequence; identical to SEQ ID NO: 13917
  GFR-binding peptide
  MOD_RES (1), (35): Xaa is C or S
  MOD_RES (15), (16), (17), (18), (19): Xaa is A or G
  MOD_RES (20), (21), (22), (23): Xaa is A or G or is absent

SEQ ID NO: 57635 - protein, 40 aa, Artificial Sequence
  GFR-binding peptide
  MOD_RES (4), (5), (39): Xaa is C or S
  MOD_RES (19), (20), (21), (22), (23): Xaa is A or G
  MOD_RES (24), (25), (26), (27): Xaa is A or G or is absent
AGPXXTPTKMNAISMLYFXXXXXXXXXLKKYRGMVVDRXG

SEQ ID NO: 57636 - protein, 36 aa, Artificial Sequence; identical to SEQ ID NO: 7437
  GFR-binding peptide
  MOD_RES (1), (2), (36): Xaa is C or S
  MOD_RES (16), (17), (18), (19), (20): Xaa is A or G
  MOD_RES (21), (22), (23), (24): Xaa is A or G or is absent

SEQ ID NO: 57637 - protein, 39 aa, Artificial Sequence; identical to SEQ ID NO: 27710
  GFR-binding peptide
  MOD_RES (6), (7): Xaa is C or S
  MOD_RES (21), (22), (23), (24), (25): Xaa is A or G
  MOD_RES (26), (27), (28), (29): Xaa is A or G or is absent

SEQ ID NO: 57638 - protein, 34 aa, Artificial Sequence
  GFR-binding peptide
  MOD_RES (1), (33): Xaa is C or S
XTPTKMNAISMLYFNDKQQIILKKYRGMVVDRXG

SEQ ID NO: 57639 - protein, 37 aa, Artificial Sequence; identical to SEQ ID NO: 8309
  GFR-binding peptide
  MOD_RES (2), (3), (37): Xaa is C or S
  MOD_RES (17), (18), (19), (20), (21): Xaa is A or G
  MOD_RES (22), (23), (24), (25): Xaa is A or G or is absent

SEQ ID NO: 57640 - protein, 38 aa, Artificial Sequence; identical to SEQ ID NO: 7441
  GFR-binding peptide
  MOD_RES (5), (6), (38): Xaa is C or S

SEQ ID NO: 57641 - protein, 39 aa, Artificial Sequence; identical to SEQ ID NO: 9242
  GFR-binding peptide
  MOD_RES (2), (3), (37), (39): Xaa is C or S
  MOD_RES (17), (18), (19), (20), (21): Xaa is A or G
  MOD_RES (22), (23), (24), (25): Xaa is A or G or is absent

SEQ ID NO: 57642 - protein, 38 aa, Artificial Sequence; identical to SEQ ID NO: 7445
  GFR-binding peptide
  MOD_RES (2), (3), (37): Xaa is C or S
  MOD_RES (17), (18), (19), (20), (21): Xaa is A or G
  MOD_RES (22), (23), (24), (25): Xaa is A or G or is absent

SEQ ID NO: 57643 - protein, 38 aa, Artificial Sequence; identical to SEQ ID NO: 6556
  GFR-binding peptide
  MOD_RES (1), (35), (37): Xaa is C or S
  MOD_RES (15), (16), (17), (18), (19): Xaa is A or G
  MOD_RES (20), (21), (22), (23): Xaa is A or G or is absent

SEQ ID NO: 57644 - protein, 37 aa, Artificial Sequence
  GFR-binding peptide
  MOD_RES (4), (5), (36): Xaa is C or S
PSTXXAPVKTNAISMLYFDNGRVLLLKKYRMIVEEXG

SEQ ID NO: 57645 - protein, 42 aa, Artificial Sequence
  GFR-binding peptide
  MOD_RES (4), (5), (39), (41): Xaa is C or S
  MOD_RES (19), (20), (21), (22), (23): Xaa is A or G
  MOD_RES (24), (25), (26), (27): Xaa is A or G or is absent
AGPXXTPTKMNAISMLYFXXXXXXXXXLKKYRGMVVDRXGXS

SEQ ID NO: 57646 - protein, 37 aa, Artificial Sequence
  GFR-binding peptide
  MOD_RES (1), (2), (36): Xaa is C or S
  MOD_RES (16), (17), (18), (19), (20): Xaa is A or G
  MOD_RES (21), (22), (23), (24): Xaa is A or G or is absent
XXTPTKMNAISMLYFXXXXXXXXXLKKYRGMVVDRXG

SEQ ID NO: 57647 - protein, 36 aa, Artificial Sequence; identical to SEQ ID NO: 8317
  GFR-binding peptide
  MOD_RES (3), (4): Xaa is C or S
  MOD_RES (18), (19), (20), (21), (22): Xaa is A or G
  MOD_RES (23), (24), (25), (26): Xaa is A or G or is absent

SEQ ID NO: 57648 - protein, 34 aa, Artificial Sequence; identical to SEQ ID NO: 16520
  GFR-binding peptide
  MOD_RES (1), (33): Xaa is C or S

SEQ ID NO: 57649 - protein, 41 aa, Artificial Sequence; identical to SEQ ID NO: 9245
  GFR-binding peptide
  MOD_RES (3), (4), (39), (41): Xaa is C or S
  MOD_RES (18), (19), (20), (21), (22): Xaa is A or G
  MOD_RES (23), (24), (25), (26): Xaa is A or G or is absent

SEQ ID NO: 57650 - protein, 40 aa, Artificial Sequence
  GFR-binding peptide
  MOD_RES (6), (7): Xaa is C or S
  MOD_RES (21), (22), (23), (24), (25): Xaa is A or G
  MOD_RES (26), (27), (28), (29): Xaa is A or G or is absent
HVPKPXXAPTKLNAISVLYFXXXXXXXXXLKKYRNMVVRS

SEQ ID NO: 57651 - protein, 34 aa, Artificial Sequence
  GFR-binding peptide
  MOD_RES (1), (1): Xaa is C or S
  MOD_RES (15), (16), (17), (18), (19): Xaa is A or G
  MOD_RES (20), (21), (22), (23): Xaa is A or G or is absent
XTPTKMNAISMLYFXXXXXXXXXLKKYRGMVVDR

SEQ ID NO: 57652 - protein, 34 aa, Artificial Sequence
  GFR-binding peptide
  MOD_RES (1), (2), (33): Xaa is C or S
XXAPVKTNAISMLYFDNGRVLLLKKYRMIVEEXG

SEQ ID NO: 57653 - protein, 33 aa, Artificial Sequence
  GFR-binding peptide
  MOD_RES (1), (2): Xaa is C or S
XXTPTKMNAISMLYFNDKQQIILKKYRGMVVDR

SEQ ID NO: 57654 - protein, 36 aa, Artificial Sequence; identical to SEQ ID NO: 9254
  GFR-binding peptide
  MOD_RES (2), (3): Xaa is C or S
  MOD_RES (17), (18), (19), (20), (21): Xaa is A or G
  MOD_RES (22), (23), (24), (25): Xaa is A or G or is absent

SEQ ID NO: 57655 - protein, 36 aa, Artificial Sequence
  GFR-binding peptide
  MOD_RES (4), (5): Xaa is C or S
AGPXXTPTKMNAISMLYFNDKQQIILKKYRGMVVDR

SEQ ID NO: 57656 - protein, 43 aa, Artificial Sequence; identical to SEQ ID NO: 27735
  GFR-binding peptide
  MOD_RES (5), (6), (40), (42): Xaa is C or S
  MOD_RES (20), (21), (22), (23), (24): Xaa is A or G
  MOD_RES (25), (26), (27), (28): Xaa is A or G or is absent

SEQ ID NO: 57657 - protein, 41 aa, Artificial Sequence; identical to SEQ ID NO: 30628
  GFR-binding peptide
  MOD_RES (6), (7), (41): Xaa is C or S
  MOD_RES (21), (22), (23), (24), (25): Xaa is A or G
  MOD_RES (26), (27), (28), (29): Xaa is A or G or is absent

SEQ ID NO: 57658 - protein, 36 aa, Artificial Sequence; identical to SEQ ID NO: 6572
  GFR-binding peptide
  MOD_RES (4), (5): Xaa is C or S

SEQ ID NO: 57659 - protein, 33 aa, Artificial Sequence; identical to SEQ ID NO: 15627
  GFR-binding peptide
  MOD_RES (1), (1): Xaa is C or S
  MOD_RES (15), (16), (17), (18), (19): Xaa is A or G
  MOD_RES (20), (21), (22), (23): Xaa is A or G or is absent

SEQ ID NO: 57660 - protein, 34 aa, Artificial Sequence; identical to SEQ ID NO: 7456
  GFR-binding peptide
  MOD_RES (1), (2): Xaa is C or S
  MOD_RES (16), (17), (18), (19), (20): Xaa is A or G
  MOD_RES (21), (22), (23), (24): Xaa is A or G or is absent

SEQ ID NO: 57661 - protein, 37 aa, Artificial Sequence; identical to SEQ ID NO: 29652
  GFR-binding peptide
  MOD_RES (34), (36): Xaa is C or S
  MOD_RES (14), (15), (16), (17), (18): Xaa is A or G
  MOD_RES (19), (20), (21), (22): Xaa is A or G or is absent

SEQ ID NO: 57662 - protein, 36 aa, Artificial Sequence; identical to SEQ ID NO: 9257
  GFR-binding peptide
  MOD_RES (1), (33), (35): Xaa is C or S

SEQ ID NO: 57663 - protein, 40 aa, Artificial Sequence; identical to SEQ ID NO: 28684
  GFR-binding peptide
  MOD_RES (6), (7), (39): Xaa is C or S

SEQ ID NO: 57664 - protein, 43 aa, Artificial Sequence; identical to SEQ ID NO: 6573
  GFR-binding peptide
  MOD_RES (5), (6), (41), (43): Xaa is C or S
  MOD_RES (20), (21), (22), (23), (24): Xaa is A or G
  MOD_RES (25), (26), (27), (28): Xaa is A or G or is absent

SEQ ID NO: 57665 - protein, 39 aa, Artificial Sequence
  GFR-binding peptide
  MOD_RES (5), (6): Xaa is C or S
  MOD_RES (20), (21), (22), (23), (24): Xaa is A or G
  MOD_RES (25), (26), (27), (28): Xaa is A or G or is absent
SAGPXXTPTKMNAISMLYFXXXXXXXXXLKKYRGMVVDR

SEQ ID NO: 57666 - protein, 41 aa, Artificial Sequence; identical to SEQ ID NO: 7462
  GFR-binding peptide
  MOD_RES (6), (7), (39), (41): Xaa is C or S

SEQ ID NO: 57667 - protein, 34 aa, Artificial Sequence; identical to SEQ ID NO: 7463
  GFR-binding peptide
  MOD_RES (1), (2): Xaa is C or S
  MOD_RES (16), (17), (18), (19), (20): Xaa is A or G
  MOD_RES (21), (22), (23), (24): Xaa is A or G or is absent

SEQ ID NO: 57668 - protein, 32 aa, Artificial Sequence; identical to SEQ ID NO: 30644
  GFR-binding peptide
  MOD_RES (14), (15), (16), (17), (18): Xaa is A or G
  MOD_RES (19), (20), (21), (22): Xaa is A or G or is absent

SEQ ID NO: 57669 - protein, 38 aa, Artificial Sequence
  GFR-binding peptide
  MOD_RES (4), (5), (38): Xaa is C or S
  MOD_RES (19), (20), (21), (22), (23): Xaa is A or G
  MOD_RES (24), (25), (26), (27): Xaa is A or G or is absent
PSTXXAPVKTNAISMLYFXXXXXXXXXLKKYRMIVEEX

SEQ ID NO: 57670 - protein, 33 aa, Artificial Sequence
  GFR-binding peptide
  MOD_RES (1), (33): Xaa is C or S
XTPTKMNAISMLYFNDKQQIILKKYRGMVVDRX

SEQ ID NO: 57671 - protein, 36 aa, Artificial Sequence; identical to SEQ ID NO: 28701
  GFR-binding peptide
  MOD_RES (3), (4): Xaa is C or S
  MOD_RES (18), (19), (20), (21), (22): Xaa is A or G
  MOD_RES (23), (24), (25), (26): Xaa is A or G or is absent

SEQ ID NO: 57672 - protein, 34 aa, Artificial Sequence
  GFR-binding peptide
  MOD_RES (1), (2): Xaa is C or S
  MOD_RES (16), (17), (18), (19), (20): Xaa is A or G
  MOD_RES (21), (22), (23), (24): Xaa is A or G or is absent
XXAPVKTNAISMLYFXXXXXXXXXLKKYRMIVEE

SEQ ID NO: 57673 - protein, 42 aa, Artificial Sequence; identical to SEQ ID NO: 8349
  GFR-binding peptide
  MOD_RES (5), (6), (40), (42): Xaa is C or S
  MOD_RES (20), (21), (22), (23), (24): Xaa is A or G
  MOD_RES (25), (26), (27), (28): Xaa is A or G or is absent

SEQ ID NO: 57674 - protein, 41 aa, Artificial Sequence; identical to SEQ ID NO: 29665
  GFR-binding peptide
  MOD_RES (5), (6), (40): Xaa is C or S
  MOD_RES (20), (21), (22), (23), (24): Xaa is A or G
  MOD_RES (25), (26), (27), (28): Xaa is A or G or is absent

SEQ ID NO: 57675 - protein, 34 aa, Artificial Sequence; identical to SEQ ID NO: 29666
  GFR-binding peptide
  MOD_RES (1), (2): Xaa is C or S
  MOD_RES (16), (17), (18), (19), (20): Xaa is A or G
  MOD_RES (21), (22), (23), (24): Xaa is A or G or is absent

SEQ ID NO: 57676 - protein, 33 aa, Artificial Sequence; identical to SEQ ID NO: 30652
  GFR-binding peptide
  MOD_RES (1), (1): Xaa is C or S
  MOD_RES (15), (16), (17), (18), (19): Xaa is A or G
  MOD_RES (20), (21), (22), (23): Xaa is A or G or is absent

SEQ ID NO: 57677 - protein, 38 aa, Artificial Sequence; identical to SEQ ID NO: 7480
  GFR-binding peptide
  MOD_RES (1), (2), (36), (38): Xaa is C or S
  MOD_RES (16), (17), (18), (19), (20): Xaa is A or G
  MOD_RES (21), (22), (23), (24): Xaa is A or G or is absent

SEQ ID NO: 57678 - protein, 39 aa, Artificial Sequence
  GFR-binding peptide
  MOD_RES (3), (4), (36), (38): Xaa is C or S
GPXXTPTKMNAISMLYFNDKQQIILKKYRGMVVDRXGXS

SEQ ID NO: 57679 - protein, 37 aa, Artificial Sequence; identical to SEQ ID NO: 9280
  GFR-binding peptide
  MOD_RES (1), (2), (36): Xaa is C or S
  MOD_RES (16), (17), (18), (19), (20): Xaa is A or G
  MOD_RES (21), (22), (23), (24): Xaa is A or G or is absent

SEQ ID NO: 57680 - protein, 42 aa, Artificial Sequence; identical to SEQ ID NO: 9281
  GFR-binding peptide
  MOD_RES (6), (7), (41): Xaa is C or S
  MOD_RES (21), (22), (23), (24), (25): Xaa is A or G
  MOD_RES (26), (27), (28), (29): Xaa is A or G or is absent

SEQ ID NO: 57681 - protein, 34 aa, Artificial Sequence; identical to SEQ ID NO: 7485
  GFR-binding peptide
  MOD_RES (1), (33): Xaa is C or S

SEQ ID NO: 57682 - protein, 32 aa, Artificial Sequence; identical to SEQ ID NO: 13962
  GFR-binding peptide
  MOD_RES (1), (1): Xaa is C or S

SEQ ID NO: 57683 - protein, 41 aa, Artificial Sequence; identical to SEQ ID NO: 8355
  GFR-binding peptide
  MOD_RES (5), (6), (38), (40): Xaa is C or S

SEQ ID NO: 57684 - protein, 36 aa, Artificial Sequence; identical to SEQ ID NO: 7490
  GFR-binding peptide
  MOD_RES (1), (36): Xaa is C or S
  MOD_RES (15), (16), (17), (18), (19): Xaa is A or G
  MOD_RES (20), (21), (22), (23): Xaa is A or G or is absent

SEQ ID NO: 57685 - protein, 41 aa, Artificial Sequence; identical to SEQ ID NO: 7491
  GFR-binding peptide
  MOD_RES (4), (5), (38), (40): Xaa is C or S

SEQ ID NO: 57686 - protein, 37 aa, Artificial Sequence
  GFR-binding peptide
  MOD_RES (6), (7): Xaa is C or S
GSAGPXXTPTKMNAISMLYFNDKQQIILKKYRGMVVD

SEQ ID NO: 57687 - protein, 38 aa, Artificial Sequence
  GFR-binding peptide
  MOD_RES (5), (6), (37): Xaa is C or S
VPSTXXAPVKTNAISMLYFDNGRVLLLKKYRMIVEEXG

SEQ ID NO: 57688 - protein, 34 aa, Artificial Sequence
  GFR-binding peptide
  MOD_RES (1), (34): Xaa is C or S
  MOD_RES (15), (16), (17), (18), (19): Xaa is A or G
  MOD_RES (20), (21), (22), (23): Xaa is A or G or is absent
XAPVKTNAISMLYFXXXXXXXXXLKKYRMIVEEX

SEQ ID NO: 57689 - protein, 38 aa, Artificial Sequence
  GFR-binding peptide
  MOD_RES (3), (4), (38): Xaa is C or S
  MOD_RES (18), (19), (20), (21), (22): Xaa is A or G
  MOD_RES (23), (24), (25), (26): Xaa is A or G or is absent
GPXXTPTKMNAISMLYFXXXXXXXXXLKKYRGMVVDRX

SEQ ID NO: 57690 - protein, 34 aa, Artificial Sequence; identical to SEQ ID NO: 29678
  GFR-binding peptide
  MOD_RES (3), (4): Xaa is C or S

SEQ ID NO: 57691 - protein, 37 aa, Artificial Sequence; identical to SEQ ID NO: 9285
  GFR-binding peptide
  MOD_RES (4), (5): Xaa is C or S
  MOD_RES (19), (20), (21), (22), (23): Xaa is A or G
  MOD_RES (24), (25), (26), (27): Xaa is A or G or is absent

SEQ ID NO: 57692 - protein, 33 aa, Artificial Sequence; identical to SEQ ID NO: 29682
  GFR-binding peptide
  MOD_RES (1), (33): Xaa is C or S

SEQ ID NO: 57693 - protein, 40 aa, Artificial Sequence; identical to SEQ ID NO: 14802
  GFR-binding peptide
  MOD_RES (2), (3), (37), (39): Xaa is C or S
  MOD_RES (17), (18), (19), (20), (21): Xaa is A or G
  MOD_RES (22), (23), (24), (25): Xaa is A or G or is absent

SEQ ID NO: 57694 - protein, 33 aa, Artificial Sequence; identical to SEQ ID NO: 7497
  GFR-binding peptide
  MOD_RES (1), (2): Xaa is C or S

SEQ ID NO: 57695 - protein, 39 aa, Artificial Sequence
  GFR-binding peptide
  MOD_RES (6), (7), (39): Xaa is C or S
GSAGPXXTPTKMNAISMLYFNDKQQIILKKYRGMVVDRX

SEQ ID NO: 57696 - protein, 40 aa, Artificial Sequence; identical to SEQ ID NO: 9287
  GFR-binding peptide
  MOD_RES (5), (6), (38), (40): Xaa is C or S

SEQ ID NO: 57697 - protein, 35 aa, Artificial Sequence; identical to SEQ ID NO: 27762
  GFR-binding peptide
  MOD_RES (1), (33), (35): Xaa is C or S

SEQ ID NO: 57698 - protein, 41 aa, Artificial Sequence; identical to SEQ ID NO: 28727
  GFR-binding peptide
  MOD_RES (4), (5), (39), (41): Xaa is C or S
  MOD_RES (19), (20), (21), (22), (23): Xaa is A or G
  MOD_RES (24), (25), (26), (27): Xaa is A or G or is absent

SEQ ID NO: 57699 - protein, 34 aa, Artificial Sequence; identical to SEQ ID NO: 16578
  GFR-binding peptide
  MOD_RES (34), (34): Xaa is C or S
  MOD_RES (14), (15), (16), (17), (18): Xaa is A or G
  MOD_RES (19), (20), (21), (22): Xaa is A or G or is absent

SEQ ID NO: 57700 - protein, 35 aa, Artificial Sequence; identical to SEQ ID NO: 8368
  GFR-binding peptide
  MOD_RES (2), (3): Xaa is C or S
  MOD_RES (17), (18), (19), (20), (21): Xaa is A or G
  MOD_RES (22), (23), (24), (25): Xaa is A or G or is absent

SEQ ID NO: 57701 - protein, 37 aa, Artificial Sequence; identical to SEQ ID NO: 6607
  GFR-binding peptide
  MOD_RES (4), (5): Xaa is C or S
  MOD_RES (19), (20), (21), (22), (23): Xaa is A or G
  MOD_RES (24), (25), (26), (27): Xaa is A or G or is absent

SEQ ID NO: 57702 - protein, 37 aa, Artificial Sequence; identical to SEQ ID NO: 14808
  GFR-binding peptide
  MOD_RES (1), (2), (36): Xaa is C or S
  MOD_RES (16), (17), (18), (19), (20): Xaa is A or G
  MOD_RES (21), (22), (23), (24): Xaa is A or G or is absent

SEQ ID NO: 57703 - protein, 37 aa, Artificial Sequence; identical to SEQ ID NO: 7501
  GFR-binding peptide
  MOD_RES (1), (2), (34), (36): Xaa is C or S

SEQ ID NO: 57704 - protein, 40 aa, Artificial Sequence
  GFR-binding peptide
  MOD_RES (2), (3), (37), (39): Xaa is C or S
  MOD_RES (17), (18), (19), (20), (21): Xaa is A or G
  MOD_RES (22), (23), (24), (25): Xaa is A or G or is absent
PXXTPTKMNAISMLYFXXXXXXXXXLKKYRGMVVDRXGXS

SEQ ID NO: 57705 - protein, 36 aa, Artificial Sequence; identical to SEQ ID NO: 29693
  GFR-binding peptide
  MOD_RES (1), (2), (36): Xaa is C or S
  MOD_RES (16), (17), (18), (19), (20): Xaa is A or G
  MOD_RES (21), (22), (23), (24): Xaa is A or G or is absent

SEQ ID NO: 57706 - protein, 44 aa, Artificial Sequence; identical to SEQ ID NO: 9294
  GFR-binding peptide
  MOD_RES (6), (7), (41), (43): Xaa is C or S
  MOD_RES (21), (22), (23), (24), (25): Xaa is A or G
  MOD_RES (26), (27), (28), (29): Xaa is A or G or is absent

SEQ ID NO: 57707 - protein, 31 aa, Artificial Sequence; identical to SEQ ID NO: 30685
  GFR-binding peptide
  MOD_RES (1), (1): Xaa is C or S

SEQ ID NO: 57708 - protein, 34 aa, Artificial Sequence; identical to SEQ ID NO: 8374
  GFR-binding peptide
  MOD_RES (1), (1): Xaa is C or S
  MOD_RES (15), (16), (17), (18), (19): Xaa is A or G
  MOD_RES (20), (21), (22), (23): Xaa is A or G or is absent

SEQ ID NO: 57709 - protein, 39 aa, Artificial Sequence; identical to SEQ ID NO: 9298
  GFR-binding peptide
  MOD_RES (1), (2), (37), (39): Xaa is C or S
  MOD_RES (16), (17), (18), (19), (20): Xaa is A or G
  MOD_RES (21), (22), (23), (24): Xaa is A or G or is absent

SEQ ID NO: 57710 - protein, 41 aa, Artificial Sequence; identical to SEQ ID NO: 9299
  GFR-binding peptide
  MOD_RES (4), (5), (39), (41): Xaa is C or S
  MOD_RES (19), (20), (21), (22), (23): Xaa is A or G
  MOD_RES (24), (25), (26), (27): Xaa is A or G or is absent

SEQ ID NO: 57711 - protein, 39 aa, Artificial Sequence; identical to SEQ ID NO: 8375
  GFR-binding peptide
  MOD_RES (2), (3), (38): Xaa is C or S
  MOD_RES (17), (18), (19), (20), (21): Xaa is A or G
  MOD_RES (22), (23), (24), (25): Xaa is A or G or is absent

SEQ ID NO: 57712 - protein, 40 aa, Artificial Sequence; identical to SEQ ID NO: 30687
  GFR-binding peptide
  MOD_RES (5), (6), (40): Xaa is C or S
  MOD_RES (20), (21), (22), (23), (24): Xaa is A or G
  MOD_RES (25), (26), (27), (28): Xaa is A or G or is absent

SEQ ID NO: 57713 - protein, 32 aa, Artificial Sequence; identical to SEQ ID NO: 13978
  GFR-binding peptide
  MOD_RES (14), (15), (16), (17), (18): Xaa is A or G
  MOD_RES (19), (20), (21), (22): Xaa is A or G or is absent

SEQ ID NO: 57714 - protein, 31 aa, Artificial Sequence; identical to SEQ ID NO: 8378
  GFR-binding peptide

SEQ ID NO: 57715 - protein, 40 aa, Artificial Sequence; identical to SEQ ID NO: 30691
  GFR-binding peptide
  MOD_RES (5), (6), (38), (40): Xaa is C or S

SEQ ID NO: 57716 - protein, 35 aa, Artificial Sequence; identical to SEQ ID NO: 6615
  GFR-binding peptide
  MOD_RES (2), (3), (35): Xaa is C or S

SEQ ID NO: 57717 - protein, 36 aa, Artificial Sequence
  GFR-binding peptide
  MOD_RES (2), (3), (34), (36): Xaa is C or S
TXXAPVKTNAISMLYFDNGRVLLLKKYRMIVEEXGX

SEQ ID NO: 57718 - protein, 39 aa, Artificial Sequence; identical to SEQ ID NO: 30696
  GFR-binding peptide
  MOD_RES (3), (4), (36), (38): Xaa is C or S

SEQ ID NO: 57719 - protein, 42 aa, Artificial Sequence; identical to SEQ ID NO: 8388
  GFR-binding peptide
  MOD_RES (6), (40), (42): Xaa is C or S
  MOD_RES (20), (21), (22), (23), (24): Xaa is A or G
  MOD_RES (25), (26), (27), (28): Xaa is A or G or is absent

SEQ ID NO: 57720 - protein, 38 aa, Artificial Sequence
  GFR-binding peptide
  MOD_RES (3), (4), (37): Xaa is C or S
  MOD_RES (18), (19), (20), (21), (22): Xaa is A or G
  MOD_RES (23), (24), (25), (26): Xaa is A or G or is absent
STXXAPVKTNAISMLYFXXXXXXXXXLKKYRMIVEEXG

SEQ ID NO: 57721 - protein, 39 aa, Artificial Sequence
  GFR-binding peptide
  MOD_RES (1), (2), (36), (38): Xaa is C or S
  MOD_RES (16), (17), (18), (19), (20): Xaa is A or G
  MOD_RES (21), (22), (23), (24): Xaa is A or G or is absent
XXTPTKMNAISMLYFXXXXXXXXXLKKYRGMVVDRXGXS

SEQ ID NO: 57722 - protein, 40 aa, Artificial Sequence
  GFR-binding peptide
  MOD_RES (3), (4), (38), (40): Xaa is C or S
  MOD_RES (18), (19), (20), (21), (22): Xaa is A or G
  MOD_RES (23), (24), (25), (26): Xaa is A or G or is absent
GPXXTPTKMNAISMLYFXXXXXXXXXLKKYRGMVVDRXGX

SEQ ID NO: 57723 - protein, 38 aa, Artificial Sequence; identical to SEQ ID NO: 8392
  GFR-binding peptide
  MOD_RES (5), (5): Xaa is C or S
  MOD_RES (19), (20), (21), (22), (23): Xaa is A or G
  MOD_RES (24), (25), (26), (27): Xaa is A or G or is absent

SEQ ID NO: 57724 - protein, 38 aa, Artificial Sequence; identical to SEQ ID NO: 30702
  GFR-binding peptide
  MOD_RES (3), (4), (36), (38): Xaa is C or S

SEQ ID NO: 57725 - protein, 37 aa, Artificial Sequence; identical to SEQ ID NO: 6625
  GFR-binding peptide
  MOD_RES (2), (3), (36): Xaa is C or S

SEQ ID NO: 57726 - protein, 38 aa, Artificial Sequence; identical to SEQ ID NO: 9312
  GFR-binding peptide
  MOD_RES (2), (36), (38): Xaa is C or S
  MOD_RES (16), (17), (18), (19), (20): Xaa is A or G
  MOD_RES (21), (22), (23), (24): Xaa is A or G or is absent

SEQ ID NO: 57727 - protein, 38 aa, Artificial Sequence; identical to SEQ ID NO: 7521
  GFR-binding peptide
  MOD_RES (3), (4), (38): Xaa is C or S
  MOD_RES (18), (19), (20), (21), (22): Xaa is A or G
  MOD_RES (23), (24), (25), (26): Xaa is A or G or is absent

SEQ ID NO: 57728 - protein, 39 aa, Artificial Sequence; identical to SEQ ID NO: 7522
  GFR-binding peptide
  MOD_RES (6), (7): Xaa is C or S
  MOD_RES (21), (22), (23), (24), (25): Xaa is A or G
  MOD_RES (26), (27), (28), (29): Xaa is A or G or is absent

SEQ ID NO: 57729 - protein, 40 aa, Artificial Sequence; identical to SEQ ID NO: 7524
  GFR-binding peptide
  MOD_RES (4), (5), (39): Xaa is C or S
  MOD_RES (19), (20), (21), (22), (23): Xaa is A or G
  MOD_RES (24), (25), (26), (27): Xaa is A or G or is absent

SEQ ID NO: 57730 - protein, 38 aa, Artificial Sequence
  GFR-binding peptide
  MOD_RES (6), (7), (38): Xaa is C or S
RVPSTXXAPVKTNAISMLYFDNGRVLLLKKYRMIVEEX

SEQ ID NO: 57731 - protein, 33 aa, Artificial Sequence; identical to SEQ ID NO: 7526
  GFR-binding peptide
  MOD_RES (33), (33): Xaa is C or S

SEQ ID NO: 57732 - protein, 39 aa, Artificial Sequence; identical to SEQ ID NO: 7527
  GFR-binding peptide
  MOD_RES (5), (6): Xaa is C or S
  MOD_RES (20), (21), (22), (23), (24): Xaa is A or G
  MOD_RES (25), (26), (27), (28): Xaa is A or G or is absent

SEQ ID NO: 57733 - protein, 37 aa, Artificial Sequence; identical to SEQ ID NO: 28767
  GFR-binding peptide
  MOD_RES (6), (7): Xaa is C or S

SEQ ID NO: 57734 - protein, 37 aa, Artificial Sequence; identical to SEQ ID NO: 15702
  GFR-binding peptide
  MOD_RES (1), (35), (37): Xaa is C or S
  MOD_RES (15), (16), (17), (18), (19): Xaa is A or G
  MOD_RES (20), (21), (22), (23): Xaa is A or G or is absent

SEQ ID NO: 57735 - protein, 40 aa, Artificial Sequence
  GFR-binding peptide
  MOD_RES (6), (7): Xaa is C or S
  MOD_RES (21), (22), (23), (24), (25): Xaa is A or G
  MOD_RES (26), (27), (28), (29): Xaa is A or G or is absent
GSAGPXXTPTKMNAISMLYFXXXXXXXXXLKKYRGMVVDR

SEQ ID NO: 57736 - protein, 35 aa, Artificial Sequence; identical to SEQ ID NO: 9324
  GFR-binding peptide
  MOD_RES (1), (33), (35): Xaa is C or S

SEQ ID NO: 57737 - protein, 39 aa, Artificial Sequence; identical to SEQ ID NO: 9325
  GFR-binding peptide
  MOD_RES (5), (6): Xaa is C or S
  MOD_RES (20), (21), (22), (23), (24): Xaa is A or G
  MOD_RES (25), (26), (27), (28): Xaa is A or G or is absent

SEQ ID NO: 57738 - protein, 35 aa, Artificial Sequence
  GFR-binding peptide
  MOD_RES (4), (5): Xaa is C or S
AGPXXTPTKMNAISMLYFNDKQQIILKKYRGMVVD

SEQ ID NO: 57739 - protein, 36 aa, Artificial Sequence; identical to SEQ ID NO: 8404
  GFR-binding peptide
  MOD_RES (1), (2), (36): Xaa is C or S
  MOD_RES (16), (17), (18), (19), (20): Xaa is A or G
  MOD_RES (21), (22), (23), (24): Xaa is A or G or is absent

SEQ ID NO: 57740 - protein, 31 aa, Artificial Sequence; identical to SEQ ID NO: 28771
  GFR-binding peptide

SEQ ID NO: 57741 - protein, 37 aa, Artificial Sequence; identical to SEQ ID NO: 9328
  GFR-binding peptide
  MOD_RES (3), (4), (36): Xaa is C or S

SEQ ID NO: 57742 - protein, 37 aa, Artificial Sequence; identical to SEQ ID NO: 6632
  GFR-binding peptide
  MOD_RES (2), (3), (37): Xaa is C or S
  MOD_RES (17), (18), (19), (20), (21): Xaa is A or G
  MOD_RES (22), (23), (24), (25): Xaa is A or G or is absent

SEQ ID NO: 57743 - protein, 38 aa, Artificial Sequence; identical to SEQ ID NO: 7536
  GFR-binding peptide
  MOD_RES (3), (4): Xaa is C or S
  MOD_RES (18), (19), (20), (21), (22): Xaa is A or G
  MOD_RES (23), (24), (25), (26): Xaa is A or G or is absent

SEQ ID NO: 57744 - protein, 35 aa, Artificial Sequence
  GFR-binding peptide
  MOD_RES (2), (3): Xaa is C or S
  MOD_RES (17), (18), (19), (20), (21): Xaa is A or G
  MOD_RES (22), (23), (24), (25): Xaa is A or G or is absent
PXXTPTKMNAISMLYFXXXXXXXXXLKKYRGMVVD

SEQ ID NO: 57745 - protein, 36 aa, Artificial Sequence; identical to SEQ ID NO: 9330
  GFR-binding peptide
  MOD_RES (34), (36): Xaa is C or S
  MOD_RES (14), (15), (16), (17), (18): Xaa is A or G
  MOD_RES (19), (20), (21), (22): Xaa is A or G or is absent

SEQ ID NO: 57746 - protein, 33 aa, Artificial Sequence
  GFR-binding peptide
  MOD_RES (1), (32): Xaa is C or S
XAPVKTNAISMLYFDNGRVLLLKKYRMIVEEXG

SEQ ID NO: 57747 - protein, 33 aa, Artificial Sequence; identical to SEQ ID NO: 8409
  GFR-binding peptide
  MOD_RES (1), (1): Xaa is C or S
  MOD_RES (15), (16), (17), (18), (19): Xaa is A or G
  MOD_RES (20), (21), (22), (23): Xaa is A or G or is absent

SEQ ID NO: 57748 - protein, 35 aa, Artificial Sequence; identical to SEQ ID NO: 28777
  GFR-binding peptide
  MOD_RES (2), (3): Xaa is C or S
  MOD_RES (17), (18), (19), (20), (21): Xaa is A or G
  MOD_RES (22), (23), (24), (25): Xaa is A or G or is absent

SEQ ID NO: 57749 - protein, 39 aa, Artificial Sequence; identical to SEQ ID NO: 8410
  GFR-binding peptide
  MOD_RES (6), (7), (39): Xaa is C or S

SEQ ID NO: 57750 - protein, 33 aa, Artificial Sequence; identical to SEQ ID NO: 27803
  GFR-binding peptide
  MOD_RES (14), (15), (16), (17), (18): Xaa is A or G
  MOD_RES (19), (20), (21), (22): Xaa is A or G or is absent

SEQ ID NO: 57751 - protein, 30 aa, Artificial Sequence
  GFR-binding peptide
TPTKMNAISMLYFNDKQQIILKKYRGMVVD

SEQ ID NO: 57752 - protein, 37 aa, Artificial Sequence; identical to SEQ ID NO: 16639
  GFR-binding peptide
  MOD_RES (6), (7): Xaa is C or S

SEQ ID NO: 57753 - protein, 38 aa, Artificial Sequence; identical to SEQ ID NO: 7543
  GFR-binding peptide
  MOD_RES (2), (3), (37): Xaa is C or S
  MOD_RES (17), (18), (19), (20), (21): Xaa is A or G
  MOD_RES (22), (23), (24), (25): Xaa is A or G or is absent

SEQ ID NO: 57754 - protein, 43 aa, Artificial Sequence; identical to SEQ ID NO: 8414
  GFR-binding peptide
  MOD_RES (6), (7), (41), (43): Xaa is C or S
  MOD_RES (21), (22), (23), (24), (25): Xaa is A or G
  MOD_RES (26), (27), (28), (29): Xaa is A or G or is absent

SEQ ID NO: 57755 - protein, 34 aa, Artificial Sequence
  GFR-binding peptide
  MOD_RES (32), (34): Xaa is C or S
TPTKMNAISMLYFNDKQQIILKKYRGMVVDRXGX

SEQ ID NO: 57756 - protein, 40 aa, Artificial Sequence
  GFR-binding peptide
  MOD_RES (4), (5), (38), (40): Xaa is C or S
  MOD_RES (19), (20), (21), (22), (23): Xaa is A or G
  MOD_RES (24), (25), (26), (27): Xaa is A or G or is absent
PSTXXAPVKTNAISMLYFXXXXXXXXXLKKYRMIVEEXGX

SEQ ID NO: 57757 - protein, 40 aa, Artificial Sequence; identical to SEQ ID NO: 7545
  GFR-binding peptide
  MOD_RES (3), (4), (38), (40): Xaa is C or S
  MOD_RES (18), (19), (20), (21), (22): Xaa is A or G
  MOD_RES (23), (24), (25), (26): Xaa is A or G or is absent

SEQ ID NO: 57758 - protein, 37 aa, Artificial Sequence; identical to SEQ ID NO: 28785
  GFR-binding peptide
  MOD_RES (5), (6): Xaa is C or S

SEQ ID NO: 57759 - protein, 38 aa, Artificial Sequence; identical to SEQ ID NO: 7546
  GFR-binding peptide
  MOD_RES (1), (35), (37): Xaa is C or S
  MOD_RES (15), (16), (17), (18), (19): Xaa is A or G
  MOD_RES (20), (21), (22), (23): Xaa is A or G or is absent

SEQ ID NO: 57760 - protein, 37 aa, Artificial Sequence; identical to SEQ ID NO: 7549
  GFR-binding peptide
  MOD_RES (6), (7): Xaa is C or S

SEQ ID NO: 57761 - protein, 37 aa, Artificial Sequence; identical to SEQ ID NO: 7550
  GFR-binding peptide
  MOD_RES (3), (4): Xaa is C or S
  MOD_RES (18), (19), (20), (21), (22): Xaa is A or G
  MOD_RES (23), (24), (25), (26): Xaa is A or G or is absent

SEQ ID NO: 57762 - protein, 33 aa, Artificial Sequence; identical to SEQ ID NO: 9341
  GFR-binding peptide
  MOD_RES (14), (15), (16), (17), (18): Xaa is A or G
  MOD_RES (19), (20), (21), (22): Xaa is A or G or is absent

SEQ ID NO: 57763 - protein, 35 aa, Artificial Sequence; identical to SEQ ID NO: 7551
  GFR-binding peptide
  MOD_RES (32), (34): Xaa is C or S

SEQ ID NO: 57764 - protein, 40 aa, Artificial Sequence
  GFR-binding peptide
  MOD_RES (5), (6), (40): Xaa is C or S
  MOD_RES (20), (21), (22), (23), (24): Xaa is A or G
  MOD_RES (25), (26), (27), (28): Xaa is A or G or is absent
SAGPXXTPTKMNAISMLYFXXXXXXXXXLKKYRGMVVDRX

SEQ ID NO: 57765 - protein, 36 aa, Artificial Sequence; identical to SEQ ID NO: 8417
  GFR-binding peptide
  MOD_RES (1), (2), (36): Xaa is C or S
  MOD_RES (16), (17), (18), (19), (20): Xaa is A or G
  MOD_RES (21), (22), (23), (24): Xaa is A or G or is absent

SEQ ID NO: 57766 - protein, 41 aa, Artificial Sequence; identical to SEQ ID NO: 7553
  GFR-binding peptide
  MOD_RES (5), (6), (40): Xaa is C or S
  MOD_RES (20), (21), (22), (23), (24): Xaa is A or G
  MOD_RES (25), (26), (27), (28): Xaa is A or G or is absent

SEQ ID NO: 57767 - protein, 34 aa, Artificial Sequence; identical to SEQ ID NO: 8421
  GFR-binding peptide
  MOD_RES (1), (2), (34): Xaa is C or S

SEQ ID NO: 57768 - protein, 31 aa, Artificial Sequence; identical to SEQ ID NO: 9343
  GFR-binding peptide

SEQ ID NO: 57769 - protein, 39 aa, Artificial Sequence
  GFR-binding peptide
  MOD_RES (2), (3), (36), (38): Xaa is C or S
  MOD_RES (17), (18), (19), (20), (21): Xaa is A or G
  MOD_RES (22), (23), (24), (25): Xaa is A or G or is absent
TXXAPVKTNAISMLYFXXXXXXXXXLKKYRMIVEEXGXL

SEQ ID NO: 57770 - protein, 31 aa, Artificial Sequence
  GFR-binding peptide
  MOD_RES (1), (1): Xaa is C or S
XTPTKMNAISMLYFNDKQQIILKKYRGMVVD

SEQ ID NO: 57771 - protein, 41 aa, Artificial Sequence; identical to SEQ ID NO: 30733
  GFR-binding peptide
  MOD_RES (6), (7), (41): Xaa is C or S
  MOD_RES (21), (22), (23), (24), (25): Xaa is A or G
  MOD_RES (26), (27), (28), (29): Xaa is A or G or is absent

SEQ ID NO: 57772 - protein, 38 aa, Artificial Sequence; identical to SEQ ID NO: 8425
  GFR-binding peptide
  MOD_RES (1), (2), (37): Xaa is C or S
  MOD_RES (16), (17), (18), (19), (20): Xaa is A or G
  MOD_RES (21), (22), (23), (24): Xaa is A or G or is absent

SEQ ID NO: 57773 - protein, 35 aa, Artificial Sequence; identical to SEQ ID NO: 29739
  GFR-binding peptide
  MOD_RES (32), (34): Xaa is C or S

SEQ ID NO: 57774 - protein, 32 aa, Artificial Sequence; identical to SEQ ID NO: 29740
  GFR-binding peptide
  MOD_RES (1), (2): Xaa is C or S

SEQ ID NO: 57775 - protein, 36 aa, Artificial Sequence; identical to SEQ ID NO: 8428
  GFR-binding peptide
  MOD_RES (1), (2), (34), (36): Xaa is C or S

SEQ ID NO: 57776 - protein, 35 aa, Artificial Sequence; identical to SEQ ID NO: 30735
  GFR-binding peptide
  MOD_RES (32), (34): Xaa is C or S

SEQ ID NO: 57777 - protein, 36 aa, Artificial Sequence; identical to SEQ ID NO: 6655
  GFR-binding peptide
  MOD_RES (4), (5): Xaa is C or S

SEQ ID NO: 57778 - protein, 41 aa, Artificial Sequence; identical to SEQ ID NO: 8429
  GFR-binding peptide
  MOD_RES (4), (5), (39), (41): Xaa is C or S
  MOD_RES (19), (20), (21), (22), (23): Xaa is A or G
  MOD_RES (24), (25), (26), (27): Xaa is A or G or is absent

SEQ ID NO: 57779 - protein, 38 aa, Artificial Sequence; identical to SEQ ID NO: 8431
  GFR-binding peptide
  MOD_RES (1), (35), (37): Xaa is C or S
  MOD_RES (15), (16), (17), (18), (19): Xaa is A or G
  MOD_RES (20), (21), (22), (23): Xaa is A or G or is absent

SEQ ID NO: 57780 - protein, 37 aa, Artificial Sequence; identical to SEQ ID NO: 29744
  GFR-binding peptide
  MOD_RES (6), (7): Xaa is C or S

SEQ ID NO: 57781 - protein, 43 aa, Artificial Sequence; identical to SEQ ID NO: 6658
  GFR-binding peptide
  MOD_RES (5), (6), (40), (42): Xaa is C or S
  MOD_RES (20), (21), (22), (23), (24): Xaa is A or G
  MOD_RES (25), (26), (27), (28): Xaa is A or G or is absent

SEQ ID NO: 57782 - protein, 33 aa, Artificial Sequence; identical to SEQ ID NO: 8433
  GFR-binding peptide
  MOD_RES (1), (1): Xaa is C or S
  MOD_RES (15), (16), (17), (18), (19): Xaa is A or G
  MOD_RES (20), (21), (22), (23): Xaa is A or G or is absent

SEQ ID NO: 57783 - protein, 37 aa, Artificial Sequence; identical to SEQ ID NO: 29748
  GFR-binding peptide
  MOD_RES (2), (3), (35), (37): Xaa is C or S

SEQ ID NO: 57784 - protein, 36 aa, Artificial Sequence; identical to SEQ ID NO: 29751
  GFR-binding peptide
  MOD_RES (1), (35): Xaa is C or S
  MOD_RES (15), (16), (17), (18), (19): Xaa is A or G
  MOD_RES (20), (21), (22), (23): Xaa is A or G or is absent

SEQ ID NO: 57785 - protein, 34 aa, Artificial Sequence; identical to SEQ ID NO: 7569
  GFR-binding peptide
  MOD_RES (1), (34): Xaa is C or S

SEQ ID NO: 57786 - protein, 39 aa, Artificial Sequence; identical to SEQ ID NO: 9352
  GFR-binding peptide
  MOD_RES (5), (6), (38): Xaa is C or S

SEQ ID NO: 57787 - protein, 37 aa, Artificial Sequence; identical to SEQ ID NO: 6664
  GFR-binding peptide
  MOD_RES (4), (5): Xaa is C or S

SEQ ID NO: 57788 - protein, 33 aa, Artificial Sequence; identical to SEQ ID NO: 29755
  GFR-binding peptide
  MOD_RES (1), (2): Xaa is C or S

SEQ ID NO: 57789 - protein, 36 aa, Artificial Sequence; identical to SEQ ID NO: 7572
  GFR-binding peptide
  MOD_RES (34), (36): Xaa is C or S
  MOD_RES (14), (15), (16), (17), (18): Xaa is A or G
  MOD_RES (19), (20), (21), (22): Xaa is A or G or is absent

SEQ ID NO: 57790 - protein, 38 aa, Artificial Sequence
  GFR-binding peptide
  MOD_RES (2), (3), (36), (38): Xaa is C or S
  MOD_RES (17), (18), (19), (20), (21): Xaa is A or G
  MOD_RES (22), (23), (24), (25): Xaa is A or G or is absent
TXXAPVKTNAISMLYFXXXXXXXXXLKKYRMIVEEXGX

SEQ ID NO: 57791 - protein, 40 aa, Artificial Sequence; identical to SEQ ID NO: 14884
  GFR-binding peptide
  MOD_RES (5), (6), (40): Xaa is C or S
  MOD_RES (20), (21), (22), (23), (24): Xaa is A or G
  MOD_RES (25), (26), (27), (28): Xaa is A or G or is absent

SEQ ID NO: 57792 - protein, 38 aa, Artificial Sequence; identical to SEQ ID NO: 7575
  GFR-binding peptide
  MOD_RES (3), (37): Xaa is C or S
  MOD_RES (17), (18), (19), (20), (21): Xaa is A or G
  MOD_RES (22), (23), (24), (25): Xaa is A or G or is absent

SEQ ID NO: 57793 - protein, 32 aa, Artificial Sequence; identical to SEQ ID NO: 8444
  GFR-binding peptide
  MOD_RES (1), (2): Xaa is C or S

SEQ ID NO: 57794 - protein, 40 aa, Artificial Sequence; identical to SEQ ID NO: 6669
  GFR-binding peptide
  MOD_RES (5), (6), (40): Xaa is C or S
  MOD_RES (20), (21), (22), (23), (24): Xaa is A or G
  MOD_RES (25), (26), (27), (28): Xaa is A or G or is absent

SEQ ID NO: 57795 - protein, 38 aa, Artificial Sequence; identical to SEQ ID NO: 9361
  GFR-binding peptide
  MOD_RES (3), (4), (38): Xaa is C or S
  MOD_RES (18), (19), (20), (21), (22): Xaa is A or G
  MOD_RES (23), (24), (25), (26): Xaa is A or G or is absent

SEQ ID NO: 57796 - protein, 34 aa, Artificial Sequence; identical to SEQ ID NO: 8446
  GFR-binding peptide
  MOD_RES (1), (1): Xaa is C or S
  MOD_RES (15), (16), (17), (18), (19): Xaa is A or G
  MOD_RES (20), (21), (22), (23): Xaa is A or G or is absent

SEQ ID NO: 57797 - protein, 35 aa, Artificial Sequence; identical to SEQ ID NO: 6670
  GFR-binding peptide
  MOD_RES (3), (4): Xaa is C or S

SEQ ID NO: 57798 - protein, 38 aa, Artificial Sequence; identical to SEQ ID NO: 7578
  GFR-binding peptide
  MOD_RES (5), (6): Xaa is C or S
  MOD_RES (20), (21), (22), (23), (24): Xaa is A or G
  MOD_RES (25), (26), (27), (28): Xaa is A or G or is absent

SEQ ID NO: 57799 - protein, 38 aa, Artificial Sequence; identical to SEQ ID NO: 15745
  GFR-binding peptide
  MOD_RES (3), (4), (38): Xaa is C or S
  MOD_RES (18), (19), (20), (21), (22): Xaa is A or G
  MOD_RES (23), (24), (25), (26): Xaa is A or G or is absent

SEQ ID NO: 57800 - protein, 36 aa, Artificial Sequence; identical to SEQ ID NO: 6671
  GFR-binding peptide
  MOD_RES (1), (35): Xaa is C or S
  MOD_RES (15), (16), (17), (18), (19): Xaa is A or G
  MOD_RES (20), (21), (22), (23): Xaa is A or G or is absent

SEQ ID NO: 57801 - protein, 40 aa, Artificial Sequence; identical to SEQ ID NO: 7580
  GFR-binding peptide
  MOD_RES (4), (5), (39): Xaa is C or S
  MOD_RES (19), (20), (21), (22), (23): Xaa is A or G
  MOD_RES (24), (25), (26), (27): Xaa is A or G or is absent

SEQ ID NO: 57802 - protein, 37 aa, Artificial Sequence; identical to SEQ ID NO: 30756
  GFR-binding peptide
  MOD_RES (2), (3), (37): Xaa is C or S
  MOD_RES (17), (18), (19), (20), (21): Xaa is A or G
  MOD_RES (22), (23), (24), (25): Xaa is A or G or is absent

SEQ ID NO: 57803 - protein, 39 aa, Artificial Sequence; identical to SEQ ID NO: 27841
  GFR-binding peptide
  MOD_RES (4), (5), (39): Xaa is C or S
  MOD_RES (19), (20), (21), (22), (23): Xaa is A or G
  MOD_RES (24), (25), (26), (27): Xaa is A or G or is absent

SEQ ID NO: 57804 - protein, 37 aa, Artificial Sequence; identical to SEQ ID NO: 14888
  GFR-binding peptide
  MOD_RES (4), (5): Xaa is C or S
  MOD_RES (19), (20), (21), (22), (23): Xaa is A or G
  MOD_RES (24), (25), (26), (27): Xaa is A or G or is absent

SEQ ID NO: 57805 - protein, 40 aa, Artificial Sequence; identical to SEQ ID NO: 30762
  GFR-binding peptide
  MOD_RES (3), (4), (38), (40): Xaa is C or S
  MOD_RES (18), (19), (20), (21), (22): Xaa is A or G
  MOD_RES (23), (24), (25), (26): Xaa is A or G or is absent

SEQ ID NO: 57806 - protein, 36 aa, Artificial Sequence
  GFR-binding peptide
  MOD_RES (2), (3): Xaa is C or S
  MOD_RES (17), (18), (19), (20), (21): Xaa is A or G
  MOD_RES (22), (23), (24), (25): Xaa is A or G or is absent
PXXTPTKMNAISMLYFXXXXXXXXXLKKYRGMVVDR

SEQ ID NO: 57807 - protein, 39 aa, Artificial Sequence; identical to SEQ ID NO: 7585
  GFR-binding peptide
  MOD_RES (6), (7): Xaa is C or S
  MOD_RES (21), (22), (23), (24), (25): Xaa is A or G
  MOD_RES (26), (27), (28), (29): Xaa is A or G or is absent

SEQ ID NO: 57808 - protein, 33 aa, Artificial Sequence; identical to SEQ ID NO: 6679
  GFR-binding peptide
  MOD_RES (1), (2): Xaa is C or S

SEQ ID NO: 57809 - protein, 35 aa, Artificial Sequence
  GFR-binding peptide
  MOD_RES (33), (35): Xaa is C or S
  MOD_RES (14), (15), (16), (17), (18): Xaa is A or G
  MOD_RES (19), (20), (21), (22): Xaa is A or G or is absent
APVKTNAISMLYFXXXXXXXXXLKKYRMIVEEXGX

SEQ ID NO: 57810 - protein, 39 aa, Artificial Sequence; identical to SEQ ID NO: 29767
  GFR-binding peptide
  MOD_RES (1), (2), (36), (38): Xaa is C or S
  MOD_RES (16), (17), (18), (19), (20): Xaa is A or G
  MOD_RES (21), (22), (23), (24): Xaa is A or G or is absent

SEQ ID NO: 57811 - protein, 41 aa, Artificial Sequence; identical to SEQ ID NO: 9371
  GFR-binding peptide
  MOD_RES (6), (7), (39), (41): Xaa is C or S

SEQ ID NO: 57812 - protein, 39 aa, Artificial Sequence; identical to SEQ ID NO: 8457
  GFR-binding peptide
  MOD_RES (2), (3), (37), (39): Xaa is C or S
  MOD_RES (17), (18), (19), (20), (21): Xaa is A or G
  MOD_RES (22), (23), (24), (25): Xaa is A or G or is absent

SEQ ID NO: 57813 - protein, 37 aa, Artificial Sequence
  GFR-binding peptide
  MOD_RES (4), (5): Xaa is C or S
  MOD_RES (19), (20), (21), (22), (23): Xaa is A or G
  MOD_RES (24), (25), (26), (27): Xaa is A or G or is absent
AGPXXTPTKMNAISMLYFXXXXXXXXXLKKYRGMVVD

SEQ ID NO: 57814 - protein, 37 aa, Artificial Sequence; identical to SEQ ID NO: 8462
  GFR-binding peptide
  MOD_RES (2), (3), (35), (37): Xaa is C or S

SEQ ID NO: 57815 - protein, 36 aa, Artificial Sequence; identical to SEQ ID NO: 29781
  GFR-binding peptide
  MOD_RES (1), (33), (35): Xaa is C or S

SEQ ID NO: 57816 - protein, 38 aa, Artificial Sequence; identical to SEQ ID NO: 29782
  GFR-binding peptide
  MOD_RES (5), (6): Xaa is C or S
  MOD_RES (20), (21), (22), (23), (24): Xaa is A or G
  MOD_RES (25), (26), (27), (28): Xaa is A or G or is absent

SEQ ID NO: 57817 - protein, 34 aa, Artificial Sequence; identical to SEQ ID NO: 8464
  GFR-binding peptide
  MOD_RES (3), (4): Xaa is C or S

SEQ ID NO: 57818 - protein, 40 aa, Artificial Sequence; identical to SEQ ID NO: 6705
  GFR-binding peptide
  MOD_RES (5), (39): Xaa is C or S
  MOD_RES (19), (20), (21), (22), (23): Xaa is A or G
  MOD_RES (24), (25), (26), (27): Xaa is A or G or is absent

SEQ ID NO: 57819 - protein, 31 aa, Artificial Sequence; identical to SEQ ID NO: 7604
  GFR-binding peptide

SEQ ID NO: 57820 - protein, 40 aa, Artificial Sequence; identical to SEQ ID NO: 6708
  GFR-binding peptide
  MOD_RES (3), (4), (38), (40): Xaa is C or S
  MOD_RES (18), (19), (20), (21), (22): Xaa is A or G
  MOD_RES (23), (24), (25), (26): Xaa is A or G or is absent

SEQ ID NO: 57821 - protein, 39 aa, Artificial Sequence; identical to SEQ ID NO: 9387
  GFR-binding peptide
  MOD_RES (4), (5), (39): Xaa is C or S
  MOD_RES (19), (20), (21), (22), (23): Xaa is A or G
  MOD_RES (24), (25), (26), (27): Xaa is A or G or is absent

SEQ ID NO: 57822 - protein, 42 aa, Artificial Sequence
  GFR-binding peptide
  MOD_RES (6), (7), (39), (41): Xaa is C or S
GSAGPXXTPTKMNAISMLYFNDKQQIILKKYRGMVVDRXGXS

SEQ ID NO: 57823 - protein, 35 aa, Artificial Sequence; identical to SEQ ID NO: 7607
  GFR-binding peptide
  MOD_RES (4), (5): Xaa is C or S

SEQ ID NO: 57824 - protein, 43 aa, Artificial Sequence; identical to SEQ ID NO: 6711
  GFR-binding peptide
  MOD_RES (6), (7), (41), (43): Xaa is C or S
  MOD_RES (21), (22), (23), (24), (25): Xaa is A or G
  MOD_RES (26), (27), (28), (29): Xaa is A or G or is absent

SEQ ID NO: 57825 - protein, 36 aa, Artificial Sequence
  GFR-binding peptide
  MOD_RES (1), (34), (36): Xaa is C or S
  MOD_RES (15), (16), (17), (18), (19): Xaa is A or G
  MOD_RES (20), (21), (22), (23): Xaa is A or G or is absent
XAPVKTNAISMLYFXXXXXXXXXLKKYRMIVEEXGX

SEQ ID NO: 57826 - protein, 36 aa, Artificial Sequence
  GFR-binding peptide
  MOD_RES (3), (4), (35): Xaa is C or S
STXXAPVKTNAISMLYFDNGRVLLLKKYRMIVEEXG

SEQ ID NO: 57827 - protein, 38 aa, Artificial Sequence; identical to SEQ ID NO: 14066
  GFR-binding peptide
  MOD_RES (1), (35), (37): Xaa is C or S
  MOD_RES (15), (16), (17), (18), (19): Xaa is A or G
  MOD_RES (20), (21), (22), (23): Xaa is A or G or is absent

SEQ ID NO: 57828 - protein, 42 aa, Artificial Sequence
  GFR-binding peptide
  MOD_RES (6), (7), (41): Xaa is C or S
  MOD_RES (21), (22), (23), (24), (25): Xaa is A or G
  MOD_RES (26), (27), (28), (29): Xaa is A or G or is absent
HVPKPXXAPTKLNAISVLYFXXXXXXXXXLKKYRNMVVRSXG

SEQ ID NO: 57829 - protein, 37 aa, Artificial Sequence; identical to SEQ ID NO: 9394
  GFR-binding peptide
  MOD_RES (35), (37): Xaa is C or S
  MOD_RES (14), (15), (16), (17), (18): Xaa is A or G
  MOD_RES (19), (20), (21), (22): Xaa is A or G or is absent

SEQ ID NO: 57830 - protein, 38 aa, Artificial Sequence; identical to SEQ ID NO: 9395
  GFR-binding peptide
  MOD_RES (3), (4), (38): Xaa is C or S
  MOD_RES (18), (19), (20), (21), (22): Xaa is A or G
  MOD_RES (23), (24), (25), (26): Xaa is A or G or is absent

SEQ ID NO: 57831 - protein, 38 aa, Artificial Sequence; identical to SEQ ID NO: 6713
  GFR-binding peptide
  MOD_RES (2), (3), (35), (37): Xaa is C or S

SEQ ID NO: 57832 - protein, 37 aa, Artificial Sequence; identical to SEQ ID NO: 15783
  GFR-binding peptide
  MOD_RES (3), (4), (36): Xaa is C or S

SEQ ID NO: 57833 - protein, 32 aa, Artificial Sequence; identical to SEQ ID NO: 7611
  GFR-binding peptide
  MOD_RES (32), (32): Xaa is C or S

SEQ ID NO: 57834 - protein, 37 aa, Artificial Sequence
  GFR-binding peptide
  MOD_RES (2), (3), (36): Xaa is C or S
  MOD_RES (17), (18), (19), (20), (21): Xaa is A or G
  MOD_RES (22), (23), (24), (25): Xaa is A or G or is absent
TXXAPVKTNAISMLYFXXXXXXXXXLKKYRMIVEEXG

SEQ ID NO: 57835 - protein, 35 aa, Artificial Sequence
  GFR-binding peptide
  MOD_RES (34), (34): Xaa is C or S
  MOD_RES (14), (15), (16), (17), (18): Xaa is A or G
  MOD_RES (19), (20), (21), (22): Xaa is A or G or is absent
TPTKMNAISMLYFXXXXXXXXXLKKYRGMVVDRXG

SEQ ID NO: 57836 - protein, 40 aa, Artificial Sequence
  GFR-binding peptide
  MOD_RES (6), (7), (39): Xaa is C or S
GSAGPXXTPTKMNAISMLYFNDKQQIILKKYRGMVVDRXG

SEQ ID NO: 57837 - protein, 39 aa, Artificial Sequence; identical to SEQ ID NO: 30804
  GFR-binding peptide
  MOD_RES (5), (6), (38): Xaa is C or S

SEQ ID NO: 57838 - protein, 33 aa, Artificial Sequence
  GFR-binding peptide
  MOD_RES (1), (1): Xaa is C or S
  MOD_RES (15), (16), (17), (18), (19): Xaa is A or G
  MOD_RES (20), (21), (22), (23): Xaa is A or G or is absent
XAPVKTNAISMLYFXXXXXXXXXLKKYRMIVEE

SEQ ID NO: 57839 - protein, 40 aa, Artificial Sequence; identical to SEQ ID NO: 6718
  GFR-binding peptide
  MOD_RES (3), (4), (38), (40): Xaa is C or S
  MOD_RES (18), (19), (20), (21), (22): Xaa is A or G
  MOD_RES (23), (24), (25), (26): Xaa is A or G or is absent

SEQ ID NO: 57840 - protein, 44 aa, Artificial Sequence; identical to SEQ ID NO: 6720
  GFR-binding peptide
  MOD_RES (7), (41), (43): Xaa is C or S
  MOD_RES (21), (22), (23), (24), (25): Xaa is A or G
  MOD_RES (26), (27), (28), (29): Xaa is A or G or is absent

SEQ ID NO: 57841 - protein, 35 aa, Artificial Sequence; identical to SEQ ID NO: 8490
  GFR-binding peptide
  MOD_RES (1), (35): Xaa is C or S
  MOD_RES (15), (16), (17), (18), (19): Xaa is A or G
  MOD_RES (20), (21), (22), (23): Xaa is A or G or is absent

SEQ ID NO: 57842 - protein, 34 aa, Artificial Sequence; identical to SEQ ID NO: 9404
  GFR-binding peptide
  MOD_RES (1), (2), (34): Xaa is C or S

SEQ ID NO: 57843 - protein, 34 aa, Artificial Sequence; identical to SEQ ID NO: 15792
  GFR-binding peptide
  MOD_RES (3), (4): Xaa is C or S

SEQ ID NO: 57844 - protein, 37 aa, Artificial Sequence; identical to SEQ ID NO: 9407
  GFR-binding peptide
  MOD_RES (5), (5): Xaa is C or S
  MOD_RES (19), (20), (21), (22), (23): Xaa is A or G
  MOD_RES (24), (25), (26), (27): Xaa is A or G or is absent

SEQ ID NO: 57845 - protein, 35 aa, Artificial Sequence
  GFR-binding peptide
  MOD_RES (1), (2): Xaa is C or S
  MOD_RES (16), (17), (18), (19), (20): Xaa is A or G
  MOD_RES (21), (22), (23), (24): Xaa is A or G or is absent
XXTPTKMNAISMLYFXXXXXXXXXLKKYRGMVVDR

SEQ ID NO: 57846 - protein, 39 aa, Artificial Sequence; identical to SEQ ID NO: 8499
  GFR-binding peptide
  MOD_RES (6), (6): Xaa is C or S
  MOD_RES (20), (21), (22), (23), (24): Xaa is A or G
  MOD_RES (25), (26), (27), (28): Xaa is A or G or is absent

SEQ ID NO: 57847 - protein, 39 aa, Artificial Sequence; identical to SEQ ID NO: 27895
  GFR-binding peptide
  MOD_RES (6), (7), (39): Xaa is C or S

SEQ ID NO: 57848 - protein, 36 aa, Artificial Sequence; identical to SEQ ID NO: 9409
  GFR-binding peptide
  MOD_RES (1), (2), (35): Xaa is C or S

SEQ ID NO: 57849 - protein, 34 aa, Artificial Sequence; identical to SEQ ID NO: 6732
  GFR-binding peptide
  MOD_RES (2), (3): Xaa is C or S

SEQ ID NO: 57850 - protein, 42 aa, Artificial Sequence; identical to SEQ ID NO: 27897
  GFR-binding peptide
  MOD_RES (4), (5), (39), (41): Xaa is C or S
  MOD_RES (19), (20), (21), (22), (23): Xaa is A or G
  MOD_RES (24), (25), (26), (27): Xaa is A or G or is absent

SEQ ID NO: 57851 - protein, 38 aa, Artificial Sequence; identical to SEQ ID NO: 28887
  GFR-binding peptide
  MOD_RES (5), (6): Xaa is C or S
  MOD_RES (20), (21), (22), (23), (24): Xaa is A or G
  MOD_RES (25), (26), (27), (28): Xaa is A or G or is absent

SEQ ID NO: 57852 - protein, 38 aa, Artificial Sequence; identical to SEQ ID NO: 28892
  GFR-binding peptide
  MOD_RES (3), (4), (38): Xaa is C or S
  MOD_RES (18), (19), (20), (21), (22): Xaa is A or G
  MOD_RES (23), (24), (25), (26): Xaa is A or G or is absent

SEQ ID NO: 57853 - protein, 39 aa, Artificial Sequence; identical to SEQ ID NO: 29828
  GFR-binding peptide
  MOD_RES (3), (4), (38): Xaa is C or S
  MOD_RES (18), (19), (20), (21), (22): Xaa is A or G
  MOD_RES (23), (24), (25), (26): Xaa is A or G or is absent

SEQ ID NO: 57854 - protein, 36 aa, Artificial Sequence
  GFR-binding peptide
  MOD_RES (1), (2), (34), (36): Xaa is C or S
XXTPTKMNAISMLYFNDKQQIILKKYRGMVVDRXGX

SEQ ID NO: 57855 - protein, 36 aa, Artificial Sequence; identical to SEQ ID NO: 7629
  GFR-binding peptide
  MOD_RES (3), (4): Xaa is C or S
  MOD_RES (18), (19), (20), (21), (22): Xaa is A or G
  MOD_RES (23), (24), (25), (26): Xaa is A or G or is absent

SEQ ID NO: 57856 - protein, 42 aa, Artificial Sequence; identical to SEQ ID NO: 9417
  GFR-binding peptide
  MOD_RES (7), (41): Xaa is C or S
  MOD_RES (21), (22), (23), (24), (25): Xaa is A or G
  MOD_RES (26), (27), (28), (29): Xaa is A or G or is absent

SEQ ID NO: 57857 - protein, 37 aa, Artificial Sequence; identical to SEQ ID NO: 8513
  GFR-binding peptide
  MOD_RES (2), (3), (35), (37): Xaa is C or S

SEQ ID NO: 57858 - protein, 40 aa, Artificial Sequence; identical to SEQ ID NO: 6739
  GFR-binding peptide
  MOD_RES (2), (3), (37), (39): Xaa is C or S
  MOD_RES (17), (18), (19), (20), (21): Xaa is A or G
  MOD_RES (22), (23), (24), (25): Xaa is A or G or is absent

SEQ ID NO: 57859 - protein, 36 aa, Artificial Sequence; identical to SEQ ID NO: 9420
  GFR-binding peptide
  MOD_RES (2), (3): Xaa is C or S
  MOD_RES (17), (18), (19), (20), (21): Xaa is A or G
  MOD_RES (22), (23), (24), (25): Xaa is A or G or is absent

SEQ ID NO: 57860 - protein, 38 aa, Artificial Sequence; identical to SEQ ID NO: 14940
  GFR-binding peptide
  MOD_RES (2), (3), (37): Xaa is C or S
  MOD_RES (17), (18), (19), (20), (21): Xaa is A or G
  MOD_RES (22), (23), (24), (25): Xaa is A or G or is absent

SEQ ID NO: 57861 - protein, 40 aa, Artificial Sequence; identical to SEQ ID NO: 8523
  GFR-binding peptide
  MOD_RES (4), (5), (40): Xaa is C or S
  MOD_RES (19), (20), (21), (22), (23): Xaa is A or G
  MOD_RES (24), (25), (26), (27): Xaa is A or G or is absent

SEQ ID NO: 57862 - protein, 37 aa, Artificial Sequence; identical to SEQ ID NO: 8524
  GFR-binding peptide
  MOD_RES (5), (6): Xaa is C or S

SEQ ID NO: 57863 - protein, 39 aa, Artificial Sequence; identical to SEQ ID NO: 8525
  GFR-binding peptide
  MOD_RES (4), (5), (38): Xaa is C or S

SEQ ID NO: 57864 - protein, 37 aa, Artificial Sequence; identical to SEQ ID NO: 7634
  GFR-binding peptide
  MOD_RES (2), (3), (37): Xaa is C or S
  MOD_RES (17), (18), (19), (20), (21): Xaa is A or G
  MOD_RES (22), (23), (24), (25): Xaa is A or G or is absent

SEQ ID NO: 57865 - protein, 41 aa, Artificial Sequence
  GFR-binding peptide
  MOD_RES (6), (7), (41): Xaa is C or S
  MOD_RES (21), (22), (23), (24), (25): Xaa is A or G
  MOD_RES (26), (27), (28), (29): Xaa is A or G or is absent
HVPKPXXAPTKLNAISVLYFXXXXXXXXXLKKYRNMVVRSX

SEQ ID NO: 57866 - protein, 36 aa, Artificial Sequence; identical to SEQ ID NO: 6751
  GFR-binding peptide
  MOD_RES (1), (2), (36): Xaa is C or S
  MOD_RES (16), (17), (18), (19), (20): Xaa is A or G
  MOD_RES (21), (22), (23), (24): Xaa is A or G or is absent

SEQ ID NO: 57867 - protein, 39 aa, Artificial Sequence
  GFR-binding peptide
  MOD_RES (6), (7), (38): Xaa is C or S
RVPSTXXAPVKTNAISMLYFDNGRVLLLKKYRMIVEEXG

SEQ ID NO: 57868 - protein, 38 aa, Artificial Sequence; identical to SEQ ID NO: 7639
  GFR-binding peptide
  MOD_RES (4), (5): Xaa is C or S
  MOD_RES (19), (20), (21), (22), (23): Xaa is A or G
  MOD_RES (24), (25), (26), (27): Xaa is A or G or is absent

SEQ ID NO: 57869 - protein, 41 aa, Artificial Sequence; identical to SEQ ID NO: 7640
  GFR-binding peptide
  MOD_RES (3), (4), (38), (40): Xaa is C or S
  MOD_RES (18), (19), (20), (21), (22): Xaa is A or G
  MOD_RES (23), (24), (25), (26): Xaa is A or G or is absent

SEQ ID NO: 57870 - protein, 38 aa, Artificial Sequence; identical to SEQ ID NO: 14102
  GFR-binding peptide
  MOD_RES (6), (7): Xaa is C or S

SEQ ID NO: 57871 - protein, 40 aa, Artificial Sequence; identical to SEQ ID NO: 7641
  GFR-binding peptide
  MOD_RES (6), (7): Xaa is C or S
  MOD_RES (21), (22), (23), (24), (25): Xaa is A or G
  MOD_RES (26), (27), (28), (29): Xaa is A or G or is absent

SEQ ID NO: 57872 - protein, 42 aa, Artificial Sequence; identical to SEQ ID NO: 7643
  GFR-binding peptide
  MOD_RES (6), (7), (41): Xaa is C or S
  MOD_RES (21), (22), (23), (24), (25): Xaa is A or G
  MOD_RES (26), (27), (28), (29): Xaa is A or G or is absent

SEQ ID NO: 57873 - protein, 41 aa, Artificial Sequence; identical to SEQ ID NO: 16738
  GFR-binding peptide
  MOD_RES (6), (7), (39), (41): Xaa is C or S

SEQ ID NO: 57874 - protein, 38 aa, Artificial Sequence
  GFR-binding peptide
  MOD_RES (5), (6): Xaa is C or S
  MOD_RES (20), (21), (22), (23), (24): Xaa is A or G
  MOD_RES (25), (26), (27), (28): Xaa is A or G or is absent
VPSTXXAPVKTNAISMLYFXXXXXXXXXLKKYRMIVEE

SEQ ID NO: 57875 - protein, 39 aa, Artificial Sequence
  GFR-binding peptide
  MOD_RES (6), (7): Xaa is C or S
  MOD_RES (21), (22), (23), (24), (25): Xaa is A or G
  MOD_RES (26), (27), (28), (29): Xaa is A or G or is absent
GSAGPXXTPTKMNAISMLYFXXXXXXXXXLKKYRGMVVD

SEQ ID NO: 57876 - protein, 41 aa, Artificial Sequence; identical to SEQ ID NO: 7651
  GFR-binding peptide
  MOD_RES (5), (6), (40): Xaa is C or S
  MOD_RES (20), (21), (22), (23), (24): Xaa is A or G
  MOD_RES (25), (26), (27), (28): Xaa is A or G or is absent

SEQ ID NO: 57877 - protein, 36 aa, Artificial Sequence; identical to SEQ ID NO: 29861
  GFR-binding peptide
  MOD_RES (34), (36): Xaa is C or S
  MOD_RES (14), (15), (16), (17), (18): Xaa is A or G
  MOD_RES (19), (20), (21), (22): Xaa is A or G or is absent

SEQ ID NO: 57878 - protein, 41 aa, Artificial Sequence; identical to SEQ ID NO: 9445
  GFR-binding peptide
  MOD_RES (3), (4), (38), (40): Xaa is C or S
  MOD_RES (18), (19), (20), (21), (22): Xaa is A or G
  MOD_RES (23), (24), (25), (26): Xaa is A or G or is absent

SEQ ID NO: 57879 - protein, 32 aa, Artificial Sequence; identical to SEQ ID NO: 8549
  GFR-binding peptide
  MOD_RES (1), (1): Xaa is C or S

SEQ ID NO: 57880 - protein, 38 aa, Artificial Sequence; identical to SEQ ID NO: 29864
  GFR-binding peptide
  MOD_RES (5), (6), (38): Xaa is C or S

SEQ ID NO: 57881 - protein, 36 aa, Artificial Sequence; identical to SEQ ID NO: 14116
  GFR-binding peptide
  MOD_RES (5), (6): Xaa is C or S

SEQ ID NO: 57882 - protein, 39 aa, Artificial Sequence; identical to SEQ ID NO: 9450
  GFR-binding peptide
  MOD_RES (3), (4), (38): Xaa is C or S
  MOD_RES (18), (19), (20), (21), (22): Xaa is A or G
  MOD_RES (23), (24), (25), (26): Xaa is A or G or is absent

SEQ ID NO: 57883 - protein, 37 aa, Artificial Sequence
  GFR-binding peptide
  MOD_RES (3), (4), (35), (37): Xaa is C or S
STXXAPVKTNAISMLYFDNGRVLLLKKYRMIVEEXGX

SEQ ID NO: 57884 - protein, 41 aa, Artificial Sequence; identical to SEQ ID NO: 8556
  GFR-binding peptide
  MOD_RES (6), (7), (41): Xaa is C or S
  MOD_RES (21), (22), (23), (24), (25): Xaa is A or G
  MOD_RES (26), (27), (28), (29): Xaa is A or G or is absent

SEQ ID NO: 57885 - protein, 35 aa, Artificial Sequence; identical to SEQ ID NO: 14123
  GFR-binding peptide
  MOD_RES (34), (34): Xaa is C or S
  MOD_RES (14), (15), (16), (17), (18): Xaa is A or G
  MOD_RES (19), (20), (21), (22): Xaa is A or G or is absent

SEQ ID NO: 57886 - protein, 33 aa, Artificial Sequence; identical to SEQ ID NO: 6769
  GFR-binding peptide
  MOD_RES (1), (1): Xaa is C or S

SEQ ID NO: 57887 - protein, 32 aa, Artificial Sequence; identical to SEQ ID NO: 8558
  GFR-binding peptide
  MOD_RES (1), (1): Xaa is C or S

SEQ ID NO: 57888 - protein, 35 aa, Artificial Sequence; identical to SEQ ID NO: 6770
  GFR-binding peptide
  MOD_RES (2), (3): Xaa is C or S
  MOD_RES (17), (18), (19), (20), (21): Xaa is A or G
  MOD_RES (22), (23), (24), (25): Xaa is A or G or is absent

SEQ ID NO: 57889 - protein, 40 aa, Artificial Sequence
  GFR-binding peptide
  MOD_RES (3), (4), (37), (39): Xaa is C or S
  MOD_RES (18), (19), (20), (21), (22): Xaa is A or G
  MOD_RES (23), (24), (25), (26): Xaa is A or G or is absent
STXXAPVKTNAISMLYFXXXXXXXXXLKKYRMIVEEXGXL

SEQ ID NO: 57890 - protein, 36 aa, Artificial Sequence; identical to SEQ ID NO: 7658
  GFR-binding peptide
  MOD_RES (5), (6): Xaa is C or S

SEQ ID NO: 57891 - protein, 33 aa, Artificial Sequence
  GFR-binding peptide
  MOD_RES (2), (3): Xaa is C or S
TXXAPVKTNAISMLYFDNGRVLLLKKYRMIVEE

SEQ ID NO: 57892 - protein, 40 aa, Artificial Sequence; identical to SEQ ID NO: 6771
  GFR-binding peptide
  MOD_RES (5), (6), (40): Xaa is C or S
  MOD_RES (20), (21), (22), (23), (24): Xaa is A or G
  MOD_RES (25), (26), (27), (28): Xaa is A or G or is absent

SEQ ID NO: 57893 - protein, 37 aa, Artificial Sequence; identical to SEQ ID NO: 8563
  GFR-binding peptide
  MOD_RES (34), (36): Xaa is C or S
  MOD_RES (14), (15), (16), (17), (18): Xaa is A or G
  MOD_RES (19), (20), (21), (22): Xaa is A or G or is absent

SEQ ID NO: 57894 - protein, 36 aa, Artificial Sequence; identical to SEQ ID NO: 8565
  GFR-binding peptide
  MOD_RES (1), (34), (36): Xaa is C or S

SEQ ID NO: 57895 - protein, 39 aa, Artificial Sequence; identical to SEQ ID NO: 6773
  GFR-binding peptide
  MOD_RES (1), (2), (36), (38): Xaa is C or S
  MOD_RES (16), (17), (18), (19), (20): Xaa is A or G
  MOD_RES (21), (22), (23), (24): Xaa is A or G or is absent

SEQ ID NO: 57896 - protein, 39 aa, Artificial Sequence; identical to SEQ ID NO: 27951
  GFR-binding peptide
  MOD_RES (5), (6): Xaa is C or S
  MOD_RES (20), (21), (22), (23), (24): Xaa is A or G
  MOD_RES (25), (26), (27), (28): Xaa is A or G or is absent

SEQ ID NO: 57897 - protein, 40 aa, Artificial Sequence; identical to SEQ ID NO: 8566
  GFR-binding peptide
  MOD_RES (6), (7), (39): Xaa is C or S

SEQ ID NO: 57898 - protein, 43 aa, Artificial Sequence
  GFR-binding peptide
  MOD_RES (5), (6), (40), (42): Xaa is C or S
  MOD_RES (20), (21), (22), (23), (24): Xaa is A or G
  MOD_RES (25), (26), (27), (28): Xaa is A or G or is absent
SAGPXXTPTKMNAISMLYFXXXXXXXXXLKKYRGMVVDRXGXS

SEQ ID NO: 57899 - protein, 36 aa, Artificial Sequence; identical to SEQ ID NO: 9460
  GFR-binding peptide
  MOD_RES (35), (35): Xaa is C or S
  MOD_RES (14), (15), (16), (17), (18): Xaa is A or G
  MOD_RES (19), (20), (21), (22): Xaa is A or G or is absent

SEQ ID NO: 57900 - protein, 36 aa, Artificial Sequence; identical to SEQ ID NO: 27958
  GFR-binding peptide
  MOD_RES (1), (2), (34), (36): Xaa is C or S

SEQ ID NO: 57901 - protein, 35 aa, Artificial Sequence
  GFR-binding peptide
  MOD_RES (1), (35): Xaa is C or S
  MOD_RES (15), (16), (17), (18), (19): Xaa is A or G
  MOD_RES (20), (21), (22), (23): Xaa is A or G or is absent
XTPTKMNAISMLYFXXXXXXXXXLKKYRGMVVDRX

SEQ ID NO: 57902 - protein, 40 aa, Artificial Sequence; identical to SEQ ID NO: 7662
  GFR-binding peptide
  MOD_RES (5), (6): Xaa is C or S
  MOD_RES (20), (21), (22), (23), (24): Xaa is A or G
  MOD_RES (25), (26), (27), (28): Xaa is A or G or is absent

SEQ ID NO: 57903 - protein, 41 aa, Artificial Sequence; identical to SEQ ID NO: 30862
  GFR-binding peptide
  MOD_RES (6), (7), (39), (41): Xaa is C or S

SEQ ID NO: 57904 - protein, 41 aa, Artificial Sequence; identical to SEQ ID NO: 29883
  GFR-binding peptide
  MOD_RES (5), (6), (38), (40): Xaa is C or S

SEQ ID NO: 57905 - protein, 34 aa, Artificial Sequence; identical to SEQ ID NO: 16767
  GFR-binding peptide
  MOD_RES (1), (1): Xaa is C or S
  MOD_RES (15), (16), (17), (18), (19): Xaa is A or G
  MOD_RES (20), (21), (22), (23): Xaa is A or G or is absent

SEQ ID NO: 57906 - protein, 37 aa, Artificial Sequence; identical to SEQ ID NO: 6782
  GFR-binding peptide
  MOD_RES (34), (36): Xaa is C or S
  MOD_RES (14), (15), (16), (17), (18): Xaa is A or G
  MOD_RES (19), (20), (21), (22): Xaa is A or G or is absent

SEQ ID NO: 57907 - protein, 38 aa, Artificial Sequence
  GFR-binding peptide
  MOD_RES (4), (5), (36), (38): Xaa is C or S
PSTXXAPVKTNAISMLYFDNGRVLLLKKYRMIVEEXGX

SEQ ID NO: 57908 - protein, 34 aa, Artificial Sequence; identical to SEQ ID NO: 7671
  GFR-binding peptide
  MOD_RES (32), (34): Xaa is C or S

SEQ ID NO: 57909 - protein, 39 aa, Artificial Sequence; identical to SEQ ID NO: 16772
  GFR-binding peptide
  MOD_RES (6), (7), (39): Xaa is C or S

SEQ ID NO: 57910 - protein, 36 aa, Artificial Sequence; identical to SEQ ID NO: 6787
  GFR-binding peptide
  MOD_RES (2), (3): Xaa is C or S
  MOD_RES (17), (18), (19), (20), (21): Xaa is A or G
  MOD_RES (22), (23), (24), (25): Xaa is A or G or is absent

SEQ ID NO: 57911 - protein, 37 aa, Artificial Sequence; identical to SEQ ID NO: 6789
  GFR-binding peptide
  MOD_RES (4), (5), (37): Xaa is C or S

SEQ ID NO: 57912 - protein, 39 aa, Artificial Sequence; identical to SEQ ID NO: 9472
  GFR-binding peptide
  MOD_RES (2), (36), (38): Xaa is C or S
  MOD_RES (16), (17), (18), (19), (20): Xaa is A or G
  MOD_RES (21), (22), (23), (24): Xaa is A or G or is absent

SEQ ID NO: 57913 - protein, 39 aa, Artificial Sequence; identical to SEQ ID NO: 9475
  GFR-binding peptide
  MOD_RES (5), (6), (38): Xaa is C or S

SEQ ID NO: 57914 - protein, 36 aa, Artificial Sequence; identical to SEQ ID NO: 7673
  GFR-binding peptide
  MOD_RES (2), (3), (35): Xaa is C or S

SEQ ID NO: 57915 - protein, 41 aa, Artificial Sequence; identical to SEQ ID NO: 8571
  GFR-binding peptide
  MOD_RES (6), (7), (39), (41): Xaa is C or S

SEQ ID NO: 57916 - protein, 40 aa, Artificial Sequence; identical to SEQ ID NO: 8573
  GFR-binding peptide
  MOD_RES (4), (5), (37), (39): Xaa is C or S

SEQ ID NO: 57917 - protein, 34 aa, Artificial Sequence
  GFR-binding peptide
  MOD_RES (33), (33): Xaa is C or S
  MOD_RES (14), (15), (16), (17), (18): Xaa is A or G
  MOD_RES (19), (20), (21), (22): Xaa is A or G or is absent
APVKTNAISMLYFXXXXXXXXXLKKYRMIVEEXG

SEQ ID NO: 57918 - protein, 37 aa, Artificial Sequence
  GFR-binding peptide
  MOD_RES (5), (6), (37): Xaa is C or S
VPSTXXAPVKTNAISMLYFDNGRVLLLKKYRMIVEEX

SEQ ID NO: 57919 - protein, 32 aa, Artificial Sequence; identical to SEQ ID NO: 28970
  GFR-binding peptide
  MOD_RES (32), (32): Xaa is C or S

SEQ ID NO: 57920 - protein, 34 aa, Artificial Sequence; identical to SEQ ID NO: 6797
  GFR-binding peptide
  MOD_RES (34), (34): Xaa is C or S
  MOD_RES (14), (15), (16), (17), (18): Xaa is A or G
  MOD_RES (19), (20), (21), (22): Xaa is A or G or is absent

SEQ ID NO: 57921 - protein, 37 aa, Artificial Sequence; identical to SEQ ID NO: 9479
  GFR-binding peptide
  MOD_RES (5), (6): Xaa is C or S

SEQ ID NO: 57922 - protein, 37 aa, Artificial Sequence; identical to SEQ ID NO: 30885
  GFR-binding peptide
  MOD_RES (5), (6): Xaa is C or S

SEQ ID NO: 57923 - protein, 39 aa, Artificial Sequence; identical to SEQ ID NO: 8580
  GFR-binding peptide
  MOD_RES (3), (4), (36), (38): Xaa is C or S

SEQ ID NO: 57924 - protein, 39 aa, Artificial Sequence; identical to SEQ ID NO: 6800
  GFR-binding peptide
  MOD_RES (4), (38): Xaa is C or S
  MOD_RES (18), (19), (20), (21), (22): Xaa is A or G
  MOD_RES (23), (24), (25), (26): Xaa is A or G or is absent

SEQ ID NO: 57925 - protein, 41 aa, Artificial Sequence; identical to SEQ ID NO: 9485
  GFR-binding peptide
  MOD_RES (3), (4), (38), (40): Xaa is C or S
  MOD_RES (18), (19), (20), (21), (22): Xaa is A or G
  MOD_RES (23), (24), (25), (26): Xaa is A or G or is absent

SEQ ID NO: 57926 - protein, 37 aa, Artificial Sequence; identical to SEQ ID NO: 9486
  GFR-binding peptide
  MOD_RES (6), (7): Xaa is C or S

SEQ ID NO: 57927 - protein, 35 aa, Artificial Sequence; identical to SEQ ID NO: 8583
  GFR-binding peptide
  MOD_RES (1), (35): Xaa is C or S
  MOD_RES (15), (16), (17), (18), (19): Xaa is A or G
  MOD_RES (20), (21), (22), (23): Xaa is A or G or is absent

SEQ ID NO: 57928 - protein, 37 aa, Artificial Sequence; identical to SEQ ID NO: 7680
  GFR-binding peptide
  MOD_RES (1), (35), (37): Xaa is C or S
  MOD_RES (15), (16), (17), (18), (19): Xaa is A or G
  MOD_RES (20), (21), (22), (23): Xaa is A or G or is absent

SEQ ID NO: 57929 - protein, 37 aa, Artificial Sequence; identical to SEQ ID NO: 30891
  GFR-binding peptide
  MOD_RES (4), (5): Xaa is C or S
  MOD_RES (19), (20), (21), (22), (23): Xaa is A or G
  MOD_RES (24), (25), (26), (27): Xaa is A or G or is absent

SEQ ID NO: 57930 - protein, 40 aa, Artificial Sequence; identical to SEQ ID NO: 9492
  GFR-binding peptide
  MOD_RES (2), (3), (37), (39): Xaa is C or S
  MOD_RES (17), (18), (19), (20), (21): Xaa is A or G
  MOD_RES (22), (23), (24), (25): Xaa is A or G or is absent

SEQ ID NO: 57931 - protein, 41 aa, Artificial Sequence
  GFR-binding peptide
  MOD_RES (5), (6), (38), (40): Xaa is C or S
SAGPXXTPTKMNAISMLYFNDKQQIILKKYRGMVVDRXGXS

SEQ ID NO: 57932 - protein, 33 aa, Artificial Sequence
  GFR-binding peptide
  MOD_RES (32), (32): Xaa is C or S
TPTKMNAISMLYFNDKQQIILKKYRGMVVDRXG

SEQ ID NO: 57933 - protein, 37 aa, Artificial Sequence
  GFR-binding peptide
  MOD_RES (5), (6): Xaa is C or S
SAGPXXTPTKMNAISMLYFNDKQQIILKKYRGMVVDR

SEQ ID NO: 57934 - protein, 41 aa, Artificial Sequence; identical to SEQ ID NO: 14986
  GFR-binding peptide
  MOD_RES (3), (4), (38), (40): Xaa is C or S
  MOD_RES (18), (19), (20), (21), (22): Xaa is A or G
  MOD_RES (23), (24), (25), (26): Xaa is A or G or is absent

SEQ ID NO: 57935 - protein, 40 aa, Artificial Sequence; identical to SEQ ID NO: 7686
  GFR-binding peptide
  MOD_RES (5), (6), (39): Xaa is C or S

SEQ ID NO: 57936 - protein, 32 aa, Artificial Sequence; identical to SEQ ID NO: 9495
  GFR-binding peptide
  MOD_RES (1), (2): Xaa is C or S

SEQ ID NO: 57937 - protein, 43 aa, Artificial Sequence; identical to SEQ ID NO: 7693
  GFR-binding peptide
  MOD_RES (6), (40), (42): Xaa is C or S
  MOD_RES (20), (21), (22), (23), (24): Xaa is A or G
  MOD_RES (25), (26), (27), (28): Xaa is A or G or is absent

SEQ ID NO: 57938 - protein, 34 aa, Artificial Sequence; identical to SEQ ID NO: 9499
  GFR-binding peptide
  MOD_RES (34), (34): Xaa is C or S
  MOD_RES (14), (15), (16), (17), (18): Xaa is A or G
  MOD_RES (19), (20), (21), (22): Xaa is A or G or is absent

SEQ ID NO: 57939 - protein, 37 aa, Artificial Sequence; identical to SEQ ID NO: 29922
  GFR-binding peptide
  MOD_RES (4), (5), (37): Xaa is C or S

SEQ ID NO: 57940 - protein, 38 aa, Artificial Sequence; identical to SEQ ID NO: 7698
  GFR-binding peptide
  MOD_RES (5), (6): Xaa is C or S
  MOD_RES (20), (21), (22), (23), (24): Xaa is A or G
  MOD_RES (25), (26), (27), (28): Xaa is A or G or is absent

SEQ ID NO: 57941 - protein, 35 aa, Artificial Sequence; identical to SEQ ID NO: 9506
  GFR-binding peptide
  MOD_RES (1), (2), (34): Xaa is C or S

SEQ ID NO: 57942 - protein, 32 aa, Artificial Sequence
  GFR-binding peptide
  MOD_RES (31), (31): Xaa is C or S
APVKTNAISMLYFDNGRVLLLKKYRMIVEEXG

SEQ ID NO: 57943 - protein, 41 aa, Artificial Sequence; identical to SEQ ID NO: 7699
  GFR-binding peptide
  MOD_RES (6), (40): Xaa is C or S
  MOD_RES (20), (21), (22), (23), (24): Xaa is A or G
  MOD_RES (25), (26), (27), (28): Xaa is A or G or is absent

SEQ ID NO: 57944 - protein, 36 aa, Artificial Sequence; identical to SEQ ID NO: 9507
  GFR-binding peptide
  MOD_RES (1), (33), (35): Xaa is C or S

SEQ ID NO: 57945 - protein, 35 aa, Artificial Sequence; identical to SEQ ID NO: 7701
  GFR-binding peptide
  MOD_RES (2), (3), (35): Xaa is C or S

SEQ ID NO: 57946 - protein, 35 aa, Artificial Sequence; identical to SEQ ID NO: 7702
  GFR-binding peptide
  MOD_RES (2), (3): Xaa is C or S
  MOD_RES (17), (18), (19), (20), (21): Xaa is A or G
  MOD_RES (22), (23), (24), (25): Xaa is A or G or is absent

SEQ ID NO: 57947 - protein, 36 aa, Artificial Sequence; identical to SEQ ID NO: 28000
  GFR-binding peptide
  MOD_RES (2), (3): Xaa is C or S
  MOD_RES (17), (18), (19), (20), (21): Xaa is A or G
  MOD_RES (22), (23), (24), (25): Xaa is A or G or is absent

SEQ ID NO: 57948 - protein, 36 aa, Artificial Sequence; identical to SEQ ID NO: 28997
  GFR-binding peptide
  MOD_RES (1), (33), (35): Xaa is C or S

SEQ ID NO: 57949 - protein, 35 aa, Artificial Sequence; identical to SEQ ID NO: 29932
  GFR-binding peptide
  MOD_RES (1), (35): Xaa is C or S
  MOD_RES (15), (16), (17), (18), (19): Xaa is A or G
  MOD_RES (20), (21), (22), (23): Xaa is A or G or is absent

SEQ ID NO: 57950 - protein, 36 aa, Artificial Sequence; identical to SEQ ID NO: 14167
  GFR-binding peptide
  MOD_RES (4), (5): Xaa is C or S

SEQ ID NO: 57951 - protein, 35 aa, Artificial Sequence; identical to SEQ ID NO: 15003
  GFR-binding peptide
  MOD_RES (3), (4): Xaa is C or S

SEQ ID NO: 57952 - protein, 41 aa, Artificial Sequence; identical to SEQ ID NO: 16810
  GFR-binding peptide
  MOD_RES (4), (5), (39), (41): Xaa is C or S
  MOD_RES (19), (20), (21), (22), (23): Xaa is A or G
  MOD_RES (24), (25), (26), (27): Xaa is A or G or is absent

SEQ ID NO: 57953 - protein, 42 aa, Artificial Sequence
  GFR-binding peptide
  MOD_RES (5), (6), (40), (42): Xaa is C or S
  MOD_RES (20), (21), (22), (23), (24): Xaa is A or G
  MOD_RES (25), (26), (27), (28): Xaa is A or G or is absent
SAGPXXTPTKMNAISMLYFXXXXXXXXXLKKYRGMVVDRXGX

SEQ ID NO: 57954 - protein, 40 aa, Artificial Sequence
  GFR-binding peptide
  MOD_RES (6), (7), (40): Xaa is C or S
  MOD_RES (21), (22), (23), (24), (25): Xaa is A or G
  MOD_RES (26), (27), (28), (29): Xaa is A or G or is absent
RVPSTXXAPVKTNAISMLYFXXXXXXXXXLKKYRMIVEEX

SEQ ID NO: 57955 - protein, 44 aa, Artificial Sequence; identical to SEQ ID NO: 29939
  GFR-binding peptide
  MOD_RES (6), (7), (41), (43): Xaa is C or S
  MOD_RES (21), (22), (23), (24), (25): Xaa is A or G
  MOD_RES (26), (27), (28), (29): Xaa is A or G or is absent

SEQ ID NO: 57956 - protein, 39 aa, Artificial Sequence; identical to SEQ ID NO: 29009
  GFR-binding peptide
  MOD_RES (5), (6): Xaa is C or S
  MOD_RES (20), (21), (22), (23), (24): Xaa is A or G
  MOD_RES (25), (26), (27), (28): Xaa is A or G or is absent

SEQ ID NO: 57957 - protein, 40 aa, Artificial Sequence; identical to SEQ ID NO: 6834
  GFR-binding peptide
  MOD_RES (5), (6), (40): Xaa is C or S
  MOD_RES (20), (21), (22), (23), (24): Xaa is A or G
  MOD_RES (25), (26), (27), (28): Xaa is A or G or is absent

SEQ ID NO: 57958 - protein, 42 aa, Artificial Sequence; identical to SEQ ID NO: 9522
  GFR-binding peptide
  MOD_RES (4), (5), (39), (41): Xaa is C or S
  MOD_RES (19), (20), (21), (22), (23): Xaa is A or G
  MOD_RES (24), (25), (26), (27): Xaa is A or G or is absent

SEQ ID NO: 57959 - protein, 39 aa, Artificial Sequence; identical to SEQ ID NO: 8615
  GFR-binding peptide
  MOD_RES (1), (2), (36), (38): Xaa is C or S
  MOD_RES (16), (17), (18), (19), (20): Xaa is A or G
  MOD_RES (21), (22), (23), (24): Xaa is A or G or is absent

SEQ ID NO: 57960 - protein, 36 aa, Artificial Sequence; identical to SEQ ID NO: 14179
  GFR-binding peptide
  MOD_RES (1), (2), (36): Xaa is C or S
  MOD_RES (16), (17), (18), (19), (20): Xaa is A or G
  MOD_RES (21), (22), (23), (24): Xaa is A or G or is absent

SEQ ID NO: 57961 - protein, 36 aa, Artificial Sequence
  GFR-binding peptide
  MOD_RES (2), (3), (35): Xaa is C or S
PXXTPTKMNAISMLYFNDKQQIILKKYRGMVVDRXG

SEQ ID NO: 57962 - protein, 37 aa, Artificial Sequence; identical to SEQ ID NO: 29954
  GFR-binding peptide
  MOD_RES (4), (5): Xaa is C or S
  MOD_RES (19), (20), (21), (22), (23): Xaa is A or G
  MOD_RES (24), (25), (26), (27): Xaa is A or G or is absent

SEQ ID NO: 57963 - protein, 34 aa, Artificial Sequence; identical to SEQ ID NO: 14180
  GFR-binding peptide
  MOD_RES (1), (2): Xaa is C or S
  MOD_RES (16), (17), (18), (19), (20): Xaa is A or G
  MOD_RES (21), (22), (23), (24): Xaa is A or G or is absent

SEQ ID NO: 57964 - protein, 37 aa, Artificial Sequence; identical to SEQ ID NO: 30922
  GFR-binding peptide
  MOD_RES (1), (2), (34), (36): Xaa is C or S

SEQ ID NO: 57965 - protein, 39 aa, Artificial Sequence; identical to SEQ ID NO: 7720
  GFR-binding peptide
  MOD_RES (3), (4), (38): Xaa is C or S
  MOD_RES (18), (19), (20), (21), (22): Xaa is A or G
  MOD_RES (23), (24), (25), (26): Xaa is A or G or is absent

SEQ ID NO: 57966 - protein, 34 aa, Artificial Sequence; identical to SEQ ID NO: 7721
  GFR-binding peptide
  MOD_RES (32), (34): Xaa is C or S

SEQ ID NO: 57967 - protein, 40 aa, Artificial Sequence; identical to SEQ ID NO: 9532
  GFR-binding peptide
  MOD_RES (2), (3), (37), (39): Xaa is C or S
  MOD_RES (17), (18), (19), (20), (21): Xaa is A or G
  MOD_RES (22), (23), (24), (25): Xaa is A or G or is absent

SEQ ID NO: 57968 - protein, 37 aa, Artificial Sequence; identical to SEQ ID NO: 28022
  GFR-binding peptide
  MOD_RES (3), (4), (36): Xaa is C or S

SEQ ID NO: 57969 - protein, 37 aa, Artificial Sequence
  GFR-binding peptide
  MOD_RES (1), (34), (36): Xaa is C or S
  MOD_RES (15), (16), (17), (18), (19): Xaa is A or G
  MOD_RES (20), (21), (22), (23): Xaa is A or G or is absent
XAPVKTNAISMLYFXXXXXXXXXLKKYRMIVEEXGXL

SEQ ID NO: 57970 - protein, 38 aa, Artificial Sequence; identical to SEQ ID NO: 29961
  GFR-binding peptide
  MOD_RES (1), (35), (37): Xaa is C or S
  MOD_RES (15), (16), (17), (18), (19): Xaa is A or G
  MOD_RES (20), (21), (22), (23): Xaa is A or G or is absent

SEQ ID NO: 57971 - protein, 39 aa, Artificial Sequence; identical to SEQ ID NO: 7726
  GFR-binding peptide
  MOD_RES (3), (4), (36), (38): Xaa is C or S

SEQ ID NO: 57972 - protein, 38 aa, Artificial Sequence; identical to SEQ ID NO: 9536
  GFR-binding peptide
  MOD_RES (6), (7): Xaa is C or S

SEQ ID NO: 57973 - protein, 39 aa, Artificial Sequence; identical to SEQ ID NO: 9537
  GFR-binding peptide
  MOD_RES (5), (6): Xaa is C or S
  MOD_RES (20), (21), (22), (23), (24): Xaa is A or G
  MOD_RES (25), (26), (27), (28): Xaa is A or G or is absent

SEQ ID NO: 57974 - protein, 40 aa, Artificial Sequence
  GFR-binding peptide
  MOD_RES (5), (6), (37), (39): Xaa is C or S
VPSTXXAPVKTNAISMLYFDNGRVLLLKKYRMIVEEXGXL

SEQ ID NO: 57975 - protein, 37 aa, Artificial Sequence; identical to SEQ ID NO: 15027
  GFR-binding peptide
  MOD_RES (34), (36): Xaa is C or S
  MOD_RES (14), (15), (16), (17), (18): Xaa is A or G
  MOD_RES (19), (20), (21), (22): Xaa is A or G or is absent

SEQ ID NO: 57976 - protein, 38 aa, Artificial Sequence
  GFR-binding peptide
  MOD_RES (1), (35), (37): Xaa is C or S
  MOD_RES (15), (16), (17), (18), (19): Xaa is A or G
  MOD_RES (20), (21), (22), (23): Xaa is A or G or is absent
XTPTKMNAISMLYFXXXXXXXXXLKKYRGMVVDRXGXS

SEQ ID NO: 57977 - protein, 38 aa, Artificial Sequence; identical to SEQ ID NO: 8628
  GFR-binding peptide
  MOD_RES (1), (36), (38): Xaa is C or S
  MOD_RES (15), (16), (17), (18), (19): Xaa is A or G
  MOD_RES (20), (21), (22), (23): Xaa is A or G or is absent

SEQ ID NO: 57978 - protein, 36 aa, Artificial Sequence; identical to SEQ ID NO: 8629
  GFR-binding peptide
  MOD_RES (34), (36): Xaa is C or S
  MOD_RES (14), (15), (16), (17), (18): Xaa is A or G
  MOD_RES (19), (20), (21), (22): Xaa is A or G or is absent

SEQ ID NO: 57979 - protein, 40 aa, Artificial Sequence; identical to SEQ ID NO: 9541
  GFR-binding peptide
  MOD_RES (4), (5), (39): Xaa is C or S
  MOD_RES (19), (20), (21), (22), (23): Xaa is A or G
  MOD_RES (24), (25), (26), (27): Xaa is A or G or is absent

SEQ ID NO: 57980 - protein, 38 aa, Artificial Sequence; identical to SEQ ID NO: 29032
  GFR-binding peptide
  MOD_RES (4), (5): Xaa is C or S
  MOD_RES (19), (20), (21), (22), (23): Xaa is A or G
  MOD_RES (24), (25), (26), (27): Xaa is A or G or is absent

SEQ ID NO: 57981 - protein, 33 aa, Artificial Sequence; identical to SEQ ID NO: 6857
  GFR-binding peptide
  MOD_RES (32), (32): Xaa is C or S

SEQ ID NO: 57982 - protein, 41 aa, Artificial Sequence; identical to SEQ ID NO: 15038
  GFR-binding peptide
  MOD_RES (6), (7), (41): Xaa is C or S
  MOD_RES (21), (22), (23), (24), (25): Xaa is A or G
  MOD_RES (26), (27), (28), (29): Xaa is A or G or is absent

SEQ ID NO: 57983 - protein, 35 aa, Artificial Sequence; identical to SEQ ID NO: 30937
  GFR-binding peptide
  MOD_RES (1), (2), (34): Xaa is C or S

SEQ ID NO: 57984 - protein, 37 aa, Artificial Sequence; identical to SEQ ID NO: 9548
  GFR-binding peptide
  MOD_RES (1), (2), (35), (37): Xaa is C or S

SEQ ID NO: 57985 - protein, 39 aa, Artificial Sequence
  GFR-binding peptide
  MOD_RES (6), (7): Xaa is C or S
  MOD_RES (21), (22), (23), (24), (25): Xaa is A or G
  MOD_RES (26), (27), (28), (29): Xaa is A or G or is absent
RVPSTXXAPVKTNAISMLYFXXXXXXXXXLKKYRMIVEE

SEQ ID NO: 57986 - protein, 36 aa, Artificial Sequence; identical to SEQ ID NO: 16846
  GFR-binding peptide
  MOD_RES (3), (4), (36): Xaa is C or S

SEQ ID NO: 57987 - protein, 40 aa, Artificial Sequence; identical to SEQ ID NO: 9553
  GFR-binding peptide
  MOD_RES (6), (7), (40): Xaa is C or S

SEQ ID NO: 57988 - protein, 37 aa, Artificial Sequence; identical to SEQ ID NO: 9555
  GFR-binding peptide
  MOD_RES (1), (2), (37): Xaa is C or S
  MOD_RES (16), (17), (18), (19), (20): Xaa is A or G
  MOD_RES (21), (22), (23), (24): Xaa is A or G or is absent

SEQ ID NO: 57989 - protein, 32 aa, Artificial Sequence; identical to SEQ ID NO: 9556
  GFR-binding peptide
  MOD_RES (1), (1): Xaa is C or S

SEQ ID NO: 57990 - protein, 40 aa, Artificial Sequence; identical to SEQ ID NO: 15943
  GFR-binding peptide
  MOD_RES (4), (5), (39): Xaa is C or S
  MOD_RES (19), (20), (21), (22), (23): Xaa is A or G
  MOD_RES (24), (25), (26), (27): Xaa is A or G or is absent

SEQ ID NO: 57991 - protein, 39 aa, Artificial Sequence
  GFR-binding peptide
  MOD_RES (5), (6), (38): Xaa is C or S
SAGPXXTPTKMNAISMLYFNDKQQIILKKYRGMVVDRXG

SEQ ID NO: 57992 - protein, 37 aa, Artificial Sequence; identical to SEQ ID NO: 8647
  GFR-binding peptide
  MOD_RES (3), (4), (36): Xaa is C or S

SEQ ID NO: 57993 - protein, 41 aa, Artificial Sequence; identical to SEQ ID NO: 7748
  GFR-binding peptide
  MOD_RES (4), (5), (39), (41): Xaa is C or S
  MOD_RES (19), (20), (21), (22), (23): Xaa is A or G
  MOD_RES (24), (25), (26), (27): Xaa is A or G or is absent

SEQ ID NO: 57994 - protein, 33 aa, Artificial Sequence
  GFR-binding peptide
  MOD_RES (33), (33): Xaa is C or S
  MOD_RES (14), (15), (16), (17), (18): Xaa is A or G
  MOD_RES (19), (20), (21), (22): Xaa is A or G or is absent
APVKTNAISMLYFXXXXXXXXXLKKYRMIVEEX

SEQ ID NO: 57995 - protein, 39 aa, Artificial Sequence
  GFR-binding peptide
  MOD_RES (5), (6), (37), (39): Xaa is C or S
VPSTXXAPVKTNAISMLYFDNGRVLLLKKYRMIVEEXGX

SEQ ID NO: 57996 - protein, 36 aa, Artificial Sequence; identical to SEQ ID NO: 28049
  GFR-binding peptide
  MOD_RES (1), (2), (36): Xaa is C or S
  MOD_RES (16), (17), (18), (19), (20): Xaa is A or G
  MOD_RES (21), (22), (23), (24): Xaa is A or G or is absent

SEQ ID NO: 57997 - protein, 41 aa, Artificial Sequence
  GFR-binding peptide
  MOD_RES (6), (7), (41): Xaa is C or S
  MOD_RES (21), (22), (23), (24), (25): Xaa is A or G
  MOD_RES (26), (27), (28), (29): Xaa is A or G or is absent
GSAGPXXTPTKMNAISMLYFXXXXXXXXXLKKYRGMVVDRX

SEQ ID NO: 57998 - protein, 35 aa, Artificial Sequence; identical to SEQ ID NO: 15950
  GFR-binding peptide
  MOD_RES (1), (2), (34): Xaa is C or S

SEQ ID NO: 57999 - protein, 43 aa, Artificial Sequence; identical to SEQ ID NO: 16861
  GFR-binding peptide
  MOD_RES (5), (6), (40), (42): Xaa is C or S
  MOD_RES (20), (21), (22), (23), (24): Xaa is A or G
  MOD_RES (25), (26), (27), (28): Xaa is A or G or is absent

SEQ ID NO: 58000 - protein, 38 aa, Artificial Sequence; identical to SEQ ID NO: 8656
  GFR-binding peptide
  MOD_RES (4), (5): Xaa is C or S
  MOD_RES (19), (20), (21), (22), (23): Xaa is A or G
  MOD_RES (24), (25), (26), (27): Xaa is A or G or is absent

SEQ ID NO: 58001 - protein, 37 aa, Artificial Sequence
  GFR-binding peptide
  MOD_RES (34), (36): Xaa is C or S
  MOD_RES (14), (15), (16), (17), (18): Xaa is A or G
  MOD_RES (19), (20), (21), (22): Xaa is A or G or is absent
TPTKMNAISMLYFXXXXXXXXXLKKYRGMVVDRXGXS

SEQ ID NO: 58002 - protein, 35 aa, Artificial Sequence
  GFR-binding peptide
  MOD_RES (2), (3), (35): Xaa is C or S
PXXTPTKMNAISMLYFNDKQQIILKKYRGMVVDRX

SEQ ID NO: 58003 - protein, 42 aa, Artificial Sequence; identical to SEQ ID NO: 29060
  GFR-binding peptide
  MOD_RES (6), (7), (39), (41): Xaa is C or S

SEQ ID NO: 58004 - protein, 35 aa, Artificial Sequence; identical to SEQ ID NO: 6879
  GFR-binding peptide
  MOD_RES (3), (3): Xaa is C or S
  MOD_RES (17), (18), (19), (20), (21): Xaa is A or G
  MOD_RES (22), (23), (24), (25): Xaa is A or G or is absent

SEQ ID NO: 58005 - protein, 36 aa, Artificial Sequence; identical to SEQ ID NO: 30005
  GFR-binding peptide
  MOD_RES (2), (3): Xaa is C or S
  MOD_RES (17), (18), (19), (20), (21): Xaa is A or G
  MOD_RES (22), (23), (24), (25): Xaa is A or G or is absent

SEQ ID NO: 58006 - protein, 43 aa, Artificial Sequence; identical to SEQ ID NO: 8670
  GFR-binding peptide
  MOD_RES (6), (7), (41), (43): Xaa is C or S
  MOD_RES (21), (22), (23), (24), (25): Xaa is A or G
  MOD_RES (26), (27), (28), (29): Xaa is A or G or is absent

SEQ ID NO: 58007 - protein, 35 aa, Artificial Sequence
  GFR-binding peptide
  MOD_RES (2), (3), (34): Xaa is C or S
TXXAPVKTNAISMLYFDNGRVLLLKKYRMIVEEXG

SEQ ID NO: 58008 - protein, 38 aa, Artificial Sequence; identical to SEQ ID NO: 16870
  GFR-binding peptide
  MOD_RES (5), (6), (38): Xaa is C or S

SEQ ID NO: 58009 - protein, 35 aa, Artificial Sequence; identical to SEQ ID NO: 6886
  GFR-binding peptide
  MOD_RES (3), (4): Xaa is C or S

SEQ ID NO: 58010 - protein, 38 aa, Artificial Sequence; identical to SEQ ID NO: 30971
  GFR-binding peptide
  MOD_RES (3), (4), (38): Xaa is C or S
  MOD_RES (18), (19), (20), (21), (22): Xaa is A or G
  MOD_RES (23), (24), (25), (26): Xaa is A or G or is absent

SEQ ID NO: 58011 - protein, 38 aa, Artificial Sequence; identical to SEQ ID NO: 9577
  GFR-binding peptide
  MOD_RES (4), (5), (37): Xaa is C or S

SEQ ID NO: 58012 - protein, 38 aa, Artificial Sequence; identical to SEQ ID NO: 8673
  GFR-binding peptide
  MOD_RES (2), (3), (37): Xaa is C or S
  MOD_RES (17), (18), (19), (20), (21): Xaa is A or G
  MOD_RES (22), (23), (24), (25): Xaa is A or G or is absent

SEQ ID NO: 58013 - protein, 34 aa, Artificial Sequence; identical to SEQ ID NO: 9579
  GFR-binding peptide
  MOD_RES (3), (4): Xaa is C or S

SEQ ID NO: 58014 - protein, 41 aa, Artificial Sequence; identical to SEQ ID NO: 9580
  GFR-binding peptide
  MOD_RES (6), (7), (41): Xaa is C or S
  MOD_RES (21), (22), (23), (24), (25): Xaa is A or G
  MOD_RES (26), (27), (28), (29): Xaa is A or G or is absent

SEQ ID NO: 58015 - protein, 37 aa, Artificial Sequence; identical to SEQ ID NO: 9581
  GFR-binding peptide
  MOD_RES (4), (5): Xaa is C or S
  MOD_RES (19), (20), (21), (22), (23): Xaa is A or G
  MOD_RES (24), (25), (26), (27): Xaa is A or G or is absent

SEQ ID NO: 58016 - protein, 32 aa, Artificial Sequence
  GFR-binding peptide
  MOD_RES (1), (32): Xaa is C or S
XAPVKTNAISMLYFDNGRVLLLKKYRMIVEEX

SEQ ID NO: 58017 - protein, 39 aa, Artificial Sequence; identical to SEQ ID NO: 29070
  GFR-binding peptide
  MOD_RES (5), (6), (38): Xaa is C or S

SEQ ID NO: 58018 - protein, 36 aa, Artificial Sequence
  GFR-binding peptide
  MOD_RES (1), (35): Xaa is C or S
  MOD_RES (15), (16), (17), (18), (19): Xaa is A or G
  MOD_RES (20), (21), (22), (23): Xaa is A or G or is absent
XTPTKMNAISMLYFXXXXXXXXXLKKYRGMVVDRXG

SEQ ID NO: 58019 - protein, 39 aa, Artificial Sequence; identical to SEQ ID NO: 9585
  GFR-binding peptide
  MOD_RES (5), (6), (39): Xaa is C or S

SEQ ID NO: 58020 - protein, 38 aa, Artificial Sequence; identical to SEQ ID NO: 30015
  GFR-binding peptide
  MOD_RES (4), (5): Xaa is C or S
  MOD_RES (19), (20), (21), (22), (23): Xaa is A or G
  MOD_RES (24), (25), (26), (27): Xaa is A or G or is absent

SEQ ID NO: 58021 - protein, 36 aa, Artificial Sequence; identical to SEQ ID NO: 8677
  GFR-binding peptide
  MOD_RES (1), (2): Xaa is C or S
  MOD_RES (16), (17), (18), (19), (20): Xaa is A or G
  MOD_RES (21), (22), (23), (24): Xaa is A or G or is absent

SEQ ID NO: 58022 - protein, 40 aa, Artificial Sequence; identical to SEQ ID NO: 9593
  GFR-binding peptide
  MOD_RES (5), (6), (40): Xaa is C or S
  MOD_RES (20), (21), (22), (23), (24): Xaa is A or G
  MOD_RES (25), (26), (27), (28): Xaa is A or G or is absent

SEQ ID NO: 58023 - protein, 35 aa, Artificial Sequence; identical to SEQ ID NO: 28082
  GFR-binding peptide
  MOD_RES (3), (4): Xaa is C or S

SEQ ID NO: 58024 - protein, 40 aa, Artificial Sequence; identical to SEQ ID NO: 9594
  GFR-binding peptide
  MOD_RES (6), (40): Xaa is C or S
  MOD_RES (20), (21), (22), (23), (24): Xaa is A or G
  MOD_RES (25), (26), (27), (28): Xaa is A or G or is absent

SEQ ID NO: 58025 - protein, 41 aa, Artificial Sequence; identical to SEQ ID NO: 7774
  GFR-binding peptide
  MOD_RES (2), (3), (38), (40): Xaa is C or S
  MOD_RES (17), (18), (19), (20), (21): Xaa is A or G
  MOD_RES (22), (23), (24), (25): Xaa is A or G or is absent

SEQ ID NO: 58026 - protein, 39 aa, Artificial Sequence; identical to SEQ ID NO: 15982
  GFR-binding peptide
  MOD_RES (3), (4), (38): Xaa is C or S
  MOD_RES (18), (19), (20), (21), (22): Xaa is A or G
  MOD_RES (23), (24), (25), (26): Xaa is A or G or is absent

SEQ ID NO: 58027 - protein, 37 aa, Artificial Sequence; identical to SEQ ID NO: 30992
  GFR-binding peptide
  MOD_RES (2), (3), (35), (37): Xaa is C or S

SEQ ID NO: 58028 - protein, 36 aa, Artificial Sequence; identical to SEQ ID NO: 7775
  GFR-binding peptide
  MOD_RES (2), (3), (35): Xaa is C or S

SEQ ID NO: 58029 - protein, 37 aa, Artificial Sequence; identical to SEQ ID NO: 6901
  GFR-binding peptide
  MOD_RES (3), (4): Xaa is C or S
  MOD_RES (18), (19), (20), (21), (22): Xaa is A or G
  MOD_RES (23), (24), (25), (26): Xaa is A or G or is absent

SEQ ID NO: 58030 - protein, 40 aa, Artificial Sequence; identical to SEQ ID NO: 6902
  GFR-binding peptide
  MOD_RES (2), (3), (37), (39): Xaa is C or S
  MOD_RES (17), (18), (19), (20), (21): Xaa is A or G
  MOD_RES (22), (23), (24), (25): Xaa is A or G or is absent

SEQ ID NO: 58031 - protein, 41 aa, Artificial Sequence; identical to SEQ ID NO: 29077
  GFR-binding peptide
  MOD_RES (3), (4), (38), (40): Xaa is C or S
  MOD_RES (18), (19), (20), (21), (22): Xaa is A or G
  MOD_RES (23), (24), (25), (26): Xaa is A or G or is absent

SEQ ID NO: 58032 - protein, 39 aa, Artificial Sequence; identical to SEQ ID NO: 15985
  GFR-binding peptide
  MOD_RES (4), (5), (37), (39): Xaa is C or S

SEQ ID NO: 58033 - protein, 42 aa, Artificial Sequence
  GFR-binding peptide
  MOD_RES (6), (7), (40), (42): Xaa is C or S
  MOD_RES (21), (22), (23), (24), (25): Xaa is A or G
  MOD_RES (26), (27), (28), (29): Xaa is A or G or is absent
RVPSTXXAPVKTNAISMLYFXXXXXXXXXLKKYRMIVEEXGX

SEQ ID NO: 58034 - protein, 32 aa, Artificial Sequence; identical to SEQ ID NO: 6905
  GFR-binding peptide
  MOD_RES (14), (15), (16), (17), (18): Xaa is A or G
  MOD_RES (19), (20), (21), (22): Xaa is A or G or is absent

SEQ ID NO: 58035 - protein, 39 aa, Artificial Sequence; identical to SEQ ID NO: 7781
  GFR-binding peptide
  MOD_RES (4), (5), (39): Xaa is C or S
  MOD_RES (19), (20), (21), (22), (23): Xaa is A or G
  MOD_RES (24), (25), (26), (27): Xaa is A or G or is absent

SEQ ID NO: 58036 - protein, 39 aa, Artificial Sequence; identical to SEQ ID NO: 15087
  GFR-binding peptide
  MOD_RES (3), (4), (36), (38): Xaa is C or S

SEQ ID NO: 58037 - protein, 35 aa, Artificial Sequence
  GFR-binding peptide
  MOD_RES (1), (32), (34): Xaa is C or S
XAPVKTNAISMLYFDNGRVLLLKKYRMIVEEXGXL

SEQ ID NO: 58038 - protein, 33 aa, Artificial Sequence; identical to SEQ ID NO: 30998
  GFR-binding peptide
  MOD_RES (32), (32): Xaa is C or S

SEQ ID NO: 58039 - protein, 41 aa, Artificial Sequence
  GFR-binding peptide
  MOD_RES (4), (5), (39), (41): Xaa is C or S
  MOD_RES (19), (20), (21), (22), (23): Xaa is A or G
  MOD_RES (24), (25), (26), (27): Xaa is A or G or is absent
AGPXXTPTKMNAISMLYFXXXXXXXXXLKKYRGMVVDRXGX

SEQ ID NO: 58040 - protein, 33 aa, Artificial Sequence; identical to SEQ ID NO: 30027
  GFR-binding peptide
  MOD_RES (1), (33): Xaa is C or S

SEQ ID NO: 58041 - protein, 35 aa, Artificial Sequence; identical to SEQ ID NO: 8688
  GFR-binding peptide
  MOD_RES (1), (2), (34): Xaa is C or S

SEQ ID NO: 58042 - protein, 37 aa, Artificial Sequence; identical to SEQ ID NO: 7787
  GFR-binding peptide
  MOD_RES (1), (2), (36): Xaa is C or S
  MOD_RES (16), (17), (18), (19), (20): Xaa is A or G
  MOD_RES (21), (22), (23), (24): Xaa is A or G or is absent

SEQ ID NO: 58043 - protein, 39 aa, Artificial Sequence; identical to SEQ ID NO: 8691
  GFR-binding peptide
  MOD_RES (4), (5), (37), (39): Xaa is C or S

SEQ ID NO: 58044 - protein, 37 aa, Artificial Sequence; identical to SEQ ID NO: 14258
  GFR-binding peptide
  MOD_RES (3), (4): Xaa is C or S
  MOD_RES (18), (19), (20), (21), (22): Xaa is A or G
  MOD_RES (23), (24), (25), (26): Xaa is A or G or is absent

SEQ ID NO: 58045 - protein, 41 aa, Artificial Sequence; identical to SEQ ID NO: 6917
  GFR-binding peptide
  MOD_RES (4), (5), (40): Xaa is C or S
  MOD_RES (19), (20), (21), (22), (23): Xaa is A or G
  MOD_RES (24), (25), (26), (27): Xaa is A or G or is absent

SEQ ID NO: 58046 - protein, 36 aa, Artificial Sequence; identical to SEQ ID NO: 30034
  GFR-binding peptide
  MOD_RES (3), (4): Xaa is C or S
  MOD_RES (18), (19), (20), (21), (22): Xaa is A or G
  MOD_RES (23), (24), (25), (26): Xaa is A or G or is absent

SEQ ID NO: 58047 - protein, 41 aa, Artificial Sequence; identical to SEQ ID NO: 7793
  GFR-binding peptide
  MOD_RES (4), (5), (39), (41): Xaa is C or S
  MOD_RES (19), (20), (21), (22), (23): Xaa is A or G
  MOD_RES (24), (25), (26), (27): Xaa is A or G or is absent

SEQ ID NO: 58048 - protein, 38 aa, Artificial Sequence; identical to SEQ ID NO: 15103
  GFR-binding peptide
  MOD_RES (2), (3), (35), (37): Xaa is C or S

SEQ ID NO: 58049 - protein, 42 aa, Artificial Sequence; identical to SEQ ID NO: 9614
  GFR-binding peptide
  MOD_RES (6), (7), (41): Xaa is C or S
  MOD_RES (21), (22), (23), (24), (25): Xaa is A or G
  MOD_RES (26), (27), (28), (29): Xaa is A or G or is absent

SEQ ID NO: 58050 - protein, 35 aa, Artificial Sequence; identical to SEQ ID NO: 16902
  GFR-binding peptide
  MOD_RES (1), (2): Xaa is C or S
  MOD_RES (16), (17), (18), (19), (20): Xaa is A or G
  MOD_RES (21), (22), (23), (24): Xaa is A or G or is absent

SEQ ID NO: 58051 - protein, 39 aa, Artificial Sequence; identical to SEQ ID NO: 8702
  GFR-binding peptide
  MOD_RES (4), (5), (39): Xaa is C or S
  MOD_RES (19), (20), (21), (22), (23): Xaa is A or G
  MOD_RES (24), (25), (26), (27): Xaa is A or G or is absent

SEQ ID NO: 58052 - protein, 35 aa, Artificial Sequence
  GFR-binding peptide
  MOD_RES (4), (5): Xaa is C or S
PSTXXAPVKTNAISMLYFDNGRVLLLKKYRMIVEE

SEQ ID NO: 58053 - protein, 43 aa, Artificial Sequence; identical to SEQ ID NO: 30042
  GFR-binding peptide
  MOD_RES (5), (6), (40), (42): Xaa is C or S
  MOD_RES (20), (21), (22), (23), (24): Xaa is A or G
  MOD_RES (25), (26), (27), (28): Xaa is A or G or is absent

SEQ ID NO: 58054 - protein, 43 aa, Artificial Sequence
  GFR-binding peptide
  MOD_RES (6), (7), (41), (43): Xaa is C or S
  MOD_RES (21), (22), (23), (24), (25): Xaa is A or G
  MOD_RES (26), (27), (28), (29): Xaa is A or G or is absent
GSAGPXXTPTKMNAISMLYFXXXXXXXXXLKKYRGMVVDRXGX

SEQ ID NO: 58055 - protein, 40 aa, Artificial Sequence; identical to SEQ ID NO: 30044
  GFR-binding peptide
  MOD_RES (4), (5), (37), (39): Xaa is C or S

SEQ ID NO: 58056 - protein, 35 aa, Artificial Sequence; identical to SEQ ID NO: 9621
  GFR-binding peptide
  MOD_RES (1), (2): Xaa is C or S
  MOD_RES (16), (17), (18), (19), (20): Xaa is A or G
  MOD_RES (21), (22), (23), (24): Xaa is A or G or is absent

SEQ ID NO: 58057 - protein, 36 aa, Artificial Sequence; identical to SEQ ID NO: 29096
  GFR-binding peptide
  MOD_RES (1), (35): Xaa is C or S
  MOD_RES (15), (16), (17), (18), (19): Xaa is A or G
  MOD_RES (20), (21), (22), (23): Xaa is A or G or is absent

SEQ ID NO: 58058 - protein, 39 aa, Artificial Sequence; identical to SEQ ID NO: 29098
  GFR-binding peptide
  MOD_RES (4), (5), (37), (39): Xaa is C or S

SEQ ID NO: 58059 - protein, 39 aa, Artificial Sequence; identical to SEQ ID NO: 16910
  GFR-binding peptide
  MOD_RES (4), (5), (39): Xaa is C or S
  MOD_RES (19), (20), (21), (22), (23): Xaa is A or G
  MOD_RES (24), (25), (26), (27): Xaa is A or G or is absent

SEQ ID NO: 58060 - protein, 36 aa, Artificial Sequence; identical to SEQ ID NO: 8716
  GFR-binding peptide
  MOD_RES (3), (4): Xaa is C or S
  MOD_RES (18), (19), (20), (21), (22): Xaa is A or G
  MOD_RES (23), (24), (25), (26): Xaa is A or G or is absent

SEQ ID NO: 58061 - protein, 42 aa, Artificial Sequence
  GFR-binding peptide
  MOD_RES (5), (6), (39), (41): Xaa is C or S
  MOD_RES (20), (21), (22), (23), (24): Xaa is A or G
  MOD_RES (25), (26), (27), (28): Xaa is A or G or is absent
VPSTXXAPVKTNAISMLYFXXXXXXXXXLKKYRMIVEEXGXL

SEQ ID NO: 58062 - protein, 37 aa, Artificial Sequence; identical to SEQ ID NO: 6941
  GFR-binding peptide
  MOD_RES (2), (3), (35), (37): Xaa is C or S

SEQ ID NO: 58063 - protein, 41 aa, Artificial Sequence; identical to SEQ ID NO: 8719
  GFR-binding peptide
  MOD_RES (3), (4), (38), (40): Xaa is C or S
  MOD_RES (18), (19), (20), (21), (22): Xaa is A or G
  MOD_RES (23), (24), (25), (26): Xaa is A or G or is absent

SEQ ID NO: 58064 - protein, 39 aa, Artificial Sequence; identical to SEQ ID NO: 7813
  GFR-binding peptide
  MOD_RES (6), (7): Xaa is C or S
  MOD_RES (21), (22), (23), (24), (25): Xaa is A or G
  MOD_RES (26), (27), (28), (29): Xaa is A or G or is absent

SEQ ID NO: 58065 - protein, 42 aa, Artificial Sequence; identical to SEQ ID NO: 7814
  GFR-binding peptide
  MOD_RES (6), (7), (42): Xaa is C or S
  MOD_RES (21), (22), (23), (24), (25): Xaa is A or G
  MOD_RES (26), (27), (28), (29): Xaa is A or G or is absent

SEQ ID NO: 58066 - protein, 43 aa, Artificial Sequence
  GFR-binding peptide
  MOD_RES (6), (7), (40), (42): Xaa is C or S
  MOD_RES (21), (22), (23), (24), (25): Xaa is A or G
  MOD_RES (26), (27), (28), (29): Xaa is A or G or is absent
RVPSTXXAPVKTNAISMLYFXXXXXXXXXLKKYRMIVEEXGXL

SEQ ID NO: 58067 - protein, 38 aa, Artificial Sequence; identical to SEQ ID NO: 7817
  GFR-binding peptide
  MOD_RES (2), (3), (35), (37): Xaa is C or S

SEQ ID NO: 58068 - protein, 38 aa, Artificial Sequence; identical to SEQ ID NO: 8724
  GFR-binding peptide
  MOD_RES (1), (2), (35), (37): Xaa is C or S

SEQ ID NO: 58069 - protein, 34 aa, Artificial Sequence; identical to SEQ ID NO: 9643
  GFR-binding peptide
  MOD_RES (1), (1): Xaa is C or S
  MOD_RES (15), (16), (17), (18), (19): Xaa is A or G
  MOD_RES (20), (21), (22), (23): Xaa is A or G or is absent

SEQ ID NO: 58070 - protein, 41 aa, Artificial Sequence; identical to SEQ ID NO: 9644
  GFR-binding peptide
  MOD_RES (7), (41): Xaa is C or S
  MOD_RES (21), (22), (23), (24), (25): Xaa is A or G
  MOD_RES (26), (27), (28), (29): Xaa is A or G or is absent

SEQ ID NO: 58071 - protein, 37 aa, Artificial Sequence; identical to SEQ ID NO: 8728
  GFR-binding peptide
  MOD_RES (5), (6): Xaa is C or S

SEQ ID NO: 58072 - protein, 39 aa, Artificial Sequence; identical to SEQ ID NO: 9646
  GFR-binding peptide
  MOD_RES (2), (3), (37), (39): Xaa is C or S
  MOD_RES (17), (18), (19), (20), (21): Xaa is A or G
  MOD_RES (22), (23), (24), (25): Xaa is A or G or is absent

SEQ ID NO: 58073 - protein, 38 aa, Artificial Sequence; identical to SEQ ID NO: 8730
  GFR-binding peptide
  MOD_RES (6), (6): Xaa is C or S
  MOD_RES (20), (21), (22), (23), (24): Xaa is A or G
  MOD_RES (25), (26), (27), (28): Xaa is A or G or is absent

SEQ ID NO: 58074 - protein, 35 aa, Artificial Sequence
  GFR-binding peptide
  MOD_RES (3), (4), (35): Xaa is C or S
STXXAPVKTNAISMLYFDNGRVLLLKKYRMIVEEX

SEQ ID NO: 58075 - protein, 42 aa, Artificial Sequence; identical to SEQ ID NO: 30070
  GFR-binding peptide
  MOD_RES (5), (6), (40), (42): Xaa is C or S
  MOD_RES (20), (21), (22), (23), (24): Xaa is A or G
  MOD_RES (25), (26), (27), (28): Xaa is A or G or is absent

SEQ ID NO: 58076 - protein, 37 aa, Artificial Sequence; identical to SEQ ID NO: 16930
  GFR-binding peptide
  MOD_RES (4), (5), (37): Xaa is C or S

SEQ ID NO: 58077 - protein, 39 aa, Artificial Sequence; identical to SEQ ID NO: 7832
  GFR-binding peptide
  MOD_RES (4), (5), (39): Xaa is C or S
  MOD_RES (19), (20), (21), (22), (23): Xaa is A or G
  MOD_RES (24), (25), (26), (27): Xaa is A or G or is absent

SEQ ID NO: 58078 - protein, 41 aa, Artificial Sequence; identical to SEQ ID NO: 9655
  GFR-binding peptide
  MOD_RES (6), (7), (41): Xaa is C or S
  MOD_RES (21), (22), (23), (24), (25): Xaa is A or G
  MOD_RES (26), (27), (28), (29): Xaa is A or G or is absent

SEQ ID NO: 58079 - protein, 38 aa, Artificial Sequence; identical to SEQ ID NO: 6969
  GFR-binding peptide
  MOD_RES (4), (38): Xaa is C or S
  MOD_RES (18), (19), (20), (21), (22): Xaa is A or G
  MOD_RES (23), (24), (25), (26): Xaa is A or G or is absent

SEQ ID NO: 58080 - protein, 33 aa, Artificial Sequence; identical to SEQ ID NO: 31061
  GFR-binding peptide
  MOD_RES (1), (2): Xaa is C or S

SEQ ID NO: 58081 - protein, 38 aa, Artificial Sequence; identical to SEQ ID NO: 29130
  GFR-binding peptide
  MOD_RES (2), (3), (37): Xaa is C or S
  MOD_RES (17), (18), (19), (20), (21): Xaa is A or G
  MOD_RES (22), (23), (24), (25): Xaa is A or G or is absent

SEQ ID NO: 58082 - protein, 36 aa, Artificial Sequence; identical to SEQ ID NO: 9661
  GFR-binding peptide
  MOD_RES (3), (4), (36): Xaa is C or S

SEQ ID NO: 58083 - protein, 39 aa, Artificial Sequence
  GFR-binding peptide
  MOD_RES (5), (6), (39): Xaa is C or S
  MOD_RES (20), (21), (22), (23), (24): Xaa is A or G
  MOD_RES (25), (26), (27), (28): Xaa is A or G or is absent
VPSTXXAPVKTNAISMLYFXXXXXXXXXLKKYRMIVEEX

SEQ ID NO: 58084 - protein, 41 aa, Artificial Sequence; identical to SEQ ID NO: 29133
  GFR-binding peptide
  MOD_RES (5), (6), (40): Xaa is C or S
  MOD_RES (20), (21), (22), (23), (24): Xaa is A or G
  MOD_RES (25), (26), (27), (28): Xaa is A or G or is absent

SEQ ID NO: 58085 - protein, 41 aa, Artificial Sequence; identical to SEQ ID NO: 7838
  GFR-binding peptide
  MOD_RES (6), (7): Xaa is C or S
  MOD_RES (21), (22), (23), (24), (25): Xaa is A or G
  MOD_RES (26), (27), (28), (29): Xaa is A or G or is absent

SEQ ID NO: 58086 - protein, 38 aa, Artificial Sequence; identical to SEQ ID NO: 6975
  GFR-binding peptide
  MOD_RES (4), (5): Xaa is C or S
  MOD_RES (19), (20), (21), (22), (23): Xaa is A or G
  MOD_RES (24), (25), (26), (27): Xaa is A or G or is absent

SEQ ID NO: 58087 - protein, 40 aa, Artificial Sequence; identical to SEQ ID NO: 16037
  GFR-binding peptide
  MOD_RES (4), (5), (37), (39): Xaa is C or S

SEQ ID NO: 58088 - protein, 36 aa, Artificial Sequence; identical to SEQ ID NO: 8744
  GFR-binding peptide
  MOD_RES (5), (6): Xaa is C or S

SEQ ID NO: 58089 - protein, 36 aa, Artificial Sequence; identical to SEQ ID NO: 7843
  GFR-binding peptide
  MOD_RES (34), (36): Xaa is C or S
  MOD_RES (14), (15), (16), (17), (18): Xaa is A or G
  MOD_RES (19), (20), (21), (22): Xaa is A or G or is absent

SEQ ID NO: 58090 - protein, 36 aa, Artificial Sequence
  GFR-binding peptide
  MOD_RES (1), (33), (35): Xaa is C or S
XTPTKMNAISMLYFNDKQQIILKKYRGMVVDRXGXS

SEQ ID NO: 58091 - protein, 36 aa, Artificial Sequence; identical to SEQ ID NO: 8752
  GFR-binding peptide
  MOD_RES (3), (4), (36): Xaa is C or S

SEQ ID NO: 58092 - protein, 32 aa, Artificial Sequence
  GFR-binding peptide
  MOD_RES (1), (2): Xaa is C or S
XXAPVKTNAISMLYFDNGRVLLLKKYRMIVEE

SEQ ID NO: 58093 - protein, 34 aa, Artificial Sequence; identical to SEQ ID NO: 16051
  GFR-binding peptide
  MOD_RES (1), (2), (34): Xaa is C or S

SEQ ID NO: 58094 - protein, 37 aa, Artificial Sequence; identical to SEQ ID NO: 9673
  GFR-binding peptide
  MOD_RES (34), (36): Xaa is C or S
  MOD_RES (14), (15), (16), (17), (18): Xaa is A or G
  MOD_RES (19), (20), (21), (22): Xaa is A or G or is absent

SEQ ID NO: 58095 - protein, 37 aa, Artificial Sequence; identical to SEQ ID NO: 7858
  GFR-binding peptide
  MOD_RES (1), (36): Xaa is C or S
  MOD_RES (15), (16), (17), (18), (19): Xaa is A or G
  MOD_RES (20), (21), (22), (23): Xaa is A or G or is absent

SEQ ID NO: 58096 - protein, 41 aa, Artificial Sequence; identical to SEQ ID NO: 8753
  GFR-binding peptide
  MOD_RES (5), (6), (41): Xaa is C or S
  MOD_RES (20), (21), (22), (23), (24): Xaa is A or G
  MOD_RES (25), (26), (27), (28): Xaa is A or G or is absent

SEQ ID NO: 58097 - protein, 38 aa, Artificial Sequence; identical to SEQ ID NO: 7861
  GFR-binding peptide
  MOD_RES (3), (4), (37): Xaa is C or S

SEQ ID NO: 58098 - protein, 36 aa, Artificial Sequence; identical to SEQ ID NO: 9677
  GFR-binding peptide
  MOD_RES (3), (3): Xaa is C or S
  MOD_RES (17), (18), (19), (20), (21): Xaa is A or G
  MOD_RES (22), (23), (24), (25): Xaa is A or G or is absent

SEQ ID NO: 58099 - protein, 40 aa, Artificial Sequence; identical to SEQ ID NO: 28163
  GFR-binding peptide
  MOD_RES (6), (7): Xaa is C or S
  MOD_RES (21), (22), (23), (24), (25): Xaa is A or G
  MOD_RES (26), (27), (28), (29): Xaa is A or G or is absent

SEQ ID NO: 58100 - protein, 35 aa, Artificial Sequence; identical to SEQ ID NO: 30107
  GFR-binding peptide
  MOD_RES (3), (4): Xaa is C or S

SEQ ID NO: 58101 - protein, 41 aa, Artificial Sequence; identical to SEQ ID NO: 7866
  GFR-binding peptide
  MOD_RES (5), (6), (40): Xaa is C or S
  MOD_RES (20), (21), (22), (23), (24): Xaa is A or G
  MOD_RES (25), (26), (27), (28): Xaa is A or G or is absent

SEQ ID NO: 58102 - protein, 38 aa, Artificial Sequence; identical to SEQ ID NO: 8763
  GFR-binding peptide
  MOD_RES (6), (7): Xaa is C or S

SEQ ID NO: 58103 - protein, 36 aa, Artificial Sequence; identical to SEQ ID NO: 9683
  GFR-binding peptide
  MOD_RES (5), (6): Xaa is C or S

SEQ ID NO: 58104 - protein, 38 aa, Artificial Sequence; identical to SEQ ID NO: 16967
  GFR-binding peptide
  MOD_RES (1), (2), (36), (38): Xaa is C or S
  MOD_RES (16), (17), (18), (19), (20): Xaa is A or G
  MOD_RES (21), (22), (23), (24): Xaa is A or G or is absent

SEQ ID NO: 58105 - protein, 34 aa, Artificial Sequence; identical to SEQ ID NO: 30119
  GFR-binding peptide
  MOD_RES (1), (2), (34): Xaa is C or S

SEQ ID NO: 58106 - protein, 36 aa, Artificial Sequence; identical to SEQ ID NO: 7875
  GFR-binding peptide
  MOD_RES (3), (4), (36): Xaa is C or S

SEQ ID NO: 58107 - protein, 35 aa, Artificial Sequence
  GFR-binding peptide
  MOD_RES (1), (33), (35): Xaa is C or S
XTPTKMNAISMLYFNDKQQIILKKYRGMVVDRXGX

SEQ ID NO: 58108 - protein, 37 aa, Artificial Sequence; identical to SEQ ID NO: 7888
  GFR-binding peptide
  MOD_RES (4), (5), (37): Xaa is C or S

SEQ ID NO: 58109 - protein, 37 aa, Artificial Sequence; identical to SEQ ID NO: 7890
  GFR-binding peptide
  MOD_RES (1), (2), (36): Xaa is C or S
  MOD_RES (16), (17), (18), (19), (20): Xaa is A or G
  MOD_RES (21), (22), (23), (24): Xaa is A or G or is absent

SEQ ID NO: 58110 - protein, 36 aa, Artificial Sequence; identical to SEQ ID NO: 7892
  GFR-binding peptide
  MOD_RES (4), (4): Xaa is C or S
  MOD_RES (18), (19), (20), (21), (22): Xaa is A or G
  MOD_RES (23), (24), (25), (26): Xaa is A or G or is absent

SEQ ID NO: 58111 - protein, 42 aa, Artificial Sequence; identical to SEQ ID NO: 9692
  GFR-binding peptide
  MOD_RES (6), (7), (40), (42): Xaa is C or S

SEQ ID NO: 58112 - protein, 40 aa, Artificial Sequence; identical to SEQ ID NO: 7008
  GFR-binding peptide
  MOD_RES (3), (4), (37), (39): Xaa is C or S

SEQ ID NO: 58113 - protein, 40 aa, Artificial Sequence; identical to SEQ ID NO: 7894
  GFR-binding peptide
  MOD_RES (3), (4), (39): Xaa is C or S
  MOD_RES (18), (19), (20), (21), (22): Xaa is A or G
  MOD_RES (23), (24), (25), (26): Xaa is A or G or is absent

SEQ ID NO: 58114 - protein, 40 aa, Artificial Sequence
  GFR-binding peptide
  MOD_RES (6), (7), (38), (40): Xaa is C or S
RVPSTXXAPVKTNAISMLYFDNGRVLLLKKYRMIVEEXGX

SEQ ID NO: 58115 - protein, 38 aa, Artificial Sequence; identical to SEQ ID NO: 8782
  GFR-binding peptide
  MOD_RES (3), (4), (38): Xaa is C or S
  MOD_RES (18), (19), (20), (21), (22): Xaa is A or G
  MOD_RES (23), (24), (25), (26): Xaa is A or G or is absent

SEQ ID NO: 58116 - protein, 35 aa, Artificial Sequence; identical to SEQ ID NO: 29172
  GFR-binding peptide
  MOD_RES (34), (34): Xaa is C or S
  MOD_RES (14), (15), (16), (17), (18): Xaa is A or G
  MOD_RES (19), (20), (21), (22): Xaa is A or G or is absent

SEQ ID NO: 58117 - protein, 30 aa, Artificial Sequence; identical to SEQ ID NO: 8785
  GFR-binding peptide

SEQ ID NO: 58118 - protein, 30 aa, Artificial Sequence; identical to SEQ ID NO: 9695
  GFR-binding peptide

SEQ ID NO: 58119 - protein, 37 aa, Artificial Sequence; identical to SEQ ID NO: 16987
  GFR-binding peptide
  MOD_RES (5), (6): Xaa is C or S

SEQ ID NO: 58120 - protein, 37 aa, Artificial Sequence; identical to SEQ ID NO: 7017
  GFR-binding peptide
  MOD_RES (1), (2), (34), (36): Xaa is C or S

SEQ ID NO: 58121 - protein, 44 aa, Artificial Sequence; identical to SEQ ID NO: 9699
  GFR-binding peptide
  MOD_RES (6), (7), (41), (43): Xaa is C or S
  MOD_RES (21), (22), (23), (24), (25): Xaa is A or G
  MOD_RES (26), (27), (28), (29): Xaa is A or G or is absent

SEQ ID NO: 58122 - protein, 36 aa, Artificial Sequence; identical to SEQ ID NO: 30139
  GFR-binding peptide
  MOD_RES (2), (3), (35): Xaa is C or S

SEQ ID NO: 58123 - protein, 36 aa, Artificial Sequence; identical to SEQ ID NO: 7018
  GFR-binding peptide
  MOD_RES (2), (3), (36): Xaa is C or S

SEQ ID NO: 58124 - protein, 34 aa, Artificial Sequence; identical to SEQ ID NO: 28197
  GFR-binding peptide
  MOD_RES (1), (33): Xaa is C or S

SEQ ID NO: 58125 - protein, 37 aa, Artificial Sequence; identical to SEQ ID NO: 9702
  GFR-binding peptide
  MOD_RES (4), (5): Xaa is C or S
  MOD_RES (19), (20), (21), (22), (23): Xaa is A or G
  MOD_RES (24), (25), (26), (27): Xaa is A or G or is absent

SEQ ID NO: 58126 - protein, 38 aa, Artificial Sequence; identical to SEQ ID NO: 31114
  GFR-binding peptide
  MOD_RES (2), (3), (35), (37): Xaa is C or S

SEQ ID NO: 58127 - protein, 35 aa, Artificial Sequence; identical to SEQ ID NO: 8792
  GFR-binding peptide
  MOD_RES (33), (35): Xaa is C or S

SEQ ID NO: 58128 - protein, 34 aa, Artificial Sequence; identical to SEQ ID NO: 7020
  GFR-binding peptide
  MOD_RES (34), (34): Xaa is C or S
  MOD_RES (14), (15), (16), (17), (18): Xaa is A or G
  MOD_RES (19), (20), (21), (22): Xaa is A or G or is absent

SEQ ID NO: 58129 - protein, 35 aa, Artificial Sequence; identical to SEQ ID NO: 7905
  GFR-binding peptide
  MOD_RES (1), (33), (35): Xaa is C or S

SEQ ID NO: 58130 - protein, 38 aa, Artificial Sequence; identical to SEQ ID NO: 9704
  GFR-binding peptide
  MOD_RES (2), (3), (38): Xaa is C or S
  MOD_RES (17), (18), (19), (20), (21): Xaa is A or G
  MOD_RES (22), (23), (24), (25): Xaa is A or G or is absent

SEQ ID NO: 58131 - protein, 36 aa, Artificial Sequence; identical to SEQ ID NO: 7023
  GFR-binding peptide
  MOD_RES (1), (35): Xaa is C or S
  MOD_RES (15), (16), (17), (18), (19): Xaa is A or G
  MOD_RES (20), (21), (22), (23): Xaa is A or G or is absent

SEQ ID NO: 58132 - protein, 39 aa, Artificial Sequence; identical to SEQ ID NO: 16090
  GFR-binding peptide
  MOD_RES (5), (6), (38): Xaa is C or S

SEQ ID NO: 58133 - protein, 36 aa, Artificial Sequence; identical to SEQ ID NO: 7025
  GFR-binding peptide
  MOD_RES (1), (2), (34), (36): Xaa is C or S

SEQ ID NO: 58134 - protein, 42 aa, Artificial Sequence; identical to SEQ ID NO: 7026
  GFR-binding peptide
  MOD_RES (4), (5), (39), (41): Xaa is C or S
  MOD_RES (19), (20), (21), (22), (23): Xaa is A or G
  MOD_RES (24), (25), (26), (27): Xaa is A or G or is absent

SEQ ID NO: 58135 - protein, 39 aa, Artificial Sequence; identical to SEQ ID NO: 9708
  GFR-binding peptide
  MOD_RES (6), (7): Xaa is C or S
  MOD_RES (21), (22), (23), (24), (25): Xaa is A or G
  MOD_RES (26), (27), (28), (29): Xaa is A or G or is absent

SEQ ID NO: 58136 - protein, 36 aa, Artificial Sequence; identical to SEQ ID NO: 8800
  GFR-binding peptide
  MOD_RES (3), (4): Xaa is C or S
  MOD_RES (18), (19), (20), (21), (22): Xaa is A or G
  MOD_RES (23), (24), (25), (26): Xaa is A or G or is absent

SEQ ID NO: 58137 - protein, 39 aa, Artificial Sequence; identical to SEQ ID NO: 30153
  GFR-binding peptide
  MOD_RES (3), (4), (36), (38): Xaa is C or S

SEQ ID NO: 58138 - protein, 38 aa, Artificial Sequence; identical to SEQ ID NO: 7912
  GFR-binding peptide
  MOD_RES (2), (3), (37): Xaa is C or S
  MOD_RES (17), (18), (19), (20), (21): Xaa is A or G
  MOD_RES (22), (23), (24), (25): Xaa is A or G or is absent

SEQ ID NO: 58139 - protein, 38 aa, Artificial Sequence; identical to SEQ ID NO: 7039
  GFR-binding peptide
  MOD_RES (5), (6): Xaa is C or S

SEQ ID NO: 58140 - protein, 44 aa, Artificial Sequence; identical to SEQ ID NO: 8808
  GFR-binding peptide
  MOD_RES (6), (7), (41), (43): Xaa is C or S
  MOD_RES (21), (22), (23), (24), (25): Xaa is A or G
  MOD_RES (26), (27), (28), (29): Xaa is A or G or is absent

SEQ ID NO: 58141 - protein, 34 aa, Artificial Sequence; identical to SEQ ID NO: 9718
  GFR-binding peptide
  MOD_RES (2), (3): Xaa is C or S

SEQ ID NO: 58142 - protein, 39 aa, Artificial Sequence; identical to SEQ ID NO: 7043
  GFR-binding peptide
  MOD_RES (5), (6): Xaa is C or S
  MOD_RES (20), (21), (22), (23), (24): Xaa is A or G
  MOD_RES (25), (26), (27), (28): Xaa is A or G or is absent

SEQ ID NO: 58143 - protein, 34 aa, Artificial Sequence; identical to SEQ ID NO: 7044
  GFR-binding peptide
  MOD_RES (1), (2): Xaa is C or S
  MOD_RES (16), (17), (18), (19), (20): Xaa is A or G
  MOD_RES (21), (22), (23), (24): Xaa is A or G or is absent

SEQ ID NO: 58144 - protein, 40 aa, Artificial Sequence; identical to SEQ ID NO: 8811
  GFR-binding peptide
  MOD_RES (6), (7): Xaa is C or S
  MOD_RES (21), (22), (23), (24), (25): Xaa is A or G
  MOD_RES (26), (27), (28), (29): Xaa is A or G or is absent

SEQ ID NO: 58145 - protein, 34 aa, Artificial Sequence; identical to SEQ ID NO: 7922
  GFR-binding peptide
  MOD_RES (1), (2): Xaa is C or S

SEQ ID NO: 58146 - protein, 33 aa, Artificial Sequence; identical to SEQ ID NO: 31134
  GFR-binding peptide
  MOD_RES (2), (3): Xaa is C or S

SEQ ID NO: 58147 - protein, 37 aa, Artificial Sequence; identical to SEQ ID NO: 9721
  GFR-binding peptide
  MOD_RES (4), (5), (37): Xaa is C or S

SEQ ID NO: 58148 - protein, 40 aa, Artificial Sequence; identical to SEQ ID NO: 30166
  GFR-binding peptide
  MOD_RES (2), (3), (37), (39): Xaa is C or S
  MOD_RES (17), (18), (19), (20), (21): Xaa is A or G
  MOD_RES (22), (23), (24), (25): Xaa is A or G or is absent

SEQ ID NO: 58149 - protein, 35 aa, Artificial Sequence; identical to SEQ ID NO: 7923
  GFR-binding peptide
  MOD_RES (3), (4): Xaa is C or S

SEQ ID NO: 58150 - protein, 38 aa, Artificial Sequence; identical to SEQ ID NO: 8816
  GFR-binding peptide
  MOD_RES (4), (5), (37): Xaa is C or S

SEQ ID NO: 58151 - protein, 33 aa, Artificial Sequence; identical to SEQ ID NO: 8817
  GFR-binding peptide
  MOD_RES (14), (15), (16), (17), (18): Xaa is A or G
  MOD_RES (19), (20), (21), (22): Xaa is A or G or is absent

SEQ ID NO: 58152 - protein, 34 aa, Artificial Sequence; identical to SEQ ID NO: 9724
  GFR-binding peptide
  MOD_RES (1), (2): Xaa is C or S
  MOD_RES (16), (17), (18), (19), (20): Xaa is A or G
  MOD_RES (21), (22), (23), (24): Xaa is A or G or is absent

SEQ ID NO: 58153 - protein, 40 aa, Artificial Sequence; identical to SEQ ID NO: 7924
  GFR-binding peptide
  MOD_RES (7), (7): Xaa is C or S
  MOD_RES (21), (22), (23), (24), (25): Xaa is A or G
  MOD_RES (26), (27), (28), (29): Xaa is A or G or is absent

SEQ ID NO: 58154 - protein, 32 aa, Artificial Sequence; identical to SEQ ID NO: 8818
  GFR-binding peptide
  MOD_RES (32), (32): Xaa is C or S

SEQ ID NO: 58155 - protein, 38 aa, Artificial Sequence; identical to SEQ ID NO: 7925
  GFR-binding peptide
  MOD_RES (1), (35), (37): Xaa is C or S
  MOD_RES (15), (16), (17), (18), (19): Xaa is A or G
  MOD_RES (20), (21), (22), (23): Xaa is A or G or is absent

SEQ ID NO: 58156 - protein, 39 aa, Artificial Sequence; identical to SEQ ID NO: 14375
  GFR-binding peptide
  MOD_RES (6), (7): Xaa is C or S
  MOD_RES (21), (22), (23), (24), (25): Xaa is A or G
  MOD_RES (26), (27), (28), (29): Xaa is A or G or is absent

SEQ ID NO: 58157 - protein, 32 aa, Artificial Sequence; identical to SEQ ID NO: 28230
  GFR-binding peptide
  MOD_RES (1), (1): Xaa is C or S

SEQ ID NO: 58158 - protein, 36 aa, Artificial Sequence
  GFR-binding peptide
  MOD_RES (1), (2), (36): Xaa is C or S
  MOD_RES (16), (17), (18), (19), (20): Xaa is A or G
  MOD_RES (21), (22), (23), (24): Xaa is A or G or is absent
XXTPTKMNAISMLYFXXXXXXXXXLKKYRGMVVDRX

SEQ ID NO: 58159 - protein, 35 aa, Artificial Sequence; identical to SEQ ID NO: 7052
  GFR-binding peptide
  MOD_RES (1), (2), (35): Xaa is C or S

SEQ ID NO: 58160 - protein, 40 aa, Artificial Sequence; identical to SEQ ID NO: 7053
  GFR-binding peptide
  MOD_RES (5), (6), (38), (40): Xaa is C or S

SEQ ID NO: 58161 - protein, 41 aa, Artificial Sequence; identical to SEQ ID NO: 7930
  GFR-binding peptide
  MOD_RES (6), (7), (41): Xaa is C or S
  MOD_RES (21), (22), (23), (24), (25): Xaa is A or G
  MOD_RES (26), (27), (28), (29): Xaa is A or G or is absent

SEQ ID NO: 58162 - protein, 40 aa, Artificial Sequence; identical to SEQ ID NO: 9731
  GFR-binding peptide
  MOD_RES (6), (7), (39): Xaa is C or S

SEQ ID NO: 58163 - protein, 40 aa, Artificial Sequence; identical to SEQ ID NO: 16128
  GFR-binding peptide
  MOD_RES (3), (4), (38), (40): Xaa is C or S
  MOD_RES (18), (19), (20), (21), (22): Xaa is A or G
  MOD_RES (23), (24), (25), (26): Xaa is A or G or is absent

SEQ ID NO: 58164 - protein, 39 aa, Artificial Sequence; identical to SEQ ID NO: 8823
  GFR-binding peptide
  MOD_RES (6), (7), (39): Xaa is C or S

SEQ ID NO: 58165 - protein, 34 aa, Artificial Sequence; identical to SEQ ID NO: 7937
  GFR-binding peptide
  MOD_RES (2), (3): Xaa is C or S

SEQ ID NO: 58166 - protein, 42 aa, Artificial Sequence; identical to SEQ ID NO: 7063
  GFR-binding peptide
  MOD_RES (6), (7), (39), (41): Xaa is C or S

SEQ ID NO: 58167 - protein, 33 aa, Artificial Sequence; identical to SEQ ID NO: 16137
  GFR-binding peptide
  MOD_RES (2), (3): Xaa is C or S

SEQ ID NO: 58168 - protein, 34 aa, Artificial Sequence; identical to SEQ ID NO: 9746
  GFR-binding peptide
  MOD_RES (1), (1): Xaa is C or S
  MOD_RES (15), (16), (17), (18), (19): Xaa is A or G
  MOD_RES (20), (21), (22), (23): Xaa is A or G or is absent

SEQ ID NO: 58169 - protein, 36 aa, Artificial Sequence; identical to SEQ ID NO: 8830
  GFR-binding peptide
  MOD_RES (2), (3), (35): Xaa is C or S

SEQ ID NO: 58170 - protein, 39 aa, Artificial Sequence; identical to SEQ ID NO: 8832
  GFR-binding peptide
  MOD_RES (7), (7): Xaa is C or S
  MOD_RES (21), (22), (23), (24), (25): Xaa is A or G
  MOD_RES (26), (27), (28), (29): Xaa is A or G or is absent

SEQ ID NO: 58171 - protein, 36 aa, Artificial Sequence; identical to SEQ ID NO: 30195
  GFR-binding peptide
  MOD_RES (1), (2), (34), (36): Xaa is C or S

SEQ ID NO: 58172 - protein, 33 aa, Artificial Sequence
  GFR-binding peptide
  MOD_RES (1), (1): Xaa is C or S
  MOD_RES (15), (16), (17), (18), (19): Xaa is A or G
  MOD_RES (20), (21), (22), (23): Xaa is A or G or is absent
XTPTKMNAISMLYFXXXXXXXXXLKKYRGMVVD

SEQ ID NO: 58173 - protein, 40 aa, Artificial Sequence; identical to SEQ ID NO: 31170
  GFR-binding peptide
  MOD_RES (4), (5), (37), (39): Xaa is C or S

SEQ ID NO: 58174 - protein, 37 aa, Artificial Sequence
  GFR-binding peptide
  MOD_RES (1), (2), (35), (37): Xaa is C or S
  MOD_RES (16), (17), (18), (19), (20): Xaa is A or G
  MOD_RES (21), (22), (23), (24): Xaa is A or G or is absent
XXAPVKTNAISMLYFXXXXXXXXXLKKYRMIVEEXGX

SEQ ID NO: 58175 - protein, 38 aa, Artificial Sequence; identical to SEQ ID NO: 9756
  GFR-binding peptide
  MOD_RES (1), (35), (37): Xaa is C or S
  MOD_RES (15), (16), (17), (18), (19): Xaa is A or G
  MOD_RES (20), (21), (22), (23): Xaa is A or G or is absent

SEQ ID NO: 58176 - protein, 37 aa, Artificial Sequence; identical to SEQ ID NO: 8842
  GFR-binding peptide
  MOD_RES (3), (4): Xaa is C or S
  MOD_RES (18), (19), (20), (21), (22): Xaa is A or G
  MOD_RES (23), (24), (25), (26): Xaa is A or G or is absent

SEQ ID NO: 58177 - protein, 38 aa, Artificial Sequence
  GFR-binding peptide
  MOD_RES (2), (3), (35), (37): Xaa is C or S
PXXTPTKMNAISMLYFNDKQQIILKKYRGMVVDRXGXS

SEQ ID NO: 58178 - protein, 33 aa, Artificial Sequence
  GFR-binding peptide
  MOD_RES (1), (2), (33): Xaa is C or S
XXAPVKTNAISMLYFDNGRVLLLKKYRMIVEEX

SEQ ID NO: 58179 - protein, 39 aa, Artificial Sequence
  GFR-binding peptide
  MOD_RES (6), (7): Xaa is C or S
  MOD_RES (21), (22), (23), (24), (25): Xaa is A or G
  MOD_RES (26), (27), (28), (29): Xaa is A or G or is absent
HVPKPXXAPTKLNAISVLYFXXXXXXXXXLKKYRNMVVR

SEQ ID NO: 58180 - protein, 39 aa, Artificial Sequence; identical to SEQ ID NO: 31178
  GFR-binding peptide
  MOD_RES (1), (2), (36), (38): Xaa is C or S
  MOD_RES (16), (17), (18), (19), (20): Xaa is A or G
  MOD_RES (21), (22), (23), (24): Xaa is A or G or is absent

SEQ ID NO: 58181 - protein, 37 aa, Artificial Sequence; identical to SEQ ID NO: 7952
  GFR-binding peptide
  MOD_RES (1), (35), (37): Xaa is C or S
  MOD_RES (15), (16), (17), (18), (19): Xaa is A or G
  MOD_RES (20), (21), (22), (23): Xaa is A or G or is absent

SEQ ID NO: 58182 - protein, 38 aa, Artificial Sequence; identical to SEQ ID NO: 7954
  GFR-binding peptide
  MOD_RES (2), (3), (37): Xaa is C or S
  MOD_RES (17), (18), (19), (20), (21): Xaa is A or G
  MOD_RES (22), (23), (24), (25): Xaa is A or G or is absent

SEQ ID NO: 58183 - protein, 34 aa, Artificial Sequence; identical to SEQ ID NO: 31179
  GFR-binding peptide
  MOD_RES (32), (34): Xaa is C or S

SEQ ID NO: 58184 - protein, 41 aa, Artificial Sequence; identical to SEQ ID NO: 17035
  GFR-binding peptide
  MOD_RES (5), (6), (40): Xaa is C or S
  MOD_RES (20), (21), (22), (23), (24): Xaa is A or G
  MOD_RES (25), (26), (27), (28): Xaa is A or G or is absent

SEQ ID NO: 58185 - protein, 35 aa, Artificial Sequence; identical to SEQ ID NO: 7088
  GFR-binding peptide
  MOD_RES (1), (35): Xaa is C or S
  MOD_RES (15), (16), (17), (18), (19): Xaa is A or G
  MOD_RES (20), (21), (22), (23): Xaa is A or G or is absent

SEQ ID NO: 58186 - protein, 39 aa, Artificial Sequence; identical to SEQ ID NO: 15243
  GFR-binding peptide
  MOD_RES (2), (3), (37), (39): Xaa is C or S
  MOD_RES (17), (18), (19), (20), (21): Xaa is A or G
  MOD_RES (22), (23), (24), (25): Xaa is A or G or is absent

SEQ ID NO: 58187 - protein, 35 aa, Artificial Sequence; identical to SEQ ID NO: 15246
  GFR-binding peptide
  MOD_RES (1), (33), (35): Xaa is C or S

SEQ ID NO: 58188 - protein, 34 aa, Artificial Sequence; identical to SEQ ID NO: 8851
  GFR-binding peptide
  MOD_RES (1), (2): Xaa is C or S
  MOD_RES (16), (17), (18), (19), (20): Xaa is A or G
  MOD_RES (21), (22), (23), (24): Xaa is A or G or is absent

SEQ ID NO: 58189 - protein, 37 aa, Artificial Sequence
  GFR-binding peptide
  MOD_RES (4), (5): Xaa is C or S
  MOD_RES (19), (20), (21), (22), (23): Xaa is A or G
  MOD_RES (24), (25), (26), (27): Xaa is A or G or is absent
PSTXXAPVKTNAISMLYFXXXXXXXXXLKKYRMIVEE

SEQ ID NO: 58190 - protein, 33 aa, Artificial Sequence; identical to SEQ ID NO: 8854
  GFR-binding peptide
  MOD_RES (14), (15), (16), (17), (18): Xaa is A or G
  MOD_RES (19), (20), (21), (22): Xaa is A or G or is absent

SEQ ID NO: 58191 - protein, 37 aa, Artificial Sequence; identical to SEQ ID NO: 7962
  GFR-binding peptide
  MOD_RES (2), (3), (37): Xaa is C or S
  MOD_RES (17), (18), (19), (20), (21): Xaa is A or G
  MOD_RES (22), (23), (24), (25): Xaa is A or G or is absent

SEQ ID NO: 58192 - protein, 32 aa, Artificial Sequence
  GFR-binding peptide
  MOD_RES (14), (15), (16), (17), (18): Xaa is A or G
  MOD_RES (19), (20), (21), (22): Xaa is A or G or is absent
TPTKMNAISMLYFXXXXXXXXXLKKYRGMVVD

SEQ ID NO: 58193 - protein, 35 aa, Artificial Sequence; identical to SEQ ID NO: 9767
  GFR-binding peptide
  MOD_RES (1), (2): Xaa is C or S
  MOD_RES (16), (17), (18), (19), (20): Xaa is A or G
  MOD_RES (21), (22), (23), (24): Xaa is A or G or is absent

SEQ ID NO: 58194 - protein, 41 aa, Artificial Sequence
  GFR-binding peptide
  MOD_RES (3), (4), (38), (40): Xaa is C or S
  MOD_RES (18), (19), (20), (21), (22): Xaa is A or G
  MOD_RES (23), (24), (25), (26): Xaa is A or G or is absent
GPXXTPTKMNAISMLYFXXXXXXXXXLKKYRGMVVDRXGXS

SEQ ID NO: 58195 - protein, 37 aa, Artificial Sequence; identical to SEQ ID NO: 7969
  GFR-binding peptide
  MOD_RES (1), (2), (36): Xaa is C or S
  MOD_RES (16), (17), (18), (19), (20): Xaa is A or G
  MOD_RES (21), (22), (23), (24): Xaa is A or G or is absent

SEQ ID NO: 58196 - protein, 33 aa, Artificial Sequence; identical to SEQ ID NO: 9775
  GFR-binding peptide
  MOD_RES (2), (3): Xaa is C or S

SEQ ID NO: 58197 - protein, 31 aa, Artificial Sequence
  GFR-binding peptide
  MOD_RES (1), (1): Xaa is C or S
XAPVKTNAISMLYFDNGRVLLLKKYRMIVEE

SEQ ID NO: 58198 - protein, 42 aa, Artificial Sequence; identical to SEQ ID NO: 7102
  GFR-binding peptide
  MOD_RES (6), (7), (39), (41): Xaa is C or S

SEQ ID NO: 58199 - protein, 39 aa, Artificial Sequence; identical to SEQ ID NO: 8870
  GFR-binding peptide
  MOD_RES (2), (3), (37), (39): Xaa is C or S
  MOD_RES (17), (18), (19), (20), (21): Xaa is A or G
  MOD_RES (22), (23), (24), (25): Xaa is A or G or is absent

SEQ ID NO: 58200 - protein, 40 aa, Artificial Sequence; identical to SEQ ID NO: 31202
  GFR-binding peptide
  MOD_RES (34), (35): Xaa is C or S
  MOD_RES (12), (13), (14), (15), (16): Xaa is A or G
  MOD_RES (17), (18), (19), (20): Xaa is A or G or is absent

SEQ ID NO: 58201 - protein, 34 aa, Artificial Sequence; identical to SEQ ID NO: 2272
  GFR-binding peptide
  MOD_RES (13), (14), (15), (16), (17): Xaa is A or G
  MOD_RES (18), (19), (20), (21): Xaa is A or G or is absent

SEQ ID NO: 58202 - protein, 31 aa, Artificial Sequence
  GFR-binding peptide
  MOD_RES (31), (31): Xaa is C or S
SRVIMPIKGYVKPKRGVFYLINIPSLAQPVX

SEQ ID NO: 58203 - protein, 36 aa, Artificial Sequence
  GFR-binding peptide
  MOD_RES (31), (32): Xaa is C or S
EVTMNEYKFKVVNKNEDLYLISIPEMKEPVXXPEPI

SEQ ID NO: 58204 - protein, 32 aa, Artificial Sequence
  GFR-binding peptide
  MOD_RES (31), (32): Xaa is C or S
EVTMNRHKRLVVNKNEDYYLISTASMKEPVXX

SEQ ID NO: 58205 - protein, 42 aa, Artificial Sequence; identical to SEQ ID NO: 31207
  GFR-binding peptide
  MOD_RES (1), (3), (37), (38): Xaa is C or S
  MOD_RES (15), (16), (17), (18), (19): Xaa is A or G
  MOD_RES (20), (21), (22), (23): Xaa is A or G or is absent

SEQ ID NO: 58206 - protein, 38 aa, Artificial Sequence; identical to SEQ ID NO: 2278
  GFR-binding peptide
  MOD_RES (1), (3), (36), (37): Xaa is C or S
  MOD_RES (14), (15), (16), (17), (18): Xaa is A or G
  MOD_RES (19), (20), (21), (22): Xaa is A or G or is absent

SEQ ID NO: 58207 - protein, 40 aa, Artificial Sequence; identical to SEQ ID NO: 23263
  GFR-binding peptide
  MOD_RES (2), (4), (36), (37): Xaa is C or S

SEQ ID NO: 58208 - protein, 38 aa, Artificial Sequence
  GFR-binding peptide
  MOD_RES (33), (34): Xaa is C or S
  MOD_RES (11), (12), (13), (14), (15): Xaa is A or G
  MOD_RES (16), (17), (18), (19): Xaa is A or G or is absent
SKVVMPIKGYXXXXXXXXXFYLINIPSLDQPVXXPSAS

SEQ ID NO: 58209 - protein, 39 aa, Artificial Sequence
  GFR-binding peptide
  MOD_RES (1), (33), (34): Xaa is C or S
XSEVTMNRYKKLVVNKNEDFYLISIANMKEPVXXPEPIG

SEQ ID NO: 58210 - protein, 36 aa, Artificial Sequence; identical to SEQ ID NO: 2280
  GFR-binding peptide
  MOD_RES (1), (33), (34): Xaa is C or S

SEQ ID NO: 58211 - protein, 39 aa, Artificial Sequence; identical to SEQ ID NO: 2281
  GFR-binding peptide
  MOD_RES (2), (4), (36), (37): Xaa is C or S

SEQ ID NO: 58212 - protein, 32 aa, Artificial Sequence; identical to SEQ ID NO: 2282
  GFR-binding peptide
  MOD_RES (1), (32): Xaa is C or S

SEQ ID NO: 58213 - protein, 37 aa, Artificial Sequence; identical to SEQ ID NO: 2283
  GFR-binding peptide
  MOD_RES (33), (34): Xaa is C or S
  MOD_RES (11), (12), (13), (14), (15): Xaa is A or G
  MOD_RES (16), (17), (18), (19): Xaa is A or G or is absent

SEQ ID NO: 58214 - protein, 35 aa, Artificial Sequence; identical to SEQ ID NO: 2285
  GFR-binding peptide
  MOD_RES (1), (35): Xaa is C or S
  MOD_RES (13), (14), (15), (16), (17): Xaa is A or G
  MOD_RES (18), (19), (20), (21): Xaa is A or G or is absent

SEQ ID NO: 58215 - protein, 39 aa, Artificial Sequence; identical to SEQ ID NO: 2286
  GFR-binding peptide
  MOD_RES (1), (34), (35): Xaa is C or S
  MOD_RES (12), (13), (14), (15), (16): Xaa is A or G
  MOD_RES (17), (18), (19), (20): Xaa is A or G or is absent

SEQ ID NO: 58216 - protein, 33 aa, Artificial Sequence
  GFR-binding peptide
  MOD_RES (1), (33): Xaa is C or S
XSEVVMDYHYKLVVNNASDKYLISIPSLRTPVX

SEQ ID NO: 58217 - protein, 32 aa, Artificial Sequence
  GFR-binding peptide
  MOD_RES (32), (32): Xaa is C or S
SEVVMDEYKFKVVNNASDLYLISIPELRTPVX

SEQ ID NO: 58218 - protein, 35 aa, Artificial Sequence; identical to SEQ ID NO: 2288
  GFR-binding peptide
  MOD_RES (31), (32): Xaa is C or S

SEQ ID NO: 58219 - protein, 35 aa, Artificial Sequence; identical to SEQ ID NO: 31225
  GFR-binding peptide
  MOD_RES (33), (34): Xaa is C or S
  MOD_RES (11), (12), (13), (14), (15): Xaa is A or G
  MOD_RES (16), (17), (18), (19): Xaa is A or G or is absent

SEQ ID NO: 58220 - protein, 36 aa, Artificial Sequence; identical to SEQ ID NO: 31228
  GFR-binding peptide
  MOD_RES (32), (33): Xaa is C or S

SEQ ID NO: 58221 - protein, 42 aa, Artificial Sequence; identical to SEQ ID NO: 2293
  GFR-binding peptide
  MOD_RES (2), (4), (36), (37): Xaa is C or S

SEQ ID NO: 58222 - protein, 37 aa, Artificial Sequence; identical to SEQ ID NO: 23277
  GFR-binding peptide
  MOD_RES (2), (33), (34): Xaa is C or S

SEQ ID NO: 58223 - protein, 33 aa, Artificial Sequence; identical to SEQ ID NO: 2296
  GFR-binding peptide
  MOD_RES (12), (13), (14), (15), (16): Xaa is A or G
  MOD_RES (17), (18), (19), (20): Xaa is A or G or is absent

SEQ ID NO: 58224 - protein, 38 aa, Artificial Sequence; identical to SEQ ID NO: 2298
  GFR-binding peptide
  MOD_RES (1), (35), (36): Xaa is C or S
  MOD_RES (13), (14), (15), (16), (17): Xaa is A or G
  MOD_RES (18), (19), (20), (21): Xaa is A or G or is absent

SEQ ID NO: 58225 - protein, 33 aa, Artificial Sequence
  GFR-binding peptide
  MOD_RES (1), (32), (33): Xaa is C or S
XSRVIMPIKGYVKPKRGVFYLINIPSLAQPVXX

SEQ ID NO: 58226 - protein, 39 aa, Artificial Sequence; identical to SEQ ID NO: 2299
  GFR-binding peptide
  MOD_RES (1), (3), (35), (36): Xaa is C or S

SEQ ID NO: 58227 - protein, 34 aa, Artificial Sequence; identical to SEQ ID NO: 23285
  GFR-binding peptide
  MOD_RES (1), (33), (34): Xaa is C or S

SEQ ID NO: 58228 - protein, 32 aa, Artificial Sequence; identical to SEQ ID NO: 2302
  GFR-binding peptide
  MOD_RES (31), (32): Xaa is C or S

SEQ ID NO: 58229 - protein, 41 aa, Artificial Sequence; identical to SEQ ID NO: 2304
  GFR-binding peptide
  MOD_RES (1), (35), (36): Xaa is C or S
  MOD_RES (13), (14), (15), (16), (17): Xaa is A or G
  MOD_RES (18), (19), (20), (21): Xaa is A or G or is absent

SEQ ID NO: 58230 - protein, 43 aa, Artificial Sequence
  GFR-binding peptide
  MOD_RES (1), (3), (37), (38): Xaa is C or S
  MOD_RES (15), (16), (17), (18), (19): Xaa is A or G
  MOD_RES (20), (21), (22), (23): Xaa is A or G or is absent
XGXRDVVMGRHKRLXXXXXXXXXYYLMSTASMKTPTXXPGASG

SEQ ID NO: 58231 - protein, 43 aa, Artificial Sequence; identical to SEQ ID NO: 31238
  GFR-binding peptide
  MOD_RES (1), (3), (37), (38): Xaa is C or S
  MOD_RES (15), (16), (17), (18), (19): Xaa is A or G
  MOD_RES (20), (21), (22), (23): Xaa is A or G or is absent

SEQ ID NO: 58232 - protein, 39 aa, Artificial Sequence
  GFR-binding peptide
  MOD_RES (34), (35): Xaa is C or S
  MOD_RES (12), (13), (14), (15), (16): Xaa is A or G
  MOD_RES (17), (18), (19), (20): Xaa is A or G or is absent
ESVAMGRHKRLXXXXXXXXXYYLISTASLKTPVXXAKSA

SEQ ID NO: 58233 - protein, 35 aa, Artificial Sequence; identical to SEQ ID NO: 23291
  GFR-binding peptide
  MOD_RES (1), (3), (35): Xaa is C or S

SEQ ID NO: 58234 - protein, 44 aa, Artificial Sequence
  GFR-binding peptide
  MOD_RES (2), (4), (38), (39): Xaa is C or S
  MOD_RES (16), (17), (18), (19), (20): Xaa is A or G
  MOD_RES (21), (22), (23), (24): Xaa is A or G or is absent
SXGXRDVVMGEYKFKXXXXXXXXXLYLMSIPEMKTPTXXPGASG

SEQ ID NO: 58235 - protein, 36 aa, Artificial Sequence; identical to SEQ ID NO: 9808
  GFR-binding peptide
  MOD_RES (2), (36): Xaa is C or S
  MOD_RES (14), (15), (16), (17), (18): Xaa is A or G
  MOD_RES (19), (20), (21), (22): Xaa is A or G or is absent

SEQ ID NO: 58236 - protein, 40 aa, Artificial Sequence; identical to SEQ ID NO: 31240
  GFR-binding peptide
  MOD_RES (1), (3), (37): Xaa is C or S
  MOD_RES (15), (16), (17), (18), (19): Xaa is A or G
  MOD_RES (20), (21), (22), (23): Xaa is A or G or is absent

SEQ ID NO: 58237 - protein, 43 aa, Artificial Sequence; identical to SEQ ID NO: 2309
  GFR-binding peptide
  MOD_RES (2), (4), (38), (39): Xaa is C or S
  MOD_RES (16), (17), (18), (19), (20): Xaa is A or G
  MOD_RES (21), (22), (23), (24): Xaa is A or G or is absent

SEQ ID NO: 58238 - protein, 38 aa, Artificial Sequence
  GFR-binding peptide
  MOD_RES (1), (3), (37), (38): Xaa is C or S
  MOD_RES (15), (16), (17), (18), (19): Xaa is A or G
  MOD_RES (20), (21), (22), (23): Xaa is A or G or is absent
XGXSEVVMDEYKFKXXXXXXXXXLYLISIPELRTPVXX

SEQ ID NO: 58239 - protein, 35 aa, Artificial Sequence; identical to SEQ ID NO: 2313
  GFR-binding peptide
  MOD_RES (1), (33), (34): Xaa is C or S

SEQ ID NO: 58240 - protein, 34 aa, Artificial Sequence
  GFR-binding peptide
  MOD_RES (1), (32), (33): Xaa is C or S
XSKVVMPIKGYVKPTRGVFYLINIPSLDQPVXXP

SEQ ID NO: 58241 - protein, 37 aa, Artificial Sequence
  GFR-binding peptide
  MOD_RES (32), (33): Xaa is C or S
SEVTMNRYKKLVVNKNEDFYLISIANMKEPVXXPEPI

SEQ ID NO: 58242 - protein, 31 aa, Artificial Sequence; identical to SEQ ID NO: 23296
  GFR-binding peptide
  MOD_RES (31), (31): Xaa is C or S

SEQ ID NO: 58243 - protein, 35 aa, Artificial Sequence
  GFR-binding peptide
  MOD_RES (32), (33): Xaa is C or S
SEVTMNRHKRLVVNKNEDYYLISTASMKEPVXXPE

SEQ ID NO: 58244 - protein, 32 aa, Artificial Sequence; identical to SEQ ID NO: 2317
  GFR-binding peptide
  MOD_RES (1), (1): Xaa is C or S

SEQ ID NO: 58245 - protein, 39 aa, Artificial Sequence; identical to SEQ ID NO: 2322
  GFR-binding peptide
  MOD_RES (2), (4), (38), (39): Xaa is C or S
  MOD_RES (16), (17), (18), (19), (20): Xaa is A or G
  MOD_RES (21), (22), (23), (24): Xaa is A or G or is absent

SEQ ID NO: 58246 - protein, 37 aa, Artificial Sequence; identical to SEQ ID NO: 2323
  GFR-binding peptide
  MOD_RES (2), (4): Xaa is C or S
  MOD_RES (16), (17), (18), (19), (20): Xaa is A or G
  MOD_RES (21), (22), (23), (24): Xaa is A or G or is absent

SEQ ID NO: 58247 - protein, 42 aa, Artificial Sequence; identical to SEQ ID NO: 31252
  GFR-binding peptide
  MOD_RES (2), (4), (38), (39): Xaa is C or S
  MOD_RES (16), (17), (18), (19), (20): Xaa is A or G
  MOD_RES (21), (22), (23), (24): Xaa is A or G or is absent

SEQ ID NO: 58248 - protein, 38 aa, Artificial Sequence; identical to SEQ ID NO: 2325
  GFR-binding peptide
  MOD_RES (2), (34), (35): Xaa is C or S

SEQ ID NO: 58249 - protein, 37 aa, Artificial Sequence; identical to SEQ ID NO: 31254
  GFR-binding peptide
  MOD_RES (31), (32): Xaa is C or S

SEQ ID NO: 58250 - protein, 37 aa, Artificial Sequence
  GFR-binding peptide
  MOD_RES (31), (32): Xaa is C or S
DVVMGYHYKLIIQQKDNKYLMSIPSMKTPTXXPGASG

SEQ ID NO: 58251 - protein, 35 aa, Artificial Sequence; identical to SEQ ID NO: 23306
  GFR-binding peptide
  MOD_RES (34), (35): Xaa is C or S
  MOD_RES (12), (13), (14), (15), (16): Xaa is A or G
  MOD_RES (17), (18), (19), (20): Xaa is A or G or is absent

SEQ ID NO: 58252 - protein, 37 aa, Artificial Sequence
  GFR-binding peptide
  MOD_RES (33), (34): Xaa is C or S
  MOD_RES (11), (12), (13), (14), (15): Xaa is A or G
  MOD_RES (16), (17), (18), (19): Xaa is A or G or is absent
EVVMDRHKRLXXXXXXXXXYYLISTASLRAPVXXSAP

SEQ ID NO: 58253 - protein, 36 aa, Artificial Sequence; identical to SEQ ID NO: 2329
  GFR-binding peptide
  MOD_RES (1), (35), (36): Xaa is C or S
  MOD_RES (13), (14), (15), (16), (17): Xaa is A or G
  MOD_RES (18), (19), (20), (21): Xaa is A or G or is absent

SEQ ID NO: 58254 - protein, 39 aa, Artificial Sequence; identical to SEQ ID NO: 31259
  GFR-binding peptide
  MOD_RES (34), (35): Xaa is C or S
  MOD_RES (12), (13), (14), (15), (16): Xaa is A or G
  MOD_RES (17), (18), (19), (20): Xaa is A or G or is absent

SEQ ID NO: 58255 - protein, 34 aa, Artificial Sequence; identical to SEQ ID NO: 56192
  GFR-binding peptide
  MOD_RES (1), (32), (33): Xaa is C or S

SEQ ID NO: 58256 - protein, 40 aa, Artificial Sequence; identical to SEQ ID NO: 23316
  GFR-binding peptide
  MOD_RES (1), (3), (35), (36): Xaa is C or S

SEQ ID NO: 58257 - protein, 40 aa, Artificial Sequence; identical to SEQ ID NO: 2333
  GFR-binding peptide
  MOD_RES (1), (3), (36), (37): Xaa is C or S

SEQ ID NO: 58258 - protein, 36 aa, Artificial Sequence; identical to SEQ ID NO: 2335
  GFR-binding peptide
  MOD_RES (1), (3): Xaa is C or S
  MOD_RES (15), (16), (17), (18), (19): Xaa is A or G
  MOD_RES (20), (21), (22), (23): Xaa is A or G or is absent

SEQ ID NO: 58259 - protein, 43 aa, Artificial Sequence; identical to SEQ ID NO: 23320
  GFR-binding peptide
  MOD_RES (2), (4), (38), (39): Xaa is C or S
  MOD_RES (16), (17), (18), (19), (20): Xaa is A or G
  MOD_RES (21), (22), (23), (24): Xaa is A or G or is absent

SEQ ID NO: 58260 - protein, 37 aa, Artificial Sequence; identical to SEQ ID NO: 23322
  GFR-binding peptide
  MOD_RES (2), (35), (36): Xaa is C or S
  MOD_RES (13), (14), (15), (16), (17): Xaa is A or G
  MOD_RES (18), (19), (20), (21): Xaa is A or G or is absent

SEQ ID NO: 58261 - protein, 38 aa, Artificial Sequence
  GFR-binding peptide
  MOD_RES (2), (35), (36): Xaa is C or S
  MOD_RES (13), (14), (15), (16), (17): Xaa is A or G
  MOD_RES (18), (19), (20), (21): Xaa is A or G or is absent
GXEEVIMRHKRLXXXXXXXXXYYLMSTASTKVPAXXTS

SEQ ID NO: 58262 - protein, 37 aa, Artificial Sequence; identical to SEQ ID NO: 31275
  GFR-binding peptide
  MOD_RES (2), (34), (35): Xaa is C or S

SEQ ID NO: 58263 - protein, 36 aa, Artificial Sequence; identical to SEQ ID NO: 31276
  GFR-binding peptide
  MOD_RES (33), (34): Xaa is C or S
  MOD_RES (11), (12), (13), (14), (15): Xaa is A or G
  MOD_RES (16), (17), (18), (19): Xaa is A or G or is absent

SEQ ID NO: 58264 - protein, 37 aa, Artificial Sequence; identical to SEQ ID NO: 23325
  GFR-binding peptide
  MOD_RES (2), (34), (35): Xaa is C or S

SEQ ID NO: 58265 - protein, 30 aa, Artificial Sequence
  GFR-binding peptide
SKVIMPIKGYIKPTKGIFYLINIPSLDQSV

SEQ ID NO: 58266 - protein, 30 aa, Artificial Sequence; identical to SEQ ID NO: 2342
  GFR-binding peptide

SEQ ID NO: 58267 - protein, 34 aa, Artificial Sequence
  GFR-binding peptide
  MOD_RES (31), (32): Xaa is C or S
SKVVMPIKGYVKPTRGVFYLINIPSLDQPVXXPS

SEQ ID NO: 58268 - protein, 37 aa, Artificial Sequence
  GFR-binding peptide
  MOD_RES (32), (33): Xaa is C or S
SEVTMNEYKFKVVNKNEDLYLISIPEMKEPVXXPEPI

SEQ ID NO: 58269 - protein, 43 aa, Artificial Sequence; identical to SEQ ID NO: 2348
  GFR-binding peptide
  MOD_RES (2), (4), (38), (39): Xaa is C or S
  MOD_RES (16), (17), (18), (19), (20): Xaa is A or G
  MOD_RES (21), (22), (23), (24): Xaa is A or G or is absent

SEQ ID NO: 58270 - protein, 36 aa, Artificial Sequence; identical to SEQ ID NO: 23332
  GFR-binding peptide
  MOD_RES (34), (35): Xaa is C or S
  MOD_RES (12), (13), (14), (15), (16): Xaa is A or G
  MOD_RES (17), (18), (19), (20): Xaa is A or G or is absent

SEQ ID NO: 58271 - protein, 34 aa, Artificial Sequence
  GFR-binding peptide
  MOD_RES (1), (34): Xaa is C or S
  MOD_RES (12), (13), (14), (15), (16): Xaa is A or G
  MOD_RES (17), (18), (19), (20): Xaa is A or G or is absent
XEEVIMRHKRLXXXXXXXXXYYLMSTASTKVPAX

SEQ ID NO: 58272 - protein, 41 aa, Artificial Sequence
  GFR-binding peptide
  MOD_RES (2), (36), (37): Xaa is C or S
  MOD_RES (14), (15), (16), (17), (18): Xaa is A or G
  MOD_RES (19), (20), (21), (22): Xaa is A or G or is absent
AXSEVTMNYHYKLXXXXXXXXXKYLISIPSMKEPVXXPEPI

SEQ ID NO: 58273 - protein, 33 aa, Artificial Sequence; identical to SEQ ID NO: 2358
  GFR-binding peptide
  MOD_RES (33), (33): Xaa is C or S
  MOD_RES (11), (12), (13), (14), (15): Xaa is A or G
  MOD_RES (16), (17), (18), (19): Xaa is A or G or is absent

SEQ ID NO: 58274 - protein, 38 aa, Artificial Sequence; identical to SEQ ID NO: 2359
  GFR-binding peptide
  MOD_RES (1), (34), (35): Xaa is C or S
  MOD_RES (12), (13), (14), (15), (16): Xaa is A or G
  MOD_RES (17), (18), (19), (20): Xaa is A or G or is absent

SEQ ID NO: 58275 - protein, 37 aa, Artificial Sequence; identical to SEQ ID NO: 2360
  GFR-binding peptide
  MOD_RES (1), (3), (37): Xaa is C or S
  MOD_RES (15), (16), (17), (18), (19): Xaa is A or G
  MOD_RES (20), (21), (22), (23): Xaa is A or G or is absent

SEQ ID NO: 58276 - protein, 34 aa, Artificial Sequence; identical to SEQ ID NO: 31305
  GFR-binding peptide
  MOD_RES (2), (34): Xaa is C or S

SEQ ID NO: 58277 - protein, 39 aa, Artificial Sequence
  GFR-binding peptide
  MOD_RES (33), (34): Xaa is C or S
  MOD_RES (11), (12), (13), (14), (15): Xaa is A or G
  MOD_RES (16), (17), (18), (19): Xaa is A or G or is absent
EVVMDRHKRLXXXXXXXXXYYLISTASLRAPVXXSAPAA

SEQ ID NO: 58278 - protein, 39 aa, Artificial Sequence; identical to SEQ ID NO: 2361
  GFR-binding peptide
  MOD_RES (2), (36), (37): Xaa is C or S
  MOD_RES (14), (15), (16), (17), (18): Xaa is A or G
  MOD_RES (19), (20), (21), (22): Xaa is A or G or is absent

SEQ ID NO: 58279 - protein, 34 aa, Artificial Sequence; identical to SEQ ID NO: 56229
  GFR-binding peptide
  MOD_RES (2), (4): Xaa is C or S

SEQ ID NO: 58280 - protein, 40 aa, Artificial Sequence; identical to SEQ ID NO: 31309
  GFR-binding peptide
  MOD_RES (2), (4), (36), (37): Xaa is C or S

SEQ ID NO: 58281 - protein, 39 aa, Artificial Sequence; identical to SEQ ID NO: 2363
  GFR-binding peptide
  MOD_RES (33), (34): Xaa is C or S
  MOD_RES (11), (12), (13), (14), (15): Xaa is A or G
  MOD_RES (16), (17), (18), (19): Xaa is A or G or is absent

SEQ ID NO: 58282 - protein, 39 aa, Artificial Sequence; identical to SEQ ID NO: 23346
  GFR-binding peptide
  MOD_RES (33), (34): Xaa is C or S
  MOD_RES (11), (12), (13), (14), (15): Xaa is A or G
  MOD_RES (16), (17), (18), (19): Xaa is A or G or is absent

SEQ ID NO: 58283 - protein, 33 aa, Artificial Sequence; identical to SEQ ID NO: 23347
  GFR-binding peptide
  MOD_RES (1), (33): Xaa is C or S

SEQ ID NO: 58284 - protein, 39 aa, Artificial Sequence; identical to SEQ ID NO: 56235
  GFR-binding peptide
  MOD_RES (2), (36), (37): Xaa is C or S
  MOD_RES (14), (15), (16), (17), (18): Xaa is A or G
  MOD_RES (19), (20), (21), (22): Xaa is A or G or is absent

SEQ ID NO: 58285 - protein, 36 aa, Artificial Sequence
  GFR-binding peptide
  MOD_RES (33), (34): Xaa is C or S
  MOD_RES (11), (12), (13), (14), (15): Xaa is A or G
  MOD_RES (16), (17), (18), (19): Xaa is A or G or is absent
EVTMNYHYKLXXXXXXXXXKYLISIPSMKEPVXXPE

SEQ ID NO: 58286 - protein, 32 aa, Artificial Sequence; identical to SEQ ID NO: 31316
  GFR-binding peptide
  MOD_RES (32), (32): Xaa is C or S

SEQ ID NO: 58287 - protein, 33 aa, Artificial Sequence
  GFR-binding peptide
  MOD_RES (32), (33): Xaa is C or S
SEVTMNRHKRLVVNKNEDYYLISTASMKEPVXX

SEQ ID NO: 58288 - protein, 36 aa, Artificial Sequence; identical to SEQ ID NO: 23348
  GFR-binding peptide
  MOD_RES (2), (4), (35), (36): Xaa is C or S

SEQ ID NO: 58289 - protein, 37 aa, Artificial Sequence; identical to SEQ ID NO: 2370
  GFR-binding peptide
  MOD_RES (32), (33): Xaa is C or S

SEQ ID NO: 58290 - protein, 41 aa, Artificial Sequence
  GFR-binding peptide
  MOD_RES (2), (4), (38), (39): Xaa is C or S
  MOD_RES (16), (17), (18), (19), (20): Xaa is A or G
  MOD_RES (21), (22), (23), (24): Xaa is A or G or is absent
RXAXSEVTMNRYKKLXXXXXXXXXFYLISIANMKEPVXXPE

SEQ ID NO: 58291 - protein, 38 aa, Artificial Sequence; identical to SEQ ID NO: 2374
  GFR-binding peptide
  MOD_RES (1), (33), (34): Xaa is C or S

SEQ ID NO: 58292 - protein, 39 aa, Artificial Sequence; identical to SEQ ID NO: 2376
  GFR-binding peptide
  MOD_RES (2), (34), (35): Xaa is C or S

SEQ ID NO: 58293 - protein, 42 aa, Artificial Sequence
  GFR-binding peptide
  MOD_RES (2), (36), (37): Xaa is C or S
  MOD_RES (14), (15), (16), (17), (18): Xaa is A or G
  MOD_RES (19), (20), (21), (22): Xaa is A or G or is absent
AXSEVTMNPIKGYXXXXXXXXXFYLINIPSMKEPVXXPEPIG

SEQ ID NO: 58294 - protein, 37 aa, Artificial Sequence; identical to SEQ ID NO: 2378
  GFR-binding peptide
  MOD_RES (2), (4), (37): Xaa is C or S

SEQ ID NO: 58295 - protein, 35 aa, Artificial Sequence; identical to SEQ ID NO: 2384
  GFR-binding peptide
  MOD_RES (1), (33), (34): Xaa is C or S

SEQ ID NO: 58296 - protein, 40 aa, Artificial Sequence
  GFR-binding peptide
  MOD_RES (2), (4), (38), (39): Xaa is C or S
  MOD_RES (16), (17), (18), (19), (20): Xaa is A or G
  MOD_RES (21), (22), (23), (24): Xaa is A or G or is absent
RXAXSEVTMNRYKKLXXXXXXXXXFYLISIANMKEPVXXP

SEQ ID NO: 58297 - protein, 33 aa, Artificial Sequence
  GFR-binding peptide
  MOD_RES (12), (13), (14), (15), (16): Xaa is A or G
  MOD_RES (17), (18), (19), (20): Xaa is A or G or is absent
SEVVMDYHYKLXXXXXXXXXKYLISIPSLRTPV

SEQ ID NO: 58298 - protein, 37 aa, Artificial Sequence; identical to SEQ ID NO: 2385
  GFR-binding peptide
  MOD_RES (31), (32): Xaa is C or S

SEQ ID NO: 58299 - protein, 44 aa, Artificial Sequence; identical to SEQ ID NO: 2388
  GFR-binding peptide
  MOD_RES (1), (3), (38), (39): Xaa is C or S
  MOD_RES (16), (17), (18), (19), (20): Xaa is A or G
  MOD_RES (21), (22), (23), (24): Xaa is A or G or is absent

SEQ ID NO: 58300 - protein, 37 aa, Artificial Sequence
  GFR-binding peptide
  MOD_RES (2), (33), (34): Xaa is C or S
KXSKVVMPIKGYVKPTRGVFYLINIPSLDQPVXXPSA

SEQ ID NO: 58301 - protein, 39 aa, Artificial Sequence; identical to SEQ ID NO: 2389
  GFR-binding peptide
  MOD_RES (1), (3), (37), (38): Xaa is C or S
  MOD_RES (15), (16), (17), (18), (19): Xaa is A or G
  MOD_RES (20), (21), (22), (23): Xaa is A or G or is absent

SEQ ID NO: 58302 - protein, 40 aa, Artificial Sequence; identical to SEQ ID NO: 2391
  GFR-binding peptide
  MOD_RES (1), (3), (38), (39): Xaa is C or S
  MOD_RES (16), (17), (18), (19), (20): Xaa is A or G
  MOD_RES (21), (22), (23), (24): Xaa is A or G or is absent

SEQ ID NO: 58303 - protein, 35 aa, Artificial Sequence; identical to SEQ ID NO: 2393
  GFR-binding peptide
  MOD_RES (1), (3), (35): Xaa is C or S

SEQ ID NO: 58304 - protein, 41 aa, Artificial Sequence; identical to SEQ ID NO: 2394
  GFR-binding peptide
  MOD_RES (2), (36), (37): Xaa is C or S
  MOD_RES (14), (15), (16), (17), (18): Xaa is A or G
  MOD_RES (19), (20), (21), (22): Xaa is A or G or is absent

SEQ ID NO: 58305 - protein, 41 aa, Artificial Sequence; identical to SEQ ID NO: 23366
  GFR-binding peptide
  MOD_RES (1), (3), (35), (36): Xaa is C or S

SEQ ID NO: 58306 - protein, 44 aa, Artificial Sequence; identical to SEQ ID NO: 23367
  GFR-binding peptide
  MOD_RES (1), (3), (38), (39): Xaa is C or S
  MOD_RES (16), (17), (18), (19), (20): Xaa is A or G
  MOD_RES (21), (22), (23), (24): Xaa is A or G or is absent

SEQ ID NO: 58307 - protein, 39 aa, Artificial Sequence; identical to SEQ ID NO: 2395
  GFR-binding peptide
  MOD_RES (1), (3), (37), (38): Xaa is C or S
  MOD_RES (15), (16), (17), (18), (19): Xaa is A or G
  MOD_RES (20), (21), (22), (23): Xaa is A or G or is absent

SEQ ID NO: 58308 - protein, 35 aa, Artificial Sequence; identical to SEQ ID NO: 2397
  GFR-binding peptide
  MOD_RES (33), (34): Xaa is C or S
  MOD_RES (11), (12), (13), (14), (15): Xaa is A or G
  MOD_RES (16), (17), (18), (19): Xaa is A or G or is absent

SEQ ID NO: 58309 - protein, 39 aa, Artificial Sequence; identical to SEQ ID NO: 31343
  GFR-binding peptide
  MOD_RES (1), (3), (34), (35): Xaa is C or S

SEQ ID NO: 58310 - protein, 36 aa, Artificial Sequence; identical to SEQ ID NO: 2398
  GFR-binding peptide
  MOD_RES (1), (34), (35): Xaa is C or S
  MOD_RES (12), (13), (14), (15), (16): Xaa is A or G
  MOD_RES (17), (18), (19), (20): Xaa is A or G or is absent

SEQ ID NO: 58311 - protein, 42 aa, Artificial Sequence; identical to SEQ ID NO: 31346
  GFR-binding peptide
  MOD_RES (2), (4), (36), (37): Xaa is C or S

SEQ ID NO: 58312 - protein, 37 aa, Artificial Sequence; identical to SEQ ID NO: 2399
  GFR-binding peptide
  MOD_RES (1), (3), (37): Xaa is C or S
  MOD_RES (15), (16), (17), (18), (19): Xaa is A or G
  MOD_RES (20), (21), (22), (23): Xaa is A or G or is absent

SEQ ID NO: 58313 - protein, 34 aa, Artificial Sequence; identical to SEQ ID NO: 2400
  GFR-binding peptide
  MOD_RES (1), (32), (33): Xaa is C or S

SEQ ID NO: 58314 - protein, 38 aa, Artificial Sequence; identical to SEQ ID NO: 31350
  GFR-binding peptide
  MOD_RES (1), (3), (37), (38): Xaa is C or S
  MOD_RES (15), (16), (17), (18), (19): Xaa is A or G
  MOD_RES (20), (21), (22), (23): Xaa is A or G or is absent

SEQ ID NO: 58315 - protein, 36 aa, Artificial Sequence; identical to SEQ ID NO: 23372
  GFR-binding peptide
  MOD_RES (34), (35): Xaa is C or S
  MOD_RES (12), (13), (14), (15), (16): Xaa is A or G
  MOD_RES (17), (18), (19), (20): Xaa is A or G or is absent

SEQ ID NO: 58316 - protein, 37 aa, Artificial Sequence; identical to SEQ ID NO: 31359
  GFR-binding peptide
  MOD_RES (1), (33), (34): Xaa is C or S

SEQ ID NO: 58317 - protein, 34 aa, Artificial Sequence
  GFR-binding peptide
  MOD_RES (1), (33), (34): Xaa is C or S
XSEVTMNPIKGYVVNKNEDFYLINIPSMKEPVXX

SEQ ID NO: 58318 - protein, 40 aa, Artificial Sequence; identical to SEQ ID NO: 2405
  GFR-binding peptide
  MOD_RES (2), (4), (36), (37): Xaa is C or S

SEQ ID NO: 58319 - protein, 37 aa, Artificial Sequence; identical to SEQ ID NO: 31365
  GFR-binding peptide
  MOD_RES (35), (36): Xaa is C or S
  MOD_RES (13), (14), (15), (16), (17): Xaa is A or G
  MOD_RES (18), (19), (20), (21): Xaa is A or G or is absent

SEQ ID NO: 58320 - protein, 38 aa, Artificial Sequence; identical to SEQ ID NO: 2407
  GFR-binding peptide
  MOD_RES (33), (34): Xaa is C or S
  MOD_RES (11), (12), (13), (14), (15): Xaa is A or G
  MOD_RES (16), (17), (18), (19): Xaa is A or G or is absent

SEQ ID NO: 58321 - protein, 31 aa, Artificial Sequence
  GFR-binding peptide
  MOD_RES (31), (31): Xaa is C or S
DVVMGYHYKLIIQQKDNKYLMSIPSMKTPTX

SEQ ID NO: 58322 - protein, 42 aa, Artificial Sequence
  GFR-binding peptide
  MOD_RES (2), (4), (36), (37): Xaa is C or S
RXGXSEVVMDRHKRLVVNNASDYYLISTASLRTPVXXTPPTS

SEQ ID NO: 58323 - protein, 42 aa, Artificial Sequence; identical to SEQ ID NO: 23389
  GFR-binding peptide
  MOD_RES (1), (3), (37), (38): Xaa is C or S
  MOD_RES (15), (16), (17), (18), (19): Xaa is A or G
  MOD_RES (20), (21), (22), (23): Xaa is A or G or is absent

SEQ ID NO: 58324 - protein, 34 aa, Artificial Sequence
  GFR-binding peptide
  MOD_RES (1), (3), (34): Xaa is C or S
XKXSRVIMPIKGYVKPKRGVFYLINIPSLAQPVX

SEQ ID NO: 58325 - protein, 40 aa, Artificial Sequence; identical to SEQ ID NO: 23391
  GFR-binding peptide
  MOD_RES (1), (3), (35), (36): Xaa is C or S

SEQ ID NO: 58326 - protein, 38 aa, Artificial Sequence
  GFR-binding peptide
  MOD_RES (1), (3), (35), (36): Xaa is C or S
XGXSEVVMDRHKRLVVNNASDYYLISTASLRTPVXXTP

SEQ ID NO: 58327 - protein, 38 aa, Artificial Sequence; identical to SEQ ID NO: 23393
  GFR-binding peptide
  MOD_RES (2), (4), (37), (38): Xaa is C or S
  MOD_RES (15), (16), (17), (18), (19): Xaa is A or G
  MOD_RES (20), (21), (22), (23): Xaa is A or G or is absent

SEQ ID NO: 58328 - protein, 40 aa, Artificial Sequence
  GFR-binding peptide
  MOD_RES (2), (34), (35): Xaa is C or S
GXRDVVMGYHYKLIIQQKDNKYLMSIPSMKTPTXXPGASG

SEQ ID NO: 58329 - protein, 40 aa, Artificial Sequence
  GFR-binding peptide
  MOD_RES (2), (4), (38), (39): Xaa is C or S
  MOD_RES (16), (17), (18), (19), (20): Xaa is A or G
  MOD_RES (21), (22), (23), (24): Xaa is A or G or is absent
RXAXSEVTMNEYKFKXXXXXXXXXLYLISIPEMKEPVXXP

SEQ ID NO: 58330 - protein, 43 aa, Artificial Sequence; identical to SEQ ID NO: 31372
  GFR-binding peptide
  MOD_RES (2), (4), (38), (39): Xaa is C or S
  MOD_RES (16), (17), (18), (19), (20): Xaa is A or G
  MOD_RES (21), (22), (23), (24): Xaa is A or G or is absent

SEQ ID NO: 58331 - protein, 37 aa, Artificial Sequence; identical to SEQ ID NO: 23395
  GFR-binding peptide
  MOD_RES (2), (34), (35): Xaa is C or S

SEQ ID NO: 58332 - protein, 38 aa, Artificial Sequence; identical to SEQ ID NO: 2417
  GFR-binding peptide
  MOD_RES (1), (33), (34): Xaa is C or S

SEQ ID NO: 58333 - protein, 37 aa, Artificial Sequence
  GFR-binding peptide
  MOD_RES (2), (4), (36), (37): Xaa is C or S
RXAXSEVTMNEYKFKVVNKNEDLYLISIPEMKEPVXX

SEQ ID NO: 58334 - protein, 37 aa, Artificial Sequence; identical to SEQ ID NO: 2419
  GFR-binding peptide
  MOD_RES (1), (3), (34), (35): Xaa is C or S

SEQ ID NO: 58335 - protein, 37 aa, Artificial Sequence
  GFR-binding peptide
  MOD_RES (1), (3), (35), (36): Xaa is C or S
XGXSEVVMDEYKFKVVNNASDLYLISIPELRTPVXXT

SEQ ID NO: 58336 - protein, 38 aa, Artificial Sequence; identical to SEQ ID NO: 23400
  GFR-binding peptide
  MOD_RES (2), (34), (35): Xaa is C or S

SEQ ID NO: 58337 - protein, 34 aa, Artificial Sequence
  GFR-binding peptide
  MOD_RES (1), (3), (34): Xaa is C or S
XGXEEVIMYHYKLLLVRGNDKYLMSIPSTKVPAX

SEQ ID NO: 58338 - protein, 35 aa, Artificial Sequence; identical to SEQ ID NO: 2426
  GFR-binding peptide
  MOD_RES (2), (2): Xaa is C or S
  MOD_RES (14), (15), (16), (17), (18): Xaa is A or G
  MOD_RES (19), (20), (21), (22): Xaa is A or G or is absent

SEQ ID NO: 58339 - protein, 38 aa, Artificial Sequence; identical to SEQ ID NO: 56288
  GFR-binding peptide
  MOD_RES (2), (34), (35): Xaa is C or S

SEQ ID NO: 58340 - protein, 36 aa, Artificial Sequence; identical to SEQ ID NO: 2427
  GFR-binding peptide
  MOD_RES (1), (33), (34): Xaa is C or S

SEQ ID NO: 58341 - protein, 32 aa, Artificial Sequence; identical to SEQ ID NO: 2428
  GFR-binding peptide
  MOD_RES (32), (32): Xaa is C or S

SEQ ID NO: 58342 - protein, 41 aa, Artificial Sequence; identical to SEQ ID NO: 56295
  GFR-binding peptide
  MOD_RES (1), (3), (36), (37): Xaa is C or S
  MOD_RES (14), (15), (16), (17), (18): Xaa is A or G
  MOD_RES (19), (20), (21), (22): Xaa is A or G or is absent

SEQ ID NO: 58343 - protein, 35 aa, Artificial Sequence; identical to SEQ ID NO: 2432
  GFR-binding peptide
  MOD_RES (1), (33), (34): Xaa is C or S

SEQ ID NO: 58344 - protein, 36 aa, Artificial Sequence
  GFR-binding peptide
  MOD_RES (1), (32), (33): Xaa is C or S
XSRVIMPIKGYVKPKRGVFYLINIPSLAQPVXXPAA

SEQ ID NO: 58345 - protein, 37 aa, Artificial Sequence; identical to SEQ ID NO: 2433
  GFR-binding peptide
  MOD_RES (2), (36), (37): Xaa is C or S
  MOD_RES (14), (15), (16), (17), (18): Xaa is A or G
  MOD_RES (19), (20), (21), (22): Xaa is A or G or is absent

SEQ ID NO: 58346 - protein, 38 aa, Artificial Sequence
  GFR-binding peptide
  MOD_RES (32), (33): Xaa is C or S
SRVVMNYHYKLIVNSSDDKYLVSIPSLKTPAXXPKPVH

SEQ ID NO: 58347 - protein, 40 aa, Artificial Sequence
  GFR-binding peptide
  MOD_RES (2), (34), (35): Xaa is C or S
AXSEVTMNRYKKLVVNKNEDFYLISIANMKEPVXXPEPIG

SEQ ID NO: 58348 - protein, 42 aa, Artificial Sequence; identical to SEQ ID NO: 2435
  GFR-binding peptide
  MOD_RES (1), (3), (37), (38): Xaa is C or S
  MOD_RES (15), (16), (17), (18), (19): Xaa is A or G
  MOD_RES (20), (21), (22), (23): Xaa is A or G or is absent

SEQ ID NO: 58349 - protein, 34 aa, Artificial Sequence
  GFR-binding peptide
  MOD_RES (32), (33): Xaa is C or S
SEVVMDEYKFKVVNNASDLYLISIPELRTPVXXT

SEQ ID NO: 58350 - protein, 33 aa, Artificial Sequence; identical to SEQ ID NO: 2439
  GFR-binding peptide
  MOD_RES (31), (32): Xaa is C or S

SEQ ID NO: 58351 - protein, 38 aa, Artificial Sequence; identical to SEQ ID NO: 23418
  GFR-binding peptide
  MOD_RES (1), (35), (36): Xaa is C or S
  MOD_RES (13), (14), (15), (16), (17): Xaa is A or G
  MOD_RES (18), (19), (20), (21): Xaa is A or G or is absent

SEQ ID NO: 58352 - protein, 36 aa, Artificial Sequence
  GFR-binding peptide
  MOD_RES (2), (4), (36): Xaa is C or S
RXAXSEVTMNYHYKLVVNKNEDKYLISIPSMKEPVX

SEQ ID NO: 58353 - protein, 37 aa, Artificial Sequence; identical to SEQ ID NO: 23419
  GFR-binding peptide
  MOD_RES (33), (34): Xaa is C or S
  MOD_RES (11), (12), (13), (14), (15): Xaa is A or G
  MOD_RES (16), (17), (18), (19): Xaa is A or G or is absent

SEQ ID NO: 58354 - protein, 41 aa, Artificial Sequence
  GFR-binding peptide
  MOD_RES (2), (36), (37): Xaa is C or S
  MOD_RES (14), (15), (16), (17), (18): Xaa is A or G
  MOD_RES (19), (20), (21), (22): Xaa is A or G or is absent
AXSEVTMNEYKFKXXXXXXXXXLYLISIPEMKEPVXXPEPI

SEQ ID NO: 58355 - protein, 36 aa, Artificial Sequence; identical to SEQ ID NO: 23420
  GFR-binding peptide
  MOD_RES (2), (36): Xaa is C or S
  MOD_RES (14), (15), (16), (17), (18): Xaa is A or G
  MOD_RES (19), (20), (21), (22): Xaa is A or G or is absent

SEQ ID NO: 58356 - protein, 36 aa, Artificial Sequence; identical to SEQ ID NO: 31408
  GFR-binding peptide
  MOD_RES (1), (35), (36): Xaa is C or S
  MOD_RES (13), (14), (15), (16), (17): Xaa is A or G
  MOD_RES (18), (19), (20), (21): Xaa is A or G or is absent

SEQ ID NO: 58357 - protein, 38 aa, Artificial Sequence; identical to SEQ ID NO: 9939
  GFR-binding peptide
  MOD_RES (33), (34): Xaa is C or S
  MOD_RES (11), (12), (13), (14), (15): Xaa is A or G
  MOD_RES (16), (17), (18), (19): Xaa is A or G or is absent

SEQ ID NO: 58358 - protein, 43 aa, Artificial Sequence; identical to SEQ ID NO: 2443
  GFR-binding peptide
  MOD_RES (2), (4), (37), (38): Xaa is C or S
  MOD_RES (15), (16), (17), (18), (19): Xaa is A or G
  MOD_RES (20), (21), (22), (23): Xaa is A or G or is absent

SEQ ID NO: 58359 - protein, 34 aa, Artificial Sequence
  GFR-binding peptide
  MOD_RES (2), (4): Xaa is C or S
SXKXSKVIMPIKGYIKPTKGIFYLINIPSLDQSV

SEQ ID NO: 58360 - protein, 35 aa, Artificial Sequence; identical to SEQ ID NO: 23421
  GFR-binding peptide
  MOD_RES (2), (34), (35): Xaa is C or S

SEQ ID NO: 58361 - protein, 37 aa, Artificial Sequence; identical to SEQ ID NO: 2445
  GFR-binding peptide
  MOD_RES (2), (36): Xaa is C or S
  MOD_RES (14), (15), (16), (17), (18): Xaa is A or G
  MOD_RES (19), (20), (21), (22): Xaa is A or G or is absent

SEQ ID NO: 58362 - protein, 39 aa, Artificial Sequence; identical to SEQ ID NO: 23423
  GFR-binding peptide
  MOD_RES (1), (35), (36): Xaa is C or S
  MOD_RES (13), (14), (15), (16), (17): Xaa is A or G
  MOD_RES (18), (19), (20), (21): Xaa is A or G or is absent

SEQ ID NO: 58363 - protein, 37 aa, Artificial Sequence
  GFR-binding peptide
  MOD_RES (2), (36), (37): Xaa is C or S
  MOD_RES (14), (15), (16), (17), (18): Xaa is A or G
  MOD_RES (19), (20), (21), (22): Xaa is A or G or is absent
AXSEVTMNEYKFKXXXXXXXXXLYLISIPEMKEPVXX

SEQ ID NO: 58364 - protein, 37 aa, Artificial Sequence; identical to SEQ ID NO: 23424
  GFR-binding peptide
  MOD_RES (2), (36): Xaa is C or S
  MOD_RES (14), (15), (16), (17), (18): Xaa is A or G
  MOD_RES (19), (20), (21), (22): Xaa is A or G or is absent

SEQ ID NO: 58365 - protein, 34 aa, Artificial Sequence; identical to SEQ ID NO: 9950
  GFR-binding peptide
  MOD_RES (32), (33): Xaa is C or S

SEQ ID NO: 58366 - protein, 36 aa, Artificial Sequence; identical to SEQ ID NO: 2449
  GFR-binding peptide
  MOD_RES (1), (3), (36): Xaa is C or S

SEQ ID NO: 58367 - protein, 37 aa, Artificial Sequence; identical to SEQ ID NO: 23432
  GFR-binding peptide
  MOD_RES (1), (3), (35): Xaa is C or S

SEQ ID NO: 58368 - protein, 34 aa, Artificial Sequence
  GFR-binding peptide
  MOD_RES (1), (3): Xaa is C or S
XGXRDVVMGRHKRLIIQQKDNYYLMSTASMKTPT

SEQ ID NO: 58369 - protein, 33 aa, Artificial Sequence; identical to SEQ ID NO: 2450
  GFR-binding peptide
  MOD_RES (32), (32): Xaa is C or S

SEQ ID NO: 58370 - protein, 41 aa, Artificial Sequence; identical to SEQ ID NO: 2451
  GFR-binding peptide
  MOD_RES (1), (3), (37), (38): Xaa is C or S
  MOD_RES (15), (16), (17), (18), (19): Xaa is A or G
  MOD_RES (20), (21), (22), (23): Xaa is A or G or is absent

SEQ ID NO: 58371 - protein, 44 aa, Artificial Sequence; identical to SEQ ID NO: 56331
  GFR-binding peptide
  MOD_RES (2), (4), (38), (39): Xaa is C or S
  MOD_RES (16), (17), (18), (19), (20): Xaa is A or G
  MOD_RES (21), (22), (23), (24): Xaa is A or G or is absent

SEQ ID NO: 58372 - protein, 35 aa, Artificial Sequence; identical to SEQ ID NO: 2452
  GFR-binding peptide
  MOD_RES (2), (2): Xaa is C or S
  MOD_RES (14), (15), (16), (17), (18): Xaa is A or G
  MOD_RES (19), (20), (21), (22): Xaa is A or G or is absent

SEQ ID NO: 58373 - protein, 37 aa, Artificial Sequence
  GFR-binding peptide
  MOD_RES (2), (34), (35): Xaa is C or S
GXSEVVMDRHKRLVVNNASDYYLISTASLRTPVXXTP

SEQ ID NO: 58374 - protein, 40 aa, Artificial Sequence; identical to SEQ ID NO: 2454
  GFR-binding peptide
  MOD_RES (2), (4), (36), (37): Xaa is C or S

SEQ ID NO: 58375 - protein, 37 aa, Artificial Sequence
  GFR-binding peptide
  MOD_RES (2), (4), (36), (37): Xaa is C or S
SXGXRDVVMGRHKRLIIQQKDNYYLMSTASMKTPTXX

SEQ ID NO: 58376 - protein, 33 aa, Artificial Sequence; identical to SEQ ID NO: 2458
  GFR-binding peptide
  MOD_RES (33), (33): Xaa is C or S
  MOD_RES (11), (12), (13), (14), (15): Xaa is A or G
  MOD_RES (16), (17), (18), (19): Xaa is A or G or is absent

SEQ ID NO: 58377 - protein, 41 aa, Artificial Sequence; identical to SEQ ID NO: 23439
  GFR-binding peptide
  MOD_RES (1), (3), (37), (38): Xaa is C or S
  MOD_RES (15), (16), (17), (18), (19): Xaa is A or G
  MOD_RES (20), (21), (22), (23): Xaa is A or G or is absent

SEQ ID NO: 58378 - protein, 35 aa, Artificial Sequence; identical to SEQ ID NO: 2461
  GFR-binding peptide
  MOD_RES (35), (35): Xaa is C or S
  MOD_RES (13), (14), (15), (16), (17): Xaa is A or G
  MOD_RES (18), (19), (20), (21): Xaa is A or G or is absent

SEQ ID NO: 58379 - protein, 37 aa, Artificial Sequence
  GFR-binding peptide
  MOD_RES (1), (3), (34), (35): Xaa is C or S
XGXEEVIMEYKFKLLVRGNDLYLMSIPETKVPAXXTS

SEQ ID NO: 58380 - protein, 36 aa, Artificial Sequence; identical to SEQ ID NO: 2463
  GFR-binding peptide
  MOD_RES (2), (36): Xaa is C or S
  MOD_RES (14), (15), (16), (17), (18): Xaa is A or G
  MOD_RES (19), (20), (21), (22): Xaa is A or G or is absent

SEQ ID NO: 58381 - protein, 39 aa, Artificial Sequence; identical to SEQ ID NO: 23443
  GFR-binding peptide
  MOD_RES (33), (34): Xaa is C or S
  MOD_RES (11), (12), (13), (14), (15): Xaa is A or G
  MOD_RES (16), (17), (18), (19): Xaa is A or G or is absent

SEQ ID NO: 58382 - protein, 44 aa, Artificial Sequence; identical to SEQ ID NO: 31431
  GFR-binding peptide
  MOD_RES (2), (4), (38), (39): Xaa is C or S
  MOD_RES (16), (17), (18), (19), (20): Xaa is A or G
  MOD_RES (21), (22), (23), (24): Xaa is A or G or is absent

SEQ ID NO: 58383 - protein, 41 aa, Artificial Sequence; identical to SEQ ID NO: 31434
  GFR-binding peptide
  MOD_RES (1), (3), (35), (36): Xaa is C or S

SEQ ID NO: 58384 - protein, 33 aa, Artificial Sequence; identical to SEQ ID NO: 31435
  GFR-binding peptide
  MOD_RES (33), (33): Xaa is C or S
  MOD_RES (11), (12), (13), (14), (15): Xaa is A or G
  MOD_RES (16), (17), (18), (19): Xaa is A or G or is absent

SEQ ID NO: 58385 - protein, 38 aa, Artificial Sequence
  GFR-binding peptide
  MOD_RES (1), (3), (35), (36): Xaa is C or S
XGXESVAMGRHKRLYTVVGKDYYLISTASLKTPVXXAK

SEQ ID NO: 58386 - protein, 38 aa, Artificial Sequence
  GFR-binding peptide
  MOD_RES (2), (4), (37), (38): Xaa is C or S
  MOD_RES (15), (16), (17), (18), (19): Xaa is A or G
  MOD_RES (20), (21), (22), (23): Xaa is A or G or is absent
LXGXEEVIMEYKFKXXXXXXXXXLYLMSIPETKVPAXX

SEQ ID NO: 58387 - protein, 40 aa, Artificial Sequence; identical to SEQ ID NO: 23447
  GFR-binding peptide
  MOD_RES (1), (3), (37), (38): Xaa is C or S
  MOD_RES (15), (16), (17), (18), (19): Xaa is A or G
  MOD_RES (20), (21), (22), (23): Xaa is A or G or is absent

SEQ ID NO: 58388 - protein, 39 aa, Artificial Sequence; identical to SEQ ID NO: 2468
  GFR-binding peptide
  MOD_RES (33), (34): Xaa is C or S
  MOD_RES (11), (12), (13), (14), (15): Xaa is A or G
  MOD_RES (16), (17), (18), (19): Xaa is A or G or is absent

SEQ ID NO: 58389 - protein, 37 aa, Artificial Sequence; identical to SEQ ID NO: 2472
  GFR-binding peptide
  MOD_RES (32), (33): Xaa is C or S

SEQ ID NO: 58390 - protein, 40 aa, Artificial Sequence; identical to SEQ ID NO: 2475
  GFR-binding peptide
  MOD_RES (1), (3), (34), (35): Xaa is C or S

SEQ ID NO: 58391 - protein, 33 aa, Artificial Sequence
  GFR-binding peptide
  MOD_RES (1), (1): Xaa is C or S
  MOD_RES (12), (13), (14), (15), (16): Xaa is A or G
  MOD_RES (17), (18), (19), (20): Xaa is A or G or is absent
XEEVIMEYKFKXXXXXXXXXLYLMSIPETKVPA

SEQ ID NO: 58392 - protein, 38 aa, Artificial Sequence; identical to SEQ ID NO: 2477
  GFR-binding peptide
  MOD_RES (2), (4): Xaa is C or S
  MOD_RES (17), (18), (19), (20), (21): Xaa is A or G
  MOD_RES (22), (23), (24), (25): Xaa is A or G or is absent

SEQ ID NO: 58393 - protein, 37 aa, Artificial Sequence; identical to SEQ ID NO: 2481
  GFR-binding peptide
  MOD_RES (1), (3), (35), (36): Xaa is C or S

SEQ ID NO: 58394 - protein, 35 aa, Artificial Sequence; identical to SEQ ID NO: 2482
  GFR-binding peptide
  MOD_RES (1), (1): Xaa is C or S
  MOD_RES (14), (15), (16), (17), (18): Xaa is A or G
  MOD_RES (19), (20), (21), (22): Xaa is A or G or is absent

SEQ ID NO: 58395 - protein, 33 aa, Artificial Sequence
  GFR-binding peptide
  MOD_RES (12), (13), (14), (15), (16): Xaa is A or G
  MOD_RES (17), (18), (19), (20): Xaa is A or G or is absent
SEVVMDEYKFKXXXXXXXXXLYLISIPELRTPV

SEQ ID NO: 58396 - protein, 39 aa, Artificial Sequence; identical to SEQ ID NO: 23463
  GFR-binding peptide
  MOD_RES (1), (3), (37), (38): Xaa is C or S
  MOD_RES (15), (16), (17), (18), (19): Xaa is A or G
  MOD_RES (20), (21), (22), (23): Xaa is A or G or is absent

SEQ ID NO: 58397 - protein, 41 aa, Artificial Sequence; identical to SEQ ID NO: 2483
  GFR-binding peptide
  MOD_RES (2), (4), (36), (37): Xaa is C or S

SEQ ID NO: 58398 - protein, 37 aa, Artificial Sequence
  GFR-binding peptide
  MOD_RES (1), (3), (34), (35): Xaa is C or S
XKXSRVIMPIKGYVKPKRGVFYLINIPSLAQPVXXPA

SEQ ID NO: 58399 - protein, 36 aa, Artificial Sequence
  GFR-binding peptide
  MOD_RES (31), (32): Xaa is C or S
EEVIMEYKFKLLVRGNDLYLMSIPETKVPAXXTSPV

SEQ ID NO: 58400 - protein, 33 aa, Artificial Sequence; identical to SEQ ID NO: 2486
  GFR-binding peptide
  MOD_RES (1), (33): Xaa is C or S

SEQ ID NO: 58401 - protein, 39 aa, Artificial Sequence; identical to SEQ ID NO: 2487
  GFR-binding peptide
  MOD_RES (2), (4), (35), (36): Xaa is C or S

SEQ ID NO: 58402 - protein, 39 aa, Artificial Sequence; identical to SEQ ID NO: 2489
  GFR-binding peptide
  MOD_RES (34), (35): Xaa is C or S
  MOD_RES (12), (13), (14), (15), (16): Xaa is A or G
  MOD_RES (17), (18), (19), (20): Xaa is A or G or is absent

SEQ ID NO: 58403 - protein, 35 aa, Artificial Sequence; identical to SEQ ID NO: 56379
  GFR-binding peptide
  MOD_RES (2), (35): Xaa is C or S
  MOD_RES (13), (14), (15), (16), (17): Xaa is A or G
  MOD_RES (18), (19), (20), (21): Xaa is A or G or is absent

SEQ ID NO: 58404 - protein, 35 aa, Artificial Sequence
  GFR-binding peptide
  MOD_RES (1), (33), (34): Xaa is C or S
XSEVVMDRHKRLVVNNASDYYLISTASLRTPVXXT

SEQ ID NO: 58405 - protein, 40 aa, Artificial Sequence; identical to SEQ ID NO: 2491
  GFR-binding peptide
  MOD_RES (2), (4), (35), (36): Xaa is C or S

SEQ ID NO: 58406 - protein, 36 aa, Artificial Sequence
  GFR-binding peptide
  MOD_RES (2), (34), (35): Xaa is C or S
GXSEVVMDEYKFKVVNNASDLYLISIPELRTPVXXT

SEQ ID NO: 58407 - protein, 43 aa, Artificial Sequence; identical to SEQ ID NO: 2492
  GFR-binding peptide
  MOD_RES (2), (4), (38), (39): Xaa is C or S
  MOD_RES (16), (17), (18), (19), (20): Xaa is A or G
  MOD_RES (21), (22), (23), (24): Xaa is A or G or is absent

SEQ ID NO: 58408 - protein, 39 aa, Artificial Sequence; identical to SEQ ID NO: 23471
  GFR-binding peptide
  MOD_RES (2), (4), (38), (39): Xaa is C or S
  MOD_RES (16), (17), (18), (19), (20): Xaa is A or G
  MOD_RES (21), (22), (23), (24): Xaa is A or G or is absent

SEQ ID NO: 58409 - protein, 41 aa, Artificial Sequence; identical to SEQ ID NO: 31461
  GFR-binding peptide
  MOD_RES (2), (36), (37): Xaa is C or S
  MOD_RES (14), (15), (16), (17), (18): Xaa is A or G
  MOD_RES (19), (20), (21), (22): Xaa is A or G or is absent

SEQ ID NO: 58410 - protein, 36 aa, Artificial Sequence; identical to SEQ ID NO: 31464
  GFR-binding peptide
  MOD_RES (2), (36): Xaa is C or S
  MOD_RES (14), (15), (16), (17), (18): Xaa is A or G
  MOD_RES (19), (20), (21), (22): Xaa is A or G or is absent

SEQ ID NO: 58411 - protein, 38 aa, Artificial Sequence; identical to SEQ ID NO: 2496
  GFR-binding peptide
  MOD_RES (34), (35): Xaa is C or S
  MOD_RES (12), (13), (14), (15), (16): Xaa is A or G
  MOD_RES (17), (18), (19), (20): Xaa is A or G or is absent

SEQ ID NO: 58412 - protein, 38 aa, Artificial Sequence; identical to SEQ ID NO: 2497
  GFR-binding peptide
  MOD_RES (2), (34), (35): Xaa is C or S

SEQ ID NO: 58413 - protein, 37 aa, Artificial Sequence; identical to SEQ ID NO: 31465
  GFR-binding peptide
  MOD_RES (33), (34): Xaa is C or S
  MOD_RES (11), (12), (13), (14), (15): Xaa is A or G
  MOD_RES (16), (17), (18), (19): Xaa is A or G or is absent

SEQ ID NO: 58414 - protein, 31 aa, Artificial Sequence
  GFR-binding peptide
  MOD_RES (31), (31): Xaa is C or S
DVVMGRHKRLIIQQKDNYYLMSTASMKTPTX

SEQ ID NO: 58415 - protein, 37 aa, Artificial Sequence; identical to SEQ ID NO: 2501
  GFR-binding peptide
  MOD_RES (33), (34): Xaa is C or S
  MOD_RES (11), (12), (13), (14), (15): Xaa is A or G
  MOD_RES (16), (17), (18), (19): Xaa is A or G or is absent

SEQ ID NO: 58416 - protein, 37 aa, Artificial Sequence; identical to SEQ ID NO: 23481
  GFR-binding peptide
  MOD_RES (2), (36), (37): Xaa is C or S
  MOD_RES (14), (15), (16), (17), (18): Xaa is A or G
  MOD_RES (19), (20), (21), (22): Xaa is A or G or is absent

SEQ ID NO: 58417 - protein, 31 aa, Artificial Sequence; identical to SEQ ID NO: 31470
  GFR-binding peptide
  MOD_RES (1), (1): Xaa is C or S

SEQ ID NO: 58418 - protein, 38 aa, Artificial Sequence; identical to SEQ ID NO: 2504
  GFR-binding peptide
  MOD_RES (2), (4), (38): Xaa is C or S
  MOD_RES (16), (17), (18), (19), (20): Xaa is A or G
  MOD_RES (21), (22), (23), (24): Xaa is A or G or is absent

SEQ ID NO: 58419 - protein, 38 aa, Artificial Sequence; identical to SEQ ID NO: 2505
  GFR-binding peptide
  MOD_RES (2), (35), (36): Xaa is C or S
  MOD_RES (13), (14), (15), (16), (17): Xaa is A or G
  MOD_RES (18), (19), (20), (21): Xaa is A or G or is absent

SEQ ID NO: 58420 - protein, 32 aa, Artificial Sequence; identical to SEQ ID NO: 2506
  GFR-binding peptide
  MOD_RES (31), (31): Xaa is C or S

SEQ ID NO: 58421 - protein, 35 aa, Artificial Sequence; identical to SEQ ID NO: 2508
  GFR-binding peptide
  MOD_RES (33), (33): Xaa is C or S
  MOD_RES (11), (12), (13), (14), (15): Xaa is A or G
  MOD_RES (16), (17), (18), (19): Xaa is A or G or is absent

SEQ ID NO: 58422 - protein, 39 aa, Artificial Sequence; identical to SEQ ID NO: 31474
  GFR-binding peptide
  MOD_RES (1), (3), (35), (36): Xaa is C or S

SEQ ID NO: 58423 - protein, 34 aa, Artificial Sequence; identical to SEQ ID NO: 23491
  GFR-binding peptide
  MOD_RES (1), (1): Xaa is C or S
  MOD_RES (13), (14), (15), (16), (17): Xaa is A or G
  MOD_RES (18), (19), (20), (21): Xaa is A or G or is absent

SEQ ID NO: 58424 - protein, 41 aa, Artificial Sequence
  GFR-binding peptide
  MOD_RES (2), (36), (37): Xaa is C or S
  MOD_RES (14), (15), (16), (17), (18): Xaa is A or G
  MOD_RES (19), (20), (21), (22): Xaa is A or G or is absent
GXRDVVMGRHKRLXXXXXXXXXYYLMSTASMKTPTXXPGAS

SEQ ID NO: 58425 - protein, 35 aa, Artificial Sequence; identical to SEQ ID NO: 23493
  GFR-binding peptide
  MOD_RES (1), (34), (35): Xaa is C or S

SEQ ID NO: 58426 - protein, 39 aa, Artificial Sequence; identical to SEQ ID NO: 2512
  GFR-binding peptide
  MOD_RES (1), (33), (34): Xaa is C or S

SEQ ID NO: 58427 - protein, 34 aa, Artificial Sequence; identical to SEQ ID NO: 56399
  GFR-binding peptide
  MOD_RES (32), (33): Xaa is C or S

SEQ ID NO: 58428 - protein, 38 aa, Artificial Sequence; identical to SEQ ID NO: 2513
  GFR-binding peptide
  MOD_RES (1), (3), (35), (36): Xaa is C or S

SEQ ID NO: 58429 - protein, 39 aa, Artificial Sequence; identical to SEQ ID NO: 2514
  GFR-binding peptide
  MOD_RES (35), (36): Xaa is C or S
  MOD_RES (13), (14), (15), (16), (17): Xaa is A or G
  MOD_RES (18), (19), (20), (21): Xaa is A or G or is absent

SEQ ID NO: 58430 - protein, 37 aa, Artificial Sequence; identical to SEQ ID NO: 31481
  GFR-binding peptide
  MOD_RES (2), (36), (37): Xaa is C or S
  MOD_RES (14), (15), (16), (17), (18): Xaa is A or G
  MOD_RES (19), (20), (21), (22): Xaa is A or G or is absent

SEQ ID NO: 58431 - protein, 37 aa, Artificial Sequence; identical to SEQ ID NO: 31483
  GFR-binding peptide
  MOD_RES (1), (33), (34): Xaa is C or S

SEQ ID NO: 58432 - protein, 41 aa, Artificial Sequence; identical to SEQ ID NO: 31484
  GFR-binding peptide
  MOD_RES (2), (4), (36), (37): Xaa is C or S

SEQ ID NO: 58433 - protein, 39 aa, Artificial Sequence; identical to SEQ ID NO: 31485
  GFR-binding peptide
  MOD_RES (34), (35): Xaa is C or S
  MOD_RES (12), (13), (14), (15), (16): Xaa is A or G
  MOD_RES (17), (18), (19), (20): Xaa is A or G or is absent

SEQ ID NO: 58434 - protein, 42 aa, Artificial Sequence; identical to SEQ ID NO: 2517
  GFR-binding peptide
  MOD_RES (1), (3), (37): Xaa is C or S
  MOD_RES (15), (16), (17), (18), (19): Xaa is A or G
  MOD_RES (20), (21), (22), (23): Xaa is A or G or is absent

SEQ ID NO: 58435 - protein, 36 aa, Artificial Sequence; identical to SEQ ID NO: 31486
  GFR-binding peptide
  MOD_RES (1), (3): Xaa is C or S
  MOD_RES (15), (16), (17), (18), (19): Xaa is A or G
  MOD_RES (20), (21), (22), (23): Xaa is A or G or is absent

SEQ ID NO: 58436 - protein, 38 aa, Artificial Sequence; identical to SEQ ID NO: 56408
  GFR-binding peptide
  MOD_RES (34), (35): Xaa is C or S
  MOD_RES (12), (13), (14), (15), (16): Xaa is A or G
  MOD_RES (17), (18), (19), (20): Xaa is A or G or is absent

SEQ ID NO: 58437 - protein, 41 aa, Artificial Sequence; identical to SEQ ID NO: 23500
  GFR-binding peptide
  MOD_RES (1), (3), (36), (37): Xaa is C or S
  MOD_RES (14), (15), (16), (17), (18): Xaa is A or G
  MOD_RES (19), (20), (21), (22): Xaa is A or G or is absent

SEQ ID NO: 58438 - protein, 33 aa, Artificial Sequence; identical to SEQ ID NO: 31488
  GFR-binding peptide
  MOD_RES (2), (33): Xaa is C or S

SEQ ID NO: 58439 - protein, 37 aa, Artificial Sequence
  GFR-binding peptide
  MOD_RES (1), (33), (34): Xaa is C or S
XSEVVMDRHKRLVVNNASDYYLISTASLRTPVXXTPP

SEQ ID NO: 58440 - protein, 34 aa, Artificial Sequence; identical to SEQ ID NO: 31490
  GFR-binding peptide
  MOD_RES (1), (1): Xaa is C or S
  MOD_RES (13), (14), (15), (16), (17): Xaa is A or G
  MOD_RES (18), (19), (20), (21): Xaa is A or G or is absent

SEQ ID NO: 58441 - protein, 32 aa, Artificial Sequence; identical to SEQ ID NO: 2520
  GFR-binding peptide
  MOD_RES (2), (2): Xaa is C or S

SEQ ID NO: 58442 - protein, 38 aa, Artificial Sequence
  GFR-binding peptide
  MOD_RES (1), (33), (34): Xaa is C or S
XSEVTMNYHYKLVVNKNEDKYLISIPSMKEPVXXPEPI

SEQ ID NO: 58443 - protein, 34 aa, Artificial Sequence; identical to SEQ ID NO: 2521
  GFR-binding peptide
  MOD_RES (34), (34): Xaa is C or S
  MOD_RES (12), (13), (14), (15), (16): Xaa is A or G
  MOD_RES (17), (18), (19), (20): Xaa is A or G or is absent

SEQ ID NO: 58444 - protein, 40 aa, Artificial Sequence; identical to SEQ ID NO: 23504
  GFR-binding peptide
  MOD_RES (34), (35): Xaa is C or S
  MOD_RES (12), (13), (14), (15), (16): Xaa is A or G
  MOD_RES (17), (18), (19), (20): Xaa is A or G or is absent

SEQ ID NO: 58445 - protein, 36 aa, Artificial Sequence
  GFR-binding peptide
  MOD_RES (33), (34): Xaa is C or S
  MOD_RES (11), (12), (13), (14), (15): Xaa is A or G
  MOD_RES (16), (17), (18), (19): Xaa is A or G or is absent
EVTMNRHKRLXXXXXXXXXYYLISTASMKEPVXXPE

SEQ ID NO: 58446 - protein, 35 aa, Artificial Sequence; identical to SEQ ID NO: 31495
  GFR-binding peptide
  MOD_RES (33), (34): Xaa is C or S
  MOD_RES (11), (12), (13), (14), (15): Xaa is A or G
  MOD_RES (16), (17), (18), (19): Xaa is A or G or is absent

SEQ ID NO: 58447 - protein, 35 aa, Artificial Sequence; identical to SEQ ID NO: 31497
  GFR-binding peptide
  MOD_RES (1), (34), (35): Xaa is C or S
  MOD_RES (12), (13), (14), (15), (16): Xaa is A or G
  MOD_RES (17), (18), (19), (20): Xaa is A or G or is absent

SEQ ID NO: 58448 - protein, 37 aa, Artificial Sequence
  GFR-binding peptide
  MOD_RES (1), (3), (37): Xaa is C or S
  MOD_RES (15), (16), (17), (18), (19): Xaa is A or G
  MOD_RES (20), (21), (22), (23): Xaa is A or G or is absent
XGXSEVVMDYHYKLXXXXXXXXXKYLISIPSLRTPVX

SEQ ID NO: 58449 - protein, 38 aa, Artificial Sequence
  GFR-binding peptide
  MOD_RES (2), (36), (37): Xaa is C or S
  MOD_RES (14), (15), (16), (17), (18): Xaa is A or G
  MOD_RES (19), (20), (21), (22): Xaa is A or G or is absent
GXRDVVMGYHYKLXXXXXXXXXKYLMSIPSMKTPTXXP

SEQ ID NO: 58450 - protein, 39 aa, Artificial Sequence
  GFR-binding peptide
  MOD_RES (2), (4), (37), (38): Xaa is C or S
  MOD_RES (15), (16), (17), (18), (19): Xaa is A or G
  MOD_RES (20), (21), (22), (23): Xaa is A or G or is absent
SXKXSKVIMPIKGYXXXXXXXXXFYLINIPSLDQSVXXP

SEQ ID NO: 58451 - protein, 35 aa, Artificial Sequence; identical to SEQ ID NO: 2528
  GFR-binding peptide
  MOD_RES (2), (34): Xaa is C or S

SEQ ID NO: 58452 - protein, 35 aa, Artificial Sequence; identical to SEQ ID NO: 10025
  GFR-binding peptide
  MOD_RES (1), (33), (34): Xaa is C or S

SEQ ID NO: 58453 - protein, 37 aa, Artificial Sequence; identical to SEQ ID NO: 23510
  GFR-binding peptide
  MOD_RES (2), (4), (36), (37): Xaa is C or S

SEQ ID NO: 58454 - protein, 36 aa, Artificial Sequence; identical to SEQ ID NO: 2529
  GFR-binding peptide
  MOD_RES (1), (33), (34): Xaa is C or S

SEQ ID NO: 58455 - protein, 36 aa, Artificial Sequence; identical to SEQ ID NO: 2532
  GFR-binding peptide
  MOD_RES (34), (35): Xaa is C or S
  MOD_RES (12), (13), (14), (15), (16): Xaa is A or G
  MOD_RES (17), (18), (19), (20): Xaa is A or G or is absent

SEQ ID NO: 58456 - protein, 35 aa, Artificial Sequence; identical to SEQ ID NO: 23515
  GFR-binding peptide
  MOD_RES (1), (3), (34), (35): Xaa is C or S

SEQ ID NO: 58457 - protein, 34 aa, Artificial Sequence; identical to SEQ ID NO: 2533
  GFR-binding peptide
  MOD_RES (32), (33): Xaa is C or S

SEQ ID NO: 58458 - protein, 34 aa, Artificial Sequence
  GFR-binding peptide
  MOD_RES (1), (33), (34): Xaa is C or S
XRDVVMGYHYKLIIQQKDNKYLMSIPSMKTPTXX

SEQ ID NO: 58459 - protein, 33 aa, Artificial Sequence; identical to SEQ ID NO: 2537
  GFR-binding peptide
  MOD_RES (2), (2): Xaa is C or S

SEQ ID NO: 58460 - protein, 36 aa, Artificial Sequence; identical to SEQ ID NO: 2538
  GFR-binding peptide
  MOD_RES (1), (3), (35), (36): Xaa is C or S

SEQ ID NO: 58461 - protein, 34 aa, Artificial Sequence; identical to SEQ ID NO: 56440
  GFR-binding peptide
  MOD_RES (1), (1): Xaa is C or S
  MOD_RES (13), (14), (15), (16), (17): Xaa is A or G
  MOD_RES (18), (19), (20), (21): Xaa is A or G or is absent

SEQ ID NO: 58462 - protein, 37 aa, Artificial Sequence; identical to SEQ ID NO: 2539
  GFR-binding peptide
  MOD_RES (2), (33), (34): Xaa is C or S

SEQ ID NO: 58463 - protein, 38 aa, Artificial Sequence; identical to SEQ ID NO: 2546
  GFR-binding peptide
  MOD_RES (1), (35), (36): Xaa is C or S
  MOD_RES (13), (14), (15), (16), (17): Xaa is A or G
  MOD_RES (18), (19), (20), (21): Xaa is A or G or is absent

SEQ ID NO: 58464 - protein, 36 aa, Artificial Sequence; identical to SEQ ID NO: 23532
  GFR-binding peptide
  MOD_RES (2), (4), (36): Xaa is C or S

SEQ ID NO: 58465 - protein, 41 aa, Artificial Sequence; identical to SEQ ID NO: 2551
  GFR-binding peptide
  MOD_RES (2), (4), (38), (39): Xaa is C or S
  MOD_RES (16), (17), (18), (19), (20): Xaa is A or G
  MOD_RES (21), (22), (23), (24): Xaa is A or G or is absent

SEQ ID NO: 58466 - protein, 33 aa, Artificial Sequence; identical to SEQ ID NO: 56455
  GFR-binding peptide
  MOD_RES (1), (3): Xaa is C or S

SEQ ID NO: 58467 - protein, 35 aa, Artificial Sequence; identical to SEQ ID NO: 2552
  GFR-binding peptide
  MOD_RES (2), (34), (35): Xaa is C or S

SEQ ID NO: 58468 - protein, 38 aa, Artificial Sequence
  GFR-binding peptide
  MOD_RES (2), (36), (37): Xaa is C or S
  MOD_RES (14), (15), (16), (17), (18): Xaa is A or G
  MOD_RES (19), (20), (21), (22): Xaa is A or G or is absent
AXSEVTMNYHYKLXXXXXXXXXKYLISIPSMKEPVXXP

SEQ ID NO: 58469 - protein, 33 aa, Artificial Sequence; identical to SEQ ID NO: 56456
  GFR-binding peptide
  MOD_RES (31), (32): Xaa is C or S

SEQ ID NO: 58470 - protein, 36 aa, Artificial Sequence; identical to SEQ ID NO: 2554
  GFR-binding peptide
  MOD_RES (32), (33): Xaa is C or S

SEQ ID NO: 58471 - protein, 33 aa, Artificial Sequence; identical to SEQ ID NO: 2555
  GFR-binding peptide
  MOD_RES (31), (32): Xaa is C or S

SEQ ID NO: 58472 - protein, 39 aa, Artificial Sequence
  GFR-binding peptide
  MOD_RES (1), (33), (34): Xaa is C or S
XSEVTMNEYKFKVVNKNEDLYLISIPEMKEPVXXPEPIG

SEQ ID NO: 58473 - protein, 43 aa, Artificial Sequence; identical to SEQ ID NO: 23542
  GFR-binding peptide
  MOD_RES (1), (3), (38), (39): Xaa is C or S
  MOD_RES (16), (17), (18), (19), (20): Xaa is A or G
  MOD_RES (21), (22), (23), (24): Xaa is A or G or is absent

SEQ ID NO: 58474 - protein, 36 aa, Artificial Sequence; identical to SEQ ID NO: 23543
  GFR-binding peptide
  MOD_RES (2), (4): Xaa is C or S
  MOD_RES (15), (16), (17), (18), (19): Xaa is A or G
  MOD_RES (20), (21), (22), (23): Xaa is A or G or is absent

SEQ ID NO: 58475 - protein, 36 aa, Artificial Sequence; identical to SEQ ID NO: 2562
  GFR-binding peptide
  MOD_RES (2), (4), (36): Xaa is C or S

SEQ ID NO: 58476 - protein, 38 aa, Artificial Sequence; identical to SEQ ID NO: 31535
  GFR-binding peptide
  MOD_RES (2), (36): Xaa is C or S
  MOD_RES (14), (15), (16), (17), (18): Xaa is A or G
  MOD_RES (19), (20), (21), (22): Xaa is A or G or is absent

SEQ ID NO: 58477 - protein, 32 aa, Artificial Sequence
  GFR-binding peptide
  MOD_RES (31), (32): Xaa is C or S
EVTMNEYKFKVVNKNEDLYLISIPEMKEPVXX

SEQ ID NO: 58478 - protein, 36 aa, Artificial Sequence; identical to SEQ ID NO: 23554
  GFR-binding peptide
  MOD_RES (34), (35): Xaa is C or S
  MOD_RES (12), (13), (14), (15), (16): Xaa is A or G
  MOD_RES (17), (18), (19), (20): Xaa is A or G or is absent

SEQ ID NO: 58479 - protein, 38 aa, Artificial Sequence; identical to SEQ ID NO: 2564
  GFR-binding peptide
  MOD_RES (1), (34), (35): Xaa is C or S

SEQ ID NO: 58480 - protein, 38 aa, Artificial Sequence
  GFR-binding peptide
  MOD_RES (33), (34): Xaa is C or S
  MOD_RES (11), (12), (13), (14), (15): Xaa is A or G
  MOD_RES (16), (17), (18), (19): Xaa is A or G or is absent
DVVMGEYKFKXXXXXXXXXLYLMSIPEMKTPTXXPGAS

SEQ ID NO: 58481 - protein, 40 aa, Artificial Sequence; identical to SEQ ID NO: 2565
  GFR-binding peptide
  MOD_RES (1), (3), (35), (36): Xaa is C or S

SEQ ID NO: 58482 - protein, 34 aa, Artificial Sequence; identical to SEQ ID NO: 2567
  GFR-binding peptide
  MOD_RES (32), (33): Xaa is C or S

SEQ ID NO: 58483 - protein, 39 aa, Artificial Sequence; identical to SEQ ID NO: 2568
  GFR-binding peptide
  MOD_RES (2), (35), (36): Xaa is C or S

SEQ ID NO: 58484 - protein, 35 aa, Artificial Sequence; identical to SEQ ID NO: 2569
  GFR-binding peptide
  MOD_RES (1), (33), (34): Xaa is C or S

SEQ ID NO: 58485 - protein, 39 aa, Artificial Sequence; identical to SEQ ID NO: 2571
  GFR-binding peptide
  MOD_RES (33), (34): Xaa is C or S
  MOD_RES (11), (12), (13), (14), (15): Xaa is A or G
  MOD_RES (16), (17), (18), (19): Xaa is A or G or is absent

SEQ ID NO: 58486 - protein, 37 aa, Artificial Sequence; identical to SEQ ID NO: 31552
  GFR-binding peptide
  MOD_RES (33), (33): Xaa is C or S
  MOD_RES (11), (12), (13), (14), (15): Xaa is A or G
  MOD_RES (16), (17), (18), (19): Xaa is A or G or is absent

SEQ ID NO: 58487 - protein, 37 aa, Artificial Sequence; identical to SEQ ID NO: 56479
  GFR-binding peptide
  MOD_RES (1), (3), (35), (36): Xaa is C or S

SEQ ID NO: 58488 - protein, 40 aa, Artificial Sequence; identical to SEQ ID NO: 23570
  GFR-binding peptide
  MOD_RES (1), (34), (35): Xaa is C or S
  MOD_RES (12), (13), (14), (15), (16): Xaa is A or G
  MOD_RES (17), (18), (19), (20): Xaa is A or G or is absent

SEQ ID NO: 58489 - protein, 42 aa, Artificial Sequence; identical to SEQ ID NO: 2575
  GFR-binding peptide
  MOD_RES (2), (36), (37): Xaa is C or S
  MOD_RES (14), (15), (16), (17), (18): Xaa is A or G
  MOD_RES (19), (20), (21), (22): Xaa is A or G or is absent

SEQ ID NO: 58490 - protein, 39 aa, Artificial Sequence; identical to SEQ ID NO: 2576
  GFR-binding peptide
  MOD_RES (1), (35), (36): Xaa is C or S
  MOD_RES (13), (14), (15), (16), (17): Xaa is A or G
  MOD_RES (18), (19), (20), (21): Xaa is A or G or is absent

SEQ ID NO: 58491 - protein, 36 aa, Artificial Sequence; identical to SEQ ID NO: 2577
  GFR-binding peptide
  MOD_RES (2), (4): Xaa is C or S
  MOD_RES (15), (16), (17), (18), (19): Xaa is A or G
  MOD_RES (20), (21), (22), (23): Xaa is A or G or is absent

SEQ ID NO: 58492 - protein, 36 aa, Artificial Sequence
  GFR-binding peptide
  MOD_RES (31), (32): Xaa is C or S
EVTMNRHKRLVVNKNEDYYLISTASMKEPVXXPEPI

SEQ ID NO: 58493 - protein, 42 aa, Artificial Sequence; identical to SEQ ID NO: 2581
  GFR-binding peptide
  MOD_RES (1), (3), (37), (38): Xaa is C or S
  MOD_RES (15), (16), (17), (18), (19): Xaa is A or G
  MOD_RES (20), (21), (22), (23): Xaa is A or G or is absent

SEQ ID NO: 58494 - protein, 35 aa, Artificial Sequence; identical to SEQ ID NO: 23578
  GFR-binding peptide
  MOD_RES (1), (35): Xaa is C or S
  MOD_RES (13), (14), (15), (16), (17): Xaa is A or G
  MOD_RES (18), (19), (20), (21): Xaa is A or G or is absent

SEQ ID NO: 58495 - protein, 36 aa, Artificial Sequence; identical to SEQ ID NO: 2582
  GFR-binding peptide
  MOD_RES (1), (3): Xaa is C or S
  MOD_RES (15), (16), (17), (18), (19): Xaa is A or G
  MOD_RES (20), (21), (22), (23): Xaa is A or G or is absent

SEQ ID NO: 58496 - protein, 39 aa, Artificial Sequence; identical to SEQ ID NO: 23580
  GFR-binding peptide
  MOD_RES (1), (3), (37), (38): Xaa is C or S
  MOD_RES (15), (16), (17), (18), (19): Xaa is A or G
  MOD_RES (20), (21), (22), (23): Xaa is A or G or is absent

SEQ ID NO: 58497 - protein, 42 aa, Artificial Sequence; identical to SEQ ID NO: 23581
  GFR-binding peptide
  MOD_RES (2), (36), (37): Xaa is C or S
  MOD_RES (14), (15), (16), (17), (18): Xaa is A or G
  MOD_RES (19), (20), (21), (22): Xaa is A or G or is absent

SEQ ID NO: 58498 - protein, 37 aa, Artificial Sequence; identical to SEQ ID NO: 23584
  GFR-binding peptide
  MOD_RES (1), (35), (36): Xaa is C or S
  MOD_RES (13), (14), (15), (16), (17): Xaa is A or G
  MOD_RES (18), (19), (20), (21): Xaa is A or G or is absent

SEQ ID NO: 58499 - protein, 38 aa, Artificial Sequence; identical to SEQ ID NO: 2587
  GFR-binding peptide
  MOD_RES (2), (4), (35), (36): Xaa is C or S

SEQ ID NO: 58500 - protein, 42 aa, Artificial Sequence; identical to SEQ ID NO: 23586
  GFR-binding peptide
  MOD_RES (2), (36), (37): Xaa is C or S
  MOD_RES (14), (15), (16), (17), (18): Xaa is A or G
  MOD_RES (19), (20), (21), (22): Xaa is A or G or is absent

SEQ ID NO: 58501 - protein, 39 aa, Artificial Sequence
  GFR-binding peptide
  MOD_RES (1), (35), (36): Xaa is C or S
  MOD_RES (13), (14), (15), (16), (17): Xaa is A or G
  MOD_RES (18), (19), (20), (21): Xaa is A or G or is absent
XRDVVMGRHKRLXXXXXXXXXYYLMSTASMKTPTXXPGA

SEQ ID NO: 58502 - protein, 33 aa, Artificial Sequence; identical to SEQ ID NO: 31566
  GFR-binding peptide
  MOD_RES (31), (32): Xaa is C or S

SEQ ID NO: 58503 - protein, 41 aa, Artificial Sequence; identical to SEQ ID NO: 23587
  GFR-binding peptide
  MOD_RES (2), (4), (36), (37): Xaa is C or S

SEQ ID NO: 58504 - protein, 41 aa, Artificial Sequence; identical to SEQ ID NO: 23588
  GFR-binding peptide
  MOD_RES (2), (4), (38), (39): Xaa is C or S
  MOD_RES (16), (17), (18), (19), (20): Xaa is A or G
  MOD_RES (21), (22), (23), (24): Xaa is A or G or is absent

SEQ ID NO: 58505 - protein, 38 aa, Artificial Sequence; identical to SEQ ID NO: 23590
  GFR-binding peptide
  MOD_RES (32), (33): Xaa is C or S

SEQ ID NO: 58506 - protein, 43 aa, Artificial Sequence; identical to SEQ ID NO: 2591
  GFR-binding peptide
  MOD_RES (2), (4), (39), (40): Xaa is C or S
  MOD_RES (17), (18), (19), (20), (21): Xaa is A or G
  MOD_RES (22), (23), (24), (25): Xaa is A or G or is absent

SEQ ID NO: 58507 - protein, 35 aa, Artificial Sequence; identical to SEQ ID NO: 23596
  GFR-binding peptide
  MOD_RES (1), (34), (35): Xaa is C or S
  MOD_RES (12), (13), (14), (15), (16): Xaa is A or G
  MOD_RES (17), (18), (19), (20): Xaa is A or G or is absent

SEQ ID NO: 58508 - protein, 41 aa, Artificial Sequence
  GFR-binding peptide
  MOD_RES (2), (4), (38), (39): Xaa is C or S
  MOD_RES (16), (17), (18), (19), (20): Xaa is A or G
  MOD_RES (21), (22), (23), (24): Xaa is A or G or is absent
RXAXSEVTMNEYKFKXXXXXXXXXLYLISIPEMKEPVXXPE

SEQ ID NO: 58509 - protein, 38 aa, Artificial Sequence; identical to SEQ ID NO: 31574
  GFR-binding peptide
  MOD_RES (1), (3), (35), (36): Xaa is C or S

SEQ ID NO: 58510 - protein, 34 aa, Artificial Sequence; identical to SEQ ID NO: 2598
  GFR-binding peptide
  MOD_RES (2), (4): Xaa is C or S

SEQ ID NO: 58511 - protein, 37 aa, Artificial Sequence; identical to SEQ ID NO: 23599
  GFR-binding peptide
  MOD_RES (33), (34): Xaa is C or S
  MOD_RES (11), (12), (13), (14), (15): Xaa is A or G
  MOD_RES (16), (17), (18), (19): Xaa is A or G or is absent

SEQ ID NO: 58512 - protein, 35 aa, Artificial Sequence
  GFR-binding peptide
  MOD_RES (33), (34): Xaa is C or S
  MOD_RES (11), (12), (13), (14), (15): Xaa is A or G
  MOD_RES (16), (17), (18), (19): Xaa is A or G or is absent
EVVMDRHKRLXXXXXXXXXYYLISTASLRAPVXXS

SEQ ID NO: 58513 - protein, 40 aa, Artificial Sequence
  GFR-binding peptide
  MOD_RES (2), (34), (35): Xaa is C or S
AXSEVTMNEYKFKVVNKNEDLYLISIPEMKEPVXXPEPIG

SEQ ID NO: 58514 - protein, 36 aa, Artificial Sequence; identical to SEQ ID NO: 23603
  GFR-binding peptide
  MOD_RES (2), (34), (35): Xaa is C or S

SEQ ID NO: 58515 - protein, 37 aa, Artificial Sequence; identical to SEQ ID NO: 56505
  GFR-binding peptide
  MOD_RES (31), (32): Xaa is C or S

SEQ ID NO: 58516 - protein, 37 aa, Artificial Sequence; identical to SEQ ID NO: 23604
  GFR-binding peptide
  MOD_RES (2), (4), (35), (36): Xaa is C or S

SEQ ID NO: 58517 - protein, 41 aa, Artificial Sequence
  GFR-binding peptide
  MOD_RES (1), (3), (35), (36): Xaa is C or S
XAXSEVTMNEYKFKVVNKNEDLYLISIPEMKEPVXXPEPIG

SEQ ID NO: 58518 - protein, 35 aa, Artificial Sequence
  GFR-binding peptide
  MOD_RES (1), (32), (33): Xaa is C or S
XSRVIMPIKGYVKPKRGVFYLINIPSLAQPVXXPA

SEQ ID NO: 58519 - protein, 35 aa, Artificial Sequence; identical to SEQ ID NO: 2601
  GFR-binding peptide
  MOD_RES (1), (3): Xaa is C or S

SEQ ID NO: 58520 - protein, 36 aa, Artificial Sequence; identical to SEQ ID NO: 2602
  GFR-binding peptide
  MOD_RES (1), (34), (35): Xaa is C or S
  MOD_RES (12), (13), (14), (15), (16): Xaa is A or G
  MOD_RES (17), (18), (19), (20): Xaa is A or G or is absent

SEQ ID NO: 58521 - protein, 37 aa, Artificial Sequence
  GFR-binding peptide
  MOD_RES (34), (35): Xaa is C or S
  MOD_RES (12), (13), (14), (15), (16): Xaa is A or G
  MOD_RES (17), (18), (19), (20): Xaa is A or G or is absent
SEVTMNRYKKLXXXXXXXXXFYLISIANMKEPVXXPE

SEQ ID NO: 58522 - protein, 33 aa, Artificial Sequence; identical to SEQ ID NO: 23612
  GFR-binding peptide
  MOD_RES (33), (33): Xaa is C or S
  MOD_RES (11), (12), (13), (14), (15): Xaa is A or G
  MOD_RES (16), (17), (18), (19): Xaa is A or G or is absent

SEQ ID NO: 58523 - protein, 43 aa, Artificial Sequence; identical to SEQ ID NO: 2607
  GFR-binding peptide
  MOD_RES (1), (3), (37), (38): Xaa is C or S
  MOD_RES (15), (16), (17), (18), (19): Xaa is A or G
  MOD_RES (20), (21), (22), (23): Xaa is A or G or is absent

SEQ ID NO: 58524 - protein, 39 aa, Artificial Sequence
  GFR-binding peptide
  MOD_RES (2), (34), (35): Xaa is C or S
GXSEVVMDRHKRLVVNNASDYYLISTASLRTPVXXTPPT

SEQ ID NO: 58525 - protein, 33 aa, Artificial Sequence; identical to SEQ ID NO: 2612
  GFR-binding peptide
  MOD_RES (1), (1): Xaa is C or S
  MOD_RES (12), (13), (14), (15), (16): Xaa is A or G
  MOD_RES (17), (18), (19), (20): Xaa is A or G or is absent

SEQ ID NO: 58526 - protein, 38 aa, Artificial Sequence; identical to SEQ ID NO: 31599
  GFR-binding peptide
  MOD_RES (2), (34), (35): Xaa is C or S

SEQ ID NO: 58527 - protein, 36 aa, Artificial Sequence; identical to SEQ ID NO: 31600
  GFR-binding peptide
  MOD_RES (2), (36): Xaa is C or S
  MOD_RES (14), (15), (16), (17), (18): Xaa is A or G
  MOD_RES (19), (20), (21), (22): Xaa is A or G or is absent

SEQ ID NO: 58528 - protein, 35 aa, Artificial Sequence; identical to SEQ ID NO: 23621
  GFR-binding peptide
  MOD_RES (33), (34): Xaa is C or S
  MOD_RES (11), (12), (13), (14), (15): Xaa is A or G
  MOD_RES (16), (17), (18), (19): Xaa is A or G or is absent

SEQ ID NO: 58529 - protein, 39 aa, Artificial Sequence; identical to SEQ ID NO: 2619
  GFR-binding peptide
  MOD_RES (1), (3), (35), (36): Xaa is C or S

SEQ ID NO: 58530 - protein, 37 aa, Artificial Sequence
  GFR-binding peptide
  MOD_RES (1), (34), (35): Xaa is C or S
  MOD_RES (12), (13), (14), (15), (16): Xaa is A or G
  MOD_RES (17), (18), (19), (20): Xaa is A or G or is absent
XEEVIMYHYKLXXXXXXXXXKYLMSIPSTKVPAXXTS

SEQ ID NO: 58531 - protein, 41 aa, Artificial Sequence; identical to SEQ ID NO: 56522
  GFR-binding peptide
  MOD_RES (2), (4), (35), (36): Xaa is C or S

SEQ ID NO: 58532 - protein, 36 aa, Artificial Sequence; identical to SEQ ID NO: 31602
  GFR-binding peptide
  MOD_RES (35), (36): Xaa is C or S
  MOD_RES (13), (14), (15), (16), (17): Xaa is A or G
  MOD_RES (18), (19), (20), (21): Xaa is A or G or is absent

SEQ ID NO: 58533 - protein, 40 aa, Artificial Sequence; identical to SEQ ID NO: 31604
  GFR-binding peptide
  MOD_RES (2), (4), (38), (39): Xaa is C or S
  MOD_RES (16), (17), (18), (19), (20): Xaa is A or G
  MOD_RES (21), (22), (23), (24): Xaa is A or G or is absent

SEQ ID NO: 58534 - protein, 34 aa, Artificial Sequence
  GFR-binding peptide
  MOD_RES (32), (33): Xaa is C or S
RDVVMGEYKFKIIQQKDNLYLMSIPEMKTPTXXP

SEQ ID NO: 58535 - protein, 39 aa, Artificial Sequence
  GFR-binding peptide
  MOD_RES (1), (35), (36): Xaa is C or S
  MOD_RES (13), (14), (15), (16), (17): Xaa is A or G
  MOD_RES (18), (19), (20), (21): Xaa is A or G or is absent
XSEVTMNEYKFKXXXXXXXXXLYLISIPEMKEPVXXPEP

SEQ ID NO: 58536 - protein, 37 aa, Artificial Sequence; identical to SEQ ID NO: 23627
  GFR-binding peptide
  MOD_RES (1), (35), (36): Xaa is C or S
  MOD_RES (13), (14), (15), (16), (17): Xaa is A or G
  MOD_RES (18), (19), (20), (21): Xaa is A or G or is absent

SEQ ID NO: 58537 - protein, 35 aa, Artificial Sequence; identical to SEQ ID NO: 2626
  GFR-binding peptide
  MOD_RES (34), (35): Xaa is C or S
  MOD_RES (12), (13), (14), (15), (16): Xaa is A or G
  MOD_RES (17), (18), (19), (20): Xaa is A or G or is absent

SEQ ID NO: 58538 - protein, 40 aa, Artificial Sequence
  GFR-binding peptide
  MOD_RES (2), (4), (35), (36): Xaa is C or S
SXKXSKVIMPIKGYIKPTKGIFYLINIPSLDQSVXXPSAS

SEQ ID NO: 58539 - protein, 41 aa, Artificial Sequence; identical to SEQ ID NO: 2627
  GFR-binding peptide
  MOD_RES (2), (4), (35), (36): Xaa is C or S

SEQ ID NO: 58540 - protein, 31 aa, Artificial Sequence; identical to SEQ ID NO: 2628
  GFR-binding peptide
  MOD_RES (31), (31): Xaa is C or S

SEQ ID NO: 58541 - protein, 38 aa, Artificial Sequence
  GFR-binding peptide
  MOD_RES (2), (33), (34): Xaa is C or S
GXEEVIMYHYKLLLVRGNDKYLMSIPSTKVPAXXTSPV

SEQ ID NO: 58542 - protein, 38 aa, Artificial Sequence; identical to SEQ ID NO: 31608
  GFR-binding peptide
  MOD_RES (2), (4), (35), (36): Xaa is C or S

SEQ ID NO: 58543 - protein, 34 aa, Artificial Sequence; identical to SEQ ID NO: 56536
  GFR-binding peptide
  MOD_RES (1), (3), (34): Xaa is C or S

SEQ ID NO: 58544 - protein, 36 aa, Artificial Sequence; identical to SEQ ID NO: 31609
  GFR-binding peptide
  MOD_RES (33), (34): Xaa is C or S
  MOD_RES (11), (12), (13), (14), (15): Xaa is A or G
  MOD_RES (16), (17), (18), (19): Xaa is A or G or is absent

SEQ ID NO: 58545 - protein, 39 aa, Artificial Sequence
  GFR-binding peptide
  MOD_RES (1), (33), (34): Xaa is C or S
XRDVVMGEYKFKIIQQKDNLYLMSIPEMKTPTXXPGASG

SEQ ID NO: 58546 - protein, 40 aa, Artificial Sequence
  GFR-binding peptide
  MOD_RES (34), (35): Xaa is C or S
  MOD_RES (12), (13), (14), (15), (16): Xaa is A or G
  MOD_RES (17), (18), (19), (20): Xaa is A or G or is absent
SEVTMNPIKGYXXXXXXXXXFYLINIPSMKEPVXXPEPIG

SEQ ID NO: 58547 - protein, 39 aa, Artificial Sequence; identical to SEQ ID NO: 2636
  GFR-binding peptide
  MOD_RES (2), (37), (38): Xaa is C or S
  MOD_RES (15), (16), (17), (18), (19): Xaa is A or G
  MOD_RES (20), (21), (22), (23): Xaa is A or G or is absent

SEQ ID NO: 58548 - protein, 32 aa, Artificial Sequence
  GFR-binding peptide
  MOD_RES (32), (32): Xaa is C or S
ESVAMGRHKRLYTVVGKDYYLISTASLKTPVX

SEQ ID NO: 58549 - protein, 31 aa, Artificial Sequence; identical to SEQ ID NO: 23635
  GFR-binding peptide

SEQ ID NO: 58550 - protein, 33 aa, Artificial Sequence; identical to SEQ ID NO: 23643
  GFR-binding peptide
  MOD_RES (1), (33): Xaa is C or S

SEQ ID NO: 58551 - protein, 31 aa, Artificial Sequence; identical to SEQ ID NO: 23644
  GFR-binding peptide

SEQ ID NO: 58552 - protein, 35 aa, Artificial Sequence; identical to SEQ ID NO: 56553
  GFR-binding peptide
  MOD_RES (1), (3), (34), (35): Xaa is C or S

SEQ ID NO: 58553 - protein, 39 aa, Artificial Sequence; identical to SEQ ID NO: 31620
  GFR-binding peptide
  MOD_RES (34), (35): Xaa is C or S
  MOD_RES (12), (13), (14), (15), (16): Xaa is A or G
  MOD_RES (17), (18), (19), (20): Xaa is A or G or is absent

SEQ ID NO: 58554 - protein, 43 aa, Artificial Sequence; identical to SEQ ID NO: 2643
  GFR-binding peptide
  MOD_RES (2), (4), (37), (38): Xaa is C or S
  MOD_RES (15), (16), (17), (18), (19): Xaa is A or G
  MOD_RES (20), (21), (22), (23): Xaa is A or G or is absent

SEQ ID NO: 58555 - protein, 40 aa, Artificial Sequence
  GFR-binding peptide
  MOD_RES (1), (3), (36), (37): Xaa is C or S
  MOD_RES (14), (15), (16), (17), (18): Xaa is A or G
  MOD_RES (19), (20), (21), (22): Xaa is A or G or is absent
XGXEEVIMEYKFKXXXXXXXXXLYLMSIPETKVPAXXTSP

SEQ ID NO: 58556 - protein, 38 aa, Artificial Sequence; identical to SEQ ID NO: 31624
  GFR-binding peptide
  MOD_RES (1), (3), (35), (36): Xaa is C or S

SEQ ID NO: 58557 - protein, 39 aa, Artificial Sequence; identical to SEQ ID NO: 23652
  GFR-binding peptide
  MOD_RES (2), (36), (37): Xaa is C or S
  MOD_RES (14), (15), (16), (17), (18): Xaa is A or G
  MOD_RES (19), (20), (21), (22): Xaa is A or G or is absent

SEQ ID NO: 58558 - protein, 41 aa, Artificial Sequence; identical to SEQ ID NO: 31628
  GFR-binding peptide
  MOD_RES (2), (4), (38), (39): Xaa is C or S
  MOD_RES (16), (17), (18), (19), (20): Xaa is A or G
  MOD_RES (21), (22), (23), (24): Xaa is A or G or is absent

SEQ ID NO: 58559 - protein, 37 aa, Artificial Sequence; identical to SEQ ID NO: 2650
  GFR-binding peptide
  MOD_RES (1), (3), (35), (36): Xaa is C or S

SEQ ID NO: 58560 - protein, 37 aa, Artificial Sequence; identical to SEQ ID NO: 2651
  GFR-binding peptide
  MOD_RES (1), (36), (37): Xaa is C or S
  MOD_RES (14), (15), (16), (17), (18): Xaa is A or G
  MOD_RES (19), (20), (21), (22): Xaa is A or G or is absent

SEQ ID NO: 58561 - protein, 39 aa, Artificial Sequence; identical to SEQ ID NO: 2653
  GFR-binding peptide
  MOD_RES (34), (34): Xaa is C or S
  MOD_RES (12), (13), (14), (15), (16): Xaa is A or G
  MOD_RES (17), (18), (19), (20): Xaa is A or G or is absent

SEQ ID NO: 58562 - protein, 36 aa, Artificial Sequence; identical to SEQ ID NO: 10135
  GFR-binding peptide
  MOD_RES (2), (34), (35): Xaa is C or S

SEQ ID NO: 58563 - protein, 37 aa, Artificial Sequence; identical to SEQ ID NO: 2656
  GFR-binding peptide
  MOD_RES (1), (3), (36), (37): Xaa is C or S
  MOD_RES (14), (15), (16), (17), (18): Xaa is A or G
  MOD_RES (19), (20), (21), (22): Xaa is A or G or is absent

SEQ ID NO: 58564 - protein, 36 aa, Artificial Sequence; identical to SEQ ID NO: 56567
  GFR-binding peptide
  MOD_RES (2), (35), (36): Xaa is C or S
  MOD_RES (13), (14), (15), (16), (17): Xaa is A or G
  MOD_RES (18), (19), (20), (21): Xaa is A or G or is absent

SEQ ID NO: 58565 - protein, 35 aa, Artificial Sequence; identical to SEQ ID NO: 31638
  GFR-binding peptide
  MOD_RES (1), (35): Xaa is C or S
  MOD_RES (13), (14), (15), (16), (17): Xaa is A or G
  MOD_RES (18), (19), (20), (21): Xaa is A or G or is absent

SEQ ID NO: 58566 - protein, 35 aa, Artificial Sequence; identical to SEQ ID NO: 2659
  GFR-binding peptide
  MOD_RES (2), (4), (35): Xaa is C or S

SEQ ID NO: 58567 - protein, 38 aa, Artificial Sequence; identical to SEQ ID NO: 2662
  GFR-binding peptide
  MOD_RES (1), (3), (37), (38): Xaa is C or S
  MOD_RES (15), (16), (17), (18), (19): Xaa is A or G
  MOD_RES (20), (21), (22), (23): Xaa is A or G or is absent

SEQ ID NO: 58568 - protein, 30 aa, Artificial Sequence
  GFR-binding peptide
EVTMNPIKGYVVNKNEDFYLINIPSMKEPV

SEQ ID NO: 58569 - protein, 36 aa, Artificial Sequence; identical to SEQ ID NO: 2664
  GFR-binding peptide
  MOD_RES (2), (36): Xaa is C or S
  MOD_RES (14), (15), (16), (17), (18): Xaa is A or G
  MOD_RES (19), (20), (21), (22): Xaa is A or G or is absent

SEQ ID NO: 58570 - protein, 38 aa, Artificial Sequence; identical to SEQ ID NO: 2666
  GFR-binding peptide
  MOD_RES (1), (35), (36): Xaa is C or S
  MOD_RES (13), (14), (15), (16), (17): Xaa is A or G
  MOD_RES (18), (19), (20), (21): Xaa is A or G or is absent

SEQ ID NO: 58571 - protein, 37 aa, Artificial Sequence; identical to SEQ ID NO: 23665
  GFR-binding peptide
  MOD_RES (2), (36), (37): Xaa is C or S
  MOD_RES (14), (15), (16), (17), (18): Xaa is A or G
  MOD_RES (19), (20), (21), (22): Xaa is A or G or is absent

SEQ ID NO: 58572 - protein, 38 aa, Artificial Sequence
  GFR-binding peptide
  MOD_RES (1), (33), (34): Xaa is C or S
XRDVVMGYHYKLIIQQKDNKYLMSIPSMKTPTXXPGAS

SEQ ID NO: 58573 - protein, 40 aa, Artificial Sequence; identical to SEQ ID NO: 2669
  GFR-binding peptide
  MOD_RES (2), (4), (38), (39): Xaa is C or S
  MOD_RES (16), (17), (18), (19), (20): Xaa is A or G
  MOD_RES (21), (22), (23), (24): Xaa is A or G or is absent

SEQ ID NO: 58574 - protein, 38 aa, Artificial Sequence; identical to SEQ ID NO: 2671
  GFR-binding peptide
  MOD_RES (35), (36): Xaa is C or S
  MOD_RES (13), (14), (15), (16), (17): Xaa is A or G
  MOD_RES (18), (19), (20), (21): Xaa is A or G or is absent

SEQ ID NO: 58575 - protein, 40 aa, Artificial Sequence; identical to SEQ ID NO: 31646
  GFR-binding peptide
  MOD_RES (1), (3), (36), (37): Xaa is C or S

SEQ ID NO: 58576 - protein, 33 aa, Artificial Sequence; identical to SEQ ID NO: 2674
  GFR-binding peptide
  MOD_RES (1), (1): Xaa is C or S

SEQ ID NO: 58577 - protein, 37 aa, Artificial Sequence; identical to SEQ ID NO: 2676
  GFR-binding peptide
  MOD_RES (31), (32): Xaa is C or S

SEQ ID NO: 58578 - protein, 38 aa, Artificial Sequence; identical to SEQ ID NO: 2678
  GFR-binding peptide
  MOD_RES (34), (35): Xaa is C or S
  MOD_RES (12), (13), (14), (15), (16): Xaa is A or G
  MOD_RES (17), (18), (19), (20): Xaa is A or G or is absent

SEQ ID NO: 58579 - protein, 36 aa, Artificial Sequence; identical to SEQ ID NO: 31655
  GFR-binding peptide
  MOD_RES (1), (3), (35): Xaa is C or S

SEQ ID NO: 58580 - protein, 39 aa, Artificial Sequence
  GFR-binding peptide
  MOD_RES (1), (3), (35), (36): Xaa is C or S
XGXSEVVMDEYKFKVVNNASDLYLISIPELRTPVXXTPP

SEQ ID NO: 58581 - protein, 37 aa, Artificial Sequence; identical to SEQ ID NO: 23678
  GFR-binding peptide
  MOD_RES (2), (4): Xaa is C or S
  MOD_RES (16), (17), (18), (19), (20): Xaa is A or G
  MOD_RES (21), (22), (23), (24): Xaa is A or G or is absent

SEQ ID NO: 58582 - protein, 37 aa, Artificial Sequence; identical to SEQ ID NO: 31659
  GFR-binding peptide
  MOD_RES (1), (35), (36): Xaa is C or S
  MOD_RES (13), (14), (15), (16), (17): Xaa is A or G
  MOD_RES (18), (19), (20), (21): Xaa is A or G or is absent

SEQ ID NO: 58583 - protein, 39 aa, Artificial Sequence; identical to SEQ ID NO: 31661
  GFR-binding peptide
  MOD_RES (34), (35): Xaa is C or S
  MOD_RES (12), (13), (14), (15), (16): Xaa is A or G
  MOD_RES (17), (18), (19), (20): Xaa is A or G or is absent

SEQ ID NO: 58584 - protein, 35 aa, Artificial Sequence; identical to SEQ ID NO: 2682
  GFR-binding peptide
  MOD_RES (1), (33), (34): Xaa is C or S

SEQ ID NO: 58585 - protein, 38 aa, Artificial Sequence
  GFR-binding peptide
  MOD_RES (2), (4), (36), (37): Xaa is C or S
RXGXSEVVMDYHYKLVVNNASDKYLISIPSLRTPVXXT

SEQ ID NO: 58586 - protein, 39 aa, Artificial Sequence; identical to SEQ ID NO: 31664
  GFR-binding peptide
  MOD_RES (1), (34), (35): Xaa is C or S

SEQ ID NO: 58587 - protein, 37 aa, Artificial Sequence; identical to SEQ ID NO: 23680
  GFR-binding peptide
  MOD_RES (33), (34): Xaa is C or S
  MOD_RES (11), (12), (13), (14), (15): Xaa is A or G
  MOD_RES (16), (17), (18), (19): Xaa is A or G or is absent

SEQ ID NO: 58588 - protein, 38 aa, Artificial Sequence
  GFR-binding peptide
  MOD_RES (1), (35), (36): Xaa is C or S
  MOD_RES (13), (14), (15), (16), (17): Xaa is A or G
  MOD_RES (18), (19), (20), (21): Xaa is A or G or is absent
XSEVVMDYHYKLXXXXXXXXXKYLISIPSLRTPVXXTP

SEQ ID NO: 58589 - protein, 38 aa, Artificial Sequence; identical to SEQ ID NO: 2689
  GFR-binding peptide
  MOD_RES (1), (33), (34): Xaa is C or S

SEQ ID NO: 58590 - protein, 37 aa, Artificial Sequence; identical to SEQ ID NO: 2690
  GFR-binding peptide
  MOD_RES (2), (4), (36), (37): Xaa is C or S

SEQ ID NO: 58591 - protein, 36 aa, Artificial Sequence; identical to SEQ ID NO: 2692
  GFR-binding peptide
  MOD_RES (2), (4): Xaa is C or S
  MOD_RES (15), (16), (17), (18), (19): Xaa is A or G
  MOD_RES (20), (21), (22), (23): Xaa is A or G or is absent

SEQ ID NO: 58592 - protein, 40 aa, Artificial Sequence; identical to SEQ ID NO: 23687
  GFR-binding peptide
  MOD_RES (2), (37), (38): Xaa is C or S
  MOD_RES (15), (16), (17), (18), (19): Xaa is A or G
  MOD_RES (20), (21), (22), (23): Xaa is A or G or is absent

SEQ ID NO: 58593 - protein, 38 aa, Artificial Sequence; identical to SEQ ID NO: 23688
  GFR-binding peptide
  MOD_RES (2), (34), (35): Xaa is C or S

SEQ ID NO: 58594 - protein, 32 aa, Artificial Sequence; identical to SEQ ID NO: 2694
  GFR-binding peptide
  MOD_RES (31), (32): Xaa is C or S

SEQ ID NO: 58595 - protein, 32 aa, Artificial Sequence; identical to SEQ ID NO: 23690
  GFR-binding peptide
  MOD_RES (31), (32): Xaa is C or S

SEQ ID NO: 58596 - protein, 35 aa, Artificial Sequence
  GFR-binding peptide
  MOD_RES (1), (3), (34), (35): Xaa is C or S
XKXSRVIMPIKGYVKPKRGVFYLINIPSLAQPVXX

SEQ ID NO: 58597 - protein, 43 aa, Artificial Sequence; identical to SEQ ID NO: 2696
  GFR-binding peptide
  MOD_RES (1), (3), (38), (39): Xaa is C or S
  MOD_RES (16), (17), (18), (19), (20): Xaa is A or G
  MOD_RES (21), (22), (23), (24): Xaa is A or G or is absent

SEQ ID NO: 58598 - protein, 38 aa, Artificial Sequence; identical to SEQ ID NO: 31671
  GFR-binding peptide
  MOD_RES (33), (34): Xaa is C or S
  MOD_RES (11), (12), (13), (14), (15): Xaa is A or G
  MOD_RES (16), (17), (18), (19): Xaa is A or G or is absent

SEQ ID NO: 58599 - protein, 35 aa, Artificial Sequence
  GFR-binding peptide
  MOD_RES (2), (4): Xaa is C or S
RXAXSEVTMNYHYKLVVNKNEDKYLISIPSMKEPV

SEQ ID NO: 58600 - protein, 43 aa, Artificial Sequence; identical to SEQ ID NO: 23698
  GFR-binding peptide
  MOD_RES (1), (3), (37), (38): Xaa is C or S
  MOD_RES (15), (16), (17), (18), (19): Xaa is A or G
  MOD_RES (20), (21), (22), (23): Xaa is A or G or is absent

SEQ ID NO: 58601 - protein, 35 aa, Artificial Sequence; identical to SEQ ID NO: 2700
  GFR-binding peptide
  MOD_RES (33), (34): Xaa is C or S
  MOD_RES (11), (12), (13), (14), (15): Xaa is A or G
  MOD_RES (16), (17), (18), (19): Xaa is A or G or is absent

SEQ ID NO: 58602 - protein, 30 aa, Artificial Sequence; identical to SEQ ID NO: 2703
  GFR-binding peptide

SEQ ID NO: 58603 - protein, 39 aa, Artificial Sequence
  GFR-binding peptide
  MOD_RES (1), (3), (36), (37): Xaa is C or S
  MOD_RES (14), (15), (16), (17), (18): Xaa is A or G
  MOD_RES (19), (20), (21), (22): Xaa is A or G or is absent
XGXEEVIMEYKFKXXXXXXXXXLYLMSIPETKVPAXXTS

SEQ ID NO: 58604 - protein, 35 aa, Artificial Sequence; identical to SEQ ID NO: 2704
  GFR-binding peptide
  MOD_RES (33), (33): Xaa is C or S
  MOD_RES (11), (12), (13), (14), (15): Xaa is A or G
  MOD_RES (16), (17), (18), (19): Xaa is A or G or is absent

SEQ ID NO: 58605 - protein, 37 aa, Artificial Sequence; identical to SEQ ID NO: 23704
  GFR-binding peptide
  MOD_RES (1), (3), (36), (37): Xaa is C or S
  MOD_RES (14), (15), (16), (17), (18): Xaa is A or G
  MOD_RES (19), (20), (21), (22): Xaa is A or G or is absent

SEQ ID NO: 58606 - protein, 36 aa, Artificial Sequence
  GFR-binding peptide
  MOD_RES (1), (3), (35), (36): Xaa is C or S
XGXSEVVMDRHKRLVVNNASDYYLISTASLRTPVXX

SEQ ID NO: 58607 - protein, 35 aa, Artificial Sequence; identical to SEQ ID NO: 23705
  GFR-binding peptide
  MOD_RES (2), (2): Xaa is C or S
  MOD_RES (14), (15), (16), (17), (18): Xaa is A or G
  MOD_RES (19), (20), (21), (22): Xaa is A or G or is absent

SEQ ID NO: 58608 - protein, 37 aa, Artificial Sequence; identical to SEQ ID NO: 2706
  GFR-binding peptide
  MOD_RES (34), (35): Xaa is C or S
  MOD_RES (12), (13), (14), (15), (16): Xaa is A or G
  MOD_RES (17), (18), (19), (20): Xaa is A or G or is absent

SEQ ID NO: 58609 - protein, 36 aa, Artificial Sequence
  GFR-binding peptide
  MOD_RES (2), (4), (36): Xaa is C or S
RXGXSEVVMDEYKFKVVNNASDLYLISIPELRTPVX

SEQ ID NO: 58610 - protein, 37 aa, Artificial Sequence; identical to SEQ ID NO: 2708
  GFR-binding peptide
  MOD_RES (1), (3), (36), (37): Xaa is C or S
  MOD_RES (14), (15), (16), (17), (18): Xaa is A or G
  MOD_RES (19), (20), (21), (22): Xaa is A or G or is absent

SEQ ID NO: 58611 - protein, 37 aa, Artificial Sequence; identical to SEQ ID NO: 2716
  GFR-binding peptide
  MOD_RES (33), (34): Xaa is C or S
  MOD_RES (11), (12), (13), (14), (15): Xaa is A or G
  MOD_RES (16), (17), (18), (19): Xaa is A or G or is absent

SEQ ID NO: 58612 - protein, 34 aa, Artificial Sequence; identical to SEQ ID NO: 2717
  GFR-binding peptide
  MOD_RES (31), (31): Xaa is C or S

SEQ ID NO: 58613 - protein, 32 aa, Artificial Sequence; identical to SEQ ID NO: 10203
  GFR-binding peptide
  MOD_RES (32), (32): Xaa is C or S

SEQ ID NO: 58614 - protein, 40 aa, Artificial Sequence; identical to SEQ ID NO: 2720
  GFR-binding peptide
  MOD_RES (2), (4), (38), (39): Xaa is C or S
  MOD_RES (16), (17), (18), (19), (20): Xaa is A or G
  MOD_RES (21), (22), (23), (24): Xaa is A or G or is absent

SEQ ID NO: 58615 - protein, 38 aa, Artificial Sequence; identical to SEQ ID NO: 31695
  GFR-binding peptide
  MOD_RES (2), (34), (35): Xaa is C or S

SEQ ID NO: 58616 - protein, 39 aa, Artificial Sequence
  GFR-binding peptide
  MOD_RES (2), (36), (37): Xaa is C or S
  MOD_RES (14), (15), (16), (17), (18): Xaa is A or G
  MOD_RES (19), (20), (21), (22): Xaa is A or G or is absent
AXSEVTMNPIKGYXXXXXXXXXFYLINIPSMKEPVXXPE

SEQ ID NO: 58617 - protein, 37 aa, Artificial Sequence; identical to SEQ ID NO: 23714
  GFR-binding peptide
  MOD_RES (1), (32), (33): Xaa is C or S

SEQ ID NO: 58618 - protein, 34 aa, Artificial Sequence; identical to SEQ ID NO: 23715
  GFR-binding peptide
  MOD_RES (1), (3): Xaa is C or S

SEQ ID NO: 58619 - protein, 36 aa, Artificial Sequence
  GFR-binding peptide
  MOD_RES (1), (3), (35), (36): Xaa is C or S
XAXSEVTMNPIKGYVVNKNEDFYLINIPSMKEPVXX

SEQ ID NO: 58620 - protein, 38 aa, Artificial Sequence
  GFR-binding peptide
  MOD_RES (2), (34), (35): Xaa is C or S
GXRDVVMGEYKFKIIQQKDNLYLMSIPEMKTPTXXPGA

SEQ ID NO: 58621 - protein, 35 aa, Artificial Sequence
  GFR-binding peptide
  MOD_RES (32), (33): Xaa is C or S
SEVVMDYHYKLVVNNASDKYLISIPSLRTPVXXTP

SEQ ID NO: 58622 - protein, 39 aa, Artificial Sequence; identical to SEQ ID NO: 2725
  GFR-binding peptide
  MOD_RES (2), (4), (37), (38): Xaa is C or S
  MOD_RES (15), (16), (17), (18), (19): Xaa is A or G
  MOD_RES (20), (21), (22), (23): Xaa is A or G or is absent

SEQ ID NO: 58623 - protein, 42 aa, Artificial Sequence; identical to SEQ ID NO: 2726
  GFR-binding peptide
  MOD_RES (2), (4), (38), (39): Xaa is C or S
  MOD_RES (16), (17), (18), (19), (20): Xaa is A or G
  MOD_RES (21), (22), (23), (24): Xaa is A or G or is absent

SEQ ID NO: 58624 - protein, 39 aa, Artificial Sequence; identical to SEQ ID NO: 56648
  GFR-binding peptide
  MOD_RES (1), (33), (34): Xaa is C or S

SEQ ID NO: 58625 - protein, 36 aa, Artificial Sequence; identical to SEQ ID NO: 2731
  GFR-binding peptide
  MOD_RES (1), (3), (35), (36): Xaa is C or S

SEQ ID NO: 58626 - protein, 30 aa, Artificial Sequence; identical to SEQ ID NO: 23723
  GFR-binding peptide

SEQ ID NO: 58627 - protein, 35 aa, Artificial Sequence; identical to SEQ ID NO: 23724
  GFR-binding peptide
  MOD_RES (33), (34): Xaa is C or S

SEQ ID NO: 58628 - protein, 37 aa, Artificial Sequence; identical to SEQ ID NO: 31719
  GFR-binding peptide
  MOD_RES (32), (33): Xaa is C or S

SEQ ID NO: 58629 - protein, 39 aa, Artificial Sequence; identical to SEQ ID NO: 2737
  GFR-binding peptide
  MOD_RES (2), (4), (35), (36): Xaa is C or S

SEQ ID NO: 58630 - protein, 35 aa, Artificial Sequence; identical to SEQ ID NO: 31721
  GFR-binding peptide
  MOD_RES (32), (33): Xaa is C or S

SEQ ID NO: 58631 - protein, 38 aa, Artificial Sequence
  GFR-binding peptide
  MOD_RES (2), (4), (38): Xaa is C or S
  MOD_RES (16), (17), (18), (19), (20): Xaa is A or G
  MOD_RES (21), (22), (23), (24): Xaa is A or G or is absent
RXAXSEVTMNRHKRLXXXXXXXXXYYLISTASMKEPVX

SEQ ID NO: 58632 - protein, 36 aa, Artificial Sequence
  GFR-binding peptide
  MOD_RES (1), (32), (33): Xaa is C or S
XEEVIMYHYKLLLVRGNDKYLMSIPSTKVPAXXTSP

SEQ ID NO: 58633 - protein, 35 aa, Artificial Sequence
  GFR-binding peptide
  MOD_RES (33), (34): Xaa is C or S
  MOD_RES (11), (12), (13), (14), (15): Xaa is A or G
  MOD_RES (16), (17), (18), (19): Xaa is A or G or is absent
EEVIMRHKRLXXXXXXXXXYYLMSTASTKVPAXXT

SEQ ID NO: 58634 - protein, 37 aa, Artificial Sequence
  GFR-binding peptide
  MOD_RES (1), (3), (37): Xaa is C or S
  MOD_RES (15), (16), (17), (18), (19): Xaa is A or G
  MOD_RES (20), (21), (22), (23): Xaa is A or G or is absent
XAXSEVTMNPIKGYXXXXXXXXXFYLINIPSMKEPVX

SEQ ID NO: 58635 - protein, 38 aa, Artificial Sequence; identical to SEQ ID NO: 2742
  GFR-binding peptide
  MOD_RES (1), (33), (34): Xaa is C or S

SEQ ID NO: 58636 - protein, 41 aa, Artificial Sequence; identical to SEQ ID NO: 2744
  GFR-binding peptide
  MOD_RES (1), (3), (36), (37): Xaa is C or S

SEQ ID NO: 58637 - protein, 35 aa, Artificial Sequence; identical to SEQ ID NO: 2745
  GFR-binding peptide
  MOD_RES (1), (33), (34): Xaa is C or S

SEQ ID NO: 58638 - protein, 36 aa, Artificial Sequence; identical to SEQ ID NO: 23730
  GFR-binding peptide
  MOD_RES (1), (3), (35), (36): Xaa is C or S

SEQ ID NO: 58639 - protein, 40 aa, Artificial Sequence; identical to SEQ ID NO: 23731
  GFR-binding peptide
  MOD_RES (1), (3), (37), (38): Xaa is C or S
  MOD_RES (15), (16), (17), (18), (19): Xaa is A or G
  MOD_RES (20), (21), (22), (23): Xaa is A or G or is absent

SEQ ID NO: 58640 - protein, 41 aa, Artificial Sequence
  GFR-binding peptide
  MOD_RES (2), (4), (38), (39): Xaa is C or S
  MOD_RES (16), (17), (18), (19), (20): Xaa is A or G
  MOD_RES (21), (22), (23), (24): Xaa is A or G or is absent
RXGXSEVVMDYHYKLXXXXXXXXXKYLISIPSLRTPVXXTP

SEQ ID NO: 58641 - protein, 37 aa, Artificial Sequence
  GFR-binding peptide
  MOD_RES (2), (4), (37): Xaa is C or S
  MOD_RES (15), (16), (17), (18), (19): Xaa is A or G
  MOD_RES (20), (21), (22), (23): Xaa is A or G or is absent
LXGXEEVIMYHYKLXXXXXXXXXKYLMSIPSTKVPAX

SEQ ID NO: 58642 - protein, 40 aa, Artificial Sequence; identical to SEQ ID NO: 56675
  GFR-binding peptide
  MOD_RES (1), (3), (37), (38): Xaa is C or S
  MOD_RES (15), (16), (17), (18), (19): Xaa is A or G
  MOD_RES (20), (21), (22), (23): Xaa is A or G or is absent

SEQ ID NO: 58643 - protein, 39 aa, Artificial Sequence; identical to SEQ ID NO: 2750
  GFR-binding peptide
  MOD_RES (33), (34): Xaa is C or S

SEQ ID NO: 58644 - protein, 39 aa, Artificial Sequence; identical to SEQ ID NO: 2752
  GFR-binding peptide
  MOD_RES (2), (4), (35), (36): Xaa is C or S

SEQ ID NO: 58645 - protein, 33 aa, Artificial Sequence; identical to SEQ ID NO: 23735
  GFR-binding peptide
  MOD_RES (1), (3): Xaa is C or S

SEQ ID NO: 58646 - protein, 31 aa, Artificial Sequence
  GFR-binding peptide
  MOD_RES (1), (1): Xaa is C or S
XSRVIMPIKGYVKPKRGVFYLINIPSLAQPV

SEQ ID NO: 58647 - protein, 34 aa, Artificial Sequence; identical to SEQ ID NO: 31742
  GFR-binding peptide
  MOD_RES (1), (1): Xaa is C or S
  MOD_RES (13), (14), (15), (16), (17): Xaa is A or G
  MOD_RES (18), (19), (20), (21): Xaa is A or G or is absent

SEQ ID NO: 58648 - protein, 40 aa, Artificial Sequence; identical to SEQ ID NO: 23739
  GFR-binding peptide
  MOD_RES (1), (3), (37), (38): Xaa is C or S
  MOD_RES (15), (16), (17), (18), (19): Xaa is A or G
  MOD_RES (20), (21), (22), (23): Xaa is A or G or is absent

SEQ ID NO: 58649 - protein, 33 aa, Artificial Sequence; identical to SEQ ID NO: 23740
  GFR-binding peptide
  MOD_RES (1), (33): Xaa is C or S

SEQ ID NO: 58650 - protein, 44 aa, Artificial Sequence; identical to SEQ ID NO: 23744
  GFR-binding peptide
  MOD_RES (2), (4), (39), (40): Xaa is C or S
  MOD_RES (17), (18), (19), (20), (21): Xaa is A or G
  MOD_RES (22), (23), (24), (25): Xaa is A or G or is absent

SEQ ID NO: 58651 - protein, 37 aa, Artificial Sequence
  GFR-binding peptide
  MOD_RES (2), (4): Xaa is C or S
  MOD_RES (16), (17), (18), (19), (20): Xaa is A or G
  MOD_RES (21), (22), (23), (24): Xaa is A or G or is absent
RXAXSEVTMNYHYKLXXXXXXXXXKYLISIPSMKEPV

SEQ ID NO: 58652 - protein, 36 aa, Artificial Sequence; identical to SEQ ID NO: 31749
  GFR-binding peptide
  MOD_RES (34), (35): Xaa is C or S
  MOD_RES (12), (13), (14), (15), (16): Xaa is A or G
  MOD_RES (17), (18), (19), (20): Xaa is A or G or is absent

SEQ ID NO: 58653 - protein, 37 aa, Artificial Sequence; identical to SEQ ID NO: 31750
  GFR-binding peptide
  MOD_RES (34), (35): Xaa is C or S
  MOD_RES (12), (13), (14), (15), (16): Xaa is A or G
  MOD_RES (17), (18), (19), (20): Xaa is A or G or is absent

SEQ ID NO: 58654 - protein, 37 aa, Artificial Sequence
  GFR-binding peptide
  MOD_RES (2), (34), (35): Xaa is C or S
GXRDVVMGRHKRLIIQQKDNYYLMSTASMKTPTXXPG

SEQ ID NO: 58655 - protein, 40 aa, Artificial Sequence; identical to SEQ ID NO: 2764
  GFR-binding peptide
  MOD_RES (1), (3), (37): Xaa is C or S
  MOD_RES (15), (16), (17), (18), (19): Xaa is A or G
  MOD_RES (20), (21), (22), (23): Xaa is A or G or is absent

SEQ ID NO: 58656 - protein, 37 aa, Artificial Sequence; identical to SEQ ID NO: 31759
  GFR-binding peptide
  MOD_RES (1), (33), (34): Xaa is C or S

SEQ ID NO: 58657 - protein, 36 aa, Artificial Sequence
  GFR-binding peptide
  MOD_RES (1), (35), (36): Xaa is C or S
  MOD_RES (13), (14), (15), (16), (17): Xaa is A or G
  MOD_RES (18), (19), (20), (21): Xaa is A or G or is absent
XRDVVMGEYKFKXXXXXXXXXLYLMSIPEMKTPTXX

SEQ ID NO: 58658 - protein, 37 aa, Artificial Sequence; identical to SEQ ID NO: 23757
  GFR-binding peptide
  MOD_RES (33), (34): Xaa is C or S
  MOD_RES (11), (12), (13), (14), (15): Xaa is A or G
  MOD_RES (16), (17), (18), (19): Xaa is A or G or is absent

SEQ ID NO: 58659 - protein, 38 aa, Artificial Sequence
  GFR-binding peptide
  MOD_RES (1), (3), (35), (36): Xaa is C or S
XAXSEVTMNEYKFKVVNKNEDLYLISIPEMKEPVXXPE

SEQ ID NO: 58660 - protein, 39 aa, Artificial Sequence
  GFR-binding peptide
  MOD_RES (2), (4), (38), (39): Xaa is C or S
  MOD_RES (16), (17), (18), (19), (20): Xaa is A or G
  MOD_RES (21), (22), (23), (24): Xaa is A or G or is absent
RXAXSEVTMNRYKKLXXXXXXXXXFYLISIANMKEPVXX

SEQ ID NO: 58661 - protein, 34 aa, Artificial Sequence; identical to SEQ ID NO: 23759
  GFR-binding peptide
  MOD_RES (34), (34): Xaa is C or S
  MOD_RES (12), (13), (14), (15), (16): Xaa is A or G
  MOD_RES (17), (18), (19), (20): Xaa is A or G or is absent

SEQ ID NO: 58662 - protein, 35 aa, Artificial Sequence; identical to SEQ ID NO: 23761
  GFR-binding peptide
  MOD_RES (2), (34), (35): Xaa is C or S

SEQ ID NO: 58663 - protein, 38 aa, Artificial Sequence; identical to SEQ ID NO: 23763
  GFR-binding peptide
  MOD_RES (1), (3), (34), (35): Xaa is C or S

SEQ ID NO: 58664 - protein, 40 aa, Artificial Sequence; identical to SEQ ID NO: 2769
  GFR-binding peptide
  MOD_RES (1), (34), (35): Xaa is C or S
  MOD_RES (12), (13), (14), (15), (16): Xaa is A or G
  MOD_RES (17), (18), (19), (20): Xaa is A or G or is absent

SEQ ID NO: 58665 - protein, 40 aa, Artificial Sequence
  GFR-binding peptide
  MOD_RES (1), (35), (36): Xaa is C or S
  MOD_RES (13), (14), (15), (16), (17): Xaa is A or G
  MOD_RES (18), (19), (20), (21): Xaa is A or G or is absent
XSEVVMDEYKFKXXXXXXXXXLYLISIPELRTPVXXTPPT

SEQ ID NO: 58666 - protein, 40 aa, Artificial Sequence; identical to SEQ ID NO: 2776
  GFR-binding peptide
  MOD_RES (2), (4), (35), (36): Xaa is C or S

SEQ ID NO: 58667 - protein, 35 aa, Artificial Sequence; identical to SEQ ID NO: 2777
  GFR-binding peptide
  MOD_RES (2), (35): Xaa is C or S
  MOD_RES (13), (14), (15), (16), (17): Xaa is A or G
  MOD_RES (18), (19), (20), (21): Xaa is A or G or is absent

SEQ ID NO: 58668 - protein, 37 aa, Artificial Sequence
  GFR-binding peptide
  MOD_RES (1), (35), (36): Xaa is C or S
  MOD_RES (13), (14), (15), (16), (17): Xaa is A or G
  MOD_RES (18), (19), (20), (21): Xaa is A or G or is absent
XSEVTMNEYKFKXXXXXXXXXLYLISIPEMKEPVXXP

SEQ ID NO: 58669 - protein, 37 aa, Artificial Sequence; identical to SEQ ID NO: 31774
  GFR-binding peptide
  MOD_RES (2), (4): Xaa is C or S
  MOD_RES (16), (17), (18), (19), (20): Xaa is A or G
  MOD_RES (21), (22), (23), (24): Xaa is A or G or is absent

SEQ ID NO: 58670 - protein, 41 aa, Artificial Sequence; identical to SEQ ID NO: 2779
  GFR-binding peptide
  MOD_RES (1), (35), (36): Xaa is C or S
  MOD_RES (13), (14), (15), (16), (17): Xaa is A or G
  MOD_RES (18), (19), (20), (21): Xaa is A or G or is absent

SEQ ID NO: 58671 - protein, 32 aa, Artificial Sequence
  GFR-binding peptide
  MOD_RES (11), (12), (13), (14), (15): Xaa is A or G
  MOD_RES (16), (17), (18), (19): Xaa is A or G or is absent
EVVMDYHYKLXXXXXXXXXKYLISIPSLRTPV

SEQ ID NO: 58672 - protein, 34 aa, Artificial Sequence; identical to SEQ ID NO: 2781
  GFR-binding peptide
  MOD_RES (2), (33), (34): Xaa is C or S

SEQ ID NO: 58673 - protein, 32 aa, Artificial Sequence
  GFR-binding peptide
  MOD_RES (11), (12), (13), (14), (15): Xaa is A or G
  MOD_RES (16), (17), (18), (19): Xaa is A or G or is absent
EVVMDEYKFKXXXXXXXXXLYLISIPELRTPV

SEQ ID NO: 58674 - protein, 39 aa, Artificial Sequence; identical to SEQ ID NO: 31782
  GFR-binding peptide
  MOD_RES (2), (4), (36), (37): Xaa is C or S

SEQ ID NO: 58675 - protein, 37 aa, Artificial Sequence; identical to SEQ ID NO: 31785
  GFR-binding peptide
  MOD_RES (1), (3), (34), (35): Xaa is C or S

SEQ ID NO: 58676 - protein, 38 aa, Artificial Sequence
  GFR-binding peptide
  MOD_RES (1), (35), (36): Xaa is C or S
  MOD_RES (13), (14), (15), (16), (17): Xaa is A or G
  MOD_RES (18), (19), (20), (21): Xaa is A or G or is absent
XSEVTMNPIKGYXXXXXXXXXFYLINIPSMKEPVXXPE

SEQ ID NO: 58677 - protein, 35 aa, Artificial Sequence; identical to SEQ ID NO: 2789
  GFR-binding peptide
  MOD_RES (33), (34): Xaa is C or S
  MOD_RES (11), (12), (13), (14), (15): Xaa is A or G
  MOD_RES (16), (17), (18), (19): Xaa is A or G or is absent

SEQ ID NO: 58678 - protein, 35 aa, Artificial Sequence
  GFR-binding peptide
  MOD_RES (1), (33), (34): Xaa is C or S
XSEVVMDEYKFKVVNNASDLYLISIPELRTPVXXT

SEQ ID NO: 58679 - protein, 35 aa, Artificial Sequence; identical to SEQ ID NO: 2790
  GFR-binding peptide
  MOD_RES (2), (4), (35): Xaa is C or S

SEQ ID NO: 58680 - protein, 36 aa, Artificial Sequence; identical to SEQ ID NO: 31787
  GFR-binding peptide
  MOD_RES (34), (35): Xaa is C or S
  MOD_RES (12), (13), (14), (15), (16): Xaa is A or G
  MOD_RES (17), (18), (19), (20): Xaa is A or G or is absent

SEQ ID NO: 58681 - protein, 43 aa, Artificial Sequence; identical to SEQ ID NO: 2795
  GFR-binding peptide
  MOD_RES (2), (4), (38), (39): Xaa is C or S
  MOD_RES (16), (17), (18), (19), (20): Xaa is A or G
  MOD_RES (21), (22), (23), (24): Xaa is A or G or is absent

SEQ ID NO: 58682 - protein, 36 aa, Artificial Sequence; identical to SEQ ID NO: 23784
  GFR-binding peptide
  MOD_RES (1), (3), (35), (36): Xaa is C or S

SEQ ID NO: 58683 - protein, 36 aa, Artificial Sequence
  GFR-binding peptide
  MOD_RES (2), (35), (36): Xaa is C or S
  MOD_RES (13), (14), (15), (16), (17): Xaa is A or G
  MOD_RES (18), (19), (20), (21): Xaa is A or G or is absent
KXSKVVMPIKGYXXXXXXXXXFYLINIPSLDQPVXX

SEQ ID NO: 58684 - protein, 33 aa, Artificial Sequence; identical to SEQ ID NO: 2797
  GFR-binding peptide
  MOD_RES (1), (33): Xaa is C or S

SEQ ID NO: 58685 - protein, 39 aa, Artificial Sequence; identical to SEQ ID NO: 31792
  GFR-binding peptide
  MOD_RES (2), (34), (35): Xaa is C or S

SEQ ID NO: 58686 - protein, 40 aa, Artificial Sequence; identical to SEQ ID NO: 23790
  GFR-binding peptide
  MOD_RES (2), (34), (35): Xaa is C or S

SEQ ID NO: 58687 - protein, 37 aa, Artificial Sequence; identical to SEQ ID NO: 31797
  GFR-binding peptide
  MOD_RES (2), (4), (37): Xaa is C or S
  MOD_RES (15), (16), (17), (18), (19): Xaa is A or G
  MOD_RES (20), (21), (22), (23): Xaa is A or G or is absent

SEQ ID NO: 58688 - protein, 34 aa, Artificial Sequence; identical to SEQ ID NO: 2803
  GFR-binding peptide
  MOD_RES (1), (3): Xaa is C or S

SEQ ID NO: 58689 - protein, 37 aa, Artificial Sequence
  GFR-binding peptide
  MOD_RES (2), (36), (37): Xaa is C or S
  MOD_RES (14), (15), (16), (17), (18): Xaa is A or G
  MOD_RES (19), (20), (21), (22): Xaa is A or G or is absent
GXRDVVMGYHYKLXXXXXXXXXKYLMSIPSMKTPTXX

SEQ ID NO: 58690 - protein, 40 aa, Artificial Sequence; identical to SEQ ID NO: 2808
  GFR-binding peptide
  MOD_RES (2), (4), (36), (37): Xaa is C or S

SEQ ID NO: 58691 - protein, 35 aa, Artificial Sequence; identical to SEQ ID NO: 23798
  GFR-binding peptide
  MOD_RES (33), (34): Xaa is C or S
  MOD_RES (11), (12), (13), (14), (15): Xaa is A or G
  MOD_RES (16), (17), (18), (19): Xaa is A or G or is absent

SEQ ID NO: 58692 - protein, 37 aa, Artificial Sequence; identical to SEQ ID NO: 23802
  GFR-binding peptide
  MOD_RES (2), (34), (35): Xaa is C or S

SEQ ID NO: 58693 - protein, 37 aa, Artificial Sequence
  GFR-binding peptide
  MOD_RES (31), (32): Xaa is C or S
RVVMNEYKFKIVNSSDDLYLVSIPELKTPAXXPKPVH

SEQ ID NO: 58694 - protein, 40 aa, Artificial Sequence
  GFR-binding peptide
  MOD_RES (2), (34), (35): Xaa is C or S
GXSRVVMNYHYKLIVNSSDDKYLVSIPSLKTPAXXPKPVH

SEQ ID NO: 58695 - protein, 39 aa, Artificial Sequence; identical to SEQ ID NO: 2815
  GFR-binding peptide
  MOD_RES (2), (4), (38): Xaa is C or S
  MOD_RES (16), (17), (18), (19), (20): Xaa is A or G
  MOD_RES (21), (22), (23), (24): Xaa is A or G or is absent

SEQ ID NO: 58696 - protein, 33 aa, Artificial Sequence
  GFR-binding peptide
  MOD_RES (1), (3): Xaa is C or S
XGXEEVIMYHYKLLLVRGNDKYLMSIPSTKVPA

SEQ ID NO: 58697 - protein, 39 aa, Artificial Sequence
  GFR-binding peptide
  MOD_RES (34), (35): Xaa is C or S
  MOD_RES (12), (13), (14), (15), (16): Xaa is A or G
  MOD_RES (17), (18), (19), (20): Xaa is A or G or is absent
SEVTMNRHKRLXXXXXXXXXYYLISTASMKEPVXXPEPI

SEQ ID NO: 58698 - protein, 35 aa, Artificial Sequence
  GFR-binding peptide
  MOD_RES (2), (35): Xaa is C or S
  MOD_RES (13), (14), (15), (16), (17): Xaa is A or G
  MOD_RES (18), (19), (20), (21): Xaa is A or G or is absent
KXSKVVMPIKGYXXXXXXXXXFYLINIPSLDQPVX

SEQ ID NO: 58699 - protein, 38 aa, Artificial Sequence
  GFR-binding peptide
  MOD_RES (2), (4), (38): Xaa is C or S
  MOD_RES (16), (17), (18), (19), (20): Xaa is A or G
  MOD_RES (21), (22), (23), (24): Xaa is A or G or is absent
SXGXRDVVMGYHYKLXXXXXXXXXKYLMSIPSMKTPTX

SEQ ID NO: 58700 - protein, 36 aa, Artificial Sequence; identical to SEQ ID NO: 2818
  GFR-binding peptide
  MOD_RES (2), (4), (36): Xaa is C or S

SEQ ID NO: 58701 - protein, 34 aa, Artificial Sequence; identical to SEQ ID NO: 31813
  GFR-binding peptide
  MOD_RES (32), (33): Xaa is C or S

SEQ ID NO: 58702 - protein, 32 aa, Artificial Sequence; identical to SEQ ID NO: 2821
  GFR-binding peptide
  MOD_RES (11), (12), (13), (14), (15): Xaa is A or G
  MOD_RES (16), (17), (18), (19): Xaa is A or G or is absent

SEQ ID NO: 58703 - protein, 40 aa, Artificial Sequence; identical to SEQ ID NO: 31819
  GFR-binding peptide
  MOD_RES (2), (4), (38): Xaa is C or S
  MOD_RES (16), (17), (18), (19), (20): Xaa is A or G
  MOD_RES (21), (22), (23), (24): Xaa is A or G or is absent

SEQ ID NO: 58704 - protein, 39 aa, Artificial Sequence; identical to SEQ ID NO: 2823
  GFR-binding peptide
  MOD_RES (33), (34): Xaa is C or S
  MOD_RES (11), (12), (13), (14), (15): Xaa is A or G
  MOD_RES (16), (17), (18), (19): Xaa is A or G or is absent

SEQ ID NO: 58705 - protein, 34 aa, Artificial Sequence; identical to SEQ ID NO: 23816
  GFR-binding peptide
  MOD_RES (1), (32), (33): Xaa is C or S

SEQ ID NO: 58706 - protein, 40 aa, Artificial Sequence; identical to SEQ ID NO: 2825
  GFR-binding peptide
  MOD_RES (1), (35), (36): Xaa is C or S
  MOD_RES (13), (14), (15), (16), (17): Xaa is A or G
  MOD_RES (18), (19), (20), (21): Xaa is A or G or is absent

SEQ ID NO: 58707 - protein, 33 aa, Artificial Sequence; identical to SEQ ID NO: 31822
  GFR-binding peptide
  MOD_RES (12), (13), (14), (15), (16): Xaa is A or G
  MOD_RES (17), (18), (19), (20): Xaa is A or G or is absent

SEQ ID NO: 58708 - protein, 32 aa, Artificial Sequence; identical to SEQ ID NO: 2826
  GFR-binding peptide
  MOD_RES (11), (12), (13), (14), (15): Xaa is A or G
  MOD_RES (16), (17), (18), (19): Xaa is A or G or is absent

SEQ ID NO: 58709 - protein, 39 aa, Artificial Sequence; identical to SEQ ID NO: 2831
  GFR-binding peptide
  MOD_RES (1), (3), (34), (35): Xaa is C or S

SEQ ID NO: 58710 - protein, 38 aa, Artificial Sequence; identical to SEQ ID NO: 2832
  GFR-binding peptide
  MOD_RES (1), (35), (36): Xaa is C or S
  MOD_RES (13), (14), (15), (16), (17): Xaa is A or G
  MOD_RES (18), (19), (20), (21): Xaa is A or G or is absent

SEQ ID NO: 58711 - protein, 35 aa, Artificial Sequence; identical to SEQ ID NO: 23823
  GFR-binding peptide
  MOD_RES (1), (33), (34): Xaa is C or S

SEQ ID NO: 58712 - protein, 39 aa, Artificial Sequence; identical to SEQ ID NO: 2834
  GFR-binding peptide
  MOD_RES (2), (4), (36), (37): Xaa is C or S

SEQ ID NO: 58713 - protein, 34 aa, Artificial Sequence; identical to SEQ ID NO: 31830
  GFR-binding peptide
  MOD_RES (1), (33): Xaa is C or S

SEQ ID NO: 58714 - protein, 37 aa, Artificial Sequence
  GFR-binding peptide
  MOD_RES (32), (33): Xaa is C or S
RDVVMGRHKRLIIQQKDNYYLMSTASMKTPTXXPGAS

SEQ ID NO: 58715 - protein, 37 aa, Artificial Sequence
  GFR-binding peptide
  MOD_RES (34), (35): Xaa is C or S
  MOD_RES (12), (13), (14), (15), (16): Xaa is A or G
  MOD_RES (17), (18), (19), (20): Xaa is A or G or is absent
RDVVMGRHKRLXXXXXXXXXYYLMSTASMKTPTXXPG

SEQ ID NO: 58716 - protein, 35 aa, Artificial Sequence; identical to SEQ ID NO: 2836
  GFR-binding peptide
  MOD_RES (2), (34), (35): Xaa is C or S

SEQ ID NO: 58717 - protein, 36 aa, Artificial Sequence; identical to SEQ ID NO: 2838
  GFR-binding peptide
  MOD_RES (33), (34): Xaa is C or S
  MOD_RES (11), (12), (13), (14), (15): Xaa is A or G
  MOD_RES (16), (17), (18), (19): Xaa is A or G or is absent

SEQ ID NO: 58718 - protein, 38 aa, Artificial Sequence; identical to SEQ ID NO: 31831
  GFR-binding peptide
  MOD_RES (1), (35), (36): Xaa is C or S
  MOD_RES (13), (14), (15), (16), (17): Xaa is A or G
  MOD_RES (18), (19), (20), (21): Xaa is A or G or is absent

SEQ ID NO: 58719 - protein, 38 aa, Artificial Sequence; identical to SEQ ID NO: 2840
  GFR-binding peptide
  MOD_RES (1), (3), (36), (37): Xaa is C or S

SEQ ID NO: 58720 - protein, 33 aa, Artificial Sequence; identical to SEQ ID NO: 31832
  GFR-binding peptide
  MOD_RES (12), (13), (14), (15), (16): Xaa is A or G
  MOD_RES (17), (18), (19), (20): Xaa is A or G or is absent

SEQ ID NO: 58721 - protein, 40 aa, Artificial Sequence; identical to SEQ ID NO: 31834
  GFR-binding peptide
  MOD_RES (1), (3), (35), (36): Xaa is C or S

SEQ ID NO: 58722 - protein, 36 aa, Artificial Sequence; identical to SEQ ID NO: 31835
  GFR-binding peptide
  MOD_RES (1), (3), (35), (36): Xaa is C or S

SEQ ID NO: 58723 - protein, 39 aa, Artificial Sequence; identical to SEQ ID NO: 2841
  GFR-binding peptide
  MOD_RES (1), (3), (34), (35): Xaa is C or S

SEQ ID NO: 58724 - protein, 34 aa, Artificial Sequence; identical to SEQ ID NO: 2844
  GFR-binding peptide
  MOD_RES (34), (34): Xaa is C or S
  MOD_RES (12), (13), (14), (15), (16): Xaa is A or G
  MOD_RES (17), (18), (19), (20): Xaa is A or G or is absent

SEQ ID NO: 58725 - protein, 38 aa, Artificial Sequence; identical to SEQ ID NO: 2845
  GFR-binding peptide
  MOD_RES (2), (4), (36): Xaa is C or S

SEQ ID NO: 58726 - protein, 37 aa, Artificial Sequence; identical to SEQ ID NO: 2846
  GFR-binding peptide
  MOD_RES (1), (32), (33): Xaa is C or S

SEQ ID NO: 58727 - protein, 33 aa, Artificial Sequence; identical to SEQ ID NO: 31844
  GFR-binding peptide
  MOD_RES (12), (13), (14), (15), (16): Xaa is A or G
  MOD_RES (17), (18), (19), (20): Xaa is A or G or is absent

SEQ ID NO: 58728 - protein, 33 aa, Artificial Sequence
  GFR-binding peptide
  MOD_RES (33), (33): Xaa is C or S
  MOD_RES (11), (12), (13), (14), (15): Xaa is A or G
  MOD_RES (16), (17), (18), (19): Xaa is A or G or is absent
SKVIMPIKGYXXXXXXXXXFYLINIPSLDQSVX

SEQ ID NO: 58729 - protein, 37 aa, Artificial Sequence; identical to SEQ ID NO: 31845
  GFR-binding peptide
  MOD_RES (2), (4), (36), (37): Xaa is C or S

SEQ ID NO: 58730 - protein, 39 aa, Artificial Sequence; identical to SEQ ID NO: 2851
  GFR-binding peptide
  MOD_RES (1), (35), (36): Xaa is C or S
  MOD_RES (13), (14), (15), (16), (17): Xaa is A or G
  MOD_RES (18), (19), (20), (21): Xaa is A or G or is absent

SEQ ID NO: 58731 - protein, 34 aa, Artificial Sequence
  GFR-binding peptide
  MOD_RES (1), (34): Xaa is C or S
  MOD_RES (12), (13), (14), (15), (16): Xaa is A or G
  MOD_RES (17), (18), (19), (20): Xaa is A or G or is absent
XSRVIMPIKGYXXXXXXXXXFYLINIPSLAQPVX

SEQ ID NO: 58732 - protein, 39 aa, Artificial Sequence; identical to SEQ ID NO: 23840
  GFR-binding peptide
  MOD_RES (33), (34): Xaa is C or S
  MOD_RES (11), (12), (13), (14), (15): Xaa is A or G
  MOD_RES (16), (17), (18), (19): Xaa is A or G or is absent

SEQ ID NO: 58733 - protein, 37 aa, Artificial Sequence
  GFR-binding peptide
  MOD_RES (2), (36), (37): Xaa is C or S
  MOD_RES (14), (15), (16), (17), (18): Xaa is A or G
  MOD_RES (19), (20), (21), (22): Xaa is A or G or is absent
GXRDVVMGEYKFKXXXXXXXXXLYLMSIPEMKTPTXX

SEQ ID NO: 58734 - protein, 38 aa, Artificial Sequence; identical to SEQ ID NO: 2852
  GFR-binding peptide
  MOD_RES (32), (33): Xaa is C or S

SEQ ID NO: 58735 - protein, 43 aa, Artificial Sequence; identical to SEQ ID NO: 2853
  GFR-binding peptide
  MOD_RES (1), (3), (37), (38): Xaa is C or S
  MOD_RES (15), (16), (17), (18), (19): Xaa is A or G
  MOD_RES (20), (21), (22), (23): Xaa is A or G or is absent

SEQ ID NO: 58736 - protein, 40 aa, Artificial Sequence; identical to SEQ ID NO: 31851
  GFR-binding peptide
  MOD_RES (2), (4), (38), (39): Xaa is C or S
  MOD_RES (16), (17), (18), (19), (20): Xaa is A or G
  MOD_RES (21), (22), (23), (24): Xaa is A or G or is absent

SEQ ID NO: 58737 - protein, 36 aa, Artificial Sequence
  GFR-binding peptide
  MOD_RES (1), (3), (34), (35): Xaa is C or S
XGXEEVIMRHKRLLLVRGNDYYLMSTASTKVPAXXT

SEQ ID NO: 58738 - protein, 38 aa, Artificial Sequence; identical to SEQ ID NO: 10322
  GFR-binding peptide
  MOD_RES (2), (4), (38): Xaa is C or S
  MOD_RES (16), (17), (18), (19), (20): Xaa is A or G
  MOD_RES (21), (22), (23), (24): Xaa is A or G or is absent

SEQ ID NO: 58739 - protein, 37 aa, Artificial Sequence
  GFR-binding peptide
  MOD_RES (32), (33): Xaa is C or S
SEVTMNPIKGYVVNKNEDFYLINIPSMKEPVXXPEPI

SEQ ID NO: 58740 - protein, 35 aa, Artificial Sequence; identical to SEQ ID NO: 23844
  GFR-binding peptide
  MOD_RES (1), (33), (34): Xaa is C or S

SEQ ID NO: 58741 - protein, 35 aa, Artificial Sequence; identical to SEQ ID NO: 2856
  GFR-binding peptide
  MOD_RES (1), (3), (35): Xaa is C or S

SEQ ID NO: 58742 - protein, 41 aa, Artificial Sequence; identical to SEQ ID NO: 31853
  GFR-binding peptide
  MOD_RES (1), (3), (37), (38): Xaa is C or S
  MOD_RES (15), (16), (17), (18), (19): Xaa is A or G
  MOD_RES (20), (21), (22), (23): Xaa is A or G or is absent

SEQ ID NO: 58743 - protein, 35 aa, Artificial Sequence; identical to SEQ ID NO: 31855
  GFR-binding peptide
  MOD_RES (2), (34), (35): Xaa is C or S

SEQ ID NO: 58744 - protein, 31 aa, Artificial Sequence; identical to SEQ ID NO: 31856
  GFR-binding peptide

SEQ ID NO: 58745 - protein, 35 aa, Artificial Sequence; identical to SEQ ID NO: 31857
  GFR-binding peptide
  MOD_RES (31), (32): Xaa is C or S

SEQ ID NO: 58746 - protein, 41 aa, Artificial Sequence; identical to SEQ ID NO: 23847
  GFR-binding peptide
  MOD_RES (2), (4), (36), (37): Xaa is C or S

SEQ ID NO: 58747 - protein, 36 aa, Artificial Sequence; identical to SEQ ID NO: 31860
  GFR-binding peptide
  MOD_RES (1), (3), (35), (36): Xaa is C or S

SEQ ID NO: 58748 - protein, 35 aa, Artificial Sequence; identical to SEQ ID NO: 56807
  GFR-binding peptide
  MOD_RES (2), (2): Xaa is C or S
  MOD_RES (14), (15), (16), (17), (18): Xaa is A or G
  MOD_RES (19), (20), (21), (22): Xaa is A or G or is absent

SEQ ID NO: 58749 - protein, 40 aa, Artificial Sequence; identical to SEQ ID NO: 2857
  GFR-binding peptide
  MOD_RES (2), (35), (36): Xaa is C or S
  MOD_RES (13), (14), (15), (16), (17): Xaa is A or G
  MOD_RES (18), (19), (20), (21): Xaa is A or G or is absent

SEQ ID NO: 58750 - protein, 33 aa, Artificial Sequence; identical to SEQ ID NO: 31861
  GFR-binding peptide
  MOD_RES (31), (32): Xaa is C or S

SEQ ID NO: 58751 - protein, 35 aa, Artificial Sequence; identical to SEQ ID NO: 23851
  GFR-binding peptide
  MOD_RES (1), (33), (34): Xaa is C or S

SEQ ID NO: 58752 - protein, 33 aa, Artificial Sequence; identical to SEQ ID NO: 56810
  GFR-binding peptide
  MOD_RES (33), (33): Xaa is C or S
  MOD_RES (11), (12), (13), (14), (15): Xaa is A or G
  MOD_RES (16), (17), (18), (19): Xaa is A or G or is absent

SEQ ID NO: 58753 - protein, 40 aa, Artificial Sequence; identical to SEQ ID NO: 2862
  GFR-binding peptide
  MOD_RES (1), (3), (37), (38): Xaa is C or S
  MOD_RES (15), (16), (17), (18), (19): Xaa is A or G
  MOD_RES (20), (21), (22), (23): Xaa is A or G or is absent

SEQ ID NO: 58754 - protein, 34 aa, Artificial Sequence
  GFR-binding peptide
  MOD_RES (1), (3): Xaa is C or S
XGXRDVVMGYHYKLIIQQKDNKYLMSIPSMKTPT

SEQ ID NO: 58755 - protein, 41 aa, Artificial Sequence
  GFR-binding peptide
  MOD_RES (2), (36), (37): Xaa is C or S
  MOD_RES (14), (15), (16), (17), (18): Xaa is A or G
  MOD_RES (19), (20), (21), (22): Xaa is A or G or is absent
GXSEVVMDYHYKLXXXXXXXXXKYLISIPSLRTPVXXTPPT

SEQ ID NO: 58756 - protein, 41 aa, Artificial Sequence
  GFR-binding peptide
  MOD_RES (1), (3), (35), (36): Xaa is C or S
XGXESVAMGRHKRLYTVVGKDYYLISTASLKTPVXXAKSAK

SEQ ID NO: 58757 - protein, 44 aa, Artificial Sequence; identical to SEQ ID NO: 2864
  GFR-binding peptide
  MOD_RES (2), (4), (38): Xaa is C or S
  MOD_RES (16), (17), (18), (19), (20): Xaa is A or G
  MOD_RES (21), (22), (23), (24): Xaa is A or G or is absent

SEQ ID NO: 58758 - protein, 36 aa, Artificial Sequence; identical to SEQ ID NO: 2865
  GFR-binding peptide
  MOD_RES (2), (35), (36): Xaa is C or S
  MOD_RES (13), (14), (15), (16), (17): Xaa is A or G
  MOD_RES (18), (19), (20), (21): Xaa is A or G or is absent

SEQ ID NO: 58759 - protein, 38 aa, Artificial Sequence
  GFR-binding peptide
  MOD_RES (1), (35), (36): Xaa is C or S
  MOD_RES (13), (14), (15), (16), (17): Xaa is A or G
  MOD_RES (18), (19), (20), (21): Xaa is A or G or is absent
XRDVVMGEYKFKXXXXXXXXXLYLMSIPEMKTPTXXPG

SEQ ID NO: 58760 - protein, 41 aa, Artificial Sequence
  GFR-binding peptide
  MOD_RES (1), (3), (35), (36): Xaa is C or S
XGXSEVVMDYHYKLVVNNASDKYLISIPSLRTPVXXTPPTS

SEQ ID NO: 58761 - protein, 39 aa, Artificial Sequence
  GFR-binding peptide
  MOD_RES (1), (3), (37), (38): Xaa is C or S
  MOD_RES (15), (16), (17), (18), (19): Xaa is A or G
  MOD_RES (20), (21), (22), (23): Xaa is A or G or is absent
XGXRDVVMGEYKFKXXXXXXXXXLYLMSIPEMKTPTXXP

SEQ ID NO: 58762 - protein, 42 aa, Artificial Sequence; identical to SEQ ID NO: 2867
  GFR-binding peptide
  MOD_RES (1), (36), (37): Xaa is C or S
  MOD_RES (14), (15), (16), (17), (18): Xaa is A or G
  MOD_RES (19), (20), (21), (22): Xaa is A or G or is absent

SEQ ID NO: 58763 - protein, 35 aa, Artificial Sequence; identical to SEQ ID NO: 2871
  GFR-binding peptide
  MOD_RES (1), (34), (35): Xaa is C or S
  MOD_RES (12), (13), (14), (15), (16): Xaa is A or G
  MOD_RES (17), (18), (19), (20): Xaa is A or G or is absent

SEQ ID NO: 58764 - protein, 37 aa, Artificial Sequence
  GFR-binding peptide
  MOD_RES (32), (33): Xaa is C or S
RDVVMGEYKFKIIQQKDNLYLMSIPEMKTPTXXPGAS

SEQ ID NO: 58765 - protein, 41 aa, Artificial Sequence; identical to SEQ ID NO: 31874
  GFR-binding peptide
  MOD_RES (1), (35), (36): Xaa is C or S
  MOD_RES (13), (14), (15), (16), (17): Xaa is A or G
  MOD_RES (18), (19), (20), (21): Xaa is A or G or is absent

SEQ ID NO: 58766 - protein, 37 aa, Artificial Sequence; identical to SEQ ID NO: 23863
  GFR-binding peptide
  MOD_RES (31), (32): Xaa is C or S

SEQ ID NO: 58767 - protein, 36 aa, Artificial Sequence
  GFR-binding peptide
  MOD_RES (33), (34): Xaa is C or S
  MOD_RES (11), (12), (13), (14), (15): Xaa is A or G
  MOD_RES (16), (17), (18), (19): Xaa is A or G or is absent
EEVIMEYKFKXXXXXXXXXLYLMSIPETKVPAXXTS

SEQ ID NO: 58768 - protein, 39 aa, Artificial Sequence; identical to SEQ ID NO: 23864
  GFR-binding peptide
  MOD_RES (1), (33), (34): Xaa is C or S

SEQ ID NO: 58769 - protein, 38 aa, Artificial Sequence
  GFR-binding peptide
  MOD_RES (1), (33), (34): Xaa is C or S
XSEVVMDEYKFKVVNNASDLYLISIPELRTPVXXTPPT

SEQ ID NO: 58770 - protein, 42 aa, Artificial Sequence; identical to SEQ ID NO: 23866
  GFR-binding peptide
  MOD_RES (2), (4), (38), (39): Xaa is C or S
  MOD_RES (16), (17), (18), (19), (20): Xaa is A or G
  MOD_RES (21), (22), (23), (24): Xaa is A or G or is absent

SEQ ID NO: 58771 - protein, 38 aa, Artificial Sequence
  GFR-binding peptide
  MOD_RES (1), (35), (36): Xaa is C or S
  MOD_RES (13), (14), (15), (16), (17): Xaa is A or G
  MOD_RES (18), (19), (20), (21): Xaa is A or G or is absent
XAEVVMDRHKRLXXXXXXXXXYYLISTASLRAPVXXSA

SEQ ID NO: 58772 - protein, 35 aa, Artificial Sequence
  GFR-binding peptide
  MOD_RES (1), (34), (35): Xaa is C or S
  MOD_RES (12), (13), (14), (15), (16): Xaa is A or G
  MOD_RES (17), (18), (19), (20): Xaa is A or G or is absent
XSKVIMPIKGYXXXXXXXXXFYLINIPSLDQSVXX

SEQ ID NO: 58773 - protein, 34 aa, Artificial Sequence; identical to SEQ ID NO: 31883
  GFR-binding peptide
  MOD_RES (32), (33): Xaa is C or S

SEQ ID NO: 58774 - protein, 31 aa, Artificial Sequence; identical to SEQ ID NO: 2881
  GFR-binding peptide

SEQ ID NO: 58775 - protein, 40 aa, Artificial Sequence; identical to SEQ ID NO: 2883
  GFR-binding peptide
  MOD_RES (2), (4), (38), (39): Xaa is C or S
  MOD_RES (16), (17), (18), (19), (20): Xaa is A or G
  MOD_RES (21), (22), (23), (24): Xaa is A or G or is absent

SEQ ID NO: 58776 - protein, 33 aa, Artificial Sequence; identical to SEQ ID NO: 23875
  GFR-binding peptide
  MOD_RES (1), (33): Xaa is C or S

SEQ ID NO: 58777 - protein, 40 aa, Artificial Sequence; identical to SEQ ID NO: 31891
  GFR-binding peptide
  MOD_RES (1), (35), (36): Xaa is C or S
  MOD_RES (13), (14), (15), (16), (17): Xaa is A or G
  MOD_RES (18), (19), (20), (21): Xaa is A or G or is absent

SEQ ID NO: 58778 - protein, 38 aa, Artificial Sequence; identical to SEQ ID NO: 31892
  GFR-binding peptide
  MOD_RES (2), (4): Xaa is C or S
  MOD_RES (17), (18), (19), (20), (21): Xaa is A or G
  MOD_RES (22), (23), (24), (25): Xaa is A or G or is absent

SEQ ID NO: 58779 - protein, 36 aa, Artificial Sequence
  GFR-binding peptide
  MOD_RES (31), (32): Xaa is C or S
EEVIMRHKRLLLVRGNDYYLMSTASTKVPAXXTSPV

SEQ ID NO: 58780 - protein, 30 aa, Artificial Sequence
  GFR-binding peptide
DVVMGEYKFKIIQQKDNLYLMSIPEMKTPT

SEQ ID NO: 58781 - protein, 41 aa, Artificial Sequence; identical to SEQ ID NO: 2890
  GFR-binding peptide
  MOD_RES (2), (4), (38), (39): Xaa is C or S
  MOD_RES (16), (17), (18), (19), (20): Xaa is A or G
  MOD_RES (21), (22), (23), (24): Xaa is A or G or is absent

SEQ ID NO: 58782 - protein, 37 aa, Artificial Sequence; identical to SEQ ID NO: 23885
  GFR-binding peptide
  MOD_RES (1), (3), (34), (35): Xaa is C or S

SEQ ID NO: 58783 - protein, 36 aa, Artificial Sequence
  GFR-binding peptide
  MOD_RES (32), (33): Xaa is C or S
SEVVMDEYKFKVVNNASDLYLISIPELRTPVXXTPP

SEQ ID NO: 58784 - protein, 40 aa, Artificial Sequence; identical to SEQ ID NO: 23886
  GFR-binding peptide
  MOD_RES (34), (35): Xaa is C or S
  MOD_RES (12), (13), (14), (15), (16): Xaa is A or G
  MOD_RES (17), (18), (19), (20): Xaa is A or G or is absent

SEQ ID NO: 58785 - protein, 31 aa, Artificial Sequence
  GFR-binding peptide
  MOD_RES (31), (31): Xaa is C or S
EVTMNPIKGYVVNKNEDFYLINIPSMKEPVX

SEQ ID NO: 58786 - protein, 37 aa, Artificial Sequence
  GFR-binding peptide
  MOD_RES (1), (35), (36): Xaa is C or S
  MOD_RES (13), (14), (15), (16), (17): Xaa is A or G
  MOD_RES (18), (19), (20), (21): Xaa is A or G or is absent
XSEVVMDYHYKLXXXXXXXXXKYLISIPSLRTPVXXT

SEQ ID NO: 58787 - protein, 33 aa, Artificial Sequence; identical to SEQ ID NO: 31902
  GFR-binding peptide
  MOD_RES (32), (33): Xaa is C or S

SEQ ID NO: 58788 - protein, 32 aa, Artificial Sequence
  GFR-binding peptide
  MOD_RES (11), (12), (13), (14), (15): Xaa is A or G
  MOD_RES (16), (17), (18), (19): Xaa is A or G or is absent
EVVMDRHKRLXXXXXXXXXYYLISTASLRTPV

SEQ ID NO: 58789 - protein, 37 aa, Artificial Sequence; identical to SEQ ID NO: 31906
  GFR-binding peptide
  MOD_RES (1), (3), (35), (36): Xaa is C or S

SEQ ID NO: 58790 - protein, 37 aa, Artificial Sequence; identical to SEQ ID NO: 2896
  GFR-binding peptide
  MOD_RES (2), (4), (35), (36): Xaa is C or S

SEQ ID NO: 58791 - protein, 38 aa, Artificial Sequence; identical to SEQ ID NO: 10361
  GFR-binding peptide
  MOD_RES (32), (33): Xaa is C or S

SEQ ID NO: 58792 - protein, 37 aa, Artificial Sequence; identical to SEQ ID NO: 31910
  GFR-binding peptide
  MOD_RES (1), (3), (37): Xaa is C or S
  MOD_RES (15), (16), (17), (18), (19): Xaa is A or G
  MOD_RES (20), (21), (22), (23): Xaa is A or G or is absent

SEQ ID NO: 58793 - protein, 36 aa, Artificial Sequence
  GFR-binding peptide
  MOD_RES (1), (32), (33): Xaa is C or S
XEEVIMEYKFKLLVRGNDLYLMSIPETKVPAXXTSP

SEQ ID NO: 58794 - protein, 35 aa, Artificial Sequence; identical to SEQ ID NO: 2901
  GFR-binding peptide
  MOD_RES (1), (35): Xaa is C or S
  MOD_RES (13), (14), (15), (16), (17): Xaa is A or G
  MOD_RES (18), (19), (20), (21): Xaa is A or G or is absent

SEQ ID NO: 58795 - protein, 32 aa, Artificial Sequence; identical to SEQ ID NO: 31914
  GFR-binding peptide
  MOD_RES (32), (32): Xaa is C or S

SEQ ID NO: 58796 - protein, 38 aa, Artificial Sequence; identical to SEQ ID NO: 56853
  GFR-binding peptide
  MOD_RES (33), (34): Xaa is C or S
  MOD_RES (11), (12), (13), (14), (15): Xaa is A or G
  MOD_RES (16), (17), (18), (19): Xaa is A or G or is absent

SEQ ID NO: 58797 - protein, 36 aa, Artificial Sequence; identical to SEQ ID NO: 23899
  GFR-binding peptide
  MOD_RES (2), (36): Xaa is C or S
  MOD_RES (14), (15), (16), (17), (18): Xaa is A or G
  MOD_RES (19), (20), (21), (22): Xaa is A or G or is absent

SEQ ID NO: 58798 - protein, 41 aa, Artificial Sequence; identical to SEQ ID NO: 23900
  GFR-binding peptide
  MOD_RES (1), (3), (35), (36): Xaa is C or S

SEQ ID NO: 58799 - protein, 44 aa, Artificial Sequence; identical to SEQ ID NO: 2905
  GFR-binding peptide
  MOD_RES (2), (4), (38), (39): Xaa is C or S
  MOD_RES (16), (17), (18), (19), (20): Xaa is A or G
  MOD_RES (21), (22), (23), (24): Xaa is A or G or is absent

SEQ ID NO: 58800 - protein, 32 aa, Artificial Sequence; identical to SEQ ID NO: 2906
  GFR-binding peptide
  MOD_RES (32), (32): Xaa is C or S

SEQ ID NO: 58801 - protein, 39 aa, Artificial Sequence; identical to SEQ ID NO: 23901
  GFR-binding peptide
  MOD_RES (2), (4), (35), (36): Xaa is C or S

SEQ ID NO: 58802 - protein, 38 aa, Artificial Sequence; identical to SEQ ID NO: 2908
  GFR-binding peptide
  MOD_RES (2), (4), (36), (37): Xaa is C or S

SEQ ID NO: 58803 - protein, 38 aa, Artificial Sequence; identical to SEQ ID NO: 2909
  GFR-binding peptide
  MOD_RES (2), (4), (37), (38): Xaa is C or S
  MOD_RES (15), (16), (17), (18), (19): Xaa is A or G
  MOD_RES (20), (21), (22), (23): Xaa is A or G or is absent

SEQ ID NO: 58804 - protein, 35 aa, Artificial Sequence; identical to SEQ ID NO: 23909
  GFR-binding peptide
  MOD_RES (32), (33): Xaa is C or S

SEQ ID NO: 58805 - protein, 36 aa, Artificial Sequence; identical to SEQ ID NO: 10376
  GFR-binding peptide
  MOD_RES (31), (32): Xaa is C or S

SEQ ID NO: 58806 - protein, 42 aa, Artificial Sequence; identical to SEQ ID NO: 2913
  GFR-binding peptide
  MOD_RES (2), (4), (37), (38): Xaa is C or S
  MOD_RES (15), (16), (17), (18), (19): Xaa is A or G
  MOD_RES (20), (21), (22), (23): Xaa is A or G or is absent

SEQ ID NO: 58807 - protein, 38 aa, Artificial Sequence; identical to SEQ ID NO: 23911
  GFR-binding peptide
  MOD_RES (1), (33), (34): Xaa is C or S

SEQ ID NO: 58808 - protein, 38 aa, Artificial Sequence
  GFR-binding peptide
  MOD_RES (34), (35): Xaa is C or S
  MOD_RES (12), (13), (14), (15), (16): Xaa is A or G
  MOD_RES (17), (18), (19), (20): Xaa is A or G or is absent
AEVVMDRHKRLXXXXXXXXXYYLISTASLRAPVXXSAP

SEQ ID NO: 58809 - protein, 33 aa, Artificial Sequence; identical to SEQ ID NO: 2917
  GFR-binding peptide
  MOD_RES (33), (33): Xaa is C or S

SEQ ID NO: 58810 - protein, 40 aa, Artificial Sequence; identical to SEQ ID NO: 2919
  GFR-binding peptide
  MOD_RES (1), (35), (36): Xaa is C or S
  MOD_RES (13), (14), (15), (16), (17): Xaa is A or G
  MOD_RES (18), (19), (20), (21): Xaa is A or G or is absent

SEQ ID NO: 58811 - protein, 35 aa, Artificial Sequence
  GFR-binding peptide
  MOD_RES (1), (3), (35): Xaa is C or S
XGXAEVVMDRHKRLVVNNAADYYLISTASLRAPVX

SEQ ID NO: 58812 - protein, 40 aa, Artificial Sequence; identical to SEQ ID NO: 2924
  GFR-binding peptide
  MOD_RES (2), (4), (37), (38): Xaa is C or S
  MOD_RES (15), (16), (17), (18), (19): Xaa is A or G
  MOD_RES (20), (21), (22), (23): Xaa is A or G or is absent

SEQ ID NO: 58813 - protein, 37 aa, Artificial Sequence; identical to SEQ ID NO: 2925
  GFR-binding peptide
  MOD_RES (1), (3): Xaa is C or S
  MOD_RES (16), (17), (18), (19), (20): Xaa is A or G
  MOD_RES (21), (22), (23), (24): Xaa is A or G or is absent

SEQ ID NO: 58814 - protein, 35 aa, Artificial Sequence; identical to SEQ ID NO: 56888
  GFR-binding peptide
  MOD_RES (1), (35): Xaa is C or S
  MOD_RES (13), (14), (15), (16), (17): Xaa is A or G
  MOD_RES (18), (19), (20), (21): Xaa is A or G or is absent

SEQ ID NO: 58815 - protein, 41 aa, Artificial Sequence; identical to SEQ ID NO: 31942
  GFR-binding peptide
  MOD_RES (1), (3), (35), (36): Xaa is C or S

SEQ ID NO: 58816 - protein, 36 aa, Artificial Sequence; identical to SEQ ID NO: 31944
  GFR-binding peptide
  MOD_RES (32), (32): Xaa is C or S

SEQ ID NO: 58817 - protein, 37 aa, Artificial Sequence; identical to SEQ ID NO: 31947
  GFR-binding peptide
  MOD_RES (34), (35): Xaa is C or S
  MOD_RES (12), (13), (14), (15), (16): Xaa is A or G
  MOD_RES (17), (18), (19), (20): Xaa is A or G or is absent

SEQ ID NO: 58818 - protein, 35 aa, Artificial Sequence
  GFR-binding peptide
  MOD_RES (1), (3), (35): Xaa is C or S
XAXSEVTMNEYKFKVVNKNEDLYLISIPEMKEPVX

SEQ ID NO: 58819 - protein, 41 aa, Artificial Sequence; identical to SEQ ID NO: 31954
  GFR-binding peptide
  MOD_RES (2), (4), (38), (39): Xaa is C or S
  MOD_RES (16), (17), (18), (19), (20): Xaa is A or G
  MOD_RES (21), (22), (23), (24): Xaa is A or G or is absent

SEQ ID NO: 58820 - protein, 38 aa, Artificial Sequence; identical to SEQ ID NO: 2944
  GFR-binding peptide
  MOD_RES (34), (35): Xaa is C or S
  MOD_RES (12), (13), (14), (15), (16): Xaa is A or G
  MOD_RES (17), (18), (19), (20): Xaa is A or G or is absent

SEQ ID NO: 58821 - protein, 39 aa, Artificial Sequence; identical to SEQ ID NO: 31956
  GFR-binding peptide
  MOD_RES (34), (35): Xaa is C or S
  MOD_RES (12), (13), (14), (15), (16): Xaa is A or G
  MOD_RES (17), (18), (19), (20): Xaa is A or G or is absent

SEQ ID NO: 58822 - protein, 34 aa, Artificial Sequence; identical to SEQ ID NO: 56906
  GFR-binding peptide
  MOD_RES (2), (2): Xaa is C or S
  MOD_RES (13), (14), (15), (16), (17): Xaa is A or G
  MOD_RES (18), (19), (20), (21): Xaa is A or G or is absent

SEQ ID NO: 58823 - protein, 39 aa, Artificial Sequence; identical to SEQ ID NO: 31959
  GFR-binding peptide
  MOD_RES (1), (33), (34): Xaa is C or S

SEQ ID NO: 58824 - protein, 34 aa, Artificial Sequence; identical to SEQ ID NO: 2948
  GFR-binding peptide
  MOD_RES (2), (4): Xaa is C or S

SEQ ID NO: 58825 - protein, 35 aa, Artificial Sequence; identical to SEQ ID NO: 2950
  GFR-binding peptide
  MOD_RES (1), (33), (34): Xaa is C or S

SEQ ID NO: 58826 - protein, 31 aa, Artificial Sequence; identical to SEQ ID NO: 31967
  GFR-binding peptide

SEQ ID NO: 58827 - protein, 32 aa, Artificial Sequence; identical to SEQ ID NO: 2953
  GFR-binding peptide
  MOD_RES (11), (12), (13), (14), (15): Xaa is A or G
  MOD_RES (16), (17), (18), (19): Xaa is A or G or is absent

SEQ ID NO: 58828 - protein, 40 aa, Artificial Sequence; identical to SEQ ID NO: 2955
  GFR-binding peptide
  MOD_RES (1), (34), (35): Xaa is C or S
  MOD_RES (12), (13), (14), (15), (16): Xaa is A or G
  MOD_RES (17), (18), (19), (20): Xaa is A or G or is absent

SEQ ID NO: 58829 - protein, 37 aa, Artificial Sequence; identical to SEQ ID NO: 23957
  GFR-binding peptide
  MOD_RES (1), (33), (34): Xaa is C or S

SEQ ID NO: 58830 - protein, 35 aa, Artificial Sequence
  GFR-binding peptide
  MOD_RES (33), (34): Xaa is C or S
  MOD_RES (11), (12), (13), (14), (15): Xaa is A or G
  MOD_RES (16), (17), (18), (19): Xaa is A or G or is absent
EEVIMEYKFKXXXXXXXXXLYLMSIPETKVPAXXT

SEQ ID NO: 58831 - protein, 41 aa, Artificial Sequence; identical to SEQ ID NO: 56923
  GFR-binding peptide
  MOD_RES (2), (4), (36), (37): Xaa is C or S

SEQ ID NO: 58832 - protein, 39 aa, Artificial Sequence; identical to SEQ ID NO: 2958
  GFR-binding peptide
  MOD_RES (2), (34): Xaa is C or S

SEQ ID NO: 58833 - protein, 37 aa, Artificial Sequence; identical to SEQ ID NO: 56925
  GFR-binding peptide
  MOD_RES (32), (33): Xaa is C or S

SEQ ID NO: 58834 - protein, 39 aa, Artificial Sequence; identical to SEQ ID NO: 2962
  GFR-binding peptide
  MOD_RES (1), (3), (36), (37): Xaa is C or S
  MOD_RES (14), (15), (16), (17), (18): Xaa is A or G
  MOD_RES (19), (20), (21), (22): Xaa is A or G or is absent

SEQ ID NO: 58835 - protein, 35 aa, Artificial Sequence; identical to SEQ ID NO: 2964
  GFR-binding peptide
  MOD_RES (2), (4): Xaa is C or S

SEQ ID NO: 58836 - protein, 37 aa, Artificial Sequence; identical to SEQ ID NO: 31979
  GFR-binding peptide
  MOD_RES (2), (33), (34): Xaa is C or S

SEQ ID NO: 58837 - protein, 35 aa, Artificial Sequence
  GFR-binding peptide
  MOD_RES (1), (35): Xaa is C or S
  MOD_RES (13), (14), (15), (16), (17): Xaa is A or G
  MOD_RES (18), (19), (20), (21): Xaa is A or G or is absent
XRDVVMGEYKFKXXXXXXXXXLYLMSIPEMKTPTX

SEQ ID NO: 58838 - protein, 32 aa, Artificial Sequence; identical to SEQ ID NO: 2969
  GFR-binding peptide
  MOD_RES (11), (12), (13), (14), (15): Xaa is A or G
  MOD_RES (16), (17), (18), (19): Xaa is A or G or is absent

SEQ ID NO: 58839 - protein, 33 aa, Artificial Sequence; identical to SEQ ID NO: 23966
  GFR-binding peptide
  MOD_RES (2), (2): Xaa is C or S

SEQ ID NO: 58840 - protein, 41 aa, Artificial Sequence
  GFR-binding peptide
  MOD_RES (1), (35), (36): Xaa is C or S
  MOD_RES (13), (14), (15), (16), (17): Xaa is A or G
  MOD_RES (18), (19), (20), (21): Xaa is A or G or is absent
XSEVTMNYHYKLXXXXXXXXXKYLISIPSMKEPVXXPEPIG

SEQ ID NO: 58841 - protein, 37 aa, Artificial Sequence; identical to SEQ ID NO: 2970
  GFR-binding peptide
  MOD_RES (2), (36), (37): Xaa is C or S
  MOD_RES (14), (15), (16), (17), (18): Xaa is A or G
  MOD_RES (19), (20), (21), (22): Xaa is A or G or is absent

SEQ ID NO: 58842 - protein, 37 aa, Artificial Sequence; identical to SEQ ID NO: 31981
  GFR-binding peptide
  MOD_RES (1), (32), (33): Xaa is C or S

SEQ ID NO: 58843 - protein, 37 aa, Artificial Sequence; identical to SEQ ID NO: 31982
  GFR-binding peptide
  MOD_RES (34), (35): Xaa is C or S
  MOD_RES (12), (13), (14), (15), (16): Xaa is A or G
  MOD_RES (17), (18), (19), (20): Xaa is A or G or is absent

SEQ ID NO: 58844 - protein, 37 aa, Artificial Sequence; identical to SEQ ID NO: 2971
  GFR-binding peptide
  MOD_RES (1), (34), (35): Xaa is C or S

SEQ ID NO: 58845 - protein, 36 aa, Artificial Sequence
  GFR-binding peptide
  MOD_RES (1), (3): Xaa is C or S
  MOD_RES (15), (16), (17), (18), (19): Xaa is A or G
  MOD_RES (20), (21), (22), (23): Xaa is A or G or is absent
XAXSEVTMNEYKFKXXXXXXXXXLYLISIPEMKEPV

SEQ ID NO: 58846 - protein, 41 aa, Artificial Sequence
  GFR-binding peptide
  MOD_RES (1), (3), (37), (38): Xaa is C or S
  MOD_RES (15), (16), (17), (18), (19): Xaa is A or G
  MOD_RES (20), (21), (22), (23): Xaa is A or G or is absent
XGXSEVVMDRHKRLXXXXXXXXXYYLISTASLRTPVXXTPP

SEQ ID NO: 58847 - protein, 32 aa, Artificial Sequence; identical to SEQ ID NO: 31986
  GFR-binding peptide
  MOD_RES (1), (1): Xaa is C or S

SEQ ID NO: 58848 - protein, 40 aa, Artificial Sequence; identical to SEQ ID NO: 2974
  GFR-binding peptide
  MOD_RES (2), (34), (35): Xaa is C or S

SEQ ID NO: 58849 - protein, 37 aa, Artificial Sequence; identical to SEQ ID NO: 23974
  GFR-binding peptide
  MOD_RES (1), (3), (36), (37): Xaa is C or S
  MOD_RES (14), (15), (16), (17), (18): Xaa is A or G
  MOD_RES (19), (20), (21), (22): Xaa is A or G or is absent

SEQ ID NO: 58850 - protein, 35 aa, Artificial Sequence; identical to SEQ ID NO: 2977
  GFR-binding peptide
  MOD_RES (33), (34): Xaa is C or S

SEQ ID NO: 58851 - protein, 36 aa, Artificial Sequence; identical to SEQ ID NO: 2978
  GFR-binding peptide
  MOD_RES (33), (34): Xaa is C or S
  MOD_RES (11), (12), (13), (14), (15): Xaa is A or G
  MOD_RES (16), (17), (18), (19): Xaa is A or G or is absent

SEQ ID NO: 58852 - protein, 35 aa, Artificial Sequence; identical to SEQ ID NO: 31990
  GFR-binding peptide
  MOD_RES (1), (33), (34): Xaa is C or S

SEQ ID NO: 58853 - protein, 36 aa, Artificial Sequence; identical to SEQ ID NO: 10433
  GFR-binding peptide
  MOD_RES (32), (33): Xaa is C or S

SEQ ID NO: 58854 - protein, 39 aa, Artificial Sequence; identical to SEQ ID NO: 23978
  GFR-binding peptide
  MOD_RES (1), (3), (37), (38): Xaa is C or S
  MOD_RES (15), (16), (17), (18), (19): Xaa is A or G
  MOD_RES (20), (21), (22), (23): Xaa is A or G or is absent

SEQ ID NO: 58855 - protein, 35 aa, Artificial Sequence
  GFR-binding peptide
  MOD_RES (1), (3): Xaa is C or S
  MOD_RES (14), (15), (16), (17), (18): Xaa is A or G
  MOD_RES (19), (20), (21), (22): Xaa is A or G or is absent
XKXSRVIMPIKGYXXXXXXXXXFYLINIPSLAQPV

SEQ ID NO: 58856 - protein, 40 aa, Artificial Sequence; identical to SEQ ID NO: 2980
  GFR-binding peptide
  MOD_RES (34), (35): Xaa is C or S
  MOD_RES (12), (13), (14), (15), (16): Xaa is A or G
  MOD_RES (17), (18), (19), (20): Xaa is A or G or is absent

SEQ ID NO: 58857 - protein, 37 aa, Artificial Sequence; identical to SEQ ID NO: 23981
  GFR-binding peptide
  MOD_RES (32), (33): Xaa is C or S

SEQ ID NO: 58858 - protein, 40 aa, Artificial Sequence; identical to SEQ ID NO: 2983
  GFR-binding peptide
  MOD_RES (1), (3), (34), (35): Xaa is C or S

SEQ ID NO: 58859 - protein, 36 aa, Artificial Sequence; identical to SEQ ID NO: 2984
  GFR-binding peptide
  MOD_RES (2), (34), (35): Xaa is C or S

SEQ ID NO: 58860 - protein, 37 aa, Artificial Sequence; identical to SEQ ID NO: 31996
  GFR-binding peptide
  MOD_RES (2), (34), (35): Xaa is C or S

SEQ ID NO: 58861 - protein, 40 aa, Artificial Sequence
  GFR-binding peptide
  MOD_RES (2), (4), (36), (37): Xaa is C or S
RXAXSEVTMNYHYKLVVNKNEDKYLISIPSMKEPVXXPEP

SEQ ID NO: 58862 - protein, 36 aa, Artificial Sequence
  GFR-binding peptide
  MOD_RES (2), (36): Xaa is C or S
  MOD_RES (14), (15), (16), (17), (18): Xaa is A or G
  MOD_RES (19), (20), (21), (22): Xaa is A or G or is absent
GXRDVVMGRHKRLXXXXXXXXXYYLMSTASMKTPTX

SEQ ID NO: 58863 - protein, 37 aa, Artificial Sequence; identical to SEQ ID NO: 31997
  GFR-binding peptide
  MOD_RES (31), (32): Xaa is C or S

SEQ ID NO: 58864 - protein, 42 aa, Artificial Sequence
  GFR-binding peptide
  MOD_RES (1), (3), (37), (38): Xaa is C or S
  MOD_RES (15), (16), (17), (18), (19): Xaa is A or G
  MOD_RES (20), (21), (22), (23): Xaa is A or G or is absent
XAXSEVTMNEYKFKXXXXXXXXXLYLISIPEMKEPVXXPEPI

SEQ ID NO: 58865 - protein, 37 aa, Artificial Sequence; identical to SEQ ID NO: 2990
  GFR-binding peptide
  MOD_RES (2), (4): Xaa is C or S
  MOD_RES (16), (17), (18), (19), (20): Xaa is A or G
  MOD_RES (21), (22), (23), (24): Xaa is A or G or is absent

SEQ ID NO: 58866 - protein, 32 aa, Artificial Sequence; identical to SEQ ID NO: 32000
  GFR-binding peptide
  MOD_RES (31), (32): Xaa is C or S

SEQ ID NO: 58867 - protein, 37 aa, Artificial Sequence
  GFR-binding peptide
  MOD_RES (2), (4): Xaa is C or S
  MOD_RES (16), (17), (18), (19), (20): Xaa is A or G
  MOD_RES (21), (22), (23), (24): Xaa is A or G or is absent
SXGXRDVVMGRHKRLXXXXXXXXXYYLMSTASMKTPT

SEQ ID NO: 58868 - protein, 40 aa, Artificial Sequence; identical to SEQ ID NO: 2991
  GFR-binding peptide
  MOD_RES (1), (3), (37), (38): Xaa is C or S
  MOD_RES (15), (16), (17), (18), (19): Xaa is A or G
  MOD_RES (20), (21), (22), (23): Xaa is A or G or is absent

SEQ ID NO: 58869 - protein, 39 aa, Artificial Sequence
  GFR-binding peptide
  MOD_RES (2), (4), (37), (38): Xaa is C or S
  MOD_RES (15), (16), (17), (18), (19): Xaa is A or G
  MOD_RES (20), (21), (22), (23): Xaa is A or G or is absent
LXGXEEVIMRHKRLXXXXXXXXXYYLMSTASTKVPAXXT

SEQ ID NO: 58870 - protein, 39 aa, Artificial Sequence
  GFR-binding peptide
  MOD_RES (1), (35), (36): Xaa is C or S
  MOD_RES (13), (14), (15), (16), (17): Xaa is A or G
  MOD_RES (18), (19), (20), (21): Xaa is A or G or is absent
XRDVVMGYHYKLXXXXXXXXXKYLMSIPSMKTPTXXPGA

SEQ ID NO: 58871 - protein, 37 aa, Artificial Sequence
  GFR-binding peptide
  MOD_RES (2), (4): Xaa is C or S
  MOD_RES (16), (17), (18), (19), (20): Xaa is A or G
  MOD_RES (21), (22), (23), (24): Xaa is A or G or is absent
RXGXAEVVMDRHKRLXXXXXXXXXYYLISTASLRAPV

SEQ ID NO: 58872 - protein, 32 aa, Artificial Sequence; identical to SEQ ID NO: 2994
  GFR-binding peptide
  MOD_RES (32), (32): Xaa is C or S

SEQ ID NO: 58873 - protein, 35 aa, Artificial Sequence; identical to SEQ ID NO: 23995
  GFR-binding peptide
  MOD_RES (33), (34): Xaa is C or S
  MOD_RES (11), (12), (13), (14), (15): Xaa is A or G
  MOD_RES (16), (17), (18), (19): Xaa is A or G or is absent

SEQ ID NO: 58874 - protein, 37 aa, Artificial Sequence; identical to SEQ ID NO: 23996
  GFR-binding peptide
  MOD_RES (2), (34), (35): Xaa is C or S

SEQ ID NO: 58875 - protein, 34 aa, Artificial Sequence
  GFR-binding peptide
  MOD_RES (33), (34): Xaa is C or S
  MOD_RES (11), (12), (13), (14), (15): Xaa is A or G
  MOD_RES (16), (17), (18), (19): Xaa is A or G or is absent
DVVMGEYKFKXXXXXXXXXLYLMSIPEMKTPTXX

SEQ ID NO: 58876 - protein, 37 aa, Artificial Sequence; identical to SEQ ID NO: 3001
  GFR-binding peptide
  MOD_RES (2), (4), (35), (36): Xaa is C or S

SEQ ID NO: 58877 - protein, 37 aa, Artificial Sequence; identical to SEQ ID NO: 32016
  GFR-binding peptide
  MOD_RES (34), (35): Xaa is C or S
  MOD_RES (12), (13), (14), (15), (16): Xaa is A or G
  MOD_RES (17), (18), (19), (20): Xaa is A or G or is absent

SEQ ID NO: 58878 - protein, 33 aa, Artificial Sequence; identical to SEQ ID NO: 32017
  GFR-binding peptide
  MOD_RES (31), (32): Xaa is C or S

SEQ ID NO: 58879 - protein, 41 aa, Artificial Sequence; identical to SEQ ID NO: 23997
  GFR-binding peptide
  MOD_RES (2), (4), (36), (37): Xaa is C or S

SEQ ID NO: 58880 - protein, 40 aa, Artificial Sequence; identical to SEQ ID NO: 56971
  GFR-binding peptide
  MOD_RES (2), (4), (35), (36): Xaa is C or S

SEQ ID NO: 58881 - protein, 38 aa, Artificial Sequence; identical to SEQ ID NO: 32019
  GFR-binding peptide
  MOD_RES (2), (37), (38): Xaa is C or S
  MOD_RES (15), (16), (17), (18), (19): Xaa is A or G
  MOD_RES (20), (21), (22), (23): Xaa is A or G or is absent

SEQ ID NO: 58882 - protein, 35 aa, Artificial Sequence
  GFR-binding peptide
  MOD_RES (2), (34), (35): Xaa is C or S
GXRDVVMGYHYKLIIQQKDNKYLMSIPSMKTPTXX

SEQ ID NO: 58883 - protein, 43 aa, Artificial Sequence
  GFR-binding peptide
  MOD_RES (1), (3), (37), (38): Xaa is C or S
  MOD_RES (15), (16), (17), (18), (19): Xaa is A or G
  MOD_RES (20), (21), (22), (23): Xaa is A or G or is absent
XGXSRVVMNRHKRLXXXXXXXXXYYLVSTASLKTPAXXPKPVH

SEQ ID NO: 58884 - protein, 36 aa, Artificial Sequence; identical to SEQ ID NO: 32031
  GFR-binding peptide
  MOD_RES (2), (36): Xaa is C or S
  MOD_RES (14), (15), (16), (17), (18): Xaa is A or G
  MOD_RES (19), (20), (21), (22): Xaa is A or G or is absent

SEQ ID NO: 58885 - protein, 39 aa, Artificial Sequence; identical to SEQ ID NO: 3012
  GFR-binding peptide
  MOD_RES (2), (36), (37): Xaa is C or S
  MOD_RES (14), (15), (16), (17), (18): Xaa is A or G
  MOD_RES (19), (20), (21), (22): Xaa is A or G or is absent

SEQ ID NO: 58886 - protein, 33 aa, Artificial Sequence; identical to SEQ ID NO: 3013
  GFR-binding peptide
  MOD_RES (2), (2): Xaa is C or S

SEQ ID NO: 58887 - protein, 38 aa, Artificial Sequence; identical to SEQ ID NO: 3022
  GFR-binding peptide
  MOD_RES (2), (34): Xaa is C or S

SEQ ID NO: 58888 - protein, 33 aa, Artificial Sequence; identical to SEQ ID NO: 3023
  GFR-binding peptide
  MOD_RES (31), (32): Xaa is C or S

SEQ ID NO: 58889 - protein, 39 aa, Artificial Sequence; identical to SEQ ID NO: 56996
  GFR-binding peptide
  MOD_RES (1), (3), (34), (35): Xaa is C or S

SEQ ID NO: 58890 - protein, 35 aa, Artificial Sequence; identical to SEQ ID NO: 24022
  GFR-binding peptide
  MOD_RES (1), (3), (34), (35): Xaa is C or S

SEQ ID NO: 58891 - protein, 36 aa, Artificial Sequence; identical to SEQ ID NO: 24023
  GFR-binding peptide
  MOD_RES (1), (35), (36): Xaa is C or S
  MOD_RES (13), (14), (15), (16), (17): Xaa is A or G
  MOD_RES (18), (19), (20), (21): Xaa is A or G or is absent

SEQ ID NO: 58892 - protein, 37 aa, Artificial Sequence; identical to SEQ ID NO: 24025
  GFR-binding peptide
  MOD_RES (31), (32): Xaa is C or S

SEQ ID NO: 58893 - protein, 38 aa, Artificial Sequence; identical to SEQ ID NO: 32060
  GFR-binding peptide
  MOD_RES (34), (34): Xaa is C or S
  MOD_RES (12), (13), (14), (15), (16): Xaa is A or G
  MOD_RES (17), (18), (19), (20): Xaa is A or G or is absent

SEQ ID NO: 58894 - protein, 43 aa, Artificial Sequence; identical to SEQ ID NO: 32061
  GFR-binding peptide
  MOD_RES (2), (4), (38), (39): Xaa is C or S
  MOD_RES (16), (17), (18), (19), (20): Xaa is A or G
  MOD_RES (21), (22), (23), (24): Xaa is A or G or is absent

SEQ ID NO: 58895 - protein, 40 aa, Artificial Sequence; identical to SEQ ID NO: 3032
  GFR-binding peptide
  MOD_RES (2), (4), (35), (36): Xaa is C or S

SEQ ID NO: 58896 - protein, 37 aa, Artificial Sequence; identical to SEQ ID NO: 32066
  GFR-binding peptide
  MOD_RES (34), (35): Xaa is C or S
  MOD_RES (12), (13), (14), (15), (16): Xaa is A or G
  MOD_RES (17), (18), (19), (20): Xaa is A or G or is absent

SEQ ID NO: 58897 - protein, 39 aa, Artificial Sequence; identical to SEQ ID NO: 24027
  GFR-binding peptide
  MOD_RES (2), (34): Xaa is C or S

SEQ ID NO: 58898 - protein, 36 aa, Artificial Sequence; identical to SEQ ID NO: 24028
  GFR-binding peptide
  MOD_RES (1), (34), (35): Xaa is C or S
  MOD_RES (12), (13), (14), (15), (16): Xaa is A or G
  MOD_RES (17), (18), (19), (20): Xaa is A or G or is absent

SEQ ID NO: 58899 - protein, 42 aa, Artificial Sequence; identical to SEQ ID NO: 32072
  GFR-binding peptide
  MOD_RES (1), (3), (36), (37): Xaa is C or S
  MOD_RES (14), (15), (16), (17), (18): Xaa is A or G
  MOD_RES (19), (20), (21), (22): Xaa is A or G or is absent

SEQ ID NO: 58900 - protein, 34 aa, Artificial Sequence
  GFR-binding peptide
  MOD_RES (1), (1): Xaa is C or S
  MOD_RES (13), (14), (15), (16), (17): Xaa is A or G
  MOD_RES (18), (19), (20), (21): Xaa is A or G or is absent
XRDVVMGEYKFKXXXXXXXXXLYLMSIPEMKTPT

SEQ ID NO: 58901 - protein, 37 aa, Artificial Sequence; identical to SEQ ID NO: 32075
  GFR-binding peptide
  MOD_RES (33), (34): Xaa is C or S
  MOD_RES (11), (12), (13), (14), (15): Xaa is A or G
  MOD_RES (16), (17), (18), (19): Xaa is A or G or is absent

SEQ ID NO: 58902 - protein, 41 aa, Artificial Sequence; identical to SEQ ID NO: 3036
  GFR-binding peptide
  MOD_RES (2), (4), (36), (37): Xaa is C or S

SEQ ID NO: 58903 - protein, 37 aa, Artificial Sequence; identical to SEQ ID NO: 24033
  GFR-binding peptide
  MOD_RES (1), (3), (35), (36): Xaa is C or S

SEQ ID NO: 58904 - protein, 38 aa, Artificial Sequence; identical to SEQ ID NO: 24038
  GFR-binding peptide
  MOD_RES (2), (4), (36), (37): Xaa is C or S

SEQ ID NO: 58905 - protein, 35 aa, Artificial Sequence; identical to SEQ ID NO: 3042
  GFR-binding peptide
  MOD_RES (32), (33): Xaa is C or S

SEQ ID NO: 58906 - protein, 35 aa, Artificial Sequence; identical to SEQ ID NO: 24040
  GFR-binding peptide
  MOD_RES (2), (4): Xaa is C or S

SEQ ID NO: 58907 - protein, 35 aa, Artificial Sequence
  GFR-binding peptide
  MOD_RES (2), (33), (34): Xaa is C or S
GXEEVIMYHYKLLLVRGNDKYLMSIPSTKVPAXXT

SEQ ID NO: 58908 - protein, 39 aa, Artificial Sequence; identical to SEQ ID NO: 24046
  GFR-binding peptide
  MOD_RES (33), (34): Xaa is C or S

SEQ ID NO: 58909 - protein, 35 aa, Artificial Sequence; identical to SEQ ID NO: 3048
  GFR-binding peptide
  MOD_RES (34), (35): Xaa is C or S
  MOD_RES (12), (13), (14), (15), (16): Xaa is A or G
  MOD_RES (17), (18), (19), (20): Xaa is A or G or is absent

SEQ ID NO: 58910 - protein, 38 aa, Artificial Sequence; identical to SEQ ID NO: 24049
  GFR-binding peptide
  MOD_RES (34), (35): Xaa is C or S
  MOD_RES (12), (13), (14), (15), (16): Xaa is A or G
  MOD_RES (17), (18), (19), (20): Xaa is A or G or is absent

SEQ ID NO: 58911 - protein, 40 aa, Artificial Sequence; identical to SEQ ID NO: 32091
  GFR-binding peptide
  MOD_RES (2), (36), (37): Xaa is C or S
  MOD_RES (14), (15), (16), (17), (18): Xaa is A or G
  MOD_RES (19), (20), (21), (22): Xaa is A or G or is absent

SEQ ID NO: 58912 - protein, 37 aa, Artificial Sequence; identical to SEQ ID NO: 24054
  GFR-binding peptide
  MOD_RES (1), (35): Xaa is C or S
  MOD_RES (13), (14), (15), (16), (17): Xaa is A or G
  MOD_RES (18), (19), (20), (21): Xaa is A or G or is absent

SEQ ID NO: 58913 - protein, 39 aa, Artificial Sequence; identical to SEQ ID NO: 32092
  GFR-binding peptide
  MOD_RES (2), (36), (37): Xaa is C or S
  MOD_RES (14), (15), (16), (17), (18): Xaa is A or G
  MOD_RES (19), (20), (21), (22): Xaa is A or G or is absent

SEQ ID NO: 58914 - protein, 37 aa, Artificial Sequence; identical to SEQ ID NO: 32093
  GFR-binding peptide
  MOD_RES (1), (33), (34): Xaa is C or S

SEQ ID NO: 58915 - protein, 37 aa, Artificial Sequence; identical to SEQ ID NO: 32094
  GFR-binding peptide
  MOD_RES (1), (33), (34): Xaa is C or S

SEQ ID NO: 58916 - protein, 38 aa, Artificial Sequence; identical to SEQ ID NO: 3056
  GFR-binding peptide
  MOD_RES (1), (3), (37), (38): Xaa is C or S
  MOD_RES (15), (16), (17), (18), (19): Xaa is A or G
  MOD_RES (20), (21), (22), (23): Xaa is A or G or is absent

SEQ ID NO: 58917 - protein, 33 aa, Artificial Sequence; identical to SEQ ID NO: 24062
  GFR-binding peptide
  MOD_RES (32), (33): Xaa is C or S

SEQ ID NO: 58918 - protein, 44 aa, Artificial Sequence; identical to SEQ ID NO: 32104
  GFR-binding peptide
  MOD_RES (2), (4), (38), (39): Xaa is C or S
  MOD_RES (16), (17), (18), (19), (20): Xaa is A or G
  MOD_RES (21), (22), (23), (24): Xaa is A or G or is absent

SEQ ID NO: 58919 - protein, 36 aa, Artificial Sequence; identical to SEQ ID NO: 3060
  GFR-binding peptide
  MOD_RES (2), (34): Xaa is C or S

SEQ ID NO: 58920 - protein, 37 aa, Artificial Sequence; identical to SEQ ID NO: 3062
  GFR-binding peptide
  MOD_RES (33), (34): Xaa is C or S
  MOD_RES (11), (12), (13), (14), (15): Xaa is A or G
  MOD_RES (16), (17), (18), (19): Xaa is A or G or is absent

SEQ ID NO: 58921 - protein, 39 aa, Artificial Sequence; identical to SEQ ID NO: 3066
  GFR-binding peptide
  MOD_RES (2), (33), (34): Xaa is C or S

SEQ ID NO: 58922 - protein, 34 aa, Artificial Sequence
  GFR-binding peptide
  MOD_RES (32), (33): Xaa is C or S
RDVVMGRHKRLIIQQKDNYYLMSTASMKTPTXXP

SEQ ID NO: 58923 - protein, 42 aa, Artificial Sequence; identical to SEQ ID NO: 24074
  GFR-binding peptide
  MOD_RES (2), (4), (36), (37): Xaa is C or S

SEQ ID NO: 58924 - protein, 38 aa, Artificial Sequence; identical to SEQ ID NO: 24075
  GFR-binding peptide
  MOD_RES (2), (4), (36), (37): Xaa is C or S

SEQ ID NO: 58925 - protein, 38 aa, Artificial Sequence; identical to SEQ ID NO: 3071
  GFR-binding peptide
  MOD_RES (34), (34): Xaa is C or S
  MOD_RES (12), (13), (14), (15), (16): Xaa is A or G
  MOD_RES (17), (18), (19), (20): Xaa is A or G or is absent

SEQ ID NO: 58926 - protein, 36 aa, Artificial Sequence
  GFR-binding peptide
  MOD_RES (31), (32): Xaa is C or S
EEVIMYHYKLLLVRGNDKYLMSIPSTKVPAXXTSPV

SEQ ID NO: 58927 - protein, 41 aa, Artificial Sequence; identical to SEQ ID NO: 3075
  GFR-binding peptide
  MOD_RES (2), (37), (38): Xaa is C or S
  MOD_RES (15), (16), (17), (18), (19): Xaa is A or G
  MOD_RES (20), (21), (22), (23): Xaa is A or G or is absent

SEQ ID NO: 58928 - protein, 39 aa, Artificial Sequence; identical to SEQ ID NO: 32120
  GFR-binding peptide
  MOD_RES (1), (3), (35), (36): Xaa is C or S

SEQ ID NO: 58929 - protein, 39 aa, Artificial Sequence
  GFR-binding peptide
  MOD_RES (2), (36), (37): Xaa is C or S
  MOD_RES (14), (15), (16), (17), (18): Xaa is A or G
  MOD_RES (19), (20), (21), (22): Xaa is A or G or is absent
AXSEVTMNRHKRLXXXXXXXXXYYLISTASMKEPVXXPE

SEQ ID NO: 58930 - protein, 41 aa, Artificial Sequence
  GFR-binding peptide
  MOD_RES (1), (35), (36): Xaa is C or S
  MOD_RES (13), (14), (15), (16), (17): Xaa is A or G
  MOD_RES (18), (19), (20), (21): Xaa is A or G or is absent
XSRVVMNRHKRLXXXXXXXXXYYLVSTASLKTPAXXPKPVH

SEQ ID NO: 58931 - protein, 37 aa, Artificial Sequence; identical to SEQ ID NO: 32125
  GFR-binding peptide
  MOD_RES (31), (32): Xaa is C or S

SEQ ID NO: 58932 - protein, 32 aa, Artificial Sequence; identical to SEQ ID NO: 3077
  GFR-binding peptide
  MOD_RES (31), (32): Xaa is C or S

SEQ ID NO: 58933 - protein, 34 aa, Artificial Sequence; identical to SEQ ID NO: 3078
  GFR-binding peptide
  MOD_RES (33), (34): Xaa is C or S
  MOD_RES (11), (12), (13), (14), (15): Xaa is A or G
  MOD_RES (16), (17), (18), (19): Xaa is A or G or is absent

SEQ ID NO: 58934 - protein, 41 aa, Artificial Sequence; identical to SEQ ID NO: 3079
  GFR-binding peptide
  MOD_RES (2), (36), (37): Xaa is C or S
  MOD_RES (14), (15), (16), (17), (18): Xaa is A or G
  MOD_RES (19), (20), (21), (22): Xaa is A or G or is absent

SEQ ID NO: 58935 - protein, 35 aa, Artificial Sequence; identical to SEQ ID NO: 57068
  GFR-binding peptide
  MOD_RES (31), (32): Xaa is C or S

SEQ ID NO: 58936 - protein, 35 aa, Artificial Sequence; identical to SEQ ID NO: 3085
  GFR-binding peptide
  MOD_RES (31), (32): Xaa is C or S

SEQ ID NO: 58937 - protein, 43 aa, Artificial Sequence; identical to SEQ ID NO: 24086
  GFR-binding peptide
  MOD_RES (2), (4), (38), (39): Xaa is C or S
  MOD_RES (16), (17), (18), (19), (20): Xaa is A or G
  MOD_RES (21), (22), (23), (24): Xaa is A or G or is absent

SEQ ID NO: 58938 - protein, 38 aa, Artificial Sequence; identical to SEQ ID NO: 32135
  GFR-binding peptide
  MOD_RES (1), (3), (37), (38): Xaa is C or S
  MOD_RES (15), (16), (17), (18), (19): Xaa is A or G
  MOD_RES (20), (21), (22), (23): Xaa is A or G or is absent

SEQ ID NO: 58939 - protein, 34 aa, Artificial Sequence; identical to SEQ ID NO: 24087
  GFR-binding peptide
  MOD_RES (1), (33), (34): Xaa is C or S

SEQ ID NO: 58940 - protein, 34 aa, Artificial Sequence; identical to SEQ ID NO: 3086
  GFR-binding peptide
  MOD_RES (1), (3): Xaa is C or S

SEQ ID NO: 58941 - protein, 40 aa, Artificial Sequence; identical to SEQ ID NO: 24089
  GFR-binding peptide
  MOD_RES (2), (4), (36), (37): Xaa is C or S

SEQ ID NO: 58942 - protein, 34 aa, Artificial Sequence; identical to SEQ ID NO: 3087
  GFR-binding peptide
  MOD_RES (1), (32), (33): Xaa is C or S

SEQ ID NO: 58943 - protein, 34 aa, Artificial Sequence
  GFR-binding peptide
  MOD_RES (2), (34): Xaa is C or S
AXSEVTMNPIKGYVVNKNEDFYLINIPSMKEPVX

SEQ ID NO: 58944 - protein, 34 aa, Artificial Sequence; identical to SEQ ID NO: 32141
  GFR-binding peptide
  MOD_RES (31), (31): Xaa is C or S

SEQ ID NO: 58945 - protein, 40 aa, Artificial Sequence; identical to SEQ ID NO: 3091
  GFR-binding peptide
  MOD_RES (1), (3), (36), (37): Xaa is C or S
  MOD_RES (14), (15), (16), (17), (18): Xaa is A or G
  MOD_RES (19), (20), (21), (22): Xaa is A or G or is absent

SEQ ID NO: 58946 - protein, 40 aa, Artificial Sequence; identical to SEQ ID NO: 3095
  GFR-binding peptide
  MOD_RES (2), (36), (37): Xaa is C or S
  MOD_RES (14), (15), (16), (17), (18): Xaa is A or G
  MOD_RES (19), (20), (21), (22): Xaa is A or G or is absent

SEQ ID NO: 58947 - protein, 32 aa, Artificial Sequence
  GFR-binding peptide
  MOD_RES (11), (12), (13), (14), (15): Xaa is A or G
  MOD_RES (16), (17), (18), (19): Xaa is A or G or is absent
SKVVMPIKGYXXXXXXXXXFYLINIPSLDQPV

SEQ ID NO: 58948 - protein, 38 aa, Artificial Sequence
  GFR-binding peptide
  MOD_RES (2), (4), (35), (36): Xaa is C or S
SXKXSKVVMPIKGYVKPTRGVFYLINIPSLDQPVXXPS

SEQ ID NO: 58949 - protein, 32 aa, Artificial Sequence; identical to SEQ ID NO: 24103
  GFR-binding peptide
  MOD_RES (32), (32): Xaa is C or S

SEQ ID NO: 58950 - protein, 37 aa, Artificial Sequence
  GFR-binding peptide
  MOD_RES (1), (34), (35): Xaa is C or S
  MOD_RES (12), (13), (14), (15), (16): Xaa is A or G
  MOD_RES (17), (18), (19), (20): Xaa is A or G or is absent
XSKVVMPIKGYXXXXXXXXXFYLINIPSLDQPVXXPS

SEQ ID NO: 58951 - protein, 43 aa, Artificial Sequence; identical to SEQ ID NO: 57084
  GFR-binding peptide
  MOD_RES (2), (4), (37), (38): Xaa is C or S
  MOD_RES (15), (16), (17), (18), (19): Xaa is A or G
  MOD_RES (20), (21), (22), (23): Xaa is A or G or is absent

SEQ ID NO: 58952 - protein, 37 aa, Artificial Sequence; identical to SEQ ID NO: 3104
  GFR-binding peptide
  MOD_RES (31), (32): Xaa is C or S

SEQ ID NO: 58953 - protein, 40 aa, Artificial Sequence
  GFR-binding peptide
  MOD_RES (1), (34), (35): Xaa is C or S
  MOD_RES (12), (13), (14), (15), (16): Xaa is A or G
  MOD_RES (17), (18), (19), (20): Xaa is A or G or is absent
XEEVIMRHKRLXXXXXXXXXYYLMSTASTKVPAXXTSPVR

SEQ ID NO: 58954 - protein, 37 aa, Artificial Sequence; identical to SEQ ID NO: 3105
  GFR-binding peptide
  MOD_RES (33), (34): Xaa is C or S
  MOD_RES (11), (12), (13), (14), (15): Xaa is A or G
  MOD_RES (16), (17), (18), (19): Xaa is A or G or is absent

SEQ ID NO: 58955 - protein, 36 aa, Artificial Sequence; identical to SEQ ID NO: 3106
  GFR-binding peptide
  MOD_RES (1), (3), (35), (36): Xaa is C or S

SEQ ID NO: 58956 - protein, 36 aa, Artificial Sequence; identical to SEQ ID NO: 24105
  GFR-binding peptide
  MOD_RES (2), (34), (35): Xaa is C or S

SEQ ID NO: 58957 - protein, 37 aa, Artificial Sequence; identical to SEQ ID NO: 24107
  GFR-binding peptide
  MOD_RES (33), (34): Xaa is C or S
  MOD_RES (11), (12), (13), (14), (15): Xaa is A or G
  MOD_RES (16), (17), (18), (19): Xaa is A or G or is absent

SEQ ID NO: 58958 - protein, 38 aa, Artificial Sequence; identical to SEQ ID NO: 24109
  GFR-binding peptide
  MOD_RES (1), (34), (35): Xaa is C or S
  MOD_RES (12), (13), (14), (15), (16): Xaa is A or G
  MOD_RES (17), (18), (19), (20): Xaa is A or G or is absent

SEQ ID NO: 58959 - protein, 39 aa, Artificial Sequence; identical to SEQ ID NO: 3110
  GFR-binding peptide
  MOD_RES (1), (3), (35), (36): Xaa is C or S

SEQ ID NO: 58960 - protein, 36 aa, Artificial Sequence; identical to SEQ ID NO: 3111
  GFR-binding peptide
  MOD_RES (32), (33): Xaa is C or S

SEQ ID NO: 58961 - protein, 38 aa, Artificial Sequence; identical to SEQ ID NO: 32158
  GFR-binding peptide
  MOD_RES (2), (4), (36), (37): Xaa is C or S

SEQ ID NO: 58962 - protein, 34 aa, Artificial Sequence; identical to SEQ ID NO: 24112
  GFR-binding peptide
  MOD_RES (13), (14), (15), (16), (17): Xaa is A or G
  MOD_RES (18), (19), (20), (21): Xaa is A or G or is absent

SEQ ID NO: 58963 - protein, 38 aa, Artificial Sequence; identical to SEQ ID NO: 3114
  GFR-binding peptide
  MOD_RES (2), (36): Xaa is C or S
  MOD_RES (14), (15), (16), (17), (18): Xaa is A or G
  MOD_RES (19), (20), (21), (22): Xaa is A or G or is absent

SEQ ID NO: 58964 - protein, 35 aa, Artificial Sequence; identical to SEQ ID NO: 3115
  GFR-binding peptide
  MOD_RES (33), (34): Xaa is C or S

SEQ ID NO: 58965 - protein, 41 aa, Artificial Sequence; identical to SEQ ID NO: 32162
  GFR-binding peptide
  MOD_RES (1), (35), (36): Xaa is C or S
  MOD_RES (13), (14), (15), (16), (17): Xaa is A or G
  MOD_RES (18), (19), (20), (21): Xaa is A or G or is absent

SEQ ID NO: 58966 - protein, 37 aa, Artificial Sequence; identical to SEQ ID NO: 3120
  GFR-binding peptide
  MOD_RES (33), (34): Xaa is C or S
  MOD_RES (11), (12), (13), (14), (15): Xaa is A or G
  MOD_RES (16), (17), (18), (19): Xaa is A or G or is absent

SEQ ID NO: 58967 - protein, 36 aa, Artificial Sequence; identical to SEQ ID NO: 24119
  GFR-binding peptide
  MOD_RES (31), (32): Xaa is C or S

SEQ ID NO: 58968 - protein, 38 aa, Artificial Sequence; identical to SEQ ID NO: 3126
  GFR-binding peptide
  MOD_RES (1), (34), (35): Xaa is C or S
  MOD_RES (12), (13), (14), (15), (16): Xaa is A or G
  MOD_RES (17), (18), (19), (20): Xaa is A or G or is absent

SEQ ID NO: 58969 - protein, 38 aa, Artificial Sequence
  GFR-binding peptide
  MOD_RES (2), (34), (35): Xaa is C or S
AXSEVTMNRHKRLVVNKNEDYYLISTASMKEPVXXPEP

SEQ ID NO: 58970 - protein, 35 aa, Artificial Sequence; identical to SEQ ID NO: 3129
  GFR-binding peptide
  MOD_RES (33), (34): Xaa is C or S
  MOD_RES (11), (12), (13), (14), (15): Xaa is A or G
  MOD_RES (16), (17), (18), (19): Xaa is A or G or is absent

SEQ ID NO: 58971 - protein, 35 aa, Artificial Sequence
  GFR-binding peptide
  MOD_RES (33), (34): Xaa is C or S
  MOD_RES (11), (12), (13), (14), (15): Xaa is A or G
  MOD_RES (16), (17), (18), (19): Xaa is A or G or is absent
EEVIMYHYKLXXXXXXXXXKYLMSIPSTKVPAXXT

SEQ ID NO: 58972 - protein, 32 aa, Artificial Sequence; identical to SEQ ID NO: 3135
  GFR-binding peptide
  MOD_RES (31), (32): Xaa is C or S

SEQ ID NO: 58973 - protein, 38 aa, Artificial Sequence
  GFR-binding peptide
  MOD_RES (2), (36), (37): Xaa is C or S
  MOD_RES (14), (15), (16), (17), (18): Xaa is A or G
  MOD_RES (19), (20), (21), (22): Xaa is A or G or is absent
GXRDVVMGEYKFKXXXXXXXXXLYLMSIPEMKTPTXXP

SEQ ID NO: 58974 - protein, 38 aa, Artificial Sequence; identical to SEQ ID NO: 32171
  GFR-binding peptide
  MOD_RES (1), (34), (35): Xaa is C or S
  MOD_RES (12), (13), (14), (15), (16): Xaa is A or G
  MOD_RES (17), (18), (19), (20): Xaa is A or G or is absent

SEQ ID NO: 58975 - protein, 38 aa, Artificial Sequence; identical to SEQ ID NO: 3138
  GFR-binding peptide
  MOD_RES (34), (35): Xaa is C or S
  MOD_RES (12), (13), (14), (15), (16): Xaa is A or G
  MOD_RES (17), (18), (19), (20): Xaa is A or G or is absent

SEQ ID NO: 58976 - protein, 37 aa, Artificial Sequence
  GFR-binding peptide
  MOD_RES (2), (4): Xaa is C or S
  MOD_RES (16), (17), (18), (19), (20): Xaa is A or G
  MOD_RES (21), (22), (23), (24): Xaa is A or G or is absent
SXGXRDVVMGEYKFKXXXXXXXXXLYLMSIPEMKTPT

SEQ ID NO: 58977 - protein, 40 aa, Artificial Sequence
  GFR-binding peptide
  MOD_RES (2), (4), (36), (37): Xaa is C or S
RXGXESVAMGRHKRLYTVVGKDYYLISTASLKTPVXXAKS

SEQ ID NO: 58978 - protein, 37 aa, Artificial Sequence; identical to SEQ ID NO: 24137
  GFR-binding peptide
  MOD_RES (33), (34): Xaa is C or S
  MOD_RES (11), (12), (13), (14), (15): Xaa is A or G
  MOD_RES (16), (17), (18), (19): Xaa is A or G or is absent

SEQ ID NO: 58979 - protein, 41 aa, Artificial Sequence; identical to SEQ ID NO: 32174
  GFR-binding peptide
  MOD_RES (2), (4), (38), (39): Xaa is C or S
  MOD_RES (16), (17), (18), (19), (20): Xaa is A or G
  MOD_RES (21), (22), (23), (24): Xaa is A or G or is absent

SEQ ID NO: 58980 - protein, 39 aa, Artificial Sequence; identical to SEQ ID NO: 32175
  GFR-binding peptide
  MOD_RES (33), (34): Xaa is C or S
  MOD_RES (11), (12), (13), (14), (15): Xaa is A or G
  MOD_RES (16), (17), (18), (19): Xaa is A or G or is absent

SEQ ID NO: 58981 - protein, 37 aa, Artificial Sequence
  GFR-binding peptide
  MOD_RES (1), (3), (37): Xaa is C or S
  MOD_RES (15), (16), (17), (18), (19): Xaa is A or G
  MOD_RES (20), (21), (22), (23): Xaa is A or G or is absent
XGXRDVVMGEYKFKXXXXXXXXXLYLMSIPEMKTPTX

SEQ ID NO: 58982 - protein, 35 aa, Artificial Sequence
  GFR-binding peptide
  MOD_RES (1), (3), (35): Xaa is C or S
XGXSEVVMDYHYKLVVNNASDKYLISIPSLRTPVX

SEQ ID NO: 58983 - protein, 32 aa, Artificial Sequence; identical to SEQ ID NO: 3145
  GFR-binding peptide
  MOD_RES (1), (32): Xaa is C or S

SEQ ID NO: 58984 - protein, 32 aa, Artificial Sequence; identical to SEQ ID NO: 3146
  GFR-binding peptide
  MOD_RES (31), (32): Xaa is C or S

SEQ ID NO: 58985 - protein, 40 aa, Artificial Sequence; identical to SEQ ID NO: 24141
  GFR-binding peptide
  MOD_RES (34), (35): Xaa is C or S
  MOD_RES (12), (13), (14), (15), (16): Xaa is A or G
  MOD_RES (17), (18), (19), (20): Xaa is A or G or is absent

SEQ ID NO: 58986 - protein, 38 aa, Artificial Sequence; identical to SEQ ID NO: 24142
  GFR-binding peptide
  MOD_RES (1), (3), (34), (35): Xaa is C or S

SEQ ID NO: 58987 - protein, 31 aa, Artificial Sequence; identical to SEQ ID NO: 32185
  GFR-binding peptide

SEQ ID NO: 58988 - protein, 39 aa, Artificial Sequence; identical to SEQ ID NO: 3150
  GFR-binding peptide
  MOD_RES (1), (3), (36), (37): Xaa is C or S

SEQ ID NO: 58989 - protein, 36 aa, Artificial Sequence; identical to SEQ ID NO: 3151
  GFR-binding peptide
  MOD_RES (2), (4), (35), (36): Xaa is C or S

SEQ ID NO: 58990 - protein, 38 aa, Artificial Sequence; identical to SEQ ID NO: 3152
  GFR-binding peptide
  MOD_RES (2), (4), (38): Xaa is C or S
  MOD_RES (16), (17), (18), (19), (20): Xaa is A or G
  MOD_RES (21), (22), (23), (24): Xaa is A or G or is absent

SEQ ID NO: 58991 - protein, 38 aa, Artificial Sequence; identical to SEQ ID NO: 32187
  GFR-binding peptide
  MOD_RES (2), (4), (38): Xaa is C or S
  MOD_RES (16), (17), (18), (19), (20): Xaa is A or G
  MOD_RES (21), (22), (23), (24): Xaa is A or G or is absent

SEQ ID NO: 58992 - protein, 39 aa, Artificial Sequence; identical to SEQ ID NO: 32188
  GFR-binding peptide
  MOD_RES (2), (4), (36), (37): Xaa is C or S

SEQ ID NO: 58993 - protein, 38 aa, Artificial Sequence; identical to SEQ ID NO: 3154
  GFR-binding peptide
  MOD_RES (1), (3), (37), (38): Xaa is C or S
  MOD_RES (15), (16), (17), (18), (19): Xaa is A or G
  MOD_RES (20), (21), (22), (23): Xaa is A or G or is absent

SEQ ID NO: 58994 - protein, 34 aa, Artificial Sequence; identical to SEQ ID NO: 3155
  GFR-binding peptide
  MOD_RES (31), (32): Xaa is C or S

SEQ ID NO: 58995 - protein, 38 aa, Artificial Sequence; identical to SEQ ID NO: 3156
  GFR-binding peptide
  MOD_RES (1), (32), (33): Xaa is C or S

SEQ ID NO: 58996 - protein, 38 aa, Artificial Sequence; identical to SEQ ID NO: 3158
  GFR-binding peptide
  MOD_RES (2), (35), (36): Xaa is C or S
  MOD_RES (13), (14), (15), (16), (17): Xaa is A or G
  MOD_RES (18), (19), (20), (21): Xaa is A or G or is absent

SEQ ID NO: 58997 - protein, 42 aa, Artificial Sequence; identical to SEQ ID NO: 24152
  GFR-binding peptide
  MOD_RES (2), (4), (36), (37): Xaa is C or S

SEQ ID NO: 58998 - protein, 37 aa, Artificial Sequence; identical to SEQ ID NO: 24153
  GFR-binding peptide
  MOD_RES (1), (35), (36): Xaa is C or S
  MOD_RES (13), (14), (15), (16), (17): Xaa is A or G
  MOD_RES (18), (19), (20), (21): Xaa is A or G or is absent

SEQ ID NO: 58999 - protein, 37 aa, Artificial Sequence
  GFR-binding peptide
  MOD_RES (31), (32): Xaa is C or S
DVVMGEYKFKIIQQKDNLYLMSIPEMKTPTXXPGASG

SEQ ID NO: 59000 - protein, 36 aa, Artificial Sequence; identical to SEQ ID NO: 3160
  GFR-binding peptide
  MOD_RES (1), (3): Xaa is C or S
  MOD_RES (15), (16), (17), (18), (19): Xaa is A or G
  MOD_RES (20), (21), (22), (23): Xaa is A or G or is absent

SEQ ID NO: 59001 - protein, 37 aa, Artificial Sequence; identical to SEQ ID NO: 3163
  GFR-binding peptide
  MOD_RES (33), (34): Xaa is C or S
  MOD_RES (11), (12), (13), (14), (15): Xaa is A or G
  MOD_RES (16), (17), (18), (19): Xaa is A or G or is absent

SEQ ID NO: 59002 - protein, 38 aa, Artificial Sequence; identical to SEQ ID NO: 3164
  GFR-binding peptide
  MOD_RES (2), (4), (36), (37): Xaa is C or S

SEQ ID NO: 59003 - protein, 37 aa, Artificial Sequence; identical to SEQ ID NO: 24157
  GFR-binding peptide
  MOD_RES (1), (3), (36), (37): Xaa is C or S

SEQ ID NO: 59004 - protein, 40 aa, Artificial Sequence; identical to SEQ ID NO: 3166
  GFR-binding peptide
  MOD_RES (2), (36), (37): Xaa is C or S
  MOD_RES (14), (15), (16), (17), (18): Xaa is A or G
  MOD_RES (19), (20), (21), (22): Xaa is A or G or is absent

SEQ ID NO: 59005 - protein, 37 aa, Artificial Sequence; identical to SEQ ID NO: 3169
  GFR-binding peptide
  MOD_RES (2), (4), (36): Xaa is C or S

SEQ ID NO: 59006 - protein, 35 aa, Artificial Sequence; identical to SEQ ID NO: 3170
  GFR-binding peptide
  MOD_RES (1), (3): Xaa is C or S
  MOD_RES (14), (15), (16), (17), (18): Xaa is A or G
  MOD_RES (19), (20), (21), (22): Xaa is A or G or is absent

SEQ ID NO: 59007 - protein, 33 aa, Artificial Sequence; identical to SEQ ID NO: 32210
  GFR-binding peptide
  MOD_RES (32), (33): Xaa is C or S

SEQ ID NO: 59008 - protein, 36 aa, Artificial Sequence; identical to SEQ ID NO: 3171
  GFR-binding peptide
  MOD_RES (2), (4), (35), (36): Xaa is C or S

SEQ ID NO: 59009 - protein, 32 aa, Artificial Sequence; identical to SEQ ID NO: 24167
  GFR-binding peptide
  MOD_RES (32), (32): Xaa is C or S

SEQ ID NO: 59010 - protein, 40 aa, Artificial Sequence; identical to SEQ ID NO: 3172
  GFR-binding peptide
  MOD_RES (2), (4), (37), (38): Xaa is C or S

SEQ ID NO: 59011 - protein, 33 aa, Artificial Sequence; identical to SEQ ID NO: 3173
  GFR-binding peptide
  MOD_RES (2), (33): Xaa is C or S

SEQ ID NO: 59012 - protein, 34 aa, Artificial Sequence; identical to SEQ ID NO: 32215
  GFR-binding peptide
  MOD_RES (31), (32): Xaa is C or S

SEQ ID NO: 59013 - protein, 34 aa, Artificial Sequence; identical to SEQ ID NO: 3177
  GFR-binding peptide
  MOD_RES (2), (34): Xaa is C or S

SEQ ID NO: 59014 - protein, 42 aa, Artificial Sequence; identical to SEQ ID NO: 32216
  GFR-binding peptide
  MOD_RES (2), (36), (37): Xaa is C or S
  MOD_RES (14), (15), (16), (17), (18): Xaa is A or G
  MOD_RES (19), (20), (21), (22): Xaa is A or G or is absent

SEQ ID NO: 59015 - protein, 30 aa, Artificial Sequence
  GFR-binding peptide
EVTMNYHYKLVVNKNEDKYLISIPSMKEPV

SEQ ID NO: 59016 - protein, 37 aa, Artificial Sequence; identical to SEQ ID NO: 3181
  GFR-binding peptide
  MOD_RES (2), (4), (36), (37): Xaa is C or S

SEQ ID NO: 59017 - protein, 36 aa, Artificial Sequence; identical to SEQ ID NO: 3182
  GFR-binding peptide
  MOD_RES (1), (34), (35): Xaa is C or S

SEQ ID NO: 59018 - protein, 35 aa, Artificial Sequence
  GFR-binding peptide
  MOD_RES (1), (3), (34), (35): Xaa is C or S
XGXEEVIMYHYKLLLVRGNDKYLMSIPSTKVPAXX

SEQ ID NO: 59019 - protein, 38 aa, Artificial Sequence
  GFR-binding peptide
  MOD_RES (2), (36), (37): Xaa is C or S
  MOD_RES (14), (15), (16), (17), (18): Xaa is A or G
  MOD_RES (19), (20), (21), (22): Xaa is A or G or is absent
GXAEVVMDRHKRLXXXXXXXXXYYLISTASLRAPVXXS

SEQ ID NO: 59020 - protein, 38 aa, Artificial Sequence; identical to SEQ ID NO: 32221
  GFR-binding peptide
  MOD_RES (1), (3), (35), (36): Xaa is C or S

SEQ ID NO: 59021 - protein, 37 aa, Artificial Sequence; identical to SEQ ID NO: 32222
  GFR-binding peptide
  MOD_RES (31), (32): Xaa is C or S

SEQ ID NO: 59022 - protein, 36 aa, Artificial Sequence; identical to SEQ ID NO: 3186
  GFR-binding peptide
  MOD_RES (1), (3): Xaa is C or S
  MOD_RES (15), (16), (17), (18), (19): Xaa is A or G
  MOD_RES (20), (21), (22), (23): Xaa is A or G or is absent

SEQ ID NO: 59023 - protein, 34 aa, Artificial Sequence
  GFR-binding peptide
  MOD_RES (1), (33), (34): Xaa is C or S
XSEVVMDYHYKLVVNNASDKYLISIPSLRTPVXX

SEQ ID NO: 59024 - protein, 35 aa, Artificial Sequence
  GFR-binding peptide
  MOD_RES (2), (2): Xaa is C or S
  MOD_RES (14), (15), (16), (17), (18): Xaa is A or G
  MOD_RES (19), (20), (21), (22): Xaa is A or G or is absent
AXSEVTMNRYKKLXXXXXXXXXFYLISIANMKEPV

SEQ ID NO: 59025 - protein, 38 aa, Artificial Sequence; identical to SEQ ID NO: 3194
  GFR-binding peptide
  MOD_RES (34), (35): Xaa is C or S
  MOD_RES (12), (13), (14), (15), (16): Xaa is A or G
  MOD_RES (17), (18), (19), (20): Xaa is A or G or is absent

SEQ ID NO: 59026 - protein, 33 aa, Artificial Sequence
  GFR-binding peptide
  MOD_RES (12), (13), (14), (15), (16): Xaa is A or G
  MOD_RES (17), (18), (19), (20): Xaa is A or G or is absent
RDVVMGRHKRLXXXXXXXXXYYLMSTASMKTPT

SEQ ID NO: 59027 - protein, 34 aa, Artificial Sequence; identical to SEQ ID NO: 3200
  GFR-binding peptide
  MOD_RES (2), (2): Xaa is C or S
  MOD_RES (13), (14), (15), (16), (17): Xaa is A or G
  MOD_RES (18), (19), (20), (21): Xaa is A or G or is absent

SEQ ID NO: 59028 - protein, 36 aa, Artificial Sequence; identical to SEQ ID NO: 3202
  GFR-binding peptide
  MOD_RES (2), (33), (34): Xaa is C or S

SEQ ID NO: 59029 - protein, 38 aa, Artificial Sequence; identical to SEQ ID NO: 3203
  GFR-binding peptide
  MOD_RES (33), (34): Xaa is C or S

SEQ ID NO: 59030 - protein, 39 aa, Artificial Sequence; identical to SEQ ID NO: 32234
  GFR-binding peptide
  MOD_RES (2), (34), (35): Xaa is C or S

SEQ ID NO: 59031 - protein, 39 aa, Artificial Sequence; identical to SEQ ID NO: 32235
  GFR-binding peptide
  MOD_RES (34), (35): Xaa is C or S
  MOD_RES (12), (13), (14), (15), (16): Xaa is A or G
  MOD_RES (17), (18), (19), (20): Xaa is A or G or is absent

SEQ ID NO: 59032 - protein, 39 aa, Artificial Sequence; identical to SEQ ID NO: 24199
  GFR-binding peptide
  MOD_RES (2), (35), (36): Xaa is C or S
  MOD_RES (13), (14), (15), (16), (17): Xaa is A or G
  MOD_RES (18), (19), (20), (21): Xaa is A or G or is absent

SEQ ID NO: 59033 - protein, 34 aa, Artificial Sequence; identical to SEQ ID NO: 3210
  GFR-binding peptide
  MOD_RES (33), (34): Xaa is C or S

SEQ ID NO: 59034 - protein, 37 aa, Artificial Sequence
  GFR-binding peptide
  MOD_RES (2), (36), (37): Xaa is C or S
  MOD_RES (14), (15), (16), (17), (18): Xaa is A or G
  MOD_RES (19), (20), (21), (22): Xaa is A or G or is absent
AXSEVTMNYHYKLXXXXXXXXXKYLISIPSMKEPVXX

SEQ ID NO: 59035 - protein, 39 aa, Artificial Sequence
  GFR-binding peptide
  MOD_RES (1), (3), (37), (38): Xaa is C or S
  MOD_RES (15), (16), (17), (18), (19): Xaa is A or G
  MOD_RES (20), (21), (22), (23): Xaa is A or G or is absent
XGXSEVVMDRHKRLXXXXXXXXXYYLISTASLRTPVXXT

SEQ ID NO: 59036 - protein, 38 aa, Artificial Sequence; identical to SEQ ID NO: 24206
  GFR-binding peptide
  MOD_RES (1), (3), (36), (37): Xaa is C or S
  MOD_RES (14), (15), (16), (17), (18): Xaa is A or G
  MOD_RES (19), (20), (21), (22): Xaa is A or G or is absent

SEQ ID NO: 59037 - protein, 34 aa, Artificial Sequence; identical to SEQ ID NO: 24207
  GFR-binding peptide
  MOD_RES (2), (4): Xaa is C or S

SEQ ID NO: 59038 - protein, 43 aa, Artificial Sequence; identical to SEQ ID NO: 3213
  GFR-binding peptide
  MOD_RES (2), (37), (38): Xaa is C or S
  MOD_RES (15), (16), (17), (18), (19): Xaa is A or G
  MOD_RES (20), (21), (22), (23): Xaa is A or G or is absent

SEQ ID NO: 59039 - protein, 34 aa, Artificial Sequence; identical to SEQ ID NO: 3216
  GFR-binding peptide
  MOD_RES (34), (34): Xaa is C or S
  MOD_RES (12), (13), (14), (15), (16): Xaa is A or G
  MOD_RES (17), (18), (19), (20): Xaa is A or G or is absent

SEQ ID NO: 59040 - protein, 41 aa, Artificial Sequence; identical to SEQ ID NO: 3217
  GFR-binding peptide
  MOD_RES (2), (35), (36): Xaa is C or S
  MOD_RES (13), (14), (15), (16), (17): Xaa is A or G
  MOD_RES (18), (19), (20), (21): Xaa is A or G or is absent

SEQ ID NO: 59041 - protein, 32 aa, Artificial Sequence; identical to SEQ ID NO: 24211
  GFR-binding peptide
  MOD_RES (32), (32): Xaa is C or S

SEQ ID NO: 59042 - protein, 38 aa, Artificial Sequence
  GFR-binding peptide
  MOD_RES (2), (4), (36), (37): Xaa is C or S
RXAXSEVTMNPIKGYVVNKNEDFYLINIPSMKEPVXXP

SEQ ID NO: 59043 - protein, 36 aa, Artificial Sequence; identical to SEQ ID NO: 57186
  GFR-binding peptide
  MOD_RES (1), (35), (36): Xaa is C or S
  MOD_RES (13), (14), (15), (16), (17): Xaa is A or G
  MOD_RES (18), (19), (20), (21): Xaa is A or G or is absent

SEQ ID NO: 59044 - protein, 35 aa, Artificial Sequence; identical to SEQ ID NO: 3218
  GFR-binding peptide
  MOD_RES (1), (34), (35): Xaa is C or S

SEQ ID NO: 59045 - protein, 40 aa, Artificial Sequence; identical to SEQ ID NO: 3219
  GFR-binding peptide
  MOD_RES (1), (3), (35), (36): Xaa is C or S

SEQ ID NO: 59046 - protein, 38 aa, Artificial Sequence
  GFR-binding peptide
  MOD_RES (2), (34), (35): Xaa is C or S
GXSEVVMDRHKRLVVNNASDYYLISTASLRTPVXXTPP

SEQ ID NO: 59047 - protein, 41 aa, Artificial Sequence
  GFR-binding peptide
  MOD_RES (2), (36), (37): Xaa is C or S
  MOD_RES (14), (15), (16), (17), (18): Xaa is A or G
  MOD_RES (19), (20), (21), (22): Xaa is A or G or is absent
GXSEVVMDEYKFKXXXXXXXXXLYLISIPELRTPVXXTPPT

SEQ ID NO: 59048 - protein, 35 aa, Artificial Sequence; identical to SEQ ID NO: 32253
  GFR-binding peptide
  MOD_RES (2), (4), (35): Xaa is C or S

SEQ ID NO: 59049 - protein, 40 aa, Artificial Sequence; identical to SEQ ID NO: 24223
  GFR-binding peptide
  MOD_RES (2), (4), (37), (38): Xaa is C or S
  MOD_RES (15), (16), (17), (18), (19): Xaa is A or G
  MOD_RES (20), (21), (22), (23): Xaa is A or G or is absent

SEQ ID NO: 59050 - protein, 40 aa, Artificial Sequence
  GFR-binding peptide
  MOD_RES (1), (35), (36): Xaa is C or S
  MOD_RES (13), (14), (15), (16), (17): Xaa is A or G
  MOD_RES (18), (19), (20), (21): Xaa is A or G or is absent
XSEVTMNPIKGYXXXXXXXXXFYLINIPSMKEPVXXPEPI

SEQ ID NO: 59051 - protein, 39 aa, Artificial Sequence; identical to SEQ ID NO: 32260
  GFR-binding peptide
  MOD_RES (2), (34), (35): Xaa is C or S

SEQ ID NO: 59052 - protein, 31 aa, Artificial Sequence
  GFR-binding peptide
RDVVMGRHKRLIIQQKDNYYLMSTASMKTPT

SEQ ID NO: 59053 - protein, 36 aa, Artificial Sequence; identical to SEQ ID NO: 3230
  GFR-binding peptide
  MOD_RES (31), (32): Xaa is C or S

SEQ ID NO: 59054 - protein, 42 aa, Artificial Sequence; identical to SEQ ID NO: 3231
  GFR-binding peptide
  MOD_RES (2), (4), (36), (37): Xaa is C or S

SEQ ID NO: 59055 - protein, 38 aa, Artificial Sequence
  GFR-binding peptide
  MOD_RES (2), (36), (37): Xaa is C or S
  MOD_RES (14), (15), (16), (17), (18): Xaa is A or G
  MOD_RES (19), (20), (21), (22): Xaa is A or G or is absent
AXSEVTMNEYKFKXXXXXXXXXLYLISIPEMKEPVXXP

SEQ ID NO: 59056 - protein, 35 aa, Artificial Sequence; identical to SEQ ID NO: 3240
  GFR-binding peptide
  MOD_RES (34), (35): Xaa is C or S
  MOD_RES (12), (13), (14), (15), (16): Xaa is A or G
  MOD_RES (17), (18), (19), (20): Xaa is A or G or is absent

SEQ ID NO: 59057 - protein, 36 aa, Artificial Sequence; identical to SEQ ID NO: 32265
  GFR-binding peptide
  MOD_RES (1), (3): Xaa is C or S
  MOD_RES (15), (16), (17), (18), (19): Xaa is A or G
  MOD_RES (20), (21), (22), (23): Xaa is A or G or is absent

SEQ ID NO: 59058 - protein, 38 aa, Artificial Sequence; identical to SEQ ID NO: 3243
  GFR-binding peptide
  MOD_RES (1), (32), (33): Xaa is C or S

SEQ ID NO: 59059 - protein, 33 aa, Artificial Sequence; identical to SEQ ID NO: 57204
  GFR-binding peptide
  MOD_RES (33), (33): Xaa is C or S
  MOD_RES (11), (12), (13), (14), (15): Xaa is A or G
  MOD_RES (16), (17), (18), (19): Xaa is A or G or is absent

SEQ ID NO: 59060 - protein, 38 aa, Artificial Sequence
  GFR-binding peptide
  MOD_RES (2), (35), (36): Xaa is C or S
  MOD_RES (13), (14), (15), (16), (17): Xaa is A or G
  MOD_RES (18), (19), (20), (21): Xaa is A or G or is absent
GXEEVIMYHYKLXXXXXXXXXKYLMSIPSTKVPAXXTS

SEQ ID NO: 59061 - protein, 35 aa, Artificial Sequence; identical to SEQ ID NO: 32274
  GFR-binding peptide
  MOD_RES (33), (34): Xaa is C or S
  MOD_RES (11), (12), (13), (14), (15): Xaa is A or G
  MOD_RES (16), (17), (18), (19): Xaa is A or G or is absent

SEQ ID NO: 59062 - protein, 39 aa, Artificial Sequence; identical to SEQ ID NO: 24236
  GFR-binding peptide
  MOD_RES (2), (35), (36): Xaa is C or S
  MOD_RES (13), (14), (15), (16), (17): Xaa is A or G
  MOD_RES (18), (19), (20), (21): Xaa is A or G or is absent

SEQ ID NO: 59063 - protein, 37 aa, Artificial Sequence; identical to SEQ ID NO: 57206
  GFR-binding peptide
  MOD_RES (1), (3), (36), (37): Xaa is C or S
  MOD_RES (14), (15), (16), (17), (18): Xaa is A or G
  MOD_RES (19), (20), (21), (22): Xaa is A or G or is absent

SEQ ID NO: 59064 - protein, 41 aa, Artificial Sequence; identical to SEQ ID NO: 3246
  GFR-binding peptide
  MOD_RES (2), (35), (36): Xaa is C or S
  MOD_RES (13), (14), (15), (16), (17): Xaa is A or G
  MOD_RES (18), (19), (20), (21): Xaa is A or G or is absent

SEQ ID NO: 59065 - protein, 40 aa, Artificial Sequence; identical to SEQ ID NO: 3247
  GFR-binding peptide
  MOD_RES (2), (4), (38), (39): Xaa is C or S
  MOD_RES (16), (17), (18), (19), (20): Xaa is A or G
  MOD_RES (21), (22), (23), (24): Xaa is A or G or is absent

SEQ ID NO: 59066 - protein, 31 aa, Artificial Sequence; identical to SEQ ID NO: 32275
  GFR-binding peptide

SEQ ID NO: 59067 - protein, 33 aa, Artificial Sequence; identical to SEQ ID NO: 3250
  GFR-binding peptide
  MOD_RES (31), (32): Xaa is C or S

SEQ ID NO: 59068 - protein, 36 aa, Artificial Sequence; identical to SEQ ID NO: 32279
  GFR-binding peptide
  MOD_RES (1), (3): Xaa is C or S
  MOD_RES (15), (16), (17), (18), (19): Xaa is A or G
  MOD_RES (20), (21), (22), (23): Xaa is A or G or is absent

SEQ ID NO: 59069 - protein, 32 aa, Artificial Sequence; identical to SEQ ID NO: 3253
  GFR-binding peptide
  MOD_RES (1), (1): Xaa is C or S

SEQ ID NO: 59070 - protein, 41 aa, Artificial Sequence; identical to SEQ ID NO: 3255
  GFR-binding peptide
  MOD_RES (1), (3), (37), (38): Xaa is C or S
  MOD_RES (15), (16), (17), (18), (19): Xaa is A or G
  MOD_RES (20), (21), (22), (23): Xaa is A or G or is absent

SEQ ID NO: 59071 - protein, 40 aa, Artificial Sequence; identical to SEQ ID NO: 24246
  GFR-binding peptide
  MOD_RES (2), (34), (35): Xaa is C or S

SEQ ID NO: 59072 - protein, 38 aa, Artificial Sequence; identical to SEQ ID NO: 32285
  GFR-binding peptide
  MOD_RES (1), (32), (33): Xaa is C or S

SEQ ID NO: 59073 - protein, 38 aa, Artificial Sequence; identical to SEQ ID NO: 3260
  GFR-binding peptide
  MOD_RES (1), (3), (35), (36): Xaa is C or S

SEQ ID NO: 59074 - protein, 42 aa, Artificial Sequence; identical to SEQ ID NO: 24250
  GFR-binding peptide
  MOD_RES (2), (4), (39), (40): Xaa is C or S
  MOD_RES (17), (18), (19), (20), (21): Xaa is A or G
  MOD_RES (22), (23), (24), (25): Xaa is A or G or is absent

SEQ ID NO: 59075 - protein, 32 aa, Artificial Sequence; identical to SEQ ID NO: 3262
  GFR-binding peptide
  MOD_RES (2), (2): Xaa is C or S

SEQ ID NO: 59076 - protein, 36 aa, Artificial Sequence; identical to SEQ ID NO: 3263
  GFR-binding peptide
  MOD_RES (1), (33), (34): Xaa is C or S

SEQ ID NO: 59077 - protein, 37 aa, Artificial Sequence; identical to SEQ ID NO: 3265
  GFR-binding peptide
  MOD_RES (1), (3), (37): Xaa is C or S
  MOD_RES (15), (16), (17), (18), (19): Xaa is A or G
  MOD_RES (20), (21), (22), (23): Xaa is A or G or is absent

SEQ ID NO: 59078 - protein, 35 aa, Artificial Sequence; identical to SEQ ID NO: 32290
  GFR-binding peptide
  MOD_RES (2), (2): Xaa is C or S
  MOD_RES (14), (15), (16), (17), (18): Xaa is A or G
  MOD_RES (19), (20), (21), (22): Xaa is A or G or is absent

SEQ ID NO: 59079 - protein, 32 aa, Artificial Sequence; identical to SEQ ID NO: 24257
  GFR-binding peptide
  MOD_RES (2), (2): Xaa is C or S

SEQ ID NO: 59080 - protein, 40 aa, Artificial Sequence; identical to SEQ ID NO: 3267
  GFR-binding peptide
  MOD_RES (1), (35), (36): Xaa is C or S
  MOD_RES (13), (14), (15), (16), (17): Xaa is A or G
  MOD_RES (18), (19), (20), (21): Xaa is A or G or is absent

SEQ ID NO: 59081 - protein, 37 aa, Artificial Sequence
  GFR-binding peptide
  MOD_RES (1), (33), (34): Xaa is C or S
XSEVVMDEYKFKVVNNASDLYLISIPELRTPVXXTPP

SEQ ID NO: 59082 - protein, 37 aa, Artificial Sequence; identical to SEQ ID NO: 24259
  GFR-binding peptide
  MOD_RES (1), (36), (37): Xaa is C or S
  MOD_RES (14), (15), (16), (17), (18): Xaa is A or G
  MOD_RES (19), (20), (21), (22): Xaa is A or G or is absent

SEQ ID NO: 59083 - protein, 36 aa, Artificial Sequence
  GFR-binding peptide
  MOD_RES (2), (35), (36): Xaa is C or S
  MOD_RES (13), (14), (15), (16), (17): Xaa is A or G
  MOD_RES (18), (19), (20), (21): Xaa is A or G or is absent
KXSKVIMPIKGYXXXXXXXXXFYLINIPSLDQSVXX

SEQ ID NO: 59084 - protein, 38 aa, Artificial Sequence; identical to SEQ ID NO: 32299
  GFR-binding peptide
  MOD_RES (33), (34): Xaa is C or S
  MOD_RES (11), (12), (13), (14), (15): Xaa is A or G
  MOD_RES (16), (17), (18), (19): Xaa is A or G or is absent

SEQ ID NO: 59085 - protein, 31 aa, Artificial Sequence; identical to SEQ ID NO: 24264
  GFR-binding peptide

SEQ ID NO: 59086 - protein, 31 aa, Artificial Sequence; identical to SEQ ID NO: 57231
  GFR-binding peptide
  MOD_RES (31), (31): Xaa is C or S

SEQ ID NO: 59087 - protein, 36 aa, Artificial Sequence; identical to SEQ ID NO: 24265
  GFR-binding peptide
  MOD_RES (2), (34), (35): Xaa is C or S

SEQ ID NO: 59088 - protein, 35 aa, Artificial Sequence; identical to SEQ ID NO: 31200
  GFR-binding peptide
  MOD_RES (31), (32): Xaa is C or S

SEQ ID NO: 59089 - protein, 38 aa, Artificial Sequence; identical to SEQ ID NO: 3274
  GFR-binding peptide
  MOD_RES (1), (3), (37), (38): Xaa is C or S
  MOD_RES (15), (16), (17), (18), (19): Xaa is A or G
  MOD_RES (20), (21), (22), (23): Xaa is A or G or is absent

SEQ ID NO: 59090 - protein, 32 aa, Artificial Sequence
  GFR-binding peptide
  MOD_RES (32), (32): Xaa is C or S
SEVVMDRHKRLVVNNASDYYLISTASLRTPVX

SEQ ID NO: 59091 - protein, 33 aa, Artificial Sequence; identical to SEQ ID NO: 3275
  GFR-binding peptide
  MOD_RES (12), (13), (14), (15), (16): Xaa is A or G
  MOD_RES (17), (18), (19), (20): Xaa is A or G or is absent

SEQ ID NO: 59092 - protein, 39 aa, Artificial Sequence; identical to SEQ ID NO: 3277
  GFR-binding peptide
  MOD_RES (1), (33), (34): Xaa is C or S

SEQ ID NO: 59093 - protein, 40 aa, Artificial Sequence; identical to SEQ ID NO: 31204
  GFR-binding peptide
  MOD_RES (1), (3), (37), (38): Xaa is C or S
  MOD_RES (15), (16), (17), (18), (19): Xaa is A or G
  MOD_RES (20), (21), (22), (23): Xaa is A or G or is absent

SEQ ID NO: 59094 - protein, 39 aa, Artificial Sequence
  GFR-binding peptide
  MOD_RES (2), (4), (36), (37): Xaa is C or S
RXGXAEVVMDRHKRLVVNNAADYYLISTASLRAPVXXSA

SEQ ID NO: 59095 - protein, 35 aa, Artificial Sequence; identical to SEQ ID NO: 31206
  GFR-binding peptide
  MOD_RES (32), (33): Xaa is C or S

SEQ ID NO: 59096 - protein, 39 aa, Artificial Sequence; identical to SEQ ID NO: 31208
  GFR-binding peptide
  MOD_RES (2), (4), (36), (37): Xaa is C or S

SEQ ID NO: 59097 - protein, 40 aa, Artificial Sequence; identical to SEQ ID NO: 31209
  GFR-binding peptide
  MOD_RES (1), (3), (35), (36): Xaa is C or S

SEQ ID NO: 59098 - protein, 41 aa, Artificial Sequence; identical to SEQ ID NO: 3282
  GFR-binding peptide
  MOD_RES (2), (35), (36): Xaa is C or S
  MOD_RES (13), (14), (15), (16), (17): Xaa is A or G
  MOD_RES (18), (19), (20), (21): Xaa is A or G or is absent

SEQ ID NO: 59099 - protein, 30 aa, Artificial Sequence
  GFR-binding peptide
SRVIMPIKGYVKPKRGVFYLINIPSLAQPV

SEQ ID NO: 59100 - protein, 33 aa, Artificial Sequence; identical to SEQ ID NO: 31212
  GFR-binding peptide
  MOD_RES (1), (33): Xaa is C or S

SEQ ID NO: 59101 - protein, 34 aa, Artificial Sequence; identical to SEQ ID NO: 3284
  GFR-binding peptide
  MOD_RES (31), (32): Xaa is C or S

SEQ ID NO: 59102 - protein, 37 aa, Artificial Sequence; identical to SEQ ID NO: 3285
  GFR-binding peptide
  MOD_RES (1), (3), (36), (37): Xaa is C or S
  MOD_RES (14), (15), (16), (17), (18): Xaa is A or G
  MOD_RES (19), (20), (21), (22): Xaa is A or G or is absent

SEQ ID NO: 59103 - protein, 40 aa, Artificial Sequence; identical to SEQ ID NO: 31216
  GFR-binding peptide
  MOD_RES (34), (34): Xaa is C or S
  MOD_RES (12), (13), (14), (15), (16): Xaa is A or G
  MOD_RES (17), (18), (19), (20): Xaa is A or G or is absent

SEQ ID NO: 59104 - protein, 35 aa, Artificial Sequence; identical to SEQ ID NO: 3286
  GFR-binding peptide
  MOD_RES (1), (3), (34), (35): Xaa is C or S

SEQ ID NO: 59105 - protein, 39 aa, Artificial Sequence; identical to SEQ ID NO: 3287
  GFR-binding peptide
  MOD_RES (1), (35), (36): Xaa is C or S
  MOD_RES (13), (14), (15), (16), (17): Xaa is A or G
  MOD_RES (18), (19), (20), (21): Xaa is A or G or is absent

SEQ ID NO: 59106 - protein, 34 aa, Artificial Sequence; identical to SEQ ID NO: 31218
  GFR-binding peptide
  MOD_RES (2), (34): Xaa is C or S

SEQ ID NO: 59107 - protein, 41 aa, Artificial Sequence; identical to SEQ ID NO: 31219
  GFR-binding peptide
  MOD_RES (1), (3), (37), (38): Xaa is C or S
  MOD_RES (15), (16), (17), (18), (19): Xaa is A or G
  MOD_RES (20), (21), (22), (23): Xaa is A or G or is absent

SEQ ID NO: 59108 - protein, 32 aa, Artificial Sequence; identical to SEQ ID NO: 3291
  GFR-binding peptide
  MOD_RES (1), (1): Xaa is C or S

SEQ ID NO: 59109 - protein, 42 aa, Artificial Sequence; identical to SEQ ID NO: 3293
  GFR-binding peptide
  MOD_RES (2), (4), (38), (39): Xaa is C or S
  MOD_RES (16), (17), (18), (19), (20): Xaa is A or G
  MOD_RES (21), (22), (23), (24): Xaa is A or G or is absent

SEQ ID NO: 59110 - protein, 36 aa, Artificial Sequence; identical to SEQ ID NO: 3296
  GFR-binding peptide
  MOD_RES (1), (35), (36): Xaa is C or S
  MOD_RES (13), (14), (15), (16), (17): Xaa is A or G
  MOD_RES (18), (19), (20), (21): Xaa is A or G or is absent

SEQ ID NO: 59111 - protein, 39 aa, Artificial Sequence; identical to SEQ ID NO: 24288
  GFR-binding peptide
  MOD_RES (2), (4), (38), (39): Xaa is C or S
  MOD_RES (16), (17), (18), (19), (20): Xaa is A or G
  MOD_RES (21), (22), (23), (24): Xaa is A or G or is absent

SEQ ID NO: 59112 - protein, 37 aa, Artificial Sequence; identical to SEQ ID NO: 31229
  GFR-binding peptide
  MOD_RES (33), (34): Xaa is C or S
  MOD_RES (11), (12), (13), (14), (15): Xaa is A or G
  MOD_RES (16), (17), (18), (19): Xaa is A or G or is absent

SEQ ID NO: 59113 - protein, 39 aa, Artificial Sequence
  GFR-binding peptide
  MOD_RES (2), (4), (38), (39): Xaa is C or S
  MOD_RES (16), (17), (18), (19), (20): Xaa is A or G
  MOD_RES (21), (22), (23), (24): Xaa is A or G or is absent
SXGXRDVVMGYHYKLXXXXXXXXXKYLMSIPSMKTPTXX

SEQ ID NO: 59114 - protein, 35 aa, Artificial Sequence; identical to SEQ ID NO: 3299
  GFR-binding peptide
  MOD_RES (2), (2): Xaa is C or S
  MOD_RES (14), (15), (16), (17), (18): Xaa is A or G
  MOD_RES (19), (20), (21), (22): Xaa is A or G or is absent

SEQ ID NO: 59115 - protein, 41 aa, Artificial Sequence; identical to SEQ ID NO: 3300
  GFR-binding peptide
  MOD_RES (1), (3), (37), (38): Xaa is C or S
  MOD_RES (15), (16), (17), (18), (19): Xaa is A or G
  MOD_RES (20), (21), (22), (23): Xaa is A or G or is absent

SEQ ID NO: 59116 - protein, 34 aa, Artificial Sequence; identical to SEQ ID NO: 24292
  GFR-binding peptide
  MOD_RES (31), (31): Xaa is C or S

SEQ ID NO: 59117 - protein, 37 aa, Artificial Sequence
  GFR-binding peptide
  MOD_RES (2), (34), (35): Xaa is C or S
GXRDVVMGEYKFKIIQQKDNLYLMSIPEMKTPTXXPG

SEQ ID NO: 59118 - protein, 32 aa, Artificial Sequence; identical to SEQ ID NO: 3304
  GFR-binding peptide
  MOD_RES (11), (12), (13), (14), (15): Xaa is A or G
  MOD_RES (16), (17), (18), (19): Xaa is A or G or is absent

SEQ ID NO: 59119 - protein, 37 aa, Artificial Sequence; identical to SEQ ID NO: 56168
  GFR-binding peptide
  MOD_RES (2), (34), (35): Xaa is C or S

SEQ ID NO: 59120 - protein, 30 aa, Artificial Sequence; identical to SEQ ID NO: 24301
  GFR-binding peptide

SEQ ID NO: 59121 - protein, 41 aa, Artificial Sequence; identical to SEQ ID NO: 3308
  GFR-binding peptide
  MOD_RES (2), (4), (38), (39): Xaa is C or S
  MOD_RES (16), (17), (18), (19), (20): Xaa is A or G
  MOD_RES (21), (22), (23), (24): Xaa is A or G or is absent

SEQ ID NO: 59122 - protein, 33 aa, Artificial Sequence; identical to SEQ ID NO: 24303
  GFR-binding peptide
  MOD_RES (1), (32), (33): Xaa is C or S

SEQ ID NO: 59123 - protein, 39 aa, Artificial Sequence
  GFR-binding peptide
  MOD_RES (33), (34): Xaa is C or S
  MOD_RES (11), (12), (13), (14), (15): Xaa is A or G
  MOD_RES (16), (17), (18), (19): Xaa is A or G or is absent
EVTMNYHYKLXXXXXXXXXKYLISIPSMKEPVXXPEPIG

SEQ ID NO: 59124 - protein, 44 aa, Artificial Sequence; identical to SEQ ID NO: 31241
  GFR-binding peptide
  MOD_RES (2), (4), (38), (39): Xaa is C or S
  MOD_RES (16), (17), (18), (19), (20): Xaa is A or G
  MOD_RES (21), (22), (23), (24): Xaa is A or G or is absent

SEQ ID NO: 59125 - protein, 43 aa, Artificial Sequence; identical to SEQ ID NO: 3314
  GFR-binding peptide
  MOD_RES (1), (3), (37), (38): Xaa is C or S
  MOD_RES (15), (16), (17), (18), (19): Xaa is A or G
  MOD_RES (20), (21), (22), (23): Xaa is A or G or is absent

SEQ ID NO: 59126 - protein, 37 aa, Artificial Sequence; identical to SEQ ID NO: 3315
  GFR-binding peptide
  MOD_RES (32), (33): Xaa is C or S

SEQ ID NO: 59127 - protein, 33 aa, Artificial Sequence
  GFR-binding peptide
  MOD_RES (12), (13), (14), (15), (16): Xaa is A or G
  MOD_RES (17), (18), (19), (20): Xaa is A or G or is absent
SEVTMNEYKFKXXXXXXXXXLYLISIPEMKEPV

SEQ ID NO: 59128 - protein, 35 aa, Artificial Sequence; identical to SEQ ID NO: 24309
  GFR-binding peptide
  MOD_RES (33), (34): Xaa is C or S
  MOD_RES (11), (12), (13), (14), (15): Xaa is A or G
  MOD_RES (16), (17), (18), (19): Xaa is A or G or is absent

SEQ ID NO: 59129 - protein, 34 aa, Artificial Sequence; identical to SEQ ID NO: 31251
  GFR-binding peptide
  MOD_RES (1), (3), (34): Xaa is C or S

SEQ ID NO: 59130 - protein, 36 aa, Artificial Sequence; identical to SEQ ID NO: 24313
  GFR-binding peptide
  MOD_RES (1), (33), (34): Xaa is C or S

SEQ ID NO: 59131 - protein, 30 aa, Artificial Sequence; identical to SEQ ID NO: 3320
  GFR-binding peptide

SEQ ID NO: 59132 - protein, 38 aa, Artificial Sequence
  GFR-binding peptide
  MOD_RES (1), (32), (33): Xaa is C or S
XSKVVMPIKGYVKPTRGVFYLINIPSLDQPVXXPSASA

SEQ ID NO: 59133 - protein, 37 aa, Artificial Sequence
  GFR-binding peptide
  MOD_RES (2), (34), (35): Xaa is C or S
AXSEVTMNRHKRLVVNKNEDYYLISTASMKEPVXXPE

SEQ ID NO: 59134 - protein, 38 aa, Artificial Sequence; identical to SEQ ID NO: 24318
  GFR-binding peptide
  MOD_RES (2), (36), (37): Xaa is C or S
  MOD_RES (14), (15), (16), (17), (18): Xaa is A or G
  MOD_RES (19), (20), (21), (22): Xaa is A or G or is absent

SEQ ID NO: 59135 - protein, 38 aa, Artificial Sequence; identical to SEQ ID NO: 3324
  GFR-binding peptide
  MOD_RES (2), (36), (37): Xaa is C or S
  MOD_RES (14), (15), (16), (17), (18): Xaa is A or G
  MOD_RES (19), (20), (21), (22): Xaa is A or G or is absent

SEQ ID NO: 59136 - protein, 38 aa, Artificial Sequence; identical to SEQ ID NO: 24320
  GFR-binding peptide
  MOD_RES (2), (33), (34): Xaa is C or S

SEQ ID NO: 59137 - protein, 40 aa, Artificial Sequence; identical to SEQ ID NO: 3327
  GFR-binding peptide
  MOD_RES (1), (3), (36), (37): Xaa is C or S
  MOD_RES (14), (15), (16), (17), (18): Xaa is A or G
  MOD_RES (19), (20), (21), (22): Xaa is A or G or is absent

SEQ ID NO: 59138 - protein, 33 aa, Artificial Sequence
  GFR-binding peptide
  MOD_RES (32), (33): Xaa is C or S
RDVVMGEYKFKIIQQKDNLYLMSIPEMKTPTXX

SEQ ID NO: 59139 - protein, 40 aa, Artificial Sequence; identical to SEQ ID NO: 3331
  GFR-binding peptide
  MOD_RES (2), (4), (37), (38): Xaa is C or S
  MOD_RES (15), (16), (17), (18), (19): Xaa is A or G
  MOD_RES (20), (21), (22), (23): Xaa is A or G or is absent

SEQ ID NO: 59140 - protein, 35 aa, Artificial Sequence; identical to SEQ ID NO: 24326
  GFR-binding peptide
  MOD_RES (34), (35): Xaa is C or S
  MOD_RES (12), (13), (14), (15), (16): Xaa is A or G
  MOD_RES (17), (18), (19), (20): Xaa is A or G or is absent

SEQ ID NO: 59141 - protein, 35 aa, Artificial Sequence
  GFR-binding peptide
  MOD_RES (1), (35): Xaa is C or S
  MOD_RES (13), (14), (15), (16), (17): Xaa is A or G
  MOD_RES (18), (19), (20), (21): Xaa is A or G or is absent
XSEVTMNEYKFKXXXXXXXXXLYLISIPEMKEPVX

SEQ ID NO: 59142 - protein, 40 aa, Artificial Sequence
  GFR-binding peptide
  MOD_RES (2), (36), (37): Xaa is C or S
  MOD_RES (14), (15), (16), (17), (18): Xaa is A or G
  MOD_RES (19), (20), (21), (22): Xaa is A or G or is absent
GXRDVVMGRHKRLXXXXXXXXXYYLMSTASMKTPTXXPGA

SEQ ID NO: 59143 - protein, 41 aa, Artificial Sequence; identical to SEQ ID NO: 3333
  GFR-binding peptide
  MOD_RES (2), (4), (35), (36): Xaa is C or S

SEQ ID NO: 59144 - protein, 42 aa, Artificial Sequence; identical to SEQ ID NO: 31265
  GFR-binding peptide
  MOD_RES (2), (4), (38), (39): Xaa is C or S
  MOD_RES (16), (17), (18), (19), (20): Xaa is A or G
  MOD_RES (21), (22), (23), (24): Xaa is A or G or is absent

SEQ ID NO: 59145 - protein, 41 aa, Artificial Sequence; identical to SEQ ID NO: 3336
  GFR-binding peptide
  MOD_RES (35), (36): Xaa is C or S
  MOD_RES (13), (14), (15), (16), (17): Xaa is A or G
  MOD_RES (18), (19), (20), (21): Xaa is A or G or is absent

SEQ ID NO: 59146 - protein, 36 aa, Artificial Sequence; identical to SEQ ID NO: 3337
  GFR-binding peptide
  MOD_RES (2), (36): Xaa is C or S
  MOD_RES (14), (15), (16), (17), (18): Xaa is A or G
  MOD_RES (19), (20), (21), (22): Xaa is A or G or is absent

SEQ ID NO: 59147 - protein, 41 aa, Artificial Sequence; identical to SEQ ID NO: 3338
  GFR-binding peptide
  MOD_RES (2), (4), (38): Xaa is C or S
  MOD_RES (16), (17), (18), (19), (20): Xaa is A or G
  MOD_RES (21), (22), (23), (24): Xaa is A or G or is absent

SEQ ID NO: 59148 - protein, 35 aa, Artificial Sequence; identical to SEQ ID NO: 56202
  GFR-binding peptide
  MOD_RES (1), (34), (35): Xaa is C or S
  MOD_RES (12), (13), (14), (15), (16): Xaa is A or G
  MOD_RES (17), (18), (19), (20): Xaa is A or G or is absent

SEQ ID NO: 59149 - protein, 39 aa, Artificial Sequence
  GFR-binding peptide
  MOD_RES (33), (34): Xaa is C or S
  MOD_RES (11), (12), (13), (14), (15): Xaa is A or G
  MOD_RES (16), (17), (18), (19): Xaa is A or G or is absent
EVTMNEYKFKXXXXXXXXXLYLISIPEMKEPVXXPEPIG

SEQ ID NO: 59150 - protein, 37 aa, Artificial Sequence; identical to SEQ ID NO: 3341
  GFR-binding peptide
  MOD_RES (2), (35), (36): Xaa is C or S
  MOD_RES (13), (14), (15), (16), (17): Xaa is A or G
  MOD_RES (18), (19), (20), (21): Xaa is A or G or is absent

SEQ ID NO: 59151 - protein, 32 aa, Artificial Sequence; identical to SEQ ID NO: 31274
  GFR-binding peptide
  MOD_RES (32), (32): Xaa is C or S

SEQ ID NO: 59152 - protein, 41 aa, Artificial Sequence
  GFR-binding peptide
  MOD_RES (1), (3), (35), (36): Xaa is C or S
XGXSRVVMNEYKFKIVNSSDDLYLVSIPELKTPAXXPKPVH

SEQ ID NO: 59153 - protein, 41 aa, Artificial Sequence
  GFR-binding peptide
  MOD_RES (1), (3), (36), (37): Xaa is C or S
  MOD_RES (14), (15), (16), (17), (18): Xaa is A or G
  MOD_RES (19), (20), (21), (22): Xaa is A or G or is absent
XKXSKVVMPIKGYXXXXXXXXXFYLINIPSLDQPVXXPSAS

SEQ ID NO: 59154 - protein, 37 aa, Artificial Sequence; identical to SEQ ID NO: 3342
  GFR-binding peptide
  MOD_RES (1), (32), (33): Xaa is C or S

SEQ ID NO: 59155 - protein, 35 aa, Artificial Sequence; identical to SEQ ID NO: 24330
  GFR-binding peptide
  MOD_RES (1), (33), (34): Xaa is C or S

SEQ ID NO: 59156 - protein, 35 aa, Artificial Sequence; identical to SEQ ID NO: 31282
  GFR-binding peptide
  MOD_RES (2), (4): Xaa is C or S

SEQ ID NO: 59157 - protein, 34 aa, Artificial Sequence
  GFR-binding peptide
  MOD_RES (31), (32): Xaa is C or S
DVVMGEYKFKIIQQKDNLYLMSIPEMKTPTXXPG

SEQ ID NO: 59158 - protein, 35 aa, Artificial Sequence; identical to SEQ ID NO: 24332
  GFR-binding peptide
  MOD_RES (34), (35): Xaa is C or S
  MOD_RES (12), (13), (14), (15), (16): Xaa is A or G
  MOD_RES (17), (18), (19), (20): Xaa is A or G or is absent

SEQ ID NO: 59159 - protein, 35 aa, Artificial Sequence
  GFR-binding peptide
  MOD_RES (1), (33), (34): Xaa is C or S
XAEVVMDRHKRLVVNNAADYYLISTASLRAPVXXS

SEQ ID NO: 59160 - protein, 36 aa, Artificial Sequence
  GFR-binding peptide
  MOD_RES (1), (34), (35): Xaa is C or S
  MOD_RES (12), (13), (14), (15), (16): Xaa is A or G
  MOD_RES (17), (18), (19), (20): Xaa is A or G or is absent
XEEVIMRHKRLXXXXXXXXXYYLMSTASTKVPAXXT

SEQ ID NO: 59161 - protein, 42 aa, Artificial Sequence; identical to SEQ ID NO: 3348
  GFR-binding peptide
  MOD_RES (2), (4), (38), (39): Xaa is C or S
  MOD_RES (16), (17), (18), (19), (20): Xaa is A or G
  MOD_RES (21), (22), (23), (24): Xaa is A or G or is absent

SEQ ID NO: 59162 - protein, 41 aa, Artificial Sequence; identical to SEQ ID NO: 31288
  GFR-binding peptide
  MOD_RES (1), (3), (35), (36): Xaa is C or S

SEQ ID NO: 59163 - protein, 38 aa, Artificial Sequence; identical to SEQ ID NO: 31290
  GFR-binding peptide
  MOD_RES (1), (3), (37), (38): Xaa is C or S
  MOD_RES (15), (16), (17), (18), (19): Xaa is A or G
  MOD_RES (20), (21), (22), (23): Xaa is A or G or is absent

SEQ ID NO: 59164 - protein, 36 aa, Artificial Sequence; identical to SEQ ID NO: 3353
  GFR-binding peptide
  MOD_RES (2), (34), (35): Xaa is C or S

SEQ ID NO: 59165 - protein, 36 aa, Artificial Sequence
  GFR-binding peptide
  MOD_RES (1), (3), (35), (36): Xaa is C or S
XGXSEVVMDYHYKLVVNNASDKYLISIPSLRTPVXX

SEQ ID NO: 59166 - protein, 38 aa, Artificial Sequence; identical to SEQ ID NO: 3355
  GFR-binding peptide
  MOD_RES (2), (4), (37), (38): Xaa is C or S
  MOD_RES (15), (16), (17), (18), (19): Xaa is A or G
  MOD_RES (20), (21), (22), (23): Xaa is A or G or is absent

SEQ ID NO: 59167 - protein, 37 aa, Artificial Sequence; identical to SEQ ID NO: 31292
  GFR-binding peptide
  MOD_RES (1), (34), (35): Xaa is C or S
  MOD_RES (12), (13), (14), (15), (16): Xaa is A or G
  MOD_RES (17), (18), (19), (20): Xaa is A or G or is absent

SEQ ID NO: 59168 - protein, 31 aa, Artificial Sequence; identical to SEQ ID NO: 3357
  GFR-binding peptide
  MOD_RES (31), (31): Xaa is C or S

SEQ ID NO: 59169 - protein, 35 aa, Artificial Sequence; identical to SEQ ID NO: 24338
  GFR-binding peptide
  MOD_RES (31), (32): Xaa is C or S

SEQ ID NO: 59170 - protein, 41 aa, Artificial Sequence; identical to SEQ ID NO: 31294
  GFR-binding peptide
  MOD_RES (2), (4), (38): Xaa is C or S
  MOD_RES (16), (17), (18), (19), (20): Xaa is A or G
  MOD_RES (21), (22), (23), (24): Xaa is A or G or is absent

SEQ ID NO: 59171 - protein, 37 aa, Artificial Sequence; identical to SEQ ID NO: 56221
  GFR-binding peptide
  MOD_RES (34), (35): Xaa is C or S
  MOD_RES (12), (13), (14), (15), (16): Xaa is A or G
  MOD_RES (17), (18), (19), (20): Xaa is A or G or is absent

SEQ ID NO: 59172 - protein, 39 aa, Artificial Sequence; identical to SEQ ID NO: 3359
  GFR-binding peptide
  MOD_RES (34), (35): Xaa is C or S
  MOD_RES (12), (13), (14), (15), (16): Xaa is A or G
  MOD_RES (17), (18), (19), (20): Xaa is A or G or is absent

SEQ ID NO: 59173 - protein, 42 aa, Artificial Sequence; identical to SEQ ID NO: 3362
  GFR-binding peptide
  MOD_RES (2), (4), (37), (38): Xaa is C or S
  MOD_RES (15), (16), (17), (18), (19): Xaa is A or G
  MOD_RES (20), (21), (22), (23): Xaa is A or G or is absent

SEQ ID NO: 59174 - protein, 31 aa, Artificial Sequence; identical to SEQ ID NO: 3363
  GFR-binding peptide

SEQ ID NO: 59175 - protein, 38 aa, Artificial Sequence
  GFR-binding peptide
  MOD_RES (1), (3), (34), (35): Xaa is C or S
XKXSKVIMPIKGYIKPTKGIFYLINIPSLDQSVXXPSA

SEQ ID NO: 59176 - protein, 38 aa, Artificial Sequence; identical to SEQ ID NO: 3365
  GFR-binding peptide
  MOD_RES (2), (4), (36), (37): Xaa is C or S

SEQ ID NO: 59177 - protein, 39 aa, Artificial Sequence
  GFR-binding peptide
  MOD_RES (34), (35): Xaa is C or S
  MOD_RES (12), (13), (14), (15), (16): Xaa is A or G
  MOD_RES (17), (18), (19), (20): Xaa is A or G or is absent
SEVTMNRYKKLXXXXXXXXXFYLISIANMKEPVXXPEPI

SEQ ID NO: 59178 - protein, 32 aa, Artificial Sequence
  GFR-binding peptide
  MOD_RES (11), (12), (13), (14), (15): Xaa is A or G
  MOD_RES (16), (17), (18), (19): Xaa is A or G or is absent
DVVMGYHYKLXXXXXXXXXKYLMSIPSMKTPT

SEQ ID NO: 59179 - protein, 38 aa, Artificial Sequence
  GFR-binding peptide
  MOD_RES (2), (4), (38): Xaa is C or S
  MOD_RES (16), (17), (18), (19), (20): Xaa is A or G
  MOD_RES (21), (22), (23), (24): Xaa is A or G or is absent
RXAXSEVTMNRYKKLXXXXXXXXXFYLISIANMKEPVX

SEQ ID NO: 59180 - protein, 37 aa, Artificial Sequence; identical to SEQ ID NO: 3368
  GFR-binding peptide
  MOD_RES (2), (4), (36), (37): Xaa is C or S

SEQ ID NO: 59181 - protein, 40 aa, Artificial Sequence; identical to SEQ ID NO: 31311
  GFR-binding peptide
  MOD_RES (2), (34), (35): Xaa is C or S

SEQ ID NO: 59182 - protein, 36 aa, Artificial Sequence; identical to SEQ ID NO: 31312
  GFR-binding peptide
  MOD_RES (2), (34), (35): Xaa is C or S

SEQ ID NO: 59183 - protein, 36 aa, Artificial Sequence
  GFR-binding peptide
  MOD_RES (2), (4), (36): Xaa is C or S
SXGXRDVVMGYHYKLIIQQKDNKYLMSIPSMKTPTX

SEQ ID NO: 59184 - protein, 41 aa, Artificial Sequence; identical to SEQ ID NO: 24352
  GFR-binding peptide
  MOD_RES (1), (3), (35), (36): Xaa is C or S

SEQ ID NO: 59185 - protein, 33 aa, Artificial Sequence
  GFR-binding peptide
  MOD_RES (31), (32): Xaa is C or S
EVTMNRHKRLVVNKNEDYYLISTASMKEPVXXP

SEQ ID NO: 59186 - protein, 34 aa, Artificial Sequence; identical to SEQ ID NO: 31313
  GFR-binding peptide
  MOD_RES (1), (3): Xaa is C or S

SEQ ID NO: 59187 - protein, 39 aa, Artificial Sequence; identical to SEQ ID NO: 31315
  GFR-binding peptide
  MOD_RES (2), (34), (35): Xaa is C or S

SEQ ID NO: 59188 - protein, 37 aa, Artificial Sequence; identical to SEQ ID NO: 3373
  GFR-binding peptide
  MOD_RES (1), (3), (34), (35): Xaa is C or S

SEQ ID NO: 59189 - protein, 37 aa, Artificial Sequence; identical to SEQ ID NO: 3374
  GFR-binding peptide
  MOD_RES (1), (3), (37): Xaa is C or S
  MOD_RES (15), (16), (17), (18), (19): Xaa is A or G
  MOD_RES (20), (21), (22), (23): Xaa is A or G or is absent

SEQ ID NO: 59190 - protein, 40 aa, Artificial Sequence; identical to SEQ ID NO: 3379
  GFR-binding peptide
  MOD_RES (2), (34), (35): Xaa is C or S

SEQ ID NO: 59191 - protein, 34 aa, Artificial Sequence; identical to SEQ ID NO: 24360
  GFR-binding peptide
  MOD_RES (1), (1): Xaa is C or S
  MOD_RES (13), (14), (15), (16), (17): Xaa is A or G
  MOD_RES (18), (19), (20), (21): Xaa is A or G or is absent

SEQ ID NO: 59192 - protein, 37 aa, Artificial Sequence; identical to SEQ ID NO: 24361
  GFR-binding peptide
  MOD_RES (31), (32): Xaa is C or S

SEQ ID NO: 59193 - protein, 34 aa, Artificial Sequence
  GFR-binding peptide
  MOD_RES (2), (34): Xaa is C or S
AXSEVTMNRHKRLVVNKNEDYYLISTASMKEPVX

SEQ ID NO: 59194 - protein, 32 aa, Artificial Sequence; identical to SEQ ID NO: 31329
  GFR-binding peptide
  MOD_RES (31), (32): Xaa is C or S

SEQ ID NO: 59195 - protein, 40 aa, Artificial Sequence; identical to SEQ ID NO: 10810
  GFR-binding peptide
  MOD_RES (1), (3), (35), (36): Xaa is C or S

SEQ ID NO: 59196 - protein, 37 aa, Artificial Sequence; identical to SEQ ID NO: 3387
  GFR-binding peptide
  MOD_RES (31), (32): Xaa is C or S

SEQ ID NO: 59197 - protein, 36 aa, Artificial Sequence; identical to SEQ ID NO: 3388
  GFR-binding peptide
  MOD_RES (2), (4), (36): Xaa is C or S

SEQ ID NO: 59198 - protein, 38 aa, Artificial Sequence; identical to SEQ ID NO: 24368
  GFR-binding peptide
  MOD_RES (33), (34): Xaa is C or S
  MOD_RES (11), (12), (13), (14), (15): Xaa is A or G
  MOD_RES (16), (17), (18), (19): Xaa is A or G or is absent

SEQ ID NO: 59199 - protein, 34 aa, Artificial Sequence; identical to SEQ ID NO: 31333
  GFR-binding peptide
  MOD_RES (1), (1): Xaa is C or S
  MOD_RES (13), (14), (15), (16), (17): Xaa is A or G
  MOD_RES (18), (19), (20), (21): Xaa is A or G or is absent

SEQ ID NO: 59200 - protein, 39 aa, Artificial Sequence; identical to SEQ ID NO: 10812
  GFR-binding peptide
  MOD_RES (2), (4), (38), (39): Xaa is C or S
  MOD_RES (16), (17), (18), (19), (20): Xaa is A or G
  MOD_RES (21), (22), (23), (24): Xaa is A or G or is absent

SEQ ID NO: 59201 - protein, 37 aa, Artificial Sequence; identical to SEQ ID NO: 31340
  GFR-binding peptide
  MOD_RES (32), (33): Xaa is C or S

SEQ ID NO: 59202 - protein, 32 aa, Artificial Sequence; identical to SEQ ID NO: 24370
  GFR-binding peptide
  MOD_RES (32), (32): Xaa is C or S

SEQ ID NO: 59203 - protein, 37 aa, Artificial Sequence
  GFR-binding peptide
  MOD_RES (32), (33): Xaa is C or S
SEVTMNRHKRLVVNKNEDYYLISTASMKEPVXXPEPI

SEQ ID NO: 59204 - protein, 35 aa, Artificial Sequence
  GFR-binding peptide
  MOD_RES (32), (33): Xaa is C or S
SEVTMNEYKFKVVNKNEDLYLISIPEMKEPVXXPE

SEQ ID NO: 59205 - protein, 34 aa, Artificial Sequence; identical to SEQ ID NO: 31344
  GFR-binding peptide
  MOD_RES (31), (32): Xaa is C or S

SEQ ID NO: 59206 - protein, 43 aa, Artificial Sequence; identical to SEQ ID NO: 24371
  GFR-binding peptide
  MOD_RES (2), (4), (38), (39): Xaa is C or S
  MOD_RES (16), (17), (18), (19), (20): Xaa is A or G
  MOD_RES (21), (22), (23), (24): Xaa is A or G or is absent

SEQ ID NO: 59207 - protein, 36 aa, Artificial Sequence
  GFR-binding peptide
  MOD_RES (1), (33), (34): Xaa is C or S
XSEVVMDEYKFKVVNNASDLYLISIPELRTPVXXTP

SEQ ID NO: 59208 - protein, 41 aa, Artificial Sequence; identical to SEQ ID NO: 3394
  GFR-binding peptide
  MOD_RES (2), (4), (37), (38): Xaa is C or S
  MOD_RES (15), (16), (17), (18), (19): Xaa is A or G
  MOD_RES (20), (21), (22), (23): Xaa is A or G or is absent

SEQ ID NO: 59209 - protein, 34 aa, Artificial Sequence; identical to SEQ ID NO: 3396
  GFR-binding peptide
  MOD_RES (1), (33), (34): Xaa is C or S

SEQ ID NO: 59210 - protein, 37 aa, Artificial Sequence; identical to SEQ ID NO: 3399
  GFR-binding peptide
  MOD_RES (1), (34), (35): Xaa is C or S
  MOD_RES (12), (13), (14), (15), (16): Xaa is A or G
  MOD_RES (17), (18), (19), (20): Xaa is A or G or is absent

SEQ ID NO: 59211 - protein, 34 aa, Artificial Sequence
  GFR-binding peptide
  MOD_RES (2), (33), (34): Xaa is C or S
KXSRVIMPIKGYVKPKRGVFYLINIPSLAQPVXX

SEQ ID NO: 59212 - protein, 40 aa, Artificial Sequence; identical to SEQ ID NO: 3401
  GFR-binding peptide
  MOD_RES (2), (35), (36): Xaa is C or S
  MOD_RES (13), (14), (15), (16), (17): Xaa is A or G
  MOD_RES (18), (19), (20), (21): Xaa is A or G or is absent

SEQ ID NO: 59213 - protein, 36 aa, Artificial Sequence
  GFR-binding peptide
  MOD_RES (2), (36): Xaa is C or S
  MOD_RES (14), (15), (16), (17), (18): Xaa is A or G
  MOD_RES (19), (20), (21), (22): Xaa is A or G or is absent
AXSEVTMNRHKRLXXXXXXXXXYYLISTASMKEPVX

SEQ ID NO: 59214 - protein, 36 aa, Artificial Sequence; identical to SEQ ID NO: 31362
  GFR-binding peptide
  MOD_RES (34), (35): Xaa is C or S
  MOD_RES (12), (13), (14), (15), (16): Xaa is A or G
  MOD_RES (17), (18), (19), (20): Xaa is A or G or is absent

SEQ ID NO: 59215 - protein, 38 aa, Artificial Sequence
  GFR-binding peptide
  MOD_RES (2), (4), (38): Xaa is C or S
  MOD_RES (16), (17), (18), (19), (20): Xaa is A or G
  MOD_RES (21), (22), (23), (24): Xaa is A or G or is absent
RXGXESVAMGRHKRLXXXXXXXXXYYLISTASLKTPVX

SEQ ID NO: 59216 - protein, 36 aa, Artificial Sequence; identical to SEQ ID NO: 24384
  GFR-binding peptide
  MOD_RES (2), (35), (36): Xaa is C or S

SEQ ID NO: 59217 - protein, 34 aa, Artificial Sequence; identical to SEQ ID NO: 24385
  GFR-binding peptide
  MOD_RES (1), (1): Xaa is C or S
  MOD_RES (13), (14), (15), (16), (17): Xaa is A or G
  MOD_RES (18), (19), (20), (21): Xaa is A or G or is absent

SEQ ID NO: 59218 - protein, 37 aa, Artificial Sequence; identical to SEQ ID NO: 31366
  GFR-binding peptide
  MOD_RES (2), (36), (37): Xaa is C or S
  MOD_RES (14), (15), (16), (17), (18): Xaa is A or G
  MOD_RES (19), (20), (21), (22): Xaa is A or G or is absent

SEQ ID NO: 59219 - protein, 39 aa, Artificial Sequence; identical to SEQ ID NO: 3406
  GFR-binding peptide
  MOD_RES (2), (34), (35): Xaa is C or S

SEQ ID NO: 59220 - protein, 32 aa, Artificial Sequence; identical to SEQ ID NO: 31367
  GFR-binding peptide
  MOD_RES (31), (32): Xaa is C or S

SEQ ID NO: 59221 - protein, 38 aa, Artificial Sequence; identical to SEQ ID NO: 24388
  GFR-binding peptide
  MOD_RES (1), (3), (35), (36): Xaa is C or S

SEQ ID NO: 59222 - protein, 37 aa, Artificial Sequence; identical to SEQ ID NO: 3408
  GFR-binding peptide
  MOD_RES (31), (32): Xaa is C or S

SEQ ID NO: 59223 - protein, 34 aa, Artificial Sequence; identical to SEQ ID NO: 3409
  GFR-binding peptide
  MOD_RES (1), (33): Xaa is C or S

SEQ ID NO: 59224 - protein, 39 aa, Artificial Sequence; identical to SEQ ID NO: 24392
  GFR-binding peptide
  MOD_RES (2), (4), (37), (38): Xaa is C or S
  MOD_RES (15), (16), (17), (18), (19): Xaa is A or G
  MOD_RES (20), (21), (22), (23): Xaa is A or G or is absent

SEQ ID NO: 59225 - protein, 35 aa, Artificial Sequence; identical to SEQ ID NO: 3410
  GFR-binding peptide
  MOD_RES (2), (2): Xaa is C or S
  MOD_RES (14), (15), (16), (17), (18): Xaa is A or G
  MOD_RES (19), (20), (21), (22): Xaa is A or G or is absent

SEQ ID NO: 59226 - protein, 33 aa, Artificial Sequence
  GFR-binding peptide
  MOD_RES (32), (33): Xaa is C or S
SEVTMNEYKFKVVNKNEDLYLISIPEMKEPVXX

SEQ ID NO: 59227 - protein, 37 aa, Artificial Sequence; identical to SEQ ID NO: 24395
  GFR-binding peptide
  MOD_RES (2), (33), (34): Xaa is C or S

SEQ ID NO: 59228 - protein, 38 aa, Artificial Sequence; identical to SEQ ID NO: 24398
  GFR-binding peptide
  MOD_RES (1), (33), (34): Xaa is C or S

SEQ ID NO: 59229 - protein, 38 aa, Artificial Sequence; identical to SEQ ID NO: 31377
  GFR-binding peptide
  MOD_RES (1), (33), (34): Xaa is C or S

SEQ ID NO: 59230 - protein, 35 aa, Artificial Sequence; identical to SEQ ID NO: 3420
  GFR-binding peptide
  MOD_RES (32), (33): Xaa is C or S

SEQ ID NO: 59231 - protein, 34 aa, Artificial Sequence
  GFR-binding peptide
  MOD_RES (2), (34): Xaa is C or S
GXSEVVMDEYKFKVVNNASDLYLISIPELRTPVX

SEQ ID NO: 59232 - protein, 42 aa, Artificial Sequence; identical to SEQ ID NO: 31388
  GFR-binding peptide
  MOD_RES (1), (3), (38), (39): Xaa is C or S
  MOD_RES (16), (17), (18), (19), (20): Xaa is A or G
  MOD_RES (21), (22), (23), (24): Xaa is A or G or is absent

SEQ ID NO: 59233 - protein, 34 aa, Artificial Sequence
  GFR-binding peptide
  MOD_RES (33), (34): Xaa is C or S
  MOD_RES (11), (12), (13), (14), (15): Xaa is A or G
  MOD_RES (16), (17), (18), (19): Xaa is A or G or is absent
EVVMDYHYKLXXXXXXXXXKYLISIPSLRTPVXX

SEQ ID NO: 59234 - protein, 35 aa, Artificial Sequence; identical to SEQ ID NO: 24407
  GFR-binding peptide
  MOD_RES (32), (32): Xaa is C or S

SEQ ID NO: 59235 - protein, 37 aa, Artificial Sequence; identical to SEQ ID NO: 24408
  GFR-binding peptide
  MOD_RES (2), (4): Xaa is C or S
  MOD_RES (16), (17), (18), (19), (20): Xaa is A or G
  MOD_RES (21), (22), (23), (24): Xaa is A or G or is absent

SEQ ID NO: 59236 - protein, 33 aa, Artificial Sequence; identical to SEQ ID NO: 31394
  GFR-binding peptide
  MOD_RES (31), (32): Xaa is C or S

SEQ ID NO: 59237 - protein, 35 aa, Artificial Sequence; identical to SEQ ID NO: 24409
  GFR-binding peptide
  MOD_RES (34), (35): Xaa is C or S
  MOD_RES (12), (13), (14), (15), (16): Xaa is A or G
  MOD_RES (17), (18), (19), (20): Xaa is A or G or is absent

SEQ ID NO: 59238 - protein, 38 aa, Artificial Sequence; identical to SEQ ID NO: 24412
  GFR-binding peptide
  MOD_RES (33), (34): Xaa is C or S
  MOD_RES (11), (12), (13), (14), (15): Xaa is A or G
  MOD_RES (16), (17), (18), (19): Xaa is A or G or is absent

SEQ ID NO: 59239 - protein, 36 aa, Artificial Sequence; identical to SEQ ID NO: 3423
  GFR-binding peptide
  MOD_RES (1), (34), (35): Xaa is C or S
  MOD_RES (12), (13), (14), (15), (16): Xaa is A or G
  MOD_RES (17), (18), (19), (20): Xaa is A or G or is absent

SEQ ID NO: 59240 - protein, 35 aa, Artificial Sequence; identical to SEQ ID NO: 24416
  GFR-binding peptide
  MOD_RES (2), (4): Xaa is C or S

SEQ ID NO: 59241 - protein, 38 aa, Artificial Sequence; identical to SEQ ID NO: 31395
  GFR-binding peptide
  MOD_RES (2), (4), (38): Xaa is C or S
  MOD_RES (16), (17), (18), (19), (20): Xaa is A or G
  MOD_RES (21), (22), (23), (24): Xaa is A or G or is absent

SEQ ID NO: 59242 - protein, 35 aa, Artificial Sequence
  GFR-binding peptide
  MOD_RES (2), (4): Xaa is C or S
RXGXSEVVMDRHKRLVVNNASDYYLISTASLRTPV

SEQ ID NO: 59243 - protein, 40 aa, Artificial Sequence; identical to SEQ ID NO: 3426
  GFR-binding peptide
  MOD_RES (2), (4), (36): Xaa is C or S

SEQ ID NO: 59244 - protein, 43 aa, Artificial Sequence; identical to SEQ ID NO: 3427
  GFR-binding peptide
  MOD_RES (2), (4), (38), (39): Xaa is C or S
  MOD_RES (16), (17), (18), (19), (20): Xaa is A or G
  MOD_RES (21), (22), (23), (24): Xaa is A or G or is absent

SEQ ID NO: 59245 - protein, 35 aa, Artificial Sequence; identical to SEQ ID NO: 31403
  GFR-binding peptide
  MOD_RES (2), (2): Xaa is C or S
  MOD_RES (14), (15), (16), (17), (18): Xaa is A or G
  MOD_RES (19), (20), (21), (22): Xaa is A or G or is absent

SEQ ID NO: 59246 - protein, 37 aa, Artificial Sequence; identical to SEQ ID NO: 3430
  GFR-binding peptide
  MOD_RES (1), (33): Xaa is C or S

SEQ ID NO: 59247 - protein, 34 aa, Artificial Sequence
  GFR-binding peptide
  MOD_RES (2), (34): Xaa is C or S
GXRDVVMGRHKRLIIQQKDNYYLMSTASMKTPTX

SEQ ID NO: 59248 - protein, 38 aa, Artificial Sequence; identical to SEQ ID NO: 3431
  GFR-binding peptide
  MOD_RES (2), (35), (36): Xaa is C or S
  MOD_RES (13), (14), (15), (16), (17): Xaa is A or G
  MOD_RES (18), (19), (20), (21): Xaa is A or G or is absent

SEQ ID NO: 59249 - protein, 37 aa, Artificial Sequence; identical to SEQ ID NO: 31406
  GFR-binding peptide
  MOD_RES (1), (35), (36): Xaa is C or S
  MOD_RES (13), (14), (15), (16), (17): Xaa is A or G
  MOD_RES (18), (19), (20), (21): Xaa is A or G or is absent

SEQ ID NO: 59250 - protein, 37 aa, Artificial Sequence; identical to SEQ ID NO: 24426
  GFR-binding peptide
  MOD_RES (2), (4), (37): Xaa is C or S
  MOD_RES (15), (16), (17), (18), (19): Xaa is A or G
  MOD_RES (20), (21), (22), (23): Xaa is A or G or is absent

SEQ ID NO: 59251 - protein, 40 aa, Artificial Sequence; identical to SEQ ID NO: 24427
  GFR-binding peptide
  MOD_RES (1), (3), (35), (36): Xaa is C or S

SEQ ID NO: 59252 - protein, 37 aa, Artificial Sequence
  GFR-binding peptide
  MOD_RES (2), (4), (37): Xaa is C or S
  MOD_RES (15), (16), (17), (18), (19): Xaa is A or G
  MOD_RES (20), (21), (22), (23): Xaa is A or G or is absent
LXGXEEVIMEYKFKXXXXXXXXXLYLMSIPETKVPAX

SEQ ID NO: 59253 - protein, 39 aa, Artificial Sequence
  GFR-binding peptide
  MOD_RES (1), (3), (35), (36): Xaa is C or S
XGXSEVVMDRHKRLVVNNASDYYLISTASLRTPVXXTPP

SEQ ID NO: 59254 - protein, 40 aa, Artificial Sequence; identical to SEQ ID NO: 3439
  GFR-binding peptide
  MOD_RES (2), (4), (35), (36): Xaa is C or S

SEQ ID NO: 59255 - protein, 32 aa, Artificial Sequence
  GFR-binding peptide
  MOD_RES (31), (32): Xaa is C or S
EVTMNPIKGYVVNKNEDFYLINIPSMKEPVXX

SEQ ID NO: 59256 - protein, 38 aa, Artificial Sequence; identical to SEQ ID NO: 31415
  GFR-binding peptide
  MOD_RES (34), (35): Xaa is C or S
  MOD_RES (12), (13), (14), (15), (16): Xaa is A or G
  MOD_RES (17), (18), (19), (20): Xaa is A or G or is absent

SEQ ID NO: 59257 - protein, 42 aa, Artificial Sequence
  GFR-binding peptide
  MOD_RES (2), (4), (38), (39): Xaa is C or S
  MOD_RES (16), (17), (18), (19), (20): Xaa is A or G
  MOD_RES (21), (22), (23), (24): Xaa is A or G or is absent
SXGXRDVVMGYHYKLXXXXXXXXXKYLMSIPSMKTPTXXPGA

SEQ ID NO: 59258 - protein, 42 aa, Artificial Sequence; identical to SEQ ID NO: 31419
  GFR-binding peptide
  MOD_RES (2), (4), (36), (37): Xaa is C or S

SEQ ID NO: 59259 - protein, 32 aa, Artificial Sequence; identical to SEQ ID NO: 3446
  GFR-binding peptide
  MOD_RES (11), (12), (13), (14), (15): Xaa is A or G
  MOD_RES (16), (17), (18), (19): Xaa is A or G or is absent

SEQ ID NO: 59260 - protein, 40 aa, Artificial Sequence; identical to SEQ ID NO: 3448
  GFR-binding peptide
  MOD_RES (2), (36), (37): Xaa is C or S
  MOD_RES (14), (15), (16), (17), (18): Xaa is A or G
  MOD_RES (19), (20), (21), (22): Xaa is A or G or is absent

SEQ ID NO: 59261 - protein, 38 aa, Artificial Sequence; identical to SEQ ID NO: 3453
  GFR-binding peptide
  MOD_RES (1), (3), (36), (37): Xaa is C or S
  MOD_RES (14), (15), (16), (17), (18): Xaa is A or G
  MOD_RES (19), (20), (21), (22): Xaa is A or G or is absent

SEQ ID NO: 59262 - protein, 38 aa, Artificial Sequence
  GFR-binding peptide
  MOD_RES (2), (4), (36), (37): Xaa is C or S
RXGXESVAMGRHKRLYTVVGKDYYLISTASLKTPVXXA

SEQ ID NO: 59263 - protein, 37 aa, Artificial Sequence
  GFR-binding peptide
  MOD_RES (2), (4), (36), (37): Xaa is C or S
SXGXRDVVMGEYKFKIIQQKDNLYLMSIPEMKTPTXX

SEQ ID NO: 59264 - protein, 33 aa, Artificial Sequence; identical to SEQ ID NO: 3456
  GFR-binding peptide
  MOD_RES (12), (13), (14), (15), (16): Xaa is A or G
  MOD_RES (17), (18), (19), (20): Xaa is A or G or is absent

SEQ ID NO: 59265 - protein, 32 aa, Artificial Sequence
  GFR-binding peptide
  MOD_RES (1), (32): Xaa is C or S
XEEVIMRHKRLLLVRGNDYYLMSTASTKVPAX

SEQ ID NO: 59266 - protein, 32 aa, Artificial Sequence; identical to SEQ ID NO: 24438
  GFR-binding peptide
  MOD_RES (1), (1): Xaa is C or S

SEQ ID NO: 59267 - protein, 38 aa, Artificial Sequence; identical to SEQ ID NO: 3460
  GFR-binding peptide
  MOD_RES (2), (35), (36): Xaa is C or S
  MOD_RES (13), (14), (15), (16), (17): Xaa is A or G
  MOD_RES (18), (19), (20), (21): Xaa is A or G or is absent

SEQ ID NO: 59268 - protein, 39 aa, Artificial Sequence; identical to SEQ ID NO: 3462
  GFR-binding peptide
  MOD_RES (1), (33), (34): Xaa is C or S

SEQ ID NO: 59269 - protein, 36 aa, Artificial Sequence; identical to SEQ ID NO: 24442
  GFR-binding peptide
  MOD_RES (2), (34), (35): Xaa is C or S

SEQ ID NO: 59270 - protein, 42 aa, Artificial Sequence
  GFR-binding peptide
  MOD_RES (2), (4), (37), (38): Xaa is C or S
  MOD_RES (15), (16), (17), (18), (19): Xaa is A or G
  MOD_RES (20), (21), (22), (23): Xaa is A or G or is absent
SXKXSRVIMPIKGYXXXXXXXXXFYLINIPSLAQPVXXPAAS

SEQ ID NO: 59271 - protein, 35 aa, Artificial Sequence
  GFR-binding peptide
  MOD_RES (34), (35): Xaa is C or S
  MOD_RES (12), (13), (14), (15), (16): Xaa is A or G
  MOD_RES (17), (18), (19), (20): Xaa is A or G or is absent
RDVVMGYHYKLXXXXXXXXXKYLMSIPSMKTPTXX

SEQ ID NO: 59272 - protein, 44 aa, Artificial Sequence; identical to SEQ ID NO: 3463
  GFR-binding peptide
  MOD_RES (2), (4), (38), (39): Xaa is C or S
  MOD_RES (16), (17), (18), (19), (20): Xaa is A or G
  MOD_RES (21), (22), (23), (24): Xaa is A or G or is absent

SEQ ID NO: 59273 - protein, 32 aa, Artificial Sequence
  GFR-binding peptide
  MOD_RES (11), (12), (13), (14), (15): Xaa is A or G
  MOD_RES (16), (17), (18), (19): Xaa is A or G or is absent
DVVMGRHKRLXXXXXXXXXYYLMSTASMKTPT

SEQ ID NO: 59274 - protein, 43 aa, Artificial Sequence
  GFR-binding peptide
  MOD_RES (1), (3), (37), (38): Xaa is C or S
  MOD_RES (15), (16), (17), (18), (19): Xaa is A or G
  MOD_RES (20), (21), (22), (23): Xaa is A or G or is absent
XGXESVAMGRHKRLXXXXXXXXXYYLISTASLKTPVXXAKSAK

SEQ ID NO: 59275 - protein, 36 aa, Artificial Sequence; identical to SEQ ID NO: 3467
  GFR-binding peptide
  MOD_RES (2), (4), (36): Xaa is C or S

SEQ ID NO: 59276 - protein, 32 aa, Artificial Sequence; identical to SEQ ID NO: 24449
  GFR-binding peptide
  MOD_RES (11), (12), (13), (14), (15): Xaa is A or G
  MOD_RES (16), (17), (18), (19): Xaa is A or G or is absent

SEQ ID NO: 59277 - protein, 33 aa, Artificial Sequence; identical to SEQ ID NO: 3471
  GFR-binding peptide
  MOD_RES (2), (2): Xaa is C or S

SEQ ID NO: 59278 - protein, 42 aa, Artificial Sequence; identical to SEQ ID NO: 10888
  GFR-binding peptide
  MOD_RES (1), (3), (37), (38): Xaa is C or S
  MOD_RES (15), (16), (17), (18), (19): Xaa is A or G
  MOD_RES (20), (21), (22), (23): Xaa is A or G or is absent

SEQ ID NO: 59279 - protein, 38 aa, Artificial Sequence; identical to SEQ ID NO: 31444
  GFR-binding peptide
  MOD_RES (33), (33): Xaa is C or S
  MOD_RES (11), (12), (13), (14), (15): Xaa is A or G
  MOD_RES (16), (17), (18), (19): Xaa is A or G or is absent

SEQ ID NO: 59280 - protein, 32 aa, Artificial Sequence; identical to SEQ ID NO: 24453
  GFR-binding peptide
  MOD_RES (1), (1): Xaa is C or S

SEQ ID NO: 59281 - protein, 38 aa, Artificial Sequence; identical to SEQ ID NO: 31446
  GFR-binding peptide
  MOD_RES (2), (34), (35): Xaa is C or S

SEQ ID NO: 59282 - protein, 38 aa, Artificial Sequence; identical to SEQ ID NO: 3473
  GFR-binding peptide
  MOD_RES (1), (3), (35), (36): Xaa is C or S

SEQ ID NO: 59283 - protein, 39 aa, Artificial Sequence; identical to SEQ ID NO: 31447
  GFR-binding peptide
  MOD_RES (35), (36): Xaa is C or S
  MOD_RES (13), (14), (15), (16), (17): Xaa is A or G
  MOD_RES (18), (19), (20), (21): Xaa is A or G or is absent

SEQ ID NO: 59284 - protein, 34 aa, Artificial Sequence; identical to SEQ ID NO: 3474
  GFR-binding peptide
  MOD_RES (2), (33), (34): Xaa is C or S

SEQ ID NO: 59285 - protein, 37 aa, Artificial Sequence; identical to SEQ ID NO: 3475
  GFR-binding peptide
  MOD_RES (34), (35): Xaa is C or S
  MOD_RES (12), (13), (14), (15), (16): Xaa is A or G
  MOD_RES (17), (18), (19), (20): Xaa is A or G or is absent

SEQ ID NO: 59286 - protein, 33 aa, Artificial Sequence; identical to SEQ ID NO: 24456
  GFR-binding peptide
  MOD_RES (12), (13), (14), (15), (16): Xaa is A or G
  MOD_RES (17), (18), (19), (20): Xaa is A or G or is absent

SEQ ID NO: 59287 - protein, 35 aa, Artificial Sequence; identical to SEQ ID NO: 56370
  GFR-binding peptide
  MOD_RES (32), (33): Xaa is C or S

SEQ ID NO: 59288 - protein, 34 aa, Artificial Sequence; identical to SEQ ID NO: 31451
  GFR-binding peptide
  MOD_RES (1), (1): Xaa is C or S
  MOD_RES (13), (14), (15), (16), (17): Xaa is A or G
  MOD_RES (18), (19), (20), (21): Xaa is A or G or is absent

SEQ ID NO: 59289 - protein, 37 aa, Artificial Sequence; identical to SEQ ID NO: 3479
  GFR-binding peptide
  MOD_RES (31), (32): Xaa is C or S

SEQ ID NO: 59290 - protein, 42 aa, Artificial Sequence; identical to SEQ ID NO: 10896
  GFR-binding peptide
  MOD_RES (2), (36), (37): Xaa is C or S
  MOD_RES (14), (15), (16), (17), (18): Xaa is A or G
  MOD_RES (19), (20), (21), (22): Xaa is A or G or is absent

SEQ ID NO: 59291 - protein, 36 aa, Artificial Sequence; identical to SEQ ID NO: 24463
  GFR-binding peptide
  MOD_RES (2), (35), (36): Xaa is C or S
  MOD_RES (13), (14), (15), (16), (17): Xaa is A or G
  MOD_RES (18), (19), (20), (21): Xaa is A or G or is absent

SEQ ID NO: 59292 - protein, 34 aa, Artificial Sequence; identical to SEQ ID NO: 24465
  GFR-binding peptide
  MOD_RES (2), (2): Xaa is C or S
  MOD_RES (13), (14), (15), (16), (17): Xaa is A or G
  MOD_RES (18), (19), (20), (21): Xaa is A or G or is absent

SEQ ID NO: 59293 - protein, 38 aa, Artificial Sequence; identical to SEQ ID NO: 31458
  GFR-binding peptide
  MOD_RES (33), (34): Xaa is C or S
  MOD_RES (11), (12), (13), (14), (15): Xaa is A or G
  MOD_RES (16), (17), (18), (19): Xaa is A or G or is absent

SEQ ID NO: 59294 - protein, 31 aa, Artificial Sequence; identical to SEQ ID NO: 24467
  GFR-binding peptide
  MOD_RES (31), (31): Xaa is C or S

SEQ ID NO: 59295 - protein, 40 aa, Artificial Sequence
  GFR-binding peptide
  MOD_RES (1), (34), (35): Xaa is C or S
  MOD_RES (12), (13), (14), (15), (16): Xaa is A or G
  MOD_RES (17), (18), (19), (20): Xaa is A or G or is absent
XEEVIMEYKFKXXXXXXXXXLYLMSIPETKVPAXXTSPVR

SEQ ID NO: 59296 - protein, 40 aa, Artificial Sequence; identical to SEQ ID NO: 3489
  GFR-binding peptide
  MOD_RES (1), (35), (36): Xaa is C or S
  MOD_RES (13), (14), (15), (16), (17): Xaa is A or G
  MOD_RES (18), (19), (20), (21): Xaa is A or G or is absent

SEQ ID NO: 59297 - protein, 34 aa, Artificial Sequence
  GFR-binding peptide
  MOD_RES (31), (32): Xaa is C or S
DVVMGRHKRLIIQQKDNYYLMSTASMKTPTXXPG

SEQ ID NO: 59298 - protein, 38 aa, Artificial Sequence; identical to SEQ ID NO: 3491
  GFR-binding peptide
  MOD_RES (2), (4), (37), (38): Xaa is C or S
  MOD_RES (15), (16), (17), (18), (19): Xaa is A or G
  MOD_RES (20), (21), (22), (23): Xaa is A or G or is absent

SEQ ID NO: 59299 - protein, 41 aa, Artificial Sequence; identical to SEQ ID NO: 3493
  GFR-binding peptide
  MOD_RES (1), (3), (36), (37): Xaa is C or S
  MOD_RES (14), (15), (16), (17), (18): Xaa is A or G
  MOD_RES (19), (20), (21), (22): Xaa is A or G or is absent

SEQ ID NO: 59300 - protein, 34 aa, Artificial Sequence; identical to SEQ ID NO: 3496
  GFR-binding peptide
  MOD_RES (33), (34): Xaa is C or S
  MOD_RES (11), (12), (13), (14), (15): Xaa is A or G
  MOD_RES (16), (17), (18), (19): Xaa is A or G or is absent

SEQ ID NO: 59301 - protein, 35 aa, Artificial Sequence; identical to SEQ ID NO: 24481
  GFR-binding peptide
  MOD_RES (1), (33), (34): Xaa is C or S

SEQ ID NO: 59302 - protein, 44 aa, Artificial Sequence
  GFR-binding peptide
  MOD_RES (2), (4), (38), (39): Xaa is C or S
  MOD_RES (16), (17), (18), (19), (20): Xaa is A or G
  MOD_RES (21), (22), (23), (24): Xaa is A or G or is absent
RXAXSEVTMNYHYKLXXXXXXXXXKYLISIPSMKEPVXXPEPIG

SEQ ID NO: 59303 - protein, 35 aa, Artificial Sequence
  GFR-binding peptide
  MOD_RES (33), (34): Xaa is C or S
  MOD_RES (11), (12), (13), (14), (15): Xaa is A or G
  MOD_RES (16), (17), (18), (19): Xaa is A or G or is absent
DVVMGYHYKLXXXXXXXXXKYLMSIPSMKTPTXXP

SEQ ID NO: 59304 - protein, 37 aa, Artificial Sequence; identical to SEQ ID NO: 56397
  GFR-binding peptide
  MOD_RES (1), (33), (34): Xaa is C or S

SEQ ID NO: 59305 - protein, 40 aa, Artificial Sequence
  GFR-binding peptide
  MOD_RES (2), (34), (35): Xaa is C or S
GXAEVVMDRHKRLVVNNAADYYLISTASLRAPVXXSAPAA

SEQ ID NO: 59306 - protein, 36 aa, Artificial Sequence; identical to SEQ ID NO: 3500
  GFR-binding peptide
  MOD_RES (34), (35): Xaa is C or S
  MOD_RES (12), (13), (14), (15), (16): Xaa is A or G
  MOD_RES (17), (18), (19), (20): Xaa is A or G or is absent

SEQ ID NO: 59307 - protein, 37 aa, Artificial Sequence; identical to SEQ ID NO: 3501
  GFR-binding peptide
  MOD_RES (1), (3), (34), (35): Xaa is C or S

SEQ ID NO: 59308 - protein, 37 aa, Artificial Sequence; identical to SEQ ID NO: 24486
  GFR-binding peptide
  MOD_RES (1), (3), (37): Xaa is C or S
  MOD_RES (15), (16), (17), (18), (19): Xaa is A or G
  MOD_RES (20), (21), (22), (23): Xaa is A or G or is absent

SEQ ID NO: 59309 - protein, 35 aa, Artificial Sequence; identical to SEQ ID NO: 24488
  GFR-binding peptide
  MOD_RES (2), (4): Xaa is C or S

SEQ ID NO: 59310 - protein, 34 aa, Artificial Sequence
  GFR-binding peptide
  MOD_RES (34), (34): Xaa is C or S
  MOD_RES (12), (13), (14), (15), (16): Xaa is A or G
  MOD_RES (17), (18), (19), (20): Xaa is A or G or is absent
RDVVMGEYKFKXXXXXXXXXLYLMSIPEMKTPTX

SEQ ID NO: 59311 - protein, 35 aa, Artificial Sequence; identical to SEQ ID NO: 10917
  GFR-binding peptide
  MOD_RES (31), (32): Xaa is C or S

SEQ ID NO: 59312 - protein, 40 aa, Artificial Sequence; identical to SEQ ID NO: 3506
  GFR-binding peptide
  MOD_RES (2), (4), (36), (37): Xaa is C or S

SEQ ID NO: 59313 - protein, 33 aa, Artificial Sequence
  GFR-binding peptide
  MOD_RES (12), (13), (14), (15), (16): Xaa is A or G
  MOD_RES (17), (18), (19), (20): Xaa is A or G or is absent
SEVTMNYHYKLXXXXXXXXXKYLISIPSMKEPV

SEQ ID NO: 59314 - protein, 37 aa, Artificial Sequence; identical to SEQ ID NO: 31487
  GFR-binding peptide
  MOD_RES (1), (3), (35), (36): Xaa is C or S

SEQ ID NO: 59315 - protein, 42 aa, Artificial Sequence; identical to SEQ ID NO: 3507
  GFR-binding peptide
  MOD_RES (2), (4), (38), (39): Xaa is C or S
  MOD_RES (16), (17), (18), (19), (20): Xaa is A or G
  MOD_RES (21), (22), (23), (24): Xaa is A or G or is absent

SEQ ID NO: 59316 - protein, 34 aa, Artificial Sequence
  GFR-binding peptide
  MOD_RES (33), (34): Xaa is C or S
  MOD_RES (11), (12), (13), (14), (15): Xaa is A or G
  MOD_RES (16), (17), (18), (19): Xaa is A or G or is absent
EVVMDEYKFKXXXXXXXXXLYLISIPELRTPVXX

SEQ ID NO: 59317 - protein, 39 aa, Artificial Sequence; identical to SEQ ID NO: 24498
  GFR-binding peptide
  MOD_RES (1), (35), (36): Xaa is C or S
  MOD_RES (13), (14), (15), (16), (17): Xaa is A or G
  MOD_RES (18), (19), (20), (21): Xaa is A or G or is absent

SEQ ID NO: 59318 - protein, 40 aa, Artificial Sequence
  GFR-binding peptide
  MOD_RES (2), (4), (35), (36): Xaa is C or S
LXGXEEVIMRHKRLLLVRGNDYYLMSTASTKVPAXXTSPV

SEQ ID NO: 59319 - protein, 40 aa, Artificial Sequence
  GFR-binding peptide
  MOD_RES (34), (35): Xaa is C or S
  MOD_RES (12), (13), (14), (15), (16): Xaa is A or G
  MOD_RES (17), (18), (19), (20): Xaa is A or G or is absent
SEVVMDRHKRLXXXXXXXXXYYLISTASLRTPVXXTPPTS

SEQ ID NO: 59320 - protein, 41 aa, Artificial Sequence
  GFR-binding peptide
  MOD_RES (1), (3), (36), (37): Xaa is C or S
  MOD_RES (14), (15), (16), (17), (18): Xaa is A or G
  MOD_RES (19), (20), (21), (22): Xaa is A or G or is absent
XKXSRVIMPIKGYXXXXXXXXXFYLINIPSLAQPVXXPAAS

SEQ ID NO: 59321 - protein, 34 aa, Artificial Sequence
  GFR-binding peptide
  MOD_RES (2), (2): Xaa is C or S
  MOD_RES (13), (14), (15), (16), (17): Xaa is A or G
  MOD_RES (18), (19), (20), (21): Xaa is A or G or is absent
GXEEVIMRHKRLXXXXXXXXXYYLMSTASTKVPA

SEQ ID NO: 59322 - protein, 38 aa, Artificial Sequence
  GFR-binding peptide
  MOD_RES (2), (34), (35): Xaa is C or S
GXESVAMGRHKRLYTVVGKDYYLISTASLKTPVXXAKS

SEQ ID NO: 59323 - protein, 42 aa, Artificial Sequence; identical to SEQ ID NO: 3521
  GFR-binding peptide
  MOD_RES (2), (4), (36): Xaa is C or S

SEQ ID NO: 59324 - protein, 41 aa, Artificial Sequence; identical to SEQ ID NO: 3522
  GFR-binding peptide
  MOD_RES (2), (4), (37), (38): Xaa is C or S
  MOD_RES (15), (16), (17), (18), (19): Xaa is A or G
  MOD_RES (20), (21), (22), (23): Xaa is A or G or is absent

SEQ ID NO: 59325 - protein, 42 aa, Artificial Sequence; identical to SEQ ID NO: 24509
  GFR-binding peptide
  MOD_RES (2), (36), (37): Xaa is C or S
  MOD_RES (14), (15), (16), (17), (18): Xaa is A or G
  MOD_RES (19), (20), (21), (22): Xaa is A or G or is absent

SEQ ID NO: 59326 - protein, 42 aa, Artificial Sequence
  GFR-binding peptide
  MOD_RES (2), (4), (38), (39): Xaa is C or S
  MOD_RES (16), (17), (18), (19), (20): Xaa is A or G
  MOD_RES (21), (22), (23), (24): Xaa is A or G or is absent
RXGXESVAMGRHKRLXXXXXXXXXYYLISTASLKTPVXXAKS

SEQ ID NO: 59327 - protein, 34 aa, Artificial Sequence
  GFR-binding peptide
  MOD_RES (33), (34): Xaa is C or S
  MOD_RES (11), (12), (13), (14), (15): Xaa is A or G
  MOD_RES (16), (17), (18), (19): Xaa is A or G or is absent
EVVMDRHKRLXXXXXXXXXYYLISTASLRAPVXX

SEQ ID NO: 59328 - protein, 36 aa, Artificial Sequence; identical to SEQ ID NO: 24511
  GFR-binding peptide
  MOD_RES (2), (34), (35): Xaa is C or S

SEQ ID NO: 59329 - protein, 34 aa, Artificial Sequence
  GFR-binding peptide
  MOD_RES (33), (34): Xaa is C or S
  MOD_RES (11), (12), (13), (14), (15): Xaa is A or G
  MOD_RES (16), (17), (18), (19): Xaa is A or G or is absent
EVVMDRHKRLXXXXXXXXXYYLISTASLRTPVXX

SEQ ID NO: 59330 - protein, 32 aa, Artificial Sequence; identical to SEQ ID NO: 3526
  GFR-binding peptide
  MOD_RES (1), (1): Xaa is C or S

SEQ ID NO: 59331 - protein, 38 aa, Artificial Sequence; identical to SEQ ID NO: 24513
  GFR-binding peptide
  MOD_RES (2), (4), (36), (37): Xaa is C or S

SEQ ID NO: 59332 - protein, 41 aa, Artificial Sequence; identical to SEQ ID NO: 24515
  GFR-binding peptide
  MOD_RES (1), (35): Xaa is C or S
  MOD_RES (13), (14), (15), (16), (17): Xaa is A or G
  MOD_RES (18), (19), (20), (21): Xaa is A or G or is absent

SEQ ID NO: 59333 - protein, 35 aa, Artificial Sequence; identical to SEQ ID NO: 24517
  GFR-binding peptide
  MOD_RES (1), (33), (34): Xaa is C or S

SEQ ID NO: 59334 - protein, 32 aa, Artificial Sequence; identical to SEQ ID NO: 56432
  GFR-binding peptide
  MOD_RES (11), (12), (13), (14), (15): Xaa is A or G
  MOD_RES (16), (17), (18), (19): Xaa is A or G or is absent

SEQ ID NO: 59335 - protein, 39 aa, Artificial Sequence; identical to SEQ ID NO: 3531
  GFR-binding peptide
  MOD_RES (2), (35), (36): Xaa is C or S

SEQ ID NO: 59336 - protein, 35 aa, Artificial Sequence; identical to SEQ ID NO: 24520
  GFR-binding peptide
  MOD_RES (32), (33): Xaa is C or S

SEQ ID NO: 59337 - protein, 38 aa, Artificial Sequence; identical to SEQ ID NO: 3532
  GFR-binding peptide
  MOD_RES (34), (35): Xaa is C or S
  MOD_RES (12), (13), (14), (15), (16): Xaa is A or G
  MOD_RES (17), (18), (19), (20): Xaa is A or G or is absent

SEQ ID NO: 59338 - protein, 37 aa, Artificial Sequence; identical to SEQ ID NO: 31511
  GFR-binding peptide
  MOD_RES (1), (3), (37): Xaa is C or S
  MOD_RES (15), (16), (17), (18), (19): Xaa is A or G
  MOD_RES (20), (21), (22), (23): Xaa is A or G or is absent

SEQ ID NO: 59339 - protein, 34 aa, Artificial Sequence; identical to SEQ ID NO: 3536
  GFR-binding peptide
  MOD_RES (1), (34): Xaa is C or S
  MOD_RES (12), (13), (14), (15), (16): Xaa is A or G
  MOD_RES (17), (18), (19), (20): Xaa is A or G or is absent

SEQ ID NO: 59340 - protein, 36 aa, Artificial Sequence
  GFR-binding peptide
  MOD_RES (2), (33), (34): Xaa is C or S
GXEEVIMRHKRLLLVRGNDYYLMSTASTKVPAXXTS

SEQ ID NO: 59341 - protein, 39 aa, Artificial Sequence
  GFR-binding peptide
  MOD_RES (2), (35), (36): Xaa is C or S
  MOD_RES (13), (14), (15), (16), (17): Xaa is A or G
  MOD_RES (18), (19), (20), (21): Xaa is A or G or is absent
KXSKVVMPIKGYXXXXXXXXXFYLINIPSLDQPVXXPSA

SEQ ID NO: 59342 - protein, 31 aa, Artificial Sequence; identical to SEQ ID NO: 56443
  GFR-binding peptide

SEQ ID NO: 59343 - protein, 38 aa, Artificial Sequence
  GFR-binding peptide
  MOD_RES (33), (34): Xaa is C or S
  MOD_RES (11), (12), (13), (14), (15): Xaa is A or G
  MOD_RES (16), (17), (18), (19): Xaa is A or G or is absent
EVVMDRHKRLXXXXXXXXXYYLISTASLRAPVXXSAPA

SEQ ID NO: 59344 - protein, 36 aa, Artificial Sequence
  GFR-binding peptide
  MOD_RES (1), (3), (36): Xaa is C or S
  MOD_RES (14), (15), (16), (17), (18): Xaa is A or G
  MOD_RES (19), (20), (21), (22): Xaa is A or G or is absent
XKXSKVIMPIKGYXXXXXXXXXFYLINIPSLDQSVX

SEQ ID NO: 59345 - protein, 36 aa, Artificial Sequence; identical to SEQ ID NO: 31519
  GFR-binding peptide
  MOD_RES (33), (34): Xaa is C or S
  MOD_RES (11), (12), (13), (14), (15): Xaa is A or G
  MOD_RES (16), (17), (18), (19): Xaa is A or G or is absent

SEQ ID NO: 59346 - protein, 41 aa, Artificial Sequence; identical to SEQ ID NO: 3540
  GFR-binding peptide
  MOD_RES (1), (3), (37): Xaa is C or S
  MOD_RES (15), (16), (17), (18), (19): Xaa is A or G
  MOD_RES (20), (21), (22), (23): Xaa is A or G or is absent

SEQ ID NO: 59347 - protein, 34 aa, Artificial Sequence; identical to SEQ ID NO: 24534
  GFR-binding peptide
  MOD_RES (32), (33): Xaa is C or S

SEQ ID NO: 59348 - protein, 31 aa, Artificial Sequence
  GFR-binding peptide
SEVVMDYHYKLVVNNASDKYLISIPSLRTPV

SEQ ID NO: 59349 - protein, 37 aa, Artificial Sequence; identical to SEQ ID NO: 3544
  GFR-binding peptide
  MOD_RES (2), (36), (37): Xaa is C or S
  MOD_RES (14), (15), (16), (17), (18): Xaa is A or G
  MOD_RES (19), (20), (21), (22): Xaa is A or G or is absent

SEQ ID NO: 59350 - protein, 39 aa, Artificial Sequence
  GFR-binding peptide
  MOD_RES (2), (34), (35): Xaa is C or S
GXRDVVMGRHKRLIIQQKDNYYLMSTASMKTPTXXPGAS

SEQ ID NO: 59351 - protein, 40 aa, Artificial Sequence; identical to SEQ ID NO: 3546
  GFR-binding peptide
  MOD_RES (2), (34), (35): Xaa is C or S

SEQ ID NO: 59352 - protein, 35 aa, Artificial Sequence; identical to SEQ ID NO: 24539
  GFR-binding peptide
  MOD_RES (1), (3), (35): Xaa is C or S

SEQ ID NO: 59353 - protein, 32 aa, Artificial Sequence; identical to SEQ ID NO: 24541
  GFR-binding peptide
  MOD_RES (32), (32): Xaa is C or S

SEQ ID NO: 59354 - protein, 33 aa, Artificial Sequence; identical to SEQ ID NO: 24542
  GFR-binding peptide
  MOD_RES (2), (2): Xaa is C or S

SEQ ID NO: 59355 - protein, 42 aa, Artificial Sequence; identical to SEQ ID NO: 24544
  GFR-binding peptide
  MOD_RES (2), (36), (37): Xaa is C or S
  MOD_RES (14), (15), (16), (17), (18): Xaa is A or G
  MOD_RES (19), (20), (21), (22): Xaa is A or G or is absent

SEQ ID NO: 59356 - protein, 37 aa, Artificial Sequence; identical to SEQ ID NO: 31541
  GFR-binding peptide
  MOD_RES (34), (35): Xaa is C or S
  MOD_RES (12), (13), (14), (15), (16): Xaa is A or G
  MOD_RES (17), (18), (19), (20): Xaa is A or G or is absent

SEQ ID NO: 59357 - protein, 34 aa, Artificial Sequence
  GFR-binding peptide
  MOD_RES (34), (34): Xaa is C or S
  MOD_RES (12), (13), (14), (15), (16): Xaa is A or G
  MOD_RES (17), (18), (19), (20): Xaa is A or G or is absent
RDVVMGYHYKLXXXXXXXXXKYLMSIPSMKTPTX

SEQ ID NO: 59358 - protein, 38 aa, Artificial Sequence; identical to SEQ ID NO: 31544
  GFR-binding peptide
  MOD_RES (2), (4), (38): Xaa is C or S
  MOD_RES (16), (17), (18), (19), (20): Xaa is A or G
  MOD_RES (21), (22), (23), (24): Xaa is A or G or is absent

SEQ ID NO: 59359 - protein, 40 aa, Artificial Sequence; identical to SEQ ID NO: 3550
  GFR-binding peptide
  MOD_RES (2), (4), (38), (39): Xaa is C or S
  MOD_RES (16), (17), (18), (19), (20): Xaa is A or G
  MOD_RES (21), (22), (23), (24): Xaa is A or G or is absent

SEQ ID NO: 59360 - protein, 36 aa, Artificial Sequence; identical to SEQ ID NO: 31548
  GFR-binding peptide
  MOD_RES (2), (4), (35), (36): Xaa is C or S

SEQ ID NO: 59361 - protein, 39 aa, Artificial Sequence; identical to SEQ ID NO: 24554
  GFR-binding peptide
  MOD_RES (2), (36), (37): Xaa is C or S
  MOD_RES (14), (15), (16), (17), (18): Xaa is A or G
  MOD_RES (19), (20), (21), (22): Xaa is A or G or is absent

SEQ ID NO: 59362 - protein, 37 aa, Artificial Sequence; identical to SEQ ID NO: 3552
  GFR-binding peptide
  MOD_RES (2), (4), (37): Xaa is C or S

SEQ ID NO: 59363 - protein, 33 aa, Artificial Sequence; identical to SEQ ID NO: 3553
  GFR-binding peptide
  MOD_RES (2), (2): Xaa is C or S

SEQ ID NO: 59364 - protein, 40 aa, Artificial Sequence; identical to SEQ ID NO: 24559
  GFR-binding peptide
  MOD_RES (1), (3), (37), (38): Xaa is C or S
  MOD_RES (15), (16), (17), (18), (19): Xaa is A or G
  MOD_RES (20), (21), (22), (23): Xaa is A or G or is absent

SEQ ID NO: 59365 - protein, 35 aa, Artificial Sequence; identical to SEQ ID NO: 24561
  GFR-binding peptide
  MOD_RES (1), (33), (34): Xaa is C or S

SEQ ID NO: 59366 - protein, 41 aa, Artificial Sequence
  GFR-binding peptide
  MOD_RES (2), (4), (35), (36): Xaa is C or S
LXGXEEVIMYHYKLLLVRGNDKYLMSIPSTKVPAXXTSPVR

SEQ ID NO: 59367 - protein, 35 aa, Artificial Sequence; identical to SEQ ID NO: 3557
  GFR-binding peptide
  MOD_RES (32), (33): Xaa is C or S

SEQ ID NO: 59368 - protein, 39 aa, Artificial Sequence; identical to SEQ ID NO: 3559
  GFR-binding peptide
  MOD_RES (2), (4), (36), (37): Xaa is C or S

SEQ ID NO: 59369 - protein, 36 aa, Artificial Sequence; identical to SEQ ID NO: 3563
  GFR-binding peptide
  MOD_RES (31), (32): Xaa is C or S

SEQ ID NO: 59370 - protein, 36 aa, Artificial Sequence; identical to SEQ ID NO: 24574
  GFR-binding peptide
  MOD_RES (1), (36): Xaa is C or S
  MOD_RES (14), (15), (16), (17), (18): Xaa is A or G
  MOD_RES (19), (20), (21), (22): Xaa is A or G or is absent

SEQ ID NO: 59371 - protein, 35 aa, Artificial Sequence
  GFR-binding peptide
  MOD_RES (1), (3): Xaa is C or S
  MOD_RES (14), (15), (16), (17), (18): Xaa is A or G
  MOD_RES (19), (20), (21), (22): Xaa is A or G or is absent
XGXEEVIMEYKFKXXXXXXXXXLYLMSIPETKVPA

SEQ ID NO: 59372 - protein, 39 aa, Artificial Sequence; identical to SEQ ID NO: 24578
  GFR-binding peptide
  MOD_RES (2), (33), (34): Xaa is C or S

SEQ ID NO: 59373 - protein, 35 aa, Artificial Sequence; identical to SEQ ID NO: 3566
  GFR-binding peptide
  MOD_RES (1), (33): Xaa is C or S

SEQ ID NO: 59374 - protein, 34 aa, Artificial Sequence; identical to SEQ ID NO: 3569
  GFR-binding peptide
  MOD_RES (33), (33): Xaa is C or S
  MOD_RES (11), (12), (13), (14), (15): Xaa is A or G
  MOD_RES (16), (17), (18), (19): Xaa is A or G or is absent

SEQ ID NO: 59375 - protein, 32 aa, Artificial Sequence
  GFR-binding peptide
  MOD_RES (1), (1): Xaa is C or S
XSEVTMNRHKRLVVNKNEDYYLISTASMKEPV

SEQ ID NO: 59376 - protein, 38 aa, Artificial Sequence; identical to SEQ ID NO: 3573
  GFR-binding peptide
  MOD_RES (2), (4), (35), (36): Xaa is C or S

SEQ ID NO: 59377 - protein, 40 aa, Artificial Sequence; identical to SEQ ID NO: 24582
  GFR-binding peptide
  MOD_RES (2), (34), (35): Xaa is C or S

SEQ ID NO: 59378 - protein, 36 aa, Artificial Sequence; identical to SEQ ID NO: 31579
  GFR-binding peptide
  MOD_RES (33), (34): Xaa is C or S

SEQ ID NO: 59379 - protein, 40 aa, Artificial Sequence; identical to SEQ ID NO: 3576
  GFR-binding peptide
  MOD_RES (2), (36), (37): Xaa is C or S
  MOD_RES (14), (15), (16), (17), (18): Xaa is A or G
  MOD_RES (19), (20), (21), (22): Xaa is A or G or is absent

SEQ ID NO: 59380 - protein, 39 aa, Artificial Sequence; identical to SEQ ID NO: 31580
  GFR-binding peptide
  MOD_RES (2), (4), (38), (39): Xaa is C or S
  MOD_RES (16), (17), (18), (19), (20): Xaa is A or G
  MOD_RES (21), (22), (23), (24): Xaa is A or G or is absent

SEQ ID NO: 59381 - protein, 39 aa, Artificial Sequence; identical to SEQ ID NO: 31581
  GFR-binding peptide
  MOD_RES (1), (3), (35): Xaa is C or S

SEQ ID NO: 59382 - protein, 38 aa, Artificial Sequence; identical to SEQ ID NO: 31582
  GFR-binding peptide
  MOD_RES (34), (35): Xaa is C or S
  MOD_RES (12), (13), (14), (15), (16): Xaa is A or G
  MOD_RES (17), (18), (19), (20): Xaa is A or G or is absent

SEQ ID NO: 59383 - protein, 42 aa, Artificial Sequence; identical to SEQ ID NO: 24589
  GFR-binding peptide
  MOD_RES (1), (3), (37), (38): Xaa is C or S
  MOD_RES (15), (16), (17), (18), (19): Xaa is A or G
  MOD_RES (20), (21), (22), (23): Xaa is A or G or is absent

SEQ ID NO: 59384 - protein, 42 aa, Artificial Sequence
  GFR-binding peptide
  MOD_RES (2), (36), (37): Xaa is C or S
  MOD_RES (14), (15), (16), (17), (18): Xaa is A or G
  MOD_RES (19), (20), (21), (22): Xaa is A or G or is absent
GXSRVVMNEYKFKXXXXXXXXXLYLVSIPELKTPAXXPKPVH

SEQ ID NO: 59385 - protein, 38 aa, Artificial Sequence; identical to SEQ ID NO: 3587
  GFR-binding peptide
  MOD_RES (1), (3), (37), (38): Xaa is C or S
  MOD_RES (15), (16), (17), (18), (19): Xaa is A or G
  MOD_RES (20), (21), (22), (23): Xaa is A or G or is absent

SEQ ID NO: 59386 - protein, 39 aa, Artificial Sequence; identical to SEQ ID NO: 24598
  GFR-binding peptide
  MOD_RES (2), (4), (36), (37): Xaa is C or S

SEQ ID NO: 59387 - protein, 40 aa, Artificial Sequence
  GFR-binding peptide
  MOD_RES (2), (36), (37): Xaa is C or S
  MOD_RES (14), (15), (16), (17), (18): Xaa is A or G
  MOD_RES (19), (20), (21), (22): Xaa is A or G or is absent
AXSEVTMNPIKGYXXXXXXXXXFYLINIPSMKEPVXXPEP

SEQ ID NO: 59388 - protein, 37 aa, Artificial Sequence
  GFR-binding peptide
  MOD_RES (32), (33): Xaa is C or S
SEVVMDYHYKLVVNNASDKYLISIPSLRTPVXXTPPT

SEQ ID NO: 59389 - protein, 33 aa, Artificial Sequence
  GFR-binding peptide
  MOD_RES (2), (33): Xaa is C or S
KXSRVIMPIKGYVKPKRGVFYLINIPSLAQPVX

SEQ ID NO: 59390 - protein, 35 aa, Artificial Sequence
  GFR-binding peptide
  MOD_RES (34), (35): Xaa is C or S
  MOD_RES (12), (13), (14), (15), (16): Xaa is A or G
  MOD_RES (17), (18), (19), (20): Xaa is A or G or is absent
SEVVMDRHKRLXXXXXXXXXYYLISTASLRTPVXX

SEQ ID NO: 59391 - protein, 42 aa, Artificial Sequence; identical to SEQ ID NO: 3595
  GFR-binding peptide
  MOD_RES (1), (3), (36), (37): Xaa is C or S
  MOD_RES (14), (15), (16), (17), (18): Xaa is A or G
  MOD_RES (19), (20), (21), (22): Xaa is A or G or is absent

SEQ ID NO: 59392 - protein, 38 aa, Artificial Sequence
  GFR-binding peptide
  MOD_RES (1), (3), (37), (38): Xaa is C or S
  MOD_RES (15), (16), (17), (18), (19): Xaa is A or G
  MOD_RES (20), (21), (22), (23): Xaa is A or G or is absent
XAXSEVTMNEYKFKXXXXXXXXXLYLISIPEMKEPVXX

SEQ ID NO: 59393 - protein, 36 aa, Artificial Sequence
  GFR-binding peptide
  MOD_RES (31), (32): Xaa is C or S
EVTMNPIKGYVVNKNEDFYLINIPSMKEPVXXPEPI

SEQ ID NO: 59394 - protein, 36 aa, Artificial Sequence; identical to SEQ ID NO: 3597
  GFR-binding peptide
  MOD_RES (1), (3), (35), (36): Xaa is C or S

SEQ ID NO: 59395 - protein, 31 aa, Artificial Sequence
  GFR-binding peptide
SEVVMDEYKFKVVNNASDLYLISIPELRTPV

SEQ ID NO: 59396 - protein, 37 aa, Artificial Sequence
  GFR-binding peptide
  MOD_RES (1), (33), (34): Xaa is C or S
XRDVVMGEYKFKIIQQKDNLYLMSIPEMKTPTXXPGA

SEQ ID NO: 59397 - protein, 34 aa, Artificial Sequence; identical to SEQ ID NO: 24613
  GFR-binding peptide
  MOD_RES (1), (1): Xaa is C or S
  MOD_RES (13), (14), (15), (16), (17): Xaa is A or G
  MOD_RES (18), (19), (20), (21): Xaa is A or G or is absent

SEQ ID NO: 59398 - protein, 39 aa, Artificial Sequence; identical to SEQ ID NO: 3605
  GFR-binding peptide
  MOD_RES (2), (4), (38), (39): Xaa is C or S
  MOD_RES (16), (17), (18), (19), (20): Xaa is A or G
  MOD_RES (21), (22), (23), (24): Xaa is A or G or is absent

SEQ ID NO: 59399 - protein, 37 aa, Artificial Sequence; identical to SEQ ID NO: 3606
  GFR-binding peptide
  MOD_RES (1), (3), (37): Xaa is C or S
  MOD_RES (15), (16), (17), (18), (19): Xaa is A or G
  MOD_RES (20), (21), (22), (23): Xaa is A or G or is absent

SEQ ID NO: 59400 - protein, 39 aa, Artificial Sequence
  GFR-binding peptide
  MOD_RES (2), (34), (35): Xaa is C or S
GXSEVVMDEYKFKVVNNASDLYLISIPELRTPVXXTPPT

SEQ ID NO: 59401 - protein, 36 aa, Artificial Sequence; identical to SEQ ID NO: 56524
  GFR-binding peptide
  MOD_RES (1), (34), (35): Xaa is C or S
  MOD_RES (12), (13), (14), (15), (16): Xaa is A or G
  MOD_RES (17), (18), (19), (20): Xaa is A or G or is absent

SEQ ID NO: 59402 - protein, 37 aa, Artificial Sequence
  GFR-binding peptide
  MOD_RES (1), (3), (37): Xaa is C or S
  MOD_RES (15), (16), (17), (18), (19): Xaa is A or G
  MOD_RES (20), (21), (22), (23): Xaa is A or G or is absent
XAXSEVTMNYHYKLXXXXXXXXXKYLISIPSMKEPVX

SEQ ID NO: 59403 - protein, 32 aa, Artificial Sequence; identical to SEQ ID NO: 31603
  GFR-binding peptide
  MOD_RES (1), (1): Xaa is C or S

SEQ ID NO: 59404 - protein, 34 aa, Artificial Sequence; identical to SEQ ID NO: 24615
  GFR-binding peptide
  MOD_RES (34), (34): Xaa is C or S
  MOD_RES (12), (13), (14), (15), (16): Xaa is A or G
  MOD_RES (17), (18), (19), (20): Xaa is A or G or is absent

SEQ ID NO: 59405 - protein, 38 aa, Artificial Sequence; identical to SEQ ID NO: 3607
  GFR-binding peptide
  MOD_RES (1), (34), (35): Xaa is C or S

SEQ ID NO: 59406 - protein, 41 aa, Artificial Sequence; identical to SEQ ID NO: 3608
  GFR-binding peptide
  MOD_RES (1), (3), (35), (36): Xaa is C or S

SEQ ID NO: 59407 - protein, 39 aa, Artificial Sequence; identical to SEQ ID NO: 3609
  GFR-binding peptide
  MOD_RES (1), (3), (34), (35): Xaa is C or S

SEQ ID NO: 59408 - protein, 38 aa, Artificial Sequence; identical to SEQ ID NO: 31607
  GFR-binding peptide
  MOD_RES (34), (35): Xaa is C or S
  MOD_RES (12), (13), (14), (15), (16): Xaa is A or G
  MOD_RES (17), (18), (19), (20): Xaa is A or G or is absent

SEQ ID NO: 59409 - protein, 44 aa, Artificial Sequence
  GFR-binding peptide
  MOD_RES (2), (4), (38), (39): Xaa is C or S
  MOD_RES (16), (17), (18), (19), (20): Xaa is A or G
  MOD_RES (21), (22), (23), (24): Xaa is A or G or is absent
HXGXSRVVMNYHYKLXXXXXXXXXKYLVSIPSLKTPAXXPKPVH

SEQ ID NO: 59410 - protein, 36 aa, Artificial Sequence; identical to SEQ ID NO: 3610
  GFR-binding peptide
  MOD_RES (31), (32): Xaa is C or S

SEQ ID NO: 59411 - protein, 31 aa, Artificial Sequence; identical to SEQ ID NO: 3611
  GFR-binding peptide

SEQ ID NO: 59412 - protein, 35 aa, Artificial Sequence; identical to SEQ ID NO: 3612
  GFR-binding peptide
  MOD_RES (31), (32): Xaa is C or S

SEQ ID NO: 59413 - protein, 39 aa, Artificial Sequence; identical to SEQ ID NO: 31611
  GFR-binding peptide
  MOD_RES (1), (35), (36): Xaa is C or S
  MOD_RES (13), (14), (15), (16), (17): Xaa is A or G
  MOD_RES (18), (19), (20), (21): Xaa is A or G or is absent

SEQ ID NO: 59414 - protein, 42 aa, Artificial Sequence; identical to SEQ ID NO: 3617
  GFR-binding peptide
  MOD_RES (2), (4), (36), (37): Xaa is C or S

SEQ ID NO: 59415 - protein, 38 aa, Artificial Sequence
  GFR-binding peptide
  MOD_RES (2), (4), (38): Xaa is C or S
  MOD_RES (16), (17), (18), (19), (20): Xaa is A or G
  MOD_RES (21), (22), (23), (24): Xaa is A or G or is absent
RXAXSEVTMNEYKFKXXXXXXXXXLYLISIPEMKEPVX

SEQ ID NO: 59416 - protein, 40 aa, Artificial Sequence; identical to SEQ ID NO: 31615
  GFR-binding peptide
  MOD_RES (2), (4), (38), (39): Xaa is C or S
  MOD_RES (16), (17), (18), (19), (20): Xaa is A or G
  MOD_RES (21), (22), (23), (24): Xaa is A or G or is absent

SEQ ID NO: 59417 - protein, 36 aa, Artificial Sequence
  GFR-binding peptide
  MOD_RES (1), (32), (33): Xaa is C or S
XEEVIMRHKRLLLVRGNDYYLMSTASTKVPAXXTSP

SEQ ID NO: 59418 - protein, 34 aa, Artificial Sequence
  GFR-binding peptide
  MOD_RES (34), (34): Xaa is C or S
  MOD_RES (12), (13), (14), (15), (16): Xaa is A or G
  MOD_RES (17), (18), (19), (20): Xaa is A or G or is absent
SEVVMDRHKRLXXXXXXXXXYYLISTASLRTPVX

SEQ ID NO: 59419 - protein, 33 aa, Artificial Sequence
  GFR-binding peptide
  MOD_RES (1), (33): Xaa is C or S
XRDVVMGYHYKLIIQQKDNKYLMSIPSMKTPTX

SEQ ID NO: 59420 - protein, 43 aa, Artificial Sequence; identical to SEQ ID NO: 3623
  GFR-binding peptide
  MOD_RES (2), (4), (37), (38): Xaa is C or S

SEQ ID NO: 59421 - protein, 36 aa, Artificial Sequence; identical to SEQ ID NO: 31623
  GFR-binding peptide
  MOD_RES (34), (35): Xaa is C or S
  MOD_RES (12), (13), (14), (15), (16): Xaa is A or G
  MOD_RES (17), (18), (19), (20): Xaa is A or G or is absent

SEQ ID NO: 59422 - protein, 33 aa, Artificial Sequence; identical to SEQ ID NO: 24635
  GFR-binding peptide
  MOD_RES (31), (32): Xaa is C or S

SEQ ID NO: 59423 - protein, 33 aa, Artificial Sequence; identical to SEQ ID NO: 3626
  GFR-binding peptide
  MOD_RES (1), (33): Xaa is C or S

SEQ ID NO: 59424 - protein, 37 aa, Artificial Sequence; identical to SEQ ID NO: 3627
  GFR-binding peptide
  MOD_RES (1), (3), (36), (37): Xaa is C or S
  MOD_RES (14), (15), (16), (17), (18): Xaa is A or G
  MOD_RES (19), (20), (21), (22): Xaa is A or G or is absent

SEQ ID NO: 59425 - protein, 37 aa, Artificial Sequence
  GFR-binding peptide
  MOD_RES (31), (32): Xaa is C or S
SVAMGRHKRLYTVVGKDYYLISTASLKTPVXXAKSAK

SEQ ID NO: 59426 - protein, 38 aa, Artificial Sequence; identical to SEQ ID NO: 3630
  GFR-binding peptide
  MOD_RES (33), (34): Xaa is C or S
  MOD_RES (11), (12), (13), (14), (15): Xaa is A or G
  MOD_RES (16), (17), (18), (19): Xaa is A or G or is absent

SEQ ID NO: 59427 - protein, 34 aa, Artificial Sequence; identical to SEQ ID NO: 3631
  GFR-binding peptide
  MOD_RES (1), (33), (34): Xaa is C or S

SEQ ID NO: 59428 - protein, 34 aa, Artificial Sequence; identical to SEQ ID NO: 24645
  GFR-binding peptide
  MOD_RES (32), (33): Xaa is C or S

SEQ ID NO: 59429 - protein, 33 aa, Artificial Sequence; identical to SEQ ID NO: 31637
  GFR-binding peptide
  MOD_RES (1), (3): Xaa is C or S

SEQ ID NO: 59430 - protein, 37 aa, Artificial Sequence; identical to SEQ ID NO: 31640
  GFR-binding peptide
  MOD_RES (32), (33): Xaa is C or S

SEQ ID NO: 59431 - protein, 37 aa, Artificial Sequence; identical to SEQ ID NO: 3634
  GFR-binding peptide
  MOD_RES (1), (3), (34), (35): Xaa is C or S

SEQ ID NO: 59432 - protein, 36 aa, Artificial Sequence
  GFR-binding peptide
  MOD_RES (34), (35): Xaa is C or S
  MOD_RES (12), (13), (14), (15), (16): Xaa is A or G
  MOD_RES (17), (18), (19), (20): Xaa is A or G or is absent
SEVTMNYHYKLXXXXXXXXXKYLISIPSMKEPVXXP

SEQ ID NO: 59433 - protein, 34 aa, Artificial Sequence; identical to SEQ ID NO: 24653
  GFR-binding peptide
  MOD_RES (34), (34): Xaa is C or S
  MOD_RES (12), (13), (14), (15), (16): Xaa is A or G
  MOD_RES (17), (18), (19), (20): Xaa is A or G or is absent

SEQ ID NO: 59434 - protein, 42 aa, Artificial Sequence
  GFR-binding peptide
  MOD_RES (2), (4), (36), (37): Xaa is C or S
SXGXRDVVMGRHKRLIIQQKDNYYLMSTASMKTPTXXPGASG

SEQ ID NO: 59435 - protein, 43 aa, Artificial Sequence
  GFR-binding peptide
  MOD_RES (2), (4), (38), (39): Xaa is C or S
  MOD_RES (16), (17), (18), (19), (20): Xaa is A or G
  MOD_RES (21), (22), (23), (24): Xaa is A or G or is absent
RXAXSEVTMNPIKGYXXXXXXXXXFYLINIPSMKEPVXXPEPI

SEQ ID NO: 59436 - protein, 38 aa, Artificial Sequence; identical to SEQ ID NO: 3641
  GFR-binding peptide
  MOD_RES (1), (3), (38): Xaa is C or S
  MOD_RES (16), (17), (18), (19), (20): Xaa is A or G
  MOD_RES (21), (22), (23), (24): Xaa is A or G or is absent

SEQ ID NO: 59437 - protein, 35 aa, Artificial Sequence
  GFR-binding peptide
  MOD_RES (33), (34): Xaa is C or S
  MOD_RES (11), (12), (13), (14), (15): Xaa is A or G
  MOD_RES (16), (17), (18), (19): Xaa is A or G or is absent
EVTMNRHKRLXXXXXXXXXYYLISTASMKEPVXXP

SEQ ID NO: 59438 - protein, 36 aa, Artificial Sequence
  GFR-binding peptide
  MOD_RES (32), (33): Xaa is C or S
SEVVMDRHKRLVVNNASDYYLISTASLRTPVXXTPP

SEQ ID NO: 59439 - protein, 38 aa, Artificial Sequence; identical to SEQ ID NO: 3644
  GFR-binding peptide
  MOD_RES (1), (33), (34): Xaa is C or S

SEQ ID NO: 59440 - protein, 38 aa, Artificial Sequence; identical to SEQ ID NO: 3648
  GFR-binding peptide
  MOD_RES (2), (36), (37): Xaa is C or S
  MOD_RES (14), (15), (16), (17), (18): Xaa is A or G
  MOD_RES (19), (20), (21), (22): Xaa is A or G or is absent

SEQ ID NO: 59441 - protein, 37 aa, Artificial Sequence
  GFR-binding peptide
  MOD_RES (1), (3), (35), (36): Xaa is C or S
XGXSEVVMDRHKRLVVNNASDYYLISTASLRTPVXXT

SEQ ID NO: 59442 - protein, 33 aa, Artificial Sequence; identical to SEQ ID NO: 24669
  GFR-binding peptide
  MOD_RES (1), (33): Xaa is C or S

SEQ ID NO: 59443 - protein, 33 aa, Artificial Sequence; identical to SEQ ID NO: 24670
  GFR-binding peptide
  MOD_RES (31), (32): Xaa is C or S

SEQ ID NO: 59444 - protein, 37 aa, Artificial Sequence
  GFR-binding peptide
  MOD_RES (2), (33), (34): Xaa is C or S
GXEEVIMYHYKLLLVRGNDKYLMSIPSTKVPAXXTSP

SEQ ID NO: 59445 - protein, 37 aa, Artificial Sequence; identical to SEQ ID NO: 31662
  GFR-binding peptide
  MOD_RES (1), (33), (34): Xaa is C or S

SEQ ID NO: 59446 - protein, 37 aa, Artificial Sequence; identical to SEQ ID NO: 31663
  GFR-binding peptide
  MOD_RES (1), (3), (37): Xaa is C or S
  MOD_RES (15), (16), (17), (18), (19): Xaa is A or G
  MOD_RES (20), (21), (22), (23): Xaa is A or G or is absent

SEQ ID NO: 59447 - protein, 42 aa, Artificial Sequence; identical to SEQ ID NO: 24676
  GFR-binding peptide
  MOD_RES (2), (4), (38), (39): Xaa is C or S
  MOD_RES (16), (17), (18), (19), (20): Xaa is A or G
  MOD_RES (21), (22), (23), (24): Xaa is A or G or is absent

SEQ ID NO: 59448 - protein, 39 aa, Artificial Sequence; identical to SEQ ID NO: 24677
  GFR-binding peptide
  MOD_RES (1), (35), (36): Xaa is C or S
  MOD_RES (13), (14), (15), (16), (17): Xaa is A or G
  MOD_RES (18), (19), (20), (21): Xaa is A or G or is absent

SEQ ID NO: 59449 - protein, 40 aa, Artificial Sequence; identical to SEQ ID NO: 3657
  GFR-binding peptide
  MOD_RES (1), (3), (34), (35): Xaa is C or S

SEQ ID NO: 59450 - protein, 32 aa, Artificial Sequence; identical to SEQ ID NO: 3660
  GFR-binding peptide
  MOD_RES (32), (32): Xaa is C or S

SEQ ID NO: 59451 - protein, 43 aa, Artificial Sequence
  GFR-binding peptide
  MOD_RES (1), (3), (37), (38): Xaa is C or S
  MOD_RES (15), (16), (17), (18), (19): Xaa is A or G
  MOD_RES (20), (21), (22), (23): Xaa is A or G or is absent
XGXAEVVMDRHKRLXXXXXXXXXYYLISTASLRAPVXXSAPAA

SEQ ID NO: 59452 - protein, 35 aa, Artificial Sequence
  GFR-binding peptide
  MOD_RES (31), (32): Xaa is C or S
EVTMNRYKKLVVNKNEDFYLISIANMKEPVXXPEP

SEQ ID NO: 59453 - protein, 38 aa, Artificial Sequence; identical to SEQ ID NO: 31669
  GFR-binding peptide
  MOD_RES (2), (4), (36), (37): Xaa is C or S

SEQ ID NO: 59454 - protein, 40 aa, Artificial Sequence; identical to SEQ ID NO: 24684
  GFR-binding peptide
  MOD_RES (2), (34), (35): Xaa is C or S

SEQ ID NO: 59455 - protein, 35 aa, Artificial Sequence; identical to SEQ ID NO: 3665
  GFR-binding peptide
  MOD_RES (1), (34), (35): Xaa is C or S
  MOD_RES (12), (13), (14), (15), (16): Xaa is A or G
  MOD_RES (17), (18), (19), (20): Xaa is A or G or is absent

SEQ ID NO: 59456 - protein, 36 aa, Artificial Sequence; identical to SEQ ID NO: 3666
  GFR-binding peptide
  MOD_RES (32), (32): Xaa is C or S

SEQ ID NO: 59457 - protein, 34 aa, Artificial Sequence; identical to SEQ ID NO: 24689
  GFR-binding peptide
  MOD_RES (32), (33): Xaa is C or S

SEQ ID NO: 59458 - protein, 35 aa, Artificial Sequence; identical to SEQ ID NO: 24692
  GFR-binding peptide
  MOD_RES (2), (34), (35): Xaa is C or S

SEQ ID NO: 59459 - protein, 32 aa, Artificial Sequence
  GFR-binding peptide
  MOD_RES (2), (2): Xaa is C or S
GXEEVIMEYKFKLLVRGNDLYLMSIPETKVPA

SEQ ID NO: 59460 - protein, 40 aa, Artificial Sequence; identical to SEQ ID NO: 3676
  GFR-binding peptide
  MOD_RES (1), (3), (35), (36): Xaa is C or S

SEQ ID NO: 59461 - protein, 39 aa, Artificial Sequence; identical to SEQ ID NO: 3677
  GFR-binding peptide
  MOD_RES (1), (3), (37), (38): Xaa is C or S
  MOD_RES (15), (16), (17), (18), (19): Xaa is A or G
  MOD_RES (20), (21), (22), (23): Xaa is A or G or is absent

SEQ ID NO: 59462 - protein, 43 aa, Artificial Sequence
  GFR-binding peptide
  MOD_RES (2), (4), (38), (39): Xaa is C or S
  MOD_RES (16), (17), (18), (19), (20): Xaa is A or G
  MOD_RES (21), (22), (23), (24): Xaa is A or G or is absent
RXAXSEVTMNRHKRLXXXXXXXXXYYLISTASMKEPVXXPEPI

SEQ ID NO: 59463 - protein, 37 aa, Artificial Sequence
  GFR-binding peptide
  MOD_RES (2), (4): Xaa is C or S
  MOD_RES (16), (17), (18), (19), (20): Xaa is A or G
  MOD_RES (21), (22), (23), (24): Xaa is A or G or is absent
RXGXSEVVMDYHYKLXXXXXXXXXKYLISIPSLRTPV

SEQ ID NO: 59464 - protein, 32 aa, Artificial Sequence; identical to SEQ ID NO: 31680
  GFR-binding peptide
  MOD_RES (31), (31): Xaa is C or S

SEQ ID NO: 59465 - protein, 36 aa, Artificial Sequence; identical to SEQ ID NO: 3680
  GFR-binding peptide
  MOD_RES (34), (35): Xaa is C or S
  MOD_RES (12), (13), (14), (15), (16): Xaa is A or G
  MOD_RES (17), (18), (19), (20): Xaa is A or G or is absent

SEQ ID NO: 59466 - protein, 39 aa, Artificial Sequence; identical to SEQ ID NO: 3681
  GFR-binding peptide
  MOD_RES (1), (35), (36): Xaa is C or S
  MOD_RES (13), (14), (15), (16), (17): Xaa is A or G
  MOD_RES (18), (19), (20), (21): Xaa is A or G or is absent

SEQ ID NO: 59467 - protein, 36 aa, Artificial Sequence; identical to SEQ ID NO: 24701
  GFR-binding peptide
  MOD_RES (33), (34): Xaa is C or S
  MOD_RES (11), (12), (13), (14), (15): Xaa is A or G
  MOD_RES (16), (17), (18), (19): Xaa is A or G or is absent

SEQ ID NO: 59468 - protein, 35 aa, Artificial Sequence
  GFR-binding peptide
  MOD_RES (33), (34): Xaa is C or S
  MOD_RES (11), (12), (13), (14), (15): Xaa is A or G
  MOD_RES (16), (17), (18), (19): Xaa is A or G or is absent
DVVMGRHKRLXXXXXXXXXYYLMSTASMKTPTXXP

SEQ ID NO: 59469 - protein, 37 aa, Artificial Sequence; identical to SEQ ID NO: 3686
  GFR-binding peptide
  MOD_RES (33), (34): Xaa is C or S
  MOD_RES (11), (12), (13), (14), (15): Xaa is A or G
  MOD_RES (16), (17), (18), (19): Xaa is A or G or is absent

SEQ ID NO: 59470 - protein, 33 aa, Artificial Sequence
  GFR-binding peptide
  MOD_RES (31), (32): Xaa is C or S
EVTMNEYKFKVVNKNEDLYLISIPEMKEPVXXP

SEQ ID NO: 59471 - protein, 39 aa, Artificial Sequence
  GFR-binding peptide
  MOD_RES (2), (4), (36), (37): Xaa is C or S
RXGXSEVVMDYHYKLVVNNASDKYLISIPSLRTPVXXTP

SEQ ID NO: 59472 - protein, 38 aa, Artificial Sequence; identical to SEQ ID NO: 3687
  GFR-binding peptide
  MOD_RES (1), (3), (37), (38): Xaa is C or S
  MOD_RES (15), (16), (17), (18), (19): Xaa is A or G
  MOD_RES (20), (21), (22), (23): Xaa is A or G or is absent

SEQ ID NO: 59473 - protein, 36 aa, Artificial Sequence
  GFR-binding peptide
  MOD_RES (2), (34), (35): Xaa is C or S
GXSEVVMDYHYKLVVNNASDKYLISIPSLRTPVXXT

SEQ ID NO: 59474 - protein, 40 aa, Artificial Sequence; identical to SEQ ID NO: 31691
  GFR-binding peptide
  MOD_RES (2), (34), (35): Xaa is C or S

SEQ ID NO: 59475 - protein, 41 aa, Artificial Sequence; identical to SEQ ID NO: 3690
  GFR-binding peptide
  MOD_RES (1), (35), (36): Xaa is C or S
  MOD_RES (13), (14), (15), (16), (17): Xaa is A or G
  MOD_RES (18), (19), (20), (21): Xaa is A or G or is absent

SEQ ID NO: 59476 - protein, 33 aa, Artificial Sequence; identical to SEQ ID NO: 3694
  GFR-binding peptide
  MOD_RES (12), (13), (14), (15), (16): Xaa is A or G
  MOD_RES (17), (18), (19), (20): Xaa is A or G or is absent

SEQ ID NO: 59477 - protein, 35 aa, Artificial Sequence
  GFR-binding peptide
  MOD_RES (1), (32), (33): Xaa is C or S
XSKVVMPIKGYVKPTRGVFYLINIPSLDQPVXXPS

SEQ ID NO: 59478 - protein, 37 aa, Artificial Sequence; identical to SEQ ID NO: 31698
  GFR-binding peptide
  MOD_RES (2), (34), (35): Xaa is C or S

SEQ ID NO: 59479 - protein, 37 aa, Artificial Sequence; identical to SEQ ID NO: 3697
  GFR-binding peptide
  MOD_RES (31), (32): Xaa is C or S

SEQ ID NO: 59480 - protein, 42 aa, Artificial Sequence
  GFR-binding peptide
  MOD_RES (2), (4), (38), (39): Xaa is C or S
  MOD_RES (16), (17), (18), (19), (20): Xaa is A or G
  MOD_RES (21), (22), (23), (24): Xaa is A or G or is absent
RXAXSEVTMNRYKKLXXXXXXXXXFYLISIANMKEPVXXPEP

SEQ ID NO: 59481 - protein, 41 aa, Artificial Sequence; identical to SEQ ID NO: 3699
  GFR-binding peptide
  MOD_RES (2), (4), (37), (38): Xaa is C or S

SEQ ID NO: 59482 - protein, 34 aa, Artificial Sequence; identical to SEQ ID NO: 24717
  GFR-binding peptide
  MOD_RES (1), (3), (34): Xaa is C or S

SEQ ID NO: 59483 - protein, 31 aa, Artificial Sequence; identical to SEQ ID NO: 3703
  GFR-binding peptide

SEQ ID NO: 59484 - protein, 36 aa, Artificial Sequence; identical to SEQ ID NO: 24719
  GFR-binding peptide
  MOD_RES (32), (32): Xaa is C or S

SEQ ID NO: 59485 - protein, 34 aa, Artificial Sequence; identical to SEQ ID NO: 24720
  GFR-binding peptide
  MOD_RES (32), (33): Xaa is C or S

SEQ ID NO: 59486 - protein, 39 aa, Artificial Sequence; identical to SEQ ID NO: 31709
  GFR-binding peptide
  MOD_RES (1), (3), (35), (36): Xaa is C or S

SEQ ID NO: 59487 - protein, 33 aa, Artificial Sequence; identical to SEQ ID NO: 3706
  GFR-binding peptide
  MOD_RES (32), (33): Xaa is C or S

SEQ ID NO: 59488 - protein, 33 aa, Artificial Sequence; identical to SEQ ID NO: 3708
  GFR-binding peptide
  MOD_RES (33), (33): Xaa is C or S
  MOD_RES (11), (12), (13), (14), (15): Xaa is A or G
  MOD_RES (16), (17), (18), (19): Xaa is A or G or is absent

SEQ ID NO: 59489 - protein, 41 aa, Artificial Sequence; identical to SEQ ID NO: 24728
  GFR-binding peptide
  MOD_RES (1), (3), (37), (38): Xaa is C or S
  MOD_RES (15), (16), (17), (18), (19): Xaa is A or G
  MOD_RES (20), (21), (22), (23): Xaa is A or G or is absent

SEQ ID NO: 59490 - protein, 42 aa, Artificial Sequence; identical to SEQ ID NO: 3709
  GFR-binding peptide
  MOD_RES (2), (4), (39), (40): Xaa is C or S
  MOD_RES (17), (18), (19), (20), (21): Xaa is A or G
  MOD_RES (22), (23), (24), (25): Xaa is A or G or is absent

SEQ ID NO: 59491 - protein, 37 aa, Artificial Sequence; identical to SEQ ID NO: 11136
  GFR-binding peptide
  MOD_RES (2), (36), (37): Xaa is C or S
  MOD_RES (14), (15), (16), (17), (18): Xaa is A or G
  MOD_RES (19), (20), (21), (22): Xaa is A or G or is absent

SEQ ID NO: 59492 - protein, 34 aa, Artificial Sequence; identical to SEQ ID NO: 24732
  GFR-binding peptide
  MOD_RES (32), (33): Xaa is C or S

SEQ ID NO: 59493 - protein, 45 aa, Artificial Sequence; identical to SEQ ID NO: 3713
  GFR-binding peptide
  MOD_RES (2), (4), (39), (40): Xaa is C or S
  MOD_RES (17), (18), (19), (20), (21): Xaa is A or G
  MOD_RES (22), (23), (24), (25): Xaa is A or G or is absent

SEQ ID NO: 59494 - protein, 36 aa, Artificial Sequence; identical to SEQ ID NO: 24735
  GFR-binding peptide
  MOD_RES (33), (34): Xaa is C or S
  MOD_RES (11), (12), (13), (14), (15): Xaa is A or G
  MOD_RES (16), (17), (18), (19): Xaa is A or G or is absent

SEQ ID NO: 59495 - protein, 33 aa, Artificial Sequence
  GFR-binding peptide
  MOD_RES (33), (33): Xaa is C or S
  MOD_RES (11), (12), (13), (14), (15): Xaa is A or G
  MOD_RES (16), (17), (18), (19): Xaa is A or G or is absent
EVVMDEYKFKXXXXXXXXXLYLISIPELRTPVX

SEQ ID NO: 59496 - protein, 38 aa, Artificial Sequence
  GFR-binding peptide
  MOD_RES (2), (4), (38): Xaa is C or S
  MOD_RES (16), (17), (18), (19), (20): Xaa is A or G
  MOD_RES (21), (22), (23), (24): Xaa is A or G or is absent
RXGXSEVVMDRHKRLXXXXXXXXXYYLISTASLRTPVX

SEQ ID NO: 59497 - protein, 35 aa, Artificial Sequence; identical to SEQ ID NO: 3717
  GFR-binding peptide
  MOD_RES (2), (4), (35): Xaa is C or S

SEQ ID NO: 59498 - protein, 36 aa, Artificial Sequence
  GFR-binding peptide
  MOD_RES (1), (35), (36): Xaa is C or S
  MOD_RES (13), (14), (15), (16), (17): Xaa is A or G
  MOD_RES (18), (19), (20), (21): Xaa is A or G or is absent
XSEVTMNPIKGYXXXXXXXXXFYLINIPSMKEPVXX

SEQ ID NO: 59499 - protein, 42 aa, Artificial Sequence; identical to SEQ ID NO: 31730
  GFR-binding peptide
  MOD_RES (2), (4), (38), (39): Xaa is C or S
  MOD_RES (16), (17), (18), (19), (20): Xaa is A or G
  MOD_RES (21), (22), (23), (24): Xaa is A or G or is absent

SEQ ID NO: 59500 - protein, 35 aa, Artificial Sequence; identical to SEQ ID NO: 3718
  GFR-binding peptide
  MOD_RES (1), (3), (35): Xaa is C or S

SEQ ID NO: 59501 - protein, 35 aa, Artificial Sequence
  GFR-binding peptide
  MOD_RES (31), (32): Xaa is C or S
SKVVMPIKGYVKPTRGVFYLINIPSLDQPVXXPSA

SEQ ID NO: 59502 - protein, 35 aa, Artificial Sequence; identical to SEQ ID NO: 3719
  GFR-binding peptide
  MOD_RES (2), (4), (35): Xaa is C or S

SEQ ID NO: 59503 - protein, 40 aa, Artificial Sequence
  GFR-binding peptide
  MOD_RES (1), (3), (34), (35): Xaa is C or S
XKXSRVIMPIKGYVKPKRGVFYLINIPSLAQPVXXPAASA

SEQ ID NO: 59504 - protein, 39 aa, Artificial Sequence; identical to SEQ ID NO: 3720
  GFR-binding peptide
  MOD_RES (2), (4), (38), (39): Xaa is C or S
  MOD_RES (16), (17), (18), (19), (20): Xaa is A or G
  MOD_RES (21), (22), (23), (24): Xaa is A or G or is absent

SEQ ID NO: 59505 - protein, 39 aa, Artificial Sequence; identical to SEQ ID NO: 3722
  GFR-binding peptide
  MOD_RES (2), (34), (35): Xaa is C or S

SEQ ID NO: 59506 - protein, 32 aa, Artificial Sequence; identical to SEQ ID NO: 31739
  GFR-binding peptide
  MOD_RES (1), (1): Xaa is C or S

SEQ ID NO: 59507 - protein, 42 aa, Artificial Sequence
  GFR-binding peptide
  MOD_RES (2), (4), (37), (38): Xaa is C or S
  MOD_RES (15), (16), (17), (18), (19): Xaa is A or G
  MOD_RES (20), (21), (22), (23): Xaa is A or G or is absent
SXKXSKVVMPIKGYXXXXXXXXXFYLINIPSLDQPVXXPSAS

SEQ ID NO: 59508 - protein, 34 aa, Artificial Sequence
  GFR-binding peptide
  MOD_RES (1), (1): Xaa is C or S
  MOD_RES (13), (14), (15), (16), (17): Xaa is A or G
  MOD_RES (18), (19), (20), (21): Xaa is A or G or is absent
XSEVTMNEYKFKXXXXXXXXXLYLISIPEMKEPV

SEQ ID NO: 59509 - protein, 40 aa, Artificial Sequence; identical to SEQ ID NO: 3727
  GFR-binding peptide
  MOD_RES (1), (3), (35): Xaa is C or S

SEQ ID NO: 59510 - protein, 39 aa, Artificial Sequence; identical to SEQ ID NO: 31741
  GFR-binding peptide
  MOD_RES (2), (4), (35), (36): Xaa is C or S

SEQ ID NO: 59511 - protein, 34 aa, Artificial Sequence; identical to SEQ ID NO: 24750
  GFR-binding peptide
  MOD_RES (1), (33), (34): Xaa is C or S

SEQ ID NO: 59512 - protein, 40 aa, Artificial Sequence
  GFR-binding peptide
  MOD_RES (1), (3), (34), (35): Xaa is C or S
XGXEEVIMEYKFKLLVRGNDLYLMSIPETKVPAXXTSPVR

SEQ ID NO: 59513 - protein, 41 aa, Artificial Sequence
  GFR-binding peptide
  MOD_RES (1), (3), (37), (38): Xaa is C or S
  MOD_RES (15), (16), (17), (18), (19): Xaa is A or G
  MOD_RES (20), (21), (22), (23): Xaa is A or G or is absent
XGXAEVVMDRHKRLXXXXXXXXXYYLISTASLRAPVXXSAP

SEQ ID NO: 59514 - protein, 40 aa, Artificial Sequence; identical to SEQ ID NO: 3730
  GFR-binding peptide
  MOD_RES (2), (4), (36), (37): Xaa is C or S

SEQ ID NO: 59515 - protein, 42 aa, Artificial Sequence
  GFR-binding peptide
  MOD_RES (2), (4), (38), (39): Xaa is C or S
  MOD_RES (16), (17), (18), (19), (20): Xaa is A or G
  MOD_RES (21), (22), (23), (24): Xaa is A or G or is absent
RXAXSEVTMNEYKFKXXXXXXXXXLYLISIPEMKEPVXXPEP

SEQ ID NO: 59516 - protein, 37 aa, Artificial Sequence; identical to SEQ ID NO: 3733
  GFR-binding peptide
  MOD_RES (2), (36), (37): Xaa is C or S
  MOD_RES (14), (15), (16), (17), (18): Xaa is A or G
  MOD_RES (19), (20), (21), (22): Xaa is A or G or is absent

SEQ ID NO: 59517 - protein, 34 aa, Artificial Sequence
  GFR-binding peptide
  MOD_RES (2), (2): Xaa is C or S
  MOD_RES (13), (14), (15), (16), (17): Xaa is A or G
  MOD_RES (18), (19), (20), (21): Xaa is A or G or is absent
KXSKVVMPIKGYXXXXXXXXXFYLINIPSLDQPV

SEQ ID NO: 59518 - protein, 39 aa, Artificial Sequence
  GFR-binding peptide
  MOD_RES (34), (35): Xaa is C or S
  MOD_RES (12), (13), (14), (15), (16): Xaa is A or G
  MOD_RES (17), (18), (19), (20): Xaa is A or G or is absent
RDVVMGYHYKLXXXXXXXXXKYLMSIPSMKTPTXXPGAS

SEQ ID NO: 59519 - protein, 38 aa, Artificial Sequence
  GFR-binding peptide
  MOD_RES (2), (4), (37), (38): Xaa is C or S
  MOD_RES (15), (16), (17), (18), (19): Xaa is A or G
  MOD_RES (20), (21), (22), (23): Xaa is A or G or is absent
SXKXSKVIMPIKGYXXXXXXXXXFYLINIPSLDQSVXX

SEQ ID NO: 59520 - protein, 37 aa, Artificial Sequence; identical to SEQ ID NO: 3736
  GFR-binding peptide
  MOD_RES (31), (31): Xaa is C or S

SEQ ID NO: 59521 - protein, 33 aa, Artificial Sequence; identical to SEQ ID NO: 3737
  GFR-binding peptide
  MOD_RES (1), (1): Xaa is C or S

SEQ ID NO: 59522 - protein, 38 aa, Artificial Sequence; identical to SEQ ID NO: 31752
  GFR-binding peptide
  MOD_RES (2), (36), (37): Xaa is C or S
  MOD_RES (14), (15), (16), (17), (18): Xaa is A or G
  MOD_RES (19), (20), (21), (22): Xaa is A or G or is absent

SEQ ID NO: 59523 - protein, 37 aa, Artificial Sequence; identical to SEQ ID NO: 3739
  GFR-binding peptide
  MOD_RES (35), (36): Xaa is C or S
  MOD_RES (13), (14), (15), (16), (17): Xaa is A or G
  MOD_RES (18), (19), (20), (21): Xaa is A or G or is absent

SEQ ID NO: 59524 - protein, 38 aa, Artificial Sequence; identical to SEQ ID NO: 3740
  GFR-binding peptide
  MOD_RES (2), (35), (36): Xaa is C or S

SEQ ID NO: 59525 - protein, 41 aa, Artificial Sequence
  GFR-binding peptide
  MOD_RES (2), (4), (38), (39): Xaa is C or S
  MOD_RES (16), (17), (18), (19), (20): Xaa is A or G
  MOD_RES (21), (22), (23), (24): Xaa is A or G or is absent
RXAXSEVTMNRHKRLXXXXXXXXXYYLISTASMKEPVXXPE

SEQ ID NO: 59526 - protein, 32 aa, Artificial Sequence; identical to SEQ ID NO: 24768
  GFR-binding peptide
  MOD_RES (31), (32): Xaa is C or S

SEQ ID NO: 59527 - protein, 39 aa, Artificial Sequence; identical to SEQ ID NO: 31760
  GFR-binding peptide
  MOD_RES (1), (3), (37), (38): Xaa is C or S
  MOD_RES (15), (16), (17), (18), (19): Xaa is A or G
  MOD_RES (20), (21), (22), (23): Xaa is A or G or is absent

SEQ ID NO: 59528 - protein, 33 aa, Artificial Sequence; identical to SEQ ID NO: 24777
  GFR-binding peptide
  MOD_RES (1), (1): Xaa is C or S

SEQ ID NO: 59529 - protein, 34 aa, Artificial Sequence
  GFR-binding peptide
  MOD_RES (31), (32): Xaa is C or S
DVVMGYHYKLIIQQKDNKYLMSIPSMKTPTXXPG

SEQ ID NO: 59530 - protein, 34 aa, Artificial Sequence
  GFR-binding peptide
  MOD_RES (2), (34): Xaa is C or S
GXESVAMGRHKRLYTVVGKDYYLISTASLKTPVX

SEQ ID NO: 59531 - protein, 35 aa, Artificial Sequence
  GFR-binding peptide
  MOD_RES (2), (35): Xaa is C or S
  MOD_RES (13), (14), (15), (16), (17): Xaa is A or G
  MOD_RES (18), (19), (20), (21): Xaa is A or G or is absent
GXEEVIMRHKRLXXXXXXXXXYYLMSTASTKVPAX

SEQ ID NO: 59532 - protein, 42 aa, Artificial Sequence; identical to SEQ ID NO: 31771
  GFR-binding peptide
  MOD_RES (1), (3), (37), (38): Xaa is C or S
  MOD_RES (15), (16), (17), (18), (19): Xaa is A or G
  MOD_RES (20), (21), (22), (23): Xaa is A or G or is absent

SEQ ID NO: 59533 - protein, 35 aa, Artificial Sequence; identical to SEQ ID NO: 31772
  GFR-binding peptide
  MOD_RES (1), (35): Xaa is C or S
  MOD_RES (13), (14), (15), (16), (17): Xaa is A or G
  MOD_RES (18), (19), (20), (21): Xaa is A or G or is absent

SEQ ID NO: 59534 - protein, 34 aa, Artificial Sequence; identical to SEQ ID NO: 3753
  GFR-binding peptide
  MOD_RES (1), (3): Xaa is C or S

SEQ ID NO: 59535 - protein, 36 aa, Artificial Sequence; identical to SEQ ID NO: 31773
  GFR-binding peptide
  MOD_RES (2), (34), (35): Xaa is C or S

SEQ ID NO: 59536 - protein, 35 aa, Artificial Sequence
  GFR-binding peptide
  MOD_RES (2), (2): Xaa is C or S
  MOD_RES (14), (15), (16), (17), (18): Xaa is A or G
  MOD_RES (19), (20), (21), (22): Xaa is A or G or is absent
GXRDVVMGEYKFKXXXXXXXXXLYLMSIPEMKTPT

SEQ ID NO: 59537 - protein, 35 aa, Artificial Sequence; identical to SEQ ID NO: 24785
  GFR-binding peptide
  MOD_RES (1), (33), (34): Xaa is C or S

SEQ ID NO: 59538 - protein, 37 aa, Artificial Sequence; identical to SEQ ID NO: 24786
  GFR-binding peptide
  MOD_RES (34), (35): Xaa is C or S
  MOD_RES (12), (13), (14), (15), (16): Xaa is A or G
  MOD_RES (17), (18), (19), (20): Xaa is A or G or is absent

SEQ ID NO: 59539 - protein, 34 aa, Artificial Sequence; identical to SEQ ID NO: 56717
  GFR-binding peptide
  MOD_RES (1), (3): Xaa is C or S

SEQ ID NO: 59540 - protein, 38 aa, Artificial Sequence; identical to SEQ ID NO: 3758
  GFR-binding peptide
  MOD_RES (2), (4), (38): Xaa is C or S
  MOD_RES (16), (17), (18), (19), (20): Xaa is A or G
  MOD_RES (21), (22), (23), (24): Xaa is A or G or is absent

SEQ ID NO: 59541 - protein, 37 aa, Artificial Sequence; identical to SEQ ID NO: 3761
  GFR-binding peptide
  MOD_RES (31), (32): Xaa is C or S

SEQ ID NO: 59542 - protein, 37 aa, Artificial Sequence; identical to SEQ ID NO: 3768
  GFR-binding peptide
  MOD_RES (33), (34): Xaa is C or S
  MOD_RES (11), (12), (13), (14), (15): Xaa is A or G
  MOD_RES (16), (17), (18), (19): Xaa is A or G or is absent

SEQ ID NO: 59543 - protein, 40 aa, Artificial Sequence; identical to SEQ ID NO: 3769
  GFR-binding peptide
  MOD_RES (35), (36): Xaa is C or S
  MOD_RES (13), (14), (15), (16), (17): Xaa is A or G
  MOD_RES (18), (19), (20), (21): Xaa is A or G or is absent

SEQ ID NO: 59544 - protein, 38 aa, Artificial Sequence; identical to SEQ ID NO: 3773
  GFR-binding peptide
  MOD_RES (2), (35), (36): Xaa is C or S
  MOD_RES (13), (14), (15), (16), (17): Xaa is A or G
  MOD_RES (18), (19), (20), (21): Xaa is A or G or is absent

SEQ ID NO: 59545 - protein, 38 aa, Artificial Sequence; identical to SEQ ID NO: 3774
  GFR-binding peptide
  MOD_RES (2), (34), (35): Xaa is C or S

SEQ ID NO: 59546 - protein, 40 aa, Artificial Sequence; identical to SEQ ID NO: 3776
  GFR-binding peptide
  MOD_RES (1), (3), (35), (36): Xaa is C or S

SEQ ID NO: 59547 - protein, 38 aa, Artificial Sequence
  GFR-binding peptide
  MOD_RES (34), (35): Xaa is C or S
  MOD_RES (12), (13), (14), (15), (16): Xaa is A or G
  MOD_RES (17), (18), (19), (20): Xaa is A or G or is absent
SEVVMDRHKRLXXXXXXXXXYYLISTASLRTPVXXTPP

SEQ ID NO: 59548 - protein, 36 aa, Artificial Sequence; identical to SEQ ID NO: 3778
  GFR-binding peptide
  MOD_RES (2), (4), (36): Xaa is C or S

SEQ ID NO: 59549 - protein, 33 aa, Artificial Sequence; identical to SEQ ID NO: 24806
  GFR-binding peptide
  MOD_RES (31), (32): Xaa is C or S

SEQ ID NO: 59550 - protein, 32 aa, Artificial Sequence; identical to SEQ ID NO: 24810
  GFR-binding peptide
  MOD_RES (11), (12), (13), (14), (15): Xaa is A or G
  MOD_RES (16), (17), (18), (19): Xaa is A or G or is absent

SEQ ID NO: 59551 - protein, 41 aa, Artificial Sequence; identical to SEQ ID NO: 3784
  GFR-binding peptide
  MOD_RES (2), (4), (36), (37): Xaa is C or S

SEQ ID NO: 59552 - protein, 36 aa, Artificial Sequence; identical to SEQ ID NO: 3786
  GFR-binding peptide
  MOD_RES (1), (3): Xaa is C or S
  MOD_RES (15), (16), (17), (18), (19): Xaa is A or G
  MOD_RES (20), (21), (22), (23): Xaa is A or G or is absent

SEQ ID NO: 59553 - protein, 38 aa, Artificial Sequence; identical to SEQ ID NO: 56755
  GFR-binding peptide
  MOD_RES (1), (3), (36), (37): Xaa is C or S
  MOD_RES (14), (15), (16), (17), (18): Xaa is A or G
  MOD_RES (19), (20), (21), (22): Xaa is A or G or is absent

SEQ ID NO: 59554 - protein, 35 aa, Artificial Sequence; identical to SEQ ID NO: 3787
  GFR-binding peptide
  MOD_RES (1), (3), (35): Xaa is C or S

SEQ ID NO: 59555 - protein, 40 aa, Artificial Sequence; identical to SEQ ID NO: 11215
  GFR-binding peptide
  MOD_RES (1), (35), (36): Xaa is C or S
  MOD_RES (13), (14), (15), (16), (17): Xaa is A or G
  MOD_RES (18), (19), (20), (21): Xaa is A or G or is absent

SEQ ID NO: 59556 - protein, 41 aa, Artificial Sequence; identical to SEQ ID NO: 31798
  GFR-binding peptide
  MOD_RES (2), (4), (36): Xaa is C or S

SEQ ID NO: 59557 - protein, 33 aa, Artificial Sequence; identical to SEQ ID NO: 24819
  GFR-binding peptide
  MOD_RES (33), (33): Xaa is C or S
  MOD_RES (11), (12), (13), (14), (15): Xaa is A or G
  MOD_RES (16), (17), (18), (19): Xaa is A or G or is absent

SEQ ID NO: 59558 - protein, 33 aa, Artificial Sequence
  GFR-binding peptide
  MOD_RES (33), (33): Xaa is C or S
  MOD_RES (11), (12), (13), (14), (15): Xaa is A or G
  MOD_RES (16), (17), (18), (19): Xaa is A or G or is absent
EVTMNRYKKLXXXXXXXXXFYLISIANMKEPVX

SEQ ID NO: 59559 - protein, 37 aa, Artificial Sequence; identical to SEQ ID NO: 3791
  GFR-binding peptide
  MOD_RES (1), (3), (35), (36): Xaa is C or S

SEQ ID NO: 59560 - protein, 33 aa, Artificial Sequence
  GFR-binding peptide
  MOD_RES (32), (33): Xaa is C or S
RDVVMGYHYKLIIQQKDNKYLMSIPSMKTPTXX

SEQ ID NO: 59561 - protein, 38 aa, Artificial Sequence; identical to SEQ ID NO: 3793
  GFR-binding peptide
  MOD_RES (33), (34): Xaa is C or S
  MOD_RES (11), (12), (13), (14), (15): Xaa is A or G
  MOD_RES (16), (17), (18), (19): Xaa is A or G or is absent

SEQ ID NO: 59562 - protein, 37 aa, Artificial Sequence; identical to SEQ ID NO: 24822
  GFR-binding peptide
  MOD_RES (1), (3), (35), (36): Xaa is C or S

SEQ ID NO: 59563 - protein, 38 aa, Artificial Sequence
  GFR-binding peptide
  MOD_RES (2), (4), (38): Xaa is C or S
  MOD_RES (16), (17), (18), (19), (20): Xaa is A or G
  MOD_RES (21), (22), (23), (24): Xaa is A or G or is absent
RXGXSEVVMDEYKFKXXXXXXXXXLYLISIPELRTPVX

SEQ ID NO: 59564 - protein, 43 aa, Artificial Sequence; identical to SEQ ID NO: 3796
  GFR-binding peptide
  MOD_RES (1), (3), (37), (38): Xaa is C or S
  MOD_RES (15), (16), (17), (18), (19): Xaa is A or G
  MOD_RES (20), (21), (22), (23): Xaa is A or G or is absent

SEQ ID NO: 59565 - protein, 32 aa, Artificial Sequence; identical to SEQ ID NO: 31805
  GFR-binding peptide
  MOD_RES (1), (1): Xaa is C or S

SEQ ID NO: 59566 - protein, 37 aa, Artificial Sequence; identical to SEQ ID NO: 11220
  GFR-binding peptide
  MOD_RES (33), (34): Xaa is C or S
  MOD_RES (11), (12), (13), (14), (15): Xaa is A or G
  MOD_RES (16), (17), (18), (19): Xaa is A or G or is absent

SEQ ID NO: 59567 - protein, 34 aa, Artificial Sequence
  GFR-binding peptide
  MOD_RES (2), (34): Xaa is C or S
GXSEVVMDYHYKLVVNNASDKYLISIPSLRTPVX

SEQ ID NO: 59568 - protein, 38 aa, Artificial Sequence; identical to SEQ ID NO: 31808
  GFR-binding peptide
  MOD_RES (33), (34): Xaa is C or S
  MOD_RES (11), (12), (13), (14), (15): Xaa is A or G
  MOD_RES (16), (17), (18), (19): Xaa is A or G or is absent

SEQ ID NO: 59569 - protein, 39 aa, Artificial Sequence
  GFR-binding peptide
  MOD_RES (34), (35): Xaa is C or S
  MOD_RES (12), (13), (14), (15), (16): Xaa is A or G
  MOD_RES (17), (18), (19), (20): Xaa is A or G or is absent
RDVVMGEYKFKXXXXXXXXXLYLMSIPEMKTPTXXPGAS

SEQ ID NO: 59570 - protein, 40 aa, Artificial Sequence; identical to SEQ ID NO: 3798
  GFR-binding peptide
  MOD_RES (2), (4), (35), (36): Xaa is C or S

SEQ ID NO: 59571 - protein, 35 aa, Artificial Sequence
  GFR-binding peptide
  MOD_RES (1), (34), (35): Xaa is C or S
  MOD_RES (12), (13), (14), (15), (16): Xaa is A or G
  MOD_RES (17), (18), (19), (20): Xaa is A or G or is absent
XSKVVMPIKGYXXXXXXXXXFYLINIPSLDQPVXX

SEQ ID NO: 59572 - protein, 37 aa, Artificial Sequence
  GFR-binding peptide
  MOD_RES (2), (4), (36), (37): Xaa is C or S
RXGXSEVVMDYHYKLVVNNASDKYLISIPSLRTPVXX

SEQ ID NO: 59573 - protein, 33 aa, Artificial Sequence; identical to SEQ ID NO: 3799
  GFR-binding peptide
  MOD_RES (33), (33): Xaa is C or S
  MOD_RES (11), (12), (13), (14), (15): Xaa is A or G
  MOD_RES (16), (17), (18), (19): Xaa is A or G or is absent

SEQ ID NO: 59574 - protein, 36 aa, Artificial Sequence
  GFR-binding peptide
  MOD_RES (1), (33), (34): Xaa is C or S
XESVAMGRHKRLYTVVGKDYYLISTASLKTPVXXAK

SEQ ID NO: 59575 - protein, 34 aa, Artificial Sequence; identical to SEQ ID NO: 3800
  GFR-binding peptide
  MOD_RES (33), (33): Xaa is C or S
  MOD_RES (11), (12), (13), (14), (15): Xaa is A or G
  MOD_RES (16), (17), (18), (19): Xaa is A or G or is absent

SEQ ID NO: 59576 - protein, 35 aa, Artificial Sequence; identical to SEQ ID NO: 3802
  GFR-binding peptide
  MOD_RES (2), (4): Xaa is C or S

SEQ ID NO: 59577 - protein, 43 aa, Artificial Sequence
  GFR-binding peptide
  MOD_RES (2), (4), (37), (38): Xaa is C or S
  MOD_RES (15), (16), (17), (18), (19): Xaa is A or G
  MOD_RES (20), (21), (22), (23): Xaa is A or G or is absent
SXKXSKVIMPIKGYXXXXXXXXXFYLINIPSLDQSVXXPSASA

SEQ ID NO: 59578 - protein, 39 aa, Artificial Sequence; identical to SEQ ID NO: 24832
  GFR-binding peptide
  MOD_RES (2), (36), (37): Xaa is C or S
  MOD_RES (14), (15), (16), (17), (18): Xaa is A or G
  MOD_RES (19), (20), (21), (22): Xaa is A or G or is absent

SEQ ID NO: 59579 - protein, 38 aa, Artificial Sequence; identical to SEQ ID NO: 24833
  GFR-binding peptide
  MOD_RES (2), (34), (35): Xaa is C or S

SEQ ID NO: 59580 - protein, 36 aa, Artificial Sequence; identical to SEQ ID NO: 24834
  GFR-binding peptide
  MOD_RES (2), (2): Xaa is C or S
  MOD_RES (15), (16), (17), (18), (19): Xaa is A or G
  MOD_RES (20), (21), (22), (23): Xaa is A or G or is absent

SEQ ID NO: 59581 - protein, 34 aa, Artificial Sequence; identical to SEQ ID NO: 31815
  GFR-binding peptide
  MOD_RES (32), (33): Xaa is C or S

SEQ ID NO: 59582 - protein, 38 aa, Artificial Sequence; identical to SEQ ID NO: 31823
  GFR-binding peptide
  MOD_RES (32), (33): Xaa is C or S

SEQ ID NO: 59583 - protein, 35 aa, Artificial Sequence; identical to SEQ ID NO: 3809
  GFR-binding peptide
  MOD_RES (1), (34), (35): Xaa is C or S
  MOD_RES (12), (13), (14), (15), (16): Xaa is A or G
  MOD_RES (17), (18), (19), (20): Xaa is A or G or is absent

SEQ ID NO: 59584 - protein, 35 aa, Artificial Sequence
  GFR-binding peptide
  MOD_RES (2), (34), (35): Xaa is C or S
AXSEVTMNYHYKLVVNKNEDKYLISIPSMKEPVXX

SEQ ID NO: 59585 - protein, 39 aa, Artificial Sequence; identical to SEQ ID NO: 24839
  GFR-binding peptide
  MOD_RES (2), (36), (37): Xaa is C or S
  MOD_RES (14), (15), (16), (17), (18): Xaa is A or G
  MOD_RES (19), (20), (21), (22): Xaa is A or G or is absent

SEQ ID NO: 59586 - protein, 35 aa, Artificial Sequence; identical to SEQ ID NO: 24840
  GFR-binding peptide
  MOD_RES (2), (35): Xaa is C or S
  MOD_RES (13), (14), (15), (16), (17): Xaa is A or G
  MOD_RES (18), (19), (20), (21): Xaa is A or G or is absent

SEQ ID NO: 59587 - protein, 38 aa, Artificial Sequence; identical to SEQ ID NO: 3813
  GFR-binding peptide
  MOD_RES (2), (33), (34): Xaa is C or S

SEQ ID NO: 59588 - protein, 36 aa, Artificial Sequence; identical to SEQ ID NO: 24841
  GFR-binding peptide
  MOD_RES (1), (32), (33): Xaa is C or S

SEQ ID NO: 59589 - protein, 40 aa, Artificial Sequence; identical to SEQ ID NO: 3814
  GFR-binding peptide
  MOD_RES (1), (3), (35), (36): Xaa is C or S

SEQ ID NO: 59590 - protein, 41 aa, Artificial Sequence
  GFR-binding peptide
  MOD_RES (2), (4), (35), (36): Xaa is C or S
SXKXSRVIMPIKGYVKPKRGVFYLINIPSLAQPVXXPAASA

SEQ ID NO: 59591 - protein, 41 aa, Artificial Sequence; identical to SEQ ID NO: 24846
  GFR-binding peptide
  MOD_RES (1), (3), (35), (36): Xaa is C or S

SEQ ID NO: 59592 - protein, 34 aa, Artificial Sequence; identical to SEQ ID NO: 31840
  GFR-binding peptide
  MOD_RES (1), (3): Xaa is C or S

SEQ ID NO: 59593 - protein, 37 aa, Artificial Sequence; identical to SEQ ID NO: 24847
  GFR-binding peptide
  MOD_RES (31), (32): Xaa is C or S

SEQ ID NO: 59594 - protein, 39 aa, Artificial Sequence; identical to SEQ ID NO: 24849
  GFR-binding peptide
  MOD_RES (2), (34), (35): Xaa is C or S

SEQ ID NO: 59595 - protein, 35 aa, Artificial Sequence; identical to SEQ ID NO: 24854
  GFR-binding peptide
  MOD_RES (2), (34), (35): Xaa is C or S

SEQ ID NO: 59596 - protein, 40 aa, Artificial Sequence
  GFR-binding peptide
  MOD_RES (1), (34), (35): Xaa is C or S
  MOD_RES (12), (13), (14), (15), (16): Xaa is A or G
  MOD_RES (17), (18), (19), (20): Xaa is A or G or is absent
XSKVVMPIKGYXXXXXXXXXFYLINIPSLDQPVXXPSASA

SEQ ID NO: 59597 - protein, 38 aa, Artificial Sequence; identical to SEQ ID NO: 3822
  GFR-binding peptide
  MOD_RES (1), (32), (33): Xaa is C or S

SEQ ID NO: 59598 - protein, 41 aa, Artificial Sequence; identical to SEQ ID NO: 31847
  GFR-binding peptide
  MOD_RES (1), (3), (35), (36): Xaa is C or S

SEQ ID NO: 59599 - protein, 39 aa, Artificial Sequence
  GFR-binding peptide
  MOD_RES (34), (35): Xaa is C or S
  MOD_RES (12), (13), (14), (15), (16): Xaa is A or G
  MOD_RES (17), (18), (19), (20): Xaa is A or G or is absent
SEVVMDRHKRLXXXXXXXXXYYLISTASLRTPVXXTPPT

SEQ ID NO: 59600 - protein, 35 aa, Artificial Sequence; identical to SEQ ID NO: 3825
  GFR-binding peptide
  MOD_RES (31), (32): Xaa is C or S

SEQ ID NO: 59601 - protein, 36 aa, Artificial Sequence; identical to SEQ ID NO: 56797
  GFR-binding peptide
  MOD_RES (2), (33), (34): Xaa is C or S

SEQ ID NO: 59602 - protein, 36 aa, Artificial Sequence
  GFR-binding peptide
  MOD_RES (2), (36): Xaa is C or S
  MOD_RES (14), (15), (16), (17), (18): Xaa is A or G
  MOD_RES (19), (20), (21), (22): Xaa is A or G or is absent
AXSEVTMNPIKGYXXXXXXXXXFYLINIPSMKEPVX

SEQ ID NO: 59603 - protein, 43 aa, Artificial Sequence; identical to SEQ ID NO: 24863
  GFR-binding peptide
  MOD_RES (2), (4), (38), (39): Xaa is C or S
  MOD_RES (16), (17), (18), (19), (20): Xaa is A or G
  MOD_RES (21), (22), (23), (24): Xaa is A or G or is absent

SEQ ID NO: 59604 - protein, 39 aa, Artificial Sequence; identical to SEQ ID NO: 31854
  GFR-binding peptide
  MOD_RES (2), (34), (35): Xaa is C or S

SEQ ID NO: 59605 - protein, 37 aa, Artificial Sequence; identical to SEQ ID NO: 31858
  GFR-binding peptide
  MOD_RES (2), (4), (36), (37): Xaa is C or S

SEQ ID NO: 59606 - protein, 37 aa, Artificial Sequence; identical to SEQ ID NO: 24869
  GFR-binding peptide
  MOD_RES (34), (35): Xaa is C or S
  MOD_RES (12), (13), (14), (15), (16): Xaa is A or G
  MOD_RES (17), (18), (19), (20): Xaa is A or G or is absent

SEQ ID NO: 59607 - protein, 34 aa, Artificial Sequence; identical to SEQ ID NO: 24870
  GFR-binding peptide
  MOD_RES (33), (33): Xaa is C or S
  MOD_RES (11), (12), (13), (14), (15): Xaa is A or G
  MOD_RES (16), (17), (18), (19): Xaa is A or G or is absent

SEQ ID NO: 59608 - protein, 43 aa, Artificial Sequence; identical to SEQ ID NO: 31862
  GFR-binding peptide
  MOD_RES (2), (4), (37), (38): Xaa is C or S
  MOD_RES (15), (16), (17), (18), (19): Xaa is A or G
  MOD_RES (20), (21), (22), (23): Xaa is A or G or is absent

SEQ ID NO: 59609 - protein, 33 aa, Artificial Sequence
  GFR-binding peptide
  MOD_RES (31), (32): Xaa is C or S
EVTMNYHYKLVVNKNEDKYLISIPSMKEPVXXP

SEQ ID NO: 59610 - protein, 34 aa, Artificial Sequence; identical to SEQ ID NO: 31863
  GFR-binding peptide
  MOD_RES (1), (33), (34): Xaa is C or S

SEQ ID NO: 59611 - protein, 40 aa, Artificial Sequence; identical to SEQ ID NO: 24877
  GFR-binding peptide
  MOD_RES (2), (36): Xaa is C or S
  MOD_RES (14), (15), (16), (17), (18): Xaa is A or G
  MOD_RES (19), (20), (21), (22): Xaa is A or G or is absent

SEQ ID NO: 59612 - protein, 41 aa, Artificial Sequence; identical to SEQ ID NO: 31867
  GFR-binding peptide
  MOD_RES (2), (4), (38), (39): Xaa is C or S
  MOD_RES (16), (17), (18), (19), (20): Xaa is A or G
  MOD_RES (21), (22), (23), (24): Xaa is A or G or is absent

SEQ ID NO: 59613 - protein, 36 aa, Artificial Sequence; identical to SEQ ID NO: 3833
  GFR-binding peptide
  MOD_RES (1), (35), (36): Xaa is C or S
  MOD_RES (13), (14), (15), (16), (17): Xaa is A or G
  MOD_RES (18), (19), (20), (21): Xaa is A or G or is absent

SEQ ID NO: 59614 - protein, 33 aa, Artificial Sequence; identical to SEQ ID NO: 31868
  GFR-binding peptide
  MOD_RES (31), (32): Xaa is C or S

SEQ ID NO: 59615 - protein, 39 aa, Artificial Sequence; identical to SEQ ID NO: 3834
  GFR-binding peptide
  MOD_RES (33), (34): Xaa is C or S
  MOD_RES (11), (12), (13), (14), (15): Xaa is A or G
  MOD_RES (16), (17), (18), (19): Xaa is A or G or is absent

SEQ ID NO: 59616 - protein, 40 aa, Artificial Sequence; identical to SEQ ID NO: 24879
  GFR-binding peptide
  MOD_RES (2), (4), (38), (39): Xaa is C or S
  MOD_RES (16), (17), (18), (19), (20): Xaa is A or G
  MOD_RES (21), (22), (23), (24): Xaa is A or G or is absent

SEQ ID NO: 59617 - protein, 36 aa, Artificial Sequence; identical to SEQ ID NO: 31869
  GFR-binding peptide
  MOD_RES (2), (4), (36): Xaa is C or S

SEQ ID NO: 59618 - protein, 36 aa, Artificial Sequence; identical to SEQ ID NO: 31870
  GFR-binding peptide
  MOD_RES (1), (3), (36): Xaa is C or S
  MOD_RES (14), (15), (16), (17), (18): Xaa is A or G
  MOD_RES (19), (20), (21), (22): Xaa is A or G or is absent

SEQ ID NO: 59619 - protein, 35 aa, Artificial Sequence
  GFR-binding peptide
  MOD_RES (33), (34): Xaa is C or S
  MOD_RES (11), (12), (13), (14), (15): Xaa is A or G
  MOD_RES (16), (17), (18), (19): Xaa is A or G or is absent
EVTMNYHYKLXXXXXXXXXKYLISIPSMKEPVXXP

SEQ ID NO: 59620 - protein, 38 aa, Artificial Sequence; identical to SEQ ID NO: 31872
  GFR-binding peptide
  MOD_RES (2), (4), (38): Xaa is C or S
  MOD_RES (16), (17), (18), (19), (20): Xaa is A or G
  MOD_RES (21), (22), (23), (24): Xaa is A or G or is absent

SEQ ID NO: 59621 - protein, 38 aa, Artificial Sequence; identical to SEQ ID NO: 3839
  GFR-binding peptide
  MOD_RES (1), (33), (34): Xaa is C or S

SEQ ID NO: 59622 - protein, 37 aa, Artificial Sequence
  GFR-binding peptide
  MOD_RES (2), (35), (36): Xaa is C or S
  MOD_RES (13), (14), (15), (16), (17): Xaa is A or G
  MOD_RES (18), (19), (20), (21): Xaa is A or G or is absent
GXEEVIMEYKFKXXXXXXXXXLYLMSIPETKVPAXXT

SEQ ID NO: 59623 - protein, 35 aa, Artificial Sequence; identical to SEQ ID NO: 3844
  GFR-binding peptide
  MOD_RES (1), (33): Xaa is C or S

SEQ ID NO: 59624 - protein, 40 aa, Artificial Sequence
  GFR-binding peptide
  MOD_RES (2), (4), (36), (37): Xaa is C or S
RXGXAEVVMDRHKRLVVNNAADYYLISTASLRAPVXXSAP

SEQ ID NO: 59625 - protein, 39 aa, Artificial Sequence; identical to SEQ ID NO: 31887
  GFR-binding peptide
  MOD_RES (1), (3), (37), (38): Xaa is C or S
  MOD_RES (15), (16), (17), (18), (19): Xaa is A or G
  MOD_RES (20), (21), (22), (23): Xaa is A or G or is absent

SEQ ID NO: 59626 - protein, 36 aa, Artificial Sequence; identical to SEQ ID NO: 3849
  GFR-binding peptide
  MOD_RES (33), (34): Xaa is C or S
  MOD_RES (11), (12), (13), (14), (15): Xaa is A or G
  MOD_RES (16), (17), (18), (19): Xaa is A or G or is absent

SEQ ID NO: 59627 - protein, 31 aa, Artificial Sequence; identical to SEQ ID NO: 24908
  GFR-binding peptide

SEQ ID NO: 59628 - protein, 34 aa, Artificial Sequence
  GFR-binding peptide
  MOD_RES (33), (34): Xaa is C or S
  MOD_RES (11), (12), (13), (14), (15): Xaa is A or G
  MOD_RES (16), (17), (18), (19): Xaa is A or G or is absent
DVVMGYHYKLXXXXXXXXXKYLMSIPSMKTPTXX

SEQ ID NO: 59629 - protein, 41 aa, Artificial Sequence; identical to SEQ ID NO: 3850
  GFR-binding peptide
  MOD_RES (2), (36), (37): Xaa is C or S
  MOD_RES (14), (15), (16), (17), (18): Xaa is A or G
  MOD_RES (19), (20), (21), (22): Xaa is A or G or is absent

SEQ ID NO: 59630 - protein, 41 aa, Artificial Sequence
  GFR-binding peptide
  MOD_RES (2), (4), (38), (39): Xaa is C or S
  MOD_RES (16), (17), (18), (19), (20): Xaa is A or G
  MOD_RES (21), (22), (23), (24): Xaa is A or G or is absent
SXGXRDVVMGRHKRLXXXXXXXXXYYLMSTASMKTPTXXPG

SEQ ID NO: 59631 - protein, 37 aa, Artificial Sequence
  GFR-binding peptide
  MOD_RES (1), (35), (36): Xaa is C or S
  MOD_RES (13), (14), (15), (16), (17): Xaa is A or G
  MOD_RES (18), (19), (20), (21): Xaa is A or G or is absent
XSEVTMNRYKKLXXXXXXXXXFYLISIANMKEPVXXP

SEQ ID NO: 59632 - protein, 38 aa, Artificial Sequence; identical to SEQ ID NO: 24915
  GFR-binding peptide
  MOD_RES (2), (4), (36), (37): Xaa is C or S

SEQ ID NO: 59633 - protein, 42 aa, Artificial Sequence; identical to SEQ ID NO: 24916
  GFR-binding peptide
  MOD_RES (2), (4), (38), (39): Xaa is C or S
  MOD_RES (16), (17), (18), (19), (20): Xaa is A or G
  MOD_RES (21), (22), (23), (24): Xaa is A or G or is absent

SEQ ID NO: 59634 - protein, 38 aa, Artificial Sequence; identical to SEQ ID NO: 31899
  GFR-binding peptide
  MOD_RES (1), (33), (34): Xaa is C or S

SEQ ID NO: 59635 - protein, 39 aa, Artificial Sequence
  GFR-binding peptide
  MOD_RES (2), (4), (36), (37): Xaa is C or S
SXGXRDVVMGYHYKLIIQQKDNKYLMSIPSMKTPTXXPG

SEQ ID NO: 59636 - protein, 31 aa, Artificial Sequence; identical to SEQ ID NO: 24919
  GFR-binding peptide
  MOD_RES (1), (1): Xaa is C or S

SEQ ID NO: 59637 - protein, 37 aa, Artificial Sequence; identical to SEQ ID NO: 3856
  GFR-binding peptide
  MOD_RES (2), (34), (35): Xaa is C or S

SEQ ID NO: 59638 - protein, 38 aa, Artificial Sequence; identical to SEQ ID NO: 3857
  GFR-binding peptide
  MOD_RES (2), (36), (37): Xaa is C or S
  MOD_RES (14), (15), (16), (17), (18): Xaa is A or G
  MOD_RES (19), (20), (21), (22): Xaa is A or G or is absent

SEQ ID NO: 59639 - protein, 36 aa, Artificial Sequence
  GFR-binding peptide
  MOD_RES (1), (3), (34), (35): Xaa is C or S
XKXSRVIMPIKGYVKPKRGVFYLINIPSLAQPVXXP

SEQ ID NO: 59640 - protein, 40 aa, Artificial Sequence; identical to SEQ ID NO: 3861
  GFR-binding peptide
  MOD_RES (34), (35): Xaa is C or S
  MOD_RES (12), (13), (14), (15), (16): Xaa is A or G
  MOD_RES (17), (18), (19), (20): Xaa is A or G or is absent

SEQ ID NO: 59641 - protein, 37 aa, Artificial Sequence; identical to SEQ ID NO: 24929
  GFR-binding peptide
  MOD_RES (1), (3), (37): Xaa is C or S
  MOD_RES (15), (16), (17), (18), (19): Xaa is A or G
  MOD_RES (20), (21), (22), (23): Xaa is A or G or is absent

SEQ ID NO: 59642 - protein, 36 aa, Artificial Sequence
  GFR-binding peptide
  MOD_RES (34), (35): Xaa is C or S
  MOD_RES (12), (13), (14), (15), (16): Xaa is A or G
  MOD_RES (17), (18), (19), (20): Xaa is A or G or is absent
RDVVMGEYKFKXXXXXXXXXLYLMSIPEMKTPTXXP

SEQ ID NO: 59643 - protein, 42 aa, Artificial Sequence; identical to SEQ ID NO: 3866
  GFR-binding peptide
  MOD_RES (2), (4), (37), (38): Xaa is C or S
  MOD_RES (15), (16), (17), (18), (19): Xaa is A or G
  MOD_RES (20), (21), (22), (23): Xaa is A or G or is absent

SEQ ID NO: 59644 - protein, 40 aa, Artificial Sequence; identical to SEQ ID NO: 24935
  GFR-binding peptide
  MOD_RES (2), (4), (38), (39): Xaa is C or S
  MOD_RES (16), (17), (18), (19), (20): Xaa is A or G
  MOD_RES (21), (22), (23), (24): Xaa is A or G or is absent

SEQ ID NO: 59645 - protein, 40 aa, Artificial Sequence; identical to SEQ ID NO: 24936
  GFR-binding peptide
  MOD_RES (2), (4), (39), (40): Xaa is C or S
  MOD_RES (17), (18), (19), (20), (21): Xaa is A or G
  MOD_RES (22), (23), (24), (25): Xaa is A or G or is absent

SEQ ID NO: 59646 - protein, 35 aa, Artificial Sequence
  GFR-binding peptide
  MOD_RES (34), (35): Xaa is C or S
  MOD_RES (12), (13), (14), (15), (16): Xaa is A or G
  MOD_RES (17), (18), (19), (20): Xaa is A or G or is absent
RDVVMGEYKFKXXXXXXXXXLYLMSIPEMKTPTXX

SEQ ID NO: 59647 - protein, 33 aa, Artificial Sequence; identical to SEQ ID NO: 3869
  GFR-binding peptide
  MOD_RES (2), (33): Xaa is C or S

SEQ ID NO: 59648 - protein, 43 aa, Artificial Sequence
  GFR-binding peptide
  MOD_RES (2), (4), (37), (38): Xaa is C or S
  MOD_RES (15), (16), (17), (18), (19): Xaa is A or G
  MOD_RES (20), (21), (22), (23): Xaa is A or G or is absent
LXGXEEVIMYHYKLXXXXXXXXXKYLMSIPSTKVPAXXTSPVR

SEQ ID NO: 59649 - protein, 39 aa, Artificial Sequence; identical to SEQ ID NO: 3870
  GFR-binding peptide
  MOD_RES (1), (3), (35), (36): Xaa is C or S

SEQ ID NO: 59650 - protein, 41 aa, Artificial Sequence; identical to SEQ ID NO: 3872
  GFR-binding peptide
  MOD_RES (2), (36), (37): Xaa is C or S
  MOD_RES (14), (15), (16), (17), (18): Xaa is A or G
  MOD_RES (19), (20), (21), (22): Xaa is A or G or is absent

SEQ ID NO: 59651 - protein, 37 aa, Artificial Sequence; identical to SEQ ID NO: 3874
  GFR-binding peptide
  MOD_RES (1), (3), (36), (37): Xaa is C or S
  MOD_RES (14), (15), (16), (17), (18): Xaa is A or G
  MOD_RES (19), (20), (21), (22): Xaa is A or G or is absent

SEQ ID NO: 59652 - protein, 35 aa, Artificial Sequence; identical to SEQ ID NO: 24945
  GFR-binding peptide
  MOD_RES (2), (4): Xaa is C or S

SEQ ID NO: 59653 - protein, 33 aa, Artificial Sequence; identical to SEQ ID NO: 24946
  GFR-binding peptide
  MOD_RES (2), (2): Xaa is C or S

SEQ ID NO: 59654 - protein, 36 aa, Artificial Sequence; identical to SEQ ID NO: 31922
  GFR-binding peptide
  MOD_RES (31), (32): Xaa is C or S

SEQ ID NO: 59655 - protein, 39 aa, Artificial Sequence
  GFR-binding peptide
  MOD_RES (2), (35), (36): Xaa is C or S
  MOD_RES (13), (14), (15), (16), (17): Xaa is A or G
  MOD_RES (18), (19), (20), (21): Xaa is A or G or is absent
GXEEVIMYHYKLXXXXXXXXXKYLMSIPSTKVPAXXTSP

SEQ ID NO: 59656 - protein, 40 aa, Artificial Sequence; identical to SEQ ID NO: 24951
  GFR-binding peptide
  MOD_RES (1), (3), (37): Xaa is C or S
  MOD_RES (15), (16), (17), (18), (19): Xaa is A or G
  MOD_RES (20), (21), (22), (23): Xaa is A or G or is absent

SEQ ID NO: 59657 - protein, 40 aa, Artificial Sequence
  GFR-binding peptide
  MOD_RES (2), (35), (36): Xaa is C or S
  MOD_RES (13), (14), (15), (16), (17): Xaa is A or G
  MOD_RES (18), (19), (20), (21): Xaa is A or G or is absent
GXEEVIMRHKRLXXXXXXXXXYYLMSTASTKVPAXXTSPV

SEQ ID NO: 59658 - protein, 33 aa, Artificial Sequence; identical to SEQ ID NO: 3881
  GFR-binding peptide
  MOD_RES (31), (32): Xaa is C or S

SEQ ID NO: 59659 - protein, 36 aa, Artificial Sequence; identical to SEQ ID NO: 3882
  GFR-binding peptide
  MOD_RES (31), (32): Xaa is C or S

SEQ ID NO: 59660 - protein, 40 aa, Artificial Sequence; identical to SEQ ID NO: 3884
  GFR-binding peptide
  MOD_RES (1), (3), (37), (38): Xaa is C or S
  MOD_RES (15), (16), (17), (18), (19): Xaa is A or G
  MOD_RES (20), (21), (22), (23): Xaa is A or G or is absent

SEQ ID NO: 59661 - protein, 36 aa, Artificial Sequence; identical to SEQ ID NO: 24957
  GFR-binding peptide
  MOD_RES (33), (34): Xaa is C or S
  MOD_RES (11), (12), (13), (14), (15): Xaa is A or G
  MOD_RES (16), (17), (18), (19): Xaa is A or G or is absent

SEQ ID NO: 59662 - protein, 35 aa, Artificial Sequence
  GFR-binding peptide
  MOD_RES (1), (3), (34), (35): Xaa is C or S
XGXEEVIMEYKFKLLVRGNDLYLMSIPETKVPAXX

SEQ ID NO: 59663 - protein, 38 aa, Artificial Sequence; identical to SEQ ID NO: 31937
  GFR-binding peptide
  MOD_RES (2), (34): Xaa is C or S

SEQ ID NO: 59664 - protein, 34 aa, Artificial Sequence; identical to SEQ ID NO: 3889
  GFR-binding peptide
  MOD_RES (1), (1): Xaa is C or S
  MOD_RES (13), (14), (15), (16), (17): Xaa is A or G
  MOD_RES (18), (19), (20), (21): Xaa is A or G or is absent

SEQ ID NO: 59665 - protein, 38 aa, Artificial Sequence; identical to SEQ ID NO: 3890
  GFR-binding peptide
  MOD_RES (1), (35): Xaa is C or S
  MOD_RES (13), (14), (15), (16), (17): Xaa is A or G
  MOD_RES (18), (19), (20), (21): Xaa is A or G or is absent

SEQ ID NO: 59666 - protein, 37 aa, Artificial Sequence; identical to SEQ ID NO: 3891
  GFR-binding peptide
  MOD_RES (2), (4), (35), (36): Xaa is C or S

SEQ ID NO: 59667 - protein, 39 aa, Artificial Sequence; identical to SEQ ID NO: 24967
  GFR-binding peptide
  MOD_RES (2), (4), (35), (36): Xaa is C or S

SEQ ID NO: 59668 - protein, 42 aa, Artificial Sequence; identical to SEQ ID NO: 3893
  GFR-binding peptide
  MOD_RES (2), (4), (39), (40): Xaa is C or S
  MOD_RES (17), (18), (19), (20), (21): Xaa is A or G
  MOD_RES (22), (23), (24), (25): Xaa is A or G or is absent

SEQ ID NO: 59669 - protein, 35 aa, Artificial Sequence; identical to SEQ ID NO: 24968
  GFR-binding peptide
  MOD_RES (1), (33), (34): Xaa is C or S

SEQ ID NO: 59670 - protein, 42 aa, Artificial Sequence; identical to SEQ ID NO: 31943
  GFR-binding peptide
  MOD_RES (1), (3), (37): Xaa is C or S
  MOD_RES (15), (16), (17), (18), (19): Xaa is A or G
  MOD_RES (20), (21), (22), (23): Xaa is A or G or is absent

SEQ ID NO: 59671 - protein, 37 aa, Artificial Sequence; identical to SEQ ID NO: 24970
  GFR-binding peptide
  MOD_RES (35), (36): Xaa is C or S
  MOD_RES (13), (14), (15), (16), (17): Xaa is A or G
  MOD_RES (18), (19), (20), (21): Xaa is A or G or is absent

SEQ ID NO: 59672 - protein, 36 aa, Artificial Sequence; identical to SEQ ID NO: 31945
  GFR-binding peptide
  MOD_RES (2), (36): Xaa is C or S
  MOD_RES (14), (15), (16), (17), (18): Xaa is A or G
  MOD_RES (19), (20), (21), (22): Xaa is A or G or is absent

SEQ ID NO: 59673 - protein, 36 aa, Artificial Sequence; identical to SEQ ID NO: 24974
  GFR-binding peptide
  MOD_RES (2), (36): Xaa is C or S
  MOD_RES (14), (15), (16), (17), (18): Xaa is A or G
  MOD_RES (19), (20), (21), (22): Xaa is A or G or is absent

SEQ ID NO: 59674 - protein, 34 aa, Artificial Sequence; identical to SEQ ID NO: 31948
  GFR-binding peptide
  MOD_RES (1), (33), (34): Xaa is C or S

SEQ ID NO: 59675 - protein, 38 aa, Artificial Sequence; identical to SEQ ID NO: 31953
  GFR-binding peptide
  MOD_RES (1), (35), (36): Xaa is C or S
  MOD_RES (13), (14), (15), (16), (17): Xaa is A or G
  MOD_RES (18), (19), (20), (21): Xaa is A or G or is absent

SEQ ID NO: 59676 - protein, 44 aa, Artificial Sequence; identical to SEQ ID NO: 24978
  GFR-binding peptide
  MOD_RES (2), (4), (38): Xaa is C or S
  MOD_RES (16), (17), (18), (19), (20): Xaa is A or G
  MOD_RES (21), (22), (23), (24): Xaa is A or G or is absent

SEQ ID NO: 59677 - protein, 42 aa, Artificial Sequence; identical to SEQ ID NO: 24979
  GFR-binding peptide
  MOD_RES (1), (3), (37), (38): Xaa is C or S
  MOD_RES (15), (16), (17), (18), (19): Xaa is A or G
  MOD_RES (20), (21), (22), (23): Xaa is A or G or is absent

SEQ ID NO: 59678 - protein, 36 aa, Artificial Sequence; identical to SEQ ID NO: 3899
  GFR-binding peptide
  MOD_RES (2), (34), (35): Xaa is C or S

SEQ ID NO: 59679 - protein, 36 aa, Artificial Sequence; identical to SEQ ID NO: 3902
  GFR-binding peptide
  MOD_RES (1), (33), (34): Xaa is C or S

SEQ ID NO: 59680 - protein, 32 aa, Artificial Sequence; identical to SEQ ID NO: 31958
  GFR-binding peptide
  MOD_RES (1), (1): Xaa is C or S

SEQ ID NO: 59681 - protein, 37 aa, Artificial Sequence
  GFR-binding peptide
  MOD_RES (1), (3), (35), (36): Xaa is C or S
XGXAEVVMDRHKRLVVNNAADYYLISTASLRAPVXXS

SEQ ID NO: 59682 - protein, 39 aa, Artificial Sequence; identical to SEQ ID NO: 31960
  GFR-binding peptide
  MOD_RES (34), (35): Xaa is C or S
  MOD_RES (12), (13), (14), (15), (16): Xaa is A or G
  MOD_RES (17), (18), (19), (20): Xaa is A or G or is absent

SEQ ID NO: 59683 - protein, 40 aa, Artificial Sequence; identical to SEQ ID NO: 31963
  GFR-binding peptide
  MOD_RES (1), (3), (37), (38): Xaa is C or S
  MOD_RES (15), (16), (17), (18), (19): Xaa is A or G
  MOD_RES (20), (21), (22), (23): Xaa is A or G or is absent

SEQ ID NO: 59684 - protein, 33 aa, Artificial Sequence; identical to SEQ ID NO: 31964
  GFR-binding peptide
  MOD_RES (1), (33): Xaa is C or S

SEQ ID NO: 59685 - protein, 32 aa, Artificial Sequence; identical to SEQ ID NO: 3905
  GFR-binding peptide
  MOD_RES (1), (1): Xaa is C or S

SEQ ID NO: 59686 - protein, 39 aa, Artificial Sequence; identical to SEQ ID NO: 3906
  GFR-binding peptide
  MOD_RES (1), (3), (36), (37): Xaa is C or S
  MOD_RES (14), (15), (16), (17), (18): Xaa is A or G
  MOD_RES (19), (20), (21), (22): Xaa is A or G or is absent

SEQ ID NO: 59687 - protein, 35 aa, Artificial Sequence; identical to SEQ ID NO: 3910
  GFR-binding peptide
  MOD_RES (31), (32): Xaa is C or S

SEQ ID NO: 59688 - protein, 41 aa, Artificial Sequence; identical to SEQ ID NO: 3911
  GFR-binding peptide
  MOD_RES (2), (35), (36): Xaa is C or S
  MOD_RES (13), (14), (15), (16), (17): Xaa is A or G
  MOD_RES (18), (19), (20), (21): Xaa is A or G or is absent

SEQ ID NO: 59689 - protein, 36 aa, Artificial Sequence
  GFR-binding peptide
  MOD_RES (2), (33), (34): Xaa is C or S
GXEEVIMYHYKLLLVRGNDKYLMSIPSTKVPAXXTS

SEQ ID NO: 59690 - protein, 41 aa, Artificial Sequence; identical to SEQ ID NO: 3912
  GFR-binding peptide
  MOD_RES (2), (35), (36): Xaa is C or S
  MOD_RES (13), (14), (15), (16), (17): Xaa is A or G
  MOD_RES (18), (19), (20), (21): Xaa is A or G or is absent

SEQ ID NO: 59691 - protein, 33 aa, Artificial Sequence; identical to SEQ ID NO: 3913
  GFR-binding peptide
  MOD_RES (31), (32): Xaa is C or S

SEQ ID NO: 59692 - protein, 36 aa, Artificial Sequence
  GFR-binding peptide
  MOD_RES (32), (33): Xaa is C or S
RDVVMGEYKFKIIQQKDNLYLMSIPEMKTPTXXPGA

SEQ ID NO: 59693 - protein, 37 aa, Artificial Sequence
  GFR-binding peptide
  MOD_RES (1), (33), (34): Xaa is C or S
XSEVTMNPIKGYVVNKNEDFYLINIPSMKEPVXXPEP

SEQ ID NO: 59694 - protein, 35 aa, Artificial Sequence; identical to SEQ ID NO: 3916
  GFR-binding peptide
  MOD_RES (1), (34), (35): Xaa is C or S

SEQ ID NO: 59695 - protein, 37 aa, Artificial Sequence; identical to SEQ ID NO: 3917
  GFR-binding peptide
  MOD_RES (33), (34): Xaa is C or S
  MOD_RES (11), (12), (13), (14), (15): Xaa is A or G
  MOD_RES (16), (17), (18), (19): Xaa is A or G or is absent

SEQ ID NO: 59696 - protein, 39 aa, Artificial Sequence; identical to SEQ ID NO: 3918
  GFR-binding peptide
  MOD_RES (33), (34): Xaa is C or S
  MOD_RES (11), (12), (13), (14), (15): Xaa is A or G
  MOD_RES (16), (17), (18), (19): Xaa is A or G or is absent

SEQ ID NO: 59697 - protein, 36 aa, Artificial Sequence; identical to SEQ ID NO: 3924
  GFR-binding peptide
  MOD_RES (1), (35), (36): Xaa is C or S
  MOD_RES (13), (14), (15), (16), (17): Xaa is A or G
  MOD_RES (18), (19), (20), (21): Xaa is A or G or is absent

SEQ ID NO: 59698 - protein, 36 aa, Artificial Sequence; identical to SEQ ID NO: 3925
  GFR-binding peptide
  MOD_RES (31), (32): Xaa is C or S

SEQ ID NO: 59699 - protein, 40 aa, Artificial Sequence; identical to SEQ ID NO: 3926
  GFR-binding peptide
  MOD_RES (2), (4), (38), (39): Xaa is C or S
  MOD_RES (16), (17), (18), (19), (20): Xaa is A or G
  MOD_RES (21), (22), (23), (24): Xaa is A or G or is absent

SEQ ID NO: 59700 - protein, 32 aa, Artificial Sequence
  GFR-binding peptide
  MOD_RES (31), (32): Xaa is C or S
SRVIMPIKGYVKPKRGVFYLINIPSLAQPVXX

SEQ ID NO: 59701 - protein, 35 aa, Artificial Sequence; identical to SEQ ID NO: 3930
  GFR-binding peptide
  MOD_RES (1), (33), (34): Xaa is C or S

SEQ ID NO: 59702 - protein, 38 aa, Artificial Sequence; identical to SEQ ID NO: 31988
  GFR-binding peptide
  MOD_RES (32), (33): Xaa is C or S

SEQ ID NO: 59703 - protein, 35 aa, Artificial Sequence; identical to SEQ ID NO: 3931
  GFR-binding peptide
  MOD_RES (33), (34): Xaa is C or S
  MOD_RES (11), (12), (13), (14), (15): Xaa is A or G
  MOD_RES (16), (17), (18), (19): Xaa is A or G or is absent

SEQ ID NO: 59704 - protein, 35 aa, Artificial Sequence; identical to SEQ ID NO: 3932
  GFR-binding peptide
  MOD_RES (1), (33), (34): Xaa is C or S

SEQ ID NO: 59705 - protein, 35 aa, Artificial Sequence; identical to SEQ ID NO: 3933
  GFR-binding peptide
  MOD_RES (1), (3), (34), (35): Xaa is C or S

SEQ ID NO: 59706 - protein, 34 aa, Artificial Sequence; identical to SEQ ID NO: 31989
  GFR-binding peptide
  MOD_RES (1), (33), (34): Xaa is C or S

SEQ ID NO: 59707 - protein, 35 aa, Artificial Sequence; identical to SEQ ID NO: 11350
  GFR-binding peptide
  MOD_RES (32), (33): Xaa is C or S

SEQ ID NO: 59708 - protein, 34 aa, Artificial Sequence; identical to SEQ ID NO: 3934
  GFR-binding peptide
  MOD_RES (1), (1): Xaa is C or S
  MOD_RES (13), (14), (15), (16), (17): Xaa is A or G
  MOD_RES (18), (19), (20), (21): Xaa is A or G or is absent

SEQ ID NO: 59709 - protein, 44 aa, Artificial Sequence; identical to SEQ ID NO: 3935
  GFR-binding peptide
  MOD_RES (2), (4), (38): Xaa is C or S
  MOD_RES (16), (17), (18), (19), (20): Xaa is A or G
  MOD_RES (21), (22), (23), (24): Xaa is A or G or is absent

SEQ ID NO: 59710 - protein, 36 aa, Artificial Sequence; identical to SEQ ID NO: 25019
  GFR-binding peptide
  MOD_RES (1), (35): Xaa is C or S
  MOD_RES (13), (14), (15), (16), (17): Xaa is A or G
  MOD_RES (18), (19), (20), (21): Xaa is A or G or is absent

SEQ ID NO: 59711 - protein, 34 aa, Artificial Sequence; identical to SEQ ID NO: 3938
  GFR-binding peptide
  MOD_RES (33), (34): Xaa is C or S
  MOD_RES (11), (12), (13), (14), (15): Xaa is A or G
  MOD_RES (16), (17), (18), (19): Xaa is A or G or is absent

SEQ ID NO: 59712 - protein, 39 aa, Artificial Sequence; identical to SEQ ID NO: 25023
  GFR-binding peptide
  MOD_RES (34), (35): Xaa is C or S
  MOD_RES (12), (13), (14), (15), (16): Xaa is A or G
  MOD_RES (17), (18), (19), (20): Xaa is A or G or is absent

SEQ ID NO: 59713 - protein, 35 aa, Artificial Sequence; identical to SEQ ID NO: 3943
  GFR-binding peptide
  MOD_RES (1), (3), (34), (35): Xaa is C or S

SEQ ID NO: 59714 - protein, 36 aa, Artificial Sequence
  GFR-binding peptide
  MOD_RES (31), (32): Xaa is C or S
EVVMDEYKFKVVNNASDLYLISIPELRTPVXXTPPT

SEQ ID NO: 59715 - protein, 35 aa, Artificial Sequence
  GFR-binding peptide
  MOD_RES (2), (2): Xaa is C or S
  MOD_RES (14), (15), (16), (17), (18): Xaa is A or G
  MOD_RES (19), (20), (21), (22): Xaa is A or G or is absent
GXRDVVMGYHYKLXXXXXXXXXKYLMSIPSMKTPT

SEQ ID NO: 59716 - protein, 36 aa, Artificial Sequence; identical to SEQ ID NO: 32001
  GFR-binding peptide
  MOD_RES (32), (33): Xaa is C or S

SEQ ID NO: 59717 - protein, 32 aa, Artificial Sequence; identical to SEQ ID NO: 25027
  GFR-binding peptide
  MOD_RES (32), (32): Xaa is C or S

SEQ ID NO: 59718 - protein, 35 aa, Artificial Sequence
  GFR-binding peptide
  MOD_RES (33), (34): Xaa is C or S
  MOD_RES (11), (12), (13), (14), (15): Xaa is A or G
  MOD_RES (16), (17), (18), (19): Xaa is A or G or is absent
EVTMNEYKFKXXXXXXXXXLYLISIPEMKEPVXXP

SEQ ID NO: 59719 - protein, 36 aa, Artificial Sequence
  GFR-binding peptide
  MOD_RES (2), (33), (34): Xaa is C or S
KXSKVVMPIKGYVKPTRGVFYLINIPSLDQPVXXPS

SEQ ID NO: 59720 - protein, 39 aa, Artificial Sequence; identical to SEQ ID NO: 25028
  GFR-binding peptide
  MOD_RES (2), (36): Xaa is C or S
  MOD_RES (14), (15), (16), (17), (18): Xaa is A or G
  MOD_RES (19), (20), (21), (22): Xaa is A or G or is absent

SEQ ID NO: 59721 - protein, 39 aa, Artificial Sequence; identical to SEQ ID NO: 25029
  GFR-binding peptide
  MOD_RES (35), (36): Xaa is C or S
  MOD_RES (13), (14), (15), (16), (17): Xaa is A or G
  MOD_RES (18), (19), (20), (21): Xaa is A or G or is absent

SEQ ID NO: 59722 - protein, 37 aa, Artificial Sequence; identical to SEQ ID NO: 25030
  GFR-binding peptide
  MOD_RES (31), (31): Xaa is C or S

SEQ ID NO: 59723 - protein, 34 aa, Artificial Sequence; identical to SEQ ID NO: 3950
  GFR-binding peptide
  MOD_RES (1), (3): Xaa is C or S

SEQ ID NO: 59724 - protein, 40 aa, Artificial Sequence; identical to SEQ ID NO: 25036
  GFR-binding peptide
  MOD_RES (2), (34), (35): Xaa is C or S

SEQ ID NO: 59725 - protein, 35 aa, Artificial Sequence; identical to SEQ ID NO: 32012
  GFR-binding peptide
  MOD_RES (1), (35): Xaa is C or S
  MOD_RES (13), (14), (15), (16), (17): Xaa is A or G
  MOD_RES (18), (19), (20), (21): Xaa is A or G or is absent

SEQ ID NO: 59726 - protein, 43 aa, Artificial Sequence; identical to SEQ ID NO: 32015
  GFR-binding peptide
  MOD_RES (1), (3), (37), (38): Xaa is C or S
  MOD_RES (15), (16), (17), (18), (19): Xaa is A or G
  MOD_RES (20), (21), (22), (23): Xaa is A or G or is absent

SEQ ID NO: 59727 - protein, 39 aa, Artificial Sequence; identical to SEQ ID NO: 3955
  GFR-binding peptide
  MOD_RES (2), (4), (36), (37): Xaa is C or S

SEQ ID NO: 59728 - protein, 42 aa, Artificial Sequence; identical to SEQ ID NO: 32018
  GFR-binding peptide
  MOD_RES (1), (3), (37), (38): Xaa is C or S
  MOD_RES (15), (16), (17), (18), (19): Xaa is A or G
  MOD_RES (20), (21), (22), (23): Xaa is A or G or is absent

SEQ ID NO: 59729 - protein, 40 aa, Artificial Sequence; identical to SEQ ID NO: 25040
  GFR-binding peptide
  MOD_RES (2), (4), (35), (36): Xaa is C or S

SEQ ID NO: 59730 - protein, 36 aa, Artificial Sequence; identical to SEQ ID NO: 25041
  GFR-binding peptide
  MOD_RES (2), (4), (36): Xaa is C or S

SEQ ID NO: 59731 - protein, 36 aa, Artificial Sequence; identical to SEQ ID NO: 3962
  GFR-binding peptide
  MOD_RES (1), (3): Xaa is C or S
  MOD_RES (15), (16), (17), (18), (19): Xaa is A or G
  MOD_RES (20), (21), (22), (23): Xaa is A or G or is absent

SEQ ID NO: 59732 - protein, 37 aa, Artificial Sequence; identical to SEQ ID NO: 3963
  GFR-binding peptide
  MOD_RES (2), (34), (35): Xaa is C or S

SEQ ID NO: 59733 - protein, 34 aa, Artificial Sequence; identical to SEQ ID NO: 3965
  GFR-binding peptide
  MOD_RES (1), (34): Xaa is C or S
  MOD_RES (12), (13), (14), (15), (16): Xaa is A or G
  MOD_RES (17), (18), (19), (20): Xaa is A or G or is absent

SEQ ID NO: 59734 - protein, 35 aa, Artificial Sequence; identical to SEQ ID NO: 3966
  GFR-binding peptide
  MOD_RES (1), (35): Xaa is C or S
  MOD_RES (13), (14), (15), (16), (17): Xaa is A or G
  MOD_RES (18), (19), (20), (21): Xaa is A or G or is absent

SEQ ID NO: 59735 - protein, 38 aa, Artificial Sequence; identical to SEQ ID NO: 25048
  GFR-binding peptide
  MOD_RES (34), (35): Xaa is C or S
  MOD_RES (12), (13), (14), (15), (16): Xaa is A or G
  MOD_RES (17), (18), (19), (20): Xaa is A or G or is absent

SEQ ID NO: 59736 - protein, 39 aa, Artificial Sequence; identical to SEQ ID NO: 25050
  GFR-binding peptide
  MOD_RES (2), (4), (38), (39): Xaa is C or S
  MOD_RES (16), (17), (18), (19), (20): Xaa is A or G
  MOD_RES (21), (22), (23), (24): Xaa is A or G or is absent

SEQ ID NO: 59737 - protein, 36 aa, Artificial Sequence; identical to SEQ ID NO: 25051
  GFR-binding peptide
  MOD_RES (31), (32): Xaa is C or S

SEQ ID NO: 59738 - protein, 34 aa, Artificial Sequence; identical to SEQ ID NO: 3969
  GFR-binding peptide
  MOD_RES (1), (33), (34): Xaa is C or S

SEQ ID NO: 59739 - protein, 42 aa, Artificial Sequence; identical to SEQ ID NO: 25053
  GFR-binding peptide
  MOD_RES (1), (3), (36), (37): Xaa is C or S
  MOD_RES (14), (15), (16), (17), (18): Xaa is A or G
  MOD_RES (19), (20), (21), (22): Xaa is A or G or is absent

SEQ ID NO: 59740 - protein, 41 aa, Artificial Sequence; identical to SEQ ID NO: 11391
  GFR-binding peptide
  MOD_RES (1), (35), (36): Xaa is C or S
  MOD_RES (13), (14), (15), (16), (17): Xaa is A or G
  MOD_RES (18), (19), (20), (21): Xaa is A or G or is absent

SEQ ID NO: 59741 - protein, 39 aa, Artificial Sequence; identical to SEQ ID NO: 32039
  GFR-binding peptide
  MOD_RES (1), (33), (34): Xaa is C or S

SEQ ID NO: 59742 - protein, 34 aa, Artificial Sequence; identical to SEQ ID NO: 3976
  GFR-binding peptide
  MOD_RES (31), (32): Xaa is C or S

SEQ ID NO: 59743 - protein, 41 aa, Artificial Sequence; identical to SEQ ID NO: 3981
  GFR-binding peptide
  MOD_RES (1), (3), (37), (38): Xaa is C or S
  MOD_RES (15), (16), (17), (18), (19): Xaa is A or G
  MOD_RES (20), (21), (22), (23): Xaa is A or G or is absent

SEQ ID NO: 59744 - protein, 33 aa, Artificial Sequence; identical to SEQ ID NO: 56995
  GFR-binding peptide
  MOD_RES (1), (1): Xaa is C or S
  MOD_RES (12), (13), (14), (15), (16): Xaa is A or G
  MOD_RES (17), (18), (19), (20): Xaa is A or G or is absent

SEQ ID NO: 59745 - protein, 38 aa, Artificial Sequence; identical to SEQ ID NO: 32053
  GFR-binding peptide
  MOD_RES (2), (35), (36): Xaa is C or S

SEQ ID NO: 59746 - protein, 39 aa, Artificial Sequence; identical to SEQ ID NO: 32055
  GFR-binding peptide
  MOD_RES (33), (33): Xaa is C or S
  MOD_RES (11), (12), (13), (14), (15): Xaa is A or G
  MOD_RES (16), (17), (18), (19): Xaa is A or G or is absent

SEQ ID NO: 59747 - protein, 40 aa, Artificial Sequence
  GFR-binding peptide
  MOD_RES (34), (35): Xaa is C or S
  MOD_RES (12), (13), (14), (15), (16): Xaa is A or G
  MOD_RES (17), (18), (19), (20): Xaa is A or G or is absent
SRVVMNRHKRLXXXXXXXXXYYLVSTASLKTPAXXPKPVH

SEQ ID NO: 59748 - protein, 36 aa, Artificial Sequence
  GFR-binding peptide
  MOD_RES (1), (33), (34): Xaa is C or S
XSEVTMNPIKGYVVNKNEDFYLINIPSMKEPVXXPE

SEQ ID NO: 59749 - protein, 32 aa, Artificial Sequence; identical to SEQ ID NO: 3987
  GFR-binding peptide
  MOD_RES (32), (32): Xaa is C or S

SEQ ID NO: 59750 - protein, 39 aa, Artificial Sequence; identical to SEQ ID NO: 25069
  GFR-binding peptide
  MOD_RES (34), (35): Xaa is C or S
  MOD_RES (12), (13), (14), (15), (16): Xaa is A or G
  MOD_RES (17), (18), (19), (20): Xaa is A or G or is absent

SEQ ID NO: 59751 - protein, 40 aa, Artificial Sequence
  GFR-binding peptide
  MOD_RES (2), (4), (36), (37): Xaa is C or S
SXGXRDVVMGYHYKLIIQQKDNKYLMSIPSMKTPTXXPGA

SEQ ID NO: 59752 - protein, 34 aa, Artificial Sequence; identical to SEQ ID NO: 25072
  GFR-binding peptide
  MOD_RES (2), (33), (34): Xaa is C or S

SEQ ID NO: 59753 - protein, 37 aa, Artificial Sequence; identical to SEQ ID NO: 57004
  GFR-binding peptide
  MOD_RES (2), (4): Xaa is C or S
  MOD_RES (16), (17), (18), (19), (20): Xaa is A or G
  MOD_RES (21), (22), (23), (24): Xaa is A or G or is absent

SEQ ID NO: 59754 - protein, 37 aa, Artificial Sequence; identical to SEQ ID NO: 3992
  GFR-binding peptide
  MOD_RES (33), (34): Xaa is C or S
  MOD_RES (11), (12), (13), (14), (15): Xaa is A or G
  MOD_RES (16), (17), (18), (19): Xaa is A or G or is absent

SEQ ID NO: 59755 - protein, 33 aa, Artificial Sequence; identical to SEQ ID NO: 32069
  GFR-binding peptide
  MOD_RES (1), (33): Xaa is C or S

SEQ ID NO: 59756 - protein, 42 aa, Artificial Sequence; identical to SEQ ID NO: 25076
  GFR-binding peptide
  MOD_RES (2), (4), (36), (37): Xaa is C or S

SEQ ID NO: 59757 - protein, 37 aa, Artificial Sequence
  GFR-binding peptide
  MOD_RES (1), (3), (37): Xaa is C or S
  MOD_RES (15), (16), (17), (18), (19): Xaa is A or G
  MOD_RES (20), (21), (22), (23): Xaa is A or G or is absent
XAXSEVTMNRYKKLXXXXXXXXXFYLISIANMKEPVX

SEQ ID NO: 59758 - protein, 39 aa, Artificial Sequence; identical to SEQ ID NO: 3994
  GFR-binding peptide
  MOD_RES (2), (4), (37), (38): Xaa is C or S

SEQ ID NO: 59759 - protein, 37 aa, Artificial Sequence
  GFR-binding peptide
  MOD_RES (1), (3), (35), (36): Xaa is C or S
XAXSEVTMNPIKGYVVNKNEDFYLINIPSMKEPVXXP

SEQ ID NO: 59760 - protein, 34 aa, Artificial Sequence
  GFR-binding peptide
  MOD_RES (2), (2): Xaa is C or S
  MOD_RES (13), (14), (15), (16), (17): Xaa is A or G
  MOD_RES (18), (19), (20), (21): Xaa is A or G or is absent
KXSRVIMPIKGYXXXXXXXXXFYLINIPSLAQPV

SEQ ID NO: 59761 - protein, 32 aa, Artificial Sequence; identical to SEQ ID NO: 3995
  GFR-binding peptide
  MOD_RES (32), (32): Xaa is C or S

SEQ ID NO: 59762 - protein, 35 aa, Artificial Sequence; identical to SEQ ID NO: 3996
  GFR-binding peptide
  MOD_RES (34), (34): Xaa is C or S
  MOD_RES (12), (13), (14), (15), (16): Xaa is A or G
  MOD_RES (17), (18), (19), (20): Xaa is A or G or is absent

SEQ ID NO: 59763 - protein, 36 aa, Artificial Sequence; identical to SEQ ID NO: 3998
  GFR-binding peptide
  MOD_RES (34), (35): Xaa is C or S
  MOD_RES (12), (13), (14), (15), (16): Xaa is A or G
  MOD_RES (17), (18), (19), (20): Xaa is A or G or is absent

SEQ ID NO: 59764 - protein, 35 aa, Artificial Sequence
  GFR-binding peptide
  MOD_RES (2), (2): Xaa is C or S
  MOD_RES (14), (15), (16), (17), (18): Xaa is A or G
  MOD_RES (19), (20), (21), (22): Xaa is A or G or is absent
GXESVAMGRHKRLXXXXXXXXXYYLISTASLKTPV

SEQ ID NO: 59765 - protein, 36 aa, Artificial Sequence; identical to SEQ ID NO: 32082
  GFR-binding peptide
  MOD_RES (2), (4), (36): Xaa is C or S

SEQ ID NO: 59766 - protein, 37 aa, Artificial Sequence; identical to SEQ ID NO: 4006
  GFR-binding peptide
  MOD_RES (1), (3), (34), (35): Xaa is C or S

SEQ ID NO: 59767 - protein, 39 aa, Artificial Sequence; identical to SEQ ID NO: 25087
  GFR-binding peptide
  MOD_RES (2), (34), (35): Xaa is C or S

SEQ ID NO: 59768 - protein, 36 aa, Artificial Sequence; identical to SEQ ID NO: 4009
  GFR-binding peptide
  MOD_RES (1), (35), (36): Xaa is C or S
  MOD_RES (13), (14), (15), (16), (17): Xaa is A or G
  MOD_RES (18), (19), (20), (21): Xaa is A or G or is absent

SEQ ID NO: 59769 - protein, 34 aa, Artificial Sequence; identical to SEQ ID NO: 25089
  GFR-binding peptide
  MOD_RES (31), (32): Xaa is C or S

SEQ ID NO: 59770 - protein, 41 aa, Artificial Sequence; identical to SEQ ID NO: 4010
  GFR-binding peptide
  MOD_RES (2), (4), (39), (40): Xaa is C or S
  MOD_RES (17), (18), (19), (20), (21): Xaa is A or G
  MOD_RES (22), (23), (24), (25): Xaa is A or G or is absent

SEQ ID NO: 59771 - protein, 41 aa, Artificial Sequence
  GFR-binding peptide
  MOD_RES (1), (3), (35), (36): Xaa is C or S
XGXAEVVMDRHKRLVVNNAADYYLISTASLRAPVXXSAPAA

SEQ ID NO: 59772 - protein, 36 aa, Artificial Sequence; identical to SEQ ID NO: 4011
  GFR-binding peptide
  MOD_RES (2), (34), (35): Xaa is C or S

SEQ ID NO: 59773 - protein, 38 aa, Artificial Sequence; identical to SEQ ID NO: 4012
  GFR-binding peptide
  MOD_RES (2), (33), (34): Xaa is C or S

SEQ ID NO: 59774 - protein, 39 aa, Artificial Sequence; identical to SEQ ID NO: 4017
  GFR-binding peptide
  MOD_RES (1), (35), (36): Xaa is C or S
  MOD_RES (13), (14), (15), (16), (17): Xaa is A or G
  MOD_RES (18), (19), (20), (21): Xaa is A or G or is absent

SEQ ID NO: 59775 - protein, 39 aa, Artificial Sequence; identical to SEQ ID NO: 11445
  GFR-binding peptide
  MOD_RES (2), (4), (36), (37): Xaa is C or S

SEQ ID NO: 59776 - protein, 40 aa, Artificial Sequence; identical to SEQ ID NO: 25095
  GFR-binding peptide
  MOD_RES (2), (4), (36), (37): Xaa is C or S

SEQ ID NO: 59777 - protein, 42 aa, Artificial Sequence; identical to SEQ ID NO: 4018
  GFR-binding peptide
  MOD_RES (2), (4), (37), (38): Xaa is C or S
  MOD_RES (15), (16), (17), (18), (19): Xaa is A or G
  MOD_RES (20), (21), (22), (23): Xaa is A or G or is absent

SEQ ID NO: 59778 - protein, 41 aa, Artificial Sequence; identical to SEQ ID NO: 25096
  GFR-binding peptide
  MOD_RES (1), (3), (37), (38): Xaa is C or S
  MOD_RES (15), (16), (17), (18), (19): Xaa is A or G
  MOD_RES (20), (21), (22), (23): Xaa is A or G or is absent

SEQ ID NO: 59779 - protein, 37 aa, Artificial Sequence; identical to SEQ ID NO: 4021
  GFR-binding peptide
  MOD_RES (1), (3), (34), (35): Xaa is C or S

SEQ ID NO: 59780 - protein, 35 aa, Artificial Sequence
  GFR-binding peptide
  MOD_RES (2), (4): Xaa is C or S
RXGXSEVVMDEYKFKVVNNASDLYLISIPELRTPV

SEQ ID NO: 59781 - protein, 38 aa, Artificial Sequence; identical to SEQ ID NO: 32116
  GFR-binding peptide
  MOD_RES (1), (3), (35): Xaa is C or S

SEQ ID NO: 59782 - protein, 36 aa, Artificial Sequence; identical to SEQ ID NO: 4030
  GFR-binding peptide
  MOD_RES (1), (36): Xaa is C or S
  MOD_RES (14), (15), (16), (17), (18): Xaa is A or G
  MOD_RES (19), (20), (21), (22): Xaa is A or G or is absent

SEQ ID NO: 59783 - protein, 38 aa, Artificial Sequence; identical to SEQ ID NO: 32118
  GFR-binding peptide
  MOD_RES (32), (33): Xaa is C or S

SEQ ID NO: 59784 - protein, 31 aa, Artificial Sequence; identical to SEQ ID NO: 32121
  GFR-binding peptide
  MOD_RES (31), (31): Xaa is C or S

SEQ ID NO: 59785 - protein, 38 aa, Artificial Sequence; identical to SEQ ID NO: 32124
  GFR-binding peptide
  MOD_RES (1), (33), (34): Xaa is C or S

SEQ ID NO: 59786 - protein, 41 aa, Artificial Sequence; identical to SEQ ID NO: 25108
  GFR-binding peptide
  MOD_RES (2), (4), (36), (37): Xaa is C or S

SEQ ID NO: 59787 - protein, 38 aa, Artificial Sequence; identical to SEQ ID NO: 11464
  GFR-binding peptide
  MOD_RES (2), (4), (36), (37): Xaa is C or S

SEQ ID NO: 59788 - protein, 37 aa, Artificial Sequence
  GFR-binding peptide
  MOD_RES (2), (4), (36), (37): Xaa is C or S
RXAXSEVTMNPIKGYVVNKNEDFYLINIPSMKEPVXX

SEQ ID NO: 59789 - protein, 40 aa, Artificial Sequence; identical to SEQ ID NO: 25110
  GFR-binding peptide
  MOD_RES (1), (35), (36): Xaa is C or S
  MOD_RES (13), (14), (15), (16), (17): Xaa is A or G
  MOD_RES (18), (19), (20), (21): Xaa is A or G or is absent

SEQ ID NO: 59790 - protein, 33 aa, Artificial Sequence; identical to SEQ ID NO: 4034
  GFR-binding peptide
  MOD_RES (1), (1): Xaa is C or S
  MOD_RES (12), (13), (14), (15), (16): Xaa is A or G
  MOD_RES (17), (18), (19), (20): Xaa is A or G or is absent

SEQ ID NO: 59791 - protein, 35 aa, Artificial Sequence; identical to SEQ ID NO: 4036
  GFR-binding peptide
  MOD_RES (33), (34): Xaa is C or S
  MOD_RES (11), (12), (13), (14), (15): Xaa is A or G
  MOD_RES (16), (17), (18), (19): Xaa is A or G or is absent

SEQ ID NO: 59792 - protein, 31 aa, Artificial Sequence; identical to SEQ ID NO: 32133
  GFR-binding peptide
  MOD_RES (31), (31): Xaa is C or S

SEQ ID NO: 59793 - protein, 37 aa, Artificial Sequence; identical to SEQ ID NO: 25117
  GFR-binding peptide
  MOD_RES (2), (4), (36), (37): Xaa is C or S

SEQ ID NO: 59794 - protein, 43 aa, Artificial Sequence; identical to SEQ ID NO: 4040
  GFR-binding peptide
  MOD_RES (1), (3), (37), (38): Xaa is C or S
  MOD_RES (15), (16), (17), (18), (19): Xaa is A or G
  MOD_RES (20), (21), (22), (23): Xaa is A or G or is absent

SEQ ID NO: 59795 - protein, 36 aa, Artificial Sequence; identical to SEQ ID NO: 25118
  GFR-binding peptide
  MOD_RES (2), (36): Xaa is C or S
  MOD_RES (14), (15), (16), (17), (18): Xaa is A or G
  MOD_RES (19), (20), (21), (22): Xaa is A or G or is absent

SEQ ID NO: 59796 - protein, 38 aa, Artificial Sequence; identical to SEQ ID NO: 4041
  GFR-binding peptide
  MOD_RES (1), (34), (35): Xaa is C or S
  MOD_RES (12), (13), (14), (15), (16): Xaa is A or G
  MOD_RES (17), (18), (19), (20): Xaa is A or G or is absent

SEQ ID NO: 59797 - protein, 39 aa, Artificial Sequence; identical to SEQ ID NO: 25121
  GFR-binding peptide
  MOD_RES (1), (3), (35), (36): Xaa is C or S

SEQ ID NO: 59798 - protein, 36 aa, Artificial Sequence; identical to SEQ ID NO: 4045
  GFR-binding peptide
  MOD_RES (2), (2): Xaa is C or S
  MOD_RES (15), (16), (17), (18), (19): Xaa is A or G
  MOD_RES (20), (21), (22), (23): Xaa is A or G or is absent

SEQ ID NO: 59799 - protein, 37 aa, Artificial Sequence; identical to SEQ ID NO: 4046
  GFR-binding peptide
  MOD_RES (1), (3), (36), (37): Xaa is C or S

SEQ ID NO: 59800 - protein, 36 aa, Artificial Sequence
  GFR-binding peptide
  MOD_RES (34), (35): Xaa is C or S
  MOD_RES (12), (13), (14), (15), (16): Xaa is A or G
  MOD_RES (17), (18), (19), (20): Xaa is A or G or is absent
RDVVMGYHYKLXXXXXXXXXKYLMSIPSMKTPTXXP

SEQ ID NO: 59801 - protein, 40 aa, Artificial Sequence; identical to SEQ ID NO: 4050
  GFR-binding peptide
  MOD_RES (2), (35), (36): Xaa is C or S
  MOD_RES (13), (14), (15), (16), (17): Xaa is A or G
  MOD_RES (18), (19), (20), (21): Xaa is A or G or is absent

SEQ ID NO: 59802 - protein, 35 aa, Artificial Sequence; identical to SEQ ID NO: 4052
  GFR-binding peptide
  MOD_RES (34), (35): Xaa is C or S
  MOD_RES (12), (13), (14), (15), (16): Xaa is A or G
  MOD_RES (17), (18), (19), (20): Xaa is A or G or is absent

SEQ ID NO: 59803 - protein, 36 aa, Artificial Sequence; identical to SEQ ID NO: 32148
  GFR-binding peptide
  MOD_RES (32), (33): Xaa is C or S

SEQ ID NO: 59804 - protein, 37 aa, Artificial Sequence; identical to SEQ ID NO: 25126
  GFR-binding peptide
  MOD_RES (2), (34), (35): Xaa is C or S

SEQ ID NO: 59805 - protein, 36 aa, Artificial Sequence; identical to SEQ ID NO: 4053
  GFR-binding peptide
  MOD_RES (2), (36): Xaa is C or S
  MOD_RES (14), (15), (16), (17), (18): Xaa is A or G
  MOD_RES (19), (20), (21), (22): Xaa is A or G or is absent

SEQ ID NO: 59806 - protein, 39 aa, Artificial Sequence; identical to SEQ ID NO: 4054
  GFR-binding peptide
  MOD_RES (33), (34): Xaa is C or S
  MOD_RES (11), (12), (13), (14), (15): Xaa is A or G
  MOD_RES (16), (17), (18), (19): Xaa is A or G or is absent

SEQ ID NO: 59807 - protein, 37 aa, Artificial Sequence; identical to SEQ ID NO: 25130
  GFR-binding peptide
  MOD_RES (2), (35), (36): Xaa is C or S
  MOD_RES (13), (14), (15), (16), (17): Xaa is A or G
  MOD_RES (18), (19), (20), (21): Xaa is A or G or is absent

SEQ ID NO: 59808 - protein, 38 aa, Artificial Sequence; identical to SEQ ID NO: 4058
  GFR-binding peptide
  MOD_RES (2), (4), (36), (37): Xaa is C or S

SEQ ID NO: 59809 - protein, 37 aa, Artificial Sequence
  GFR-binding peptide
  MOD_RES (1), (33), (34): Xaa is C or S
XRDVVMGRHKRLIIQQKDNYYLMSTASMKTPTXXPGA

SEQ ID NO: 59810 - protein, 34 aa, Artificial Sequence; identical to SEQ ID NO: 4061
  GFR-binding peptide
  MOD_RES (31), (31): Xaa is C or S

SEQ ID NO: 59811 - protein, 40 aa, Artificial Sequence; identical to SEQ ID NO: 4062
  GFR-binding peptide
  MOD_RES (1), (3), (37), (38): Xaa is C or S
  MOD_RES (15), (16), (17), (18), (19): Xaa is A or G
  MOD_RES (20), (21), (22), (23): Xaa is A or G or is absent

SEQ ID NO: 59812 - protein, 37 aa, Artificial Sequence
  GFR-binding peptide
  MOD_RES (1), (35), (36): Xaa is C or S
  MOD_RES (13), (14), (15), (16), (17): Xaa is A or G
  MOD_RES (18), (19), (20), (21): Xaa is A or G or is absent
XRDVVMGRHKRLXXXXXXXXXYYLMSTASMKTPTXXP

SEQ ID NO: 59813 - protein, 36 aa, Artificial Sequence; identical to SEQ ID NO: 25135
  GFR-binding peptide
  MOD_RES (34), (35): Xaa is C or S
  MOD_RES (12), (13), (14), (15), (16): Xaa is A or G
  MOD_RES (17), (18), (19), (20): Xaa is A or G or is absent

SEQ ID NO: 59814 - protein, 37 aa, Artificial Sequence; identical to SEQ ID NO: 25136
  GFR-binding peptide
  MOD_RES (31), (32): Xaa is C or S

SEQ ID NO: 59815 - protein, 32 aa, Artificial Sequence; identical to SEQ ID NO: 4064
  GFR-binding peptide
  MOD_RES (2), (2): Xaa is C or S

SEQ ID NO: 59816 - protein, 40 aa, Artificial Sequence
  GFR-binding peptide
  MOD_RES (2), (4), (37), (38): Xaa is C or S
  MOD_RES (15), (16), (17), (18), (19): Xaa is A or G
  MOD_RES (20), (21), (22), (23): Xaa is A or G or is absent
SXKXSKVIMPIKGYXXXXXXXXXFYLINIPSLDQSVXXPS

SEQ ID NO: 59817 - protein, 35 aa, Artificial Sequence; identical to SEQ ID NO: 4066
  GFR-binding peptide
  MOD_RES (1), (32), (33): Xaa is C or S

SEQ ID NO: 59818 - protein, 35 aa, Artificial Sequence
  GFR-binding peptide
  MOD_RES (1), (33), (34): Xaa is C or S
XRDVVMGYHYKLIIQQKDNKYLMSIPSMKTPTXXP

SEQ ID NO: 59819 - protein, 35 aa, Artificial Sequence; identical to SEQ ID NO: 25142
  GFR-binding peptide
  MOD_RES (33), (34): Xaa is C or S
  MOD_RES (11), (12), (13), (14), (15): Xaa is A or G
  MOD_RES (16), (17), (18), (19): Xaa is A or G or is absent

SEQ ID NO: 59820 - protein, 34 aa, Artificial Sequence; identical to SEQ ID NO: 4068
  GFR-binding peptide
  MOD_RES (34), (34): Xaa is C or S
  MOD_RES (12), (13), (14), (15), (16): Xaa is A or G
  MOD_RES (17), (18), (19), (20): Xaa is A or G or is absent

SEQ ID NO: 59821 - protein, 35 aa, Artificial Sequence; identical to SEQ ID NO: 57094
  GFR-binding peptide
  MOD_RES (1), (32), (33): Xaa is C or S

SEQ ID NO: 59822 - protein, 36 aa, Artificial Sequence
  GFR-binding peptide
  MOD_RES (32), (33): Xaa is C or S
RDVVMGRHKRLIIQQKDNYYLMSTASMKTPTXXPGA

SEQ ID NO: 59823 - protein, 37 aa, Artificial Sequence; identical to SEQ ID NO: 25147
  GFR-binding peptide
  MOD_RES (2), (4): Xaa is C or S
  MOD_RES (16), (17), (18), (19), (20): Xaa is A or G
  MOD_RES (21), (22), (23), (24): Xaa is A or G or is absent

SEQ ID NO: 59824 - protein, 32 aa, Artificial Sequence; identical to SEQ ID NO: 25148
  GFR-binding peptide
  MOD_RES (1), (32): Xaa is C or S

SEQ ID NO: 59825 - protein, 37 aa, Artificial Sequence; identical to SEQ ID NO: 4077
  GFR-binding peptide
  MOD_RES (1), (32), (33): Xaa is C or S

SEQ ID NO: 59826 - protein, 38 aa, Artificial Sequence; identical to SEQ ID NO: 25150
  GFR-binding peptide
  MOD_RES (32), (33): Xaa is C or S

SEQ ID NO: 59827 - protein, 41 aa, Artificial Sequence
  GFR-binding peptide
  MOD_RES (1), (3), (35), (36): Xaa is C or S
XGXSEVVMDRHKRLVVNNASDYYLISTASLRTPVXXTPPTS

SEQ ID NO: 59828 - protein, 42 aa, Artificial Sequence
  GFR-binding peptide
  MOD_RES (2), (36), (37): Xaa is C or S
  MOD_RES (14), (15), (16), (17), (18): Xaa is A or G
  MOD_RES (19), (20), (21), (22): Xaa is A or G or is absent
AXSEVTMNYHYKLXXXXXXXXXKYLISIPSMKEPVXXPEPIG

SEQ ID NO: 59829 - protein, 33 aa, Artificial Sequence; identical to SEQ ID NO: 25152
  GFR-binding peptide
  MOD_RES (2), (2): Xaa is C or S

SEQ ID NO: 59830 - protein, 36 aa, Artificial Sequence; identical to SEQ ID NO: 25156
  GFR-binding peptide
  MOD_RES (33), (34): Xaa is C or S
  MOD_RES (11), (12), (13), (14), (15): Xaa is A or G
  MOD_RES (16), (17), (18), (19): Xaa is A or G or is absent

SEQ ID NO: 59831 - protein, 39 aa, Artificial Sequence; identical to SEQ ID NO: 4079
  GFR-binding peptide
  MOD_RES (2), (4), (38), (39): Xaa is C or S
  MOD_RES (16), (17), (18), (19), (20): Xaa is A or G
  MOD_RES (21), (22), (23), (24): Xaa is A or G or is absent

SEQ ID NO: 59832 - protein, 32 aa, Artificial Sequence
  GFR-binding peptide
  MOD_RES (11), (12), (13), (14), (15): Xaa is A or G
  MOD_RES (16), (17), (18), (19): Xaa is A or G or is absent
EVVMDRHKRLXXXXXXXXXYYLISTASLRAPV

SEQ ID NO: 59833 - protein, 36 aa, Artificial Sequence; identical to SEQ ID NO: 4086
  GFR-binding peptide
  MOD_RES (1), (3): Xaa is C or S
  MOD_RES (15), (16), (17), (18), (19): Xaa is A or G
  MOD_RES (20), (21), (22), (23): Xaa is A or G or is absent

SEQ ID NO: 59834 - protein, 36 aa, Artificial Sequence; identical to SEQ ID NO: 4090
  GFR-binding peptide
  MOD_RES (33), (34): Xaa is C or S
  MOD_RES (11), (12), (13), (14), (15): Xaa is A or G
  MOD_RES (16), (17), (18), (19): Xaa is A or G or is absent

SEQ ID NO: 59835 - protein, 35 aa, Artificial Sequence; identical to SEQ ID NO: 4092
  GFR-binding peptide
  MOD_RES (32), (32): Xaa is C or S

SEQ ID NO: 59836 - protein, 34 aa, Artificial Sequence; identical to SEQ ID NO: 4100
  GFR-binding peptide
  MOD_RES (1), (34): Xaa is C or S
  MOD_RES (12), (13), (14), (15), (16): Xaa is A or G
  MOD_RES (17), (18), (19), (20): Xaa is A or G or is absent

SEQ ID NO: 59837 - protein, 38 aa, Artificial Sequence; identical to SEQ ID NO: 4105
  GFR-binding peptide
  MOD_RES (2), (35), (36): Xaa is C or S

SEQ ID NO: 59838 - protein, 32 aa, Artificial Sequence
  GFR-binding peptide
  MOD_RES (1), (1): Xaa is C or S
XSEVTMNEYKFKVVNKNEDLYLISIPEMKEPV

SEQ ID NO: 59839 - protein, 37 aa, Artificial Sequence; identical to SEQ ID NO: 4115
  GFR-binding peptide
  MOD_RES (1), (33), (34): Xaa is C or S

SEQ ID NO: 59840 - protein, 36 aa, Artificial Sequence
  GFR-binding peptide
  MOD_RES (1), (3), (35), (36): Xaa is C or S
XGXSEVVMDEYKFKVVNNASDLYLISIPELRTPVXX

SEQ ID NO: 59841 - protein, 41 aa, Artificial Sequence; identical to SEQ ID NO: 32190
  GFR-binding peptide
  MOD_RES (2), (36), (37): Xaa is C or S
  MOD_RES (14), (15), (16), (17), (18): Xaa is A or G
  MOD_RES (19), (20), (21), (22): Xaa is A or G or is absent

SEQ ID NO: 59842 - protein, 39 aa, Artificial Sequence
  GFR-binding peptide
  MOD_RES (1), (35), (36): Xaa is C or S
  MOD_RES (13), (14), (15), (16), (17): Xaa is A or G
  MOD_RES (18), (19), (20), (21): Xaa is A or G or is absent
XAEVVMDRHKRLXXXXXXXXXYYLISTASLRAPVXXSAP

SEQ ID NO: 59843 - protein, 31 aa, Artificial Sequence; identical to SEQ ID NO: 32192
  GFR-binding peptide
  MOD_RES (31), (31): Xaa is C or S

SEQ ID NO: 59844 - protein, 36 aa, Artificial Sequence; identical to SEQ ID NO: 4120
  GFR-binding peptide
  MOD_RES (1), (33), (34): Xaa is C or S

SEQ ID NO: 59845 - protein, 34 aa, Artificial Sequence; identical to SEQ ID NO: 32200
  GFR-binding peptide
  MOD_RES (1), (1): Xaa is C or S
  MOD_RES (13), (14), (15), (16), (17): Xaa is A or G
  MOD_RES (18), (19), (20), (21): Xaa is A or G or is absent

SEQ ID NO: 59846 - protein, 37 aa, Artificial Sequence; identical to SEQ ID NO: 4124
  GFR-binding peptide
  MOD_RES (2), (4), (36), (37): Xaa is C or S

SEQ ID NO: 59847 - protein, 42 aa, Artificial Sequence
  GFR-binding peptide
  MOD_RES (1), (3), (37), (38): Xaa is C or S
  MOD_RES (15), (16), (17), (18), (19): Xaa is A or G
  MOD_RES (20), (21), (22), (23): Xaa is A or G or is absent
XAXSEVTMNYHYKLXXXXXXXXXKYLISIPSMKEPVXXPEPI

SEQ ID NO: 59848 - protein, 40 aa, Artificial Sequence
  GFR-binding peptide
  MOD_RES (1), (3), (37), (38): Xaa is C or S
  MOD_RES (15), (16), (17), (18), (19): Xaa is A or G
  MOD_RES (20), (21), (22), (23): Xaa is A or G or is absent
XGXSEVVMDRHKRLXXXXXXXXXYYLISTASLRTPVXXTP

SEQ ID NO: 59849 - protein, 37 aa, Artificial Sequence
  GFR-binding peptide
  MOD_RES (31), (32): Xaa is C or S
EVTMNRYKKLVVNKNEDFYLISIANMKEPVXXPEPIG

SEQ ID NO: 59850 - protein, 37 aa, Artificial Sequence; identical to SEQ ID NO: 4136
  GFR-binding peptide
  MOD_RES (2), (36), (37): Xaa is C or S
  MOD_RES (14), (15), (16), (17), (18): Xaa is A or G
  MOD_RES (19), (20), (21), (22): Xaa is A or G or is absent

SEQ ID NO: 59851 - protein, 38 aa, Artificial Sequence; identical to SEQ ID NO: 4137
  GFR-binding peptide
  MOD_RES (2), (34), (35): Xaa is C or S

SEQ ID NO: 59852 - protein, 36 aa, Artificial Sequence
  GFR-binding peptide
  MOD_RES (1), (3): Xaa is C or S
  MOD_RES (15), (16), (17), (18), (19): Xaa is A or G
  MOD_RES (20), (21), (22), (23): Xaa is A or G or is absent
XGXSEVVMDEYKFKXXXXXXXXXLYLISIPELRTPV

SEQ ID NO: 59853 - protein, 39 aa, Artificial Sequence; identical to SEQ ID NO: 4139
  GFR-binding peptide
  MOD_RES (2), (34), (35): Xaa is C or S

SEQ ID NO: 59854 - protein, 43 aa, Artificial Sequence; identical to SEQ ID NO: 4141
  GFR-binding peptide
  MOD_RES (2), (4), (38), (39): Xaa is C or S
  MOD_RES (16), (17), (18), (19), (20): Xaa is A or G
  MOD_RES (21), (22), (23), (24): Xaa is A or G or is absent

SEQ ID NO: 59855 - protein, 35 aa, Artificial Sequence
  GFR-binding peptide
  MOD_RES (1), (3), (34), (35): Xaa is C or S
XKXSKVIMPIKGYIKPTKGIFYLINIPSLDQSVXX

SEQ ID NO: 59856 - protein, 37 aa, Artificial Sequence; identical to SEQ ID NO: 25197
  GFR-binding peptide
  MOD_RES (31), (32): Xaa is C or S

SEQ ID NO: 59857 - protein, 39 aa, Artificial Sequence
  GFR-binding peptide
  MOD_RES (2), (4), (35), (36): Xaa is C or S
SXKXSKVIMPIKGYIKPTKGIFYLINIPSLDQSVXXPSA

SEQ ID NO: 59858 - protein, 36 aa, Artificial Sequence; identical to SEQ ID NO: 4143
  GFR-binding peptide
  MOD_RES (2), (35), (36): Xaa is C or S
  MOD_RES (13), (14), (15), (16), (17): Xaa is A or G
  MOD_RES (18), (19), (20), (21): Xaa is A or G or is absent

SEQ ID NO: 59859 - protein, 35 aa, Artificial Sequence; identical to SEQ ID NO: 25198
  GFR-binding peptide
  MOD_RES (2), (2): Xaa is C or S
  MOD_RES (14), (15), (16), (17), (18): Xaa is A or G
  MOD_RES (19), (20), (21), (22): Xaa is A or G or is absent

SEQ ID NO: 59860 - protein, 35 aa, Artificial Sequence; identical to SEQ ID NO: 4145
  GFR-binding peptide
  MOD_RES (1), (32), (33): Xaa is C or S

SEQ ID NO: 59861 - protein, 34 aa, Artificial Sequence
  GFR-binding peptide
  MOD_RES (33), (34): Xaa is C or S
  MOD_RES (11), (12), (13), (14), (15): Xaa is A or G
  MOD_RES (16), (17), (18), (19): Xaa is A or G or is absent
EEVIMYHYKLXXXXXXXXXKYLMSIPSTKVPAXX

SEQ ID NO: 59862 - protein, 35 aa, Artificial Sequence; identical to SEQ ID NO: 25202
  GFR-binding peptide
  MOD_RES (1), (3), (35): Xaa is C or S

SEQ ID NO: 59863 - protein, 32 aa, Artificial Sequence
  GFR-binding peptide
  MOD_RES (11), (12), (13), (14), (15): Xaa is A or G
  MOD_RES (16), (17), (18), (19): Xaa is A or G or is absent
EVTMNRYKKLXXXXXXXXXFYLISIANMKEPV

SEQ ID NO: 59864 - protein, 38 aa, Artificial Sequence
  GFR-binding peptide
  MOD_RES (2), (36), (37): Xaa is C or S
  MOD_RES (14), (15), (16), (17), (18): Xaa is A or G
  MOD_RES (19), (20), (21), (22): Xaa is A or G or is absent
AXSEVTMNRYKKLXXXXXXXXXFYLISIANMKEPVXXP

SEQ ID NO: 59865 - protein, 44 aa, Artificial Sequence; identical to SEQ ID NO: 25203
  GFR-binding peptide
  MOD_RES (2), (4), (38), (39): Xaa is C or S
  MOD_RES (16), (17), (18), (19), (20): Xaa is A or G
  MOD_RES (21), (22), (23), (24): Xaa is A or G or is absent

SEQ ID NO: 59866 - protein, 39 aa, Artificial Sequence
  GFR-binding peptide
  MOD_RES (33), (34): Xaa is C or S
  MOD_RES (11), (12), (13), (14), (15): Xaa is A or G
  MOD_RES (16), (17), (18), (19): Xaa is A or G or is absent
EVTMNRHKRLXXXXXXXXXYYLISTASMKEPVXXPEPIG

SEQ ID NO: 59867 - protein, 38 aa, Artificial Sequence; identical to SEQ ID NO: 25205
  GFR-binding peptide
  MOD_RES (2), (4), (38): Xaa is C or S
  MOD_RES (16), (17), (18), (19), (20): Xaa is A or G
  MOD_RES (21), (22), (23), (24): Xaa is A or G or is absent

SEQ ID NO: 59868 - protein, 34 aa, Artificial Sequence; identical to SEQ ID NO: 25206
  GFR-binding peptide
  MOD_RES (1), (3), (34): Xaa is C or S

SEQ ID NO: 59869 - protein, 40 aa, Artificial Sequence; identical to SEQ ID NO: 4150
  GFR-binding peptide
  MOD_RES (1), (34), (35): Xaa is C or S
  MOD_RES (12), (13), (14), (15), (16): Xaa is A or G
  MOD_RES (17), (18), (19), (20): Xaa is A or G or is absent

SEQ ID NO: 59870 - protein, 35 aa, Artificial Sequence; identical to SEQ ID NO: 4151
  GFR-binding peptide
  MOD_RES (1), (3), (35): Xaa is C or S

SEQ ID NO: 59871 - protein, 32 aa, Artificial Sequence; identical to SEQ ID NO: 4153
  GFR-binding peptide
  MOD_RES (2), (2): Xaa is C or S

SEQ ID NO: 59872 - protein, 39 aa, Artificial Sequence; identical to SEQ ID NO: 32224
  GFR-binding peptide
  MOD_RES (33), (34): Xaa is C or S
  MOD_RES (11), (12), (13), (14), (15): Xaa is A or G
  MOD_RES (16), (17), (18), (19): Xaa is A or G or is absent

SEQ ID NO: 59873 - protein, 35 aa, Artificial Sequence; identical to SEQ ID NO: 4157
  GFR-binding peptide
  MOD_RES (1), (33), (34): Xaa is C or S

SEQ ID NO: 59874 - protein, 41 aa, Artificial Sequence; identical to SEQ ID NO: 32230
  GFR-binding peptide
  MOD_RES (2), (35), (36): Xaa is C or S
  MOD_RES (13), (14), (15), (16), (17): Xaa is A or G
  MOD_RES (18), (19), (20), (21): Xaa is A or G or is absent

SEQ ID NO: 59875 - protein, 38 aa, Artificial Sequence; identical to SEQ ID NO: 4160
  GFR-binding peptide
  MOD_RES (2), (36), (37): Xaa is C or S
  MOD_RES (14), (15), (16), (17), (18): Xaa is A or G
  MOD_RES (19), (20), (21), (22): Xaa is A or G or is absent

SEQ ID NO: 59876 - protein, 37 aa, Artificial Sequence; identical to SEQ ID NO: 4162
  GFR-binding peptide
  MOD_RES (2), (4), (36), (37): Xaa is C or S

SEQ ID NO: 59877 - protein, 40 aa, Artificial Sequence
  GFR-binding peptide
  MOD_RES (2), (34), (35): Xaa is C or S
GXSRVVMNEYKFKIVNSSDDLYLVSIPELKTPAXXPKPVH

SEQ ID NO: 59878 - protein, 35 aa, Artificial Sequence
  GFR-binding peptide
  MOD_RES (1), (34), (35): Xaa is C or S
  MOD_RES (12), (13), (14), (15), (16): Xaa is A or G
  MOD_RES (17), (18), (19), (20): Xaa is A or G or is absent
XEEVIMYHYKLXXXXXXXXXKYLMSIPSTKVPAXX

SEQ ID NO: 59879 - protein, 40 aa, Artificial Sequence; identical to SEQ ID NO: 4164
  GFR-binding peptide
  MOD_RES (2), (36): Xaa is C or S
  MOD_RES (14), (15), (16), (17), (18): Xaa is A or G
  MOD_RES (19), (20), (21), (22): Xaa is A or G or is absent

SEQ ID NO: 59880 - protein, 37 aa, Artificial Sequence; identical to SEQ ID NO: 4166
  GFR-binding peptide
  MOD_RES (1), (32), (33): Xaa is C or S

SEQ ID NO: 59881 - protein, 36 aa, Artificial Sequence; identical to SEQ ID NO: 32240
  GFR-binding peptide
  MOD_RES (1), (35), (36): Xaa is C or S
  MOD_RES (13), (14), (15), (16), (17): Xaa is A or G
  MOD_RES (18), (19), (20), (21): Xaa is A or G or is absent

SEQ ID NO: 59882 - protein, 36 aa, Artificial Sequence
  GFR-binding peptide
  MOD_RES (34), (35): Xaa is C or S
  MOD_RES (12), (13), (14), (15), (16): Xaa is A or G
  MOD_RES (17), (18), (19), (20): Xaa is A or G or is absent
SEVTMNEYKFKXXXXXXXXXLYLISIPEMKEPVXXP

SEQ ID NO: 59883 - protein, 34 aa, Artificial Sequence; identical to SEQ ID NO: 4170
  GFR-binding peptide
  MOD_RES (33), (34): Xaa is C or S

SEQ ID NO: 59884 - protein, 38 aa, Artificial Sequence
  GFR-binding peptide
  MOD_RES (1), (34), (35): Xaa is C or S
  MOD_RES (12), (13), (14), (15), (16): Xaa is A or G
  MOD_RES (17), (18), (19), (20): Xaa is A or G or is absent
XSKVIMPIKGYXXXXXXXXXFYLINIPSLDQSVXXPSA

SEQ ID NO: 59885 - protein, 34 aa, Artificial Sequence; identical to SEQ ID NO: 25230
  GFR-binding peptide
  MOD_RES (1), (3), (34): Xaa is C or S

SEQ ID NO: 59886 - protein, 40 aa, Artificial Sequence; identical to SEQ ID NO: 25235
  GFR-binding peptide
  MOD_RES (2), (4), (36), (37): Xaa is C or S

SEQ ID NO: 59887 - protein, 42 aa, Artificial Sequence
  GFR-binding peptide
  MOD_RES (1), (3), (37), (38): Xaa is C or S
  MOD_RES (15), (16), (17), (18), (19): Xaa is A or G
  MOD_RES (20), (21), (22), (23): Xaa is A or G or is absent
XGXSEVVMDYHYKLXXXXXXXXXKYLISIPSLRTPVXXTPPT

SEQ ID NO: 59888 - protein, 38 aa, Artificial Sequence; identical to SEQ ID NO: 4184
  GFR-binding peptide
  MOD_RES (1), (35), (36): Xaa is C or S
  MOD_RES (13), (14), (15), (16), (17): Xaa is A or G
  MOD_RES (18), (19), (20), (21): Xaa is A or G or is absent

SEQ ID NO: 59889 - protein, 34 aa, Artificial Sequence; identical to SEQ ID NO: 32254
  GFR-binding peptide
  MOD_RES (34), (34): Xaa is C or S
  MOD_RES (12), (13), (14), (15), (16): Xaa is A or G
  MOD_RES (17), (18), (19), (20): Xaa is A or G or is absent

SEQ ID NO: 59890 - protein, 44 aa, Artificial Sequence; identical to SEQ ID NO: 4188
  GFR-binding peptide
  MOD_RES (2), (4), (39), (40): Xaa is C or S
  MOD_RES (17), (18), (19), (20), (21): Xaa is A or G
  MOD_RES (22), (23), (24), (25): Xaa is A or G or is absent

SEQ ID NO: 59891 - protein, 42 aa, Artificial Sequence
  GFR-binding peptide
  MOD_RES (2), (4), (36), (37): Xaa is C or S
HXGXSRVVMNEYKFKIVNSSDDLYLVSIPELKTPAXXPKPVH

SEQ ID NO: 59892 - protein, 42 aa, Artificial Sequence
  GFR-binding peptide
  MOD_RES (2), (36), (37): Xaa is C or S
  MOD_RES (14), (15), (16), (17), (18): Xaa is A or G
  MOD_RES (19), (20), (21), (22): Xaa is A or G or is absent
GXSRVVMNYHYKLXXXXXXXXXKYLVSIPSLKTPAXXPKPVH

SEQ ID NO: 59893 - protein, 34 aa, Artificial Sequence
  GFR-binding peptide
  MOD_RES (33), (34): Xaa is C or S
  MOD_RES (11), (12), (13), (14), (15): Xaa is A or G
  MOD_RES (16), (17), (18), (19): Xaa is A or G or is absent
DVVMGRHKRLXXXXXXXXXYYLMSTASMKTPTXX

SEQ ID NO: 59894 - protein, 31 aa, Artificial Sequence; identical to SEQ ID NO: 25244
  GFR-binding peptide
  MOD_RES (1), (1): Xaa is C or S

SEQ ID NO: 59895 - protein, 40 aa, Artificial Sequence; identical to SEQ ID NO: 4192
  GFR-binding peptide
  MOD_RES (34), (35): Xaa is C or S
  MOD_RES (12), (13), (14), (15), (16): Xaa is A or G
  MOD_RES (17), (18), (19), (20): Xaa is A or G or is absent

SEQ ID NO: 59896 - protein, 35 aa, Artificial Sequence
  GFR-binding peptide
  MOD_RES (1), (3), (34), (35): Xaa is C or S
XKXSKVVMPIKGYVKPTRGVFYLINIPSLDQPVXX

SEQ ID NO: 59897 - protein, 33 aa, Artificial Sequence; identical to SEQ ID NO: 25246
  GFR-binding peptide
  MOD_RES (1), (3): Xaa is C or S

SEQ ID NO: 59898 - protein, 37 aa, Artificial Sequence; identical to SEQ ID NO: 4194
  GFR-binding peptide
  MOD_RES (2), (34), (35): Xaa is C or S

SEQ ID NO: 59899 - protein, 42 aa, Artificial Sequence; identical to SEQ ID NO: 4195
  GFR-binding peptide
  MOD_RES (1), (3), (36), (37): Xaa is C or S
  MOD_RES (14), (15), (16), (17), (18): Xaa is A or G
  MOD_RES (19), (20), (21), (22): Xaa is A or G or is absent

SEQ ID NO: 59900 - protein, 37 aa, Artificial Sequence; identical to SEQ ID NO: 25250
  GFR-binding peptide
  MOD_RES (1), (35), (36): Xaa is C or S
  MOD_RES (13), (14), (15), (16), (17): Xaa is A or G
  MOD_RES (18), (19), (20), (21): Xaa is A or G or is absent

SEQ ID NO: 59901 - protein, 33 aa, Artificial Sequence
  GFR-binding peptide
  MOD_RES (31), (32): Xaa is C or S
EVTMNRYKKLVVNKNEDFYLISIANMKEPVXXP

SEQ ID NO: 59902 - protein, 35 aa, Artificial Sequence; identical to SEQ ID NO: 4199
  GFR-binding peptide
  MOD_RES (1), (33), (34): Xaa is C or S

SEQ ID NO: 59903 - protein, 33 aa, Artificial Sequence; identical to SEQ ID NO: 4200
  GFR-binding peptide
  MOD_RES (31), (32): Xaa is C or S

SEQ ID NO: 59904 - protein, 39 aa, Artificial Sequence
  GFR-binding peptide
  MOD_RES (33), (34): Xaa is C or S
  MOD_RES (11), (12), (13), (14), (15): Xaa is A or G
  MOD_RES (16), (17), (18), (19): Xaa is A or G or is absent
SRVIMPIKGYXXXXXXXXXFYLINIPSLAQPVXXPAASA

SEQ ID NO: 59905 - protein, 42 aa, Artificial Sequence
  GFR-binding peptide
  MOD_RES (2), (4), (38), (39): Xaa is C or S
  MOD_RES (16), (17), (18), (19), (20): Xaa is A or G
  MOD_RES (21), (22), (23), (24): Xaa is A or G or is absent
RXGXAEVVMDRHKRLXXXXXXXXXYYLISTASLRAPVXXSAP

SEQ ID NO: 59906 - protein, 37 aa, Artificial Sequence
  GFR-binding peptide
  MOD_RES (33), (34): Xaa is C or S
  MOD_RES (11), (12), (13), (14), (15): Xaa is A or G
  MOD_RES (16), (17), (18), (19): Xaa is A or G or is absent
EEVIMEYKFKXXXXXXXXXLYLMSIPETKVPAXXTSP

SEQ ID NO: 59907 - protein, 32 aa, Artificial Sequence; identical to SEQ ID NO: 4202
  GFR-binding peptide
  MOD_RES (11), (12), (13), (14), (15): Xaa is A or G
  MOD_RES (16), (17), (18), (19): Xaa is A or G or is absent

SEQ ID NO: 59908 - protein, 38 aa, Artificial Sequence; identical to SEQ ID NO: 25258
  GFR-binding peptide
  MOD_RES (33), (34): Xaa is C or S
  MOD_RES (11), (12), (13), (14), (15): Xaa is A or G
  MOD_RES (16), (17), (18), (19): Xaa is A or G or is absent

SEQ ID NO: 59909 - protein, 42 aa, Artificial Sequence
  GFR-binding peptide
  MOD_RES (1), (3), (37), (38): Xaa is C or S
  MOD_RES (15), (16), (17), (18), (19): Xaa is A or G
  MOD_RES (20), (21), (22), (23): Xaa is A or G or is absent
XAXSEVTMNPIKGYXXXXXXXXXFYLINIPSMKEPVXXPEPI

SEQ ID NO: 59910 - protein, 34 aa, Artificial Sequence; identical to SEQ ID NO: 4204
  GFR-binding peptide
  MOD_RES (31), (32): Xaa is C or S

SEQ ID NO: 59911 - protein, 36 aa, Artificial Sequence
  GFR-binding peptide
  MOD_RES (2), (35), (36): Xaa is C or S
  MOD_RES (13), (14), (15), (16), (17): Xaa is A or G
  MOD_RES (18), (19), (20), (21): Xaa is A or G or is absent
GXEEVIMEYKFKXXXXXXXXXLYLMSIPETKVPAXX

SEQ ID NO: 59912 - protein, 33 aa, Artificial Sequence; identical to SEQ ID NO: 25263
  GFR-binding peptide
  MOD_RES (1), (3): Xaa is C or S

SEQ ID NO: 59913 - protein, 37 aa, Artificial Sequence; identical to SEQ ID NO: 4205
  GFR-binding peptide
  MOD_RES (1), (3), (37): Xaa is C or S
  MOD_RES (15), (16), (17), (18), (19): Xaa is A or G
  MOD_RES (20), (21), (22), (23): Xaa is A or G or is absent

SEQ ID NO: 59914 - protein, 33 aa, Artificial Sequence; identical to SEQ ID NO: 25267
  GFR-binding peptide
  MOD_RES (32), (32): Xaa is C or S

SEQ ID NO: 59915 - protein, 38 aa, Artificial Sequence; identical to SEQ ID NO: 32281
  GFR-binding peptide
  MOD_RES (1), (3), (34), (35): Xaa is C or S

SEQ ID NO: 59916 - protein, 39 aa, Artificial Sequence; identical to SEQ ID NO: 11618
  GFR-binding peptide
  MOD_RES (1), (3), (37), (38): Xaa is C or S
  MOD_RES (15), (16), (17), (18), (19): Xaa is A or G
  MOD_RES (20), (21), (22), (23): Xaa is A or G or is absent

SEQ ID NO: 59917 - protein, 37 aa, Artificial Sequence; identical to SEQ ID NO: 25269
  GFR-binding peptide
  MOD_RES (34), (35): Xaa is C or S
  MOD_RES (12), (13), (14), (15), (16): Xaa is A or G
  MOD_RES (17), (18), (19), (20): Xaa is A or G or is absent

SEQ ID NO: 59918 - protein, 37 aa, Artificial Sequence; identical to SEQ ID NO: 32284
  GFR-binding peptide
  MOD_RES (2), (4), (36), (37): Xaa is C or S

SEQ ID NO: 59919 - protein, 38 aa, Artificial Sequence; identical to SEQ ID NO: 4210
  GFR-binding peptide
  MOD_RES (1), (35), (36): Xaa is C or S
  MOD_RES (13), (14), (15), (16), (17): Xaa is A or G
  MOD_RES (18), (19), (20), (21): Xaa is A or G or is absent

SEQ ID NO: 59920 - protein, 35 aa, Artificial Sequence; identical to SEQ ID NO: 11621
  GFR-binding peptide
  MOD_RES (1), (3), (35): Xaa is C or S

SEQ ID NO: 59921 - protein, 41 aa, Artificial Sequence
  GFR-binding peptide
  MOD_RES (2), (4), (38), (39): Xaa is C or S
  MOD_RES (16), (17), (18), (19), (20): Xaa is A or G
  MOD_RES (21), (22), (23), (24): Xaa is A or G or is absent
SXGXRDVVMGEYKFKXXXXXXXXXLYLMSIPEMKTPTXXPG

SEQ ID NO: 59922 - protein, 38 aa, Artificial Sequence; identical to SEQ ID NO: 4212
  GFR-binding peptide
  MOD_RES (2), (36), (37): Xaa is C or S
  MOD_RES (14), (15), (16), (17), (18): Xaa is A or G
  MOD_RES (19), (20), (21), (22): Xaa is A or G or is absent

SEQ ID NO: 59923 - protein, 36 aa, Artificial Sequence
  GFR-binding peptide
  MOD_RES (1), (35), (36): Xaa is C or S
  MOD_RES (13), (14), (15), (16), (17): Xaa is A or G
  MOD_RES (18), (19), (20), (21): Xaa is A or G or is absent
XAEVVMDRHKRLXXXXXXXXXYYLISTASLRAPVXX

SEQ ID NO: 59924 - protein, 37 aa, Artificial Sequence; identical to SEQ ID NO: 4215
  GFR-binding peptide
  MOD_RES (1), (35), (36): Xaa is C or S
  MOD_RES (13), (14), (15), (16), (17): Xaa is A or G
  MOD_RES (18), (19), (20), (21): Xaa is A or G or is absent

SEQ ID NO: 59925 - protein, 38 aa, Artificial Sequence; identical to SEQ ID NO: 4216
  GFR-binding peptide
  MOD_RES (1), (32), (33): Xaa is C or S

SEQ ID NO: 59926 - protein, 36 aa, Artificial Sequence; identical to SEQ ID NO: 25276
  GFR-binding peptide
  MOD_RES (1), (35), (36): Xaa is C or S
  MOD_RES (13), (14), (15), (16), (17): Xaa is A or G
  MOD_RES (18), (19), (20), (21): Xaa is A or G or is absent

SEQ ID NO: 59927 - protein, 30 aa, Artificial Sequence; identical to SEQ ID NO: 4217
  GFR-binding peptide

SEQ ID NO: 59928 - protein, 39 aa, Artificial Sequence
  GFR-binding peptide
  MOD_RES (33), (34): Xaa is C or S
  MOD_RES (11), (12), (13), (14), (15): Xaa is A or G
  MOD_RES (16), (17), (18), (19): Xaa is A or G or is absent
DVVMGRHKRLXXXXXXXXXYYLMSTASMKTPTXXPGASG

SEQ ID NO: 59929 - protein, 37 aa, Artificial Sequence; identical to SEQ ID NO: 4223
  GFR-binding peptide
  MOD_RES (2), (36), (37): Xaa is C or S
  MOD_RES (14), (15), (16), (17), (18): Xaa is A or G
  MOD_RES (19), (20), (21), (22): Xaa is A or G or is absent

SEQ ID NO: 59930 - protein, 36 aa, Artificial Sequence; identical to SEQ ID NO: 4224
  GFR-binding peptide
  MOD_RES (2), (4), (35), (36): Xaa is C or S

SEQ ID NO: 59931 - protein, 35 aa, Artificial Sequence; identical to SEQ ID NO: 32298
  GFR-binding peptide
  MOD_RES (34), (35): Xaa is C or S
  MOD_RES (12), (13), (14), (15), (16): Xaa is A or G
  MOD_RES (17), (18), (19), (20): Xaa is A or G or is absent

SEQ ID NO: 59932 - protein, 39 aa, Artificial Sequence; identical to SEQ ID NO: 25284
  GFR-binding peptide
  MOD_RES (33), (34): Xaa is C or S
  MOD_RES (11), (12), (13), (14), (15): Xaa is A or G
  MOD_RES (16), (17), (18), (19): Xaa is A or G or is absent

SEQ ID NO: 59933 - protein, 38 aa, Artificial Sequence
  GFR-binding peptide
  MOD_RES (33), (34): Xaa is C or S
  MOD_RES (11), (12), (13), (14), (15): Xaa is A or G
  MOD_RES (16), (17), (18), (19): Xaa is A or G or is absent
SRVIMPIKGYXXXXXXXXXFYLINIPSLAQPVXXPAAS

SEQ ID NO: 59934 - protein, 35 aa, Artificial Sequence; identical to SEQ ID NO: 4225
  GFR-binding peptide
  MOD_RES (2), (4), (35): Xaa is C or S

SEQ ID NO: 59935 - protein, 32 aa, Artificial Sequence
  GFR-binding peptide
  MOD_RES (11), (12), (13), (14), (15): Xaa is A or G
  MOD_RES (16), (17), (18), (19): Xaa is A or G or is absent
DVVMGEYKFKXXXXXXXXXLYLMSIPEMKTPT

SEQ ID NO: 59936 - protein, 40 aa, Artificial Sequence
  GFR-binding peptide
  MOD_RES (1), (3), (36), (37): Xaa is C or S
  MOD_RES (14), (15), (16), (17), (18): Xaa is A or G
  MOD_RES (19), (20), (21), (22): Xaa is A or G or is absent
XGXEEVIMRHKRLXXXXXXXXXYYLMSTASTKVPAXXTSP

SEQ ID NO: 59937 - protein, 38 aa, Artificial Sequence; identical to SEQ ID NO: 4227
  GFR-binding peptide
  MOD_RES (1), (34), (35): Xaa is C or S
  MOD_RES (12), (13), (14), (15), (16): Xaa is A or G
  MOD_RES (17), (18), (19), (20): Xaa is A or G or is absent

SEQ ID NO: 59938 - protein, 36 aa, Artificial Sequence; identical to SEQ ID NO: 4228
  GFR-binding peptide
  MOD_RES (1), (33), (34): Xaa is C or S

SEQ ID NO: 59939 - protein, 41 aa, Artificial Sequence
  GFR-binding peptide
  MOD_RES (2), (36), (37): Xaa is C or S
  MOD_RES (14), (15), (16), (17), (18): Xaa is A or G
  MOD_RES (19), (20), (21), (22): Xaa is A or G or is absent
AXSEVTMNPIKGYXXXXXXXXXFYLINIPSMKEPVXXPEPI

SEQ ID NO: 59940 - protein, 41 aa, Artificial Sequence; identical to SEQ ID NO: 31210
  GFR-binding peptide
  MOD_RES (1), (3), (37), (38): Xaa is C or S
  MOD_RES (15), (16), (17), (18), (19): Xaa is A or G
  MOD_RES (20), (21), (22), (23): Xaa is A or G or is absent

SEQ ID NO: 59941 - protein, 37 aa, Artificial Sequence; identical to SEQ ID NO: 4230
  GFR-binding peptide
  MOD_RES (2), (4), (35), (36): Xaa is C or S

SEQ ID NO: 59942 - protein, 40 aa, Artificial Sequence; identical to SEQ ID NO: 31214
  GFR-binding peptide
  MOD_RES (1), (3), (35), (36): Xaa is C or S

SEQ ID NO: 59943 - protein, 37 aa, Artificial Sequence; identical to SEQ ID NO: 31215
  GFR-binding peptide
  MOD_RES (2), (34): Xaa is C or S

SEQ ID NO: 59944 - protein, 40 aa, Artificial Sequence; identical to SEQ ID NO: 25293
  GFR-binding peptide
  MOD_RES (34), (35): Xaa is C or S
  MOD_RES (12), (13), (14), (15), (16): Xaa is A or G
  MOD_RES (17), (18), (19), (20): Xaa is A or G or is absent

SEQ ID NO: 59945 - protein, 35 aa, Artificial Sequence; identical to SEQ ID NO: 4233
  GFR-binding peptide
  MOD_RES (1), (3), (34), (35): Xaa is C or S

SEQ ID NO: 59946 - protein, 35 aa, Artificial Sequence
  GFR-binding peptide
  MOD_RES (1), (35): Xaa is C or S
  MOD_RES (13), (14), (15), (16), (17): Xaa is A or G
  MOD_RES (18), (19), (20), (21): Xaa is A or G or is absent
XSEVVMDYHYKLXXXXXXXXXKYLISIPSLRTPVX

SEQ ID NO: 59947 - protein, 42 aa, Artificial Sequence; identical to SEQ ID NO: 4234
  GFR-binding peptide
  MOD_RES (2), (4), (37), (38): Xaa is C or S
  MOD_RES (15), (16), (17), (18), (19): Xaa is A or G
  MOD_RES (20), (21), (22), (23): Xaa is A or G or is absent

SEQ ID NO: 59948 - protein, 38 aa, Artificial Sequence; identical to SEQ ID NO: 4236
  GFR-binding peptide
  MOD_RES (1), (33), (34): Xaa is C or S

SEQ ID NO: 59949 - protein, 35 aa, Artificial Sequence
  GFR-binding peptide
  MOD_RES (2), (33), (34): Xaa is C or S
GXEEVIMEYKFKLLVRGNDLYLMSIPETKVPAXXT

SEQ ID NO: 59950 - protein, 41 aa, Artificial Sequence; identical to SEQ ID NO: 25297
  GFR-binding peptide
  MOD_RES (2), (4), (38): Xaa is C or S
  MOD_RES (16), (17), (18), (19), (20): Xaa is A or G
  MOD_RES (21), (22), (23), (24): Xaa is A or G or is absent

SEQ ID NO: 59951 - protein, 39 aa, Artificial Sequence
  GFR-binding peptide
  MOD_RES (2), (4), (36), (37): Xaa is C or S
RXGXESVAMGRHKRLYTVVGKDYYLISTASLKTPVXXAK

SEQ ID NO: 59952 - protein, 37 aa, Artificial Sequence; identical to SEQ ID NO: 4240
  GFR-binding peptide
  MOD_RES (1), (3), (35), (36): Xaa is C or S

SEQ ID NO: 59953 - protein, 39 aa, Artificial Sequence
  GFR-binding peptide
  MOD_RES (1), (33), (34): Xaa is C or S
XSEVTMNYHYKLVVNKNEDKYLISIPSMKEPVXXPEPIG

SEQ ID NO: 59954 - protein, 40 aa, Artificial Sequence
  GFR-binding peptide
  MOD_RES (2), (34), (35): Xaa is C or S
AXSEVTMNPIKGYVVNKNEDFYLINIPSMKEPVXXPEPIG

SEQ ID NO: 59955 - protein, 39 aa, Artificial Sequence; identical to SEQ ID NO: 31226
  GFR-binding peptide
  MOD_RES (2), (4), (37), (38): Xaa is C or S

SEQ ID NO: 59956 - protein, 38 aa, Artificial Sequence; identical to SEQ ID NO: 4245
  GFR-binding peptide
  MOD_RES (2), (35), (36): Xaa is C or S

SEQ ID NO: 59957 - protein, 37 aa, Artificial Sequence; identical to SEQ ID NO: 4246
  GFR-binding peptide
  MOD_RES (2), (35), (36): Xaa is C or S
  MOD_RES (13), (14), (15), (16), (17): Xaa is A or G
  MOD_RES (18), (19), (20), (21): Xaa is A or G or is absent

SEQ ID NO: 59958 - protein, 33 aa, Artificial Sequence; identical to SEQ ID NO: 31232
  GFR-binding peptide
  MOD_RES (32), (33): Xaa is C or S

SEQ ID NO: 59959 - protein, 39 aa, Artificial Sequence; identical to SEQ ID NO: 4247
  GFR-binding peptide
  MOD_RES (2), (36), (37): Xaa is C or S
  MOD_RES (14), (15), (16), (17), (18): Xaa is A or G
  MOD_RES (19), (20), (21), (22): Xaa is A or G or is absent

SEQ ID NO: 59960 - protein, 39 aa, Artificial Sequence; identical to SEQ ID NO: 31234
  GFR-binding peptide
  MOD_RES (2), (4), (36), (37): Xaa is C or S

SEQ ID NO: 59961 - protein, 31 aa, Artificial Sequence; identical to SEQ ID NO: 56159
  GFR-binding peptide
  MOD_RES (1), (1): Xaa is C or S

SEQ ID NO: 59962 - protein, 39 aa, Artificial Sequence
  GFR-binding peptide
  MOD_RES (34), (35): Xaa is C or S
  MOD_RES (12), (13), (14), (15), (16): Xaa is A or G
  MOD_RES (17), (18), (19), (20): Xaa is A or G or is absent
SEVVMDEYKFKXXXXXXXXXLYLISIPELRTPVXXTPPT

SEQ ID NO: 59963 - protein, 35 aa, Artificial Sequence; identical to SEQ ID NO: 4251
  GFR-binding peptide
  MOD_RES (2), (4), (35): Xaa is C or S

SEQ ID NO: 59964 - protein, 37 aa, Artificial Sequence; identical to SEQ ID NO: 4254
  GFR-binding peptide
  MOD_RES (31), (32): Xaa is C or S

SEQ ID NO: 59965 - protein, 36 aa, Artificial Sequence
  GFR-binding peptide
  MOD_RES (1), (33), (34): Xaa is C or S
XRDVVMGEYKFKIIQQKDNLYLMSIPEMKTPTXXPG

SEQ ID NO: 59966 - protein, 36 aa, Artificial Sequence
  GFR-binding peptide
  MOD_RES (32), (33): Xaa is C or S
SEVTMNEYKFKVVNKNEDLYLISIPEMKEPVXXPEP

SEQ ID NO: 59967 - protein, 40 aa, Artificial Sequence
  GFR-binding peptide
  MOD_RES (2), (4), (36), (37): Xaa is C or S
RXAXSEVTMNPIKGYVVNKNEDFYLINIPSMKEPVXXPEP

SEQ ID NO: 59968 - protein, 40 aa, Artificial Sequence
  GFR-binding peptide
  MOD_RES (1), (3), (37), (38): Xaa is C or S
  MOD_RES (15), (16), (17), (18), (19): Xaa is A or G
  MOD_RES (20), (21), (22), (23): Xaa is A or G or is absent
XGXAEVVMDRHKRLXXXXXXXXXYYLISTASLRAPVXXSA

SEQ ID NO: 59969 - protein, 39 aa, Artificial Sequence; identical to SEQ ID NO: 31243
  GFR-binding peptide
  MOD_RES (1), (33), (34): Xaa is C or S

SEQ ID NO: 59970 - protein, 39 aa, Artificial Sequence; identical to SEQ ID NO: 4258
  GFR-binding peptide
  MOD_RES (34), (35): Xaa is C or S
  MOD_RES (12), (13), (14), (15), (16): Xaa is A or G
  MOD_RES (17), (18), (19), (20): Xaa is A or G or is absent

SEQ ID NO: 59971 - protein, 37 aa, Artificial Sequence; identical to SEQ ID NO: 4259
  GFR-binding peptide
  MOD_RES (2), (4), (35), (36): Xaa is C or S

SEQ ID NO: 59972 - protein, 39 aa, Artificial Sequence
  GFR-binding peptide
  MOD_RES (2), (36), (37): Xaa is C or S
  MOD_RES (14), (15), (16), (17), (18): Xaa is A or G
  MOD_RES (19), (20), (21), (22): Xaa is A or G or is absent
GXRDVVMGEYKFKXXXXXXXXXLYLMSIPEMKTPTXXPG

SEQ ID NO: 59973 - protein, 37 aa, Artificial Sequence
  GFR-binding peptide
  MOD_RES (1), (35), (36): Xaa is C or S
  MOD_RES (13), (14), (15), (16), (17): Xaa is A or G
  MOD_RES (18), (19), (20), (21): Xaa is A or G or is absent
XESVAMGRHKRLXXXXXXXXXYYLISTASLKTPVXXA

SEQ ID NO: 59974 - protein, 32 aa, Artificial Sequence
  GFR-binding peptide
  MOD_RES (1), (32): Xaa is C or S
XEEVIMYHYKLLLVRGNDKYLMSIPSTKVPAX

SEQ ID NO: 59975 - protein, 36 aa, Artificial Sequence; identical to SEQ ID NO: 11684
  GFR-binding peptide
  MOD_RES (1), (3), (35), (36): Xaa is C or S

SEQ ID NO: 59976 - protein, 40 aa, Artificial Sequence; identical to SEQ ID NO: 31257
  GFR-binding peptide
  MOD_RES (2), (36), (37): Xaa is C or S
  MOD_RES (14), (15), (16), (17), (18): Xaa is A or G
  MOD_RES (19), (20), (21), (22): Xaa is A or G or is absent

SEQ ID NO: 59977 - protein, 37 aa, Artificial Sequence
  GFR-binding peptide
  MOD_RES (2), (36), (37): Xaa is C or S
  MOD_RES (14), (15), (16), (17), (18): Xaa is A or G
  MOD_RES (19), (20), (21), (22): Xaa is A or G or is absent
AXSEVTMNPIKGYXXXXXXXXXFYLINIPSMKEPVXX

SEQ ID NO: 59978 - protein, 35 aa, Artificial Sequence; identical to SEQ ID NO: 31261
  GFR-binding peptide
  MOD_RES (2), (2): Xaa is C or S
  MOD_RES (14), (15), (16), (17), (18): Xaa is A or G
  MOD_RES (19), (20), (21), (22): Xaa is A or G or is absent

SEQ ID NO: 59979 - protein, 35 aa, Artificial Sequence; identical to SEQ ID NO: 11686
  GFR-binding peptide
  MOD_RES (33), (34): Xaa is C or S
  MOD_RES (11), (12), (13), (14), (15): Xaa is A or G
  MOD_RES (16), (17), (18), (19): Xaa is A or G or is absent

SEQ ID NO: 59980 - protein, 37 aa, Artificial Sequence
  GFR-binding peptide
  MOD_RES (1), (3), (36), (37): Xaa is C or S
  MOD_RES (14), (15), (16), (17), (18): Xaa is A or G
  MOD_RES (19), (20), (21), (22): Xaa is A or G or is absent
XGXEEVIMYHYKLXXXXXXXXXKYLMSIPSTKVPAXX

SEQ ID NO: 59981 - protein, 41 aa, Artificial Sequence
  GFR-binding peptide
  MOD_RES (2), (4), (37), (38): Xaa is C or S
  MOD_RES (15), (16), (17), (18), (19): Xaa is A or G
  MOD_RES (20), (21), (22), (23): Xaa is A or G or is absent
SXKXSKVVMPIKGYXXXXXXXXXFYLINIPSLDQPVXXPSA

SEQ ID NO: 59982 - protein, 39 aa, Artificial Sequence; identical to SEQ ID NO: 31268
  GFR-binding peptide
  MOD_RES (2), (35), (36): Xaa is C or S
  MOD_RES (13), (14), (15), (16), (17): Xaa is A or G
  MOD_RES (18), (19), (20), (21): Xaa is A or G or is absent

SEQ ID NO: 59983 - protein, 36 aa, Artificial Sequence
  GFR-binding peptide
  MOD_RES (2), (34), (35): Xaa is C or S
GXRDVVMGYHYKLIIQQKDNKYLMSIPSMKTPTXXP

SEQ ID NO: 59984 - protein, 40 aa, Artificial Sequence; identical to SEQ ID NO: 31271
  GFR-binding peptide
  MOD_RES (2), (34), (35): Xaa is C or S

SEQ ID NO: 59985 - protein, 42 aa, Artificial Sequence; identical to SEQ ID NO: 4274
  GFR-binding peptide
  MOD_RES (2), (4), (37), (38): Xaa is C or S

SEQ ID NO: 59986 - protein, 38 aa, Artificial Sequence; identical to SEQ ID NO: 25324
  GFR-binding peptide
  MOD_RES (2), (34), (35): Xaa is C or S

SEQ ID NO: 59987 - protein, 38 aa, Artificial Sequence
  GFR-binding peptide
  MOD_RES (2), (33), (34): Xaa is C or S
GXEEVIMEYKFKLLVRGNDLYLMSIPETKVPAXXTSPV

SEQ ID NO: 59988 - protein, 36 aa, Artificial Sequence; identical to SEQ ID NO: 4276
  GFR-binding peptide
  MOD_RES (1), (35): Xaa is C or S
  MOD_RES (13), (14), (15), (16), (17): Xaa is A or G
  MOD_RES (18), (19), (20), (21): Xaa is A or G or is absent

SEQ ID NO: 59989 - protein, 34 aa, Artificial Sequence; identical to SEQ ID NO: 4277
  GFR-binding peptide
  MOD_RES (1), (1): Xaa is C or S
  MOD_RES (13), (14), (15), (16), (17): Xaa is A or G
  MOD_RES (18), (19), (20), (21): Xaa is A or G or is absent

SEQ ID NO: 59990 - protein, 36 aa, Artificial Sequence
  GFR-binding peptide
  MOD_RES (31), (32): Xaa is C or S
SKVVMPIKGYVKPTRGVFYLINIPSLDQPVXXPSAS

SEQ ID NO: 59991 - protein, 40 aa, Artificial Sequence; identical to SEQ ID NO: 31278
  GFR-binding peptide
  MOD_RES (1), (3), (35), (36): Xaa is C or S

SEQ ID NO: 59992 - protein, 39 aa, Artificial Sequence
  GFR-binding peptide
  MOD_RES (2), (36), (37): Xaa is C or S
  MOD_RES (14), (15), (16), (17), (18): Xaa is A or G
  MOD_RES (19), (20), (21), (22): Xaa is A or G or is absent
GXRDVVMGYHYKLXXXXXXXXXKYLMSIPSMKTPTXXPG

SEQ ID NO: 59993 - protein, 32 aa, Artificial Sequence; identical to SEQ ID NO: 56211
  GFR-binding peptide
  MOD_RES (32), (32): Xaa is C or S

SEQ ID NO: 59994 - protein, 41 aa, Artificial Sequence; identical to SEQ ID NO: 31283
  GFR-binding peptide
  MOD_RES (2), (4), (36), (37): Xaa is C or S

SEQ ID NO: 59995 - protein, 34 aa, Artificial Sequence
  GFR-binding peptide
  MOD_RES (1), (3): Xaa is C or S
XAXSEVTMNYHYKLVVNKNEDKYLISIPSMKEPV

SEQ ID NO: 59996 - protein, 33 aa, Artificial Sequence; identical to SEQ ID NO: 4281
  GFR-binding peptide
  MOD_RES (31), (31): Xaa is C or S

SEQ ID NO: 59997 - protein, 44 aa, Artificial Sequence; identical to SEQ ID NO: 4282
  GFR-binding peptide
  MOD_RES (2), (4), (38), (39): Xaa is C or S
  MOD_RES (16), (17), (18), (19), (20): Xaa is A or G
  MOD_RES (21), (22), (23), (24): Xaa is A or G or is absent

SEQ ID NO: 59998 - protein, 36 aa, Artificial Sequence
  GFR-binding peptide
  MOD_RES (2), (34), (35): Xaa is C or S
AXSEVTMNYHYKLVVNKNEDKYLISIPSMKEPVXXP

SEQ ID NO: 59999 - protein, 38 aa, Artificial Sequence; identical to SEQ ID NO: 25331
  GFR-binding peptide
  MOD_RES (32), (33): Xaa is C or S

SEQ ID NO: 60000 - protein, 32 aa, Artificial Sequence
  GFR-binding peptide
  MOD_RES (31), (32): Xaa is C or S
EVVMDRHKRLVVNNASDYYLISTASLRTPVXX

SEQ ID NO: 60001 - protein, 32 aa, Artificial Sequence; identical to SEQ ID NO: 31297
  GFR-binding peptide
  MOD_RES (11), (12), (13), (14), (15): Xaa is A or G
  MOD_RES (16), (17), (18), (19): Xaa is A or G or is absent

SEQ ID NO: 60002 - protein, 43 aa, Artificial Sequence; identical to SEQ ID NO: 31298
  GFR-binding peptide
  MOD_RES (2), (4), (38), (39): Xaa is C or S
  MOD_RES (16), (17), (18), (19), (20): Xaa is A or G
  MOD_RES (21), (22), (23), (24): Xaa is A or G or is absent

SEQ ID NO: 60003 - protein, 43 aa, Artificial Sequence; identical to SEQ ID NO: 4288
  GFR-binding peptide
  MOD_RES (1), (3), (37), (38): Xaa is C or S
  MOD_RES (15), (16), (17), (18), (19): Xaa is A or G
  MOD_RES (20), (21), (22), (23): Xaa is A or G or is absent

SEQ ID NO: 60004 - protein, 38 aa, Artificial Sequence; identical to SEQ ID NO: 31302
  GFR-binding peptide
  MOD_RES (1), (3), (35), (36): Xaa is C or S

SEQ ID NO: 60005 - protein, 33 aa, Artificial Sequence; identical to SEQ ID NO: 31303
  GFR-binding peptide
  MOD_RES (33), (33): Xaa is C or S
  MOD_RES (11), (12), (13), (14), (15): Xaa is A or G
  MOD_RES (16), (17), (18), (19): Xaa is A or G or is absent

SEQ ID NO: 60006 - protein, 39 aa, Artificial Sequence
  GFR-binding peptide
  MOD_RES (2), (34), (35): Xaa is C or S
AXSEVTMNRHKRLVVNKNEDYYLISTASMKEPVXXPEPI

SEQ ID NO: 60007 - protein, 44 aa, Artificial Sequence; identical to SEQ ID NO: 25340
  GFR-binding peptide
  MOD_RES (2), (4), (38), (39): Xaa is C or S
  MOD_RES (16), (17), (18), (19), (20): Xaa is A or G
  MOD_RES (21), (22), (23), (24): Xaa is A or G or is absent

SEQ ID NO: 60008 - protein, 37 aa, Artificial Sequence; identical to SEQ ID NO: 25341
  GFR-binding peptide
  MOD_RES (33), (34): Xaa is C or S
  MOD_RES (11), (12), (13), (14), (15): Xaa is A or G
  MOD_RES (16), (17), (18), (19): Xaa is A or G or is absent

SEQ ID NO: 60009 - protein, 31 aa, Artificial Sequence; identical to SEQ ID NO: 31307
  GFR-binding peptide

SEQ ID NO: 60010 - protein, 33 aa, Artificial Sequence
  GFR-binding peptide
  MOD_RES (31), (32): Xaa is C or S
EEVIMYHYKLLLVRGNDKYLMSIPSTKVPAXXT

SEQ ID NO: 60011 - protein, 41 aa, Artificial Sequence; identical to SEQ ID NO: 4293
  GFR-binding peptide
  MOD_RES (2), (37), (38): Xaa is C or S
  MOD_RES (15), (16), (17), (18), (19): Xaa is A or G
  MOD_RES (20), (21), (22), (23): Xaa is A or G or is absent

SEQ ID NO: 60012 - protein, 36 aa, Artificial Sequence; identical to SEQ ID NO: 25345
  GFR-binding peptide
  MOD_RES (2), (34), (35): Xaa is C or S

SEQ ID NO: 60013 - protein, 38 aa, Artificial Sequence; identical to SEQ ID NO: 4294
  GFR-binding peptide
  MOD_RES (33), (34): Xaa is C or S
  MOD_RES (11), (12), (13), (14), (15): Xaa is A or G
  MOD_RES (16), (17), (18), (19): Xaa is A or G or is absent

SEQ ID NO: 60014 - protein, 33 aa, Artificial Sequence; identical to SEQ ID NO: 4295
  GFR-binding peptide
  MOD_RES (2), (33): Xaa is C or S

SEQ ID NO: 60015 - protein, 36 aa, Artificial Sequence
  GFR-binding peptide
  MOD_RES (31), (32): Xaa is C or S
EVTMNRYKKLVVNKNEDFYLISIANMKEPVXXPEPI

SEQ ID NO: 60016 - protein, 33 aa, Artificial Sequence; identical to SEQ ID NO: 4298
  GFR-binding peptide
  MOD_RES (2), (33): Xaa is C or S

SEQ ID NO: 60017 - protein, 37 aa, Artificial Sequence; identical to SEQ ID NO: 4299
  GFR-binding peptide
  MOD_RES (2), (36), (37): Xaa is C or S
  MOD_RES (14), (15), (16), (17), (18): Xaa is A or G
  MOD_RES (19), (20), (21), (22): Xaa is A or G or is absent

SEQ ID NO: 60018 - protein, 40 aa, Artificial Sequence; identical to SEQ ID NO: 31319
  GFR-binding peptide
  MOD_RES (2), (36), (37): Xaa is C or S
  MOD_RES (14), (15), (16), (17), (18): Xaa is A or G
  MOD_RES (19), (20), (21), (22): Xaa is A or G or is absent

SEQ ID NO: 60019 - protein, 33 aa, Artificial Sequence
  GFR-binding peptide
  MOD_RES (32), (33): Xaa is C or S
RDVVMGRHKRLIIQQKDNYYLMSTASMKTPTXX

SEQ ID NO: 60020 - protein, 40 aa, Artificial Sequence; identical to SEQ ID NO: 31323
  GFR-binding peptide
  MOD_RES (1), (3), (34), (35): Xaa is C or S

SEQ ID NO: 60021 - protein, 40 aa, Artificial Sequence; identical to SEQ ID NO: 4307
  GFR-binding peptide
  MOD_RES (2), (35), (36): Xaa is C or S

SEQ ID NO: 60022 - protein, 36 aa, Artificial Sequence; identical to SEQ ID NO: 31325
  GFR-binding peptide
  MOD_RES (1), (33), (34): Xaa is C or S

SEQ ID NO: 60023 - protein, 41 aa, Artificial Sequence; identical to SEQ ID NO: 4311
  GFR-binding peptide
  MOD_RES (1), (35), (36): Xaa is C or S
  MOD_RES (13), (14), (15), (16), (17): Xaa is A or G
  MOD_RES (18), (19), (20), (21): Xaa is A or G or is absent

SEQ ID NO: 60024 - protein, 40 aa, Artificial Sequence; identical to SEQ ID NO: 56247
  GFR-binding peptide
  MOD_RES (1), (3), (35), (36): Xaa is C or S

SEQ ID NO: 60025 - protein, 39 aa, Artificial Sequence; identical to SEQ ID NO: 4315
  GFR-binding peptide
  MOD_RES (2), (33), (34): Xaa is C or S

SEQ ID NO: 60026 - protein, 36 aa, Artificial Sequence
  GFR-binding peptide
  MOD_RES (2), (4), (35), (36): Xaa is C or S
SXKXSKVIMPIKGYIKPTKGIFYLINIPSLDQSVXX

SEQ ID NO: 60027 - protein, 39 aa, Artificial Sequence; identical to SEQ ID NO: 4317
  GFR-binding peptide
  MOD_RES (35), (36): Xaa is C or S
  MOD_RES (13), (14), (15), (16), (17): Xaa is A or G
  MOD_RES (18), (19), (20), (21): Xaa is A or G or is absent

SEQ ID NO: 60028 - protein, 36 aa, Artificial Sequence; identical to SEQ ID NO: 31336
  GFR-binding peptide
  MOD_RES (2), (4): Xaa is C or S
  MOD_RES (15), (16), (17), (18), (19): Xaa is A or G
  MOD_RES (20), (21), (22), (23): Xaa is A or G or is absent

SEQ ID NO: 60029 - protein, 39 aa, Artificial Sequence; identical to SEQ ID NO: 25372
  GFR-binding peptide
  MOD_RES (2), (34), (35): Xaa is C or S

SEQ ID NO: 60030 - protein, 36 aa, Artificial Sequence; identical to SEQ ID NO: 4319
  GFR-binding peptide
  MOD_RES (1), (3), (35), (36): Xaa is C or S

SEQ ID NO: 60031 - protein, 36 aa, Artificial Sequence; identical to SEQ ID NO: 31348
  GFR-binding peptide
  MOD_RES (2), (34), (35): Xaa is C or S

SEQ ID NO: 60032 - protein, 38 aa, Artificial Sequence; identical to SEQ ID NO: 31349
  GFR-binding peptide
  MOD_RES (32), (33): Xaa is C or S

SEQ ID NO: 60033 - protein, 38 aa, Artificial Sequence; identical to SEQ ID NO: 4324
  GFR-binding peptide
  MOD_RES (2), (34), (35): Xaa is C or S

SEQ ID NO: 60034 - protein, 37 aa, Artificial Sequence; identical to SEQ ID NO: 4325
  GFR-binding peptide
  MOD_RES (31), (32): Xaa is C or S

SEQ ID NO: 60035 - protein, 33 aa, Artificial Sequence; identical to SEQ ID NO: 4326
  GFR-binding peptide
  MOD_RES (31), (32): Xaa is C or S

SEQ ID NO: 60036 - protein, 36 aa, Artificial Sequence; identical to SEQ ID NO: 31351
  GFR-binding peptide
  MOD_RES (1), (35), (36): Xaa is C or S
  MOD_RES (13), (14), (15), (16), (17): Xaa is A or G
  MOD_RES (18), (19), (20), (21): Xaa is A or G or is absent

SEQ ID NO: 60037 - protein, 38 aa, Artificial Sequence; identical to SEQ ID NO: 25387
  GFR-binding peptide
  MOD_RES (2), (33), (34): Xaa is C or S

SEQ ID NO: 60038 - protein, 35 aa, Artificial Sequence; identical to SEQ ID NO: 4327
  GFR-binding peptide
  MOD_RES (31), (32): Xaa is C or S

SEQ ID NO: 60039 - protein, 36 aa, Artificial Sequence
  GFR-binding peptide
  MOD_RES (1), (3), (35), (36): Xaa is C or S
XGXRDVVMGRHKRLIIQQKDNYYLMSTASMKTPTXX

SEQ ID NO: 60040 - protein, 34 aa, Artificial Sequence
  GFR-binding peptide
  MOD_RES (2), (33), (34): Xaa is C or S
KXSKVIMPIKGYIKPTKGIFYLINIPSLDQSVXX

SEQ ID NO: 60041 - protein, 43 aa, Artificial Sequence; identical to SEQ ID NO: 31353
  GFR-binding peptide
  MOD_RES (1), (3), (37), (38): Xaa is C or S
  MOD_RES (15), (16), (17), (18), (19): Xaa is A or G
  MOD_RES (20), (21), (22), (23): Xaa is A or G or is absent

SEQ ID NO: 60042 - protein, 38 aa, Artificial Sequence; identical to SEQ ID NO: 4328
  GFR-binding peptide
  MOD_RES (1), (3), (36), (37): Xaa is C or S
  MOD_RES (14), (15), (16), (17), (18): Xaa is A or G
  MOD_RES (19), (20), (21), (22): Xaa is A or G or is absent

SEQ ID NO: 60043 - protein, 34 aa, Artificial Sequence
  GFR-binding peptide
  MOD_RES (32), (33): Xaa is C or S
ESVAMGRHKRLYTVVGKDYYLISTASLKTPVXXA

SEQ ID NO: 60044 - protein, 38 aa, Artificial Sequence; identical to SEQ ID NO: 25390
  GFR-binding peptide
  MOD_RES (33), (34): Xaa is C or S
  MOD_RES (11), (12), (13), (14), (15): Xaa is A or G
  MOD_RES (16), (17), (18), (19): Xaa is A or G or is absent

SEQ ID NO: 60045 - protein, 37 aa, Artificial Sequence; identical to SEQ ID NO: 4330
  GFR-binding peptide
  MOD_RES (2), (4), (35), (36): Xaa is C or S

SEQ ID NO: 60046 - protein, 31 aa, Artificial Sequence; identical to SEQ ID NO: 31356
  GFR-binding peptide

SEQ ID NO: 60047 - protein, 34 aa, Artificial Sequence
  GFR-binding peptide
  MOD_RES (1), (33), (34): Xaa is C or S
XSEVVMDEYKFKVVNNASDLYLISIPELRTPVXX

SEQ ID NO: 60048 - protein, 35 aa, Artificial Sequence; identical to SEQ ID NO: 25397
  GFR-binding peptide
  MOD_RES (1), (35): Xaa is C or S
  MOD_RES (13), (14), (15), (16), (17): Xaa is A or G
  MOD_RES (18), (19), (20), (21): Xaa is A or G or is absent

SEQ ID NO: 60049 - protein, 37 aa, Artificial Sequence; identical to SEQ ID NO: 31360
  GFR-binding peptide
  MOD_RES (31), (32): Xaa is C or S

SEQ ID NO: 60050 - protein, 37 aa, Artificial Sequence
  GFR-binding peptide
  MOD_RES (31), (32): Xaa is C or S
EVVMDYHYKLVVNNASDKYLISIPSLRTPVXXTPPTS

SEQ ID NO: 60051 - protein, 39 aa, Artificial Sequence; identical to SEQ ID NO: 4340
  GFR-binding peptide
  MOD_RES (2), (33), (34): Xaa is C or S

SEQ ID NO: 60052 - protein, 38 aa, Artificial Sequence; identical to SEQ ID NO: 56275
  GFR-binding peptide
  MOD_RES (2), (36), (37): Xaa is C or S
  MOD_RES (14), (15), (16), (17), (18): Xaa is A or G
  MOD_RES (19), (20), (21), (22): Xaa is A or G or is absent

SEQ ID NO: 60053 - protein, 39 aa, Artificial Sequence
  GFR-binding peptide
  MOD_RES (33), (34): Xaa is C or S
  MOD_RES (11), (12), (13), (14), (15): Xaa is A or G
  MOD_RES (16), (17), (18), (19): Xaa is A or G or is absent
DVVMGEYKFKXXXXXXXXXLYLMSIPEMKTPTXXPGASG

SEQ ID NO: 60054 - protein, 36 aa, Artificial Sequence; identical to SEQ ID NO: 4344
  GFR-binding peptide
  MOD_RES (1), (32), (33): Xaa is C or S

SEQ ID NO: 60055 - protein, 38 aa, Artificial Sequence; identical to SEQ ID NO: 31369
  GFR-binding peptide
  MOD_RES (1), (3), (36), (37): Xaa is C or S

SEQ ID NO: 60056 - protein, 37 aa, Artificial Sequence; identical to SEQ ID NO: 4345
  GFR-binding peptide
  MOD_RES (1), (3), (37): Xaa is C or S
  MOD_RES (15), (16), (17), (18), (19): Xaa is A or G
  MOD_RES (20), (21), (22), (23): Xaa is A or G or is absent

SEQ ID NO: 60057 - protein, 38 aa, Artificial Sequence; identical to SEQ ID NO: 25404
  GFR-binding peptide
  MOD_RES (2), (34), (35): Xaa is C or S

SEQ ID NO: 60058 - protein, 31 aa, Artificial Sequence; identical to SEQ ID NO: 25405
  GFR-binding peptide

SEQ ID NO: 60059 - protein, 40 aa, Artificial Sequence; identical to SEQ ID NO: 4347
  GFR-binding peptide
  MOD_RES (2), (4), (37), (38): Xaa is C or S
  MOD_RES (15), (16), (17), (18), (19): Xaa is A or G
  MOD_RES (20), (21), (22), (23): Xaa is A or G or is absent

SEQ ID NO: 60060 - protein, 42 aa, Artificial Sequence
  GFR-binding peptide
  MOD_RES (2), (4), (38), (39): Xaa is C or S
  MOD_RES (16), (17), (18), (19), (20): Xaa is A or G
  MOD_RES (21), (22), (23), (24): Xaa is A or G or is absent
RXGXSEVVMDYHYKLXXXXXXXXXKYLISIPSLRTPVXXTPP

SEQ ID NO: 60061 - protein, 43 aa, Artificial Sequence
  GFR-binding peptide
  MOD_RES (2), (4), (38), (39): Xaa is C or S
  MOD_RES (16), (17), (18), (19), (20): Xaa is A or G
  MOD_RES (21), (22), (23), (24): Xaa is A or G or is absent
RXGXSEVVMDRHKRLXXXXXXXXXYYLISTASLRTPVXXTPPT

SEQ ID NO: 60062 - protein, 34 aa, Artificial Sequence; identical to SEQ ID NO: 4351
  GFR-binding peptide
  MOD_RES (1), (32), (33): Xaa is C or S

SEQ ID NO: 60063 - protein, 37 aa, Artificial Sequence; identical to SEQ ID NO: 4353
  GFR-binding peptide
  MOD_RES (2), (4), (36), (37): Xaa is C or S

SEQ ID NO: 60064 - protein, 39 aa, Artificial Sequence
  GFR-binding peptide
  MOD_RES (33), (34): Xaa is C or S
  MOD_RES (11), (12), (13), (14), (15): Xaa is A or G
  MOD_RES (16), (17), (18), (19): Xaa is A or G or is absent
DVVMGYHYKLXXXXXXXXXKYLMSIPSMKTPTXXPGASG

SEQ ID NO: 60065 - protein, 37 aa, Artificial Sequence; identical to SEQ ID NO: 56284
  GFR-binding peptide
  MOD_RES (1), (34), (35): Xaa is C or S
  MOD_RES (12), (13), (14), (15), (16): Xaa is A or G
  MOD_RES (17), (18), (19), (20): Xaa is A or G or is absent

SEQ ID NO: 60066 - protein, 36 aa, Artificial Sequence; identical to SEQ ID NO: 4355
  GFR-binding peptide
  MOD_RES (31), (32): Xaa is C or S

SEQ ID NO: 60067 - protein, 37 aa, Artificial Sequence; identical to SEQ ID NO: 25412
  GFR-binding peptide
  MOD_RES (32), (33): Xaa is C or S

SEQ ID NO: 60068 - protein, 37 aa, Artificial Sequence; identical to SEQ ID NO: 4356
  GFR-binding peptide
  MOD_RES (2), (4), (36), (37): Xaa is C or S

SEQ ID NO: 60069 - protein, 38 aa, Artificial Sequence; identical to SEQ ID NO: 31378
  GFR-binding peptide
  MOD_RES (1), (35), (36): Xaa is C or S
  MOD_RES (13), (14), (15), (16), (17): Xaa is A or G
  MOD_RES (18), (19), (20), (21): Xaa is A or G or is absent

SEQ ID NO: 60070 - protein, 40 aa, Artificial Sequence
  GFR-binding peptide
  MOD_RES (1), (35), (36): Xaa is C or S
  MOD_RES (13), (14), (15), (16), (17): Xaa is A or G
  MOD_RES (18), (19), (20), (21): Xaa is A or G or is absent
XRDVVMGYHYKLXXXXXXXXXKYLMSIPSMKTPTXXPGAS

SEQ ID NO: 60071 - protein, 39 aa, Artificial Sequence
  GFR-binding peptide
  MOD_RES (1), (3), (34), (35): Xaa is C or S
XGXEEVIMRHKRLLLVRGNDYYLMSTASTKVPAXXTSPV

SEQ ID NO: 60072 - protein, 35 aa, Artificial Sequence; identical to SEQ ID NO: 31381
  GFR-binding peptide
  MOD_RES (34), (35): Xaa is C or S
  MOD_RES (12), (13), (14), (15), (16): Xaa is A or G
  MOD_RES (17), (18), (19), (20): Xaa is A or G or is absent

SEQ ID NO: 60073 - protein, 42 aa, Artificial Sequence; identical to SEQ ID NO: 4359
  GFR-binding peptide
  MOD_RES (2), (4), (38), (39): Xaa is C or S
  MOD_RES (16), (17), (18), (19), (20): Xaa is A or G
  MOD_RES (21), (22), (23), (24): Xaa is A or G or is absent

SEQ ID NO: 60074 - protein, 43 aa, Artificial Sequence
  GFR-binding peptide
  MOD_RES (1), (3), (37), (38): Xaa is C or S
  MOD_RES (15), (16), (17), (18), (19): Xaa is A or G
  MOD_RES (20), (21), (22), (23): Xaa is A or G or is absent
XGXSEVVMDYHYKLXXXXXXXXXKYLISIPSLRTPVXXTPPTS

SEQ ID NO: 60075 - protein, 42 aa, Artificial Sequence; identical to SEQ ID NO: 4360
  GFR-binding peptide
  MOD_RES (2), (36), (37): Xaa is C or S
  MOD_RES (14), (15), (16), (17), (18): Xaa is A or G
  MOD_RES (19), (20), (21), (22): Xaa is A or G or is absent

SEQ ID NO: 60076 - protein, 35 aa, Artificial Sequence; identical to SEQ ID NO: 4361
  GFR-binding peptide
  MOD_RES (31), (32): Xaa is C or S

SEQ ID NO: 60077 - protein, 32 aa, Artificial Sequence; identical to SEQ ID NO: 4362
  GFR-binding peptide
  MOD_RES (32), (32): Xaa is C or S

SEQ ID NO: 60078 - protein, 34 aa, Artificial Sequence; identical to SEQ ID NO: 31383
  GFR-binding peptide
  MOD_RES (31), (32): Xaa is C or S

SEQ ID NO: 60079 - protein, 31 aa, Artificial Sequence; identical to SEQ ID NO: 25420
  GFR-binding peptide

SEQ ID NO: 60080 - protein, 34 aa, Artificial Sequence; identical to SEQ ID NO: 31390
  GFR-binding peptide
  MOD_RES (33), (34): Xaa is C or S
  MOD_RES (11), (12), (13), (14), (15): Xaa is A or G
  MOD_RES (16), (17), (18), (19): Xaa is A or G or is absent

SEQ ID NO: 60081 - protein, 38 aa, Artificial Sequence; identical to SEQ ID NO: 25422
  GFR-binding peptide
  MOD_RES (32), (33): Xaa is C or S

SEQ ID NO: 60082 - protein, 34 aa, Artificial Sequence; identical to SEQ ID NO: 4364
  GFR-binding peptide
  MOD_RES (1), (1): Xaa is C or S
  MOD_RES (13), (14), (15), (16), (17): Xaa is A or G
  MOD_RES (18), (19), (20), (21): Xaa is A or G or is absent

SEQ ID NO: 60083 - protein, 37 aa, Artificial Sequence
  GFR-binding peptide
  MOD_RES (1), (3), (37): Xaa is C or S
  MOD_RES (15), (16), (17), (18), (19): Xaa is A or G
  MOD_RES (20), (21), (22), (23): Xaa is A or G or is absent
XAXSEVTMNEYKFKXXXXXXXXXLYLISIPEMKEPVX

SEQ ID NO: 60084 - protein, 38 aa, Artificial Sequence; identical to SEQ ID NO: 25425
  GFR-binding peptide
  MOD_RES (1), (3), (35), (36): Xaa is C or S

SEQ ID NO: 60085 - protein, 33 aa, Artificial Sequence; identical to SEQ ID NO: 31396
  GFR-binding peptide
  MOD_RES (2), (2): Xaa is C or S

SEQ ID NO: 60086 - protein, 40 aa, Artificial Sequence; identical to SEQ ID NO: 25427
  GFR-binding peptide
  MOD_RES (1), (3), (37), (38): Xaa is C or S
  MOD_RES (15), (16), (17), (18), (19): Xaa is A or G
  MOD_RES (20), (21), (22), (23): Xaa is A or G or is absent

SEQ ID NO: 60087 - protein, 40 aa, Artificial Sequence; identical to SEQ ID NO: 31400
  GFR-binding peptide
  MOD_RES (1), (3), (38), (39): Xaa is C or S
  MOD_RES (16), (17), (18), (19), (20): Xaa is A or G
  MOD_RES (21), (22), (23), (24): Xaa is A or G or is absent

SEQ ID NO: 60088 - protein, 42 aa, Artificial Sequence; identical to SEQ ID NO: 25430
  GFR-binding peptide
  MOD_RES (2), (4), (36), (37): Xaa is C or S

SEQ ID NO: 60089 - protein, 33 aa, Artificial Sequence; identical to SEQ ID NO: 31407
  GFR-binding peptide
  MOD_RES (1), (33): Xaa is C or S

SEQ ID NO: 60090 - protein, 39 aa, Artificial Sequence; identical to SEQ ID NO: 31411
  GFR-binding peptide
  MOD_RES (1), (3), (35), (36): Xaa is C or S

SEQ ID NO: 60091 - protein, 33 aa, Artificial Sequence; identical to SEQ ID NO: 31412
  GFR-binding peptide
  MOD_RES (12), (13), (14), (15), (16): Xaa is A or G
  MOD_RES (17), (18), (19), (20): Xaa is A or G or is absent

SEQ ID NO: 60092 - protein, 35 aa, Artificial Sequence; identical to SEQ ID NO: 25438
  GFR-binding peptide
  MOD_RES (1), (35): Xaa is C or S
  MOD_RES (13), (14), (15), (16), (17): Xaa is A or G
  MOD_RES (18), (19), (20), (21): Xaa is A or G or is absent

SEQ ID NO: 60093 - protein, 38 aa, Artificial Sequence; identical to SEQ ID NO: 11805
  GFR-binding peptide
  MOD_RES (34), (35): Xaa is C or S
  MOD_RES (12), (13), (14), (15), (16): Xaa is A or G
  MOD_RES (17), (18), (19), (20): Xaa is A or G or is absent

SEQ ID NO: 60094 - protein, 36 aa, Artificial Sequence; identical to SEQ ID NO: 25442
  GFR-binding peptide
  MOD_RES (1), (3), (34), (35): Xaa is C or S

SEQ ID NO: 60095 - protein, 37 aa, Artificial Sequence; identical to SEQ ID NO: 4382
  GFR-binding peptide
  MOD_RES (1), (3), (37): Xaa is C or S
  MOD_RES (15), (16), (17), (18), (19): Xaa is A or G
  MOD_RES (20), (21), (22), (23): Xaa is A or G or is absent

SEQ ID NO: 60096 - protein, 36 aa, Artificial Sequence; identical to SEQ ID NO: 25445
  GFR-binding peptide
  MOD_RES (1), (3): Xaa is C or S
  MOD_RES (15), (16), (17), (18), (19): Xaa is A or G
  MOD_RES (20), (21), (22), (23): Xaa is A or G or is absent

SEQ ID NO: 60097 - protein, 40 aa, Artificial Sequence; identical to SEQ ID NO: 4383
  GFR-binding peptide
  MOD_RES (2), (4), (37), (38): Xaa is C or S
  MOD_RES (15), (16), (17), (18), (19): Xaa is A or G
  MOD_RES (20), (21), (22), (23): Xaa is A or G or is absent

SEQ ID NO: 60098 - protein, 37 aa, Artificial Sequence
  GFR-binding peptide
  MOD_RES (1), (34), (35): Xaa is C or S
  MOD_RES (12), (13), (14), (15), (16): Xaa is A or G
  MOD_RES (17), (18), (19), (20): Xaa is A or G or is absent
XEEVIMEYKFKXXXXXXXXXLYLMSIPETKVPAXXTS

SEQ ID NO: 60099 - protein, 38 aa, Artificial Sequence
  GFR-binding peptide
  MOD_RES (1), (33), (34): Xaa is C or S
XSEVTMNRYKKLVVNKNEDFYLISIANMKEPVXXPEPI

SEQ ID NO: 60100 - protein, 36 aa, Artificial Sequence; identical to SEQ ID NO: 4385
  GFR-binding peptide
  MOD_RES (2), (36): Xaa is C or S
  MOD_RES (14), (15), (16), (17), (18): Xaa is A or G
  MOD_RES (19), (20), (21), (22): Xaa is A or G or is absent

SEQ ID NO: 60101 - protein, 40 aa, Artificial Sequence; identical to SEQ ID NO: 31425
  GFR-binding peptide
  MOD_RES (2), (4), (36), (37): Xaa is C or S

SEQ ID NO: 60102 - protein, 36 aa, Artificial Sequence; identical to SEQ ID NO: 4386
  GFR-binding peptide
  MOD_RES (2), (4): Xaa is C or S
  MOD_RES (15), (16), (17), (18), (19): Xaa is A or G
  MOD_RES (20), (21), (22), (23): Xaa is A or G or is absent

SEQ ID NO: 60103 - protein, 32 aa, Artificial Sequence
  GFR-binding peptide
  MOD_RES (31), (32): Xaa is C or S
DVVMGYHYKLIIQQKDNKYLMSIPSMKTPTXX

SEQ ID NO: 60104 - protein, 36 aa, Artificial Sequence; identical to SEQ ID NO: 11819
  GFR-binding peptide
  MOD_RES (34), (35): Xaa is C or S
  MOD_RES (12), (13), (14), (15), (16): Xaa is A or G
  MOD_RES (17), (18), (19), (20): Xaa is A or G or is absent

SEQ ID NO: 60105 - protein, 40 aa, Artificial Sequence; identical to SEQ ID NO: 25451
  GFR-binding peptide
  MOD_RES (1), (3), (36), (37): Xaa is C or S

SEQ ID NO: 60106 - protein, 33 aa, Artificial Sequence; identical to SEQ ID NO: 4393
  GFR-binding peptide
  MOD_RES (32), (33): Xaa is C or S

SEQ ID NO: 60107 - protein, 35 aa, Artificial Sequence; identical to SEQ ID NO: 4395
  GFR-binding peptide
  MOD_RES (2), (33), (34): Xaa is C or S

SEQ ID NO: 60108 - protein, 40 aa, Artificial Sequence
  GFR-binding peptide
  MOD_RES (2), (35), (36): Xaa is C or S
  MOD_RES (13), (14), (15), (16), (17): Xaa is A or G
  MOD_RES (18), (19), (20), (21): Xaa is A or G or is absent
GXEEVIMEYKFKXXXXXXXXXLYLMSIPETKVPAXXTSPV

SEQ ID NO: 60109 - protein, 40 aa, Artificial Sequence; identical to SEQ ID NO: 4396
  GFR-binding peptide
  MOD_RES (34), (35): Xaa is C or S
  MOD_RES (12), (13), (14), (15), (16): Xaa is A or G
  MOD_RES (17), (18), (19), (20): Xaa is A or G or is absent

SEQ ID NO: 60110 - protein, 38 aa, Artificial Sequence; identical to SEQ ID NO: 31430
  GFR-binding peptide
  MOD_RES (32), (33): Xaa is C or S

SEQ ID NO: 60111 - protein, 33 aa, Artificial Sequence; identical to SEQ ID NO: 4399
  GFR-binding peptide
  MOD_RES (1), (33): Xaa is C or S

SEQ ID NO: 60112 - protein, 34 aa, Artificial Sequence; identical to SEQ ID NO: 4402
  GFR-binding peptide
  MOD_RES (1), (3): Xaa is C or S

SEQ ID NO: 60113 - protein, 35 aa, Artificial Sequence; identical to SEQ ID NO: 4403
  GFR-binding peptide
  MOD_RES (2), (34), (35): Xaa is C or S

SEQ ID NO: 60114 - protein, 34 aa, Artificial Sequence
  GFR-binding peptide
  MOD_RES (33), (34): Xaa is C or S
  MOD_RES (11), (12), (13), (14), (15): Xaa is A or G
  MOD_RES (16), (17), (18), (19): Xaa is A or G or is absent
EEVIMRHKRLXXXXXXXXXYYLMSTASTKVPAXX

SEQ ID NO: 60115 - protein, 35 aa, Artificial Sequence; identical to SEQ ID NO: 4404
  GFR-binding peptide
  MOD_RES (1), (1): Xaa is C or S
  MOD_RES (14), (15), (16), (17), (18): Xaa is A or G
  MOD_RES (19), (20), (21), (22): Xaa is A or G or is absent

SEQ ID NO: 60116 - protein, 40 aa, Artificial Sequence; identical to SEQ ID NO: 31441
  GFR-binding peptide
  MOD_RES (1), (3), (35), (36): Xaa is C or S

SEQ ID NO: 60117 - protein, 34 aa, Artificial Sequence; identical to SEQ ID NO: 4405
  GFR-binding peptide
  MOD_RES (31), (32): Xaa is C or S

SEQ ID NO: 60118 - protein, 34 aa, Artificial Sequence; identical to SEQ ID NO: 4409
  GFR-binding peptide
  MOD_RES (2), (34): Xaa is C or S

SEQ ID NO: 60119 - protein, 38 aa, Artificial Sequence; identical to SEQ ID NO: 25473
  GFR-binding peptide
  MOD_RES (2), (34): Xaa is C or S

SEQ ID NO: 60120 - protein, 40 aa, Artificial Sequence
  GFR-binding peptide
  MOD_RES (1), (34), (35): Xaa is C or S
  MOD_RES (12), (13), (14), (15), (16): Xaa is A or G
  MOD_RES (17), (18), (19), (20): Xaa is A or G or is absent
XSRVIMPIKGYXXXXXXXXXFYLINIPSLAQPVXXPAASA

SEQ ID NO: 60121 - protein, 37 aa, Artificial Sequence
  GFR-binding peptide
  MOD_RES (1), (3), (37): Xaa is C or S
  MOD_RES (15), (16), (17), (18), (19): Xaa is A or G
  MOD_RES (20), (21), (22), (23): Xaa is A or G or is absent
XGXAEVVMDRHKRLXXXXXXXXXYYLISTASLRAPVX

SEQ ID NO: 60122 - protein, 33 aa, Artificial Sequence; identical to SEQ ID NO: 4413
  GFR-binding peptide
  MOD_RES (1), (32), (33): Xaa is C or S

SEQ ID NO: 60123 - protein, 35 aa, Artificial Sequence; identical to SEQ ID NO: 31453
  GFR-binding peptide
  MOD_RES (2), (4): Xaa is C or S

SEQ ID NO: 60124 - protein, 35 aa, Artificial Sequence; identical to SEQ ID NO: 4415
  GFR-binding peptide
  MOD_RES (31), (32): Xaa is C or S

SEQ ID NO: 60125 - protein, 37 aa, Artificial Sequence
  GFR-binding peptide
  MOD_RES (33), (34): Xaa is C or S
  MOD_RES (11), (12), (13), (14), (15): Xaa is A or G
  MOD_RES (16), (17), (18), (19): Xaa is A or G or is absent
EEVIMRHKRLXXXXXXXXXYYLMSTASTKVPAXXTSP

SEQ ID NO: 60126 - protein, 33 aa, Artificial Sequence; identical to SEQ ID NO: 4417
  GFR-binding peptide
  MOD_RES (31), (32): Xaa is C or S

SEQ ID NO: 60127 - protein, 38 aa, Artificial Sequence
  GFR-binding peptide
  MOD_RES (1), (3), (35), (36): Xaa is C or S
XAXSEVTMNYHYKLVVNKNEDKYLISIPSMKEPVXXPE

SEQ ID NO: 60128 - protein, 35 aa, Artificial Sequence
  GFR-binding peptide
  MOD_RES (2), (35): Xaa is C or S
  MOD_RES (13), (14), (15), (16), (17): Xaa is A or G
  MOD_RES (18), (19), (20), (21): Xaa is A or G or is absent
GXEEVIMYHYKLXXXXXXXXXKYLMSIPSTKVPAX

SEQ ID NO: 60129 - protein, 34 aa, Artificial Sequence; identical to SEQ ID NO: 4423
  GFR-binding peptide
  MOD_RES (1), (34): Xaa is C or S
  MOD_RES (12), (13), (14), (15), (16): Xaa is A or G
  MOD_RES (17), (18), (19), (20): Xaa is A or G or is absent

SEQ ID NO: 60130 - protein, 38 aa, Artificial Sequence; identical to SEQ ID NO: 25491
  GFR-binding peptide
  MOD_RES (2), (4), (38): Xaa is C or S
  MOD_RES (16), (17), (18), (19), (20): Xaa is A or G
  MOD_RES (21), (22), (23), (24): Xaa is A or G or is absent

SEQ ID NO: 60131 - protein, 36 aa, Artificial Sequence; identical to SEQ ID NO: 4425
  GFR-binding peptide
  MOD_RES (2), (4): Xaa is C or S

SEQ ID NO: 60132 - protein, 38 aa, Artificial Sequence; identical to SEQ ID NO: 4428
  GFR-binding peptide
  MOD_RES (2), (33), (34): Xaa is C or S

SEQ ID NO: 60133 - protein, 39 aa, Artificial Sequence
  GFR-binding peptide
  MOD_RES (34), (35): Xaa is C or S
  MOD_RES (12), (13), (14), (15), (16): Xaa is A or G
  MOD_RES (17), (18), (19), (20): Xaa is A or G or is absent
AEVVMDRHKRLXXXXXXXXXYYLISTASLRAPVXXSAPA

SEQ ID NO: 60134 - protein, 44 aa, Artificial Sequence; identical to SEQ ID NO: 25501
  GFR-binding peptide
  MOD_RES (2), (4), (38), (39): Xaa is C or S
  MOD_RES (16), (17), (18), (19), (20): Xaa is A or G
  MOD_RES (21), (22), (23), (24): Xaa is A or G or is absent

SEQ ID NO: 60135 - protein, 34 aa, Artificial Sequence; identical to SEQ ID NO: 4433
  GFR-binding peptide
  MOD_RES (1), (33), (34): Xaa is C or S

SEQ ID NO: 60136 - protein, 35 aa, Artificial Sequence; identical to SEQ ID NO: 4434
  GFR-binding peptide
  MOD_RES (2), (34), (35): Xaa is C or S

SEQ ID NO: 60137 - protein, 36 aa, Artificial Sequence; identical to SEQ ID NO: 25509
  GFR-binding peptide
  MOD_RES (34), (35): Xaa is C or S
  MOD_RES (12), (13), (14), (15), (16): Xaa is A or G
  MOD_RES (17), (18), (19), (20): Xaa is A or G or is absent

SEQ ID NO: 60138 - protein, 39 aa, Artificial Sequence; identical to SEQ ID NO: 31473
  GFR-binding peptide
  MOD_RES (1), (33), (34): Xaa is C or S

SEQ ID NO: 60139 - protein, 40 aa, Artificial Sequence
  GFR-binding peptide
  MOD_RES (1), (35), (36): Xaa is C or S
  MOD_RES (13), (14), (15), (16), (17): Xaa is A or G
  MOD_RES (18), (19), (20), (21): Xaa is A or G or is absent
XSEVVMDRHKRLXXXXXXXXXYYLISTASLRTPVXXTPPT

SEQ ID NO: 60140 - protein, 42 aa, Artificial Sequence; identical to SEQ ID NO: 25516
  GFR-binding peptide
  MOD_RES (2), (36), (37): Xaa is C or S
  MOD_RES (14), (15), (16), (17), (18): Xaa is A or G
  MOD_RES (19), (20), (21), (22): Xaa is A or G or is absent

SEQ ID NO: 60141 - protein, 32 aa, Artificial Sequence
  GFR-binding peptide
  MOD_RES (31), (32): Xaa is C or S
EVVMDEYKFKVVNNASDLYLISIPELRTPVXX

SEQ ID NO: 60142 - protein, 41 aa, Artificial Sequence; identical to SEQ ID NO: 31477
  GFR-binding peptide
  MOD_RES (2), (4), (36), (37): Xaa is C or S

SEQ ID NO: 60143 - protein, 41 aa, Artificial Sequence; identical to SEQ ID NO: 25518
  GFR-binding peptide
  MOD_RES (2), (4), (38), (39): Xaa is C or S
  MOD_RES (16), (17), (18), (19), (20): Xaa is A or G
  MOD_RES (21), (22), (23), (24): Xaa is A or G or is absent

SEQ ID NO: 60144 - protein, 39 aa, Artificial Sequence
  GFR-binding peptide
  MOD_RES (2), (4), (38), (39): Xaa is C or S
  MOD_RES (16), (17), (18), (19), (20): Xaa is A or G
  MOD_RES (21), (22), (23), (24): Xaa is A or G or is absent
RXGXSEVVMDRHKRLXXXXXXXXXYYLISTASLRTPVXX

SEQ ID NO: 60145 - protein, 41 aa, Artificial Sequence
  GFR-binding peptide
  MOD_RES (2), (36), (37): Xaa is C or S
  MOD_RES (14), (15), (16), (17), (18): Xaa is A or G
  MOD_RES (19), (20), (21), (22): Xaa is A or G or is absent
GXAEVVMDRHKRLXXXXXXXXXYYLISTASLRAPVXXSAPA

SEQ ID NO: 60146 - protein, 42 aa, Artificial Sequence; identical to SEQ ID NO: 31480
  GFR-binding peptide
  MOD_RES (2), (36), (37): Xaa is C or S
  MOD_RES (14), (15), (16), (17), (18): Xaa is A or G
  MOD_RES (19), (20), (21), (22): Xaa is A or G or is absent

SEQ ID NO: 60147 - protein, 44 aa, Artificial Sequence; identical to SEQ ID NO: 25519
  GFR-binding peptide
  MOD_RES (2), (4), (38), (39): Xaa is C or S
  MOD_RES (16), (17), (18), (19), (20): Xaa is A or G
  MOD_RES (21), (22), (23), (24): Xaa is A or G or is absent

SEQ ID NO: 60148 - protein, 40 aa, Artificial Sequence
  GFR-binding peptide
  MOD_RES (34), (35): Xaa is C or S
  MOD_RES (12), (13), (14), (15), (16): Xaa is A or G
  MOD_RES (17), (18), (19), (20): Xaa is A or G or is absent
SEVTMNYHYKLXXXXXXXXXKYLISIPSMKEPVXXPEPIG

SEQ ID NO: 60149 - protein, 39 aa, Artificial Sequence; identical to SEQ ID NO: 4445
  GFR-binding peptide
  MOD_RES (33), (33): Xaa is C or S
  MOD_RES (11), (12), (13), (14), (15): Xaa is A or G
  MOD_RES (16), (17), (18), (19): Xaa is A or G or is absent

SEQ ID NO: 60150 - protein, 35 aa, Artificial Sequence
  GFR-binding peptide
  MOD_RES (2), (2): Xaa is C or S
  MOD_RES (14), (15), (16), (17), (18): Xaa is A or G
  MOD_RES (19), (20), (21), (22): Xaa is A or G or is absent
GXAEVVMDRHKRLXXXXXXXXXYYLISTASLRAPV

SEQ ID NO: 60151 - protein, 36 aa, Artificial Sequence
  GFR-binding peptide
  MOD_RES (1), (35), (36): Xaa is C or S
  MOD_RES (13), (14), (15), (16), (17): Xaa is A or G
  MOD_RES (18), (19), (20), (21): Xaa is A or G or is absent
XSEVVMDYHYKLXXXXXXXXXKYLISIPSLRTPVXX

SEQ ID NO: 60152 - protein, 36 aa, Artificial Sequence; identical to SEQ ID NO: 4447
  GFR-binding peptide
  MOD_RES (31), (32): Xaa is C or S

SEQ ID NO: 60153 - protein, 38 aa, Artificial Sequence; identical to SEQ ID NO: 56411
  GFR-binding peptide
  MOD_RES (1), (3), (35), (36): Xaa is C or S

SEQ ID NO: 60154 - protein, 34 aa, Artificial Sequence
  GFR-binding peptide
  MOD_RES (1), (1): Xaa is C or S
  MOD_RES (13), (14), (15), (16), (17): Xaa is A or G
  MOD_RES (18), (19), (20), (21): Xaa is A or G or is absent
XRDVVMGRHKRLXXXXXXXXXYYLMSTASMKTPT

SEQ ID NO: 60155 - protein, 41 aa, Artificial Sequence; identical to SEQ ID NO: 4449
  GFR-binding peptide
  MOD_RES (1), (3), (38), (39): Xaa is C or S
  MOD_RES (16), (17), (18), (19), (20): Xaa is A or G
  MOD_RES (21), (22), (23), (24): Xaa is A or G or is absent

SEQ ID NO: 60156 - protein, 35 aa, Artificial Sequence; identical to SEQ ID NO: 4451
  GFR-binding peptide
  MOD_RES (33), (34): Xaa is C or S
  MOD_RES (11), (12), (13), (14), (15): Xaa is A or G
  MOD_RES (16), (17), (18), (19): Xaa is A or G or is absent

SEQ ID NO: 60157 - protein, 41 aa, Artificial Sequence; identical to SEQ ID NO: 25526
  GFR-binding peptide
  MOD_RES (2), (4), (38), (39): Xaa is C or S
  MOD_RES (16), (17), (18), (19), (20): Xaa is A or G
  MOD_RES (21), (22), (23), (24): Xaa is A or G or is absent

SEQ ID NO: 60158 - protein, 37 aa, Artificial Sequence
  GFR-binding peptide
  MOD_RES (31), (32): Xaa is C or S
EVVMDRHKRLVVNNASDYYLISTASLRTPVXXTPPTS

SEQ ID NO: 60159 - protein, 36 aa, Artificial Sequence
  GFR-binding peptide
  MOD_RES (1), (35), (36): Xaa is C or S
  MOD_RES (13), (14), (15), (16), (17): Xaa is A or G
  MOD_RES (18), (19), (20), (21): Xaa is A or G or is absent
XSEVTMNRYKKLXXXXXXXXXFYLISIANMKEPVXX

SEQ ID NO: 60160 - protein, 36 aa, Artificial Sequence; identical to SEQ ID NO: 31494
  GFR-binding peptide
  MOD_RES (1), (33): Xaa is C or S

SEQ ID NO: 60161 - protein, 39 aa, Artificial Sequence; identical to SEQ ID NO: 25529
  GFR-binding peptide
  MOD_RES (1), (35), (36): Xaa is C or S
  MOD_RES (13), (14), (15), (16), (17): Xaa is A or G
  MOD_RES (18), (19), (20), (21): Xaa is A or G or is absent

SEQ ID NO: 60162 - protein, 32 aa, Artificial Sequence; identical to SEQ ID NO: 31498
  GFR-binding peptide
  MOD_RES (11), (12), (13), (14), (15): Xaa is A or G
  MOD_RES (16), (17), (18), (19): Xaa is A or G or is absent

SEQ ID NO: 60163 - protein, 39 aa, Artificial Sequence
  GFR-binding peptide
  MOD_RES (33), (34): Xaa is C or S
  MOD_RES (11), (12), (13), (14), (15): Xaa is A or G
  MOD_RES (16), (17), (18), (19): Xaa is A or G or is absent
RVVMNRHKRLXXXXXXXXXYYLVSTASLKTPAXXPKPVH

SEQ ID NO: 60164 - protein, 43 aa, Artificial Sequence; identical to SEQ ID NO: 4454
  GFR-binding peptide
  MOD_RES (2), (4), (37), (38): Xaa is C or S
  MOD_RES (15), (16), (17), (18), (19): Xaa is A or G
  MOD_RES (20), (21), (22), (23): Xaa is A or G or is absent

SEQ ID NO: 60165 - protein, 39 aa, Artificial Sequence; identical to SEQ ID NO: 25535
  GFR-binding peptide
  MOD_RES (1), (3), (36), (37): Xaa is C or S
  MOD_RES (14), (15), (16), (17), (18): Xaa is A or G
  MOD_RES (19), (20), (21), (22): Xaa is A or G or is absent

SEQ ID NO: 60166 - protein, 36 aa, Artificial Sequence; identical to SEQ ID NO: 4459
  GFR-binding peptide
  MOD_RES (2), (4): Xaa is C or S
  MOD_RES (15), (16), (17), (18), (19): Xaa is A or G
  MOD_RES (20), (21), (22), (23): Xaa is A or G or is absent

SEQ ID NO: 60167 - protein, 36 aa, Artificial Sequence; identical to SEQ ID NO: 4460
  GFR-binding peptide
  MOD_RES (1), (34), (35): Xaa is C or S
  MOD_RES (12), (13), (14), (15), (16): Xaa is A or G
  MOD_RES (17), (18), (19), (20): Xaa is A or G or is absent

SEQ ID NO: 60168 - protein, 34 aa, Artificial Sequence; identical to SEQ ID NO: 56431
  GFR-binding peptide
  MOD_RES (1), (33), (34): Xaa is C or S

SEQ ID NO: 60169 - protein, 41 aa, Artificial Sequence
  GFR-binding peptide
  MOD_RES (2), (4), (36), (37): Xaa is C or S
RXGXSEVVMDYHYKLVVNNASDKYLISIPSLRTPVXXTPPT

SEQ ID NO: 60170 - protein, 42 aa, Artificial Sequence; identical to SEQ ID NO: 31509
  GFR-binding peptide
  MOD_RES (2), (4), (36), (37): Xaa is C or S

SEQ ID NO: 60171 - protein, 41 aa, Artificial Sequence
  GFR-binding peptide
  MOD_RES (1), (3), (37), (38): Xaa is C or S
  MOD_RES (15), (16), (17), (18), (19): Xaa is A or G
  MOD_RES (20), (21), (22), (23): Xaa is A or G or is absent
XAXSEVTMNYHYKLXXXXXXXXXKYLISIPSMKEPVXXPEP

SEQ ID NO: 60172 - protein, 35 aa, Artificial Sequence; identical to SEQ ID NO: 4465
  GFR-binding peptide
  MOD_RES (32), (33): Xaa is C or S

SEQ ID NO: 60173 - protein, 33 aa, Artificial Sequence; identical to SEQ ID NO: 4468
  GFR-binding peptide
  MOD_RES (2), (2): Xaa is C or S

SEQ ID NO: 60174 - protein, 36 aa, Artificial Sequence
  GFR-binding peptide
  MOD_RES (1), (3), (35), (36): Xaa is C or S
XGXAEVVMDRHKRLVVNNAADYYLISTASLRAPVXX

SEQ ID NO: 60175 - protein, 33 aa, Artificial Sequence; identical to SEQ ID NO: 4473
  GFR-binding peptide
  MOD_RES (2), (2): Xaa is C or S

SEQ ID NO: 60176 - protein, 39 aa, Artificial Sequence; identical to SEQ ID NO: 25557
  GFR-binding peptide
  MOD_RES (1), (33), (34): Xaa is C or S

SEQ ID NO: 60177 - protein, 39 aa, Artificial Sequence; identical to SEQ ID NO: 31520
  GFR-binding peptide
  MOD_RES (2), (36), (37): Xaa is C or S
  MOD_RES (14), (15), (16), (17), (18): Xaa is A or G
  MOD_RES (19), (20), (21), (22): Xaa is A or G or is absent

SEQ ID NO: 60178 - protein, 33 aa, Artificial Sequence
  GFR-binding peptide
  MOD_RES (2), (2): Xaa is C or S
GXRDVVMGYHYKLIIQQKDNKYLMSIPSMKTPT

SEQ ID NO: 60179 - protein, 34 aa, Artificial Sequence
  GFR-binding peptide
  MOD_RES (1), (33), (34): Xaa is C or S
XAEVVMDRHKRLVVNNAADYYLISTASLRAPVXX

SEQ ID NO: 60180 - protein, 35 aa, Artificial Sequence; identical to SEQ ID NO: 4480
  GFR-binding peptide
  MOD_RES (31), (32): Xaa is C or S

SEQ ID NO: 60181 - protein, 34 aa, Artificial Sequence; identical to SEQ ID NO: 25568
  GFR-binding peptide
  MOD_RES (33), (34): Xaa is C or S
  MOD_RES (11), (12), (13), (14), (15): Xaa is A or G
  MOD_RES (16), (17), (18), (19): Xaa is A or G or is absent

SEQ ID NO: 60182 - protein, 36 aa, Artificial Sequence
  GFR-binding peptide
  MOD_RES (32), (33): Xaa is C or S
RDVVMGYHYKLIIQQKDNKYLMSIPSMKTPTXXPGA

SEQ ID NO: 60183 - protein, 38 aa, Artificial Sequence; identical to SEQ ID NO: 4481
  GFR-binding peptide
  MOD_RES (1), (3), (37), (38): Xaa is C or S
  MOD_RES (15), (16), (17), (18), (19): Xaa is A or G
  MOD_RES (20), (21), (22), (23): Xaa is A or G or is absent

SEQ ID NO: 60184 - protein, 39 aa, Artificial Sequence; identical to SEQ ID NO: 4483
  GFR-binding peptide
  MOD_RES (1), (34), (35): Xaa is C or S
  MOD_RES (12), (13), (14), (15), (16): Xaa is A or G
  MOD_RES (17), (18), (19), (20): Xaa is A or G or is absent

SEQ ID NO: 60185 - protein, 36 aa, Artificial Sequence; identical to SEQ ID NO: 11916
  GFR-binding peptide
  MOD_RES (2), (4), (36): Xaa is C or S

SEQ ID NO: 60186 - protein, 37 aa, Artificial Sequence; identical to SEQ ID NO: 4485
  GFR-binding peptide
  MOD_RES (2), (33), (34): Xaa is C or S

SEQ ID NO: 60187 - protein, 38 aa, Artificial Sequence; identical to SEQ ID NO: 31539
  GFR-binding peptide
  MOD_RES (2), (36), (37): Xaa is C or S
  MOD_RES (14), (15), (16), (17), (18): Xaa is A or G
  MOD_RES (19), (20), (21), (22): Xaa is A or G or is absent

SEQ ID NO: 60188 - protein, 37 aa, Artificial Sequence; identical to SEQ ID NO: 31542
  GFR-binding peptide
  MOD_RES (1), (35), (36): Xaa is C or S
  MOD_RES (13), (14), (15), (16), (17): Xaa is A or G
  MOD_RES (18), (19), (20), (21): Xaa is A or G or is absent

SEQ ID NO: 60189 - protein, 40 aa, Artificial Sequence; identical to SEQ ID NO: 25580
  GFR-binding peptide
  MOD_RES (2), (36), (37): Xaa is C or S
  MOD_RES (14), (15), (16), (17), (18): Xaa is A or G
  MOD_RES (19), (20), (21), (22): Xaa is A or G or is absent

SEQ ID NO: 60190 - protein, 41 aa, Artificial Sequence
  GFR-binding peptide
  MOD_RES (1), (3), (36), (37): Xaa is C or S
  MOD_RES (14), (15), (16), (17), (18): Xaa is A or G
  MOD_RES (19), (20), (21), (22): Xaa is A or G or is absent
XGXEEVIMYHYKLXXXXXXXXXKYLMSIPSTKVPAXXTSPV

SEQ ID NO: 60191 - protein, 35 aa, Artificial Sequence; identical to SEQ ID NO: 4491
  GFR-binding peptide
  MOD_RES (1), (33), (34): Xaa is C or S

SEQ ID NO: 60192 - protein, 37 aa, Artificial Sequence
  GFR-binding peptide
  MOD_RES (1), (3), (35), (36): Xaa is C or S
XAXSEVTMNEYKFKVVNKNEDLYLISIPEMKEPVXXP

SEQ ID NO: 60193 - protein, 38 aa, Artificial Sequence; identical to SEQ ID NO: 25584
  GFR-binding peptide
  MOD_RES (2), (36), (37): Xaa is C or S
  MOD_RES (14), (15), (16), (17), (18): Xaa is A or G
  MOD_RES (19), (20), (21), (22): Xaa is A or G or is absent

SEQ ID NO: 60194 - protein, 38 aa, Artificial Sequence; identical to SEQ ID NO: 31550
  GFR-binding peptide
  MOD_RES (2), (4), (36), (37): Xaa is C or S

SEQ ID NO: 60195 - protein, 41 aa, Artificial Sequence; identical to SEQ ID NO: 4493
  GFR-binding peptide
  MOD_RES (1), (3), (35), (36): Xaa is C or S

SEQ ID NO: 60196 - protein, 34 aa, Artificial Sequence
  GFR-binding peptide
  MOD_RES (2), (2): Xaa is C or S
  MOD_RES (13), (14), (15), (16), (17): Xaa is A or G
  MOD_RES (18), (19), (20), (21): Xaa is A or G or is absent
GXEEVIMYHYKLXXXXXXXXXKYLMSIPSTKVPA

SEQ ID NO: 60197 - protein, 40 aa, Artificial Sequence; identical to SEQ ID NO: 25586
  GFR-binding peptide
  MOD_RES (2), (35), (36): Xaa is C or S
  MOD_RES (13), (14), (15), (16), (17): Xaa is A or G
  MOD_RES (18), (19), (20), (21): Xaa is A or G or is absent

SEQ ID NO: 60198 - protein, 42 aa, Artificial Sequence; identical to SEQ ID NO: 4496
  GFR-binding peptide
  MOD_RES (1), (3), (36), (37): Xaa is C or S
  MOD_RES (14), (15), (16), (17), (18): Xaa is A or G
  MOD_RES (19), (20), (21), (22): Xaa is A or G or is absent

SEQ ID NO: 60199 - protein, 40 aa, Artificial Sequence; identical to SEQ ID NO: 4497
  GFR-binding peptide
  MOD_RES (2), (36), (37): Xaa is C or S
  MOD_RES (14), (15), (16), (17), (18): Xaa is A or G
  MOD_RES (19), (20), (21), (22): Xaa is A or G or is absent

SEQ ID NO: 60200 - protein, 34 aa, Artificial Sequence; identical to SEQ ID NO: 31555
  GFR-binding peptide
  MOD_RES (34), (34): Xaa is C or S
  MOD_RES (12), (13), (14), (15), (16): Xaa is A or G
  MOD_RES (17), (18), (19), (20): Xaa is A or G or is absent

SEQ ID NO: 60201 - protein, 37 aa, Artificial Sequence; identical to SEQ ID NO: 31556
  GFR-binding peptide
  MOD_RES (32), (33): Xaa is C or S

SEQ ID NO: 60202 - protein, 39 aa, Artificial Sequence; identical to SEQ ID NO: 31557
  GFR-binding peptide
  MOD_RES (1), (3), (38), (39): Xaa is C or S
  MOD_RES (16), (17), (18), (19), (20): Xaa is A or G
  MOD_RES (21), (22), (23), (24): Xaa is A or G or is absent

SEQ ID NO: 60203 - protein, 35 aa, Artificial Sequence; identical to SEQ ID NO: 31558
  GFR-binding peptide
  MOD_RES (2), (35): Xaa is C or S

SEQ ID NO: 60204 - protein, 43 aa, Artificial Sequence; identical to SEQ ID NO: 31560
  GFR-binding peptide
  MOD_RES (2), (4), (37), (38): Xaa is C or S

SEQ ID NO: 60205 - protein, 39 aa, Artificial Sequence; identical to SEQ ID NO: 4500
  GFR-binding peptide
  MOD_RES (34), (35): Xaa is C or S
  MOD_RES (12), (13), (14), (15), (16): Xaa is A or G
  MOD_RES (17), (18), (19), (20): Xaa is A or G or is absent

SEQ ID NO: 60206 - protein, 38 aa, Artificial Sequence; identical to SEQ ID NO: 25596
  GFR-binding peptide
  MOD_RES (1), (32), (33): Xaa is C or S

SEQ ID NO: 60207 - protein, 35 aa, Artificial Sequence; identical to SEQ ID NO: 25599
  GFR-binding peptide
  MOD_RES (2), (34), (35): Xaa is C or S

SEQ ID NO: 60208 - protein, 37 aa, Artificial Sequence; identical to SEQ ID NO: 4503
  GFR-binding peptide
  MOD_RES (31), (32): Xaa is C or S

SEQ ID NO: 60209 - protein, 36 aa, Artificial Sequence; identical to SEQ ID NO: 56490
  GFR-binding peptide
  MOD_RES (1), (32), (33): Xaa is C or S

SEQ ID NO: 60210 - protein, 39 aa, Artificial Sequence
  GFR-binding peptide
  MOD_RES (1), (3), (37), (38): Xaa is C or S
  MOD_RES (15), (16), (17), (18), (19): Xaa is A or G
  MOD_RES (20), (21), (22), (23): Xaa is A or G or is absent
XAXSEVTMNEYKFKXXXXXXXXXLYLISIPEMKEPVXXP

SEQ ID NO: 60211 - protein, 39 aa, Artificial Sequence; identical to SEQ ID NO: 4504
  GFR-binding peptide
  MOD_RES (1), (33), (34): Xaa is C or S

SEQ ID NO: 60212 - protein, 37 aa, Artificial Sequence; identical to SEQ ID NO: 11946
  GFR-binding peptide
  MOD_RES (2), (4), (36), (37): Xaa is C or S

SEQ ID NO: 60213 - protein, 37 aa, Artificial Sequence
  GFR-binding peptide
  MOD_RES (2), (4), (35), (36): Xaa is C or S
LXGXEEVIMYHYKLLLVRGNDKYLMSIPSTKVPAXXT

SEQ ID NO: 60214 - protein, 40 aa, Artificial Sequence; identical to SEQ ID NO: 31571
  GFR-binding peptide
  MOD_RES (2), (4), (36), (37): Xaa is C or S

SEQ ID NO: 60215 - protein, 37 aa, Artificial Sequence; identical to SEQ ID NO: 4511
  GFR-binding peptide
  MOD_RES (2), (35), (36): Xaa is C or S
  MOD_RES (13), (14), (15), (16), (17): Xaa is A or G
  MOD_RES (18), (19), (20), (21): Xaa is A or G or is absent

SEQ ID NO: 60216 - protein, 41 aa, Artificial Sequence; identical to SEQ ID NO: 25606
  GFR-binding peptide
  MOD_RES (1), (3), (37), (38): Xaa is C or S
  MOD_RES (15), (16), (17), (18), (19): Xaa is A or G
  MOD_RES (20), (21), (22), (23): Xaa is A or G or is absent

SEQ ID NO: 60217 - protein, 40 aa, Artificial Sequence
  GFR-binding peptide
  MOD_RES (2), (4), (38), (39): Xaa is C or S
  MOD_RES (16), (17), (18), (19), (20): Xaa is A or G
  MOD_RES (21), (22), (23), (24): Xaa is A or G or is absent
RXGXSEVVMDRHKRLXXXXXXXXXYYLISTASLRTPVXXT

SEQ ID NO: 60218 - protein, 39 aa, Artificial Sequence; identical to SEQ ID NO: 4514
  GFR-binding peptide
  MOD_RES (2), (36), (37): Xaa is C or S
  MOD_RES (14), (15), (16), (17), (18): Xaa is A or G
  MOD_RES (19), (20), (21), (22): Xaa is A or G or is absent

SEQ ID NO: 60219 - protein, 32 aa, Artificial Sequence; identical to SEQ ID NO: 56508
  GFR-binding peptide
  MOD_RES (1), (1): Xaa is C or S

SEQ ID NO: 60220 - protein, 38 aa, Artificial Sequence; identical to SEQ ID NO: 4519
  GFR-binding peptide
  MOD_RES (32), (33): Xaa is C or S

SEQ ID NO: 60221 - protein, 33 aa, Artificial Sequence; identical to SEQ ID NO: 4520
  GFR-binding peptide
  MOD_RES (31), (32): Xaa is C or S

SEQ ID NO: 60222 - protein, 37 aa, Artificial Sequence; identical to SEQ ID NO: 4521
  GFR-binding peptide
  MOD_RES (34), (35): Xaa is C or S
  MOD_RES (12), (13), (14), (15), (16): Xaa is A or G
  MOD_RES (17), (18), (19), (20): Xaa is A or G or is absent

SEQ ID NO: 60223 - protein, 35 aa, Artificial Sequence; identical to SEQ ID NO: 4523
  GFR-binding peptide
  MOD_RES (33), (34): Xaa is C or S
  MOD_RES (11), (12), (13), (14), (15): Xaa is A or G
  MOD_RES (16), (17), (18), (19): Xaa is A or G or is absent

SEQ ID NO: 60224 - protein, 36 aa, Artificial Sequence; identical to SEQ ID NO: 4524
  GFR-binding peptide
  MOD_RES (1), (3): Xaa is C or S
  MOD_RES (15), (16), (17), (18), (19): Xaa is A or G
  MOD_RES (20), (21), (22), (23): Xaa is A or G or is absent

SEQ ID NO: 60225 - protein, 41 aa, Artificial Sequence
  GFR-binding peptide
  MOD_RES (2), (4), (36), (37): Xaa is C or S
RXAXSEVTMNPIKGYVVNKNEDFYLINIPSMKEPVXXPEPI

SEQ ID NO: 60226 - protein, 36 aa, Artificial Sequence; identical to SEQ ID NO: 25623
  GFR-binding peptide
  MOD_RES (1), (33): Xaa is C or S

SEQ ID NO: 60227 - protein, 38 aa, Artificial Sequence; identical to SEQ ID NO: 25627
  GFR-binding peptide
  MOD_RES (1), (33), (34): Xaa is C or S

SEQ ID NO: 60228 - protein, 41 aa, Artificial Sequence; identical to SEQ ID NO: 4532
  GFR-binding peptide
  MOD_RES (2), (4), (39), (40): Xaa is C or S
  MOD_RES (17), (18), (19), (20), (21): Xaa is A or G
  MOD_RES (22), (23), (24), (25): Xaa is A or G or is absent

SEQ ID NO: 60229 - protein, 43 aa, Artificial Sequence; identical to SEQ ID NO: 31601
  GFR-binding peptide
  MOD_RES (1), (3), (37): Xaa is C or S
  MOD_RES (15), (16), (17), (18), (19): Xaa is A or G
  MOD_RES (20), (21), (22), (23): Xaa is A or G or is absent

SEQ ID NO: 60230 - protein, 39 aa, Artificial Sequence; identical to SEQ ID NO: 4533
  GFR-binding peptide
  MOD_RES (1), (35), (36): Xaa is C or S
  MOD_RES (13), (14), (15), (16), (17): Xaa is A or G
  MOD_RES (18), (19), (20), (21): Xaa is A or G or is absent

SEQ ID NO: 60231 - protein, 38 aa, Artificial Sequence; identical to SEQ ID NO: 4535
  GFR-binding peptide
  MOD_RES (2), (4), (36): Xaa is C or S

SEQ ID NO: 60232 - protein, 34 aa, Artificial Sequence; identical to SEQ ID NO: 4538
  GFR-binding peptide
  MOD_RES (2), (33), (34): Xaa is C or S

SEQ ID NO: 60233 - protein, 34 aa, Artificial Sequence; identical to SEQ ID NO: 4540
  GFR-binding peptide
  MOD_RES (2), (34): Xaa is C or S

SEQ ID NO: 60234 - protein, 37 aa, Artificial Sequence; identical to SEQ ID NO: 25637
  GFR-binding peptide
  MOD_RES (2), (4), (36), (37): Xaa is C or S

SEQ ID NO: 60235 - protein, 40 aa, Artificial Sequence; identical to SEQ ID NO: 4543
  GFR-binding peptide
  MOD_RES (1), (3), (34), (35): Xaa is C or S

SEQ ID NO: 60236 - protein, 34 aa, Artificial Sequence
  GFR-binding peptide
  MOD_RES (2), (34): Xaa is C or S
GXAEVVMDRHKRLVVNNAADYYLISTASLRAPVX

SEQ ID NO: 60237 - protein, 38 aa, Artificial Sequence
  GFR-binding peptide
  MOD_RES (33), (34): Xaa is C or S
  MOD_RES (11), (12), (13), (14), (15): Xaa is A or G
  MOD_RES (16), (17), (18), (19): Xaa is A or G or is absent
SKVIMPIKGYXXXXXXXXXFYLINIPSLDQSVXXPSAS

SEQ ID NO: 60238 - protein, 41 aa, Artificial Sequence; identical to SEQ ID NO: 4547
  GFR-binding peptide
  MOD_RES (2), (4), (38), (39): Xaa is C or S
  MOD_RES (16), (17), (18), (19), (20): Xaa is A or G
  MOD_RES (21), (22), (23), (24): Xaa is A or G or is absent

SEQ ID NO: 60239 - protein, 33 aa, Artificial Sequence; identical to SEQ ID NO: 25642
  GFR-binding peptide
  MOD_RES (12), (13), (14), (15), (16): Xaa is A or G
  MOD_RES (17), (18), (19), (20): Xaa is A or G or is absent

SEQ ID NO: 60240 - protein, 39 aa, Artificial Sequence; identical to SEQ ID NO: 25645
  GFR-binding peptide
  MOD_RES (2), (34), (35): Xaa is C or S

SEQ ID NO: 60241 - protein, 40 aa, Artificial Sequence; identical to SEQ ID NO: 4551
  GFR-binding peptide
  MOD_RES (1), (35), (36): Xaa is C or S
  MOD_RES (13), (14), (15), (16), (17): Xaa is A or G
  MOD_RES (18), (19), (20), (21): Xaa is A or G or is absent

SEQ ID NO: 60242 - protein, 42 aa, Artificial Sequence
  GFR-binding peptide
  MOD_RES (2), (4), (38), (39): Xaa is C or S
  MOD_RES (16), (17), (18), (19), (20): Xaa is A or G
  MOD_RES (21), (22), (23), (24): Xaa is A or G or is absent
RXAXSEVTMNRHKRLXXXXXXXXXYYLISTASMKEPVXXPEP

SEQ ID NO: 60243 - protein, 37 aa, Artificial Sequence; identical to SEQ ID NO: 4562
  GFR-binding peptide
  MOD_RES (1), (35), (36): Xaa is C or S
  MOD_RES (13), (14), (15), (16), (17): Xaa is A or G
  MOD_RES (18), (19), (20), (21): Xaa is A or G or is absent

SEQ ID NO: 60244 - protein, 38 aa, Artificial Sequence; identical to SEQ ID NO: 4566
  GFR-binding peptide
  MOD_RES (1), (3), (36), (37): Xaa is C or S
  MOD_RES (14), (15), (16), (17), (18): Xaa is A or G
  MOD_RES (19), (20), (21), (22): Xaa is A or G or is absent

SEQ ID NO: 60245 - protein, 39 aa, Artificial Sequence; identical to SEQ ID NO: 25658
  GFR-binding peptide
  MOD_RES (1), (35), (36): Xaa is C or S
  MOD_RES (13), (14), (15), (16), (17): Xaa is A or G
  MOD_RES (18), (19), (20), (21): Xaa is A or G or is absent

SEQ ID NO: 60246 - protein, 37 aa, Artificial Sequence; identical to SEQ ID NO: 31621
  GFR-binding peptide
  MOD_RES (2), (4), (36), (37): Xaa is C or S

SEQ ID NO: 60247 - protein, 37 aa, Artificial Sequence; identical to SEQ ID NO: 4567
  GFR-binding peptide
  MOD_RES (1), (3), (37): Xaa is C or S
  MOD_RES (15), (16), (17), (18), (19): Xaa is A or G
  MOD_RES (20), (21), (22), (23): Xaa is A or G or is absent

SEQ ID NO: 60248 - protein, 37 aa, Artificial Sequence
  GFR-binding peptide
  MOD_RES (2), (36), (37): Xaa is C or S
  MOD_RES (14), (15), (16), (17), (18): Xaa is A or G
  MOD_RES (19), (20), (21), (22): Xaa is A or G or is absent
AXSEVTMNRYKKLXXXXXXXXXFYLISIANMKEPVXX

SEQ ID NO: 60249 - protein, 39 aa, Artificial Sequence; identical to SEQ ID NO: 4570
  GFR-binding peptide
  MOD_RES (1), (3), (35), (36): Xaa is C or S

SEQ ID NO: 60250 - protein, 41 aa, Artificial Sequence
  GFR-binding peptide
  MOD_RES (1), (35), (36): Xaa is C or S
  MOD_RES (13), (14), (15), (16), (17): Xaa is A or G
  MOD_RES (18), (19), (20), (21): Xaa is A or G or is absent
XSRVVMNEYKFKXXXXXXXXXLYLVSIPELKTPAXXPKPVH

SEQ ID NO: 60251 - protein, 39 aa, Artificial Sequence
  GFR-binding peptide
  MOD_RES (1), (35), (36): Xaa is C or S
  MOD_RES (13), (14), (15), (16), (17): Xaa is A or G
  MOD_RES (18), (19), (20), (21): Xaa is A or G or is absent
XSEVTMNPIKGYXXXXXXXXXFYLINIPSMKEPVXXPEP

SEQ ID NO: 60252 - protein, 37 aa, Artificial Sequence; identical to SEQ ID NO: 4573
  GFR-binding peptide
  MOD_RES (34), (35): Xaa is C or S
  MOD_RES (12), (13), (14), (15), (16): Xaa is A or G
  MOD_RES (17), (18), (19), (20): Xaa is A or G or is absent

SEQ ID NO: 60253 - protein, 36 aa, Artificial Sequence; identical to SEQ ID NO: 25663
  GFR-binding peptide
  MOD_RES (33), (34): Xaa is C or S
  MOD_RES (11), (12), (13), (14), (15): Xaa is A or G
  MOD_RES (16), (17), (18), (19): Xaa is A or G or is absent

SEQ ID NO: 60254 - protein, 37 aa, Artificial Sequence; identical to SEQ ID NO: 31632
  GFR-binding peptide
  MOD_RES (1), (3), (37): Xaa is C or S
  MOD_RES (15), (16), (17), (18), (19): Xaa is A or G
  MOD_RES (20), (21), (22), (23): Xaa is A or G or is absent

SEQ ID NO: 60255 - protein, 36 aa, Artificial Sequence; identical to SEQ ID NO: 56558
  GFR-binding peptide
  MOD_RES (2), (4), (35), (36): Xaa is C or S

SEQ ID NO: 60256 - protein, 41 aa, Artificial Sequence; identical to SEQ ID NO: 4575
  GFR-binding peptide
  MOD_RES (1), (3), (35), (36): Xaa is C or S

SEQ ID NO: 60257 - protein, 40 aa, Artificial Sequence; identical to SEQ ID NO: 31634
  GFR-binding peptide
  MOD_RES (1), (3), (35), (36): Xaa is C or S

SEQ ID NO: 60258 - protein, 38 aa, Artificial Sequence; identical to SEQ ID NO: 4579
  GFR-binding peptide
  MOD_RES (32), (33): Xaa is C or S

SEQ ID NO: 60259 - protein, 37 aa, Artificial Sequence; identical to SEQ ID NO: 25669
  GFR-binding peptide
  MOD_RES (32), (33): Xaa is C or S

SEQ ID NO: 60260 - protein, 33 aa, Artificial Sequence
  GFR-binding peptide
  MOD_RES (1), (1): Xaa is C or S
  MOD_RES (12), (13), (14), (15), (16): Xaa is A or G
  MOD_RES (17), (18), (19), (20): Xaa is A or G or is absent
XEEVIMYHYKLXXXXXXXXXKYLMSIPSTKVPA

SEQ ID NO: 60261 - protein, 41 aa, Artificial Sequence
  GFR-binding peptide
  MOD_RES (1), (3), (35), (36): Xaa is C or S
XAXSEVTMNYHYKLVVNKNEDKYLISIPSMKEPVXXPEPIG

SEQ ID NO: 60262 - protein, 37 aa, Artificial Sequence; identical to SEQ ID NO: 31639
  GFR-binding peptide
  MOD_RES (31), (32): Xaa is C or S

SEQ ID NO: 60263 - protein, 34 aa, Artificial Sequence; identical to SEQ ID NO: 25672
  GFR-binding peptide
  MOD_RES (34), (34): Xaa is C or S
  MOD_RES (12), (13), (14), (15), (16): Xaa is A or G
  MOD_RES (17), (18), (19), (20): Xaa is A or G or is absent

SEQ ID NO: 60264 - protein, 35 aa, Artificial Sequence; identical to SEQ ID NO: 4584
  GFR-binding peptide
  MOD_RES (2), (2): Xaa is C or S
  MOD_RES (14), (15), (16), (17), (18): Xaa is A or G
  MOD_RES (19), (20), (21), (22): Xaa is A or G or is absent

SEQ ID NO: 60265 - protein, 38 aa, Artificial Sequence; identical to SEQ ID NO: 56577
  GFR-binding peptide
  MOD_RES (1), (33), (34): Xaa is C or S

SEQ ID NO: 60266 - protein, 40 aa, Artificial Sequence
  GFR-binding peptide
  MOD_RES (1), (3), (37), (38): Xaa is C or S
  MOD_RES (15), (16), (17), (18), (19): Xaa is A or G
  MOD_RES (20), (21), (22), (23): Xaa is A or G or is absent
XGXRDVVMGEYKFKXXXXXXXXXLYLMSIPEMKTPTXXPG

SEQ ID NO: 60267 - protein, 32 aa, Artificial Sequence; identical to SEQ ID NO: 25681
  GFR-binding peptide
  MOD_RES (1), (1): Xaa is C or S

SEQ ID NO: 60268 - protein, 40 aa, Artificial Sequence
  GFR-binding peptide
  MOD_RES (1), (35), (36): Xaa is C or S
  MOD_RES (13), (14), (15), (16), (17): Xaa is A or G
  MOD_RES (18), (19), (20), (21): Xaa is A or G or is absent
XESVAMGRHKRLXXXXXXXXXYYLISTASLKTPVXXAKSA

SEQ ID NO: 60269 - protein, 37 aa, Artificial Sequence
  GFR-binding peptide
  MOD_RES (31), (32): Xaa is C or S
SKVIMPIKGYIKPTKGIFYLINIPSLDQSVXXPSASA

SEQ ID NO: 60270 - protein, 33 aa, Artificial Sequence
  GFR-binding peptide
  MOD_RES (2), (33): Xaa is C or S
KXSKVIMPIKGYIKPTKGIFYLINIPSLDQSVX

SEQ ID NO: 60271 - protein, 40 aa, Artificial Sequence; identical to SEQ ID NO: 25686
  GFR-binding peptide
  MOD_RES (1), (3), (36), (37): Xaa is C or S
  MOD_RES (14), (15), (16), (17), (18): Xaa is A or G
  MOD_RES (19), (20), (21), (22): Xaa is A or G or is absent

SEQ ID NO: 60272 - protein, 37 aa, Artificial Sequence; identical to SEQ ID NO: 4594
  GFR-binding peptide
  MOD_RES (1), (35), (36): Xaa is C or S
  MOD_RES (13), (14), (15), (16), (17): Xaa is A or G
  MOD_RES (18), (19), (20), (21): Xaa is A or G or is absent

SEQ ID NO: 60273 - protein, 33 aa, Artificial Sequence; identical to SEQ ID NO: 25688
  GFR-binding peptide
  MOD_RES (12), (13), (14), (15), (16): Xaa is A or G
  MOD_RES (17), (18), (19), (20): Xaa is A or G or is absent

SEQ ID NO: 60274 - protein, 38 aa, Artificial Sequence; identical to SEQ ID NO: 25689
  GFR-binding peptide
  MOD_RES (2), (36), (37): Xaa is C or S
  MOD_RES (14), (15), (16), (17), (18): Xaa is A or G
  MOD_RES (19), (20), (21), (22): Xaa is A or G or is absent

SEQ ID NO: 60275 - protein, 40 aa, Artificial Sequence; identical to SEQ ID NO: 4598
  GFR-binding peptide
  MOD_RES (1), (3), (35), (36): Xaa is C or S

SEQ ID NO: 60276 - protein, 40 aa, Artificial Sequence; identical to SEQ ID NO: 25693
  GFR-binding peptide
  MOD_RES (2), (34), (35): Xaa is C or S

SEQ ID NO: 60277 - protein, 34 aa, Artificial Sequence; identical to SEQ ID NO: 4599
  GFR-binding peptide
  MOD_RES (1), (3), (34): Xaa is C or S

SEQ ID NO: 60278 - protein, 37 aa, Artificial Sequence; identical to SEQ ID NO: 31660
  GFR-binding peptide
  MOD_RES (1), (3), (35): Xaa is C or S

SEQ ID NO: 60279 - protein, 34 aa, Artificial Sequence; identical to SEQ ID NO: 4601
  GFR-binding peptide
  MOD_RES (1), (3), (34): Xaa is C or S

SEQ ID NO: 60280 - protein, 42 aa, Artificial Sequence; identical to SEQ ID NO: 4605
  GFR-binding peptide
  MOD_RES (2), (4), (38): Xaa is C or S
  MOD_RES (16), (17), (18), (19), (20): Xaa is A or G
  MOD_RES (21), (22), (23), (24): Xaa is A or G or is absent

SEQ ID NO: 60281 - protein, 34 aa, Artificial Sequence
  GFR-binding peptide
  MOD_RES (33), (34): Xaa is C or S
  MOD_RES (11), (12), (13), (14), (15): Xaa is A or G
  MOD_RES (16), (17), (18), (19): Xaa is A or G or is absent
EEVIMEYKFKXXXXXXXXXLYLMSIPETKVPAXX

SEQ ID NO: 60282 - protein, 37 aa, Artificial Sequence
  GFR-binding peptide
  MOD_RES (1), (32), (33): Xaa is C or S
XSKVVMPIKGYVKPTRGVFYLINIPSLDQPVXXPSAS

SEQ ID NO: 60283 - protein, 34 aa, Artificial Sequence; identical to SEQ ID NO: 31668
  GFR-binding peptide
  MOD_RES (1), (1): Xaa is C or S
  MOD_RES (13), (14), (15), (16), (17): Xaa is A or G
  MOD_RES (18), (19), (20), (21): Xaa is A or G or is absent

SEQ ID NO: 60284 - protein, 34 aa, Artificial Sequence; identical to SEQ ID NO: 25703
  GFR-binding peptide
  MOD_RES (2), (4): Xaa is C or S

SEQ ID NO: 60285 - protein, 36 aa, Artificial Sequence; identical to SEQ ID NO: 25708
  GFR-binding peptide
  MOD_RES (2), (4), (36): Xaa is C or S

SEQ ID NO: 60286 - protein, 41 aa, Artificial Sequence; identical to SEQ ID NO: 4617
  GFR-binding peptide
  MOD_RES (1), (3), (37), (38): Xaa is C or S
  MOD_RES (15), (16), (17), (18), (19): Xaa is A or G
  MOD_RES (20), (21), (22), (23): Xaa is A or G or is absent

SEQ ID NO: 60287 - protein, 37 aa, Artificial Sequence; identical to SEQ ID NO: 25712
  GFR-binding peptide
  MOD_RES (1), (3), (37): Xaa is C or S
  MOD_RES (15), (16), (17), (18), (19): Xaa is A or G
  MOD_RES (20), (21), (22), (23): Xaa is A or G or is absent

SEQ ID NO: 60288 - protein, 32 aa, Artificial Sequence; identical to SEQ ID NO: 31672
  GFR-binding peptide
  MOD_RES (11), (12), (13), (14), (15): Xaa is A or G
  MOD_RES (16), (17), (18), (19): Xaa is A or G or is absent

SEQ ID NO: 60289 - protein, 33 aa, Artificial Sequence
  GFR-binding peptide
  MOD_RES (32), (33): Xaa is C or S
SEVVMDYHYKLVVNNASDKYLISIPSLRTPVXX

SEQ ID NO: 60290 - protein, 34 aa, Artificial Sequence; identical to SEQ ID NO: 25714
  GFR-binding peptide
  MOD_RES (1), (34): Xaa is C or S
  MOD_RES (12), (13), (14), (15), (16): Xaa is A or G
  MOD_RES (17), (18), (19), (20): Xaa is A or G or is absent

SEQ ID NO: 60291 - protein, 40 aa, Artificial Sequence; identical to SEQ ID NO: 31677
  GFR-binding peptide
  MOD_RES (2), (4), (38), (39): Xaa is C or S
  MOD_RES (16), (17), (18), (19), (20): Xaa is A or G
  MOD_RES (21), (22), (23), (24): Xaa is A or G or is absent

SEQ ID NO: 60292 - protein, 39 aa, Artificial Sequence; identical to SEQ ID NO: 4630
  GFR-binding peptide
  MOD_RES (1), (34), (35): Xaa is C or S
  MOD_RES (12), (13), (14), (15), (16): Xaa is A or G
  MOD_RES (17), (18), (19), (20): Xaa is A or G or is absent

SEQ ID NO: 60293 - protein, 37 aa, Artificial Sequence; identical to SEQ ID NO: 31684
  GFR-binding peptide
  MOD_RES (1), (3), (35), (36): Xaa is C or S

SEQ ID NO: 60294 - protein, 33 aa, Artificial Sequence
  GFR-binding peptide
  MOD_RES (1), (33): Xaa is C or S
XAEVVMDRHKRLVVNNAADYYLISTASLRAPVX

SEQ ID NO: 60295 - protein, 39 aa, Artificial Sequence; identical to SEQ ID NO: 25718
  GFR-binding peptide
  MOD_RES (1), (3), (37), (38): Xaa is C or S
  MOD_RES (15), (16), (17), (18), (19): Xaa is A or G
  MOD_RES (20), (21), (22), (23): Xaa is A or G or is absent

SEQ ID NO: 60296 - protein, 41 aa, Artificial Sequence; identical to SEQ ID NO: 31685
  GFR-binding peptide
  MOD_RES (2), (4), (36), (37): Xaa is C or S

SEQ ID NO: 60297 - protein, 39 aa, Artificial Sequence; identical to SEQ ID NO: 31686
  GFR-binding peptide
  MOD_RES (2), (4), (38), (39): Xaa is C or S
  MOD_RES (16), (17), (18), (19), (20): Xaa is A or G
  MOD_RES (21), (22), (23), (24): Xaa is A or G or is absent

SEQ ID NO: 60298 - protein, 34 aa, Artificial Sequence; identical to SEQ ID NO: 56623
  GFR-binding peptide
  MOD_RES (33), (34): Xaa is C or S
  MOD_RES (11), (12), (13), (14), (15): Xaa is A or G
  MOD_RES (16), (17), (18), (19): Xaa is A or G or is absent

SEQ ID NO: 60299 - protein, 41 aa, Artificial Sequence; identical to SEQ ID NO: 25720
  GFR-binding peptide
  MOD_RES (2), (36), (37): Xaa is C or S
  MOD_RES (14), (15), (16), (17), (18): Xaa is A or G
  MOD_RES (19), (20), (21), (22): Xaa is A or G or is absent

SEQ ID NO: 60300 - protein, 37 aa, Artificial Sequence; identical to SEQ ID NO: 25722
  GFR-binding peptide
  MOD_RES (1), (32), (33): Xaa is C or S

SEQ ID NO: 60301 - protein, 36 aa, Artificial Sequence; identical to SEQ ID NO: 4634
  GFR-binding peptide
  MOD_RES (1), (3): Xaa is C or S
  MOD_RES (15), (16), (17), (18), (19): Xaa is A or G
  MOD_RES (20), (21), (22), (23): Xaa is A or G or is absent

SEQ ID NO: 60302 - protein, 34 aa, Artificial Sequence; identical to SEQ ID NO: 31688
  GFR-binding peptide
  MOD_RES (2), (34): Xaa is C or S

SEQ ID NO: 60303 - protein, 39 aa, Artificial Sequence
  GFR-binding peptide
  MOD_RES (1), (33), (34): Xaa is C or S
XRDVVMGYHYKLIIQQKDNKYLMSIPSMKTPTXXPGASG

SEQ ID NO: 60304 - protein, 31 aa, Artificial Sequence
  GFR-binding peptide
  MOD_RES (31), (31): Xaa is C or S
SVAMGRHKRLYTVVGKDYYLISTASLKTPVX

SEQ ID NO: 60305 - protein, 39 aa, Artificial Sequence; identical to SEQ ID NO: 25727
  GFR-binding peptide
  MOD_RES (2), (36), (37): Xaa is C or S
  MOD_RES (14), (15), (16), (17), (18): Xaa is A or G
  MOD_RES (19), (20), (21), (22): Xaa is A or G or is absent

SEQ ID NO: 60306 - protein, 32 aa, Artificial Sequence; identical to SEQ ID NO: 31696
  GFR-binding peptide
  MOD_RES (1), (1): Xaa is C or S

SEQ ID NO: 60307 - protein, 34 aa, Artificial Sequence; identical to SEQ ID NO: 31701
  GFR-binding peptide
  MOD_RES (31), (32): Xaa is C or S

SEQ ID NO: 60308 - protein, 38 aa, Artificial Sequence
  GFR-binding peptide
  MOD_RES (32), (33): Xaa is C or S
SRVVMNEYKFKIVNSSDDLYLVSIPELKTPAXXPKPVH

SEQ ID NO: 60309 - protein, 37 aa, Artificial Sequence; identical to SEQ ID NO: 31704
  GFR-binding peptide
  MOD_RES (2), (36): Xaa is C or S
  MOD_RES (14), (15), (16), (17), (18): Xaa is A or G
  MOD_RES (19), (20), (21), (22): Xaa is A or G or is absent

SEQ ID NO: 60310 - protein, 34 aa, Artificial Sequence; identical to SEQ ID NO: 56641
  GFR-binding peptide
  MOD_RES (1), (34): Xaa is C or S
  MOD_RES (12), (13), (14), (15), (16): Xaa is A or G
  MOD_RES (17), (18), (19), (20): Xaa is A or G or is absent

SEQ ID NO: 60311 - protein, 36 aa, Artificial Sequence; identical to SEQ ID NO: 31706
  GFR-binding peptide
  MOD_RES (33), (34): Xaa is C or S
  MOD_RES (11), (12), (13), (14), (15): Xaa is A or G
  MOD_RES (16), (17), (18), (19): Xaa is A or G or is absent

SEQ ID NO: 60312 - protein, 39 aa, Artificial Sequence; identical to SEQ ID NO: 4642
  GFR-binding peptide
  MOD_RES (34), (35): Xaa is C or S
  MOD_RES (12), (13), (14), (15), (16): Xaa is A or G
  MOD_RES (17), (18), (19), (20): Xaa is A or G or is absent

SEQ ID NO: 60313 - protein, 38 aa, Artificial Sequence
  GFR-binding peptide
  MOD_RES (2), (4), (38): Xaa is C or S
  MOD_RES (16), (17), (18), (19), (20): Xaa is A or G
  MOD_RES (21), (22), (23), (24): Xaa is A or G or is absent
RXAXSEVTMNPIKGYXXXXXXXXXFYLINIPSMKEPVX

SEQ ID NO: 60314 - protein, 39 aa, Artificial Sequence; identical to SEQ ID NO: 4643
  GFR-binding peptide
  MOD_RES (2), (35), (36): Xaa is C or S
  MOD_RES (13), (14), (15), (16), (17): Xaa is A or G
  MOD_RES (18), (19), (20), (21): Xaa is A or G or is absent

SEQ ID NO: 60315 - protein, 38 aa, Artificial Sequence; identical to SEQ ID NO: 56642
  GFR-binding peptide
  MOD_RES (1), (35), (36): Xaa is C or S
  MOD_RES (13), (14), (15), (16), (17): Xaa is A or G
  MOD_RES (18), (19), (20), (21): Xaa is A or G or is absent

SEQ ID NO: 60316 - protein, 38 aa, Artificial Sequence; identical to SEQ ID NO: 31708
  GFR-binding peptide
  MOD_RES (2), (34), (35): Xaa is C or S

SEQ ID NO: 60317 - protein, 40 aa, Artificial Sequence; identical to SEQ ID NO: 31711
  GFR-binding peptide
  MOD_RES (1), (35), (36): Xaa is C or S
  MOD_RES (13), (14), (15), (16), (17): Xaa is A or G
  MOD_RES (18), (19), (20), (21): Xaa is A or G or is absent

SEQ ID NO: 60318 - protein, 41 aa, Artificial Sequence; identical to SEQ ID NO: 25739
  GFR-binding peptide
  MOD_RES (1), (3), (35), (36): Xaa is C or S

SEQ ID NO: 60319 - protein, 37 aa, Artificial Sequence; identical to SEQ ID NO: 31712
  GFR-binding peptide
  MOD_RES (1), (35): Xaa is C or S
  MOD_RES (13), (14), (15), (16), (17): Xaa is A or G
  MOD_RES (18), (19), (20), (21): Xaa is A or G or is absent

SEQ ID NO: 60320 - protein, 38 aa, Artificial Sequence; identical to SEQ ID NO: 4649
  GFR-binding peptide
  MOD_RES (1), (3), (34), (35): Xaa is C or S

SEQ ID NO: 60321 - protein, 31 aa, Artificial Sequence; identical to SEQ ID NO: 4655
  GFR-binding peptide
  MOD_RES (1), (1): Xaa is C or S

SEQ ID NO: 60322 - protein, 34 aa, Artificial Sequence; identical to SEQ ID NO: 31717
  GFR-binding peptide
  MOD_RES (2), (2): Xaa is C or S

SEQ ID NO: 60323 - protein, 38 aa, Artificial Sequence; identical to SEQ ID NO: 25747
  GFR-binding peptide
  MOD_RES (1), (3), (37), (38): Xaa is C or S
  MOD_RES (15), (16), (17), (18), (19): Xaa is A or G
  MOD_RES (20), (21), (22), (23): Xaa is A or G or is absent

SEQ ID NO: 60324 - protein, 38 aa, Artificial Sequence; identical to SEQ ID NO: 25751
  GFR-binding peptide
  MOD_RES (33), (34): Xaa is C or S
  MOD_RES (11), (12), (13), (14), (15): Xaa is A or G
  MOD_RES (16), (17), (18), (19): Xaa is A or G or is absent

SEQ ID NO: 60325 - protein, 41 aa, Artificial Sequence; identical to SEQ ID NO: 25752
  GFR-binding peptide
  MOD_RES (2), (36), (37): Xaa is C or S
  MOD_RES (14), (15), (16), (17), (18): Xaa is A or G
  MOD_RES (19), (20), (21), (22): Xaa is A or G or is absent

SEQ ID NO: 60326 - protein, 43 aa, Artificial Sequence
  GFR-binding peptide
  MOD_RES (2), (4), (38), (39): Xaa is C or S
  MOD_RES (16), (17), (18), (19), (20): Xaa is A or G
  MOD_RES (21), (22), (23), (24): Xaa is A or G or is absent
RXAXSEVTMNEYKFKXXXXXXXXXLYLISIPEMKEPVXXPEPI

SEQ ID NO: 60327 - protein, 38 aa, Artificial Sequence
  GFR-binding peptide
  MOD_RES (2), (34), (35): Xaa is C or S
AXSEVTMNRYKKLVVNKNEDFYLISIANMKEPVXXPEP

SEQ ID NO: 60328 - protein, 36 aa, Artificial Sequence
  GFR-binding peptide
  MOD_RES (2), (35), (36): Xaa is C or S
  MOD_RES (13), (14), (15), (16), (17): Xaa is A or G
  MOD_RES (18), (19), (20), (21): Xaa is A or G or is absent
GXEEVIMRHKRLXXXXXXXXXYYLMSTASTKVPAXX

SEQ ID NO: 60329 - protein, 32 aa, Artificial Sequence; identical to SEQ ID NO: 4657
  GFR-binding peptide
  MOD_RES (32), (32): Xaa is C or S

SEQ ID NO: 60330 - protein, 38 aa, Artificial Sequence
  GFR-binding peptide
  MOD_RES (1), (3), (36), (37): Xaa is C or S
  MOD_RES (14), (15), (16), (17), (18): Xaa is A or G
  MOD_RES (19), (20), (21), (22): Xaa is A or G or is absent
XKXSRVIMPIKGYXXXXXXXXXFYLINIPSLAQPVXXP

SEQ ID NO: 60331 - protein, 31 aa, Artificial Sequence; identical to SEQ ID NO: 4662
  GFR-binding peptide

SEQ ID NO: 60332 - protein, 40 aa, Artificial Sequence; identical to SEQ ID NO: 31728
  GFR-binding peptide
  MOD_RES (2), (4), (38), (39): Xaa is C or S
  MOD_RES (16), (17), (18), (19), (20): Xaa is A or G
  MOD_RES (21), (22), (23), (24): Xaa is A or G or is absent

SEQ ID NO: 60333 - protein, 38 aa, Artificial Sequence; identical to SEQ ID NO: 4667
  GFR-binding peptide
  MOD_RES (33), (34): Xaa is C or S
  MOD_RES (11), (12), (13), (14), (15): Xaa is A or G
  MOD_RES (16), (17), (18), (19): Xaa is A or G or is absent

SEQ ID NO: 60334 - protein, 36 aa, Artificial Sequence; identical to SEQ ID NO: 56670
  GFR-binding peptide
  MOD_RES (1), (3), (34), (35): Xaa is C or S

SEQ ID NO: 60335 - protein, 39 aa, Artificial Sequence; identical to SEQ ID NO: 4668
  GFR-binding peptide
  MOD_RES (1), (3), (34), (35): Xaa is C or S

SEQ ID NO: 60336 - protein, 37 aa, Artificial Sequence; identical to SEQ ID NO: 4669
  GFR-binding peptide
  MOD_RES (32), (33): Xaa is C or S

SEQ ID NO: 60337 - protein, 42 aa, Artificial Sequence; identical to SEQ ID NO: 31735
  GFR-binding peptide
  MOD_RES (2), (4), (38), (39): Xaa is C or S
  MOD_RES (16), (17), (18), (19), (20): Xaa is A or G
  MOD_RES (21), (22), (23), (24): Xaa is A or G or is absent

SEQ ID NO: 60338 - protein, 37 aa, Artificial Sequence
  GFR-binding peptide
  MOD_RES (31), (32): Xaa is C or S
EVTMNEYKFKVVNKNEDLYLISIPEMKEPVXXPEPIG

SEQ ID NO: 60339 - protein, 37 aa, Artificial Sequence; identical to SEQ ID NO: 4670
  GFR-binding peptide
  MOD_RES (2), (36), (37): Xaa is C or S
  MOD_RES (14), (15), (16), (17), (18): Xaa is A or G
  MOD_RES (19), (20), (21), (22): Xaa is A or G or is absent

SEQ ID NO: 60340 - protein, 38 aa, Artificial Sequence
  GFR-binding peptide
  MOD_RES (34), (35): Xaa is C or S
  MOD_RES (12), (13), (14), (15), (16): Xaa is A or G
  MOD_RES (17), (18), (19), (20): Xaa is A or G or is absent
SEVTMNRYKKLXXXXXXXXXFYLISIANMKEPVXXPEP

SEQ ID NO: 60341 - protein, 35 aa, Artificial Sequence; identical to SEQ ID NO: 4671
  GFR-binding peptide
  MOD_RES (33), (34): Xaa is C or S
  MOD_RES (11), (12), (13), (14), (15): Xaa is A or G
  MOD_RES (16), (17), (18), (19): Xaa is A or G or is absent

SEQ ID NO: 60342 - protein, 38 aa, Artificial Sequence; identical to SEQ ID NO: 56673
  GFR-binding peptide
  MOD_RES (2), (35), (36): Xaa is C or S
  MOD_RES (13), (14), (15), (16), (17): Xaa is A or G
  MOD_RES (18), (19), (20), (21): Xaa is A or G or is absent

SEQ ID NO: 60343 - protein, 39 aa, Artificial Sequence; identical to SEQ ID NO: 25764
  GFR-binding peptide
  MOD_RES (1), (34), (35): Xaa is C or S

SEQ ID NO: 60344 - protein, 32 aa, Artificial Sequence; identical to SEQ ID NO: 4673
  GFR-binding peptide
  MOD_RES (11), (12), (13), (14), (15): Xaa is A or G
  MOD_RES (16), (17), (18), (19): Xaa is A or G or is absent

SEQ ID NO: 60345 - protein, 38 aa, Artificial Sequence
  GFR-binding peptide
  MOD_RES (2), (34), (35): Xaa is C or S
GXRDVVMGRHKRLIIQQKDNYYLMSTASMKTPTXXPGA

SEQ ID NO: 60346 - protein, 37 aa, Artificial Sequence; identical to SEQ ID NO: 25767
  GFR-binding peptide
  MOD_RES (1), (3), (35), (36): Xaa is C or S

SEQ ID NO: 60347 - protein, 40 aa, Artificial Sequence; identical to SEQ ID NO: 4679
  GFR-binding peptide
  MOD_RES (2), (34), (35): Xaa is C or S

SEQ ID NO: 60348 - protein, 37 aa, Artificial Sequence; identical to SEQ ID NO: 4681
  GFR-binding peptide
  MOD_RES (1), (3), (34), (35): Xaa is C or S

SEQ ID NO: 60349 - protein, 37 aa, Artificial Sequence
  GFR-binding peptide
  MOD_RES (1), (3), (35), (36): Xaa is C or S
XGXSEVVMDYHYKLVVNNASDKYLISIPSLRTPVXXT

SEQ ID NO: 60350 - protein, 38 aa, Artificial Sequence; identical to SEQ ID NO: 31744
  GFR-binding peptide
  MOD_RES (2), (36), (37): Xaa is C or S
  MOD_RES (14), (15), (16), (17), (18): Xaa is A or G
  MOD_RES (19), (20), (21), (22): Xaa is A or G or is absent

SEQ ID NO: 60351 - protein, 36 aa, Artificial Sequence; identical to SEQ ID NO: 4682
  GFR-binding peptide
  MOD_RES (2), (33), (34): Xaa is C or S

SEQ ID NO: 60352 - protein, 38 aa, Artificial Sequence
  GFR-binding peptide
  MOD_RES (2), (34), (35): Xaa is C or S
GXAEVVMDRHKRLVVNNAADYYLISTASLRAPVXXSAP

SEQ ID NO: 60353 - protein, 32 aa, Artificial Sequence; identical to SEQ ID NO: 4685
  GFR-binding peptide
  MOD_RES (1), (32): Xaa is C or S

SEQ ID NO: 60354 - protein, 32 aa, Artificial Sequence
  GFR-binding peptide
  MOD_RES (1), (32): Xaa is C or S
XSRVIMPIKGYVKPKRGVFYLINIPSLAQPVX

SEQ ID NO: 60355 - protein, 38 aa, Artificial Sequence; identical to SEQ ID NO: 56688
  GFR-binding peptide
  MOD_RES (1), (32), (33): Xaa is C or S

SEQ ID NO: 60356 - protein, 36 aa, Artificial Sequence; identical to SEQ ID NO: 4686
  GFR-binding peptide
  MOD_RES (2), (35), (36): Xaa is C or S
  MOD_RES (13), (14), (15), (16), (17): Xaa is A or G
  MOD_RES (18), (19), (20), (21): Xaa is A or G or is absent

SEQ ID NO: 60357 - protein, 43 aa, Artificial Sequence; identical to SEQ ID NO: 25774
  GFR-binding peptide
  MOD_RES (2), (4), (37), (38): Xaa is C or S
  MOD_RES (15), (16), (17), (18), (19): Xaa is A or G
  MOD_RES (20), (21), (22), (23): Xaa is A or G or is absent

SEQ ID NO: 60358 - protein, 36 aa, Artificial Sequence
  GFR-binding peptide
  MOD_RES (2), (36): Xaa is C or S
  MOD_RES (14), (15), (16), (17), (18): Xaa is A or G
  MOD_RES (19), (20), (21), (22): Xaa is A or G or is absent
GXRDVVMGYHYKLXXXXXXXXXKYLMSIPSMKTPTX

SEQ ID NO: 60359 - protein, 38 aa, Artificial Sequence; identical to SEQ ID NO: 4687
  GFR-binding peptide
  MOD_RES (1), (3), (37), (38): Xaa is C or S
  MOD_RES (15), (16), (17), (18), (19): Xaa is A or G
  MOD_RES (20), (21), (22), (23): Xaa is A or G or is absent

SEQ ID NO: 60360 - protein, 32 aa, Artificial Sequence; identical to SEQ ID NO: 4688
  GFR-binding peptide
  MOD_RES (31), (32): Xaa is C or S

SEQ ID NO: 60361 - protein, 36 aa, Artificial Sequence
  GFR-binding peptide
  MOD_RES (2), (36): Xaa is C or S
  MOD_RES (14), (15), (16), (17), (18): Xaa is A or G
  MOD_RES (19), (20), (21), (22): Xaa is A or G or is absent
GXSEVVMDYHYKLXXXXXXXXXKYLISIPSLRTPVX

SEQ ID NO: 60362 - protein, 36 aa, Artificial Sequence; identical to SEQ ID NO: 4691
  GFR-binding peptide
  MOD_RES (1), (35), (36): Xaa is C or S
  MOD_RES (13), (14), (15), (16), (17): Xaa is A or G
  MOD_RES (18), (19), (20), (21): Xaa is A or G or is absent

SEQ ID NO: 60363 - protein, 41 aa, Artificial Sequence; identical to SEQ ID NO: 4692
  GFR-binding peptide
  MOD_RES (1), (3), (36), (37): Xaa is C or S

SEQ ID NO: 60364 - protein, 36 aa, Artificial Sequence; identical to SEQ ID NO: 31767
  GFR-binding peptide
  MOD_RES (1), (3), (35), (36): Xaa is C or S

SEQ ID NO: 60365 - protein, 35 aa, Artificial Sequence; identical to SEQ ID NO: 25782
  GFR-binding peptide
  MOD_RES (1), (35): Xaa is C or S
  MOD_RES (13), (14), (15), (16), (17): Xaa is A or G
  MOD_RES (18), (19), (20), (21): Xaa is A or G or is absent

SEQ ID NO: 60366 - protein, 38 aa, Artificial Sequence; identical to SEQ ID NO: 25783
  GFR-binding peptide
  MOD_RES (2), (36), (37): Xaa is C or S
  MOD_RES (14), (15), (16), (17), (18): Xaa is A or G
  MOD_RES (19), (20), (21), (22): Xaa is A or G or is absent

SEQ ID NO: 60367 - protein, 41 aa, Artificial Sequence; identical to SEQ ID NO: 4694
  GFR-binding peptide
  MOD_RES (2), (36), (37): Xaa is C or S
  MOD_RES (14), (15), (16), (17), (18): Xaa is A or G
  MOD_RES (19), (20), (21), (22): Xaa is A or G or is absent

SEQ ID NO: 60368 - protein, 40 aa, Artificial Sequence
  GFR-binding peptide
  MOD_RES (34), (35): Xaa is C or S
  MOD_RES (12), (13), (14), (15), (16): Xaa is A or G
  MOD_RES (17), (18), (19), (20): Xaa is A or G or is absent
SRVVMNYHYKLXXXXXXXXXKYLVSIPSLKTPAXXPKPVH

SEQ ID NO: 60369 - protein, 34 aa, Artificial Sequence; identical to SEQ ID NO: 4699
  GFR-binding peptide
  MOD_RES (2), (33), (34): Xaa is C or S

SEQ ID NO: 60370 - protein, 43 aa, Artificial Sequence; identical to SEQ ID NO: 4703
  GFR-binding peptide
  MOD_RES (1), (3), (37), (38): Xaa is C or S
  MOD_RES (15), (16), (17), (18), (19): Xaa is A or G
  MOD_RES (20), (21), (22), (23): Xaa is A or G or is absent

SEQ ID NO: 60371 - protein, 36 aa, Artificial Sequence; identical to SEQ ID NO: 4706
  GFR-binding peptide
  MOD_RES (1), (34), (35): Xaa is C or S
  MOD_RES (12), (13), (14), (15), (16): Xaa is A or G
  MOD_RES (17), (18), (19), (20): Xaa is A or G or is absent

SEQ ID NO: 60372 - protein, 36 aa, Artificial Sequence
  GFR-binding peptide
  MOD_RES (1), (3), (34), (35): Xaa is C or S
XGXEEVIMYHYKLLLVRGNDKYLMSIPSTKVPAXXT

SEQ ID NO: 60373 - protein, 34 aa, Artificial Sequence
  GFR-binding peptide
  MOD_RES (34), (34): Xaa is C or S
  MOD_RES (12), (13), (14), (15), (16): Xaa is A or G
  MOD_RES (17), (18), (19), (20): Xaa is A or G or is absent
RDVVMGRHKRLXXXXXXXXXYYLMSTASMKTPTX

SEQ ID NO: 60374 - protein, 40 aa, Artificial Sequence; identical to SEQ ID NO: 4707
  GFR-binding peptide
  MOD_RES (2), (4), (38): Xaa is C or S
  MOD_RES (16), (17), (18), (19), (20): Xaa is A or G
  MOD_RES (21), (22), (23), (24): Xaa is A or G or is absent

SEQ ID NO: 60375 - protein, 37 aa, Artificial Sequence
  GFR-binding peptide
  MOD_RES (34), (35): Xaa is C or S
  MOD_RES (12), (13), (14), (15), (16): Xaa is A or G
  MOD_RES (17), (18), (19), (20): Xaa is A or G or is absent
SEVVMDEYKFKXXXXXXXXXLYLISIPELRTPVXXTP

SEQ ID NO: 60376 - protein, 34 aa, Artificial Sequence; identical to SEQ ID NO: 4712
  GFR-binding peptide
  MOD_RES (1), (33), (34): Xaa is C or S

SEQ ID NO: 60377 - protein, 35 aa, Artificial Sequence
  GFR-binding peptide
  MOD_RES (1), (33), (34): Xaa is C or S
XSEVTMNYHYKLVVNKNEDKYLISIPSMKEPVXXP

SEQ ID NO: 60378 - protein, 35 aa, Artificial Sequence; identical to SEQ ID NO: 4713
  GFR-binding peptide
  MOD_RES (2), (2): Xaa is C or S
  MOD_RES (14), (15), (16), (17), (18): Xaa is A or G
  MOD_RES (19), (20), (21), (22): Xaa is A or G or is absent

SEQ ID NO: 60379 - protein, 42 aa, Artificial Sequence; identical to SEQ ID NO: 25794
  GFR-binding peptide
  MOD_RES (1), (3), (36), (37): Xaa is C or S
  MOD_RES (14), (15), (16), (17), (18): Xaa is A or G
  MOD_RES (19), (20), (21), (22): Xaa is A or G or is absent

SEQ ID NO: 60380 - protein, 40 aa, Artificial Sequence; identical to SEQ ID NO: 31781
  GFR-binding peptide
  MOD_RES (2), (34): Xaa is C or S

SEQ ID NO: 60381 - protein, 37 aa, Artificial Sequence; identical to SEQ ID NO: 25795
  GFR-binding peptide
  MOD_RES (32), (33): Xaa is C or S

SEQ ID NO: 60382 - protein, 38 aa, Artificial Sequence; identical to SEQ ID NO: 4716
  GFR-binding peptide
  MOD_RES (2), (37), (38): Xaa is C or S
  MOD_RES (15), (16), (17), (18), (19): Xaa is A or G
  MOD_RES (20), (21), (22), (23): Xaa is A or G or is absent

SEQ ID NO: 60383 - protein, 36 aa, Artificial Sequence; identical to SEQ ID NO: 31784
  GFR-binding peptide
  MOD_RES (31), (32): Xaa is C or S

SEQ ID NO: 60384 - protein, 35 aa, Artificial Sequence; identical to SEQ ID NO: 25797
  GFR-binding peptide
  MOD_RES (2), (4): Xaa is C or S

SEQ ID NO: 60385 - protein, 32 aa, Artificial Sequence; identical to SEQ ID NO: 25798
  GFR-binding peptide
  MOD_RES (31), (32): Xaa is C or S

SEQ ID NO: 60386 - protein, 36 aa, Artificial Sequence; identical to SEQ ID NO: 4719
  GFR-binding peptide
  MOD_RES (1), (3), (35), (36): Xaa is C or S

SEQ ID NO: 60387 - protein, 33 aa, Artificial Sequence
  GFR-binding peptide
  MOD_RES (2), (33): Xaa is C or S
GXEEVIMYHYKLLLVRGNDKYLMSIPSTKVPAX

SEQ ID NO: 60388 - protein, 33 aa, Artificial Sequence
  GFR-binding peptide
  MOD_RES (1), (1): Xaa is C or S
  MOD_RES (12), (13), (14), (15), (16): Xaa is A or G
  MOD_RES (17), (18), (19), (20): Xaa is A or G or is absent
XSRVIMPIKGYXXXXXXXXXFYLINIPSLAQPV

SEQ ID NO: 60389 - protein, 40 aa, Artificial Sequence
  GFR-binding peptide
  MOD_RES (2), (34), (35): Xaa is C or S
GXRDVVMGEYKFKIIQQKDNLYLMSIPEMKTPTXXPGASG

SEQ ID NO: 60390 - protein, 31 aa, Artificial Sequence
  GFR-binding peptide
  MOD_RES (31), (31): Xaa is C or S
SKVVMPIKGYVKPTRGVFYLINIPSLDQPVX

SEQ ID NO: 60391 - protein, 37 aa, Artificial Sequence; identical to SEQ ID NO: 4723
  GFR-binding peptide
  MOD_RES (1), (32), (33): Xaa is C or S

SEQ ID NO: 60392 - protein, 37 aa, Artificial Sequence; identical to SEQ ID NO: 25806
  GFR-binding peptide
  MOD_RES (1), (3), (35), (36): Xaa is C or S

SEQ ID NO: 60393 - protein, 33 aa, Artificial Sequence; identical to SEQ ID NO: 25807
  GFR-binding peptide
  MOD_RES (31), (31): Xaa is C or S

SEQ ID NO: 60394 - protein, 34 aa, Artificial Sequence; identical to SEQ ID NO: 4725
  GFR-binding peptide
  MOD_RES (33), (34): Xaa is C or S
  MOD_RES (11), (12), (13), (14), (15): Xaa is A or G
  MOD_RES (16), (17), (18), (19): Xaa is A or G or is absent

SEQ ID NO: 60395 - protein, 32 aa, Artificial Sequence; identical to SEQ ID NO: 31790
  GFR-binding peptide
  MOD_RES (11), (12), (13), (14), (15): Xaa is A or G
  MOD_RES (16), (17), (18), (19): Xaa is A or G or is absent

SEQ ID NO: 60396 - protein, 36 aa, Artificial Sequence; identical to SEQ ID NO: 31794
  GFR-binding peptide
  MOD_RES (31), (32): Xaa is C or S

SEQ ID NO: 60397 - protein, 37 aa, Artificial Sequence
  GFR-binding peptide
  MOD_RES (1), (35), (36): Xaa is C or S
  MOD_RES (13), (14), (15), (16), (17): Xaa is A or G
  MOD_RES (18), (19), (20), (21): Xaa is A or G or is absent
XSEVTMNPIKGYXXXXXXXXXFYLINIPSMKEPVXXP

SEQ ID NO: 60398 - protein, 33 aa, Artificial Sequence; identical to SEQ ID NO: 4732
  GFR-binding peptide
  MOD_RES (1), (1): Xaa is C or S
  MOD_RES (12), (13), (14), (15), (16): Xaa is A or G
  MOD_RES (17), (18), (19), (20): Xaa is A or G or is absent

SEQ ID NO: 60399 - protein, 40 aa, Artificial Sequence; identical to SEQ ID NO: 31796
  GFR-binding peptide
  MOD_RES (1), (3), (37), (38): Xaa is C or S
  MOD_RES (15), (16), (17), (18), (19): Xaa is A or G
  MOD_RES (20), (21), (22), (23): Xaa is A or G or is absent

SEQ ID NO: 60400 - protein, 32 aa, Artificial Sequence; identical to SEQ ID NO: 4735
  GFR-binding peptide
  MOD_RES (31), (32): Xaa is C or S

SEQ ID NO: 60401 - protein, 38 aa, Artificial Sequence
  GFR-binding peptide
  MOD_RES (34), (35): Xaa is C or S
  MOD_RES (12), (13), (14), (15), (16): Xaa is A or G
  MOD_RES (17), (18), (19), (20): Xaa is A or G or is absent
RDVVMGYHYKLXXXXXXXXXKYLMSIPSMKTPTXXPGA

SEQ ID NO: 60402 - protein, 35 aa, Artificial Sequence; identical to SEQ ID NO: 31800
  GFR-binding peptide
  MOD_RES (34), (35): Xaa is C or S
  MOD_RES (12), (13), (14), (15), (16): Xaa is A or G
  MOD_RES (17), (18), (19), (20): Xaa is A or G or is absent

SEQ ID NO: 60403 - protein, 37 aa, Artificial Sequence; identical to SEQ ID NO: 25817
  GFR-binding peptide
  MOD_RES (1), (3), (37): Xaa is C or S
  MOD_RES (15), (16), (17), (18), (19): Xaa is A or G
  MOD_RES (20), (21), (22), (23): Xaa is A or G or is absent

SEQ ID NO: 60404 - protein, 41 aa, Artificial Sequence; identical to SEQ ID NO: 4739
  GFR-binding peptide
  MOD_RES (2), (36), (37): Xaa is C or S
  MOD_RES (14), (15), (16), (17), (18): Xaa is A or G
  MOD_RES (19), (20), (21), (22): Xaa is A or G or is absent

SEQ ID NO: 60405 - protein, 41 aa, Artificial Sequence; identical to SEQ ID NO: 4742
  GFR-binding peptide
  MOD_RES (1), (3), (36), (37): Xaa is C or S
  MOD_RES (14), (15), (16), (17), (18): Xaa is A or G
  MOD_RES (19), (20), (21), (22): Xaa is A or G or is absent

SEQ ID NO: 60406 - protein, 40 aa, Artificial Sequence; identical to SEQ ID NO: 4743
  GFR-binding peptide
  MOD_RES (1), (3), (34), (35): Xaa is C or S

SEQ ID NO: 60407 - protein, 35 aa, Artificial Sequence
  GFR-binding peptide
  MOD_RES (33), (34): Xaa is C or S
  MOD_RES (11), (12), (13), (14), (15): Xaa is A or G
  MOD_RES (16), (17), (18), (19): Xaa is A or G or is absent
EVVMDYHYKLXXXXXXXXXKYLISIPSLRTPVXXT

SEQ ID NO: 60408 - protein, 39 aa, Artificial Sequence; identical to SEQ ID NO: 31807
  GFR-binding peptide
  MOD_RES (1), (35), (36): Xaa is C or S
  MOD_RES (13), (14), (15), (16), (17): Xaa is A or G
  MOD_RES (18), (19), (20), (21): Xaa is A or G or is absent

SEQ ID NO: 60409 - protein, 35 aa, Artificial Sequence
  GFR-binding peptide
  MOD_RES (33), (34): Xaa is C or S
  MOD_RES (11), (12), (13), (14), (15): Xaa is A or G
  MOD_RES (16), (17), (18), (19): Xaa is A or G or is absent
EVVMDEYKFKXXXXXXXXXLYLISIPELRTPVXXT

SEQ ID NO: 60410 - protein, 41 aa, Artificial Sequence; identical to SEQ ID NO: 31817
  GFR-binding peptide
  MOD_RES (2), (4), (38), (39): Xaa is C or S
  MOD_RES (16), (17), (18), (19), (20): Xaa is A or G
  MOD_RES (21), (22), (23), (24): Xaa is A or G or is absent

SEQ ID NO: 60411 - protein, 39 aa, Artificial Sequence; identical to SEQ ID NO: 25827
  GFR-binding peptide
  MOD_RES (2), (4), (38), (39): Xaa is C or S
  MOD_RES (16), (17), (18), (19), (20): Xaa is A or G
  MOD_RES (21), (22), (23), (24): Xaa is A or G or is absent

SEQ ID NO: 60412 - protein, 39 aa, Artificial Sequence; identical to SEQ ID NO: 4749
  GFR-binding peptide
  MOD_RES (1), (35), (36): Xaa is C or S
  MOD_RES (13), (14), (15), (16), (17): Xaa is A or G
  MOD_RES (18), (19), (20), (21): Xaa is A or G or is absent

SEQ ID NO: 60413 - protein, 34 aa, Artificial Sequence; identical to SEQ ID NO: 4750
  GFR-binding peptide
  MOD_RES (33), (34): Xaa is C or S
  MOD_RES (11), (12), (13), (14), (15): Xaa is A or G
  MOD_RES (16), (17), (18), (19): Xaa is A or G or is absent

SEQ ID NO: 60414 - protein, 38 aa, Artificial Sequence; identical to SEQ ID NO: 25829
  GFR-binding peptide
  MOD_RES (2), (4), (36), (37): Xaa is C or S

SEQ ID NO: 60415 - protein, 39 aa, Artificial Sequence; identical to SEQ ID NO: 4751
  GFR-binding peptide
  MOD_RES (1), (3), (37), (38): Xaa is C or S
  MOD_RES (15), (16), (17), (18), (19): Xaa is A or G
  MOD_RES (20), (21), (22), (23): Xaa is A or G or is absent

SEQ ID NO: 60416 - protein, 37 aa, Artificial Sequence; identical to SEQ ID NO: 4752
  GFR-binding peptide
  MOD_RES (31), (32): Xaa is C or S

SEQ ID NO: 60417 - protein, 33 aa, Artificial Sequence; identical to SEQ ID NO: 25835
  GFR-binding peptide
  MOD_RES (31), (32): Xaa is C or S

SEQ ID NO: 60418 - protein, 36 aa, Artificial Sequence; identical to SEQ ID NO: 4756
  GFR-binding peptide
  MOD_RES (2), (4): Xaa is C or S
  MOD_RES (15), (16), (17), (18), (19): Xaa is A or G
  MOD_RES (20), (21), (22), (23): Xaa is A or G or is absent

SEQ ID NO: 60419 - protein, 37 aa, Artificial Sequence; identical to SEQ ID NO: 4757
  GFR-binding peptide
  MOD_RES (1), (3), (35), (36): Xaa is C or S

SEQ ID NO: 60420 - protein, 38 aa, Artificial Sequence; identical to SEQ ID NO: 31839
  GFR-binding peptide
  MOD_RES (35), (36): Xaa is C or S
  MOD_RES (13), (14), (15), (16), (17): Xaa is A or G
  MOD_RES (18), (19), (20), (21): Xaa is A or G or is absent

SEQ ID NO: 60421 - protein, 36 aa, Artificial Sequence; identical to SEQ ID NO: 25841
  GFR-binding peptide
  MOD_RES (2), (4), (36): Xaa is C or S

SEQ ID NO: 60422 - protein, 37 aa, Artificial Sequence
  GFR-binding peptide
  MOD_RES (33), (34): Xaa is C or S
  MOD_RES (11), (12), (13), (14), (15): Xaa is A or G
  MOD_RES (16), (17), (18), (19): Xaa is A or G or is absent
EVTMNRHKRLXXXXXXXXXYYLISTASMKEPVXXPEP

SEQ ID NO: 60423 - protein, 35 aa, Artificial Sequence
  GFR-binding peptide
  MOD_RES (2), (4): Xaa is C or S
RXGXAEVVMDRHKRLVVNNAADYYLISTASLRAPV

SEQ ID NO: 60424 - protein, 38 aa, Artificial Sequence; identical to SEQ ID NO: 25846
  GFR-binding peptide
  MOD_RES (32), (33): Xaa is C or S

SEQ ID NO: 60425 - protein, 40 aa, Artificial Sequence; identical to SEQ ID NO: 31843
  GFR-binding peptide
  MOD_RES (1), (35), (36): Xaa is C or S
  MOD_RES (13), (14), (15), (16), (17): Xaa is A or G
  MOD_RES (18), (19), (20), (21): Xaa is A or G or is absent

SEQ ID NO: 60426 - protein, 38 aa, Artificial Sequence; identical to SEQ ID NO: 25851
  GFR-binding peptide
  MOD_RES (2), (34), (35): Xaa is C or S

SEQ ID NO: 60427 - protein, 37 aa, Artificial Sequence; identical to SEQ ID NO: 31850
  GFR-binding peptide
  MOD_RES (1), (35), (36): Xaa is C or S
  MOD_RES (13), (14), (15), (16), (17): Xaa is A or G
  MOD_RES (18), (19), (20), (21): Xaa is A or G or is absent

SEQ ID NO: 60428 - protein, 39 aa, Artificial Sequence; identical to SEQ ID NO: 4768
  GFR-binding peptide
  MOD_RES (2), (36): Xaa is C or S
  MOD_RES (14), (15), (16), (17), (18): Xaa is A or G
  MOD_RES (19), (20), (21), (22): Xaa is A or G or is absent

SEQ ID NO: 60429 - protein, 37 aa, Artificial Sequence; identical to SEQ ID NO: 4772
  GFR-binding peptide
  MOD_RES (34), (35): Xaa is C or S
  MOD_RES (12), (13), (14), (15), (16): Xaa is A or G
  MOD_RES (17), (18), (19), (20): Xaa is A or G or is absent

SEQ ID NO: 60430 - protein, 40 aa, Artificial Sequence
  GFR-binding peptide
  MOD_RES (2), (4), (35), (36): Xaa is C or S
LXGXEEVIMEYKFKLLVRGNDLYLMSIPETKVPAXXTSPV

SEQ ID NO: 60431 - protein, 38 aa, Artificial Sequence
  GFR-binding peptide
  MOD_RES (2), (4), (35), (36): Xaa is C or S
SXKXSRVIMPIKGYVKPKRGVFYLINIPSLAQPVXXPA

SEQ ID NO: 60432 - protein, 37 aa, Artificial Sequence; identical to SEQ ID NO: 12213
  GFR-binding peptide
  MOD_RES (2), (34), (35): Xaa is C or S

SEQ ID NO: 60433 - protein, 40 aa, Artificial Sequence
  GFR-binding peptide
  MOD_RES (2), (4), (38), (39): Xaa is C or S
  MOD_RES (16), (17), (18), (19), (20): Xaa is A or G
  MOD_RES (21), (22), (23), (24): Xaa is A or G or is absent
RXGXSEVVMDYHYKLXXXXXXXXXKYLISIPSLRTPVXXT

SEQ ID NO: 60434 - protein, 37 aa, Artificial Sequence
  GFR-binding peptide
  MOD_RES (1), (3), (37): Xaa is C or S
  MOD_RES (15), (16), (17), (18), (19): Xaa is A or G
  MOD_RES (20), (21), (22), (23): Xaa is A or G or is absent
XAXSEVTMNRHKRLXXXXXXXXXYYLISTASMKEPVX

SEQ ID NO: 60435 - protein, 37 aa, Artificial Sequence; identical to SEQ ID NO: 56806
  GFR-binding peptide
  MOD_RES (2), (35), (36): Xaa is C or S
  MOD_RES (13), (14), (15), (16), (17): Xaa is A or G
  MOD_RES (18), (19), (20), (21): Xaa is A or G or is absent

SEQ ID NO: 60436 - protein, 40 aa, Artificial Sequence; identical to SEQ ID NO: 25863
  GFR-binding peptide
  MOD_RES (2), (4), (38): Xaa is C or S
  MOD_RES (16), (17), (18), (19), (20): Xaa is A or G
  MOD_RES (21), (22), (23), (24): Xaa is A or G or is absent

SEQ ID NO: 60437 - protein, 35 aa, Artificial Sequence
  GFR-binding peptide
  MOD_RES (1), (3), (35): Xaa is C or S
XAXSEVTMNYHYKLVVNKNEDKYLISIPSMKEPVX

SEQ ID NO: 60438 - protein, 40 aa, Artificial Sequence
  GFR-binding peptide
  MOD_RES (2), (4), (38), (39): Xaa is C or S
  MOD_RES (16), (17), (18), (19), (20): Xaa is A or G
  MOD_RES (21), (22), (23), (24): Xaa is A or G or is absent
SXGXRDVVMGRHKRLXXXXXXXXXYYLMSTASMKTPTXXP

SEQ ID NO: 60439 - protein, 34 aa, Artificial Sequence
  GFR-binding peptide
  MOD_RES (33), (34): Xaa is C or S
  MOD_RES (11), (12), (13), (14), (15): Xaa is A or G
  MOD_RES (16), (17), (18), (19): Xaa is A or G or is absent
EVTMNRYKKLXXXXXXXXXFYLISIANMKEPVXX

SEQ ID NO: 60440 - protein, 32 aa, Artificial Sequence
  GFR-binding peptide
  MOD_RES (2), (2): Xaa is C or S
KXSKVIMPIKGYIKPTKGIFYLINIPSLDQSV

SEQ ID NO: 60441 - protein, 35 aa, Artificial Sequence; identical to SEQ ID NO: 4780
  GFR-binding peptide
  MOD_RES (32), (32): Xaa is C or S

SEQ ID NO: 60442 - protein, 37 aa, Artificial Sequence; identical to SEQ ID NO: 31866
  GFR-binding peptide
  MOD_RES (33), (34): Xaa is C or S
  MOD_RES (11), (12), (13), (14), (15): Xaa is A or G
  MOD_RES (16), (17), (18), (19): Xaa is A or G or is absent

SEQ ID NO: 60443 - protein, 36 aa, Artificial Sequence; identical to SEQ ID NO: 4781
  GFR-binding peptide
  MOD_RES (2), (4): Xaa is C or S

SEQ ID NO: 60444 - protein, 41 aa, Artificial Sequence; identical to SEQ ID NO: 4784
  GFR-binding peptide
  MOD_RES (2), (4), (38), (39): Xaa is C or S
  MOD_RES (16), (17), (18), (19), (20): Xaa is A or G
  MOD_RES (21), (22), (23), (24): Xaa is A or G or is absent

SEQ ID NO: 60445 - protein, 32 aa, Artificial Sequence; identical to SEQ ID NO: 25868
  GFR-binding peptide
  MOD_RES (32), (32): Xaa is C or S

SEQ ID NO: 60446 - protein, 36 aa, Artificial Sequence; identical to SEQ ID NO: 4788
  GFR-binding peptide
  MOD_RES (34), (34): Xaa is C or S
  MOD_RES (12), (13), (14), (15), (16): Xaa is A or G
  MOD_RES (17), (18), (19), (20): Xaa is A or G or is absent

SEQ ID NO: 60447 - protein, 35 aa, Artificial Sequence; identical to SEQ ID NO: 4789
  GFR-binding peptide
  MOD_RES (1), (35): Xaa is C or S
  MOD_RES (13), (14), (15), (16), (17): Xaa is A or G
  MOD_RES (18), (19), (20), (21): Xaa is A or G or is absent

SEQ ID NO: 60448 - protein, 36 aa, Artificial Sequence; identical to SEQ ID NO: 4791
  GFR-binding peptide
  MOD_RES (31), (32): Xaa is C or S

SEQ ID NO: 60449 - protein, 35 aa, Artificial Sequence
  GFR-binding peptide
  MOD_RES (1), (32), (33): Xaa is C or S
XEEVIMYHYKLLLVRGNDKYLMSIPSTKVPAXXTS

SEQ ID NO: 60450 - protein, 34 aa, Artificial Sequence; identical to SEQ ID NO: 12224
  GFR-binding peptide
  MOD_RES (31), (32): Xaa is C or S

SEQ ID NO: 60451 - protein, 42 aa, Artificial Sequence; identical to SEQ ID NO: 4792
  GFR-binding peptide
  MOD_RES (2), (4), (36), (37): Xaa is C or S

SEQ ID NO: 60452 - protein, 42 aa, Artificial Sequence; identical to SEQ ID NO: 25873
  GFR-binding peptide
  MOD_RES (2), (36), (37): Xaa is C or S
  MOD_RES (14), (15), (16), (17), (18): Xaa is A or G
  MOD_RES (19), (20), (21), (22): Xaa is A or G or is absent

SEQ ID NO: 60453 - protein, 38 aa, Artificial Sequence; identical to SEQ ID NO: 4794
  GFR-binding peptide
  MOD_RES (2), (33), (34): Xaa is C or S

SEQ ID NO: 60454 - protein, 40 aa, Artificial Sequence
  GFR-binding peptide
  MOD_RES (2), (36), (37): Xaa is C or S
  MOD_RES (14), (15), (16), (17), (18): Xaa is A or G
  MOD_RES (19), (20), (21), (22): Xaa is A or G or is absent
GXAEVVMDRHKRLXXXXXXXXXYYLISTASLRAPVXXSAP

SEQ ID NO: 60455 - protein, 35 aa, Artificial Sequence; identical to SEQ ID NO: 4797
  GFR-binding peptide
  MOD_RES (31), (31): Xaa is C or S

SEQ ID NO: 60456 - protein, 33 aa, Artificial Sequence
  GFR-binding peptide
  MOD_RES (31), (32): Xaa is C or S
EEVIMEYKFKLLVRGNDLYLMSIPETKVPAXXT

SEQ ID NO: 60457 - protein, 39 aa, Artificial Sequence
  GFR-binding peptide
  MOD_RES (1), (3), (37), (38): Xaa is C or S
  MOD_RES (15), (16), (17), (18), (19): Xaa is A or G
  MOD_RES (20), (21), (22), (23): Xaa is A or G or is absent
XGXRDVVMGYHYKLXXXXXXXXXKYLMSIPSMKTPTXXP

SEQ ID NO: 60458 - protein, 34 aa, Artificial Sequence; identical to SEQ ID NO: 31875
  GFR-binding peptide
  MOD_RES (34), (34): Xaa is C or S
  MOD_RES (12), (13), (14), (15), (16): Xaa is A or G
  MOD_RES (17), (18), (19), (20): Xaa is A or G or is absent

SEQ ID NO: 60459 - protein, 33 aa, Artificial Sequence; identical to SEQ ID NO: 4800
  GFR-binding peptide
  MOD_RES (33), (33): Xaa is C or S
  MOD_RES (11), (12), (13), (14), (15): Xaa is A or G
  MOD_RES (16), (17), (18), (19): Xaa is A or G or is absent

SEQ ID NO: 60460 - protein, 37 aa, Artificial Sequence; identical to SEQ ID NO: 4804
  GFR-binding peptide
  MOD_RES (1), (3), (36), (37): Xaa is C or S
  MOD_RES (14), (15), (16), (17), (18): Xaa is A or G
  MOD_RES (19), (20), (21), (22): Xaa is A or G or is absent

SEQ ID NO: 60461 - protein, 39 aa, Artificial Sequence; identical to SEQ ID NO: 31880
  GFR-binding peptide
  MOD_RES (34), (35): Xaa is C or S
  MOD_RES (12), (13), (14), (15), (16): Xaa is A or G
  MOD_RES (17), (18), (19), (20): Xaa is A or G or is absent

SEQ ID NO: 60462 - protein, 40 aa, Artificial Sequence; identical to SEQ ID NO: 4806
  GFR-binding peptide
  MOD_RES (2), (4), (39), (40): Xaa is C or S
  MOD_RES (17), (18), (19), (20), (21): Xaa is A or G
  MOD_RES (22), (23), (24), (25): Xaa is A or G or is absent

SEQ ID NO: 60463 - protein, 39 aa, Artificial Sequence; identical to SEQ ID NO: 4807
  GFR-binding peptide
  MOD_RES (1), (3), (37), (38): Xaa is C or S
  MOD_RES (15), (16), (17), (18), (19): Xaa is A or G
  MOD_RES (20), (21), (22), (23): Xaa is A or G or is absent

SEQ ID NO: 60464 - protein, 41 aa, Artificial Sequence; identical to SEQ ID NO: 4810
  GFR-binding peptide
  MOD_RES (2), (36), (37): Xaa is C or S
  MOD_RES (14), (15), (16), (17), (18): Xaa is A or G
  MOD_RES (19), (20), (21), (22): Xaa is A or G or is absent

SEQ ID NO: 60465 - protein, 39 aa, Artificial Sequence; identical to SEQ ID NO: 4811
  GFR-binding peptide
  MOD_RES (2), (4), (35), (36): Xaa is C or S

SEQ ID NO: 60466 - protein, 39 aa, Artificial Sequence; identical to SEQ ID NO: 25890
  GFR-binding peptide
  MOD_RES (2), (36), (37): Xaa is C or S
  MOD_RES (14), (15), (16), (17), (18): Xaa is A or G
  MOD_RES (19), (20), (21), (22): Xaa is A or G or is absent

SEQ ID NO: 60467 - protein, 33 aa, Artificial Sequence; identical to SEQ ID NO: 4812
  GFR-binding peptide
  MOD_RES (1), (3): Xaa is C or S

SEQ ID NO: 60468 - protein, 37 aa, Artificial Sequence; identical to SEQ ID NO: 4813
  GFR-binding peptide
  MOD_RES (1), (3), (35), (36): Xaa is C or S

SEQ ID NO: 60469 - protein, 37 aa, Artificial Sequence; identical to SEQ ID NO: 25892
  GFR-binding peptide
  MOD_RES (1), (34), (35): Xaa is C or S
  MOD_RES (12), (13), (14), (15), (16): Xaa is A or G
  MOD_RES (17), (18), (19), (20): Xaa is A or G or is absent

SEQ ID NO: 60470 - protein, 37 aa, Artificial Sequence; identical to SEQ ID NO: 31893
  GFR-binding peptide
  MOD_RES (1), (3), (35), (36): Xaa is C or S

SEQ ID NO: 60471 - protein, 36 aa, Artificial Sequence
  GFR-binding peptide
  MOD_RES (33), (34): Xaa is C or S
  MOD_RES (11), (12), (13), (14), (15): Xaa is A or G
  MOD_RES (16), (17), (18), (19): Xaa is A or G or is absent
EVVMDRHKRLXXXXXXXXXYYLISTASLRAPVXXSA

SEQ ID NO: 60472 - protein, 32 aa, Artificial Sequence; identical to SEQ ID NO: 4815
  GFR-binding peptide
  MOD_RES (1), (1): Xaa is C or S

SEQ ID NO: 60473 - protein, 40 aa, Artificial Sequence; identical to SEQ ID NO: 25897
  GFR-binding peptide
  MOD_RES (2), (36), (37): Xaa is C or S
  MOD_RES (14), (15), (16), (17), (18): Xaa is A or G
  MOD_RES (19), (20), (21), (22): Xaa is A or G or is absent

SEQ ID NO: 60474 - protein, 40 aa, Artificial Sequence; identical to SEQ ID NO: 4816
  GFR-binding peptide
  MOD_RES (2), (37), (38): Xaa is C or S
  MOD_RES (15), (16), (17), (18), (19): Xaa is A or G
  MOD_RES (20), (21), (22), (23): Xaa is A or G or is absent

SEQ ID NO: 60475 - protein, 33 aa, Artificial Sequence; identical to SEQ ID NO: 4817
  GFR-binding peptide
  MOD_RES (12), (13), (14), (15), (16): Xaa is A or G
  MOD_RES (17), (18), (19), (20): Xaa is A or G or is absent

SEQ ID NO: 60476 - protein, 38 aa, Artificial Sequence; identical to SEQ ID NO: 31897
  GFR-binding peptide
  MOD_RES (2), (4), (36), (37): Xaa is C or S

SEQ ID NO: 60477 - protein, 41 aa, Artificial Sequence; identical to SEQ ID NO: 25900
  GFR-binding peptide
  MOD_RES (1), (3), (35), (36): Xaa is C or S

SEQ ID NO: 60478 - protein, 31 aa, Artificial Sequence; identical to SEQ ID NO: 4820
  GFR-binding peptide
  MOD_RES (31), (31): Xaa is C or S

SEQ ID NO: 60479 - protein, 37 aa, Artificial Sequence; identical to SEQ ID NO: 4822
  GFR-binding peptide
  MOD_RES (1), (33), (34): Xaa is C or S

SEQ ID NO: 60480 - protein, 37 aa, Artificial Sequence; identical to SEQ ID NO: 4825
  GFR-binding peptide
  MOD_RES (32), (33): Xaa is C or S

SEQ ID NO: 60481 - protein, 42 aa, Artificial Sequence; identical to SEQ ID NO: 31898
  GFR-binding peptide
  MOD_RES (2), (4), (38), (39): Xaa is C or S
  MOD_RES (16), (17), (18), (19), (20): Xaa is A or G
  MOD_RES (21), (22), (23), (24): Xaa is A or G or is absent

SEQ ID NO: 60482 - protein, 39 aa, Artificial Sequence; identical to SEQ ID NO: 4826
  GFR-binding peptide
  MOD_RES (2), (35), (36): Xaa is C or S

SEQ ID NO: 60483 - protein, 37 aa, Artificial Sequence; identical to SEQ ID NO: 4828
  GFR-binding peptide
  MOD_RES (31), (32): Xaa is C or S

SEQ ID NO: 60484 - protein, 36 aa, Artificial Sequence
  GFR-binding peptide
  MOD_RES (2), (34), (35): Xaa is C or S
GXSEVVMDRHKRLVVNNASDYYLISTASLRTPVXXT

SEQ ID NO: 60485 - protein, 37 aa, Artificial Sequence
  GFR-binding peptide
  MOD_RES (2), (34), (35): Xaa is C or S
GXSEVVMDEYKFKVVNNASDLYLISIPELRTPVXXTP

SEQ ID NO: 60486 - protein, 38 aa, Artificial Sequence
  GFR-binding peptide
  MOD_RES (1), (34), (35): Xaa is C or S
  MOD_RES (12), (13), (14), (15), (16): Xaa is A or G
  MOD_RES (17), (18), (19), (20): Xaa is A or G or is absent
XSRVIMPIKGYXXXXXXXXXFYLINIPSLAQPVXXPAA

SEQ ID NO: 60487 - protein, 39 aa, Artificial Sequence; identical to SEQ ID NO: 4830
  GFR-binding peptide
  MOD_RES (35), (36): Xaa is C or S
  MOD_RES (13), (14), (15), (16), (17): Xaa is A or G
  MOD_RES (18), (19), (20), (21): Xaa is A or G or is absent

SEQ ID NO: 60488 - protein, 39 aa, Artificial Sequence; identical to SEQ ID NO: 4834
  GFR-binding peptide
  MOD_RES (2), (4), (37), (38): Xaa is C or S
  MOD_RES (15), (16), (17), (18), (19): Xaa is A or G
  MOD_RES (20), (21), (22), (23): Xaa is A or G or is absent

SEQ ID NO: 60489 - protein, 38 aa, Artificial Sequence; identical to SEQ ID NO: 4837
  GFR-binding peptide
  MOD_RES (2), (4), (37), (38): Xaa is C or S
  MOD_RES (15), (16), (17), (18), (19): Xaa is A or G
  MOD_RES (20), (21), (22), (23): Xaa is A or G or is absent

SEQ ID NO: 60490 - protein, 42 aa, Artificial Sequence
  GFR-binding peptide
  MOD_RES (1), (3), (37), (38): Xaa is C or S
  MOD_RES (15), (16), (17), (18), (19): Xaa is A or G
  MOD_RES (20), (21), (22), (23): Xaa is A or G or is absent
XGXSEVVMDEYKFKXXXXXXXXXLYLISIPELRTPVXXTPPT

SEQ ID NO: 60491 - protein, 34 aa, Artificial Sequence; identical to SEQ ID NO: 25913
  GFR-binding peptide
  MOD_RES (1), (3): Xaa is C or S

SEQ ID NO: 60492 - protein, 39 aa, Artificial Sequence
  GFR-binding peptide
  MOD_RES (1), (33), (34): Xaa is C or S
XSEVVMDRHKRLVVNNASDYYLISTASLRTPVXXTPPTS

SEQ ID NO: 60493 - protein, 37 aa, Artificial Sequence; identical to SEQ ID NO: 31911
  GFR-binding peptide
  MOD_RES (1), (3), (37): Xaa is C or S
  MOD_RES (15), (16), (17), (18), (19): Xaa is A or G
  MOD_RES (20), (21), (22), (23): Xaa is A or G or is absent

SEQ ID NO: 60494 - protein, 41 aa, Artificial Sequence
  GFR-binding peptide
  MOD_RES (2), (36), (37): Xaa is C or S
  MOD_RES (14), (15), (16), (17), (18): Xaa is A or G
  MOD_RES (19), (20), (21), (22): Xaa is A or G or is absent
AXSEVTMNRHKRLXXXXXXXXXYYLISTASMKEPVXXPEPI

SEQ ID NO: 60495 - protein, 35 aa, Artificial Sequence; identical to SEQ ID NO: 31912
  GFR-binding peptide
  MOD_RES (31), (32): Xaa is C or S

SEQ ID NO: 60496 - protein, 36 aa, Artificial Sequence; identical to SEQ ID NO: 4842
  GFR-binding peptide
  MOD_RES (1), (32), (33): Xaa is C or S

SEQ ID NO: 60497 - protein, 34 aa, Artificial Sequence
  GFR-binding peptide
  MOD_RES (1), (1): Xaa is C or S
  MOD_RES (13), (14), (15), (16), (17): Xaa is A or G
  MOD_RES (18), (19), (20), (21): Xaa is A or G or is absent
XRDVVMGYHYKLXXXXXXXXXKYLMSIPSMKTPT

SEQ ID NO: 60498 - protein, 38 aa, Artificial Sequence; identical to SEQ ID NO: 25916
  GFR-binding peptide
  MOD_RES (2), (36): Xaa is C or S
  MOD_RES (14), (15), (16), (17), (18): Xaa is A or G
  MOD_RES (19), (20), (21), (22): Xaa is A or G or is absent

SEQ ID NO: 60499 - protein, 36 aa, Artificial Sequence; identical to SEQ ID NO: 4847
  GFR-binding peptide
  MOD_RES (33), (34): Xaa is C or S
  MOD_RES (11), (12), (13), (14), (15): Xaa is A or G
  MOD_RES (16), (17), (18), (19): Xaa is A or G or is absent

SEQ ID NO: 60500 - protein, 43 aa, Artificial Sequence
  GFR-binding peptide
  MOD_RES (1), (3), (37), (38): Xaa is C or S
  MOD_RES (15), (16), (17), (18), (19): Xaa is A or G
  MOD_RES (20), (21), (22), (23): Xaa is A or G or is absent
XAXSEVTMNEYKFKXXXXXXXXXLYLISIPEMKEPVXXPEPIG

SEQ ID NO: 60501 - protein, 39 aa, Artificial Sequence
  GFR-binding peptide
  MOD_RES (2), (4), (36), (37): Xaa is C or S
RXAXSEVTMNRYKKLVVNKNEDFYLISIANMKEPVXXPE

SEQ ID NO: 60502 - protein, 37 aa, Artificial Sequence; identical to SEQ ID NO: 31919
  GFR-binding peptide
  MOD_RES (33), (34): Xaa is C or S
  MOD_RES (11), (12), (13), (14), (15): Xaa is A or G
  MOD_RES (16), (17), (18), (19): Xaa is A or G or is absent

SEQ ID NO: 60503 - protein, 37 aa, Artificial Sequence; identical to SEQ ID NO: 31921
  GFR-binding peptide
  MOD_RES (32), (33): Xaa is C or S

SEQ ID NO: 60504 - protein, 35 aa, Artificial Sequence
  GFR-binding peptide
  MOD_RES (1), (32), (33): Xaa is C or S
XEEVIMRHKRLLLVRGNDYYLMSTASTKVPAXXTS

SEQ ID NO: 60505 - protein, 36 aa, Artificial Sequence; identical to SEQ ID NO: 25924
  GFR-binding peptide
  MOD_RES (1), (3): Xaa is C or S
  MOD_RES (15), (16), (17), (18), (19): Xaa is A or G
  MOD_RES (20), (21), (22), (23): Xaa is A or G or is absent

SEQ ID NO: 60506 - protein, 39 aa, Artificial Sequence
  GFR-binding peptide
  MOD_RES (2), (36), (37): Xaa is C or S
  MOD_RES (14), (15), (16), (17), (18): Xaa is A or G
  MOD_RES (19), (20), (21), (22): Xaa is A or G or is absent
GXAEVVMDRHKRLXXXXXXXXXYYLISTASLRAPVXXSA

SEQ ID NO: 60507 - protein, 32 aa, Artificial Sequence; identical to SEQ ID NO: 4852
  GFR-binding peptide
  MOD_RES (32), (32): Xaa is C or S

SEQ ID NO: 60508 - protein, 36 aa, Artificial Sequence; identical to SEQ ID NO: 4856
  GFR-binding peptide
  MOD_RES (33), (33): Xaa is C or S
  MOD_RES (11), (12), (13), (14), (15): Xaa is A or G
  MOD_RES (16), (17), (18), (19): Xaa is A or G or is absent

SEQ ID NO: 60509 - protein, 36 aa, Artificial Sequence; identical to SEQ ID NO: 4859
  GFR-binding peptide
  MOD_RES (33), (34): Xaa is C or S
  MOD_RES (11), (12), (13), (14), (15): Xaa is A or G
  MOD_RES (16), (17), (18), (19): Xaa is A or G or is absent

SEQ ID NO: 60510 - protein, 37 aa, Artificial Sequence; identical to SEQ ID NO: 56866
  GFR-binding peptide
  MOD_RES (1), (3), (34), (35): Xaa is C or S

SEQ ID NO: 60511 - protein, 41 aa, Artificial Sequence; identical to SEQ ID NO: 4860
  GFR-binding peptide
  MOD_RES (1), (35), (36): Xaa is C or S
  MOD_RES (13), (14), (15), (16), (17): Xaa is A or G
  MOD_RES (18), (19), (20), (21): Xaa is A or G or is absent

SEQ ID NO: 60512 - protein, 32 aa, Artificial Sequence; identical to SEQ ID NO: 4862
  GFR-binding peptide
  MOD_RES (32), (32): Xaa is C or S

SEQ ID NO: 60513 - protein, 40 aa, Artificial Sequence; identical to SEQ ID NO: 56872
  GFR-binding peptide
  MOD_RES (2), (4), (37), (38): Xaa is C or S
  MOD_RES (15), (16), (17), (18), (19): Xaa is A or G
  MOD_RES (20), (21), (22), (23): Xaa is A or G or is absent

SEQ ID NO: 60514 - protein, 38 aa, Artificial Sequence; identical to SEQ ID NO: 4863
  GFR-binding peptide
  MOD_RES (2), (36), (37): Xaa is C or S
  MOD_RES (14), (15), (16), (17), (18): Xaa is A or G
  MOD_RES (19), (20), (21), (22): Xaa is A or G or is absent

SEQ ID NO: 60515 - protein, 36 aa, Artificial Sequence
  GFR-binding peptide
  MOD_RES (1), (3): Xaa is C or S
  MOD_RES (15), (16), (17), (18), (19): Xaa is A or G
  MOD_RES (20), (21), (22), (23): Xaa is A or G or is absent
XGXSEVVMDYHYKLXXXXXXXXXKYLISIPSLRTPV

SEQ ID NO: 60516 - protein, 39 aa, Artificial Sequence; identical to SEQ ID NO: 4866
  GFR-binding peptide
  MOD_RES (1), (35), (36): Xaa is C or S
  MOD_RES (13), (14), (15), (16), (17): Xaa is A or G
  MOD_RES (18), (19), (20), (21): Xaa is A or G or is absent

SEQ ID NO: 60517 - protein, 37 aa, Artificial Sequence; identical to SEQ ID NO: 4867
  GFR-binding peptide
  MOD_RES (2), (4): Xaa is C or S
  MOD_RES (16), (17), (18), (19), (20): Xaa is A or G
  MOD_RES (21), (22), (23), (24): Xaa is A or G or is absent

SEQ ID NO: 60518 - protein, 40 aa, Artificial Sequence; identical to SEQ ID NO: 25938
  GFR-binding peptide
  MOD_RES (1), (35), (36): Xaa is C or S
  MOD_RES (13), (14), (15), (16), (17): Xaa is A or G
  MOD_RES (18), (19), (20), (21): Xaa is A or G or is absent

SEQ ID NO: 60519 - protein, 40 aa, Artificial Sequence
  GFR-binding peptide
  MOD_RES (2), (34), (35): Xaa is C or S
AXSEVTMNRHKRLVVNKNEDYYLISTASMKEPVXXPEPIG

SEQ ID NO: 60520 - protein, 40 aa, Artificial Sequence; identical to SEQ ID NO: 4870
  GFR-binding peptide
  MOD_RES (2), (34), (35): Xaa is C or S

SEQ ID NO: 60521 - protein, 39 aa, Artificial Sequence; identical to SEQ ID NO: 4871
  GFR-binding peptide
  MOD_RES (2), (4), (36), (37): Xaa is C or S

SEQ ID NO: 60522 - protein, 30 aa, Artificial Sequence; identical to SEQ ID NO: 25942
  GFR-binding peptide

SEQ ID NO: 60523 - protein, 36 aa, Artificial Sequence
  GFR-binding peptide
  MOD_RES (1), (33), (34): Xaa is C or S
XRDVVMGRHKRLIIQQKDNYYLMSTASMKTPTXXPG

SEQ ID NO: 60524 - protein, 31 aa, Artificial Sequence; identical to SEQ ID NO: 25943
  GFR-binding peptide

SEQ ID NO: 60525 - protein, 40 aa, Artificial Sequence
  GFR-binding peptide
  MOD_RES (34), (35): Xaa is C or S
  MOD_RES (12), (13), (14), (15), (16): Xaa is A or G
  MOD_RES (17), (18), (19), (20): Xaa is A or G or is absent
RDVVMGEYKFKXXXXXXXXXLYLMSIPEMKTPTXXPGASG

SEQ ID NO: 60526 - protein, 39 aa, Artificial Sequence; identical to SEQ ID NO: 31935
  GFR-binding peptide
  MOD_RES (34), (34): Xaa is C or S
  MOD_RES (12), (13), (14), (15), (16): Xaa is A or G
  MOD_RES (17), (18), (19), (20): Xaa is A or G or is absent

SEQ ID NO: 60527 - protein, 35 aa, Artificial Sequence; identical to SEQ ID NO: 25945
  GFR-binding peptide
  MOD_RES (2), (4): Xaa is C or S

SEQ ID NO: 60528 - protein, 41 aa, Artificial Sequence; identical to SEQ ID NO: 31939
  GFR-binding peptide
  MOD_RES (2), (4), (38), (39): Xaa is C or S
  MOD_RES (16), (17), (18), (19), (20): Xaa is A or G
  MOD_RES (21), (22), (23), (24): Xaa is A or G or is absent

SEQ ID NO: 60529 - protein, 37 aa, Artificial Sequence
  GFR-binding peptide
  MOD_RES (2), (36), (37): Xaa is C or S
  MOD_RES (14), (15), (16), (17), (18): Xaa is A or G
  MOD_RES (19), (20), (21), (22): Xaa is A or G or is absent
AXSEVTMNRHKRLXXXXXXXXXYYLISTASMKEPVXX

SEQ ID NO: 60530 - protein, 34 aa, Artificial Sequence; identical to SEQ ID NO: 4873
  GFR-binding peptide
  MOD_RES (31), (32): Xaa is C or S

SEQ ID NO: 60531 - protein, 33 aa, Artificial Sequence; identical to SEQ ID NO: 25949
  GFR-binding peptide
  MOD_RES (33), (33): Xaa is C or S
  MOD_RES (11), (12), (13), (14), (15): Xaa is A or G
  MOD_RES (16), (17), (18), (19): Xaa is A or G or is absent

SEQ ID NO: 60532 - protein, 35 aa, Artificial Sequence; identical to SEQ ID NO: 4874
  GFR-binding peptide
  MOD_RES (2), (33), (34): Xaa is C or S

SEQ ID NO: 60533 - protein, 44 aa, Artificial Sequence; identical to SEQ ID NO: 25952
  GFR-binding peptide
  MOD_RES (2), (4), (38), (39): Xaa is C or S
  MOD_RES (16), (17), (18), (19), (20): Xaa is A or G
  MOD_RES (21), (22), (23), (24): Xaa is A or G or is absent

SEQ ID NO: 60534 - protein, 35 aa, Artificial Sequence; identical to SEQ ID NO: 4875
  GFR-binding peptide
  MOD_RES (1), (3): Xaa is C or S
  MOD_RES (14), (15), (16), (17), (18): Xaa is A or G
  MOD_RES (19), (20), (21), (22): Xaa is A or G or is absent

SEQ ID NO: 60535 - protein, 38 aa, Artificial Sequence
  GFR-binding peptide
  MOD_RES (2), (4), (38): Xaa is C or S
  MOD_RES (16), (17), (18), (19), (20): Xaa is A or G
  MOD_RES (21), (22), (23), (24): Xaa is A or G or is absent
RXGXSEVVMDYHYKLXXXXXXXXXKYLISIPSLRTPVX

SEQ ID NO: 60536 - protein, 38 aa, Artificial Sequence; identical to SEQ ID NO: 25955
  GFR-binding peptide
  MOD_RES (2), (36), (37): Xaa is C or S
  MOD_RES (14), (15), (16), (17), (18): Xaa is A or G
  MOD_RES (19), (20), (21), (22): Xaa is A or G or is absent

SEQ ID NO: 60537 - protein, 39 aa, Artificial Sequence
  GFR-binding peptide
  MOD_RES (1), (3), (37), (38): Xaa is C or S
  MOD_RES (15), (16), (17), (18), (19): Xaa is A or G
  MOD_RES (20), (21), (22), (23): Xaa is A or G or is absent
XGXAEVVMDRHKRLXXXXXXXXXYYLISTASLRAPVXXS

SEQ ID NO: 60538 - protein, 44 aa, Artificial Sequence; identical to SEQ ID NO: 4882
  GFR-binding peptide
  MOD_RES (2), (4), (39), (40): Xaa is C or S
  MOD_RES (17), (18), (19), (20), (21): Xaa is A or G
  MOD_RES (22), (23), (24), (25): Xaa is A or G or is absent

SEQ ID NO: 60539 - protein, 39 aa, Artificial Sequence; identical to SEQ ID NO: 25960
  GFR-binding peptide
  MOD_RES (1), (3), (37): Xaa is C or S
  MOD_RES (15), (16), (17), (18), (19): Xaa is A or G
  MOD_RES (20), (21), (22), (23): Xaa is A or G or is absent

SEQ ID NO: 60540 - protein, 39 aa, Artificial Sequence; identical to SEQ ID NO: 4885
  GFR-binding peptide
  MOD_RES (2), (4), (36), (37): Xaa is C or S

SEQ ID NO: 60541 - protein, 39 aa, Artificial Sequence
  GFR-binding peptide
  MOD_RES (2), (4), (36), (37): Xaa is C or S
RXGXSEVVMDEYKFKVVNNASDLYLISIPELRTPVXXTP

SEQ ID NO: 60542 - protein, 34 aa, Artificial Sequence; identical to SEQ ID NO: 25966
  GFR-binding peptide
  MOD_RES (34), (34): Xaa is C or S
  MOD_RES (12), (13), (14), (15), (16): Xaa is A or G
  MOD_RES (17), (18), (19), (20): Xaa is A or G or is absent

SEQ ID NO: 60543 - protein, 35 aa, Artificial Sequence; identical to SEQ ID NO: 4888
  GFR-binding peptide
  MOD_RES (1), (35): Xaa is C or S
  MOD_RES (13), (14), (15), (16), (17): Xaa is A or G
  MOD_RES (18), (19), (20), (21): Xaa is A or G or is absent

SEQ ID NO: 60544 - protein, 37 aa, Artificial Sequence; identical to SEQ ID NO: 31971
  GFR-binding peptide
  MOD_RES (2), (4), (36), (37): Xaa is C or S

SEQ ID NO: 60545 - protein, 39 aa, Artificial Sequence; identical to SEQ ID NO: 25969
  GFR-binding peptide
  MOD_RES (2), (4), (38): Xaa is C or S
  MOD_RES (16), (17), (18), (19), (20): Xaa is A or G
  MOD_RES (21), (22), (23), (24): Xaa is A or G or is absent

SEQ ID NO: 60546 - protein, 33 aa, Artificial Sequence; identical to SEQ ID NO: 25970
  GFR-binding peptide
  MOD_RES (32), (33): Xaa is C or S

SEQ ID NO: 60547 - protein, 37 aa, Artificial Sequence; identical to SEQ ID NO: 31972
  GFR-binding peptide
  MOD_RES (2), (4): Xaa is C or S
  MOD_RES (16), (17), (18), (19), (20): Xaa is A or G
  MOD_RES (21), (22), (23), (24): Xaa is A or G or is absent

SEQ ID NO: 60548 - protein, 37 aa, Artificial Sequence; identical to SEQ ID NO: 4892
  GFR-binding peptide
  MOD_RES (31), (32): Xaa is C or S

SEQ ID NO: 60549 - protein, 36 aa, Artificial Sequence; identical to SEQ ID NO: 25975
  GFR-binding peptide
  MOD_RES (31), (32): Xaa is C or S

SEQ ID NO: 60550 - protein, 31 aa, Artificial Sequence
  GFR-binding peptide
RDVVMGEYKFKIIQQKDNLYLMSIPEMKTPT

SEQ ID NO: 60551 - protein, 38 aa, Artificial Sequence
  GFR-binding peptide
  MOD_RES (1), (3), (34), (35): Xaa is C or S
XKXSKVVMPIKGYVKPTRGVFYLINIPSLDQPVXXPSA

SEQ ID NO: 60552 - protein, 36 aa, Artificial Sequence
  GFR-binding peptide
  MOD_RES (2), (34), (35): Xaa is C or S
AXSEVTMNPIKGYVVNKNEDFYLINIPSMKEPVXXP

SEQ ID NO: 60553 - protein, 33 aa, Artificial Sequence
  GFR-binding peptide
  MOD_RES (31), (32): Xaa is C or S
DVVMGRHKRLIIQQKDNYYLMSTASMKTPTXXP

SEQ ID NO: 60554 - protein, 38 aa, Artificial Sequence; identical to SEQ ID NO: 25978
  GFR-binding peptide
  MOD_RES (1), (3), (37), (38): Xaa is C or S
  MOD_RES (15), (16), (17), (18), (19): Xaa is A or G
  MOD_RES (20), (21), (22), (23): Xaa is A or G or is absent

SEQ ID NO: 60555 - protein, 41 aa, Artificial Sequence; identical to SEQ ID NO: 25979
  GFR-binding peptide
  MOD_RES (2), (4), (38), (39): Xaa is C or S
  MOD_RES (16), (17), (18), (19), (20): Xaa is A or G
  MOD_RES (21), (22), (23), (24): Xaa is A or G or is absent

SEQ ID NO: 60556 - protein, 36 aa, Artificial Sequence; identical to SEQ ID NO: 31980
  GFR-binding peptide
  MOD_RES (1), (3), (35), (36): Xaa is C or S

SEQ ID NO: 60557 - protein, 34 aa, Artificial Sequence; identical to SEQ ID NO: 4896
  GFR-binding peptide
  MOD_RES (1), (33), (34): Xaa is C or S

SEQ ID NO: 60558 - protein, 37 aa, Artificial Sequence; identical to SEQ ID NO: 25985
  GFR-binding peptide
  MOD_RES (1), (33), (34): Xaa is C or S

SEQ ID NO: 60559 - protein, 34 aa, Artificial Sequence; identical to SEQ ID NO: 4900
  GFR-binding peptide
  MOD_RES (32), (33): Xaa is C or S

SEQ ID NO: 60560 - protein, 34 aa, Artificial Sequence; identical to SEQ ID NO: 4901
  GFR-binding peptide
  MOD_RES (1), (3): Xaa is C or S

SEQ ID NO: 60561 - protein, 35 aa, Artificial Sequence
  GFR-binding peptide
  MOD_RES (2), (4): Xaa is C or S
RXAXSEVTMNPIKGYVVNKNEDFYLINIPSMKEPV

SEQ ID NO: 60562 - protein, 38 aa, Artificial Sequence; identical to SEQ ID NO: 4903
  GFR-binding peptide
  MOD_RES (32), (32): Xaa is C or S

SEQ ID NO: 60563 - protein, 35 aa, Artificial Sequence
  GFR-binding peptide
  MOD_RES (1), (34), (35): Xaa is C or S
  MOD_RES (12), (13), (14), (15), (16): Xaa is A or G
  MOD_RES (17), (18), (19), (20): Xaa is A or G or is absent
XEEVIMEYKFKXXXXXXXXXLYLMSIPETKVPAXX

SEQ ID NO: 60564 - protein, 35 aa, Artificial Sequence; identical to SEQ ID NO: 25991
  GFR-binding peptide
  MOD_RES (31), (31): Xaa is C or S

SEQ ID NO: 60565 - protein, 37 aa, Artificial Sequence; identical to SEQ ID NO: 25992
  GFR-binding peptide
  MOD_RES (2), (34), (35): Xaa is C or S

SEQ ID NO: 60566 - protein, 39 aa, Artificial Sequence
  GFR-binding peptide
  MOD_RES (33), (34): Xaa is C or S
  MOD_RES (11), (12), (13), (14), (15): Xaa is A or G
  MOD_RES (16), (17), (18), (19): Xaa is A or G or is absent
EEVIMRHKRLXXXXXXXXXYYLMSTASTKVPAXXTSPVR

SEQ ID NO: 60567 - protein, 36 aa, Artificial Sequence
  GFR-binding peptide
  MOD_RES (2), (36): Xaa is C or S
  MOD_RES (14), (15), (16), (17), (18): Xaa is A or G
  MOD_RES (19), (20), (21), (22): Xaa is A or G or is absent
AXSEVTMNEYKFKXXXXXXXXXLYLISIPEMKEPVX

SEQ ID NO: 60568 - protein, 32 aa, Artificial Sequence; identical to SEQ ID NO: 25999
  GFR-binding peptide
  MOD_RES (1), (1): Xaa is C or S

SEQ ID NO: 60569 - protein, 40 aa, Artificial Sequence
  GFR-binding peptide
  MOD_RES (2), (34), (35): Xaa is C or S
GXSEVVMDYHYKLVVNNASDKYLISIPSLRTPVXXTPPTS

SEQ ID NO: 60570 - protein, 41 aa, Artificial Sequence; identical to SEQ ID NO: 26000
  GFR-binding peptide
  MOD_RES (2), (4), (38), (39): Xaa is C or S
  MOD_RES (16), (17), (18), (19), (20): Xaa is A or G
  MOD_RES (21), (22), (23), (24): Xaa is A or G or is absent

SEQ ID NO: 60571 - protein, 35 aa, Artificial Sequence; identical to SEQ ID NO: 31992
  GFR-binding peptide
  MOD_RES (2), (4): Xaa is C or S

SEQ ID NO: 60572 - protein, 41 aa, Artificial Sequence
  GFR-binding peptide
  MOD_RES (1), (3), (36), (37): Xaa is C or S
  MOD_RES (14), (15), (16), (17), (18): Xaa is A or G
  MOD_RES (19), (20), (21), (22): Xaa is A or G or is absent
XGXEEVIMRHKRLXXXXXXXXXYYLMSTASTKVPAXXTSPV

SEQ ID NO: 60573 - protein, 33 aa, Artificial Sequence; identical to SEQ ID NO: 26001
  GFR-binding peptide
  MOD_RES (1), (1): Xaa is C or S
  MOD_RES (12), (13), (14), (15), (16): Xaa is A or G
  MOD_RES (17), (18), (19), (20): Xaa is A or G or is absent

SEQ ID NO: 60574 - protein, 32 aa, Artificial Sequence; identical to SEQ ID NO: 31994
  GFR-binding peptide
  MOD_RES (1), (32): Xaa is C or S

SEQ ID NO: 60575 - protein, 44 aa, Artificial Sequence; identical to SEQ ID NO: 26002
  GFR-binding peptide
  MOD_RES (2), (4), (38), (39): Xaa is C or S
  MOD_RES (16), (17), (18), (19), (20): Xaa is A or G
  MOD_RES (21), (22), (23), (24): Xaa is A or G or is absent

SEQ ID NO: 60576 - protein, 33 aa, Artificial Sequence; identical to SEQ ID NO: 4911
  GFR-binding peptide
  MOD_RES (1), (33): Xaa is C or S

SEQ ID NO: 60577 - protein, 37 aa, Artificial Sequence; identical to SEQ ID NO: 26003
  GFR-binding peptide
  MOD_RES (2), (35), (36): Xaa is C or S
  MOD_RES (13), (14), (15), (16), (17): Xaa is A or G
  MOD_RES (18), (19), (20), (21): Xaa is A or G or is absent

SEQ ID NO: 60578 - protein, 39 aa, Artificial Sequence; identical to SEQ ID NO: 26004
  GFR-binding peptide
  MOD_RES (2), (36), (37): Xaa is C or S
  MOD_RES (14), (15), (16), (17), (18): Xaa is A or G
  MOD_RES (19), (20), (21), (22): Xaa is A or G or is absent

SEQ ID NO: 60579 - protein, 35 aa, Artificial Sequence; identical to SEQ ID NO: 26005
  GFR-binding peptide
  MOD_RES (34), (35): Xaa is C or S
  MOD_RES (12), (13), (14), (15), (16): Xaa is A or G
  MOD_RES (17), (18), (19), (20): Xaa is A or G or is absent

SEQ ID NO: 60580 - protein, 37 aa, Artificial Sequence
  GFR-binding peptide
  MOD_RES (2), (4), (35), (36): Xaa is C or S
SXKXSKVVMPIKGYVKPTRGVFYLINIPSLDQPVXXP

SEQ ID NO: 60581 - protein, 37 aa, Artificial Sequence
  GFR-binding peptide
  MOD_RES (1), (32), (33): Xaa is C or S
XEEVIMRHKRLLLVRGNDYYLMSTASTKVPAXXTSPV

SEQ ID NO: 60582 - protein, 41 aa, Artificial Sequence; identical to SEQ ID NO: 4916
  GFR-binding peptide
  MOD_RES (2), (4), (35), (36): Xaa is C or S

SEQ ID NO: 60583 - protein, 39 aa, Artificial Sequence; identical to SEQ ID NO: 4920
  GFR-binding peptide
  MOD_RES (2), (4), (38), (39): Xaa is C or S
  MOD_RES (16), (17), (18), (19), (20): Xaa is A or G
  MOD_RES (21), (22), (23), (24): Xaa is A or G or is absent

SEQ ID NO: 60584 - protein, 35 aa, Artificial Sequence; identical to SEQ ID NO: 4923
  GFR-binding peptide
  MOD_RES (1), (35): Xaa is C or S
  MOD_RES (13), (14), (15), (16), (17): Xaa is A or G
  MOD_RES (18), (19), (20), (21): Xaa is A or G or is absent

SEQ ID NO: 60585 - protein, 33 aa, Artificial Sequence
  GFR-binding peptide
  MOD_RES (1), (32), (33): Xaa is C or S
XSKVVMPIKGYVKPTRGVFYLINIPSLDQPVXX

SEQ ID NO: 60586 - protein, 36 aa, Artificial Sequence; identical to SEQ ID NO: 4925
  GFR-binding peptide
  MOD_RES (33), (34): Xaa is C or S
  MOD_RES (11), (12), (13), (14), (15): Xaa is A or G
  MOD_RES (16), (17), (18), (19): Xaa is A or G or is absent

SEQ ID NO: 60587 - protein, 40 aa, Artificial Sequence; identical to SEQ ID NO: 4927
  GFR-binding peptide
  MOD_RES (1), (35), (36): Xaa is C or S
  MOD_RES (13), (14), (15), (16), (17): Xaa is A or G
  MOD_RES (18), (19), (20), (21): Xaa is A or G or is absent

SEQ ID NO: 60588 - protein, 33 aa, Artificial Sequence; identical to SEQ ID NO: 4928
  GFR-binding peptide
  MOD_RES (32), (33): Xaa is C or S

SEQ ID NO: 60589 - protein, 45 aa, Artificial Sequence; identical to SEQ ID NO: 4930
  GFR-binding peptide
  MOD_RES (2), (4), (39), (40): Xaa is C or S
  MOD_RES (17), (18), (19), (20), (21): Xaa is A or G
  MOD_RES (22), (23), (24), (25): Xaa is A or G or is absent

SEQ ID NO: 60590 - protein, 33 aa, Artificial Sequence
  GFR-binding peptide
  MOD_RES (1), (3): Xaa is C or S
XGXEEVIMRHKRLLLVRGNDYYLMSTASTKVPA

SEQ ID NO: 60591 - protein, 38 aa, Artificial Sequence; identical to SEQ ID NO: 32008
  GFR-binding peptide
  MOD_RES (32), (33): Xaa is C or S

SEQ ID NO: 60592 - protein, 36 aa, Artificial Sequence; identical to SEQ ID NO: 26023
  GFR-binding peptide
  MOD_RES (1), (33), (34): Xaa is C or S

SEQ ID NO: 60593 - protein, 38 aa, Artificial Sequence; identical to SEQ ID NO: 26024
  GFR-binding peptide
  MOD_RES (2), (4), (38): Xaa is C or S
  MOD_RES (16), (17), (18), (19), (20): Xaa is A or G
  MOD_RES (21), (22), (23), (24): Xaa is A or G or is absent

SEQ ID NO: 60594 - protein, 32 aa, Artificial Sequence; identical to SEQ ID NO: 26026
  GFR-binding peptide
  MOD_RES (1), (1): Xaa is C or S

SEQ ID NO: 60595 - protein, 34 aa, Artificial Sequence
  GFR-binding peptide
  MOD_RES (1), (3): Xaa is C or S
XGXSEVVMDRHKRLVVNNASDYYLISTASLRTPV

SEQ ID NO: 60596 - protein, 32 aa, Artificial Sequence
  GFR-binding peptide
  MOD_RES (31), (32): Xaa is C or S
DVVMGRHKRLIIQQKDNYYLMSTASMKTPTXX

SEQ ID NO: 60597 - protein, 39 aa, Artificial Sequence; identical to SEQ ID NO: 32024
  GFR-binding peptide
  MOD_RES (2), (4), (36), (37): Xaa is C or S

SEQ ID NO: 60598 - protein, 40 aa, Artificial Sequence
  GFR-binding peptide
  MOD_RES (2), (35), (36): Xaa is C or S
  MOD_RES (13), (14), (15), (16), (17): Xaa is A or G
  MOD_RES (18), (19), (20), (21): Xaa is A or G or is absent
GXEEVIMYHYKLXXXXXXXXXKYLMSIPSTKVPAXXTSPV

SEQ ID NO: 60599 - protein, 41 aa, Artificial Sequence; identical to SEQ ID NO: 32026
  GFR-binding peptide
  MOD_RES (2), (36), (37): Xaa is C or S
  MOD_RES (14), (15), (16), (17), (18): Xaa is A or G
  MOD_RES (19), (20), (21), (22): Xaa is A or G or is absent

SEQ ID NO: 60600 - protein, 36 aa, Artificial Sequence; identical to SEQ ID NO: 4939
  GFR-binding peptide
  MOD_RES (1), (35): Xaa is C or S
  MOD_RES (13), (14), (15), (16), (17): Xaa is A or G
  MOD_RES (18), (19), (20), (21): Xaa is A or G or is absent

SEQ ID NO: 60601 - protein, 36 aa, Artificial Sequence; identical to SEQ ID NO: 32029
  GFR-binding peptide
  MOD_RES (1), (35), (36): Xaa is C or S
  MOD_RES (13), (14), (15), (16), (17): Xaa is A or G
  MOD_RES (18), (19), (20), (21): Xaa is A or G or is absent

SEQ ID NO: 60602 - protein, 36 aa, Artificial Sequence; identical to SEQ ID NO: 26037
  GFR-binding peptide
  MOD_RES (1), (33), (34): Xaa is C or S

SEQ ID NO: 60603 - protein, 35 aa, Artificial Sequence
  GFR-binding peptide
  MOD_RES (34), (35): Xaa is C or S
  MOD_RES (12), (13), (14), (15), (16): Xaa is A or G
  MOD_RES (17), (18), (19), (20): Xaa is A or G or is absent
ESVAMGRHKRLXXXXXXXXXYYLISTASLKTPVXX

SEQ ID NO: 60604 - protein, 34 aa, Artificial Sequence; identical to SEQ ID NO: 26038
  GFR-binding peptide
  MOD_RES (1), (3): Xaa is C or S

SEQ ID NO: 60605 - protein, 33 aa, Artificial Sequence; identical to SEQ ID NO: 26040
  GFR-binding peptide
  MOD_RES (2), (33): Xaa is C or S

SEQ ID NO: 60606 - protein, 42 aa, Artificial Sequence; identical to SEQ ID NO: 32040
  GFR-binding peptide
  MOD_RES (1), (3), (36), (37): Xaa is C or S

SEQ ID NO: 60607 - protein, 39 aa, Artificial Sequence; identical to SEQ ID NO: 56984
  GFR-binding peptide
  MOD_RES (33), (34): Xaa is C or S
  MOD_RES (11), (12), (13), (14), (15): Xaa is A or G
  MOD_RES (16), (17), (18), (19): Xaa is A or G or is absent

SEQ ID NO: 60608 - protein, 35 aa, Artificial Sequence; identical to SEQ ID NO: 26041
  GFR-binding peptide
  MOD_RES (31), (32): Xaa is C or S

SEQ ID NO: 60609 - protein, 40 aa, Artificial Sequence; identical to SEQ ID NO: 32043
  GFR-binding peptide
  MOD_RES (2), (34), (35): Xaa is C or S

SEQ ID NO: 60610 - protein, 38 aa, Artificial Sequence; identical to SEQ ID NO: 4952
  GFR-binding peptide
  MOD_RES (1), (3), (35): Xaa is C or S

SEQ ID NO: 60611 - protein, 39 aa, Artificial Sequence; identical to SEQ ID NO: 26046
  GFR-binding peptide
  MOD_RES (1), (33), (34): Xaa is C or S

SEQ ID NO: 60612 - protein, 39 aa, Artificial Sequence; identical to SEQ ID NO: 26048
  GFR-binding peptide
  MOD_RES (2), (4), (37), (38): Xaa is C or S

SEQ ID NO: 60613 - protein, 34 aa, Artificial Sequence; identical to SEQ ID NO: 4958
  GFR-binding peptide
  MOD_RES (2), (4): Xaa is C or S

SEQ ID NO: 60614 - protein, 34 aa, Artificial Sequence
  GFR-binding peptide
  MOD_RES (1), (1): Xaa is C or S
  MOD_RES (13), (14), (15), (16), (17): Xaa is A or G
  MOD_RES (18), (19), (20), (21): Xaa is A or G or is absent
XSEVVMDEYKFKXXXXXXXXXLYLISIPELRTPV

SEQ ID NO: 60615 - protein, 33 aa, Artificial Sequence; identical to SEQ ID NO: 32065
  GFR-binding peptide
  MOD_RES (33), (33): Xaa is C or S
  MOD_RES (11), (12), (13), (14), (15): Xaa is A or G
  MOD_RES (16), (17), (18), (19): Xaa is A or G or is absent

SEQ ID NO: 60616 - protein, 40 aa, Artificial Sequence; identical to SEQ ID NO: 26062
  GFR-binding peptide
  MOD_RES (2), (4), (37), (38): Xaa is C or S
  MOD_RES (15), (16), (17), (18), (19): Xaa is A or G
  MOD_RES (20), (21), (22), (23): Xaa is A or G or is absent

SEQ ID NO: 60617 - protein, 39 aa, Artificial Sequence; identical to SEQ ID NO: 26063
  GFR-binding peptide
  MOD_RES (2), (35), (36): Xaa is C or S
  MOD_RES (13), (14), (15), (16), (17): Xaa is A or G
  MOD_RES (18), (19), (20), (21): Xaa is A or G or is absent

SEQ ID NO: 60618 - protein, 36 aa, Artificial Sequence; identical to SEQ ID NO: 4973
  GFR-binding peptide
  MOD_RES (2), (4), (36): Xaa is C or S

SEQ ID NO: 60619 - protein, 35 aa, Artificial Sequence; identical to SEQ ID NO: 4976
  GFR-binding peptide
  MOD_RES (2), (2): Xaa is C or S
  MOD_RES (14), (15), (16), (17), (18): Xaa is A or G
  MOD_RES (19), (20), (21), (22): Xaa is A or G or is absent

SEQ ID NO: 60620 - protein, 32 aa, Artificial Sequence; identical to SEQ ID NO: 4978
  GFR-binding peptide
  MOD_RES (11), (12), (13), (14), (15): Xaa is A or G
  MOD_RES (16), (17), (18), (19): Xaa is A or G or is absent

SEQ ID NO: 60621 - protein, 42 aa, Artificial Sequence
  GFR-binding peptide
  MOD_RES (2), (4), (38), (39): Xaa is C or S
  MOD_RES (16), (17), (18), (19), (20): Xaa is A or G
  MOD_RES (21), (22), (23), (24): Xaa is A or G or is absent
RXAXSEVTMNYHYKLXXXXXXXXXKYLISIPSMKEPVXXPEP

SEQ ID NO: 60622 - protein, 41 aa, Artificial Sequence; identical to SEQ ID NO: 32073
  GFR-binding peptide
  MOD_RES (1), (3), (37), (38): Xaa is C or S
  MOD_RES (15), (16), (17), (18), (19): Xaa is A or G
  MOD_RES (20), (21), (22), (23): Xaa is A or G or is absent

SEQ ID NO: 60623 - protein, 40 aa, Artificial Sequence; identical to SEQ ID NO: 32074
  GFR-binding peptide
  MOD_RES (35), (36): Xaa is C or S
  MOD_RES (13), (14), (15), (16), (17): Xaa is A or G
  MOD_RES (18), (19), (20), (21): Xaa is A or G or is absent

SEQ ID NO: 60624 - protein, 40 aa, Artificial Sequence; identical to SEQ ID NO: 4979
  GFR-binding peptide
  MOD_RES (2), (4), (37), (38): Xaa is C or S
  MOD_RES (15), (16), (17), (18), (19): Xaa is A or G
  MOD_RES (20), (21), (22), (23): Xaa is A or G or is absent

SEQ ID NO: 60625 - protein, 38 aa, Artificial Sequence
  GFR-binding peptide
  MOD_RES (2), (34), (35): Xaa is C or S
AXSEVTMNEYKFKVVNKNEDLYLISIPEMKEPVXXPEP

SEQ ID NO: 60626 - protein, 42 aa, Artificial Sequence
  GFR-binding peptide
  MOD_RES (2), (36), (37): Xaa is C or S
  MOD_RES (14), (15), (16), (17), (18): Xaa is A or G
  MOD_RES (19), (20), (21), (22): Xaa is A or G or is absent
GXRDVVMGRHKRLXXXXXXXXXYYLMSTASMKTPTXXPGASG

SEQ ID NO: 60627 - protein, 40 aa, Artificial Sequence; identical to SEQ ID NO: 26073
  GFR-binding peptide
  MOD_RES (2), (36), (37): Xaa is C or S
  MOD_RES (14), (15), (16), (17), (18): Xaa is A or G
  MOD_RES (19), (20), (21), (22): Xaa is A or G or is absent

SEQ ID NO: 60628 - protein, 40 aa, Artificial Sequence; identical to SEQ ID NO: 4982
  GFR-binding peptide
  MOD_RES (34), (34): Xaa is C or S
  MOD_RES (12), (13), (14), (15), (16): Xaa is A or G
  MOD_RES (17), (18), (19), (20): Xaa is A or G or is absent

SEQ ID NO: 60629 - protein, 35 aa, Artificial Sequence; identical to SEQ ID NO: 26075
  GFR-binding peptide
  MOD_RES (33), (34): Xaa is C or S
  MOD_RES (11), (12), (13), (14), (15): Xaa is A or G
  MOD_RES (16), (17), (18), (19): Xaa is A or G or is absent

SEQ ID NO: 60630 - protein, 34 aa, Artificial Sequence; identical to SEQ ID NO: 26076
  GFR-binding peptide
  MOD_RES (1), (1): Xaa is C or S
  MOD_RES (13), (14), (15), (16), (17): Xaa is A or G
  MOD_RES (18), (19), (20), (21): Xaa is A or G or is absent

SEQ ID NO: 60631 - protein, 38 aa, Artificial Sequence
  GFR-binding peptide
  MOD_RES (1), (3), (37), (38): Xaa is C or S
  MOD_RES (15), (16), (17), (18), (19): Xaa is A or G
  MOD_RES (20), (21), (22), (23): Xaa is A or G or is absent
XGXSEVVMDYHYKLXXXXXXXXXKYLISIPSLRTPVXX

SEQ ID NO: 60632 - protein, 41 aa, Artificial Sequence
  GFR-binding peptide
  MOD_RES (2), (36), (37): Xaa is C or S
  MOD_RES (14), (15), (16), (17), (18): Xaa is A or G
  MOD_RES (19), (20), (21), (22): Xaa is A or G or is absent
GXSEVVMDRHKRLXXXXXXXXXYYLISTASLRTPVXXTPPT

SEQ ID NO: 60633 - protein, 36 aa, Artificial Sequence; identical to SEQ ID NO: 32088
  GFR-binding peptide
  MOD_RES (2), (36): Xaa is C or S
  MOD_RES (14), (15), (16), (17), (18): Xaa is A or G
  MOD_RES (19), (20), (21), (22): Xaa is A or G or is absent

SEQ ID NO: 60634 - protein, 40 aa, Artificial Sequence; identical to SEQ ID NO: 32089
  GFR-binding peptide
  MOD_RES (2), (4), (38), (39): Xaa is C or S
  MOD_RES (16), (17), (18), (19), (20): Xaa is A or G
  MOD_RES (21), (22), (23), (24): Xaa is A or G or is absent

SEQ ID NO: 60635 - protein, 38 aa, Artificial Sequence; identical to SEQ ID NO: 4989
  GFR-binding peptide
  MOD_RES (33), (34): Xaa is C or S
  MOD_RES (11), (12), (13), (14), (15): Xaa is A or G
  MOD_RES (16), (17), (18), (19): Xaa is A or G or is absent

SEQ ID NO: 60636 - protein, 44 aa, Artificial Sequence; identical to SEQ ID NO: 4990
  GFR-binding peptide
  MOD_RES (2), (4), (38), (39): Xaa is C or S
  MOD_RES (16), (17), (18), (19), (20): Xaa is A or G
  MOD_RES (21), (22), (23), (24): Xaa is A or G or is absent

SEQ ID NO: 60637 - protein, 32 aa, Artificial Sequence; identical to SEQ ID NO: 26084
  GFR-binding peptide
  MOD_RES (11), (12), (13), (14), (15): Xaa is A or G
  MOD_RES (16), (17), (18), (19): Xaa is A or G or is absent

SEQ ID NO: 60638 - protein, 32 aa, Artificial Sequence
  GFR-binding peptide
  MOD_RES (1), (1): Xaa is C or S
XAEVVMDRHKRLVVNNAADYYLISTASLRAPV

SEQ ID NO: 60639 - protein, 42 aa, Artificial Sequence; identical to SEQ ID NO: 26086
  GFR-binding peptide
  MOD_RES (1), (36), (37): Xaa is C or S
  MOD_RES (14), (15), (16), (17), (18): Xaa is A or G
  MOD_RES (19), (20), (21), (22): Xaa is A or G or is absent

SEQ ID NO: 60640 - protein, 38 aa, Artificial Sequence; identical to SEQ ID NO: 26087
  GFR-binding peptide
  MOD_RES (1), (35), (36): Xaa is C or S
  MOD_RES (13), (14), (15), (16), (17): Xaa is A or G
  MOD_RES (18), (19), (20), (21): Xaa is A or G or is absent

SEQ ID NO: 60641 - protein, 34 aa, Artificial Sequence; identical to SEQ ID NO: 26088
  GFR-binding peptide
  MOD_RES (33), (34): Xaa is C or S
  MOD_RES (11), (12), (13), (14), (15): Xaa is A or G
  MOD_RES (16), (17), (18), (19): Xaa is A or G or is absent

SEQ ID NO: 60642 - protein, 40 aa, Artificial Sequence; identical to SEQ ID NO: 32099
  GFR-binding peptide
  MOD_RES (1), (35): Xaa is C or S
  MOD_RES (13), (14), (15), (16), (17): Xaa is A or G
  MOD_RES (18), (19), (20), (21): Xaa is A or G or is absent

SEQ ID NO: 60643 - protein, 38 aa, Artificial Sequence; identical to SEQ ID NO: 4991
  GFR-binding peptide
  MOD_RES (2), (33), (34): Xaa is C or S

SEQ ID NO: 60644 - protein, 42 aa, Artificial Sequence; identical to SEQ ID NO: 57042
  GFR-binding peptide
  MOD_RES (1), (3), (36), (37): Xaa is C or S
  MOD_RES (14), (15), (16), (17), (18): Xaa is A or G
  MOD_RES (19), (20), (21), (22): Xaa is A or G or is absent

SEQ ID NO: 60645 - protein, 36 aa, Artificial Sequence; identical to SEQ ID NO: 4996
  GFR-binding peptide
  MOD_RES (1), (3), (35), (36): Xaa is C or S

SEQ ID NO: 60646 - protein, 33 aa, Artificial Sequence; identical to SEQ ID NO: 26093
  GFR-binding peptide
  MOD_RES (1), (33): Xaa is C or S

SEQ ID NO: 60647 - protein, 31 aa, Artificial Sequence; identical to SEQ ID NO: 5002
  GFR-binding peptide
  MOD_RES (31), (31): Xaa is C or S

SEQ ID NO: 60648 - protein, 39 aa, Artificial Sequence; identical to SEQ ID NO: 5004
  GFR-binding peptide
  MOD_RES (1), (3), (35), (36): Xaa is C or S

SEQ ID NO: 60649 - protein, 33 aa, Artificial Sequence; identical to SEQ ID NO: 5005
  GFR-binding peptide
  MOD_RES (31), (32): Xaa is C or S

SEQ ID NO: 60650 - protein, 38 aa, Artificial Sequence; identical to SEQ ID NO: 32114
  GFR-binding peptide
  MOD_RES (1), (3), (37): Xaa is C or S
  MOD_RES (15), (16), (17), (18), (19): Xaa is A or G
  MOD_RES (20), (21), (22), (23): Xaa is A or G or is absent

SEQ ID NO: 60651 - protein, 33 aa, Artificial Sequence
  GFR-binding peptide
  MOD_RES (32), (33): Xaa is C or S
AEVVMDRHKRLVVNNAADYYLISTASLRAPVXX

SEQ ID NO: 60652 - protein, 37 aa, Artificial Sequence; identical to SEQ ID NO: 5006
  GFR-binding peptide
  MOD_RES (1), (3), (34), (35): Xaa is C or S

SEQ ID NO: 60653 - protein, 36 aa, Artificial Sequence; identical to SEQ ID NO: 26101
  GFR-binding peptide
  MOD_RES (33), (34): Xaa is C or S
  MOD_RES (11), (12), (13), (14), (15): Xaa is A or G
  MOD_RES (16), (17), (18), (19): Xaa is A or G or is absent

SEQ ID NO: 60654 - protein, 38 aa, Artificial Sequence; identical to SEQ ID NO: 32123
  GFR-binding peptide
  MOD_RES (34), (35): Xaa is C or S
  MOD_RES (12), (13), (14), (15), (16): Xaa is A or G
  MOD_RES (17), (18), (19), (20): Xaa is A or G or is absent

SEQ ID NO: 60655 - protein, 30 aa, Artificial Sequence; identical to SEQ ID NO: 32131
  GFR-binding peptide

SEQ ID NO: 60656 - protein, 32 aa, Artificial Sequence
  GFR-binding peptide
  MOD_RES (1), (32): Xaa is C or S
XEEVIMEYKFKLLVRGNDLYLMSIPETKVPAX

SEQ ID NO: 60657 - protein, 39 aa, Artificial Sequence
  GFR-binding peptide
  MOD_RES (1), (35), (36): Xaa is C or S
  MOD_RES (13), (14), (15), (16), (17): Xaa is A or G
  MOD_RES (18), (19), (20), (21): Xaa is A or G or is absent
XESVAMGRHKRLXXXXXXXXXYYLISTASLKTPVXXAKS

SEQ ID NO: 60658 - protein, 33 aa, Artificial Sequence
  GFR-binding peptide
  MOD_RES (33), (33): Xaa is C or S
  MOD_RES (11), (12), (13), (14), (15): Xaa is A or G
  MOD_RES (16), (17), (18), (19): Xaa is A or G or is absent
EVVMDYHYKLXXXXXXXXXKYLISIPSLRTPVX

SEQ ID NO: 60659 - protein, 37 aa, Artificial Sequence; identical to SEQ ID NO: 5014
  GFR-binding peptide
  MOD_RES (31), (32): Xaa is C or S

SEQ ID NO: 60660 - protein, 39 aa, Artificial Sequence; identical to SEQ ID NO: 5015
  GFR-binding peptide
  MOD_RES (1), (3), (37), (38): Xaa is C or S
  MOD_RES (15), (16), (17), (18), (19): Xaa is A or G
  MOD_RES (20), (21), (22), (23): Xaa is A or G or is absent

SEQ ID NO: 60661 - protein, 39 aa, Artificial Sequence; identical to SEQ ID NO: 5016
  GFR-binding peptide
  MOD_RES (1), (35), (36): Xaa is C or S
  MOD_RES (13), (14), (15), (16), (17): Xaa is A or G
  MOD_RES (18), (19), (20), (21): Xaa is A or G or is absent

SEQ ID NO: 60662 - protein, 36 aa, Artificial Sequence; identical to SEQ ID NO: 5017
  GFR-binding peptide
  MOD_RES (2), (34), (35): Xaa is C or S

SEQ ID NO: 60663 - protein, 39 aa, Artificial Sequence; identical to SEQ ID NO: 32136
  GFR-binding peptide
  MOD_RES (2), (33), (34): Xaa is C or S

SEQ ID NO: 60664 - protein, 43 aa, Artificial Sequence; identical to SEQ ID NO: 57070
  GFR-binding peptide
  MOD_RES (1), (3), (37), (38): Xaa is C or S
  MOD_RES (15), (16), (17), (18), (19): Xaa is A or G
  MOD_RES (20), (21), (22), (23): Xaa is A or G or is absent

SEQ ID NO: 60665 - protein, 40 aa, Artificial Sequence; identical to SEQ ID NO: 26111
  GFR-binding peptide
  MOD_RES (2), (4), (36), (37): Xaa is C or S

SEQ ID NO: 60666 - protein, 44 aa, Artificial Sequence
  GFR-binding peptide
  MOD_RES (2), (4), (38), (39): Xaa is C or S
  MOD_RES (16), (17), (18), (19), (20): Xaa is A or G
  MOD_RES (21), (22), (23), (24): Xaa is A or G or is absent
RXGXESVAMGRHKRLXXXXXXXXXYYLISTASLKTPVXXAKSAK

SEQ ID NO: 60667 - protein, 34 aa, Artificial Sequence; identical to SEQ ID NO: 26114
  GFR-binding peptide
  MOD_RES (1), (1): Xaa is C or S
  MOD_RES (13), (14), (15), (16), (17): Xaa is A or G
  MOD_RES (18), (19), (20), (21): Xaa is A or G or is absent

SEQ ID NO: 60668 - protein, 33 aa, Artificial Sequence; identical to SEQ ID NO: 5027
  GFR-binding peptide
  MOD_RES (31), (32): Xaa is C or S

SEQ ID NO: 60669 - protein, 40 aa, Artificial Sequence; identical to SEQ ID NO: 5028
  GFR-binding peptide
  MOD_RES (2), (4), (37), (38): Xaa is C or S

SEQ ID NO: 60670 - protein, 36 aa, Artificial Sequence; identical to SEQ ID NO: 5030
  GFR-binding peptide
  MOD_RES (33), (34): Xaa is C or S
  MOD_RES (11), (12), (13), (14), (15): Xaa is A or G
  MOD_RES (16), (17), (18), (19): Xaa is A or G or is absent

SEQ ID NO: 60671 - protein, 37 aa, Artificial Sequence
  GFR-binding peptide
  MOD_RES (2), (4), (36), (37): Xaa is C or S
RXAXSEVTMNRYKKLVVNKNEDFYLISIANMKEPVXX

SEQ ID NO: 60672 - protein, 36 aa, Artificial Sequence; identical to SEQ ID NO: 5031
  GFR-binding peptide
  MOD_RES (1), (34), (35): Xaa is C or S

SEQ ID NO: 60673 - protein, 36 aa, Artificial Sequence
  GFR-binding peptide
  MOD_RES (2), (33), (34): Xaa is C or S
KXSRVIMPIKGYVKPKRGVFYLINIPSLAQPVXXPA

SEQ ID NO: 60674 - protein, 40 aa, Artificial Sequence
  GFR-binding peptide
  MOD_RES (1), (35), (36): Xaa is C or S
  MOD_RES (13), (14), (15), (16), (17): Xaa is A or G
  MOD_RES (18), (19), (20), (21): Xaa is A or G or is absent
XRDVVMGRHKRLXXXXXXXXXYYLMSTASMKTPTXXPGAS

SEQ ID NO: 60675 - protein, 36 aa, Artificial Sequence; identical to SEQ ID NO: 32149
  GFR-binding peptide
  MOD_RES (1), (33), (34): Xaa is C or S

SEQ ID NO: 60676 - protein, 34 aa, Artificial Sequence; identical to SEQ ID NO: 26126
  GFR-binding peptide
  MOD_RES (2), (34): Xaa is C or S

SEQ ID NO: 60677 - protein, 37 aa, Artificial Sequence; identical to SEQ ID NO: 5037
  GFR-binding peptide
  MOD_RES (31), (32): Xaa is C or S

SEQ ID NO: 60678 - protein, 38 aa, Artificial Sequence; identical to SEQ ID NO: 32153
  GFR-binding peptide
  MOD_RES (1), (33), (34): Xaa is C or S

SEQ ID NO: 60679 - protein, 38 aa, Artificial Sequence; identical to SEQ ID NO: 5040
  GFR-binding peptide
  MOD_RES (2), (4), (37), (38): Xaa is C or S

SEQ ID NO: 60680 - protein, 34 aa, Artificial Sequence; identical to SEQ ID NO: 5042
  GFR-binding peptide
  MOD_RES (32), (33): Xaa is C or S

SEQ ID NO: 60681 - protein, 34 aa, Artificial Sequence
  GFR-binding peptide
  MOD_RES (32), (33): Xaa is C or S
SEVTMNPIKGYVVNKNEDFYLINIPSMKEPVXXP

SEQ ID NO: 60682 - protein, 41 aa, Artificial Sequence; identical to SEQ ID NO: 32159
  GFR-binding peptide
  MOD_RES (2), (37), (38): Xaa is C or S
  MOD_RES (15), (16), (17), (18), (19): Xaa is A or G
  MOD_RES (20), (21), (22), (23): Xaa is A or G or is absent

SEQ ID NO: 60683 - protein, 37 aa, Artificial Sequence; identical to SEQ ID NO: 5044
  GFR-binding peptide
  MOD_RES (32), (33): Xaa is C or S

SEQ ID NO: 60684 - protein, 42 aa, Artificial Sequence; identical to SEQ ID NO: 26135
  GFR-binding peptide
  MOD_RES (2), (36), (37): Xaa is C or S
  MOD_RES (14), (15), (16), (17), (18): Xaa is A or G
  MOD_RES (19), (20), (21), (22): Xaa is A or G or is absent

SEQ ID NO: 60685 - protein, 37 aa, Artificial Sequence; identical to SEQ ID NO: 26137
  GFR-binding peptide
  MOD_RES (1), (35), (36): Xaa is C or S
  MOD_RES (13), (14), (15), (16), (17): Xaa is A or G
  MOD_RES (18), (19), (20), (21): Xaa is A or G or is absent

SEQ ID NO: 60686 - protein, 36 aa, Artificial Sequence
  GFR-binding peptide
  MOD_RES (33), (34): Xaa is C or S
  MOD_RES (11), (12), (13), (14), (15): Xaa is A or G
  MOD_RES (16), (17), (18), (19): Xaa is A or G or is absent
EVVMDRHKRLXXXXXXXXXYYLISTASLRTPVXXTP

SEQ ID NO: 60687 - protein, 40 aa, Artificial Sequence; identical to SEQ ID NO: 26142
  GFR-binding peptide
  MOD_RES (1), (3), (35), (36): Xaa is C or S

SEQ ID NO: 60688 - protein, 38 aa, Artificial Sequence; identical to SEQ ID NO: 5048
  GFR-binding peptide
  MOD_RES (2), (4), (38): Xaa is C or S
  MOD_RES (16), (17), (18), (19), (20): Xaa is A or G
  MOD_RES (21), (22), (23), (24): Xaa is A or G or is absent

SEQ ID NO: 60689 - protein, 39 aa, Artificial Sequence; identical to SEQ ID NO: 5052
  GFR-binding peptide
  MOD_RES (2), (4), (38), (39): Xaa is C or S
  MOD_RES (16), (17), (18), (19), (20): Xaa is A or G
  MOD_RES (21), (22), (23), (24): Xaa is A or G or is absent

SEQ ID NO: 60690 - protein, 41 aa, Artificial Sequence; identical to SEQ ID NO: 26147
  GFR-binding peptide
  MOD_RES (2), (4), (37), (38): Xaa is C or S
  MOD_RES (15), (16), (17), (18), (19): Xaa is A or G
  MOD_RES (20), (21), (22), (23): Xaa is A or G or is absent

SEQ ID NO: 60691 - protein, 42 aa, Artificial Sequence
  GFR-binding peptide
  MOD_RES (2), (4), (37), (38): Xaa is C or S
  MOD_RES (15), (16), (17), (18), (19): Xaa is A or G
  MOD_RES (20), (21), (22), (23): Xaa is A or G or is absent
LXGXEEVIMEYKFKXXXXXXXXXLYLMSIPETKVPAXXTSPV

SEQ ID NO: 60692 - protein, 36 aa, Artificial Sequence; identical to SEQ ID NO: 26148
  GFR-binding peptide
  MOD_RES (32), (33): Xaa is C or S

SEQ ID NO: 60693 - protein, 38 aa, Artificial Sequence; identical to SEQ ID NO: 5054
  GFR-binding peptide
  MOD_RES (33), (33): Xaa is C or S
  MOD_RES (11), (12), (13), (14), (15): Xaa is A or G
  MOD_RES (16), (17), (18), (19): Xaa is A or G or is absent

SEQ ID NO: 60694 - protein, 37 aa, Artificial Sequence
  GFR-binding peptide
  MOD_RES (2), (35), (36): Xaa is C or S
  MOD_RES (13), (14), (15), (16), (17): Xaa is A or G
  MOD_RES (18), (19), (20), (21): Xaa is A or G or is absent
KXSKVIMPIKGYXXXXXXXXXFYLINIPSLDQSVXXP

SEQ ID NO: 60695 - protein, 32 aa, Artificial Sequence; identical to SEQ ID NO: 26149
  GFR-binding peptide

SEQ ID NO: 60696 - protein, 39 aa, Artificial Sequence; identical to SEQ ID NO: 57103
  GFR-binding peptide
  MOD_RES (1), (34), (35): Xaa is C or S
  MOD_RES (12), (13), (14), (15), (16): Xaa is A or G
  MOD_RES (17), (18), (19), (20): Xaa is A or G or is absent

SEQ ID NO: 60697 - protein, 39 aa, Artificial Sequence
  GFR-binding peptide
  MOD_RES (1), (3), (35), (36): Xaa is C or S
XAXSEVTMNYHYKLVVNKNEDKYLISIPSMKEPVXXPEP

SEQ ID NO: 60698 - protein, 38 aa, Artificial Sequence
  GFR-binding peptide
  MOD_RES (32), (33): Xaa is C or S
RDVVMGYHYKLIIQQKDNKYLMSIPSMKTPTXXPGASG

SEQ ID NO: 60699 - protein, 33 aa, Artificial Sequence; identical to SEQ ID NO: 26157
  GFR-binding peptide
  MOD_RES (2), (2): Xaa is C or S

SEQ ID NO: 60700 - protein, 37 aa, Artificial Sequence
  GFR-binding peptide
  MOD_RES (1), (35), (36): Xaa is C or S
  MOD_RES (13), (14), (15), (16), (17): Xaa is A or G
  MOD_RES (18), (19), (20), (21): Xaa is A or G or is absent
XAEVVMDRHKRLXXXXXXXXXYYLISTASLRAPVXXS

SEQ ID NO: 60701 - protein, 34 aa, Artificial Sequence
  GFR-binding peptide
  MOD_RES (33), (34): Xaa is C or S
  MOD_RES (11), (12), (13), (14), (15): Xaa is A or G
  MOD_RES (16), (17), (18), (19): Xaa is A or G or is absent
EVTMNRHKRLXXXXXXXXXYYLISTASMKEPVXX

SEQ ID NO: 60702 - protein, 35 aa, Artificial Sequence
  GFR-binding peptide
  MOD_RES (32), (33): Xaa is C or S
SEVVMDRHKRLVVNNASDYYLISTASLRTPVXXTP

SEQ ID NO: 60703 - protein, 43 aa, Artificial Sequence
  GFR-binding peptide
  MOD_RES (2), (4), (37), (38): Xaa is C or S
  MOD_RES (15), (16), (17), (18), (19): Xaa is A or G
  MOD_RES (20), (21), (22), (23): Xaa is A or G or is absent
SXKXSRVIMPIKGYXXXXXXXXXFYLINIPSLAQPVXXPAASA

SEQ ID NO: 60704 - protein, 36 aa, Artificial Sequence; identical to SEQ ID NO: 5066
  GFR-binding peptide
  MOD_RES (31), (32): Xaa is C or S

SEQ ID NO: 60705 - protein, 34 aa, Artificial Sequence; identical to SEQ ID NO: 26168
  GFR-binding peptide
  MOD_RES (2), (34): Xaa is C or S

SEQ ID NO: 60706 - protein, 39 aa, Artificial Sequence; identical to SEQ ID NO: 26170
  GFR-binding peptide
  MOD_RES (1), (34), (35): Xaa is C or S
  MOD_RES (12), (13), (14), (15), (16): Xaa is A or G
  MOD_RES (17), (18), (19), (20): Xaa is A or G or is absent

SEQ ID NO: 60707 - protein, 40 aa, Artificial Sequence; identical to SEQ ID NO: 32177
  GFR-binding peptide
  MOD_RES (2), (34), (35): Xaa is C or S

SEQ ID NO: 60708 - protein, 34 aa, Artificial Sequence; identical to SEQ ID NO: 32178
  GFR-binding peptide
  MOD_RES (32), (33): Xaa is C or S

SEQ ID NO: 60709 - protein, 40 aa, Artificial Sequence; identical to SEQ ID NO: 32179
  GFR-binding peptide
  MOD_RES (2), (36), (37): Xaa is C or S
  MOD_RES (14), (15), (16), (17), (18): Xaa is A or G
  MOD_RES (19), (20), (21), (22): Xaa is A or G or is absent

SEQ ID NO: 60710 - protein, 37 aa, Artificial Sequence; identical to SEQ ID NO: 32180
  GFR-binding peptide
  MOD_RES (32), (32): Xaa is C or S

SEQ ID NO: 60711 - protein, 33 aa, Artificial Sequence
  GFR-binding peptide
  MOD_RES (12), (13), (14), (15), (16): Xaa is A or G
  MOD_RES (17), (18), (19), (20): Xaa is A or G or is absent
ESVAMGRHKRLXXXXXXXXXYYLISTASLKTPV

SEQ ID NO: 60712 - protein, 36 aa, Artificial Sequence; identical to SEQ ID NO: 32181
  GFR-binding peptide
  MOD_RES (33), (33): Xaa is C or S
  MOD_RES (11), (12), (13), (14), (15): Xaa is A or G
  MOD_RES (16), (17), (18), (19): Xaa is A or G or is absent

SEQ ID NO: 60713 - protein, 36 aa, Artificial Sequence; identical to SEQ ID NO: 5069
  GFR-binding peptide
  MOD_RES (1), (33), (34): Xaa is C or S

SEQ ID NO: 60714 - protein, 32 aa, Artificial Sequence; identical to SEQ ID NO: 57113
  GFR-binding peptide
  MOD_RES (31), (32): Xaa is C or S

SEQ ID NO: 60715 - protein, 41 aa, Artificial Sequence
  GFR-binding peptide
  MOD_RES (1), (3), (35), (36): Xaa is C or S
XGXRDVVMGEYKFKIIQQKDNLYLMSIPEMKTPTXXPGASG

SEQ ID NO: 60716 - protein, 37 aa, Artificial Sequence; identical to SEQ ID NO: 26173
  GFR-binding peptide
  MOD_RES (2), (35), (36): Xaa is C or S

SEQ ID NO: 60717 - protein, 41 aa, Artificial Sequence; identical to SEQ ID NO: 5070
  GFR-binding peptide
  MOD_RES (1), (36), (37): Xaa is C or S
  MOD_RES (14), (15), (16), (17), (18): Xaa is A or G
  MOD_RES (19), (20), (21), (22): Xaa is A or G or is absent

SEQ ID NO: 60718 - protein, 36 aa, Artificial Sequence; identical to SEQ ID NO: 5071
  GFR-binding peptide
  MOD_RES (33), (34): Xaa is C or S
  MOD_RES (11), (12), (13), (14), (15): Xaa is A or G
  MOD_RES (16), (17), (18), (19): Xaa is A or G or is absent

SEQ ID NO: 60719 - protein, 35 aa, Artificial Sequence; identical to SEQ ID NO: 5072
  GFR-binding peptide
  MOD_RES (31), (31): Xaa is C or S

SEQ ID NO: 60720 - protein, 35 aa, Artificial Sequence
  GFR-binding peptide
  MOD_RES (34), (35): Xaa is C or S
  MOD_RES (12), (13), (14), (15), (16): Xaa is A or G
  MOD_RES (17), (18), (19), (20): Xaa is A or G or is absent
SEVTMNYHYKLXXXXXXXXXKYLISIPSMKEPVXX

SEQ ID NO: 60721 - protein, 35 aa, Artificial Sequence; identical to SEQ ID NO: 26177
  GFR-binding peptide
  MOD_RES (32), (33): Xaa is C or S

SEQ ID NO: 60722 - protein, 37 aa, Artificial Sequence; identical to SEQ ID NO: 5075
  GFR-binding peptide
  MOD_RES (2), (4), (36), (37): Xaa is C or S

SEQ ID NO: 60723 - protein, 36 aa, Artificial Sequence
  GFR-binding peptide
  MOD_RES (34), (35): Xaa is C or S
  MOD_RES (12), (13), (14), (15), (16): Xaa is A or G
  MOD_RES (17), (18), (19), (20): Xaa is A or G or is absent
SEVTMNRHKRLXXXXXXXXXYYLISTASMKEPVXXP

SEQ ID NO: 60724 - protein, 36 aa, Artificial Sequence; identical to SEQ ID NO: 5076
  GFR-binding peptide
  MOD_RES (2), (34), (35): Xaa is C or S

SEQ ID NO: 60725 - protein, 37 aa, Artificial Sequence; identical to SEQ ID NO: 26181
  GFR-binding peptide
  MOD_RES (1), (3): Xaa is C or S
  MOD_RES (16), (17), (18), (19), (20): Xaa is A or G
  MOD_RES (21), (22), (23), (24): Xaa is A or G or is absent

SEQ ID NO: 60726 - protein, 41 aa, Artificial Sequence; identical to SEQ ID NO: 5077
  GFR-binding peptide
  MOD_RES (1), (35), (36): Xaa is C or S
  MOD_RES (13), (14), (15), (16), (17): Xaa is A or G
  MOD_RES (18), (19), (20), (21): Xaa is A or G or is absent

SEQ ID NO: 60727 - protein, 34 aa, Artificial Sequence
  GFR-binding peptide
  MOD_RES (1), (3): Xaa is C or S
XAXSEVTMNRYKKLVVNKNEDFYLISIANMKEPV

SEQ ID NO: 60728 - protein, 32 aa, Artificial Sequence; identical to SEQ ID NO: 5082
  GFR-binding peptide
  MOD_RES (1), (1): Xaa is C or S

SEQ ID NO: 60729 - protein, 34 aa, Artificial Sequence; identical to SEQ ID NO: 26189
  GFR-binding peptide
  MOD_RES (1), (33), (34): Xaa is C or S

SEQ ID NO: 60730 - protein, 35 aa, Artificial Sequence; identical to SEQ ID NO: 5085
  GFR-binding peptide
  MOD_RES (1), (3), (35): Xaa is C or S

SEQ ID NO: 60731 - protein, 35 aa, Artificial Sequence; identical to SEQ ID NO: 26192
  GFR-binding peptide
  MOD_RES (2), (33), (34): Xaa is C or S

SEQ ID NO: 60732 - protein, 41 aa, Artificial Sequence; identical to SEQ ID NO: 32194
  GFR-binding peptide
  MOD_RES (1), (35), (36): Xaa is C or S
  MOD_RES (13), (14), (15), (16), (17): Xaa is A or G
  MOD_RES (18), (19), (20), (21): Xaa is A or G or is absent

SEQ ID NO: 60733 - protein, 39 aa, Artificial Sequence
  GFR-binding peptide
  MOD_RES (2), (4), (37), (38): Xaa is C or S
  MOD_RES (15), (16), (17), (18), (19): Xaa is A or G
  MOD_RES (20), (21), (22), (23): Xaa is A or G or is absent
LXGXEEVIMYHYKLXXXXXXXXXKYLMSIPSTKVPAXXT

SEQ ID NO: 60734 - protein, 39 aa, Artificial Sequence; identical to SEQ ID NO: 5089
  GFR-binding peptide
  MOD_RES (2), (4), (36): Xaa is C or S

SEQ ID NO: 60735 - protein, 41 aa, Artificial Sequence; identical to SEQ ID NO: 5090
  GFR-binding peptide
  MOD_RES (2), (36), (37): Xaa is C or S
  MOD_RES (14), (15), (16), (17), (18): Xaa is A or G
  MOD_RES (19), (20), (21), (22): Xaa is A or G or is absent

SEQ ID NO: 60736 - protein, 42 aa, Artificial Sequence; identical to SEQ ID NO: 26195
  GFR-binding peptide
  MOD_RES (2), (4), (37), (38): Xaa is C or S
  MOD_RES (15), (16), (17), (18), (19): Xaa is A or G
  MOD_RES (20), (21), (22), (23): Xaa is A or G or is absent

SEQ ID NO: 60737 - protein, 35 aa, Artificial Sequence
  GFR-binding peptide
  MOD_RES (32), (33): Xaa is C or S
RDVVMGEYKFKIIQQKDNLYLMSIPEMKTPTXXPG

SEQ ID NO: 60738 - protein, 41 aa, Artificial Sequence; identical to SEQ ID NO: 5095
  GFR-binding peptide
  MOD_RES (2), (35), (36): Xaa is C or S

SEQ ID NO: 60739 - protein, 36 aa, Artificial Sequence; identical to SEQ ID NO: 26197
  GFR-binding peptide
  MOD_RES (2), (36): Xaa is C or S
  MOD_RES (14), (15), (16), (17), (18): Xaa is A or G
  MOD_RES (19), (20), (21), (22): Xaa is A or G or is absent

SEQ ID NO: 60740 - protein, 38 aa, Artificial Sequence
  GFR-binding peptide
  MOD_RES (2), (33), (34): Xaa is C or S
KXSRVIMPIKGYVKPKRGVFYLINIPSLAQPVXXPAAS

SEQ ID NO: 60741 - protein, 33 aa, Artificial Sequence; identical to SEQ ID NO: 5100
  GFR-binding peptide
  MOD_RES (33), (33): Xaa is C or S
  MOD_RES (11), (12), (13), (14), (15): Xaa is A or G
  MOD_RES (16), (17), (18), (19): Xaa is A or G or is absent

SEQ ID NO: 60742 - protein, 36 aa, Artificial Sequence; identical to SEQ ID NO: 32207
  GFR-binding peptide
  MOD_RES (33), (34): Xaa is C or S
  MOD_RES (11), (12), (13), (14), (15): Xaa is A or G
  MOD_RES (16), (17), (18), (19): Xaa is A or G or is absent

SEQ ID NO: 60743 - protein, 37 aa, Artificial Sequence; identical to SEQ ID NO: 5101
  GFR-binding peptide
  MOD_RES (2), (4), (36), (37): Xaa is C or S

SEQ ID NO: 60744 - protein, 31 aa, Artificial Sequence; identical to SEQ ID NO: 26202
  GFR-binding peptide
  MOD_RES (31), (31): Xaa is C or S

SEQ ID NO: 60745 - protein, 34 aa, Artificial Sequence
  GFR-binding peptide
  MOD_RES (32), (33): Xaa is C or S
SEVTMNRHKRLVVNKNEDYYLISTASMKEPVXXP

SEQ ID NO: 60746 - protein, 39 aa, Artificial Sequence; identical to SEQ ID NO: 26205
  GFR-binding peptide
  MOD_RES (33), (34): Xaa is C or S
  MOD_RES (11), (12), (13), (14), (15): Xaa is A or G
  MOD_RES (16), (17), (18), (19): Xaa is A or G or is absent

SEQ ID NO: 60747 - protein, 30 aa, Artificial Sequence; identical to SEQ ID NO: 5105
  GFR-binding peptide

SEQ ID NO: 60748 - protein, 33 aa, Artificial Sequence; identical to SEQ ID NO: 26208
  GFR-binding peptide
  MOD_RES (31), (32): Xaa is C or S

SEQ ID NO: 60749 - protein, 39 aa, Artificial Sequence
  GFR-binding peptide
  MOD_RES (2), (36), (37): Xaa is C or S
  MOD_RES (14), (15), (16), (17), (18): Xaa is A or G
  MOD_RES (19), (20), (21), (22): Xaa is A or G or is absent
AXSEVTMNEYKFKXXXXXXXXXLYLISIPEMKEPVXXPE

SEQ ID NO: 60750 - protein, 41 aa, Artificial Sequence
  GFR-binding peptide
  MOD_RES (2), (4), (38), (39): Xaa is C or S
  MOD_RES (16), (17), (18), (19), (20): Xaa is A or G
  MOD_RES (21), (22), (23), (24): Xaa is A or G or is absent
RXGXESVAMGRHKRLXXXXXXXXXYYLISTASLKTPVXXAK

SEQ ID NO: 60751 - protein, 35 aa, Artificial Sequence
  GFR-binding peptide
  MOD_RES (1), (3), (34), (35): Xaa is C or S
XGXEEVIMRHKRLLLVRGNDYYLMSTASTKVPAXX

SEQ ID NO: 60752 - protein, 39 aa, Artificial Sequence; identical to SEQ ID NO: 32219
  GFR-binding peptide
  MOD_RES (1), (3), (37), (38): Xaa is C or S
  MOD_RES (15), (16), (17), (18), (19): Xaa is A or G
  MOD_RES (20), (21), (22), (23): Xaa is A or G or is absent

SEQ ID NO: 60753 - protein, 34 aa, Artificial Sequence; identical to SEQ ID NO: 26212
  GFR-binding peptide
  MOD_RES (31), (32): Xaa is C or S

SEQ ID NO: 60754 - protein, 33 aa, Artificial Sequence; identical to SEQ ID NO: 5109
  GFR-binding peptide
  MOD_RES (33), (33): Xaa is C or S
  MOD_RES (11), (12), (13), (14), (15): Xaa is A or G
  MOD_RES (16), (17), (18), (19): Xaa is A or G or is absent

SEQ ID NO: 60755 - protein, 34 aa, Artificial Sequence; identical to SEQ ID NO: 5111
  GFR-binding peptide
  MOD_RES (2), (34): Xaa is C or S

SEQ ID NO: 60756 - protein, 31 aa, Artificial Sequence; identical to SEQ ID NO: 5112
  GFR-binding peptide
  MOD_RES (1), (1): Xaa is C or S

SEQ ID NO: 60757 - protein, 37 aa, Artificial Sequence; identical to SEQ ID NO: 5115
  GFR-binding peptide
  MOD_RES (31), (31): Xaa is C or S

SEQ ID NO: 60758 - protein, 32 aa, Artificial Sequence; identical to SEQ ID NO: 5117
  GFR-binding peptide
  MOD_RES (31), (32): Xaa is C or S

SEQ ID NO: 60759 - protein, 36 aa, Artificial Sequence; identical to SEQ ID NO: 26219
  GFR-binding peptide
  MOD_RES (33), (33): Xaa is C or S
  MOD_RES (11), (12), (13), (14), (15): Xaa is A or G
  MOD_RES (16), (17), (18), (19): Xaa is A or G or is absent

SEQ ID NO: 60760 - protein, 36 aa, Artificial Sequence; identical to SEQ ID NO: 5118
  GFR-binding peptide
  MOD_RES (1), (3), (36): Xaa is C or S

SEQ ID NO: 60761 - protein, 37 aa, Artificial Sequence
  GFR-binding peptide
  MOD_RES (33), (34): Xaa is C or S
  MOD_RES (11), (12), (13), (14), (15): Xaa is A or G
  MOD_RES (16), (17), (18), (19): Xaa is A or G or is absent
DVVMGYHYKLXXXXXXXXXKYLMSIPSMKTPTXXPGA

SEQ ID NO: 60762 - protein, 35 aa, Artificial Sequence
  GFR-binding peptide
  MOD_RES (1), (35): Xaa is C or S
  MOD_RES (13), (14), (15), (16), (17): Xaa is A or G
  MOD_RES (18), (19), (20), (21): Xaa is A or G or is absent
XSEVVMDEYKFKXXXXXXXXXLYLISIPELRTPVX

SEQ ID NO: 60763 - protein, 39 aa, Artificial Sequence; identical to SEQ ID NO: 12547
  GFR-binding peptide
  MOD_RES (2), (34), (35): Xaa is C or S

SEQ ID NO: 60764 - protein, 33 aa, Artificial Sequence; identical to SEQ ID NO: 5119
  GFR-binding peptide
  MOD_RES (1), (3): Xaa is C or S

SEQ ID NO: 60765 - protein, 40 aa, Artificial Sequence; identical to SEQ ID NO: 26223
  GFR-binding peptide
  MOD_RES (34), (35): Xaa is C or S
  MOD_RES (12), (13), (14), (15), (16): Xaa is A or G
  MOD_RES (17), (18), (19), (20): Xaa is A or G or is absent

SEQ ID NO: 60766 - protein, 35 aa, Artificial Sequence; identical to SEQ ID NO: 32229
  GFR-binding peptide
  MOD_RES (2), (2): Xaa is C or S
  MOD_RES (14), (15), (16), (17), (18): Xaa is A or G
  MOD_RES (19), (20), (21), (22): Xaa is A or G or is absent

SEQ ID NO: 60767 - protein, 39 aa, Artificial Sequence; identical to SEQ ID NO: 5123
  GFR-binding peptide
  MOD_RES (2), (36), (37): Xaa is C or S
  MOD_RES (14), (15), (16), (17), (18): Xaa is A or G
  MOD_RES (19), (20), (21), (22): Xaa is A or G or is absent

SEQ ID NO: 60768 - protein, 34 aa, Artificial Sequence; identical to SEQ ID NO: 5124
  GFR-binding peptide
  MOD_RES (33), (34): Xaa is C or S
  MOD_RES (11), (12), (13), (14), (15): Xaa is A or G
  MOD_RES (16), (17), (18), (19): Xaa is A or G or is absent

SEQ ID NO: 60769 - protein, 41 aa, Artificial Sequence; identical to SEQ ID NO: 5126
  GFR-binding peptide
  MOD_RES (1), (35), (36): Xaa is C or S
  MOD_RES (13), (14), (15), (16), (17): Xaa is A or G
  MOD_RES (18), (19), (20), (21): Xaa is A or G or is absent

SEQ ID NO: 60770 - protein, 36 aa, Artificial Sequence; identical to SEQ ID NO: 26228
  GFR-binding peptide
  MOD_RES (33), (34): Xaa is C or S
  MOD_RES (11), (12), (13), (14), (15): Xaa is A or G
  MOD_RES (16), (17), (18), (19): Xaa is A or G or is absent

SEQ ID NO: 60771 - protein, 32 aa, Artificial Sequence
  GFR-binding peptide
  MOD_RES (11), (12), (13), (14), (15): Xaa is A or G
  MOD_RES (16), (17), (18), (19): Xaa is A or G or is absent
EEVIMRHKRLXXXXXXXXXYYLMSTASTKVPA

SEQ ID NO: 60772 - protein, 39 aa, Artificial Sequence; identical to SEQ ID NO: 32236
  GFR-binding peptide
  MOD_RES (1), (33), (34): Xaa is C or S

SEQ ID NO: 60773 - protein, 37 aa, Artificial Sequence; identical to SEQ ID NO: 5128
  GFR-binding peptide
  MOD_RES (34), (35): Xaa is C or S
  MOD_RES (12), (13), (14), (15), (16): Xaa is A or G
  MOD_RES (17), (18), (19), (20): Xaa is A or G or is absent

SEQ ID NO: 60774 - protein, 40 aa, Artificial Sequence; identical to SEQ ID NO: 5129
  GFR-binding peptide
  MOD_RES (2), (4), (36): Xaa is C or S

SEQ ID NO: 60775 - protein, 44 aa, Artificial Sequence; identical to SEQ ID NO: 5130
  GFR-binding peptide
  MOD_RES (2), (4), (38), (39): Xaa is C or S
  MOD_RES (16), (17), (18), (19), (20): Xaa is A or G
  MOD_RES (21), (22), (23), (24): Xaa is A or G or is absent

SEQ ID NO: 60776 - protein, 40 aa, Artificial Sequence; identical to SEQ ID NO: 32239
  GFR-binding peptide
  MOD_RES (2), (4), (37), (38): Xaa is C or S

SEQ ID NO: 60777 - protein, 37 aa, Artificial Sequence; identical to SEQ ID NO: 32242
  GFR-binding peptide
  MOD_RES (32), (33): Xaa is C or S

SEQ ID NO: 60778 - protein, 37 aa, Artificial Sequence; identical to SEQ ID NO: 26237
  GFR-binding peptide
  MOD_RES (31), (32): Xaa is C or S

SEQ ID NO: 60779 - protein, 37 aa, Artificial Sequence; identical to SEQ ID NO: 5138
  GFR-binding peptide
  MOD_RES (2), (36): Xaa is C or S
  MOD_RES (14), (15), (16), (17), (18): Xaa is A or G
  MOD_RES (19), (20), (21), (22): Xaa is A or G or is absent

SEQ ID NO: 60780 - protein, 40 aa, Artificial Sequence; identical to SEQ ID NO: 26238
  GFR-binding peptide
  MOD_RES (2), (4), (38), (39): Xaa is C or S
  MOD_RES (16), (17), (18), (19), (20): Xaa is A or G
  MOD_RES (21), (22), (23), (24): Xaa is A or G or is absent

SEQ ID NO: 60781 - protein, 37 aa, Artificial Sequence
  GFR-binding peptide
  MOD_RES (1), (3), (34), (35): Xaa is C or S
XKXSKVIMPIKGYIKPTKGIFYLINIPSLDQSVXXPS

SEQ ID NO: 60782 - protein, 37 aa, Artificial Sequence
  GFR-binding peptide
  MOD_RES (34), (35): Xaa is C or S
  MOD_RES (12), (13), (14), (15), (16): Xaa is A or G
  MOD_RES (17), (18), (19), (20): Xaa is A or G or is absent
ESVAMGRHKRLXXXXXXXXXYYLISTASLKTPVXXAK

SEQ ID NO: 60783 - protein, 35 aa, Artificial Sequence
  GFR-binding peptide
  MOD_RES (2), (4): Xaa is C or S
RXGXESVAMGRHKRLYTVVGKDYYLISTASLKTPV

SEQ ID NO: 60784 - protein, 38 aa, Artificial Sequence; identical to SEQ ID NO: 5139
  GFR-binding peptide
  MOD_RES (2), (34), (35): Xaa is C or S

SEQ ID NO: 60785 - protein, 32 aa, Artificial Sequence; identical to SEQ ID NO: 5141
  GFR-binding peptide
  MOD_RES (1), (1): Xaa is C or S

SEQ ID NO: 60786 - protein, 43 aa, Artificial Sequence
  GFR-binding peptide
  MOD_RES (2), (4), (38), (39): Xaa is C or S
  MOD_RES (16), (17), (18), (19), (20): Xaa is A or G
  MOD_RES (21), (22), (23), (24): Xaa is A or G or is absent
SXGXRDVVMGYHYKLXXXXXXXXXKYLMSIPSMKTPTXXPGAS

SEQ ID NO: 60787 - protein, 39 aa, Artificial Sequence; identical to SEQ ID NO: 26244
  GFR-binding peptide
  MOD_RES (1), (33), (34): Xaa is C or S

SEQ ID NO: 60788 - protein, 34 aa, Artificial Sequence; identical to SEQ ID NO: 32248
  GFR-binding peptide
  MOD_RES (31), (32): Xaa is C or S

SEQ ID NO: 60789 - protein, 40 aa, Artificial Sequence
  GFR-binding peptide
  MOD_RES (2), (36), (37): Xaa is C or S
  MOD_RES (14), (15), (16), (17), (18): Xaa is A or G
  MOD_RES (19), (20), (21), (22): Xaa is A or G or is absent
AXSEVTMNEYKFKXXXXXXXXXLYLISIPEMKEPVXXPEP

SEQ ID NO: 60790 - protein, 38 aa, Artificial Sequence; identical to SEQ ID NO: 26248
  GFR-binding peptide
  MOD_RES (1), (3), (35), (36): Xaa is C or S

SEQ ID NO: 60791 - protein, 32 aa, Artificial Sequence; identical to SEQ ID NO: 5144
  GFR-binding peptide
  MOD_RES (1), (32): Xaa is C or S

SEQ ID NO: 60792 - protein, 32 aa, Artificial Sequence; identical to SEQ ID NO: 32252
  GFR-binding peptide
  MOD_RES (31), (32): Xaa is C or S

SEQ ID NO: 60793 - protein, 36 aa, Artificial Sequence
  GFR-binding peptide
  MOD_RES (33), (34): Xaa is C or S
  MOD_RES (11), (12), (13), (14), (15): Xaa is A or G
  MOD_RES (16), (17), (18), (19): Xaa is A or G or is absent
DVVMGYHYKLXXXXXXXXXKYLMSIPSMKTPTXXPG

SEQ ID NO: 60794 - protein, 33 aa, Artificial Sequence; identical to SEQ ID NO: 32256
  GFR-binding peptide
  MOD_RES (31), (31): Xaa is C or S

SEQ ID NO: 60795 - protein, 40 aa, Artificial Sequence; identical to SEQ ID NO: 12587
  GFR-binding peptide
  MOD_RES (1), (3), (37), (38): Xaa is C or S
  MOD_RES (15), (16), (17), (18), (19): Xaa is A or G
  MOD_RES (20), (21), (22), (23): Xaa is A or G or is absent

SEQ ID NO: 60796 - protein, 38 aa, Artificial Sequence
  GFR-binding peptide
  MOD_RES (2), (36), (37): Xaa is C or S
  MOD_RES (14), (15), (16), (17), (18): Xaa is A or G
  MOD_RES (19), (20), (21), (22): Xaa is A or G or is absent
GXRDVVMGRHKRLXXXXXXXXXYYLMSTASMKTPTXXP

SEQ ID NO: 60797 - protein, 39 aa, Artificial Sequence; identical to SEQ ID NO: 5147
  GFR-binding peptide
  MOD_RES (1), (33), (34): Xaa is C or S

SEQ ID NO: 60798 - protein, 42 aa, Artificial Sequence; identical to SEQ ID NO: 32261
  GFR-binding peptide
  MOD_RES (2), (4), (36), (37): Xaa is C or S

SEQ ID NO: 60799 - protein, 39 aa, Artificial Sequence
  GFR-binding peptide
  MOD_RES (1), (33), (34): Xaa is C or S
XSEVVMDEYKFKVVNNASDLYLISIPELRTPVXXTPPTS

SEQ ID NO: 60800 - protein, 34 aa, Artificial Sequence
  GFR-binding peptide
  MOD_RES (34), (34): Xaa is C or S
  MOD_RES (12), (13), (14), (15), (16): Xaa is A or G
  MOD_RES (17), (18), (19), (20): Xaa is A or G or is absent
SEVTMNYHYKLXXXXXXXXXKYLISIPSMKEPVX

SEQ ID NO: 60801 - protein, 33 aa, Artificial Sequence; identical to SEQ ID NO: 12596
  GFR-binding peptide
  MOD_RES (31), (32): Xaa is C or S

SEQ ID NO: 60802 - protein, 37 aa, Artificial Sequence; identical to SEQ ID NO: 26258
  GFR-binding peptide
  MOD_RES (33), (34): Xaa is C or S
  MOD_RES (11), (12), (13), (14), (15): Xaa is A or G
  MOD_RES (16), (17), (18), (19): Xaa is A or G or is absent

SEQ ID NO: 60803 - protein, 34 aa, Artificial Sequence; identical to SEQ ID NO: 26259
  GFR-binding peptide
  MOD_RES (2), (4): Xaa is C or S

SEQ ID NO: 60804 - protein, 34 aa, Artificial Sequence; identical to SEQ ID NO: 26260
  GFR-binding peptide
  MOD_RES (33), (34): Xaa is C or S
  MOD_RES (11), (12), (13), (14), (15): Xaa is A or G
  MOD_RES (16), (17), (18), (19): Xaa is A or G or is absent

SEQ ID NO: 60805 - protein, 37 aa, Artificial Sequence; identical to SEQ ID NO: 26262
  GFR-binding peptide
  MOD_RES (2), (4): Xaa is C or S
  MOD_RES (16), (17), (18), (19), (20): Xaa is A or G
  MOD_RES (21), (22), (23), (24): Xaa is A or G or is absent

SEQ ID NO: 60806 - protein, 39 aa, Artificial Sequence; identical to SEQ ID NO: 32264
  GFR-binding peptide
  MOD_RES (1), (36), (37): Xaa is C or S
  MOD_RES (14), (15), (16), (17), (18): Xaa is A or G
  MOD_RES (19), (20), (21), (22): Xaa is A or G or is absent

SEQ ID NO: 60807 - protein, 34 aa, Artificial Sequence; identical to SEQ ID NO: 32267
  GFR-binding peptide
  MOD_RES (34), (34): Xaa is C or S
  MOD_RES (12), (13), (14), (15), (16): Xaa is A or G
  MOD_RES (17), (18), (19), (20): Xaa is A or G or is absent

SEQ ID NO: 60808 - protein, 39 aa, Artificial Sequence; identical to SEQ ID NO: 26267
  GFR-binding peptide
  MOD_RES (1), (33), (34): Xaa is C or S

SEQ ID NO: 60809 - protein, 41 aa, Artificial Sequence; identical to SEQ ID NO: 5162
  GFR-binding peptide
  MOD_RES (2), (4), (36): Xaa is C or S

SEQ ID NO: 60810 - protein, 34 aa, Artificial Sequence
  GFR-binding peptide
  MOD_RES (1), (1): Xaa is C or S
  MOD_RES (13), (14), (15), (16), (17): Xaa is A or G
  MOD_RES (18), (19), (20), (21): Xaa is A or G or is absent
XSEVVMDYHYKLXXXXXXXXXKYLISIPSLRTPV

SEQ ID NO: 60811 - protein, 36 aa, Artificial Sequence; identical to SEQ ID NO: 5166
  GFR-binding peptide
  MOD_RES (1), (33), (34): Xaa is C or S

SEQ ID NO: 60812 - protein, 42 aa, Artificial Sequence; identical to SEQ ID NO: 26274
  GFR-binding peptide
  MOD_RES (2), (4), (36), (37): Xaa is C or S

SEQ ID NO: 60813 - protein, 38 aa, Artificial Sequence; identical to SEQ ID NO: 26275
  GFR-binding peptide
  MOD_RES (2), (4), (38): Xaa is C or S
  MOD_RES (16), (17), (18), (19), (20): Xaa is A or G
  MOD_RES (21), (22), (23), (24): Xaa is A or G or is absent

SEQ ID NO: 60814 - protein, 36 aa, Artificial Sequence; identical to SEQ ID NO: 26277
  GFR-binding peptide
  MOD_RES (1), (3), (36): Xaa is C or S
  MOD_RES (14), (15), (16), (17), (18): Xaa is A or G
  MOD_RES (19), (20), (21), (22): Xaa is A or G or is absent

SEQ ID NO: 60815 - protein, 36 aa, Artificial Sequence; identical to SEQ ID NO: 5169
  GFR-binding peptide
  MOD_RES (1), (35), (36): Xaa is C or S
  MOD_RES (13), (14), (15), (16), (17): Xaa is A or G
  MOD_RES (18), (19), (20), (21): Xaa is A or G or is absent

SEQ ID NO: 60816 - protein, 42 aa, Artificial Sequence; identical to SEQ ID NO: 5172
  GFR-binding peptide
  MOD_RES (1), (3), (36), (37): Xaa is C or S
  MOD_RES (14), (15), (16), (17), (18): Xaa is A or G
  MOD_RES (19), (20), (21), (22): Xaa is A or G or is absent

SEQ ID NO: 60817 - protein, 35 aa, Artificial Sequence
  GFR-binding peptide
  MOD_RES (31), (32): Xaa is C or S
EVTMNEYKFKVVNKNEDLYLISIPEMKEPVXXPEP

SEQ ID NO: 60818 - protein, 34 aa, Artificial Sequence; identical to SEQ ID NO: 5175
  GFR-binding peptide
  MOD_RES (1), (3), (34): Xaa is C or S

SEQ ID NO: 60819 - protein, 38 aa, Artificial Sequence; identical to SEQ ID NO: 26286
  GFR-binding peptide
  MOD_RES (2), (4), (38): Xaa is C or S
  MOD_RES (16), (17), (18), (19), (20): Xaa is A or G
  MOD_RES (21), (22), (23), (24): Xaa is A or G or is absent

SEQ ID NO: 60820 - protein, 32 aa, Artificial Sequence; identical to SEQ ID NO: 5178
  GFR-binding peptide
  MOD_RES (1), (1): Xaa is C or S

SEQ ID NO: 60821 - protein, 37 aa, Artificial Sequence; identical to SEQ ID NO: 57222
  GFR-binding peptide
  MOD_RES (33), (34): Xaa is C or S
  MOD_RES (11), (12), (13), (14), (15): Xaa is A or G
  MOD_RES (16), (17), (18), (19): Xaa is A or G or is absent

SEQ ID NO: 60822 - protein, 37 aa, Artificial Sequence; identical to SEQ ID NO: 5179
  GFR-binding peptide
  MOD_RES (33), (34): Xaa is C or S
  MOD_RES (11), (12), (13), (14), (15): Xaa is A or G
  MOD_RES (16), (17), (18), (19): Xaa is A or G or is absent

SEQ ID NO: 60823 - protein, 33 aa, Artificial Sequence; identical to SEQ ID NO: 5180
  GFR-binding peptide
  MOD_RES (12), (13), (14), (15), (16): Xaa is A or G
  MOD_RES (17), (18), (19), (20): Xaa is A or G or is absent

SEQ ID NO: 60824 - protein, 32 aa, Artificial Sequence; identical to SEQ ID NO: 57226
  GFR-binding peptide
  MOD_RES (11), (12), (13), (14), (15): Xaa is A or G
  MOD_RES (16), (17), (18), (19): Xaa is A or G or is absent

SEQ ID NO: 60825 - protein, 38 aa, Artificial Sequence; identical to SEQ ID NO: 26294
  GFR-binding peptide
  MOD_RES (32), (33): Xaa is C or S

SEQ ID NO: 60826 - protein, 39 aa, Artificial Sequence; identical to SEQ ID NO: 32288
  GFR-binding peptide
  MOD_RES (2), (36), (37): Xaa is C or S
  MOD_RES (14), (15), (16), (17), (18): Xaa is A or G
  MOD_RES (19), (20), (21), (22): Xaa is A or G or is absent

SEQ ID NO: 60827 - protein, 36 aa, Artificial Sequence; identical to SEQ ID NO: 5185
  GFR-binding peptide
  MOD_RES (2), (33), (34): Xaa is C or S

SEQ ID NO: 60828 - protein, 39 aa, Artificial Sequence; identical to SEQ ID NO: 32291
  GFR-binding peptide
  MOD_RES (1), (33): Xaa is C or S

SEQ ID NO: 60829 - protein, 37 aa, Artificial Sequence; identical to SEQ ID NO: 5187
  GFR-binding peptide
  MOD_RES (1), (32), (33): Xaa is C or S

SEQ ID NO: 60830 - protein, 33 aa, Artificial Sequence; identical to SEQ ID NO: 32295
  GFR-binding peptide
  MOD_RES (31), (32): Xaa is C or S

SEQ ID NO: 60831 - protein, 38 aa, Artificial Sequence; identical to SEQ ID NO: 32297
  GFR-binding peptide
  MOD_RES (2), (4), (37), (38): Xaa is C or S
  MOD_RES (15), (16), (17), (18), (19): Xaa is A or G
  MOD_RES (20), (21), (22), (23): Xaa is A or G or is absent

SEQ ID NO: 60832 - protein, 39 aa, Artificial Sequence
  GFR-binding peptide
  MOD_RES (1), (34), (35): Xaa is C or S
  MOD_RES (12), (13), (14), (15), (16): Xaa is A or G
  MOD_RES (17), (18), (19), (20): Xaa is A or G or is absent
XSKVVMPIKGYXXXXXXXXXFYLINIPSLDQPVXXPSAS

SEQ ID NO: 60833 - protein, 42 aa, Artificial Sequence; identical to SEQ ID NO: 5194
  GFR-binding peptide
  MOD_RES (2), (4), (38), (39): Xaa is C or S
  MOD_RES (16), (17), (18), (19), (20): Xaa is A or G
  MOD_RES (21), (22), (23), (24): Xaa is A or G or is absent

SEQ ID NO: 60834 - protein, 35 aa, Artificial Sequence; identical to SEQ ID NO: 5195
  GFR-binding peptide
  MOD_RES (1), (32), (33): Xaa is C or S

SEQ ID NO: 60835 - protein, 37 aa, Artificial Sequence; identical to SEQ ID NO: 32300
  GFR-binding peptide
  MOD_RES (1), (3), (36), (37): Xaa is C or S
  MOD_RES (14), (15), (16), (17), (18): Xaa is A or G
  MOD_RES (19), (20), (21), (22): Xaa is A or G or is absent

SEQ ID NO: 60836 - protein, 40 aa, Artificial Sequence; identical to SEQ ID NO: 26307
  GFR-binding peptide
  MOD_RES (2), (4), (36), (37): Xaa is C or S

SEQ ID NO: 60837 - protein, 36 aa, Artificial Sequence; identical to SEQ ID NO: 5198
  GFR-binding peptide
  MOD_RES (32), (33): Xaa is C or S

SEQ ID NO: 60838 - protein, 34 aa, Artificial Sequence; identical to SEQ ID NO: 26309
  GFR-binding peptide
  MOD_RES (2), (34): Xaa is C or S

SEQ ID NO: 60839 - protein, 41 aa, Artificial Sequence; identical to SEQ ID NO: 5199
  GFR-binding peptide
  MOD_RES (1), (3), (35): Xaa is C or S

SEQ ID NO: 60840 - protein, 43 aa, Artificial Sequence; identical to SEQ ID NO: 31201
  GFR-binding peptide
  MOD_RES (1), (3), (37), (38): Xaa is C or S
  MOD_RES (15), (16), (17), (18), (19): Xaa is A or G
  MOD_RES (20), (21), (22), (23): Xaa is A or G or is absent

SEQ ID NO: 60841 - protein, 38 aa, Artificial Sequence; identical to SEQ ID NO: 5200
  GFR-binding peptide
  MOD_RES (1), (33), (34): Xaa is C or S

SEQ ID NO: 60842 - protein, 37 aa, Artificial Sequence; identical to SEQ ID NO: 26314
  GFR-binding peptide
  MOD_RES (1), (34), (35): Xaa is C or S

SEQ ID NO: 60843 - protein, 32 aa, Artificial Sequence; identical to SEQ ID NO: 31205
  GFR-binding peptide
  MOD_RES (2), (2): Xaa is C or S

SEQ ID NO: 60844 - protein, 37 aa, Artificial Sequence; identical to SEQ ID NO: 5205
  GFR-binding peptide
  MOD_RES (2), (34), (35): Xaa is C or S

SEQ ID NO: 60845 - protein, 42 aa, Artificial Sequence
  GFR-binding peptide
  MOD_RES (2), (36), (37): Xaa is C or S
  MOD_RES (14), (15), (16), (17), (18): Xaa is A or G
  MOD_RES (19), (20), (21), (22): Xaa is A or G or is absent
GXSEVVMDRHKRLXXXXXXXXXYYLISTASLRTPVXXTPPTS

SEQ ID NO: 60846 - protein, 35 aa, Artificial Sequence; identical to SEQ ID NO: 31211
  GFR-binding peptide
  MOD_RES (1), (33), (34): Xaa is C or S

SEQ ID NO: 60847 - protein, 40 aa, Artificial Sequence; identical to SEQ ID NO: 5212
  GFR-binding peptide
  MOD_RES (34), (35): Xaa is C or S
  MOD_RES (12), (13), (14), (15), (16): Xaa is A or G
  MOD_RES (17), (18), (19), (20): Xaa is A or G or is absent

SEQ ID NO: 60848 - protein, 40 aa, Artificial Sequence; identical to SEQ ID NO: 31220
  GFR-binding peptide
  MOD_RES (1), (35), (36): Xaa is C or S
  MOD_RES (13), (14), (15), (16), (17): Xaa is A or G
  MOD_RES (18), (19), (20), (21): Xaa is A or G or is absent

SEQ ID NO: 60849 - protein, 35 aa, Artificial Sequence; identical to SEQ ID NO: 5215
  GFR-binding peptide
  MOD_RES (34), (34): Xaa is C or S
  MOD_RES (12), (13), (14), (15), (16): Xaa is A or G
  MOD_RES (17), (18), (19), (20): Xaa is A or G or is absent

SEQ ID NO: 60850 - protein, 31 aa, Artificial Sequence
  GFR-binding peptide
SEVTMNYHYKLVVNKNEDKYLISIPSMKEPV

SEQ ID NO: 60851 - protein, 34 aa, Artificial Sequence
  GFR-binding peptide
  MOD_RES (31), (32): Xaa is C or S
EVTMNYHYKLVVNKNEDKYLISIPSMKEPVXXPE

SEQ ID NO: 60852 - protein, 39 aa, Artificial Sequence
  GFR-binding peptide
  MOD_RES (2), (4), (38), (39): Xaa is C or S
  MOD_RES (16), (17), (18), (19), (20): Xaa is A or G
  MOD_RES (21), (22), (23), (24): Xaa is A or G or is absent
RXGXSEVVMDEYKFKXXXXXXXXXLYLISIPELRTPVXX

SEQ ID NO: 60853 - protein, 37 aa, Artificial Sequence; identical to SEQ ID NO: 5217
  GFR-binding peptide
  MOD_RES (1), (3), (36), (37): Xaa is C or S
  MOD_RES (14), (15), (16), (17), (18): Xaa is A or G
  MOD_RES (19), (20), (21), (22): Xaa is A or G or is absent

SEQ ID NO: 60854 - protein, 36 aa, Artificial Sequence; identical to SEQ ID NO: 26327
  GFR-binding peptide
  MOD_RES (1), (33), (34): Xaa is C or S

SEQ ID NO: 60855 - protein, 35 aa, Artificial Sequence; identical to SEQ ID NO: 5219
  GFR-binding peptide
  MOD_RES (2), (34), (35): Xaa is C or S

SEQ ID NO: 60856 - protein, 37 aa, Artificial Sequence; identical to SEQ ID NO: 5221
  GFR-binding peptide
  MOD_RES (2), (35), (36): Xaa is C or S
  MOD_RES (13), (14), (15), (16), (17): Xaa is A or G
  MOD_RES (18), (19), (20), (21): Xaa is A or G or is absent

SEQ ID NO: 60857 - protein, 36 aa, Artificial Sequence; identical to SEQ ID NO: 26332
  GFR-binding peptide
  MOD_RES (31), (32): Xaa is C or S

SEQ ID NO: 60858 - protein, 40 aa, Artificial Sequence; identical to SEQ ID NO: 5222
  GFR-binding peptide
  MOD_RES (1), (35), (36): Xaa is C or S
  MOD_RES (13), (14), (15), (16), (17): Xaa is A or G
  MOD_RES (18), (19), (20), (21): Xaa is A or G or is absent

SEQ ID NO: 60859 - protein, 42 aa, Artificial Sequence; identical to SEQ ID NO: 5224
  GFR-binding peptide
  MOD_RES (2), (37), (38): Xaa is C or S
  MOD_RES (15), (16), (17), (18), (19): Xaa is A or G
  MOD_RES (20), (21), (22), (23): Xaa is A or G or is absent

SEQ ID NO: 60860 - protein, 40 aa, Artificial Sequence
  GFR-binding peptide
  MOD_RES (2), (36), (37): Xaa is C or S
  MOD_RES (14), (15), (16), (17), (18): Xaa is A or G
  MOD_RES (19), (20), (21), (22): Xaa is A or G or is absent
AXSEVTMNRYKKLXXXXXXXXXFYLISIANMKEPVXXPEP

SEQ ID NO: 60861 - protein, 37 aa, Artificial Sequence
  GFR-binding peptide
  MOD_RES (33), (34): Xaa is C or S
  MOD_RES (11), (12), (13), (14), (15): Xaa is A or G
  MOD_RES (16), (17), (18), (19): Xaa is A or G or is absent
EVVMDYHYKLXXXXXXXXXKYLISIPSLRTPVXXTPP

SEQ ID NO: 60862 - protein, 38 aa, Artificial Sequence
  GFR-binding peptide
  MOD_RES (1), (3), (35), (36): Xaa is C or S
XGXRDVVMGYHYKLIIQQKDNKYLMSIPSMKTPTXXPG

SEQ ID NO: 60863 - protein, 37 aa, Artificial Sequence
  GFR-binding peptide
  MOD_RES (1), (3), (37): Xaa is C or S
  MOD_RES (15), (16), (17), (18), (19): Xaa is A or G
  MOD_RES (20), (21), (22), (23): Xaa is A or G or is absent
XGXSEVVMDEYKFKXXXXXXXXXLYLISIPELRTPVX

SEQ ID NO: 60864 - protein, 35 aa, Artificial Sequence; identical to SEQ ID NO: 26339
  GFR-binding peptide
  MOD_RES (2), (34), (35): Xaa is C or S

SEQ ID NO: 60865 - protein, 39 aa, Artificial Sequence; identical to SEQ ID NO: 26340
  GFR-binding peptide
  MOD_RES (1), (3), (35), (36): Xaa is C or S

SEQ ID NO: 60866 - protein, 37 aa, Artificial Sequence; identical to SEQ ID NO: 56166
  GFR-binding peptide
  MOD_RES (2), (4), (36), (37): Xaa is C or S

SEQ ID NO: 60867 - protein, 38 aa, Artificial Sequence; identical to SEQ ID NO: 5228
  GFR-binding peptide
  MOD_RES (2), (37), (38): Xaa is C or S
  MOD_RES (15), (16), (17), (18), (19): Xaa is A or G
  MOD_RES (20), (21), (22), (23): Xaa is A or G or is absent

SEQ ID NO: 60868 - protein, 43 aa, Artificial Sequence; identical to SEQ ID NO: 31237
  GFR-binding peptide
  MOD_RES (2), (4), (38), (39): Xaa is C or S
  MOD_RES (16), (17), (18), (19), (20): Xaa is A or G
  MOD_RES (21), (22), (23), (24): Xaa is A or G or is absent

SEQ ID NO: 60869 - protein, 34 aa, Artificial Sequence
  GFR-binding peptide
  MOD_RES (1), (1): Xaa is C or S
  MOD_RES (13), (14), (15), (16), (17): Xaa is A or G
  MOD_RES (18), (19), (20), (21): Xaa is A or G or is absent
XAEVVMDRHKRLXXXXXXXXXYYLISTASLRAPV

SEQ ID NO: 60870 - protein, 37 aa, Artificial Sequence; identical to SEQ ID NO: 26342
  GFR-binding peptide
  MOD_RES (2), (36), (37): Xaa is C or S
  MOD_RES (14), (15), (16), (17), (18): Xaa is A or G
  MOD_RES (19), (20), (21), (22): Xaa is A or G or is absent

SEQ ID NO: 60871 - protein, 35 aa, Artificial Sequence; identical to SEQ ID NO: 26344
  GFR-binding peptide
  MOD_RES (2), (34), (35): Xaa is C or S

SEQ ID NO: 60872 - protein, 35 aa, Artificial Sequence; identical to SEQ ID NO: 26345
  GFR-binding peptide
  MOD_RES (2), (34), (35): Xaa is C or S

SEQ ID NO: 60873 - protein, 35 aa, Artificial Sequence
  GFR-binding peptide
  MOD_RES (1), (35): Xaa is C or S
  MOD_RES (13), (14), (15), (16), (17): Xaa is A or G
  MOD_RES (18), (19), (20), (21): Xaa is A or G or is absent
XRDVVMGYHYKLXXXXXXXXXKYLMSIPSMKTPTX

SEQ ID NO: 60874 - protein, 32 aa, Artificial Sequence; identical to SEQ ID NO: 5233
  GFR-binding peptide
  MOD_RES (31), (32): Xaa is C or S

SEQ ID NO: 60875 - protein, 37 aa, Artificial Sequence; identical to SEQ ID NO: 12669
  GFR-binding peptide
  MOD_RES (1), (3), (35), (36): Xaa is C or S

SEQ ID NO: 60876 - protein, 35 aa, Artificial Sequence; identical to SEQ ID NO: 26347
  GFR-binding peptide
  MOD_RES (1), (3), (35): Xaa is C or S

SEQ ID NO: 60877 - protein, 35 aa, Artificial Sequence; identical to SEQ ID NO: 5235
  GFR-binding peptide
  MOD_RES (2), (34), (35): Xaa is C or S

SEQ ID NO: 60878 - protein, 37 aa, Artificial Sequence; identical to SEQ ID NO: 31246
  GFR-binding peptide
  MOD_RES (2), (4), (36): Xaa is C or S

SEQ ID NO: 60879 - protein, 41 aa, Artificial Sequence
  GFR-binding peptide
  MOD_RES (1), (3), (36), (37): Xaa is C or S
  MOD_RES (14), (15), (16), (17), (18): Xaa is A or G
  MOD_RES (19), (20), (21), (22): Xaa is A or G or is absent
XGXEEVIMEYKFKXXXXXXXXXLYLMSIPETKVPAXXTSPV

SEQ ID NO: 60880 - protein, 35 aa, Artificial Sequence; identical to SEQ ID NO: 5236
  GFR-binding peptide
  MOD_RES (2), (4), (35): Xaa is C or S

SEQ ID NO: 60881 - protein, 42 aa, Artificial Sequence
  GFR-binding peptide
  MOD_RES (1), (3), (37), (38): Xaa is C or S
  MOD_RES (15), (16), (17), (18), (19): Xaa is A or G
  MOD_RES (20), (21), (22), (23): Xaa is A or G or is absent
XGXSEVVMDRHKRLXXXXXXXXXYYLISTASLRTPVXXTPPT

SEQ ID NO: 60882 - protein, 31 aa, Artificial Sequence; identical to SEQ ID NO: 26352
  GFR-binding peptide
  MOD_RES (31), (31): Xaa is C or S

SEQ ID NO: 60883 - protein, 35 aa, Artificial Sequence
  GFR-binding peptide
  MOD_RES (33), (34): Xaa is C or S
  MOD_RES (11), (12), (13), (14), (15): Xaa is A or G
  MOD_RES (16), (17), (18), (19): Xaa is A or G or is absent
DVVMGEYKFKXXXXXXXXXLYLMSIPEMKTPTXXP

SEQ ID NO: 60884 - protein, 33 aa, Artificial Sequence
  GFR-binding peptide
  MOD_RES (32), (33): Xaa is C or S
SEVTMNRYKKLVVNKNEDFYLISIANMKEPVXX

SEQ ID NO: 60885 - protein, 37 aa, Artificial Sequence; identical to SEQ ID NO: 31249
  GFR-binding peptide
  MOD_RES (2), (35), (36): Xaa is C or S

SEQ ID NO: 60886 - protein, 36 aa, Artificial Sequence
  GFR-binding peptide
  MOD_RES (1), (35), (36): Xaa is C or S
  MOD_RES (13), (14), (15), (16), (17): Xaa is A or G
  MOD_RES (18), (19), (20), (21): Xaa is A or G or is absent
XSEVTMNEYKFKXXXXXXXXXLYLISIPEMKEPVXX

SEQ ID NO: 60887 - protein, 42 aa, Artificial Sequence; identical to SEQ ID NO: 31250
  GFR-binding peptide
  MOD_RES (2), (4), (38), (39): Xaa is C or S
  MOD_RES (16), (17), (18), (19), (20): Xaa is A or G
  MOD_RES (21), (22), (23), (24): Xaa is A or G or is absent

SEQ ID NO: 60888 - protein, 36 aa, Artificial Sequence; identical to SEQ ID NO: 31253
  GFR-binding peptide
  MOD_RES (2), (4), (36): Xaa is C or S

SEQ ID NO: 60889 - protein, 41 aa, Artificial Sequence; identical to SEQ ID NO: 5242
  GFR-binding peptide
  MOD_RES (2), (35), (36): Xaa is C or S
  MOD_RES (13), (14), (15), (16), (17): Xaa is A or G
  MOD_RES (18), (19), (20), (21): Xaa is A or G or is absent

SEQ ID NO: 60890 - protein, 38 aa, Artificial Sequence; identical to SEQ ID NO: 5243
  GFR-binding peptide
  MOD_RES (33), (34): Xaa is C or S
  MOD_RES (11), (12), (13), (14), (15): Xaa is A or G
  MOD_RES (16), (17), (18), (19): Xaa is A or G or is absent

SEQ ID NO: 60891 - protein, 41 aa, Artificial Sequence
  GFR-binding peptide
  MOD_RES (1), (35), (36): Xaa is C or S
  MOD_RES (13), (14), (15), (16), (17): Xaa is A or G
  MOD_RES (18), (19), (20), (21): Xaa is A or G or is absent
XSRVVMNYHYKLXXXXXXXXXKYLVSIPSLKTPAXXPKPVH

SEQ ID NO: 60892 - protein, 35 aa, Artificial Sequence; identical to SEQ ID NO: 31258
  GFR-binding peptide
  MOD_RES (34), (35): Xaa is C or S
  MOD_RES (12), (13), (14), (15), (16): Xaa is A or G
  MOD_RES (17), (18), (19), (20): Xaa is A or G or is absent

SEQ ID NO: 60893 - protein, 34 aa, Artificial Sequence; identical to SEQ ID NO: 26365
  GFR-binding peptide
  MOD_RES (32), (33): Xaa is C or S

SEQ ID NO: 60894 - protein, 39 aa, Artificial Sequence; identical to SEQ ID NO: 26366
  GFR-binding peptide
  MOD_RES (34), (35): Xaa is C or S
  MOD_RES (12), (13), (14), (15), (16): Xaa is A or G
  MOD_RES (17), (18), (19), (20): Xaa is A or G or is absent

SEQ ID NO: 60895 - protein, 35 aa, Artificial Sequence; identical to SEQ ID NO: 5248
  GFR-binding peptide
  MOD_RES (31), (32): Xaa is C or S

SEQ ID NO: 60896 - protein, 39 aa, Artificial Sequence; identical to SEQ ID NO: 31269
  GFR-binding peptide
  MOD_RES (2), (34): Xaa is C or S

SEQ ID NO: 60897 - protein, 42 aa, Artificial Sequence; identical to SEQ ID NO: 31270
  GFR-binding peptide
  MOD_RES (2), (37), (38): Xaa is C or S
  MOD_RES (15), (16), (17), (18), (19): Xaa is A or G
  MOD_RES (20), (21), (22), (23): Xaa is A or G or is absent

SEQ ID NO: 60898 - protein, 37 aa, Artificial Sequence; identical to SEQ ID NO: 5253
  GFR-binding peptide
  MOD_RES (1), (34), (35): Xaa is C or S

SEQ ID NO: 60899 - protein, 36 aa, Artificial Sequence
  GFR-binding peptide
  MOD_RES (1), (34), (35): Xaa is C or S
  MOD_RES (12), (13), (14), (15), (16): Xaa is A or G
  MOD_RES (17), (18), (19), (20): Xaa is A or G or is absent
XSKVIMPIKGYXXXXXXXXXFYLINIPSLDQSVXXP

SEQ ID NO: 60900 - protein, 44 aa, Artificial Sequence
  GFR-binding peptide
  MOD_RES (2), (4), (38), (39): Xaa is C or S
  MOD_RES (16), (17), (18), (19), (20): Xaa is A or G
  MOD_RES (21), (22), (23), (24): Xaa is A or G or is absent
SXGXRDVVMGRHKRLXXXXXXXXXYYLMSTASMKTPTXXPGASG

SEQ ID NO: 60901 - protein, 38 aa, Artificial Sequence
  GFR-binding peptide
  MOD_RES (32), (33): Xaa is C or S
SEVTMNPIKGYVVNKNEDFYLINIPSMKEPVXXPEPIG

SEQ ID NO: 60902 - protein, 33 aa, Artificial Sequence; identical to SEQ ID NO: 5255
  GFR-binding peptide
  MOD_RES (33), (33): Xaa is C or S
  MOD_RES (11), (12), (13), (14), (15): Xaa is A or G
  MOD_RES (16), (17), (18), (19): Xaa is A or G or is absent

SEQ ID NO: 60903 - protein, 36 aa, Artificial Sequence; identical to SEQ ID NO: 31279
  GFR-binding peptide
  MOD_RES (1), (3): Xaa is C or S
  MOD_RES (15), (16), (17), (18), (19): Xaa is A or G
  MOD_RES (20), (21), (22), (23): Xaa is A or G or is absent

SEQ ID NO: 60904 - protein, 39 aa, Artificial Sequence; identical to SEQ ID NO: 5261
  GFR-binding peptide
  MOD_RES (1), (3), (37), (38): Xaa is C or S
  MOD_RES (15), (16), (17), (18), (19): Xaa is A or G
  MOD_RES (20), (21), (22), (23): Xaa is A or G or is absent

SEQ ID NO: 60905 - protein, 41 aa, Artificial Sequence; identical to SEQ ID NO: 26383
  GFR-binding peptide
  MOD_RES (1), (3), (35): Xaa is C or S

SEQ ID NO: 60906 - protein, 32 aa, Artificial Sequence; identical to SEQ ID NO: 5264
  GFR-binding peptide
  MOD_RES (2), (2): Xaa is C or S

SEQ ID NO: 60907 - protein, 37 aa, Artificial Sequence; identical to SEQ ID NO: 5269
  GFR-binding peptide
  MOD_RES (35), (36): Xaa is C or S
  MOD_RES (13), (14), (15), (16), (17): Xaa is A or G
  MOD_RES (18), (19), (20), (21): Xaa is A or G or is absent

SEQ ID NO: 60908 - protein, 38 aa, Artificial Sequence; identical to SEQ ID NO: 31289
  GFR-binding peptide
  MOD_RES (2), (36), (37): Xaa is C or S
  MOD_RES (14), (15), (16), (17), (18): Xaa is A or G
  MOD_RES (19), (20), (21), (22): Xaa is A or G or is absent

SEQ ID NO: 60909 - protein, 36 aa, Artificial Sequence; identical to SEQ ID NO: 5271
  GFR-binding peptide
  MOD_RES (1), (32), (33): Xaa is C or S

SEQ ID NO: 60910 - protein, 38 aa, Artificial Sequence; identical to SEQ ID NO: 31291
  GFR-binding peptide
  MOD_RES (1), (33), (34): Xaa is C or S

SEQ ID NO: 60911 - protein, 35 aa, Artificial Sequence; identical to SEQ ID NO: 31293
  GFR-binding peptide
  MOD_RES (31), (32): Xaa is C or S

SEQ ID NO: 60912 - protein, 37 aa, Artificial Sequence
  GFR-binding peptide
  MOD_RES (33), (34): Xaa is C or S
  MOD_RES (11), (12), (13), (14), (15): Xaa is A or G
  MOD_RES (16), (17), (18), (19): Xaa is A or G or is absent
DVVMGEYKFKXXXXXXXXXLYLMSIPEMKTPTXXPGA

SEQ ID NO: 60913 - protein, 41 aa, Artificial Sequence
  GFR-binding peptide
  MOD_RES (2), (4), (38), (39): Xaa is C or S
  MOD_RES (16), (17), (18), (19), (20): Xaa is A or G
  MOD_RES (21), (22), (23), (24): Xaa is A or G or is absent
RXGXAEVVMDRHKRLXXXXXXXXXYYLISTASLRAPVXXSA

SEQ ID NO: 60914 - protein, 39 aa, Artificial Sequence; identical to SEQ ID NO: 31295
  GFR-binding peptide
  MOD_RES (33), (34): Xaa is C or S

SEQ ID NO: 60915 - protein, 35 aa, Artificial Sequence; identical to SEQ ID NO: 26392
  GFR-binding peptide
  MOD_RES (2), (2): Xaa is C or S
  MOD_RES (14), (15), (16), (17), (18): Xaa is A or G
  MOD_RES (19), (20), (21), (22): Xaa is A or G or is absent

SEQ ID NO: 60916 - protein, 41 aa, Artificial Sequence
  GFR-binding peptide
  MOD_RES (1), (3), (35), (36): Xaa is C or S
XAXSEVTMNRYKKLVVNKNEDFYLISIANMKEPVXXPEPIG

SEQ ID NO: 60917 - protein, 34 aa, Artificial Sequence; identical to SEQ ID NO: 26395
  GFR-binding peptide
  MOD_RES (32), (33): Xaa is C or S

SEQ ID NO: 60918 - protein, 40 aa, Artificial Sequence; identical to SEQ ID NO: 5279
  GFR-binding peptide
  MOD_RES (2), (34), (35): Xaa is C or S

SEQ ID NO: 60919 - protein, 39 aa, Artificial Sequence; identical to SEQ ID NO: 31304
  GFR-binding peptide
  MOD_RES (2), (4), (38), (39): Xaa is C or S
  MOD_RES (16), (17), (18), (19), (20): Xaa is A or G
  MOD_RES (21), (22), (23), (24): Xaa is A or G or is absent

SEQ ID NO: 60920 - protein, 37 aa, Artificial Sequence; identical to SEQ ID NO: 26397
  GFR-binding peptide
  MOD_RES (1), (3), (35), (36): Xaa is C or S

SEQ ID NO: 60921 - protein, 41 aa, Artificial Sequence; identical to SEQ ID NO: 26399
  GFR-binding peptide
  MOD_RES (1), (36), (37): Xaa is C or S
  MOD_RES (14), (15), (16), (17), (18): Xaa is A or G
  MOD_RES (19), (20), (21), (22): Xaa is A or G or is absent

SEQ ID NO: 60922 - protein, 35 aa, Artificial Sequence
  GFR-binding peptide
  MOD_RES (31), (32): Xaa is C or S
SRVIMPIKGYVKPKRGVFYLINIPSLAQPVXXPAA

SEQ ID NO: 60923 - protein, 38 aa, Artificial Sequence; identical to SEQ ID NO: 5280
  GFR-binding peptide
  MOD_RES (1), (35), (36): Xaa is C or S
  MOD_RES (13), (14), (15), (16), (17): Xaa is A or G
  MOD_RES (18), (19), (20), (21): Xaa is A or G or is absent

SEQ ID NO: 60924 - protein, 37 aa, Artificial Sequence; identical to SEQ ID NO: 31310
  GFR-binding peptide
  MOD_RES (2), (4): Xaa is C or S
  MOD_RES (16), (17), (18), (19), (20): Xaa is A or G
  MOD_RES (21), (22), (23), (24): Xaa is A or G or is absent

SEQ ID NO: 60925 - protein, 38 aa, Artificial Sequence; identical to SEQ ID NO: 26406
  GFR-binding peptide
  MOD_RES (1), (3), (36), (37): Xaa is C or S
  MOD_RES (14), (15), (16), (17), (18): Xaa is A or G
  MOD_RES (19), (20), (21), (22): Xaa is A or G or is absent

SEQ ID NO: 60926 - protein, 40 aa, Artificial Sequence; identical to SEQ ID NO: 5287
  GFR-binding peptide
  MOD_RES (2), (4), (37), (38): Xaa is C or S

SEQ ID NO: 60927 - protein, 39 aa, Artificial Sequence
  GFR-binding peptide
  MOD_RES (1), (3), (35), (36): Xaa is C or S
XAXSEVTMNEYKFKVVNKNEDLYLISIPEMKEPVXXPEP

SEQ ID NO: 60928 - protein, 35 aa, Artificial Sequence; identical to SEQ ID NO: 5290
  GFR-binding peptide
  MOD_RES (1), (3), (35): Xaa is C or S

SEQ ID NO: 60929 - protein, 39 aa, Artificial Sequence; identical to SEQ ID NO: 26411
  GFR-binding peptide
  MOD_RES (1), (3), (34), (35): Xaa is C or S

SEQ ID NO: 60930 - protein, 33 aa, Artificial Sequence; identical to SEQ ID NO: 5291
  GFR-binding peptide
  MOD_RES (31), (32): Xaa is C or S

SEQ ID NO: 60931 - protein, 40 aa, Artificial Sequence; identical to SEQ ID NO: 5292
  GFR-binding peptide
  MOD_RES (2), (4), (37), (38): Xaa is C or S
  MOD_RES (15), (16), (17), (18), (19): Xaa is A or G
  MOD_RES (20), (21), (22), (23): Xaa is A or G or is absent

SEQ ID NO: 60932 - protein, 36 aa, Artificial Sequence; identical to SEQ ID NO: 5294
  GFR-binding peptide
  MOD_RES (1), (3), (35): Xaa is C or S

SEQ ID NO: 60933 - protein, 36 aa, Artificial Sequence; identical to SEQ ID NO: 31318
  GFR-binding peptide
  MOD_RES (32), (33): Xaa is C or S

SEQ ID NO: 60934 - protein, 32 aa, Artificial Sequence; identical to SEQ ID NO: 5295
  GFR-binding peptide
  MOD_RES (31), (32): Xaa is C or S

SEQ ID NO: 60935 - protein, 33 aa, Artificial Sequence; identical to SEQ ID NO: 26415
  GFR-binding peptide
  MOD_RES (2), (2): Xaa is C or S

SEQ ID NO: 60936 - protein, 35 aa, Artificial Sequence; identical to SEQ ID NO: 5296
  GFR-binding peptide
  MOD_RES (34), (35): Xaa is C or S
  MOD_RES (12), (13), (14), (15), (16): Xaa is A or G
  MOD_RES (17), (18), (19), (20): Xaa is A or G or is absent

SEQ ID NO: 60937 - protein, 40 aa, Artificial Sequence; identical to SEQ ID NO: 26417
  GFR-binding peptide
  MOD_RES (1), (3), (37), (38): Xaa is C or S
  MOD_RES (15), (16), (17), (18), (19): Xaa is A or G
  MOD_RES (20), (21), (22), (23): Xaa is A or G or is absent

SEQ ID NO: 60938 - protein, 36 aa, Artificial Sequence; identical to SEQ ID NO: 26419
  GFR-binding peptide
  MOD_RES (1), (33), (34): Xaa is C or S

SEQ ID NO: 60939 - protein, 40 aa, Artificial Sequence; identical to SEQ ID NO: 5299
  GFR-binding peptide
  MOD_RES (1), (3), (37), (38): Xaa is C or S
  MOD_RES (15), (16), (17), (18), (19): Xaa is A or G
  MOD_RES (20), (21), (22), (23): Xaa is A or G or is absent

SEQ ID NO: 60940 - protein, 35 aa, Artificial Sequence; identical to SEQ ID NO: 5301
  GFR-binding peptide
  MOD_RES (2), (4): Xaa is C or S

SEQ ID NO: 60941 - protein, 38 aa, Artificial Sequence; identical to SEQ ID NO: 5303
  GFR-binding peptide
  MOD_RES (2), (4), (35), (36): Xaa is C or S

SEQ ID NO: 60942 - protein, 38 aa, Artificial Sequence
  GFR-binding peptide
  MOD_RES (1), (33), (34): Xaa is C or S
XAEVVMDRHKRLVVNNAADYYLISTASLRAPVXXSAPA

SEQ ID NO: 60943 - protein, 36 aa, Artificial Sequence; identical to SEQ ID NO: 5304
  GFR-binding peptide
  MOD_RES (31), (32): Xaa is C or S

SEQ ID NO: 60944 - protein, 38 aa, Artificial Sequence; identical to SEQ ID NO: 5306
  GFR-binding peptide
  MOD_RES (2), (34), (35): Xaa is C or S

SEQ ID NO: 60945 - protein, 33 aa, Artificial Sequence; identical to SEQ ID NO: 5307
  GFR-binding peptide
  MOD_RES (32), (33): Xaa is C or S

SEQ ID NO: 60946 - protein, 33 aa, Artificial Sequence; identical to SEQ ID NO: 56252
  GFR-binding peptide
  MOD_RES (12), (13), (14), (15), (16): Xaa is A or G
  MOD_RES (17), (18), (19), (20): Xaa is A or G or is absent

SEQ ID NO: 60947 - protein, 32 aa, Artificial Sequence; identical to SEQ ID NO: 26430
  GFR-binding peptide
  MOD_RES (1), (1): Xaa is C or S

SEQ ID NO: 60948 - protein, 38 aa, Artificial Sequence
  GFR-binding peptide
  MOD_RES (34), (35): Xaa is C or S
  MOD_RES (12), (13), (14), (15), (16): Xaa is A or G
  MOD_RES (17), (18), (19), (20): Xaa is A or G or is absent
SEVVMDEYKFKXXXXXXXXXLYLISIPELRTPVXXTPP

SEQ ID NO: 60949 - protein, 39 aa, Artificial Sequence; identical to SEQ ID NO: 5310
  GFR-binding peptide
  MOD_RES (2), (4), (36), (37): Xaa is C or S

SEQ ID NO: 60950 - protein, 38 aa, Artificial Sequence; identical to SEQ ID NO: 5313
  GFR-binding peptide
  MOD_RES (1), (33), (34): Xaa is C or S

SEQ ID NO: 60951 - protein, 38 aa, Artificial Sequence; identical to SEQ ID NO: 31335
  GFR-binding peptide
  MOD_RES (34), (35): Xaa is C or S
  MOD_RES (12), (13), (14), (15), (16): Xaa is A or G
  MOD_RES (17), (18), (19), (20): Xaa is A or G or is absent

SEQ ID NO: 60952 - protein, 35 aa, Artificial Sequence; identical to SEQ ID NO: 31338
  GFR-binding peptide
  MOD_RES (1), (3), (35): Xaa is C or S

SEQ ID NO: 60953 - protein, 32 aa, Artificial Sequence; identical to SEQ ID NO: 5314
  GFR-binding peptide
  MOD_RES (2), (2): Xaa is C or S

SEQ ID NO: 60954 - protein, 38 aa, Artificial Sequence; identical to SEQ ID NO: 5316
  GFR-binding peptide
  MOD_RES (2), (33), (34): Xaa is C or S

SEQ ID NO: 60955 - protein, 36 aa, Artificial Sequence; identical to SEQ ID NO: 26440
  GFR-binding peptide
  MOD_RES (1), (3): Xaa is C or S
  MOD_RES (15), (16), (17), (18), (19): Xaa is A or G
  MOD_RES (20), (21), (22), (23): Xaa is A or G or is absent

SEQ ID NO: 60956 - protein, 37 aa, Artificial Sequence; identical to SEQ ID NO: 31345
  GFR-binding peptide
  MOD_RES (1), (3), (37): Xaa is C or S
  MOD_RES (15), (16), (17), (18), (19): Xaa is A or G
  MOD_RES (20), (21), (22), (23): Xaa is A or G or is absent

SEQ ID NO: 60957 - protein, 34 aa, Artificial Sequence; identical to SEQ ID NO: 26442
  GFR-binding peptide
  MOD_RES (33), (34): Xaa is C or S

SEQ ID NO: 60958 - protein, 41 aa, Artificial Sequence
  GFR-binding peptide
  MOD_RES (1), (35), (36): Xaa is C or S
  MOD_RES (13), (14), (15), (16), (17): Xaa is A or G
  MOD_RES (18), (19), (20), (21): Xaa is A or G or is absent
XSEVTMNRHKRLXXXXXXXXXYYLISTASMKEPVXXPEPIG

SEQ ID NO: 60959 - protein, 40 aa, Artificial Sequence; identical to SEQ ID NO: 5318
  GFR-binding peptide
  MOD_RES (1), (35): Xaa is C or S
  MOD_RES (13), (14), (15), (16), (17): Xaa is A or G
  MOD_RES (18), (19), (20), (21): Xaa is A or G or is absent

SEQ ID NO: 60960 - protein, 39 aa, Artificial Sequence; identical to SEQ ID NO: 26443
  GFR-binding peptide
  MOD_RES (2), (36), (37): Xaa is C or S
  MOD_RES (14), (15), (16), (17), (18): Xaa is A or G
  MOD_RES (19), (20), (21), (22): Xaa is A or G or is absent

SEQ ID NO: 60961 - protein, 30 aa, Artificial Sequence; identical to SEQ ID NO: 12746
  GFR-binding peptide

SEQ ID NO: 60962 - protein, 35 aa, Artificial Sequence; identical to SEQ ID NO: 26447
  GFR-binding peptide
  MOD_RES (2), (2): Xaa is C or S
  MOD_RES (14), (15), (16), (17), (18): Xaa is A or G
  MOD_RES (19), (20), (21), (22): Xaa is A or G or is absent

SEQ ID NO: 60963 - protein, 34 aa, Artificial Sequence
  GFR-binding peptide
  MOD_RES (2), (33), (34): Xaa is C or S
GXEEVIMYHYKLLLVRGNDKYLMSIPSTKVPAXX

SEQ ID NO: 60964 - protein, 35 aa, Artificial Sequence; identical to SEQ ID NO: 31355
  GFR-binding peptide
  MOD_RES (34), (35): Xaa is C or S
  MOD_RES (12), (13), (14), (15), (16): Xaa is A or G
  MOD_RES (17), (18), (19), (20): Xaa is A or G or is absent

SEQ ID NO: 60965 - protein, 41 aa, Artificial Sequence; identical to SEQ ID NO: 31357
  GFR-binding peptide
  MOD_RES (2), (4), (38), (39): Xaa is C or S
  MOD_RES (16), (17), (18), (19), (20): Xaa is A or G
  MOD_RES (21), (22), (23), (24): Xaa is A or G or is absent

SEQ ID NO: 60966 - protein, 40 aa, Artificial Sequence; identical to SEQ ID NO: 31358
  GFR-binding peptide
  MOD_RES (1), (3), (35), (36): Xaa is C or S

SEQ ID NO: 60967 - protein, 33 aa, Artificial Sequence; identical to SEQ ID NO: 5325
  GFR-binding peptide
  MOD_RES (1), (33): Xaa is C or S

SEQ ID NO: 60968 - protein, 30 aa, Artificial Sequence; identical to SEQ ID NO: 5326
  GFR-binding peptide

SEQ ID NO: 60969 - protein, 39 aa, Artificial Sequence; identical to SEQ ID NO: 5329
  GFR-binding peptide
  MOD_RES (1), (35), (36): Xaa is C or S
  MOD_RES (13), (14), (15), (16), (17): Xaa is A or G
  MOD_RES (18), (19), (20), (21): Xaa is A or G or is absent

SEQ ID NO: 60970 - protein, 39 aa, Artificial Sequence
  GFR-binding peptide
  MOD_RES (1), (35), (36): Xaa is C or S
  MOD_RES (13), (14), (15), (16), (17): Xaa is A or G
  MOD_RES (18), (19), (20), (21): Xaa is A or G or is absent
XSEVTMNRHKRLXXXXXXXXXYYLISTASMKEPVXXPEP

SEQ ID NO: 60971 - protein, 38 aa, Artificial Sequence
  GFR-binding peptide
  MOD_RES (2), (4), (36), (37): Xaa is C or S
RXGXSEVVMDRHKRLVVNNASDYYLISTASLRTPVXXT

SEQ ID NO: 60972 - protein, 32 aa, Artificial Sequence
  GFR-binding peptide
  MOD_RES (32), (32): Xaa is C or S
RDVVMGRHKRLIIQQKDNYYLMSTASMKTPTX

SEQ ID NO: 60973 - protein, 38 aa, Artificial Sequence
  GFR-binding peptide
  MOD_RES (34), (35): Xaa is C or S
  MOD_RES (12), (13), (14), (15), (16): Xaa is A or G
  MOD_RES (17), (18), (19), (20): Xaa is A or G or is absent
SEVTMNEYKFKXXXXXXXXXLYLISIPEMKEPVXXPEP

SEQ ID NO: 60974 - protein, 41 aa, Artificial Sequence; identical to SEQ ID NO: 5331
  GFR-binding peptide
  MOD_RES (1), (3), (37), (38): Xaa is C or S
  MOD_RES (15), (16), (17), (18), (19): Xaa is A or G
  MOD_RES (20), (21), (22), (23): Xaa is A or G or is absent

SEQ ID NO: 60975 - protein, 35 aa, Artificial Sequence; identical to SEQ ID NO: 26455
  GFR-binding peptide
  MOD_RES (31), (32): Xaa is C or S

SEQ ID NO: 60976 - protein, 36 aa, Artificial Sequence; identical to SEQ ID NO: 26456
  GFR-binding peptide
  MOD_RES (1), (3): Xaa is C or S
  MOD_RES (15), (16), (17), (18), (19): Xaa is A or G
  MOD_RES (20), (21), (22), (23): Xaa is A or G or is absent

SEQ ID NO: 60977 - protein, 34 aa, Artificial Sequence
  GFR-binding peptide
  MOD_RES (1), (3), (34): Xaa is C or S
XKXSKVIMPIKGYIKPTKGIFYLINIPSLDQSVX

SEQ ID NO: 60978 - protein, 37 aa, Artificial Sequence
  GFR-binding peptide
  MOD_RES (1), (32), (33): Xaa is C or S
XEEVIMYHYKLLLVRGNDKYLMSIPSTKVPAXXTSPV

SEQ ID NO: 60979 - protein, 31 aa, Artificial Sequence; identical to SEQ ID NO: 26460
  GFR-binding peptide

SEQ ID NO: 60980 - protein, 38 aa, Artificial Sequence
  GFR-binding peptide
  MOD_RES (33), (34): Xaa is C or S
  MOD_RES (11), (12), (13), (14), (15): Xaa is A or G
  MOD_RES (16), (17), (18), (19): Xaa is A or G or is absent
EEVIMEYKFKXXXXXXXXXLYLMSIPETKVPAXXTSPV

SEQ ID NO: 60981 - protein, 37 aa, Artificial Sequence; identical to SEQ ID NO: 31376
  GFR-binding peptide
  MOD_RES (34), (34): Xaa is C or S
  MOD_RES (12), (13), (14), (15), (16): Xaa is A or G
  MOD_RES (17), (18), (19), (20): Xaa is A or G or is absent

SEQ ID NO: 60982 - protein, 37 aa, Artificial Sequence
  GFR-binding peptide
  MOD_RES (1), (3), (35), (36): Xaa is C or S
XGXRDVVMGEYKFKIIQQKDNLYLMSIPEMKTPTXXP

SEQ ID NO: 60983 - protein, 38 aa, Artificial Sequence; identical to SEQ ID NO: 5338
  GFR-binding peptide
  MOD_RES (1), (3), (35), (36): Xaa is C or S

SEQ ID NO: 60984 - protein, 40 aa, Artificial Sequence; identical to SEQ ID NO: 26468
  GFR-binding peptide
  MOD_RES (2), (34), (35): Xaa is C or S

SEQ ID NO: 60985 - protein, 39 aa, Artificial Sequence; identical to SEQ ID NO: 5342
  GFR-binding peptide
  MOD_RES (2), (4), (36): Xaa is C or S

SEQ ID NO: 60986 - protein, 38 aa, Artificial Sequence; identical to SEQ ID NO: 5344
  GFR-binding peptide
  MOD_RES (1), (3), (35), (36): Xaa is C or S

SEQ ID NO: 60987 - protein, 39 aa, Artificial Sequence; identical to SEQ ID NO: 31387
  GFR-binding peptide
  MOD_RES (1), (3), (35), (36): Xaa is C or S

SEQ ID NO: 60988 - protein, 40 aa, Artificial Sequence
  GFR-binding peptide
  MOD_RES (1), (3), (36), (37): Xaa is C or S
  MOD_RES (14), (15), (16), (17), (18): Xaa is A or G
  MOD_RES (19), (20), (21), (22): Xaa is A or G or is absent
XGXEEVIMYHYKLXXXXXXXXXKYLMSIPSTKVPAXXTSP

SEQ ID NO: 60989 - protein, 37 aa, Artificial Sequence; identical to SEQ ID NO: 26473
  GFR-binding peptide
  MOD_RES (2), (34), (35): Xaa is C or S

SEQ ID NO: 60990 - protein, 34 aa, Artificial Sequence; identical to SEQ ID NO: 31392
  GFR-binding peptide
  MOD_RES (32), (33): Xaa is C or S

SEQ ID NO: 60991 - protein, 36 aa, Artificial Sequence
  GFR-binding peptide
  MOD_RES (33), (34): Xaa is C or S
  MOD_RES (11), (12), (13), (14), (15): Xaa is A or G
  MOD_RES (16), (17), (18), (19): Xaa is A or G or is absent
SVAMGRHKRLXXXXXXXXXYYLISTASLKTPVXXAK

SEQ ID NO: 60992 - protein, 39 aa, Artificial Sequence; identical to SEQ ID NO: 5348
  GFR-binding peptide
  MOD_RES (1), (3), (35), (36): Xaa is C or S

SEQ ID NO: 60993 - protein, 44 aa, Artificial Sequence; identical to SEQ ID NO: 5349
  GFR-binding peptide
  MOD_RES (2), (4), (38), (39): Xaa is C or S
  MOD_RES (16), (17), (18), (19), (20): Xaa is A or G
  MOD_RES (21), (22), (23), (24): Xaa is A or G or is absent

SEQ ID NO: 60994 - protein, 37 aa, Artificial Sequence; identical to SEQ ID NO: 56303
  GFR-binding peptide
  MOD_RES (1), (35), (36): Xaa is C or S
  MOD_RES (13), (14), (15), (16), (17): Xaa is A or G
  MOD_RES (18), (19), (20), (21): Xaa is A or G or is absent

SEQ ID NO: 60995 - protein, 39 aa, Artificial Sequence; identical to SEQ ID NO: 31398
  GFR-binding peptide
  MOD_RES (2), (4), (38), (39): Xaa is C or S
  MOD_RES (16), (17), (18), (19), (20): Xaa is A or G
  MOD_RES (21), (22), (23), (24): Xaa is A or G or is absent

SEQ ID NO: 60996 - protein, 33 aa, Artificial Sequence; identical to SEQ ID NO: 5351
  GFR-binding peptide
  MOD_RES (31), (32): Xaa is C or S

SEQ ID NO: 60997 - protein, 40 aa, Artificial Sequence; identical to SEQ ID NO: 5355
  GFR-binding peptide
  MOD_RES (1), (35), (36): Xaa is C or S
  MOD_RES (13), (14), (15), (16), (17): Xaa is A or G
  MOD_RES (18), (19), (20), (21): Xaa is A or G or is absent

SEQ ID NO: 60998 - protein, 35 aa, Artificial Sequence; identical to SEQ ID NO: 5361
  GFR-binding peptide
  MOD_RES (32), (33): Xaa is C or S

SEQ ID NO: 60999 - protein, 35 aa, Artificial Sequence
  GFR-binding peptide
  MOD_RES (1), (33), (34): Xaa is C or S
XSEVTMNPIKGYVVNKNEDFYLINIPSMKEPVXXP

SEQ ID NO: 61000 - protein, 35 aa, Artificial Sequence; identical to SEQ ID NO: 5362
  GFR-binding peptide
  MOD_RES (31), (32): Xaa is C or S

SEQ ID NO: 61001 - protein, 35 aa, Artificial Sequence; identical to SEQ ID NO: 31409
  GFR-binding peptide
  MOD_RES (33), (34): Xaa is C or S

SEQ ID NO: 61002 - protein, 40 aa, Artificial Sequence; identical to SEQ ID NO: 26489
  GFR-binding peptide
  MOD_RES (1), (3), (37), (38): Xaa is C or S
  MOD_RES (15), (16), (17), (18), (19): Xaa is A or G
  MOD_RES (20), (21), (22), (23): Xaa is A or G or is absent

SEQ ID NO: 61003 - protein, 42 aa, Artificial Sequence; identical to SEQ ID NO: 31410
  GFR-binding peptide
  MOD_RES (1), (36), (37): Xaa is C or S
  MOD_RES (14), (15), (16), (17), (18): Xaa is A or G
  MOD_RES (19), (20), (21), (22): Xaa is A or G or is absent

SEQ ID NO: 61004 - protein, 38 aa, Artificial Sequence
  GFR-binding peptide
  MOD_RES (1), (3), (37), (38): Xaa is C or S
  MOD_RES (15), (16), (17), (18), (19): Xaa is A or G
  MOD_RES (20), (21), (22), (23): Xaa is A or G or is absent
XGXAEVVMDRHKRLXXXXXXXXXYYLISTASLRAPVXX

SEQ ID NO: 61005 - protein, 32 aa, Artificial Sequence; identical to SEQ ID NO: 26490
  GFR-binding peptide
  MOD_RES (11), (12), (13), (14), (15): Xaa is A or G
  MOD_RES (16), (17), (18), (19): Xaa is A or G or is absent

SEQ ID NO: 61006 - protein, 38 aa, Artificial Sequence
  GFR-binding peptide
  MOD_RES (2), (33), (34): Xaa is C or S
KXSKVVMPIKGYVKPTRGVFYLINIPSLDQPVXXPSAS

SEQ ID NO: 61007 - protein, 37 aa, Artificial Sequence; identical to SEQ ID NO: 26492
  GFR-binding peptide
  MOD_RES (31), (32): Xaa is C or S

SEQ ID NO: 61008 - protein, 39 aa, Artificial Sequence
  GFR-binding peptide
  MOD_RES (2), (4), (35), (36): Xaa is C or S
SXKXSKVVMPIKGYVKPTRGVFYLINIPSLDQPVXXPSA

SEQ ID NO: 61009 - protein, 37 aa, Artificial Sequence; identical to SEQ ID NO: 26495
  GFR-binding peptide
  MOD_RES (1), (35), (36): Xaa is C or S
  MOD_RES (13), (14), (15), (16), (17): Xaa is A or G
  MOD_RES (18), (19), (20), (21): Xaa is A or G or is absent

SEQ ID NO: 61010 - protein, 41 aa, Artificial Sequence; identical to SEQ ID NO: 5365
  GFR-binding peptide
  MOD_RES (1), (35), (36): Xaa is C or S
  MOD_RES (13), (14), (15), (16), (17): Xaa is A or G
  MOD_RES (18), (19), (20), (21): Xaa is A or G or is absent

SEQ ID NO: 61011 - protein, 34 aa, Artificial Sequence; identical to SEQ ID NO: 5367
  GFR-binding peptide
  MOD_RES (33), (34): Xaa is C or S
  MOD_RES (11), (12), (13), (14), (15): Xaa is A or G
  MOD_RES (16), (17), (18), (19): Xaa is A or G or is absent

SEQ ID NO: 61012 - protein, 39 aa, Artificial Sequence; identical to SEQ ID NO: 12801
  GFR-binding peptide
  MOD_RES (34), (35): Xaa is C or S
  MOD_RES (12), (13), (14), (15), (16): Xaa is A or G
  MOD_RES (17), (18), (19), (20): Xaa is A or G or is absent

SEQ ID NO: 61013 - protein, 35 aa, Artificial Sequence; identical to SEQ ID NO: 31418
  GFR-binding peptide
  MOD_RES (1), (3), (34), (35): Xaa is C or S

SEQ ID NO: 61014 - protein, 35 aa, Artificial Sequence; identical to SEQ ID NO: 5369
  GFR-binding peptide
  MOD_RES (33), (34): Xaa is C or S

SEQ ID NO: 61015 - protein, 33 aa, Artificial Sequence; identical to SEQ ID NO: 5370
  GFR-binding peptide
  MOD_RES (1), (33): Xaa is C or S

SEQ ID NO: 61016 - protein, 34 aa, Artificial Sequence; identical to SEQ ID NO: 5373
  GFR-binding peptide
  MOD_RES (33), (34): Xaa is C or S
  MOD_RES (11), (12), (13), (14), (15): Xaa is A or G
  MOD_RES (16), (17), (18), (19): Xaa is A or G or is absent

SEQ ID NO: 61017 - protein, 42 aa, Artificial Sequence
  GFR-binding peptide
  MOD_RES (1), (3), (37), (38): Xaa is C or S
  MOD_RES (15), (16), (17), (18), (19): Xaa is A or G
  MOD_RES (20), (21), (22), (23): Xaa is A or G or is absent
XAXSEVTMNRHKRLXXXXXXXXXYYLISTASMKEPVXXPEPI

SEQ ID NO: 61018 - protein, 40 aa, Artificial Sequence; identical to SEQ ID NO: 26506
  GFR-binding peptide
  MOD_RES (1), (34), (35): Xaa is C or S
  MOD_RES (12), (13), (14), (15), (16): Xaa is A or G
  MOD_RES (17), (18), (19), (20): Xaa is A or G or is absent

SEQ ID NO: 61019 - protein, 33 aa, Artificial Sequence
  GFR-binding peptide
  MOD_RES (32), (33): Xaa is C or S
SEVVMDEYKFKVVNNASDLYLISIPELRTPVXX

SEQ ID NO: 61020 - protein, 37 aa, Artificial Sequence
  GFR-binding peptide
  MOD_RES (2), (33), (34): Xaa is C or S
KXSRVIMPIKGYVKPKRGVFYLINIPSLAQPVXXPAA

SEQ ID NO: 61021 - protein, 39 aa, Artificial Sequence
  GFR-binding peptide
  MOD_RES (2), (4), (37), (38): Xaa is C or S
  MOD_RES (15), (16), (17), (18), (19): Xaa is A or G
  MOD_RES (20), (21), (22), (23): Xaa is A or G or is absent
SXKXSKVVMPIKGYXXXXXXXXXFYLINIPSLDQPVXXP

SEQ ID NO: 61022 - protein, 35 aa, Artificial Sequence; identical to SEQ ID NO: 26511
  GFR-binding peptide
  MOD_RES (31), (32): Xaa is C or S

SEQ ID NO: 61023 - protein, 38 aa, Artificial Sequence; identical to SEQ ID NO: 31429
  GFR-binding peptide
  MOD_RES (1), (3), (35), (36): Xaa is C or S

SEQ ID NO: 61024 - protein, 39 aa, Artificial Sequence
  GFR-binding peptide
  MOD_RES (1), (3), (36), (37): Xaa is C or S
  MOD_RES (14), (15), (16), (17), (18): Xaa is A or G
  MOD_RES (19), (20), (21), (22): Xaa is A or G or is absent
XKXSKVIMPIKGYXXXXXXXXXFYLINIPSLDQSVXXPS

SEQ ID NO: 61025 - protein, 34 aa, Artificial Sequence
  GFR-binding peptide
  MOD_RES (1), (3), (34): Xaa is C or S
XGXEEVIMRHKRLLLVRGNDYYLMSTASTKVPAX

SEQ ID NO: 61026 - protein, 31 aa, Artificial Sequence
  GFR-binding peptide
ESVAMGRHKRLYTVVGKDYYLISTASLKTPV

SEQ ID NO: 61027 - protein, 43 aa, Artificial Sequence; identical to SEQ ID NO: 26514
  GFR-binding peptide
  MOD_RES (2), (4), (38), (39): Xaa is C or S
  MOD_RES (16), (17), (18), (19), (20): Xaa is A or G
  MOD_RES (21), (22), (23), (24): Xaa is A or G or is absent

SEQ ID NO: 61028 - protein, 34 aa, Artificial Sequence; identical to SEQ ID NO: 5385
  GFR-binding peptide
  MOD_RES (1), (1): Xaa is C or S
  MOD_RES (13), (14), (15), (16), (17): Xaa is A or G
  MOD_RES (18), (19), (20), (21): Xaa is A or G or is absent

SEQ ID NO: 61029 - protein, 32 aa, Artificial Sequence; identical to SEQ ID NO: 5386
  GFR-binding peptide
  MOD_RES (11), (12), (13), (14), (15): Xaa is A or G
  MOD_RES (16), (17), (18), (19): Xaa is A or G or is absent

SEQ ID NO: 61030 - protein, 39 aa, Artificial Sequence
  GFR-binding peptide
  MOD_RES (2), (4), (36), (37): Xaa is C or S
RXAXSEVTMNYHYKLVVNKNEDKYLISIPSMKEPVXXPE

SEQ ID NO: 61031 - protein, 40 aa, Artificial Sequence
  GFR-binding peptide
  MOD_RES (1), (3), (37), (38): Xaa is C or S
  MOD_RES (15), (16), (17), (18), (19): Xaa is A or G
  MOD_RES (20), (21), (22), (23): Xaa is A or G or is absent
XGXRDVVMGYHYKLXXXXXXXXXKYLMSIPSMKTPTXXPG

SEQ ID NO: 61032 - protein, 35 aa, Artificial Sequence; identical to SEQ ID NO: 5388
  GFR-binding peptide
  MOD_RES (2), (35): Xaa is C or S
  MOD_RES (13), (14), (15), (16), (17): Xaa is A or G
  MOD_RES (18), (19), (20), (21): Xaa is A or G or is absent

SEQ ID NO: 61033 - protein, 40 aa, Artificial Sequence; identical to SEQ ID NO: 5389
  GFR-binding peptide
  MOD_RES (1), (3), (35), (36): Xaa is C or S

SEQ ID NO: 61034 - protein, 37 aa, Artificial Sequence; identical to SEQ ID NO: 5392
  GFR-binding peptide
  MOD_RES (1), (35), (36): Xaa is C or S
  MOD_RES (13), (14), (15), (16), (17): Xaa is A or G
  MOD_RES (18), (19), (20), (21): Xaa is A or G or is absent

SEQ ID NO: 61035 - protein, 39 aa, Artificial Sequence; identical to SEQ ID NO: 26522
  GFR-binding peptide
  MOD_RES (2), (4), (36), (37): Xaa is C or S

SEQ ID NO: 61036 - protein, 42 aa, Artificial Sequence; identical to SEQ ID NO: 12830
  GFR-binding peptide
  MOD_RES (2), (4), (36), (37): Xaa is C or S

SEQ ID NO: 61037 - protein, 43 aa, Artificial Sequence; identical to SEQ ID NO: 31440
  GFR-binding peptide
  MOD_RES (2), (4), (38), (39): Xaa is C or S
  MOD_RES (16), (17), (18), (19), (20): Xaa is A or G
  MOD_RES (21), (22), (23), (24): Xaa is A or G or is absent

SEQ ID NO: 61038 - protein, 41 aa, Artificial Sequence; identical to SEQ ID NO: 5399
  GFR-binding peptide
  MOD_RES (2), (37), (38): Xaa is C or S
  MOD_RES (15), (16), (17), (18), (19): Xaa is A or G
  MOD_RES (20), (21), (22), (23): Xaa is A or G or is absent

SEQ ID NO: 61039 - protein, 40 aa, Artificial Sequence; identical to SEQ ID NO: 5400
  GFR-binding peptide
  MOD_RES (1), (35), (36): Xaa is C or S
  MOD_RES (13), (14), (15), (16), (17): Xaa is A or G
  MOD_RES (18), (19), (20), (21): Xaa is A or G or is absent

SEQ ID NO: 61040 - protein, 36 aa, Artificial Sequence; identical to SEQ ID NO: 26524
  GFR-binding peptide
  MOD_RES (32), (33): Xaa is C or S

SEQ ID NO: 61041 - protein, 33 aa, Artificial Sequence; identical to SEQ ID NO: 26525
  GFR-binding peptide
  MOD_RES (2), (2): Xaa is C or S

SEQ ID NO: 61042 - protein, 37 aa, Artificial Sequence; identical to SEQ ID NO: 5404
  GFR-binding peptide
  MOD_RES (2), (4), (35), (36): Xaa is C or S

SEQ ID NO: 61043 - protein, 37 aa, Artificial Sequence; identical to SEQ ID NO: 26529
  GFR-binding peptide
  MOD_RES (2), (4), (36), (37): Xaa is C or S

SEQ ID NO: 61044 - protein, 44 aa, Artificial Sequence; identical to SEQ ID NO: 26532
  GFR-binding peptide
  MOD_RES (2), (4), (38), (39): Xaa is C or S
  MOD_RES (16), (17), (18), (19), (20): Xaa is A or G
  MOD_RES (21), (22), (23), (24): Xaa is A or G or is absent

SEQ ID NO: 61045 - protein, 33 aa, Artificial Sequence; identical to SEQ ID NO: 31452
  GFR-binding peptide
  MOD_RES (1), (1): Xaa is C or S
  MOD_RES (12), (13), (14), (15), (16): Xaa is A or G
  MOD_RES (17), (18), (19), (20): Xaa is A or G or is absent

SEQ ID NO: 61046 - protein, 41 aa, Artificial Sequence
  GFR-binding peptide
  MOD_RES (2), (35), (36): Xaa is C or S
  MOD_RES (13), (14), (15), (16), (17): Xaa is A or G
  MOD_RES (18), (19), (20), (21): Xaa is A or G or is absent
GXEEVIMYHYKLXXXXXXXXXKYLMSIPSTKVPAXXTSPVR

SEQ ID NO: 61047 - protein, 34 aa, Artificial Sequence
  GFR-binding peptide
  MOD_RES (34), (34): Xaa is C or S
  MOD_RES (12), (13), (14), (15), (16): Xaa is A or G
  MOD_RES (17), (18), (19), (20): Xaa is A or G or is absent
ESVAMGRHKRLXXXXXXXXXYYLISTASLKTPVX

SEQ ID NO: 61048 - protein, 37 aa, Artificial Sequence
  GFR-binding peptide
  MOD_RES (2), (4): Xaa is C or S
  MOD_RES (16), (17), (18), (19), (20): Xaa is A or G
  MOD_RES (21), (22), (23), (24): Xaa is A or G or is absent
RXAXSEVTMNEYKFKXXXXXXXXXLYLISIPEMKEPV

SEQ ID NO: 61049 - protein, 36 aa, Artificial Sequence; identical to SEQ ID NO: 31460
  GFR-binding peptide
  MOD_RES (1), (33), (34): Xaa is C or S

SEQ ID NO: 61050 - protein, 39 aa, Artificial Sequence; identical to SEQ ID NO: 5411
  GFR-binding peptide
  MOD_RES (1), (3), (36), (37): Xaa is C or S
  MOD_RES (14), (15), (16), (17), (18): Xaa is A or G
  MOD_RES (19), (20), (21), (22): Xaa is A or G or is absent

SEQ ID NO: 61051 - protein, 38 aa, Artificial Sequence; identical to SEQ ID NO: 5412
  GFR-binding peptide
  MOD_RES (2), (35), (36): Xaa is C or S
  MOD_RES (13), (14), (15), (16), (17): Xaa is A or G
  MOD_RES (18), (19), (20), (21): Xaa is A or G or is absent

SEQ ID NO: 61052 - protein, 38 aa, Artificial Sequence
  GFR-binding peptide
  MOD_RES (32), (33): Xaa is C or S
RDVVMGEYKFKIIQQKDNLYLMSIPEMKTPTXXPGASG

SEQ ID NO: 61053 - protein, 34 aa, Artificial Sequence; identical to SEQ ID NO: 26539
  GFR-binding peptide
  MOD_RES (2), (33), (34): Xaa is C or S

SEQ ID NO: 61054 - protein, 32 aa, Artificial Sequence; identical to SEQ ID NO: 31466
  GFR-binding peptide
  MOD_RES (31), (32): Xaa is C or S

SEQ ID NO: 61055 - protein, 40 aa, Artificial Sequence; identical to SEQ ID NO: 26542
  GFR-binding peptide
  MOD_RES (2), (4), (38), (39): Xaa is C or S
  MOD_RES (16), (17), (18), (19), (20): Xaa is A or G
  MOD_RES (21), (22), (23), (24): Xaa is A or G or is absent

SEQ ID NO: 61056 - protein, 38 aa, Artificial Sequence; identical to SEQ ID NO: 5416
  GFR-binding peptide
  MOD_RES (2), (36), (37): Xaa is C or S
  MOD_RES (14), (15), (16), (17), (18): Xaa is A or G
  MOD_RES (19), (20), (21), (22): Xaa is A or G or is absent

SEQ ID NO: 61057 - protein, 42 aa, Artificial Sequence; identical to SEQ ID NO: 26544
  GFR-binding peptide
  MOD_RES (2), (36), (37): Xaa is C or S
  MOD_RES (14), (15), (16), (17), (18): Xaa is A or G
  MOD_RES (19), (20), (21), (22): Xaa is A or G or is absent

SEQ ID NO: 61058 - protein, 35 aa, Artificial Sequence; identical to SEQ ID NO: 26545
  GFR-binding peptide
  MOD_RES (33), (34): Xaa is C or S
  MOD_RES (11), (12), (13), (14), (15): Xaa is A or G
  MOD_RES (16), (17), (18), (19): Xaa is A or G or is absent

SEQ ID NO: 61059 - protein, 36 aa, Artificial Sequence; identical to SEQ ID NO: 5418
  GFR-binding peptide
  MOD_RES (1), (3), (36): Xaa is C or S
  MOD_RES (14), (15), (16), (17), (18): Xaa is A or G
  MOD_RES (19), (20), (21), (22): Xaa is A or G or is absent

SEQ ID NO: 61060 - protein, 35 aa, Artificial Sequence
  GFR-binding peptide
  MOD_RES (2), (35): Xaa is C or S
  MOD_RES (13), (14), (15), (16), (17): Xaa is A or G
  MOD_RES (18), (19), (20), (21): Xaa is A or G or is absent
GXEEVIMEYKFKXXXXXXXXXLYLMSIPETKVPAX

SEQ ID NO: 61061 - protein, 39 aa, Artificial Sequence; identical to SEQ ID NO: 5419
  GFR-binding peptide
  MOD_RES (33), (34): Xaa is C or S
  MOD_RES (11), (12), (13), (14), (15): Xaa is A or G
  MOD_RES (16), (17), (18), (19): Xaa is A or G or is absent

SEQ ID NO: 61062 - protein, 34 aa, Artificial Sequence; identical to SEQ ID NO: 31471
  GFR-binding peptide
  MOD_RES (2), (4): Xaa is C or S

SEQ ID NO: 61063 - protein, 35 aa, Artificial Sequence; identical to SEQ ID NO: 26549
  GFR-binding peptide
  MOD_RES (2), (4), (35): Xaa is C or S

SEQ ID NO: 61064 - protein, 38 aa, Artificial Sequence; identical to SEQ ID NO: 5424
  GFR-binding peptide
  MOD_RES (2), (4), (37), (38): Xaa is C or S

SEQ ID NO: 61065 - protein, 35 aa, Artificial Sequence
  GFR-binding peptide
  MOD_RES (2), (35): Xaa is C or S
  MOD_RES (13), (14), (15), (16), (17): Xaa is A or G
  MOD_RES (18), (19), (20), (21): Xaa is A or G or is absent
KXSKVIMPIKGYXXXXXXXXXFYLINIPSLDQSVX

SEQ ID NO: 61066 - protein, 36 aa, Artificial Sequence; identical to SEQ ID NO: 5428
  GFR-binding peptide
  MOD_RES (34), (35): Xaa is C or S
  MOD_RES (12), (13), (14), (15), (16): Xaa is A or G
  MOD_RES (17), (18), (19), (20): Xaa is A or G or is absent

SEQ ID NO: 61067 - protein, 34 aa, Artificial Sequence; identical to SEQ ID NO: 5429
  GFR-binding peptide
  MOD_RES (1), (32), (33): Xaa is C or S

SEQ ID NO: 61068 - protein, 40 aa, Artificial Sequence; identical to SEQ ID NO: 26553
  GFR-binding peptide
  MOD_RES (2), (35), (36): Xaa is C or S

SEQ ID NO: 61069 - protein, 43 aa, Artificial Sequence; identical to SEQ ID NO: 26554
  GFR-binding peptide
  MOD_RES (1), (3), (37), (38): Xaa is C or S
  MOD_RES (15), (16), (17), (18), (19): Xaa is A or G
  MOD_RES (20), (21), (22), (23): Xaa is A or G or is absent

SEQ ID NO: 61070 - protein, 44 aa, Artificial Sequence; identical to SEQ ID NO: 5431
  GFR-binding peptide
  MOD_RES (1), (3), (38), (39): Xaa is C or S
  MOD_RES (16), (17), (18), (19), (20): Xaa is A or G
  MOD_RES (21), (22), (23), (24): Xaa is A or G or is absent

SEQ ID NO: 61071 - protein, 40 aa, Artificial Sequence
  GFR-binding peptide
  MOD_RES (2), (4), (38), (39): Xaa is C or S
  MOD_RES (16), (17), (18), (19), (20): Xaa is A or G
  MOD_RES (21), (22), (23), (24): Xaa is A or G or is absent
RXAXSEVTMNRHKRLXXXXXXXXXYYLISTASMKEPVXXP

SEQ ID NO: 61072 - protein, 39 aa, Artificial Sequence; identical to SEQ ID NO: 31482
  GFR-binding peptide
  MOD_RES (2), (36), (37): Xaa is C or S
  MOD_RES (14), (15), (16), (17), (18): Xaa is A or G
  MOD_RES (19), (20), (21), (22): Xaa is A or G or is absent

SEQ ID NO: 61073 - protein, 34 aa, Artificial Sequence; identical to SEQ ID NO: 56407
  GFR-binding peptide
  MOD_RES (33), (34): Xaa is C or S
  MOD_RES (11), (12), (13), (14), (15): Xaa is A or G
  MOD_RES (16), (17), (18), (19): Xaa is A or G or is absent

SEQ ID NO: 61074 - protein, 38 aa, Artificial Sequence; identical to SEQ ID NO: 5434
  GFR-binding peptide
  MOD_RES (2), (36), (37): Xaa is C or S
  MOD_RES (14), (15), (16), (17), (18): Xaa is A or G
  MOD_RES (19), (20), (21), (22): Xaa is A or G or is absent

SEQ ID NO: 61075 - protein, 33 aa, Artificial Sequence; identical to SEQ ID NO: 5436
  GFR-binding peptide
  MOD_RES (1), (33): Xaa is C or S

SEQ ID NO: 61076 - protein, 33 aa, Artificial Sequence; identical to SEQ ID NO: 5438
  GFR-binding peptide
  MOD_RES (33), (33): Xaa is C or S
  MOD_RES (11), (12), (13), (14), (15): Xaa is A or G
  MOD_RES (16), (17), (18), (19): Xaa is A or G or is absent

SEQ ID NO: 61077 - protein, 35 aa, Artificial Sequence; identical to SEQ ID NO: 31491
  GFR-binding peptide
  MOD_RES (2), (34), (35): Xaa is C or S

SEQ ID NO: 61078 - protein, 38 aa, Artificial Sequence
  GFR-binding peptide
  MOD_RES (33), (34): Xaa is C or S
  MOD_RES (11), (12), (13), (14), (15): Xaa is A or G
  MOD_RES (16), (17), (18), (19): Xaa is A or G or is absent
EEVIMYHYKLXXXXXXXXXKYLMSIPSTKVPAXXTSPV

SEQ ID NO: 61079 - protein, 41 aa, Artificial Sequence; identical to SEQ ID NO: 31492
  GFR-binding peptide
  MOD_RES (2), (4), (38), (39): Xaa is C or S
  MOD_RES (16), (17), (18), (19), (20): Xaa is A or G
  MOD_RES (21), (22), (23), (24): Xaa is A or G or is absent

SEQ ID NO: 61080 - protein, 35 aa, Artificial Sequence
  GFR-binding peptide
  MOD_RES (33), (34): Xaa is C or S
  MOD_RES (11), (12), (13), (14), (15): Xaa is A or G
  MOD_RES (16), (17), (18), (19): Xaa is A or G or is absent
EVTMNRYKKLXXXXXXXXXFYLISIANMKEPVXXP

SEQ ID NO: 61081 - protein, 40 aa, Artificial Sequence; identical to SEQ ID NO: 5446
  GFR-binding peptide
  MOD_RES (1), (34), (35): Xaa is C or S
  MOD_RES (12), (13), (14), (15), (16): Xaa is A or G
  MOD_RES (17), (18), (19), (20): Xaa is A or G or is absent

SEQ ID NO: 61082 - protein, 35 aa, Artificial Sequence; identical to SEQ ID NO: 5448
  GFR-binding peptide
  MOD_RES (1), (3): Xaa is C or S
  MOD_RES (14), (15), (16), (17), (18): Xaa is A or G
  MOD_RES (19), (20), (21), (22): Xaa is A or G or is absent

SEQ ID NO: 61083 - protein, 34 aa, Artificial Sequence; identical to SEQ ID NO: 5449
  GFR-binding peptide
  MOD_RES (2), (34): Xaa is C or S

SEQ ID NO: 61084 - protein, 33 aa, Artificial Sequence; identical to SEQ ID NO: 5450
  GFR-binding peptide
  MOD_RES (1), (32), (33): Xaa is C or S

SEQ ID NO: 61085 - protein, 36 aa, Artificial Sequence; identical to SEQ ID NO: 31502
  GFR-binding peptide
  MOD_RES (2), (4), (36): Xaa is C or S

SEQ ID NO: 61086 - protein, 34 aa, Artificial Sequence
  GFR-binding peptide
  MOD_RES (2), (2): Xaa is C or S
  MOD_RES (13), (14), (15), (16), (17): Xaa is A or G
  MOD_RES (18), (19), (20), (21): Xaa is A or G or is absent
KXSKVIMPIKGYXXXXXXXXXFYLINIPSLDQSV

SEQ ID NO: 61087 - protein, 39 aa, Artificial Sequence; identical to SEQ ID NO: 5453
  GFR-binding peptide
  MOD_RES (2), (4), (38), (39): Xaa is C or S
  MOD_RES (16), (17), (18), (19), (20): Xaa is A or G
  MOD_RES (21), (22), (23), (24): Xaa is A or G or is absent

SEQ ID NO: 61088 - protein, 36 aa, Artificial Sequence; identical to SEQ ID NO: 5454
  GFR-binding peptide
  MOD_RES (32), (33): Xaa is C or S

SEQ ID NO: 61089 - protein, 39 aa, Artificial Sequence; identical to SEQ ID NO: 26568
  GFR-binding peptide
  MOD_RES (2), (34), (35): Xaa is C or S

SEQ ID NO: 61090 - protein, 40 aa, Artificial Sequence; identical to SEQ ID NO: 5458
  GFR-binding peptide
  MOD_RES (34), (35): Xaa is C or S
  MOD_RES (12), (13), (14), (15), (16): Xaa is A or G
  MOD_RES (17), (18), (19), (20): Xaa is A or G or is absent

SEQ ID NO: 61091 - protein, 30 aa, Artificial Sequence
  GFR-binding peptide
EEVIMEYKFKLLVRGNDLYLMSIPETKVPA

SEQ ID NO: 61092 - protein, 32 aa, Artificial Sequence
  GFR-binding peptide
  MOD_RES (32), (32): Xaa is C or S
SEVTMNRHKRLVVNKNEDYYLISTASMKEPVX

SEQ ID NO: 61093 - protein, 38 aa, Artificial Sequence; identical to SEQ ID NO: 5461
  GFR-binding peptide
  MOD_RES (1), (3), (37): Xaa is C or S
  MOD_RES (15), (16), (17), (18), (19): Xaa is A or G
  MOD_RES (20), (21), (22), (23): Xaa is A or G or is absent

SEQ ID NO: 61094 - protein, 40 aa, Artificial Sequence
  GFR-binding peptide
  MOD_RES (2), (4), (37), (38): Xaa is C or S
  MOD_RES (15), (16), (17), (18), (19): Xaa is A or G
  MOD_RES (20), (21), (22), (23): Xaa is A or G or is absent
LXGXEEVIMRHKRLXXXXXXXXXYYLMSTASTKVPAXXTS

SEQ ID NO: 61095 - protein, 37 aa, Artificial Sequence; identical to SEQ ID NO: 5462
  GFR-binding peptide
  MOD_RES (1), (34), (35): Xaa is C or S
  MOD_RES (12), (13), (14), (15), (16): Xaa is A or G
  MOD_RES (17), (18), (19), (20): Xaa is A or G or is absent

SEQ ID NO: 61096 - protein, 35 aa, Artificial Sequence
  GFR-binding peptide
  MOD_RES (31), (32): Xaa is C or S
EEVIMEYKFKLLVRGNDLYLMSIPETKVPAXXTSP

SEQ ID NO: 61097 - protein, 43 aa, Artificial Sequence; identical to SEQ ID NO: 5466
  GFR-binding peptide
  MOD_RES (2), (4), (37), (38): Xaa is C or S
  MOD_RES (15), (16), (17), (18), (19): Xaa is A or G
  MOD_RES (20), (21), (22), (23): Xaa is A or G or is absent

SEQ ID NO: 61098 - protein, 41 aa, Artificial Sequence; identical to SEQ ID NO: 5467
  GFR-binding peptide
  MOD_RES (2), (35), (36): Xaa is C or S
  MOD_RES (13), (14), (15), (16), (17): Xaa is A or G
  MOD_RES (18), (19), (20), (21): Xaa is A or G or is absent

SEQ ID NO: 61099 - protein, 31 aa, Artificial Sequence; identical to SEQ ID NO: 5468
  GFR-binding peptide
  MOD_RES (31), (31): Xaa is C or S

SEQ ID NO: 61100 - protein, 39 aa, Artificial Sequence
  GFR-binding peptide
  MOD_RES (33), (34): Xaa is C or S
  MOD_RES (11), (12), (13), (14), (15): Xaa is A or G
  MOD_RES (16), (17), (18), (19): Xaa is A or G or is absent
EVVMDRHKRLXXXXXXXXXYYLISTASLRTPVXXTPPTS

SEQ ID NO: 61101 - protein, 38 aa, Artificial Sequence; identical to SEQ ID NO: 31517
  GFR-binding peptide
  MOD_RES (2), (34), (35): Xaa is C or S

SEQ ID NO: 61102 - protein, 38 aa, Artificial Sequence; identical to SEQ ID NO: 5470
  GFR-binding peptide
  MOD_RES (33), (34): Xaa is C or S
  MOD_RES (11), (12), (13), (14), (15): Xaa is A or G
  MOD_RES (16), (17), (18), (19): Xaa is A or G or is absent

SEQ ID NO: 61103 - protein, 34 aa, Artificial Sequence; identical to SEQ ID NO: 26585
  GFR-binding peptide
  MOD_RES (33), (34): Xaa is C or S
  MOD_RES (11), (12), (13), (14), (15): Xaa is A or G
  MOD_RES (16), (17), (18), (19): Xaa is A or G or is absent

SEQ ID NO: 61104 - protein, 43 aa, Artificial Sequence; identical to SEQ ID NO: 5472
  GFR-binding peptide
  MOD_RES (1), (3), (37), (38): Xaa is C or S
  MOD_RES (15), (16), (17), (18), (19): Xaa is A or G
  MOD_RES (20), (21), (22), (23): Xaa is A or G or is absent

SEQ ID NO: 61105 - protein, 36 aa, Artificial Sequence; identical to SEQ ID NO: 5475
  GFR-binding peptide
  MOD_RES (1), (33): Xaa is C or S

SEQ ID NO: 61106 - protein, 44 aa, Artificial Sequence; identical to SEQ ID NO: 5477
  GFR-binding peptide
  MOD_RES (2), (4), (38), (39): Xaa is C or S
  MOD_RES (16), (17), (18), (19), (20): Xaa is A or G
  MOD_RES (21), (22), (23), (24): Xaa is A or G or is absent

SEQ ID NO: 61107 - protein, 39 aa, Artificial Sequence; identical to SEQ ID NO: 26589
  GFR-binding peptide
  MOD_RES (1), (3), (37), (38): Xaa is C or S
  MOD_RES (15), (16), (17), (18), (19): Xaa is A or G
  MOD_RES (20), (21), (22), (23): Xaa is A or G or is absent

SEQ ID NO: 61108 - protein, 40 aa, Artificial Sequence; identical to SEQ ID NO: 31525
  GFR-binding peptide
  MOD_RES (2), (34), (35): Xaa is C or S

SEQ ID NO: 61109 - protein, 35 aa, Artificial Sequence
  GFR-binding peptide
  MOD_RES (1), (3): Xaa is C or S
  MOD_RES (14), (15), (16), (17), (18): Xaa is A or G
  MOD_RES (19), (20), (21), (22): Xaa is A or G or is absent
XKXSKVIMPIKGYXXXXXXXXXFYLINIPSLDQSV

SEQ ID NO: 61110 - protein, 40 aa, Artificial Sequence; identical to SEQ ID NO: 31528
  GFR-binding peptide
  MOD_RES (2), (4), (39), (40): Xaa is C or S
  MOD_RES (17), (18), (19), (20), (21): Xaa is A or G
  MOD_RES (22), (23), (24), (25): Xaa is A or G or is absent

SEQ ID NO: 61111 - protein, 40 aa, Artificial Sequence; identical to SEQ ID NO: 26590
  GFR-binding peptide
  MOD_RES (2), (36), (37): Xaa is C or S
  MOD_RES (14), (15), (16), (17), (18): Xaa is A or G
  MOD_RES (19), (20), (21), (22): Xaa is A or G or is absent

SEQ ID NO: 61112 - protein, 36 aa, Artificial Sequence
  GFR-binding peptide
  MOD_RES (1), (35), (36): Xaa is C or S
  MOD_RES (13), (14), (15), (16), (17): Xaa is A or G
  MOD_RES (18), (19), (20), (21): Xaa is A or G or is absent
XESVAMGRHKRLXXXXXXXXXYYLISTASLKTPVXX

SEQ ID NO: 61113 - protein, 34 aa, Artificial Sequence; identical to SEQ ID NO: 5483
  GFR-binding peptide
  MOD_RES (2), (34): Xaa is C or S

SEQ ID NO: 61114 - protein, 36 aa, Artificial Sequence; identical to SEQ ID NO: 26593
  GFR-binding peptide
  MOD_RES (31), (32): Xaa is C or S

SEQ ID NO: 61115 - protein, 36 aa, Artificial Sequence; identical to SEQ ID NO: 5486
  GFR-binding peptide
  MOD_RES (2), (4), (35), (36): Xaa is C or S

SEQ ID NO: 61116 - protein, 43 aa, Artificial Sequence; identical to SEQ ID NO: 5487
  GFR-binding peptide
  MOD_RES (2), (4), (38), (39): Xaa is C or S
  MOD_RES (16), (17), (18), (19), (20): Xaa is A or G
  MOD_RES (21), (22), (23), (24): Xaa is A or G or is absent

SEQ ID NO: 61117 - protein, 41 aa, Artificial Sequence; identical to SEQ ID NO: 31533
  GFR-binding peptide
  MOD_RES (2), (4), (36), (37): Xaa is C or S

SEQ ID NO: 61118 - protein, 38 aa, Artificial Sequence; identical to SEQ ID NO: 26596
  GFR-binding peptide
  MOD_RES (1), (33), (34): Xaa is C or S

SEQ ID NO: 61119 - protein, 37 aa, Artificial Sequence; identical to SEQ ID NO: 31536
  GFR-binding peptide
  MOD_RES (33), (34): Xaa is C or S

SEQ ID NO: 61120 - protein, 43 aa, Artificial Sequence
  GFR-binding peptide
  MOD_RES (2), (4), (38), (39): Xaa is C or S
  MOD_RES (16), (17), (18), (19), (20): Xaa is A or G
  MOD_RES (21), (22), (23), (24): Xaa is A or G or is absent
RXGXAEVVMDRHKRLXXXXXXXXXYYLISTASLRAPVXXSAPA

SEQ ID NO: 61121 - protein, 36 aa, Artificial Sequence; identical to SEQ ID NO: 5491
  GFR-binding peptide
  MOD_RES (33), (34): Xaa is C or S
  MOD_RES (11), (12), (13), (14), (15): Xaa is A or G
  MOD_RES (16), (17), (18), (19): Xaa is A or G or is absent

SEQ ID NO: 61122 - protein, 33 aa, Artificial Sequence
  GFR-binding peptide
  MOD_RES (31), (32): Xaa is C or S
SRVIMPIKGYVKPKRGVFYLINIPSLAQPVXXP

SEQ ID NO: 61123 - protein, 34 aa, Artificial Sequence; identical to SEQ ID NO: 31538
  GFR-binding peptide
  MOD_RES (34), (34): Xaa is C or S
  MOD_RES (12), (13), (14), (15), (16): Xaa is A or G
  MOD_RES (17), (18), (19), (20): Xaa is A or G or is absent

SEQ ID NO: 61124 - protein, 34 aa, Artificial Sequence; identical to SEQ ID NO: 5493
  GFR-binding peptide
  MOD_RES (1), (3): Xaa is C or S

SEQ ID NO: 61125 - protein, 34 aa, Artificial Sequence; identical to SEQ ID NO: 26599
  GFR-binding peptide
  MOD_RES (1), (3): Xaa is C or S

SEQ ID NO: 61126 - protein, 30 aa, Artificial Sequence; identical to SEQ ID NO: 31547
  GFR-binding peptide

SEQ ID NO: 61127 - protein, 37 aa, Artificial Sequence; identical to SEQ ID NO: 31549
  GFR-binding peptide
  MOD_RES (1), (34), (35): Xaa is C or S

SEQ ID NO: 61128 - protein, 37 aa, Artificial Sequence
  GFR-binding peptide
  MOD_RES (1), (33), (34): Xaa is C or S
XSEVTMNEYKFKVVNKNEDLYLISIPEMKEPVXXPEP

SEQ ID NO: 61129 - protein, 42 aa, Artificial Sequence
  GFR-binding peptide
  MOD_RES (2), (4), (36), (37): Xaa is C or S
RXAXSEVTMNPIKGYVVNKNEDFYLINIPSMKEPVXXPEPIG

SEQ ID NO: 61130 - protein, 43 aa, Artificial Sequence; identical to SEQ ID NO: 31554
  GFR-binding peptide
  MOD_RES (1), (3), (38), (39): Xaa is C or S
  MOD_RES (16), (17), (18), (19), (20): Xaa is A or G
  MOD_RES (21), (22), (23), (24): Xaa is A or G or is absent

SEQ ID NO: 61131 - protein, 37 aa, Artificial Sequence; identical to SEQ ID NO: 5504
  GFR-binding peptide
  MOD_RES (1), (33), (34): Xaa is C or S

SEQ ID NO: 61132 - protein, 37 aa, Artificial Sequence; identical to SEQ ID NO: 26613
  GFR-binding peptide
  MOD_RES (34), (34): Xaa is C or S
  MOD_RES (12), (13), (14), (15), (16): Xaa is A or G
  MOD_RES (17), (18), (19), (20): Xaa is A or G or is absent

SEQ ID NO: 61133 - protein, 36 aa, Artificial Sequence; identical to SEQ ID NO: 26616
  GFR-binding peptide
  MOD_RES (1), (33), (34): Xaa is C or S

SEQ ID NO: 61134 - protein, 38 aa, Artificial Sequence; identical to SEQ ID NO: 26617
  GFR-binding peptide
  MOD_RES (35), (36): Xaa is C or S
  MOD_RES (13), (14), (15), (16), (17): Xaa is A or G
  MOD_RES (18), (19), (20), (21): Xaa is A or G or is absent

SEQ ID NO: 61135 - protein, 35 aa, Artificial Sequence; identical to SEQ ID NO: 5512
  GFR-binding peptide
  MOD_RES (2), (4): Xaa is C or S

SEQ ID NO: 61136 - protein, 38 aa, Artificial Sequence; identical to SEQ ID NO: 5513
  GFR-binding peptide
  MOD_RES (33), (34): Xaa is C or S
  MOD_RES (11), (12), (13), (14), (15): Xaa is A or G
  MOD_RES (16), (17), (18), (19): Xaa is A or G or is absent

SEQ ID NO: 61137 - protein, 35 aa, Artificial Sequence; identical to SEQ ID NO: 31562
  GFR-binding peptide
  MOD_RES (2), (4): Xaa is C or S

SEQ ID NO: 61138 - protein, 34 aa, Artificial Sequence; identical to SEQ ID NO: 5515
  GFR-binding peptide
  MOD_RES (32), (32): Xaa is C or S

SEQ ID NO: 61139 - protein, 42 aa, Artificial Sequence; identical to SEQ ID NO: 5516
  GFR-binding peptide
  MOD_RES (2), (36), (37): Xaa is C or S
  MOD_RES (14), (15), (16), (17), (18): Xaa is A or G
  MOD_RES (19), (20), (21), (22): Xaa is A or G or is absent

SEQ ID NO: 61140 - protein, 33 aa, Artificial Sequence; identical to SEQ ID NO: 26624
  GFR-binding peptide
  MOD_RES (1), (33): Xaa is C or S

SEQ ID NO: 61141 - protein, 32 aa, Artificial Sequence; identical to SEQ ID NO: 5517
  GFR-binding peptide
  MOD_RES (31), (32): Xaa is C or S

SEQ ID NO: 61142 - protein, 41 aa, Artificial Sequence
  GFR-binding peptide
  MOD_RES (2), (4), (38), (39): Xaa is C or S
  MOD_RES (16), (17), (18), (19), (20): Xaa is A or G
  MOD_RES (21), (22), (23), (24): Xaa is A or G or is absent
RXAXSEVTMNYHYKLXXXXXXXXXKYLISIPSMKEPVXXPE

SEQ ID NO: 61143 - protein, 37 aa, Artificial Sequence
  GFR-binding peptide
  MOD_RES (33), (34): Xaa is C or S
  MOD_RES (11), (12), (13), (14), (15): Xaa is A or G
  MOD_RES (16), (17), (18), (19): Xaa is A or G or is absent
SKVVMPIKGYXXXXXXXXXFYLINIPSLDQPVXXPSA

SEQ ID NO: 61144 - protein, 43 aa, Artificial Sequence; identical to SEQ ID NO: 26627
  GFR-binding peptide
  MOD_RES (2), (4), (38), (39): Xaa is C or S
  MOD_RES (16), (17), (18), (19), (20): Xaa is A or G
  MOD_RES (21), (22), (23), (24): Xaa is A or G or is absent

SEQ ID NO: 61145 - protein, 37 aa, Artificial Sequence; identical to SEQ ID NO: 5520
  GFR-binding peptide
  MOD_RES (1), (35), (36): Xaa is C or S
  MOD_RES (13), (14), (15), (16), (17): Xaa is A or G
  MOD_RES (18), (19), (20), (21): Xaa is A or G or is absent

SEQ ID NO: 61146 - protein, 39 aa, Artificial Sequence; identical to SEQ ID NO: 5522
  GFR-binding peptide
  MOD_RES (1), (3), (36), (37): Xaa is C or S

SEQ ID NO: 61147 - protein, 38 aa, Artificial Sequence; identical to SEQ ID NO: 26631
  GFR-binding peptide
  MOD_RES (2), (35), (36): Xaa is C or S

SEQ ID NO: 61148 - protein, 30 aa, Artificial Sequence
  GFR-binding peptide
EVTMNRHKRLVVNKNEDYYLISTASMKEPV

SEQ ID NO: 61149 - protein, 35 aa, Artificial Sequence; identical to SEQ ID NO: 31572
  GFR-binding peptide
  MOD_RES (2), (34), (35): Xaa is C or S

SEQ ID NO: 61150 - protein, 38 aa, Artificial Sequence
  GFR-binding peptide
  MOD_RES (1), (3), (34), (35): Xaa is C or S
XGXEEVIMEYKFKLLVRGNDLYLMSIPETKVPAXXTSP

SEQ ID NO: 61151 - protein, 31 aa, Artificial Sequence; identical to SEQ ID NO: 26634
  GFR-binding peptide
  MOD_RES (31), (31): Xaa is C or S

SEQ ID NO: 61152 - protein, 32 aa, Artificial Sequence; identical to SEQ ID NO: 5527
  GFR-binding peptide
  MOD_RES (32), (32): Xaa is C or S

SEQ ID NO: 61153 - protein, 39 aa, Artificial Sequence; identical to SEQ ID NO: 26642
  GFR-binding peptide
  MOD_RES (33), (34): Xaa is C or S
  MOD_RES (11), (12), (13), (14), (15): Xaa is A or G
  MOD_RES (16), (17), (18), (19): Xaa is A or G or is absent

SEQ ID NO: 61154 - protein, 38 aa, Artificial Sequence; identical to SEQ ID NO: 26643
  GFR-binding peptide
  MOD_RES (33), (34): Xaa is C or S
  MOD_RES (11), (12), (13), (14), (15): Xaa is A or G
  MOD_RES (16), (17), (18), (19): Xaa is A or G or is absent

SEQ ID NO: 61155 - protein, 36 aa, Artificial Sequence; identical to SEQ ID NO: 5531
  GFR-binding peptide
  MOD_RES (1), (35), (36): Xaa is C or S
  MOD_RES (13), (14), (15), (16), (17): Xaa is A or G
  MOD_RES (18), (19), (20), (21): Xaa is A or G or is absent

SEQ ID NO: 61156 - protein, 38 aa, Artificial Sequence; identical to SEQ ID NO: 5532
  GFR-binding peptide
  MOD_RES (33), (34): Xaa is C or S
  MOD_RES (11), (12), (13), (14), (15): Xaa is A or G
  MOD_RES (16), (17), (18), (19): Xaa is A or G or is absent

SEQ ID NO: 61157 - protein, 43 aa, Artificial Sequence; identical to SEQ ID NO: 26646
  GFR-binding peptide
  MOD_RES (2), (4), (37), (38): Xaa is C or S
  MOD_RES (15), (16), (17), (18), (19): Xaa is A or G
  MOD_RES (20), (21), (22), (23): Xaa is A or G or is absent

SEQ ID NO: 61158 - protein, 41 aa, Artificial Sequence
  GFR-binding peptide
  MOD_RES (1), (35), (36): Xaa is C or S
  MOD_RES (13), (14), (15), (16), (17): Xaa is A or G
  MOD_RES (18), (19), (20), (21): Xaa is A or G or is absent
XESVAMGRHKRLXXXXXXXXXYYLISTASLKTPVXXAKSAK

SEQ ID NO: 61159 - protein, 38 aa, Artificial Sequence; identical to SEQ ID NO: 31586
  GFR-binding peptide
  MOD_RES (1), (3), (38): Xaa is C or S
  MOD_RES (16), (17), (18), (19), (20): Xaa is A or G
  MOD_RES (21), (22), (23), (24): Xaa is A or G or is absent

SEQ ID NO: 61160 - protein, 34 aa, Artificial Sequence; identical to SEQ ID NO: 31589
  GFR-binding peptide
  MOD_RES (2), (34): Xaa is C or S

SEQ ID NO: 61161 - protein, 35 aa, Artificial Sequence; identical to SEQ ID NO: 31592
  GFR-binding peptide
  MOD_RES (34), (35): Xaa is C or S
  MOD_RES (12), (13), (14), (15), (16): Xaa is A or G
  MOD_RES (17), (18), (19), (20): Xaa is A or G or is absent

SEQ ID NO: 61162 - protein, 35 aa, Artificial Sequence; identical to SEQ ID NO: 26649
  GFR-binding peptide
  MOD_RES (33), (34): Xaa is C or S
  MOD_RES (11), (12), (13), (14), (15): Xaa is A or G
  MOD_RES (16), (17), (18), (19): Xaa is A or G or is absent

SEQ ID NO: 61163 - protein, 38 aa, Artificial Sequence; identical to SEQ ID NO: 5537
  GFR-binding peptide
  MOD_RES (2), (36), (37): Xaa is C or S
  MOD_RES (14), (15), (16), (17), (18): Xaa is A or G
  MOD_RES (19), (20), (21), (22): Xaa is A or G or is absent

SEQ ID NO: 61164 - protein, 39 aa, Artificial Sequence; identical to SEQ ID NO: 5538
  GFR-binding peptide
  MOD_RES (1), (33), (34): Xaa is C or S

SEQ ID NO: 61165 - protein, 39 aa, Artificial Sequence; identical to SEQ ID NO: 26651
  GFR-binding peptide
  MOD_RES (33), (34): Xaa is C or S
  MOD_RES (11), (12), (13), (14), (15): Xaa is A or G
  MOD_RES (16), (17), (18), (19): Xaa is A or G or is absent

SEQ ID NO: 61166 - protein, 39 aa, Artificial Sequence; identical to SEQ ID NO: 26653
  GFR-binding peptide
  MOD_RES (2), (4), (36), (37): Xaa is C or S

SEQ ID NO: 61167 - protein, 32 aa, Artificial Sequence
  GFR-binding peptide
  MOD_RES (2), (2): Xaa is C or S
GXEEVIMYHYKLLLVRGNDKYLMSIPSTKVPA

SEQ ID NO: 61168 - protein, 37 aa, Artificial Sequence
  GFR-binding peptide
  MOD_RES (1), (3), (35), (36): Xaa is C or S
XGXRDVVMGYHYKLIIQQKDNKYLMSIPSMKTPTXXP

SEQ ID NO: 61169 - protein, 34 aa, Artificial Sequence; identical to SEQ ID NO: 26656
  GFR-binding peptide
  MOD_RES (1), (3): Xaa is C or S

SEQ ID NO: 61170 - protein, 40 aa, Artificial Sequence; identical to SEQ ID NO: 5544
  GFR-binding peptide
  MOD_RES (1), (3), (37), (38): Xaa is C or S
  MOD_RES (15), (16), (17), (18), (19): Xaa is A or G
  MOD_RES (20), (21), (22), (23): Xaa is A or G or is absent

SEQ ID NO: 61171 - protein, 35 aa, Artificial Sequence; identical to SEQ ID NO: 5545
  GFR-binding peptide
  MOD_RES (33), (34): Xaa is C or S
  MOD_RES (11), (12), (13), (14), (15): Xaa is A or G
  MOD_RES (16), (17), (18), (19): Xaa is A or G or is absent

SEQ ID NO: 61172 - protein, 38 aa, Artificial Sequence; identical to SEQ ID NO: 26659
  GFR-binding peptide
  MOD_RES (33), (34): Xaa is C or S
  MOD_RES (11), (12), (13), (14), (15): Xaa is A or G
  MOD_RES (16), (17), (18), (19): Xaa is A or G or is absent

SEQ ID NO: 61173 - protein, 33 aa, Artificial Sequence; identical to SEQ ID NO: 5548
  GFR-binding peptide
  MOD_RES (1), (33): Xaa is C or S

SEQ ID NO: 61174 - protein, 40 aa, Artificial Sequence; identical to SEQ ID NO: 26662
  GFR-binding peptide
  MOD_RES (2), (35), (36): Xaa is C or S
  MOD_RES (13), (14), (15), (16), (17): Xaa is A or G
  MOD_RES (18), (19), (20), (21): Xaa is A or G or is absent

SEQ ID NO: 61175 - protein, 34 aa, Artificial Sequence; identical to SEQ ID NO: 5551
  GFR-binding peptide
  MOD_RES (2), (4): Xaa is C or S

SEQ ID NO: 61176 - protein, 36 aa, Artificial Sequence; identical to SEQ ID NO: 26665
  GFR-binding peptide
  MOD_RES (32), (33): Xaa is C or S

SEQ ID NO: 61177 - protein, 32 aa, Artificial Sequence; identical to SEQ ID NO: 26668
  GFR-binding peptide
  MOD_RES (32), (32): Xaa is C or S

SEQ ID NO: 61178 - protein, 31 aa, Artificial Sequence
  GFR-binding peptide
RDVVMGYHYKLIIQQKDNKYLMSIPSMKTPT

SEQ ID NO: 61179 - protein, 37 aa, Artificial Sequence; identical to SEQ ID NO: 5554
  GFR-binding peptide
  MOD_RES (1), (3), (35), (36): Xaa is C or S

SEQ ID NO: 61180 - protein, 36 aa, Artificial Sequence
  GFR-binding peptide
  MOD_RES (34), (35): Xaa is C or S
  MOD_RES (12), (13), (14), (15), (16): Xaa is A or G
  MOD_RES (17), (18), (19), (20): Xaa is A or G or is absent
SEVTMNRYKKLXXXXXXXXXFYLISIANMKEPVXXP

SEQ ID NO: 61181 - protein, 33 aa, Artificial Sequence
  GFR-binding peptide
  MOD_RES (1), (3): Xaa is C or S
XKXSKVIMPIKGYIKPTKGIFYLINIPSLDQSV

SEQ ID NO: 61182 - protein, 32 aa, Artificial Sequence; identical to SEQ ID NO: 5556
  GFR-binding peptide
  MOD_RES (31), (32): Xaa is C or S

SEQ ID NO: 61183 - protein, 38 aa, Artificial Sequence; identical to SEQ ID NO: 26673
  GFR-binding peptide
  MOD_RES (1), (33), (34): Xaa is C or S

SEQ ID NO: 61184 - protein, 33 aa, Artificial Sequence; identical to SEQ ID NO: 31614
  GFR-binding peptide
  MOD_RES (12), (13), (14), (15), (16): Xaa is A or G
  MOD_RES (17), (18), (19), (20): Xaa is A or G or is absent

SEQ ID NO: 61185 - protein, 42 aa, Artificial Sequence; identical to SEQ ID NO: 5560
  GFR-binding peptide
  MOD_RES (1), (3), (37), (38): Xaa is C or S
  MOD_RES (15), (16), (17), (18), (19): Xaa is A or G
  MOD_RES (20), (21), (22), (23): Xaa is A or G or is absent

SEQ ID NO: 61186 - protein, 37 aa, Artificial Sequence; identical to SEQ ID NO: 56551
  GFR-binding peptide
  MOD_RES (2), (4), (35), (36): Xaa is C or S

SEQ ID NO: 61187 - protein, 36 aa, Artificial Sequence
  GFR-binding peptide
  MOD_RES (2), (4): Xaa is C or S
  MOD_RES (15), (16), (17), (18), (19): Xaa is A or G
  MOD_RES (20), (21), (22), (23): Xaa is A or G or is absent
SXKXSRVIMPIKGYXXXXXXXXXFYLINIPSLAQPV

SEQ ID NO: 61188 - protein, 37 aa, Artificial Sequence
  GFR-binding peptide
  MOD_RES (31), (32): Xaa is C or S
EVVMDRHKRLVVNNAADYYLISTASLRAPVXXSAPAA

SEQ ID NO: 61189 - protein, 38 aa, Artificial Sequence; identical to SEQ ID NO: 5566
  GFR-binding peptide
  MOD_RES (1), (36), (37): Xaa is C or S
  MOD_RES (14), (15), (16), (17), (18): Xaa is A or G
  MOD_RES (19), (20), (21), (22): Xaa is A or G or is absent

SEQ ID NO: 61190 - protein, 38 aa, Artificial Sequence
  GFR-binding peptide
  MOD_RES (2), (33), (34): Xaa is C or S
GXEEVIMRHKRLLLVRGNDYYLMSTASTKVPAXXTSPV

SEQ ID NO: 61191 - protein, 44 aa, Artificial Sequence
  GFR-binding peptide
  MOD_RES (2), (4), (38), (39): Xaa is C or S
  MOD_RES (16), (17), (18), (19), (20): Xaa is A or G
  MOD_RES (21), (22), (23), (24): Xaa is A or G or is absent
HXGXSRVVMNRHKRLXXXXXXXXXYYLVSTASLKTPAXXPKPVH

SEQ ID NO: 61192 - protein, 33 aa, Artificial Sequence; identical to SEQ ID NO: 5571
  GFR-binding peptide
  MOD_RES (12), (13), (14), (15), (16): Xaa is A or G
  MOD_RES (17), (18), (19), (20): Xaa is A or G or is absent

SEQ ID NO: 61193 - protein, 36 aa, Artificial Sequence; identical to SEQ ID NO: 5573
  GFR-binding peptide
  MOD_RES (34), (35): Xaa is C or S
  MOD_RES (12), (13), (14), (15), (16): Xaa is A or G
  MOD_RES (17), (18), (19), (20): Xaa is A or G or is absent

SEQ ID NO: 61194 - protein, 33 aa, Artificial Sequence; identical to SEQ ID NO: 26688
  GFR-binding peptide
  MOD_RES (12), (13), (14), (15), (16): Xaa is A or G
  MOD_RES (17), (18), (19), (20): Xaa is A or G or is absent

SEQ ID NO: 61195 - protein, 34 aa, Artificial Sequence; identical to SEQ ID NO: 5577
  GFR-binding peptide
  MOD_RES (33), (34): Xaa is C or S
  MOD_RES (11), (12), (13), (14), (15): Xaa is A or G
  MOD_RES (16), (17), (18), (19): Xaa is A or G or is absent

SEQ ID NO: 61196 - protein, 40 aa, Artificial Sequence; identical to SEQ ID NO: 5580
  GFR-binding peptide
  MOD_RES (2), (35), (36): Xaa is C or S
  MOD_RES (13), (14), (15), (16), (17): Xaa is A or G
  MOD_RES (18), (19), (20), (21): Xaa is A or G or is absent

SEQ ID NO: 61197 - protein, 36 aa, Artificial Sequence
  GFR-binding peptide
  MOD_RES (1), (3), (36): Xaa is C or S
  MOD_RES (14), (15), (16), (17), (18): Xaa is A or G
  MOD_RES (19), (20), (21), (22): Xaa is A or G or is absent
XKXSRVIMPIKGYXXXXXXXXXFYLINIPSLAQPVX

SEQ ID NO: 61198 - protein, 37 aa, Artificial Sequence; identical to SEQ ID NO: 26696
  GFR-binding peptide
  MOD_RES (1), (3), (35), (36): Xaa is C or S

SEQ ID NO: 61199 - protein, 35 aa, Artificial Sequence; identical to SEQ ID NO: 31649
  GFR-binding peptide
  MOD_RES (2), (2): Xaa is C or S
  MOD_RES (14), (15), (16), (17), (18): Xaa is A or G
  MOD_RES (19), (20), (21), (22): Xaa is A or G or is absent

SEQ ID NO: 61200 - protein, 41 aa, Artificial Sequence; identical to SEQ ID NO: 5591
  GFR-binding peptide
  MOD_RES (1), (3), (36), (37): Xaa is C or S
  MOD_RES (14), (15), (16), (17), (18): Xaa is A or G
  MOD_RES (19), (20), (21), (22): Xaa is A or G or is absent

SEQ ID NO: 61201 - protein, 36 aa, Artificial Sequence; identical to SEQ ID NO: 5592
  GFR-binding peptide
  MOD_RES (1), (3), (36): Xaa is C or S
  MOD_RES (14), (15), (16), (17), (18): Xaa is A or G
  MOD_RES (19), (20), (21), (22): Xaa is A or G or is absent

SEQ ID NO: 61202 - protein, 41 aa, Artificial Sequence; identical to SEQ ID NO: 26702
  GFR-binding peptide
  MOD_RES (1), (3), (36), (37): Xaa is C or S

SEQ ID NO: 61203 - protein, 32 aa, Artificial Sequence
  GFR-binding peptide
  MOD_RES (1), (1): Xaa is C or S
XSEVVMDRHKRLVVNNASDYYLISTASLRTPV

SEQ ID NO: 61204 - protein, 40 aa, Artificial Sequence; identical to SEQ ID NO: 31654
  GFR-binding peptide
  MOD_RES (2), (36), (37): Xaa is C or S
  MOD_RES (14), (15), (16), (17), (18): Xaa is A or G
  MOD_RES (19), (20), (21), (22): Xaa is A or G or is absent

SEQ ID NO: 61205 - protein, 34 aa, Artificial Sequence; identical to SEQ ID NO: 31656
  GFR-binding peptide
  MOD_RES (34), (34): Xaa is C or S
  MOD_RES (12), (13), (14), (15), (16): Xaa is A or G
  MOD_RES (17), (18), (19), (20): Xaa is A or G or is absent

SEQ ID NO: 61206 - protein, 37 aa, Artificial Sequence; identical to SEQ ID NO: 5596
  GFR-binding peptide
  MOD_RES (1), (34), (35): Xaa is C or S
  MOD_RES (12), (13), (14), (15), (16): Xaa is A or G
  MOD_RES (17), (18), (19), (20): Xaa is A or G or is absent

SEQ ID NO: 61207 - protein, 34 aa, Artificial Sequence
  GFR-binding peptide
  MOD_RES (1), (34): Xaa is C or S
  MOD_RES (12), (13), (14), (15), (16): Xaa is A or G
  MOD_RES (17), (18), (19), (20): Xaa is A or G or is absent
XSKVVMPIKGYXXXXXXXXXFYLINIPSLDQPVX

SEQ ID NO: 61208 - protein, 34 aa, Artificial Sequence; identical to SEQ ID NO: 5601
  GFR-binding peptide
  MOD_RES (1), (33), (34): Xaa is C or S

SEQ ID NO: 61209 - protein, 43 aa, Artificial Sequence
  GFR-binding peptide
  MOD_RES (1), (3), (37), (38): Xaa is C or S
  MOD_RES (15), (16), (17), (18), (19): Xaa is A or G
  MOD_RES (20), (21), (22), (23): Xaa is A or G or is absent
XGXSEVVMDRHKRLXXXXXXXXXYYLISTASLRTPVXXTPPTS

SEQ ID NO: 61210 - protein, 34 aa, Artificial Sequence; identical to SEQ ID NO: 56598
  GFR-binding peptide
  MOD_RES (2), (33), (34): Xaa is C or S

SEQ ID NO: 61211 - protein, 33 aa, Artificial Sequence; identical to SEQ ID NO: 56602
  GFR-binding peptide
  MOD_RES (32), (33): Xaa is C or S

SEQ ID NO: 61212 - protein, 35 aa, Artificial Sequence
  GFR-binding peptide
  MOD_RES (2), (34), (35): Xaa is C or S
GXESVAMGRHKRLYTVVGKDYYLISTASLKTPVXX

SEQ ID NO: 61213 - protein, 36 aa, Artificial Sequence; identical to SEQ ID NO: 5605
  GFR-binding peptide
  MOD_RES (1), (3), (36): Xaa is C or S
  MOD_RES (14), (15), (16), (17), (18): Xaa is A or G
  MOD_RES (19), (20), (21), (22): Xaa is A or G or is absent

SEQ ID NO: 61214 - protein, 38 aa, Artificial Sequence; identical to SEQ ID NO: 5607
  GFR-binding peptide
  MOD_RES (2), (33), (34): Xaa is C or S

SEQ ID NO: 61215 - protein, 36 aa, Artificial Sequence; identical to SEQ ID NO: 56604
  GFR-binding peptide
  MOD_RES (32), (33): Xaa is C or S

SEQ ID NO: 61216 - protein, 41 aa, Artificial Sequence; identical to SEQ ID NO: 26720
  GFR-binding peptide
  MOD_RES (1), (35), (36): Xaa is C or S
  MOD_RES (13), (14), (15), (16), (17): Xaa is A or G
  MOD_RES (18), (19), (20), (21): Xaa is A or G or is absent

SEQ ID NO: 61217 - protein, 37 aa, Artificial Sequence; identical to SEQ ID NO: 5608
  GFR-binding peptide
  MOD_RES (2), (4): Xaa is C or S
  MOD_RES (16), (17), (18), (19), (20): Xaa is A or G
  MOD_RES (21), (22), (23), (24): Xaa is A or G or is absent

SEQ ID NO: 61218 - protein, 40 aa, Artificial Sequence; identical to SEQ ID NO: 26722
  GFR-binding peptide
  MOD_RES (2), (34), (35): Xaa is C or S

SEQ ID NO: 61219 - protein, 39 aa, Artificial Sequence
  GFR-binding peptide
  MOD_RES (2), (4), (37), (38): Xaa is C or S
  MOD_RES (15), (16), (17), (18), (19): Xaa is A or G
  MOD_RES (20), (21), (22), (23): Xaa is A or G or is absent
SXKXSRVIMPIKGYXXXXXXXXXFYLINIPSLAQPVXXP

SEQ ID NO: 61220 - protein, 31 aa, Artificial Sequence; identical to SEQ ID NO: 26724
  GFR-binding peptide

SEQ ID NO: 61221 - protein, 39 aa, Artificial Sequence; identical to SEQ ID NO: 56614
  GFR-binding peptide
  MOD_RES (34), (35): Xaa is C or S
  MOD_RES (12), (13), (14), (15), (16): Xaa is A or G
  MOD_RES (17), (18), (19), (20): Xaa is A or G or is absent

SEQ ID NO: 61222 - protein, 37 aa, Artificial Sequence; identical to SEQ ID NO: 5610
  GFR-binding peptide
  MOD_RES (2), (33), (34): Xaa is C or S

SEQ ID NO: 61223 - protein, 34 aa, Artificial Sequence; identical to SEQ ID NO: 5613
  GFR-binding peptide
  MOD_RES (31), (32): Xaa is C or S

SEQ ID NO: 61224 - protein, 41 aa, Artificial Sequence
  GFR-binding peptide
  MOD_RES (1), (35), (36): Xaa is C or S
  MOD_RES (13), (14), (15), (16), (17): Xaa is A or G
  MOD_RES (18), (19), (20), (21): Xaa is A or G or is absent
XRDVVMGYHYKLXXXXXXXXXKYLMSIPSMKTPTXXPGASG

SEQ ID NO: 61225 - protein, 32 aa, Artificial Sequence; identical to SEQ ID NO: 31676
  GFR-binding peptide
  MOD_RES (32), (32): Xaa is C or S

SEQ ID NO: 61226 - protein, 34 aa, Artificial Sequence
  GFR-binding peptide
  MOD_RES (31), (32): Xaa is C or S
EEVIMYHYKLLLVRGNDKYLMSIPSTKVPAXXTS

SEQ ID NO: 61227 - protein, 36 aa, Artificial Sequence
  GFR-binding peptide
  MOD_RES (2), (4), (36): Xaa is C or S
RXGXSEVVMDRHKRLVVNNASDYYLISTASLRTPVX

SEQ ID NO: 61228 - protein, 32 aa, Artificial Sequence; identical to SEQ ID NO: 5619
  GFR-binding peptide
  MOD_RES (1), (32): Xaa is C or S

SEQ ID NO: 61229 - protein, 38 aa, Artificial Sequence
  GFR-binding peptide
  MOD_RES (1), (3), (35), (36): Xaa is C or S
XGXRDVVMGEYKFKIIQQKDNLYLMSIPEMKTPTXXPG

SEQ ID NO: 61230 - protein, 43 aa, Artificial Sequence
  GFR-binding peptide
  MOD_RES (1), (3), (37), (38): Xaa is C or S
  MOD_RES (15), (16), (17), (18), (19): Xaa is A or G
  MOD_RES (20), (21), (22), (23): Xaa is A or G or is absent
XGXSEVVMDEYKFKXXXXXXXXXLYLISIPELRTPVXXTPPTS

SEQ ID NO: 61231 - protein, 32 aa, Artificial Sequence; identical to SEQ ID NO: 26737
  GFR-binding peptide
  MOD_RES (11), (12), (13), (14), (15): Xaa is A or G
  MOD_RES (16), (17), (18), (19): Xaa is A or G or is absent

SEQ ID NO: 61232 - protein, 37 aa, Artificial Sequence
  GFR-binding peptide
  MOD_RES (1), (33), (34): Xaa is C or S
XSEVTMNRHKRLVVNKNEDYYLISTASMKEPVXXPEP

SEQ ID NO: 61233 - protein, 34 aa, Artificial Sequence; identical to SEQ ID NO: 26738
  GFR-binding peptide
  MOD_RES (1), (33), (34): Xaa is C or S

SEQ ID NO: 61234 - protein, 40 aa, Artificial Sequence
  GFR-binding peptide
  MOD_RES (2), (4), (38), (39): Xaa is C or S
  MOD_RES (16), (17), (18), (19), (20): Xaa is A or G
  MOD_RES (21), (22), (23), (24): Xaa is A or G or is absent
SXGXRDVVMGEYKFKXXXXXXXXXLYLMSIPEMKTPTXXP

SEQ ID NO: 61235 - protein, 40 aa, Artificial Sequence; identical to SEQ ID NO: 5624
  GFR-binding peptide
  MOD_RES (1), (3), (37), (38): Xaa is C or S
  MOD_RES (15), (16), (17), (18), (19): Xaa is A or G
  MOD_RES (20), (21), (22), (23): Xaa is A or G or is absent

SEQ ID NO: 61236 - protein, 39 aa, Artificial Sequence; identical to SEQ ID NO: 26744
  GFR-binding peptide
  MOD_RES (1), (3), (37), (38): Xaa is C or S
  MOD_RES (15), (16), (17), (18), (19): Xaa is A or G
  MOD_RES (20), (21), (22), (23): Xaa is A or G or is absent

SEQ ID NO: 61237 - protein, 38 aa, Artificial Sequence; identical to SEQ ID NO: 5625
  GFR-binding peptide
  MOD_RES (2), (36), (37): Xaa is C or S
  MOD_RES (14), (15), (16), (17), (18): Xaa is A or G
  MOD_RES (19), (20), (21), (22): Xaa is A or G or is absent

SEQ ID NO: 61238 - protein, 35 aa, Artificial Sequence; identical to SEQ ID NO: 31687
  GFR-binding peptide
  MOD_RES (2), (34): Xaa is C or S

SEQ ID NO: 61239 - protein, 36 aa, Artificial Sequence
  GFR-binding peptide
  MOD_RES (1), (33), (34): Xaa is C or S
XSEVTMNRHKRLVVNKNEDYYLISTASMKEPVXXPE

SEQ ID NO: 61240 - protein, 33 aa, Artificial Sequence; identical to SEQ ID NO: 26745
  GFR-binding peptide
  MOD_RES (33), (33): Xaa is C or S
  MOD_RES (11), (12), (13), (14), (15): Xaa is A or G
  MOD_RES (16), (17), (18), (19): Xaa is A or G or is absent

SEQ ID NO: 61241 - protein, 40 aa, Artificial Sequence; identical to SEQ ID NO: 5627
  GFR-binding peptide
  MOD_RES (2), (4), (38), (39): Xaa is C or S
  MOD_RES (16), (17), (18), (19), (20): Xaa is A or G
  MOD_RES (21), (22), (23), (24): Xaa is A or G or is absent

SEQ ID NO: 61242 - protein, 38 aa, Artificial Sequence; identical to SEQ ID NO: 26747
  GFR-binding peptide
  MOD_RES (1), (35), (36): Xaa is C or S
  MOD_RES (13), (14), (15), (16), (17): Xaa is A or G
  MOD_RES (18), (19), (20), (21): Xaa is A or G or is absent

SEQ ID NO: 61243 - protein, 31 aa, Artificial Sequence; identical to SEQ ID NO: 5628
  GFR-binding peptide
  MOD_RES (1), (1): Xaa is C or S

SEQ ID NO: 61244 - protein, 41 aa, Artificial Sequence; identical to SEQ ID NO: 5629
  GFR-binding peptide
  MOD_RES (2), (4), (35), (36): Xaa is C or S

SEQ ID NO: 61245 - protein, 39 aa, Artificial Sequence; identical to SEQ ID NO: 5632
  GFR-binding peptide
  MOD_RES (2), (4), (35), (36): Xaa is C or S

SEQ ID NO: 61246 - protein, 37 aa, Artificial Sequence; identical to SEQ ID NO: 5633
  GFR-binding peptide
  MOD_RES (2), (36), (37): Xaa is C or S
  MOD_RES (14), (15), (16), (17), (18): Xaa is A or G
  MOD_RES (19), (20), (21), (22): Xaa is A or G or is absent

SEQ ID NO: 61247 - protein, 34 aa, Artificial Sequence; identical to SEQ ID NO: 5636
  GFR-binding peptide
  MOD_RES (1), (1): Xaa is C or S
  MOD_RES (13), (14), (15), (16), (17): Xaa is A or G
  MOD_RES (18), (19), (20), (21): Xaa is A or G or is absent

SEQ ID NO: 61248 - protein, 37 aa, Artificial Sequence
  GFR-binding peptide
  MOD_RES (2), (4), (36), (37): Xaa is C or S
SXGXRDVVMGYHYKLIIQQKDNKYLMSIPSMKTPTXX

SEQ ID NO: 61249 - protein, 39 aa, Artificial Sequence; identical to SEQ ID NO: 31707
  GFR-binding peptide
  MOD_RES (1), (3), (37), (38): Xaa is C or S
  MOD_RES (15), (16), (17), (18), (19): Xaa is A or G
  MOD_RES (20), (21), (22), (23): Xaa is A or G or is absent

SEQ ID NO: 61250 - protein, 35 aa, Artificial Sequence; identical to SEQ ID NO: 31710
  GFR-binding peptide
  MOD_RES (2), (2): Xaa is C or S
  MOD_RES (14), (15), (16), (17), (18): Xaa is A or G
  MOD_RES (19), (20), (21), (22): Xaa is A or G or is absent

SEQ ID NO: 61251 - protein, 37 aa, Artificial Sequence; identical to SEQ ID NO: 5638
  GFR-binding peptide
  MOD_RES (33), (34): Xaa is C or S
  MOD_RES (11), (12), (13), (14), (15): Xaa is A or G
  MOD_RES (16), (17), (18), (19): Xaa is A or G or is absent

SEQ ID NO: 61252 - protein, 40 aa, Artificial Sequence; identical to SEQ ID NO: 26760
  GFR-binding peptide
  MOD_RES (1), (3), (34), (35): Xaa is C or S

SEQ ID NO: 61253 - protein, 42 aa, Artificial Sequence; identical to SEQ ID NO: 26762
  GFR-binding peptide
  MOD_RES (2), (4), (38): Xaa is C or S
  MOD_RES (16), (17), (18), (19), (20): Xaa is A or G
  MOD_RES (21), (22), (23), (24): Xaa is A or G or is absent

SEQ ID NO: 61254 - protein, 40 aa, Artificial Sequence; identical to SEQ ID NO: 5640
  GFR-binding peptide
  MOD_RES (1), (3), (35), (36): Xaa is C or S

SEQ ID NO: 61255 - protein, 39 aa, Artificial Sequence; identical to SEQ ID NO: 5641
  GFR-binding peptide
  MOD_RES (1), (34), (35): Xaa is C or S

SEQ ID NO: 61256 - protein, 42 aa, Artificial Sequence; identical to SEQ ID NO: 26768
  GFR-binding peptide
  MOD_RES (1), (3), (37), (38): Xaa is C or S
  MOD_RES (15), (16), (17), (18), (19): Xaa is A or G
  MOD_RES (20), (21), (22), (23): Xaa is A or G or is absent

SEQ ID NO: 61257 - protein, 35 aa, Artificial Sequence; identical to SEQ ID NO: 26769
  GFR-binding peptide
  MOD_RES (2), (34): Xaa is C or S

SEQ ID NO: 61258 - protein, 32 aa, Artificial Sequence; identical to SEQ ID NO: 31715
  GFR-binding peptide
  MOD_RES (32), (32): Xaa is C or S

SEQ ID NO: 61259 - protein, 39 aa, Artificial Sequence
  GFR-binding peptide
  MOD_RES (33), (34): Xaa is C or S
  MOD_RES (11), (12), (13), (14), (15): Xaa is A or G
  MOD_RES (16), (17), (18), (19): Xaa is A or G or is absent
SKVVMPIKGYXXXXXXXXXFYLINIPSLDQPVXXPSASA

SEQ ID NO: 61260 - protein, 38 aa, Artificial Sequence; identical to SEQ ID NO: 31716
  GFR-binding peptide
  MOD_RES (32), (33): Xaa is C or S

SEQ ID NO: 61261 - protein, 40 aa, Artificial Sequence; identical to SEQ ID NO: 26770
  GFR-binding peptide
  MOD_RES (2), (36), (37): Xaa is C or S
  MOD_RES (14), (15), (16), (17), (18): Xaa is A or G
  MOD_RES (19), (20), (21), (22): Xaa is A or G or is absent

SEQ ID NO: 61262 - protein, 40 aa, Artificial Sequence; identical to SEQ ID NO: 56657
  GFR-binding peptide
  MOD_RES (2), (4), (38), (39): Xaa is C or S
  MOD_RES (16), (17), (18), (19), (20): Xaa is A or G
  MOD_RES (21), (22), (23), (24): Xaa is A or G or is absent

SEQ ID NO: 61263 - protein, 34 aa, Artificial Sequence; identical to SEQ ID NO: 5642
  GFR-binding peptide
  MOD_RES (31), (32): Xaa is C or S

SEQ ID NO: 61264 - protein, 39 aa, Artificial Sequence; identical to SEQ ID NO: 5643
  GFR-binding peptide
  MOD_RES (2), (34), (35): Xaa is C or S

SEQ ID NO: 61265 - protein, 34 aa, Artificial Sequence; identical to SEQ ID NO: 5646
  GFR-binding peptide
  MOD_RES (33), (34): Xaa is C or S
  MOD_RES (11), (12), (13), (14), (15): Xaa is A or G
  MOD_RES (16), (17), (18), (19): Xaa is A or G or is absent

SEQ ID NO: 61266 - protein, 36 aa, Artificial Sequence
  GFR-binding peptide
  MOD_RES (2), (4), (35), (36): Xaa is C or S
LXGXEEVIMYHYKLLLVRGNDKYLMSIPSTKVPAXX

SEQ ID NO: 61267 - protein, 39 aa, Artificial Sequence
  GFR-binding peptide
  MOD_RES (1), (3), (34), (35): Xaa is C or S
XGXEEVIMEYKFKLLVRGNDLYLMSIPETKVPAXXTSPV

SEQ ID NO: 61268 - protein, 31 aa, Artificial Sequence; identical to SEQ ID NO: 26778
  GFR-binding peptide
  MOD_RES (31), (31): Xaa is C or S

SEQ ID NO: 61269 - protein, 36 aa, Artificial Sequence; identical to SEQ ID NO: 31723
  GFR-binding peptide
  MOD_RES (31), (32): Xaa is C or S

SEQ ID NO: 61270 - protein, 41 aa, Artificial Sequence; identical to SEQ ID NO: 5652
  GFR-binding peptide
  MOD_RES (1), (3), (37), (38): Xaa is C or S
  MOD_RES (15), (16), (17), (18), (19): Xaa is A or G
  MOD_RES (20), (21), (22), (23): Xaa is A or G or is absent

SEQ ID NO: 61271 - protein, 40 aa, Artificial Sequence; identical to SEQ ID NO: 26780
  GFR-binding peptide
  MOD_RES (1), (35), (36): Xaa is C or S
  MOD_RES (13), (14), (15), (16), (17): Xaa is A or G
  MOD_RES (18), (19), (20), (21): Xaa is A or G or is absent

SEQ ID NO: 61272 - protein, 36 aa, Artificial Sequence; identical to SEQ ID NO: 5653
  GFR-binding peptide
  MOD_RES (31), (32): Xaa is C or S

SEQ ID NO: 61273 - protein, 39 aa, Artificial Sequence
  GFR-binding peptide
  MOD_RES (2), (4), (36), (37): Xaa is C or S
RXAXSEVTMNEYKFKVVNKNEDLYLISIPEMKEPVXXPE

SEQ ID NO: 61274 - protein, 33 aa, Artificial Sequence; identical to SEQ ID NO: 26783
  GFR-binding peptide
  MOD_RES (31), (32): Xaa is C or S

SEQ ID NO: 61275 - protein, 39 aa, Artificial Sequence; identical to SEQ ID NO: 31726
  GFR-binding peptide
  MOD_RES (2), (36), (37): Xaa is C or S
  MOD_RES (14), (15), (16), (17), (18): Xaa is A or G
  MOD_RES (19), (20), (21), (22): Xaa is A or G or is absent

SEQ ID NO: 61276 - protein, 40 aa, Artificial Sequence; identical to SEQ ID NO: 31729
  GFR-binding peptide
  MOD_RES (2), (36), (37): Xaa is C or S
  MOD_RES (14), (15), (16), (17), (18): Xaa is A or G
  MOD_RES (19), (20), (21), (22): Xaa is A or G or is absent

SEQ ID NO: 61277 - protein, 37 aa, Artificial Sequence; identical to SEQ ID NO: 26786
  GFR-binding peptide
  MOD_RES (1), (35), (36): Xaa is C or S
  MOD_RES (13), (14), (15), (16), (17): Xaa is A or G
  MOD_RES (18), (19), (20), (21): Xaa is A or G or is absent

SEQ ID NO: 61278 - protein, 42 aa, Artificial Sequence; identical to SEQ ID NO: 31731
  GFR-binding peptide
  MOD_RES (2), (4), (36): Xaa is C or S

SEQ ID NO: 61279 - protein, 33 aa, Artificial Sequence; identical to SEQ ID NO: 31733
  GFR-binding peptide
  MOD_RES (1), (32), (33): Xaa is C or S

SEQ ID NO: 61280 - protein, 33 aa, Artificial Sequence; identical to SEQ ID NO: 5657
  GFR-binding peptide
  MOD_RES (1), (3): Xaa is C or S

SEQ ID NO: 61281 - protein, 36 aa, Artificial Sequence
  GFR-binding peptide
  MOD_RES (2), (36): Xaa is C or S
  MOD_RES (14), (15), (16), (17), (18): Xaa is A or G
  MOD_RES (19), (20), (21), (22): Xaa is A or G or is absent
GXAEVVMDRHKRLXXXXXXXXXYYLISTASLRAPVX

SEQ ID NO: 61282 - protein, 35 aa, Artificial Sequence; identical to SEQ ID NO: 26791
  GFR-binding peptide
  MOD_RES (1), (3), (35): Xaa is C or S

SEQ ID NO: 61283 - protein, 35 aa, Artificial Sequence
  GFR-binding peptide
  MOD_RES (32), (33): Xaa is C or S
SEVTMNRYKKLVVNKNEDFYLISIANMKEPVXXPE

SEQ ID NO: 61284 - protein, 30 aa, Artificial Sequence; identical to SEQ ID NO: 26792
  GFR-binding peptide

SEQ ID NO: 61285 - protein, 41 aa, Artificial Sequence; identical to SEQ ID NO: 5660
  GFR-binding peptide
  MOD_RES (2), (4), (36), (37): Xaa is C or S

SEQ ID NO: 61286 - protein, 35 aa, Artificial Sequence; identical to SEQ ID NO: 5661
  GFR-binding peptide
  MOD_RES (2), (2): Xaa is C or S
  MOD_RES (14), (15), (16), (17), (18): Xaa is A or G
  MOD_RES (19), (20), (21), (22): Xaa is A or G or is absent

SEQ ID NO: 61287 - protein, 39 aa, Artificial Sequence; identical to SEQ ID NO: 5662
  GFR-binding peptide
  MOD_RES (1), (36), (37): Xaa is C or S
  MOD_RES (14), (15), (16), (17), (18): Xaa is A or G
  MOD_RES (19), (20), (21), (22): Xaa is A or G or is absent

SEQ ID NO: 61288 - protein, 35 aa, Artificial Sequence; identical to SEQ ID NO: 5665
  GFR-binding peptide
  MOD_RES (1), (35): Xaa is C or S
  MOD_RES (13), (14), (15), (16), (17): Xaa is A or G
  MOD_RES (18), (19), (20), (21): Xaa is A or G or is absent

SEQ ID NO: 61289 - protein, 34 aa, Artificial Sequence
  GFR-binding peptide
  MOD_RES (32), (33): Xaa is C or S
SEVVMDRHKRLVVNNASDYYLISTASLRTPVXXT

SEQ ID NO: 61290 - protein, 36 aa, Artificial Sequence; identical to SEQ ID NO: 5669
  GFR-binding peptide
  MOD_RES (1), (3), (35), (36): Xaa is C or S

SEQ ID NO: 61291 - protein, 42 aa, Artificial Sequence; identical to SEQ ID NO: 31747
  GFR-binding peptide
  MOD_RES (2), (4), (38), (39): Xaa is C or S
  MOD_RES (16), (17), (18), (19), (20): Xaa is A or G
  MOD_RES (21), (22), (23), (24): Xaa is A or G or is absent

SEQ ID NO: 61292 - protein, 39 aa, Artificial Sequence; identical to SEQ ID NO: 26803
  GFR-binding peptide
  MOD_RES (1), (35), (36): Xaa is C or S
  MOD_RES (13), (14), (15), (16), (17): Xaa is A or G
  MOD_RES (18), (19), (20), (21): Xaa is A or G or is absent

SEQ ID NO: 61293 - protein, 31 aa, Artificial Sequence; identical to SEQ ID NO: 5672
  GFR-binding peptide
  MOD_RES (31), (31): Xaa is C or S

SEQ ID NO: 61294 - protein, 43 aa, Artificial Sequence; identical to SEQ ID NO: 31756
  GFR-binding peptide
  MOD_RES (1), (3), (37), (38): Xaa is C or S
  MOD_RES (15), (16), (17), (18), (19): Xaa is A or G
  MOD_RES (20), (21), (22), (23): Xaa is A or G or is absent

SEQ ID NO: 61295 - protein, 37 aa, Artificial Sequence
  GFR-binding peptide
  MOD_RES (2), (36), (37): Xaa is C or S
  MOD_RES (14), (15), (16), (17), (18): Xaa is A or G
  MOD_RES (19), (20), (21), (22): Xaa is A or G or is absent
GXESVAMGRHKRLXXXXXXXXXYYLISTASLKTPVXX

SEQ ID NO: 61296 - protein, 37 aa, Artificial Sequence; identical to SEQ ID NO: 5675
  GFR-binding peptide
  MOD_RES (1), (3), (35): Xaa is C or S

SEQ ID NO: 61297 - protein, 35 aa, Artificial Sequence; identical to SEQ ID NO: 31758
  GFR-binding peptide
  MOD_RES (2), (35): Xaa is C or S
  MOD_RES (13), (14), (15), (16), (17): Xaa is A or G
  MOD_RES (18), (19), (20), (21): Xaa is A or G or is absent

SEQ ID NO: 61298 - protein, 40 aa, Artificial Sequence; identical to SEQ ID NO: 56696
  GFR-binding peptide
  MOD_RES (34), (35): Xaa is C or S
  MOD_RES (12), (13), (14), (15), (16): Xaa is A or G
  MOD_RES (17), (18), (19), (20): Xaa is A or G or is absent

SEQ ID NO: 61299 - protein, 41 aa, Artificial Sequence; identical to SEQ ID NO: 31761
  GFR-binding peptide
  MOD_RES (1), (3), (37), (38): Xaa is C or S
  MOD_RES (15), (16), (17), (18), (19): Xaa is A or G
  MOD_RES (20), (21), (22), (23): Xaa is A or G or is absent

SEQ ID NO: 61300 - protein, 39 aa, Artificial Sequence; identical to SEQ ID NO: 5680
  GFR-binding peptide
  MOD_RES (34), (35): Xaa is C or S
  MOD_RES (12), (13), (14), (15), (16): Xaa is A or G
  MOD_RES (17), (18), (19), (20): Xaa is A or G or is absent

SEQ ID NO: 61301 - protein, 35 aa, Artificial Sequence; identical to SEQ ID NO: 31763
  GFR-binding peptide
  MOD_RES (1), (35): Xaa is C or S
  MOD_RES (13), (14), (15), (16), (17): Xaa is A or G
  MOD_RES (18), (19), (20), (21): Xaa is A or G or is absent

SEQ ID NO: 61302 - protein, 40 aa, Artificial Sequence; identical to SEQ ID NO: 5681
  GFR-binding peptide
  MOD_RES (2), (36), (37): Xaa is C or S
  MOD_RES (14), (15), (16), (17), (18): Xaa is A or G
  MOD_RES (19), (20), (21), (22): Xaa is A or G or is absent

SEQ ID NO: 61303 - protein, 37 aa, Artificial Sequence; identical to SEQ ID NO: 5683
  GFR-binding peptide
  MOD_RES (2), (34), (35): Xaa is C or S

SEQ ID NO: 61304 - protein, 32 aa, Artificial Sequence
  GFR-binding peptide
  MOD_RES (11), (12), (13), (14), (15): Xaa is A or G
  MOD_RES (16), (17), (18), (19): Xaa is A or G or is absent
EVTMNRHKRLXXXXXXXXXYYLISTASMKEPV

SEQ ID NO: 61305 - protein, 35 aa, Artificial Sequence; identical to SEQ ID NO: 56706
  GFR-binding peptide
  MOD_RES (33), (34): Xaa is C or S
  MOD_RES (11), (12), (13), (14), (15): Xaa is A or G
  MOD_RES (16), (17), (18), (19): Xaa is A or G or is absent

SEQ ID NO: 61306 - protein, 31 aa, Artificial Sequence; identical to SEQ ID NO: 5686
  GFR-binding peptide

SEQ ID NO: 61307 - protein, 41 aa, Artificial Sequence; identical to SEQ ID NO: 31770
  GFR-binding peptide
  MOD_RES (2), (4), (36), (37): Xaa is C or S

SEQ ID NO: 61308 - protein, 43 aa, Artificial Sequence; identical to SEQ ID NO: 5689
  GFR-binding peptide
  MOD_RES (2), (4), (39), (40): Xaa is C or S
  MOD_RES (17), (18), (19), (20), (21): Xaa is A or G
  MOD_RES (22), (23), (24), (25): Xaa is A or G or is absent

SEQ ID NO: 61309 - protein, 35 aa, Artificial Sequence
  GFR-binding peptide
  MOD_RES (2), (34), (35): Xaa is C or S
GXAEVVMDRHKRLVVNNAADYYLISTASLRAPVXX

SEQ ID NO: 61310 - protein, 37 aa, Artificial Sequence; identical to SEQ ID NO: 26817
  GFR-binding peptide
  MOD_RES (2), (4): Xaa is C or S
  MOD_RES (16), (17), (18), (19), (20): Xaa is A or G
  MOD_RES (21), (22), (23), (24): Xaa is A or G or is absent

SEQ ID NO: 61311 - protein, 38 aa, Artificial Sequence
  GFR-binding peptide
  MOD_RES (2), (35), (36): Xaa is C or S
  MOD_RES (13), (14), (15), (16), (17): Xaa is A or G
  MOD_RES (18), (19), (20), (21): Xaa is A or G or is absent
KXSKVIMPIKGYXXXXXXXXXFYLINIPSLDQSVXXPS

SEQ ID NO: 61312 - protein, 30 aa, Artificial Sequence; identical to SEQ ID NO: 56713
  GFR-binding peptide

SEQ ID NO: 61313 - protein, 39 aa, Artificial Sequence
  GFR-binding peptide
  MOD_RES (33), (34): Xaa is C or S
  MOD_RES (11), (12), (13), (14), (15): Xaa is A or G
  MOD_RES (16), (17), (18), (19): Xaa is A or G or is absent
EVTMNRYKKLXXXXXXXXXFYLISIANMKEPVXXPEPIG

SEQ ID NO: 61314 - protein, 40 aa, Artificial Sequence
  GFR-binding peptide
  MOD_RES (2), (4), (35), (36): Xaa is C or S
LXGXEEVIMYHYKLLLVRGNDKYLMSIPSTKVPAXXTSPV

SEQ ID NO: 61315 - protein, 38 aa, Artificial Sequence; identical to SEQ ID NO: 26822
  GFR-binding peptide
  MOD_RES (2), (34), (35): Xaa is C or S

SEQ ID NO: 61316 - protein, 33 aa, Artificial Sequence; identical to SEQ ID NO: 5699
  GFR-binding peptide
  MOD_RES (12), (13), (14), (15), (16): Xaa is A or G
  MOD_RES (17), (18), (19), (20): Xaa is A or G or is absent

SEQ ID NO: 61317 - protein, 41 aa, Artificial Sequence; identical to SEQ ID NO: 5700
  GFR-binding peptide
  MOD_RES (2), (4), (35), (36): Xaa is C or S

SEQ ID NO: 61318 - protein, 39 aa, Artificial Sequence; identical to SEQ ID NO: 5702
  GFR-binding peptide
  MOD_RES (2), (36), (37): Xaa is C or S
  MOD_RES (14), (15), (16), (17), (18): Xaa is A or G
  MOD_RES (19), (20), (21), (22): Xaa is A or G or is absent

SEQ ID NO: 61319 - protein, 38 aa, Artificial Sequence
  GFR-binding peptide
  MOD_RES (1), (35), (36): Xaa is C or S
  MOD_RES (13), (14), (15), (16), (17): Xaa is A or G
  MOD_RES (18), (19), (20), (21): Xaa is A or G or is absent
XSEVTMNEYKFKXXXXXXXXXLYLISIPEMKEPVXXPE

SEQ ID NO: 61320 - protein, 35 aa, Artificial Sequence; identical to SEQ ID NO: 31783
  GFR-binding peptide
  MOD_RES (1), (3): Xaa is C or S

SEQ ID NO: 61321 - protein, 41 aa, Artificial Sequence; identical to SEQ ID NO: 5706
  GFR-binding peptide
  MOD_RES (2), (4), (37), (38): Xaa is C or S
  MOD_RES (15), (16), (17), (18), (19): Xaa is A or G
  MOD_RES (20), (21), (22), (23): Xaa is A or G or is absent

SEQ ID NO: 61322 - protein, 38 aa, Artificial Sequence; identical to SEQ ID NO: 26832
  GFR-binding peptide
  MOD_RES (2), (4), (38): Xaa is C or S
  MOD_RES (16), (17), (18), (19), (20): Xaa is A or G
  MOD_RES (21), (22), (23), (24): Xaa is A or G or is absent

SEQ ID NO: 61323 - protein, 41 aa, Artificial Sequence
  GFR-binding peptide
  MOD_RES (2), (35), (36): Xaa is C or S
  MOD_RES (13), (14), (15), (16), (17): Xaa is A or G
  MOD_RES (18), (19), (20), (21): Xaa is A or G or is absent
GXEEVIMRHKRLXXXXXXXXXYYLMSTASTKVPAXXTSPVR

SEQ ID NO: 61324 - protein, 36 aa, Artificial Sequence; identical to SEQ ID NO: 31789
  GFR-binding peptide
  MOD_RES (2), (36): Xaa is C or S
  MOD_RES (14), (15), (16), (17), (18): Xaa is A or G
  MOD_RES (19), (20), (21), (22): Xaa is A or G or is absent

SEQ ID NO: 61325 - protein, 36 aa, Artificial Sequence
  GFR-binding peptide
  MOD_RES (2), (4), (36): Xaa is C or S
RXGXAEVVMDRHKRLVVNNAADYYLISTASLRAPVX

SEQ ID NO: 61326 - protein, 38 aa, Artificial Sequence; identical to SEQ ID NO: 5710
  GFR-binding peptide
  MOD_RES (2), (34), (35): Xaa is C or S

SEQ ID NO: 61327 - protein, 38 aa, Artificial Sequence; identical to SEQ ID NO: 26835
  GFR-binding peptide
  MOD_RES (1), (3), (37), (38): Xaa is C or S
  MOD_RES (15), (16), (17), (18), (19): Xaa is A or G
  MOD_RES (20), (21), (22), (23): Xaa is A or G or is absent

SEQ ID NO: 61328 - protein, 37 aa, Artificial Sequence; identical to SEQ ID NO: 26836
  GFR-binding peptide
  MOD_RES (31), (32): Xaa is C or S

SEQ ID NO: 61329 - protein, 37 aa, Artificial Sequence; identical to SEQ ID NO: 5715
  GFR-binding peptide
  MOD_RES (1), (33), (34): Xaa is C or S

SEQ ID NO: 61330 - protein, 37 aa, Artificial Sequence; identical to SEQ ID NO: 26840
  GFR-binding peptide
  MOD_RES (2), (4), (37): Xaa is C or S

SEQ ID NO: 61331 - protein, 36 aa, Artificial Sequence; identical to SEQ ID NO: 5716
  GFR-binding peptide
  MOD_RES (1), (3), (35), (36): Xaa is C or S

SEQ ID NO: 61332 - protein, 35 aa, Artificial Sequence
  GFR-binding peptide
  MOD_RES (1), (33), (34): Xaa is C or S
XSEVTMNRYKKLVVNKNEDFYLISIANMKEPVXXP

SEQ ID NO: 61333 - protein, 38 aa, Artificial Sequence
  GFR-binding peptide
  MOD_RES (2), (34), (35): Xaa is C or S
AXSEVTMNPIKGYVVNKNEDFYLINIPSMKEPVXXPEP

SEQ ID NO: 61334 - protein, 43 aa, Artificial Sequence
  GFR-binding peptide
  MOD_RES (2), (4), (38), (39): Xaa is C or S
  MOD_RES (16), (17), (18), (19), (20): Xaa is A or G
  MOD_RES (21), (22), (23), (24): Xaa is A or G or is absent
RXAXSEVTMNRYKKLXXXXXXXXXFYLISIANMKEPVXXPEPI

SEQ ID NO: 61335 - protein, 38 aa, Artificial Sequence; identical to SEQ ID NO: 5721
  GFR-binding peptide
  MOD_RES (1), (35), (36): Xaa is C or S
  MOD_RES (13), (14), (15), (16), (17): Xaa is A or G
  MOD_RES (18), (19), (20), (21): Xaa is A or G or is absent

SEQ ID NO: 61336 - protein, 44 aa, Artificial Sequence; identical to SEQ ID NO: 26848
  GFR-binding peptide
  MOD_RES (2), (4), (38), (39): Xaa is C or S
  MOD_RES (16), (17), (18), (19), (20): Xaa is A or G
  MOD_RES (21), (22), (23), (24): Xaa is A or G or is absent

SEQ ID NO: 61337 - protein, 37 aa, Artificial Sequence; identical to SEQ ID NO: 5723
  GFR-binding peptide
  MOD_RES (2), (4): Xaa is C or S
  MOD_RES (16), (17), (18), (19), (20): Xaa is A or G
  MOD_RES (21), (22), (23), (24): Xaa is A or G or is absent

SEQ ID NO: 61338 - protein, 36 aa, Artificial Sequence; identical to SEQ ID NO: 26849
  GFR-binding peptide
  MOD_RES (32), (33): Xaa is C or S

SEQ ID NO: 61339 - protein, 33 aa, Artificial Sequence; identical to SEQ ID NO: 31802
  GFR-binding peptide
  MOD_RES (32), (33): Xaa is C or S

SEQ ID NO: 61340 - protein, 36 aa, Artificial Sequence
  GFR-binding peptide
  MOD_RES (33), (34): Xaa is C or S
  MOD_RES (11), (12), (13), (14), (15): Xaa is A or G
  MOD_RES (16), (17), (18), (19): Xaa is A or G or is absent
EEVIMYHYKLXXXXXXXXXKYLMSIPSTKVPAXXTS

SEQ ID NO: 61341 - protein, 39 aa, Artificial Sequence; identical to SEQ ID NO: 26852
  GFR-binding peptide
  MOD_RES (2), (4), (38), (39): Xaa is C or S
  MOD_RES (16), (17), (18), (19), (20): Xaa is A or G
  MOD_RES (21), (22), (23), (24): Xaa is A or G or is absent

SEQ ID NO: 61342 - protein, 43 aa, Artificial Sequence
  GFR-binding peptide
  MOD_RES (1), (3), (37), (38): Xaa is C or S
  MOD_RES (15), (16), (17), (18), (19): Xaa is A or G
  MOD_RES (20), (21), (22), (23): Xaa is A or G or is absent
XAXSEVTMNYHYKLXXXXXXXXXKYLISIPSMKEPVXXPEPIG

SEQ ID NO: 61343 - protein, 39 aa, Artificial Sequence; identical to SEQ ID NO: 5730
  GFR-binding peptide
  MOD_RES (33), (34): Xaa is C or S
  MOD_RES (11), (12), (13), (14), (15): Xaa is A or G
  MOD_RES (16), (17), (18), (19): Xaa is A or G or is absent

SEQ ID NO: 61344 - protein, 34 aa, Artificial Sequence; identical to SEQ ID NO: 31814
  GFR-binding peptide
  MOD_RES (1), (3): Xaa is C or S

SEQ ID NO: 61345 - protein, 33 aa, Artificial Sequence; identical to SEQ ID NO: 31820
  GFR-binding peptide
  MOD_RES (12), (13), (14), (15), (16): Xaa is A or G
  MOD_RES (17), (18), (19), (20): Xaa is A or G or is absent

SEQ ID NO: 61346 - protein, 41 aa, Artificial Sequence; identical to SEQ ID NO: 5731
  GFR-binding peptide
  MOD_RES (1), (3), (35), (36): Xaa is C or S

SEQ ID NO: 61347 - protein, 39 aa, Artificial Sequence; identical to SEQ ID NO: 5733
  GFR-binding peptide
  MOD_RES (2), (4), (35), (36): Xaa is C or S

SEQ ID NO: 61348 - protein, 42 aa, Artificial Sequence; identical to SEQ ID NO: 5735
  GFR-binding peptide
  MOD_RES (2), (4), (38), (39): Xaa is C or S
  MOD_RES (16), (17), (18), (19), (20): Xaa is A or G
  MOD_RES (21), (22), (23), (24): Xaa is A or G or is absent

SEQ ID NO: 61349 - protein, 33 aa, Artificial Sequence; identical to SEQ ID NO: 5736
  GFR-binding peptide
  MOD_RES (2), (2): Xaa is C or S

SEQ ID NO: 61350 - protein, 37 aa, Artificial Sequence; identical to SEQ ID NO: 56781
  GFR-binding peptide
  MOD_RES (33), (34): Xaa is C or S
  MOD_RES (11), (12), (13), (14), (15): Xaa is A or G
  MOD_RES (16), (17), (18), (19): Xaa is A or G or is absent

SEQ ID NO: 61351 - protein, 39 aa, Artificial Sequence
  GFR-binding peptide
  MOD_RES (1), (34), (35): Xaa is C or S
  MOD_RES (12), (13), (14), (15), (16): Xaa is A or G
  MOD_RES (17), (18), (19), (20): Xaa is A or G or is absent
XEEVIMRHKRLXXXXXXXXXYYLMSTASTKVPAXXTSPV

SEQ ID NO: 61352 - protein, 39 aa, Artificial Sequence; identical to SEQ ID NO: 26871
  GFR-binding peptide
  MOD_RES (2), (4), (36), (37): Xaa is C or S

SEQ ID NO: 61353 - protein, 37 aa, Artificial Sequence
  GFR-binding peptide
  MOD_RES (31), (32): Xaa is C or S
EVVMDEYKFKVVNNASDLYLISIPELRTPVXXTPPTS

SEQ ID NO: 61354 - protein, 37 aa, Artificial Sequence
  GFR-binding peptide
  MOD_RES (1), (3), (37): Xaa is C or S
  MOD_RES (15), (16), (17), (18), (19): Xaa is A or G
  MOD_RES (20), (21), (22), (23): Xaa is A or G or is absent
XGXRDVVMGYHYKLXXXXXXXXXKYLMSIPSMKTPTX

SEQ ID NO: 61355 - protein, 35 aa, Artificial Sequence; identical to SEQ ID NO: 5744
  GFR-binding peptide
  MOD_RES (33), (34): Xaa is C or S
  MOD_RES (11), (12), (13), (14), (15): Xaa is A or G
  MOD_RES (16), (17), (18), (19): Xaa is A or G or is absent

SEQ ID NO: 61356 - protein, 33 aa, Artificial Sequence; identical to SEQ ID NO: 31841
  GFR-binding peptide
  MOD_RES (2), (2): Xaa is C or S

SEQ ID NO: 61357 - protein, 38 aa, Artificial Sequence
  GFR-binding peptide
  MOD_RES (32), (33): Xaa is C or S
SEVVMDRHKRLVVNNASDYYLISTASLRTPVXXTPPTS

SEQ ID NO: 61358 - protein, 36 aa, Artificial Sequence
  GFR-binding peptide
  MOD_RES (34), (35): Xaa is C or S
  MOD_RES (12), (13), (14), (15), (16): Xaa is A or G
  MOD_RES (17), (18), (19), (20): Xaa is A or G or is absent
SEVVMDRHKRLXXXXXXXXXYYLISTASLRTPVXXT

SEQ ID NO: 61359 - protein, 32 aa, Artificial Sequence; identical to SEQ ID NO: 5746
  GFR-binding peptide
  MOD_RES (11), (12), (13), (14), (15): Xaa is A or G
  MOD_RES (16), (17), (18), (19): Xaa is A or G or is absent

SEQ ID NO: 61360 - protein, 35 aa, Artificial Sequence; identical to SEQ ID NO: 5748
  GFR-binding peptide
  MOD_RES (31), (32): Xaa is C or S

SEQ ID NO: 61361 - protein, 37 aa, Artificial Sequence; identical to SEQ ID NO: 5749
  GFR-binding peptide
  MOD_RES (1), (3), (35), (36): Xaa is C or S

SEQ ID NO: 61362 - protein, 42 aa, Artificial Sequence; identical to SEQ ID NO: 26881
  GFR-binding peptide
  MOD_RES (2), (4), (37), (38): Xaa is C or S
  MOD_RES (15), (16), (17), (18), (19): Xaa is A or G
  MOD_RES (20), (21), (22), (23): Xaa is A or G or is absent

SEQ ID NO: 61363 - protein, 37 aa, Artificial Sequence; identical to SEQ ID NO: 26883
  GFR-binding peptide
  MOD_RES (32), (33): Xaa is C or S

SEQ ID NO: 61364 - protein, 40 aa, Artificial Sequence; identical to SEQ ID NO: 5751
  GFR-binding peptide
  MOD_RES (1), (3), (37), (38): Xaa is C or S
  MOD_RES (15), (16), (17), (18), (19): Xaa is A or G
  MOD_RES (20), (21), (22), (23): Xaa is A or G or is absent

SEQ ID NO: 61365 - protein, 38 aa, Artificial Sequence; identical to SEQ ID NO: 5752
  GFR-binding peptide
  MOD_RES (2), (35), (36): Xaa is C or S
  MOD_RES (13), (14), (15), (16), (17): Xaa is A or G
  MOD_RES (18), (19), (20), (21): Xaa is A or G or is absent

SEQ ID NO: 61366 - protein, 38 aa, Artificial Sequence; identical to SEQ ID NO: 5753
  GFR-binding peptide
  MOD_RES (2), (4), (37), (38): Xaa is C or S
  MOD_RES (15), (16), (17), (18), (19): Xaa is A or G
  MOD_RES (20), (21), (22), (23): Xaa is A or G or is absent

SEQ ID NO: 61367 - protein, 32 aa, Artificial Sequence
  GFR-binding peptide
  MOD_RES (1), (1): Xaa is C or S
XSEVVMDEYKFKVVNNASDLYLISIPELRTPV

SEQ ID NO: 61368 - protein, 34 aa, Artificial Sequence; identical to SEQ ID NO: 5755
  GFR-binding peptide
  MOD_RES (34), (34): Xaa is C or S
  MOD_RES (12), (13), (14), (15), (16): Xaa is A or G
  MOD_RES (17), (18), (19), (20): Xaa is A or G or is absent

SEQ ID NO: 61369 - protein, 40 aa, Artificial Sequence
  GFR-binding peptide
  MOD_RES (1), (3), (35), (36): Xaa is C or S
XGXSEVVMDRHKRLVVNNASDYYLISTASLRTPVXXTPPT

SEQ ID NO: 61370 - protein, 33 aa, Artificial Sequence; identical to SEQ ID NO: 26887
  GFR-binding peptide
  MOD_RES (12), (13), (14), (15), (16): Xaa is A or G
  MOD_RES (17), (18), (19), (20): Xaa is A or G or is absent

SEQ ID NO: 61371 - protein, 37 aa, Artificial Sequence; identical to SEQ ID NO: 5758
  GFR-binding peptide
  MOD_RES (1), (3): Xaa is C or S
  MOD_RES (16), (17), (18), (19), (20): Xaa is A or G
  MOD_RES (21), (22), (23), (24): Xaa is A or G or is absent

SEQ ID NO: 61372 - protein, 35 aa, Artificial Sequence
  GFR-binding peptide
  MOD_RES (2), (33), (34): Xaa is C or S
GXEEVIMRHKRLLLVRGNDYYLMSTASTKVPAXXT

SEQ ID NO: 61373 - protein, 39 aa, Artificial Sequence
  GFR-binding peptide
  MOD_RES (1), (35), (36): Xaa is C or S
  MOD_RES (13), (14), (15), (16), (17): Xaa is A or G
  MOD_RES (18), (19), (20), (21): Xaa is A or G or is absent
XSEVTMNYHYKLXXXXXXXXXKYLISIPSMKEPVXXPEP

SEQ ID NO: 61374 - protein, 42 aa, Artificial Sequence; identical to SEQ ID NO: 5761
  GFR-binding peptide
  MOD_RES (1), (3), (37), (38): Xaa is C or S
  MOD_RES (15), (16), (17), (18), (19): Xaa is A or G
  MOD_RES (20), (21), (22), (23): Xaa is A or G or is absent

SEQ ID NO: 61375 - protein, 36 aa, Artificial Sequence; identical to SEQ ID NO: 26893
  GFR-binding peptide
  MOD_RES (1), (35), (36): Xaa is C or S
  MOD_RES (13), (14), (15), (16), (17): Xaa is A or G
  MOD_RES (18), (19), (20), (21): Xaa is A or G or is absent

SEQ ID NO: 61376 - protein, 31 aa, Artificial Sequence
  GFR-binding peptide
  MOD_RES (31), (31): Xaa is C or S
DVVMGEYKFKIIQQKDNLYLMSIPEMKTPTX

SEQ ID NO: 61377 - protein, 40 aa, Artificial Sequence
  GFR-binding peptide
  MOD_RES (2), (36), (37): Xaa is C or S
  MOD_RES (14), (15), (16), (17), (18): Xaa is A or G
  MOD_RES (19), (20), (21), (22): Xaa is A or G or is absent
GXSEVVMDRHKRLXXXXXXXXXYYLISTASLRTPVXXTPP

SEQ ID NO: 61378 - protein, 39 aa, Artificial Sequence; identical to SEQ ID NO: 26899
  GFR-binding peptide
  MOD_RES (33), (34): Xaa is C or S
  MOD_RES (11), (12), (13), (14), (15): Xaa is A or G
  MOD_RES (16), (17), (18), (19): Xaa is A or G or is absent

SEQ ID NO: 61379 - protein, 40 aa, Artificial Sequence; identical to SEQ ID NO: 56808
  GFR-binding peptide
  MOD_RES (2), (34), (35): Xaa is C or S

SEQ ID NO: 61380 - protein, 34 aa, Artificial Sequence; identical to SEQ ID NO: 26900
  GFR-binding peptide
  MOD_RES (1), (33), (34): Xaa is C or S

SEQ ID NO: 61381 - protein, 44 aa, Artificial Sequence
  GFR-binding peptide
  MOD_RES (2), (4), (38), (39): Xaa is C or S
  MOD_RES (16), (17), (18), (19), (20): Xaa is A or G
  MOD_RES (21), (22), (23), (24): Xaa is A or G or is absent
RXGXAEVVMDRHKRLXXXXXXXXXYYLISTASLRAPVXXSAPAA

SEQ ID NO: 61382 - protein, 40 aa, Artificial Sequence; identical to SEQ ID NO: 5767
  GFR-binding peptide
  MOD_RES (34), (34): Xaa is C or S
  MOD_RES (12), (13), (14), (15), (16): Xaa is A or G
  MOD_RES (17), (18), (19), (20): Xaa is A or G or is absent

SEQ ID NO: 61383 - protein, 42 aa, Artificial Sequence; identical to SEQ ID NO: 26904
  GFR-binding peptide
  MOD_RES (2), (4), (36), (37): Xaa is C or S

SEQ ID NO: 61384 - protein, 36 aa, Artificial Sequence
  GFR-binding peptide
  MOD_RES (1), (3): Xaa is C or S
  MOD_RES (15), (16), (17), (18), (19): Xaa is A or G
  MOD_RES (20), (21), (22), (23): Xaa is A or G or is absent
XGXAEVVMDRHKRLXXXXXXXXXYYLISTASLRAPV

SEQ ID NO: 61385 - protein, 32 aa, Artificial Sequence
  GFR-binding peptide
  MOD_RES (2), (2): Xaa is C or S
KXSKVVMPIKGYVKPTRGVFYLINIPSLDQPV

SEQ ID NO: 61386 - protein, 37 aa, Artificial Sequence; identical to SEQ ID NO: 5771
  GFR-binding peptide
  MOD_RES (2), (33), (34): Xaa is C or S

SEQ ID NO: 61387 - protein, 35 aa, Artificial Sequence; identical to SEQ ID NO: 56817
  GFR-binding peptide
  MOD_RES (34), (35): Xaa is C or S
  MOD_RES (12), (13), (14), (15), (16): Xaa is A or G
  MOD_RES (17), (18), (19), (20): Xaa is A or G or is absent

SEQ ID NO: 61388 - protein, 30 aa, Artificial Sequence
  GFR-binding peptide
EEVIMRHKRLLLVRGNDYYLMSTASTKVPA

SEQ ID NO: 61389 - protein, 39 aa, Artificial Sequence; identical to SEQ ID NO: 5776
  GFR-binding peptide
  MOD_RES (2), (4), (37), (38): Xaa is C or S

SEQ ID NO: 61390 - protein, 35 aa, Artificial Sequence; identical to SEQ ID NO: 31879
  GFR-binding peptide
  MOD_RES (33), (34): Xaa is C or S
  MOD_RES (11), (12), (13), (14), (15): Xaa is A or G
  MOD_RES (16), (17), (18), (19): Xaa is A or G or is absent

SEQ ID NO: 61391 - protein, 36 aa, Artificial Sequence; identical to SEQ ID NO: 31884
  GFR-binding peptide
  MOD_RES (1), (35), (36): Xaa is C or S
  MOD_RES (13), (14), (15), (16), (17): Xaa is A or G
  MOD_RES (18), (19), (20), (21): Xaa is A or G or is absent

SEQ ID NO: 61392 - protein, 36 aa, Artificial Sequence; identical to SEQ ID NO: 5782
  GFR-binding peptide
  MOD_RES (2), (36): Xaa is C or S
  MOD_RES (14), (15), (16), (17), (18): Xaa is A or G
  MOD_RES (19), (20), (21), (22): Xaa is A or G or is absent

SEQ ID NO: 61393 - protein, 33 aa, Artificial Sequence
  GFR-binding peptide
  MOD_RES (12), (13), (14), (15), (16): Xaa is A or G
  MOD_RES (17), (18), (19), (20): Xaa is A or G or is absent
AEVVMDRHKRLXXXXXXXXXYYLISTASLRAPV

SEQ ID NO: 61394 - protein, 37 aa, Artificial Sequence
  GFR-binding peptide
  MOD_RES (31), (32): Xaa is C or S
DVVMGRHKRLIIQQKDNYYLMSTASMKTPTXXPGASG

SEQ ID NO: 61395 - protein, 34 aa, Artificial Sequence; identical to SEQ ID NO: 26925
  GFR-binding peptide
  MOD_RES (2), (2): Xaa is C or S

SEQ ID NO: 61396 - protein, 37 aa, Artificial Sequence; identical to SEQ ID NO: 5790
  GFR-binding peptide
  MOD_RES (33), (34): Xaa is C or S

SEQ ID NO: 61397 - protein, 39 aa, Artificial Sequence; identical to SEQ ID NO: 5791
  GFR-binding peptide
  MOD_RES (2), (4), (36), (37): Xaa is C or S

SEQ ID NO: 61398 - protein, 38 aa, Artificial Sequence
  GFR-binding peptide
  MOD_RES (2), (4), (38): Xaa is C or S
  MOD_RES (16), (17), (18), (19), (20): Xaa is A or G
  MOD_RES (21), (22), (23), (24): Xaa is A or G or is absent
RXGXAEVVMDRHKRLXXXXXXXXXYYLISTASLRAPVX

SEQ ID NO: 61399 - protein, 39 aa, Artificial Sequence; identical to SEQ ID NO: 5794
  GFR-binding peptide
  MOD_RES (33), (34): Xaa is C or S

SEQ ID NO: 61400 - protein, 34 aa, Artificial Sequence
  GFR-binding peptide
  MOD_RES (1), (3): Xaa is C or S
XGXRDVVMGEYKFKIIQQKDNLYLMSIPEMKTPT

SEQ ID NO: 61401 - protein, 35 aa, Artificial Sequence; identical to SEQ ID NO: 26931
  GFR-binding peptide
  MOD_RES (31), (32): Xaa is C or S

SEQ ID NO: 61402 - protein, 40 aa, Artificial Sequence; identical to SEQ ID NO: 31900
  GFR-binding peptide
  MOD_RES (1), (3), (37), (38): Xaa is C or S
  MOD_RES (15), (16), (17), (18), (19): Xaa is A or G
  MOD_RES (20), (21), (22), (23): Xaa is A or G or is absent

SEQ ID NO: 61403 - protein, 37 aa, Artificial Sequence; identical to SEQ ID NO: 26933
  GFR-binding peptide
  MOD_RES (34), (35): Xaa is C or S
  MOD_RES (12), (13), (14), (15), (16): Xaa is A or G
  MOD_RES (17), (18), (19), (20): Xaa is A or G or is absent

SEQ ID NO: 61404 - protein, 39 aa, Artificial Sequence; identical to SEQ ID NO: 5797
  GFR-binding peptide
  MOD_RES (1), (3), (37), (38): Xaa is C or S
  MOD_RES (15), (16), (17), (18), (19): Xaa is A or G
  MOD_RES (20), (21), (22), (23): Xaa is A or G or is absent

SEQ ID NO: 61405 - protein, 38 aa, Artificial Sequence; identical to SEQ ID NO: 31904
  GFR-binding peptide
  MOD_RES (2), (4), (38): Xaa is C or S
  MOD_RES (16), (17), (18), (19), (20): Xaa is A or G
  MOD_RES (21), (22), (23), (24): Xaa is A or G or is absent

SEQ ID NO: 61406 - protein, 36 aa, Artificial Sequence; identical to SEQ ID NO: 31907
  GFR-binding peptide
  MOD_RES (2), (34), (35): Xaa is C or S

SEQ ID NO: 61407 - protein, 35 aa, Artificial Sequence
  GFR-binding peptide
  MOD_RES (1), (35): Xaa is C or S
  MOD_RES (13), (14), (15), (16), (17): Xaa is A or G
  MOD_RES (18), (19), (20), (21): Xaa is A or G or is absent
XAEVVMDRHKRLXXXXXXXXXYYLISTASLRAPVX

SEQ ID NO: 61408 - protein, 37 aa, Artificial Sequence; identical to SEQ ID NO: 5800
  GFR-binding peptide
  MOD_RES (32), (33): Xaa is C or S

SEQ ID NO: 61409 - protein, 39 aa, Artificial Sequence; identical to SEQ ID NO: 56844
  GFR-binding peptide
  MOD_RES (2), (33), (34): Xaa is C or S

SEQ ID NO: 61410 - protein, 34 aa, Artificial Sequence; identical to SEQ ID NO: 26937
  GFR-binding peptide
  MOD_RES (31), (32): Xaa is C or S

SEQ ID NO: 61411 - protein, 43 aa, Artificial Sequence; identical to SEQ ID NO: 26939
  GFR-binding peptide
  MOD_RES (1), (3), (37), (38): Xaa is C or S
  MOD_RES (15), (16), (17), (18), (19): Xaa is A or G
  MOD_RES (20), (21), (22), (23): Xaa is A or G or is absent

SEQ ID NO: 61412 - protein, 40 aa, Artificial Sequence; identical to SEQ ID NO: 5807
  GFR-binding peptide
  MOD_RES (1), (3), (37), (38): Xaa is C or S
  MOD_RES (15), (16), (17), (18), (19): Xaa is A or G
  MOD_RES (20), (21), (22), (23): Xaa is A or G or is absent

SEQ ID NO: 61413 - protein, 39 aa, Artificial Sequence; identical to SEQ ID NO: 56854
  GFR-binding peptide
  MOD_RES (33), (34): Xaa is C or S
  MOD_RES (11), (12), (13), (14), (15): Xaa is A or G
  MOD_RES (16), (17), (18), (19): Xaa is A or G or is absent

SEQ ID NO: 61414 - protein, 31 aa, Artificial Sequence; identical to SEQ ID NO: 31915
  GFR-binding peptide
  MOD_RES (31), (31): Xaa is C or S

SEQ ID NO: 61415 - protein, 35 aa, Artificial Sequence; identical to SEQ ID NO: 31916
  GFR-binding peptide
  MOD_RES (2), (2): Xaa is C or S
  MOD_RES (14), (15), (16), (17), (18): Xaa is A or G
  MOD_RES (19), (20), (21), (22): Xaa is A or G or is absent

SEQ ID NO: 61416 - protein, 37 aa, Artificial Sequence; identical to SEQ ID NO: 31917
  GFR-binding peptide
  MOD_RES (1), (35), (36): Xaa is C or S
  MOD_RES (13), (14), (15), (16), (17): Xaa is A or G
  MOD_RES (18), (19), (20), (21): Xaa is A or G or is absent

SEQ ID NO: 61417 - protein, 40 aa, Artificial Sequence; identical to SEQ ID NO: 26943
  GFR-binding peptide
  MOD_RES (1), (3), (37), (38): Xaa is C or S
  MOD_RES (15), (16), (17), (18), (19): Xaa is A or G
  MOD_RES (20), (21), (22), (23): Xaa is A or G or is absent

SEQ ID NO: 61418 - protein, 30 aa, Artificial Sequence; identical to SEQ ID NO: 5814
  GFR-binding peptide

SEQ ID NO: 61419 - protein, 41 aa, Artificial Sequence; identical to SEQ ID NO: 5815
  GFR-binding peptide
  MOD_RES (2), (4), (38), (39): Xaa is C or S
  MOD_RES (16), (17), (18), (19), (20): Xaa is A or G
  MOD_RES (21), (22), (23), (24): Xaa is A or G or is absent

SEQ ID NO: 61420 - protein, 41 aa, Artificial Sequence
  GFR-binding peptide
  MOD_RES (2), (4), (38), (39): Xaa is C or S
  MOD_RES (16), (17), (18), (19), (20): Xaa is A or G
  MOD_RES (21), (22), (23), (24): Xaa is A or G or is absent
SXGXRDVVMGYHYKLXXXXXXXXXKYLMSIPSMKTPTXXPG

SEQ ID NO: 61421 - protein, 38 aa, Artificial Sequence; identical to SEQ ID NO: 5817
  GFR-binding peptide
  MOD_RES (32), (33): Xaa is C or S

SEQ ID NO: 61422 - protein, 31 aa, Artificial Sequence; identical to SEQ ID NO: 5819
  GFR-binding peptide

SEQ ID NO: 61423 - protein, 40 aa, Artificial Sequence; identical to SEQ ID NO: 31927
  GFR-binding peptide
  MOD_RES (2), (4), (36), (37): Xaa is C or S

SEQ ID NO: 61424 - protein, 36 aa, Artificial Sequence
  GFR-binding peptide
  MOD_RES (1), (35), (36): Xaa is C or S
  MOD_RES (13), (14), (15), (16), (17): Xaa is A or G
  MOD_RES (18), (19), (20), (21): Xaa is A or G or is absent
XSEVVMDRHKRLXXXXXXXXXYYLISTASLRTPVXX

SEQ ID NO: 61425 - protein, 34 aa, Artificial Sequence
  GFR-binding peptide
  MOD_RES (2), (4): Xaa is C or S
LXGXEEVIMRHKRLLLVRGNDYYLMSTASTKVPA

SEQ ID NO: 61426 - protein, 38 aa, Artificial Sequence; identical to SEQ ID NO: 5827
  GFR-binding peptide
  MOD_RES (33), (34): Xaa is C or S
  MOD_RES (11), (12), (13), (14), (15): Xaa is A or G
  MOD_RES (16), (17), (18), (19): Xaa is A or G or is absent

SEQ ID NO: 61427 - protein, 40 aa, Artificial Sequence; identical to SEQ ID NO: 5828
  GFR-binding peptide
  MOD_RES (1), (35): Xaa is C or S
  MOD_RES (13), (14), (15), (16), (17): Xaa is A or G
  MOD_RES (18), (19), (20), (21): Xaa is A or G or is absent

SEQ ID NO: 61428 - protein, 38 aa, Artificial Sequence; identical to SEQ ID NO: 5830
  GFR-binding peptide
  MOD_RES (2), (4), (36), (37): Xaa is C or S

SEQ ID NO: 61429 - protein, 36 aa, Artificial Sequence; identical to SEQ ID NO: 5833
  GFR-binding peptide
  MOD_RES (33), (34): Xaa is C or S
  MOD_RES (11), (12), (13), (14), (15): Xaa is A or G
  MOD_RES (16), (17), (18), (19): Xaa is A or G or is absent

SEQ ID NO: 61430 - protein, 41 aa, Artificial Sequence; identical to SEQ ID NO: 26962
  GFR-binding peptide
  MOD_RES (1), (3), (35), (36): Xaa is C or S

SEQ ID NO: 61431 - protein, 39 aa, Artificial Sequence; identical to SEQ ID NO: 5837
  GFR-binding peptide
  MOD_RES (1), (33): Xaa is C or S

SEQ ID NO: 61432 - protein, 39 aa, Artificial Sequence; identical to SEQ ID NO: 5838
  GFR-binding peptide
  MOD_RES (2), (4), (36), (37): Xaa is C or S

SEQ ID NO: 61433 - protein, 37 aa, Artificial Sequence
  GFR-binding peptide
  MOD_RES (2), (34), (35): Xaa is C or S
GXRDVVMGYHYKLIIQQKDNKYLMSIPSMKTPTXXPG

SEQ ID NO: 61434 - protein, 41 aa, Artificial Sequence
  GFR-binding peptide
  MOD_RES (1), (35), (36): Xaa is C or S
  MOD_RES (13), (14), (15), (16), (17): Xaa is A or G
  MOD_RES (18), (19), (20), (21): Xaa is A or G or is absent
XSEVVMDEYKFKXXXXXXXXXLYLISIPELRTPVXXTPPTS

SEQ ID NO: 61435 - protein, 38 aa, Artificial Sequence; identical to SEQ ID NO: 26966
  GFR-binding peptide
  MOD_RES (1), (3), (37), (38): Xaa is C or S
  MOD_RES (15), (16), (17), (18), (19): Xaa is A or G
  MOD_RES (20), (21), (22), (23): Xaa is A or G or is absent

SEQ ID NO: 61436 - protein, 36 aa, Artificial Sequence; identical to SEQ ID NO: 5841
  GFR-binding peptide
  MOD_RES (2), (33), (34): Xaa is C or S

SEQ ID NO: 61437 - protein, 35 aa, Artificial Sequence; identical to SEQ ID NO: 31946
  GFR-binding peptide
  MOD_RES (1), (35): Xaa is C or S
  MOD_RES (13), (14), (15), (16), (17): Xaa is A or G
  MOD_RES (18), (19), (20), (21): Xaa is A or G or is absent

SEQ ID NO: 61438 - protein, 39 aa, Artificial Sequence; identical to SEQ ID NO: 31950
  GFR-binding peptide
  MOD_RES (1), (3), (35), (36): Xaa is C or S

SEQ ID NO: 61439 - protein, 34 aa, Artificial Sequence; identical to SEQ ID NO: 31951
  GFR-binding peptide
  MOD_RES (2), (33), (34): Xaa is C or S

SEQ ID NO: 61440 - protein, 34 aa, Artificial Sequence; identical to SEQ ID NO: 5843
  GFR-binding peptide
  MOD_RES (32), (33): Xaa is C or S

SEQ ID NO: 61441 - protein, 40 aa, Artificial Sequence; identical to SEQ ID NO: 5845
  GFR-binding peptide
  MOD_RES (1), (36), (37): Xaa is C or S
  MOD_RES (14), (15), (16), (17), (18): Xaa is A or G
  MOD_RES (19), (20), (21), (22): Xaa is A or G or is absent

SEQ ID NO: 61442 - protein, 39 aa, Artificial Sequence
  GFR-binding peptide
  MOD_RES (2), (4), (38), (39): Xaa is C or S
  MOD_RES (16), (17), (18), (19), (20): Xaa is A or G
  MOD_RES (21), (22), (23), (24): Xaa is A or G or is absent
RXAXSEVTMNPIKGYXXXXXXXXXFYLINIPSMKEPVXX

SEQ ID NO: 61443 - protein, 42 aa, Artificial Sequence; identical to SEQ ID NO: 26976
  GFR-binding peptide
  MOD_RES (2), (4), (38), (39): Xaa is C or S
  MOD_RES (16), (17), (18), (19), (20): Xaa is A or G
  MOD_RES (21), (22), (23), (24): Xaa is A or G or is absent

SEQ ID NO: 61444 - protein, 38 aa, Artificial Sequence; identical to SEQ ID NO: 5852
  GFR-binding peptide
  MOD_RES (33), (34): Xaa is C or S
  MOD_RES (11), (12), (13), (14), (15): Xaa is A or G
  MOD_RES (16), (17), (18), (19): Xaa is A or G or is absent

SEQ ID NO: 61445 - protein, 37 aa, Artificial Sequence; identical to SEQ ID NO: 31962
  GFR-binding peptide
  MOD_RES (33), (34): Xaa is C or S
  MOD_RES (11), (12), (13), (14), (15): Xaa is A or G
  MOD_RES (16), (17), (18), (19): Xaa is A or G or is absent

SEQ ID NO: 61446 - protein, 38 aa, Artificial Sequence
  GFR-binding peptide
  MOD_RES (1), (3), (37), (38): Xaa is C or S
  MOD_RES (15), (16), (17), (18), (19): Xaa is A or G
  MOD_RES (20), (21), (22), (23): Xaa is A or G or is absent
XAXSEVTMNYHYKLXXXXXXXXXKYLISIPSMKEPVXX

SEQ ID NO: 61447 - protein, 35 aa, Artificial Sequence; identical to SEQ ID NO: 5859
  GFR-binding peptide
  MOD_RES (2), (34), (35): Xaa is C or S

SEQ ID NO: 61448 - protein, 37 aa, Artificial Sequence; identical to SEQ ID NO: 31966
  GFR-binding peptide
  MOD_RES (2), (34), (35): Xaa is C or S

SEQ ID NO: 61449 - protein, 35 aa, Artificial Sequence; identical to SEQ ID NO: 26988
  GFR-binding peptide
  MOD_RES (1), (3), (34), (35): Xaa is C or S

SEQ ID NO: 61450 - protein, 41 aa, Artificial Sequence; identical to SEQ ID NO: 5860
  GFR-binding peptide
  MOD_RES (2), (4), (38), (39): Xaa is C or S
  MOD_RES (16), (17), (18), (19), (20): Xaa is A or G
  MOD_RES (21), (22), (23), (24): Xaa is A or G or is absent

SEQ ID NO: 61451 - protein, 36 aa, Artificial Sequence; identical to SEQ ID NO: 5866
  GFR-binding peptide
  MOD_RES (2), (35), (36): Xaa is C or S
  MOD_RES (13), (14), (15), (16), (17): Xaa is A or G
  MOD_RES (18), (19), (20), (21): Xaa is A or G or is absent

SEQ ID NO: 61452 - protein, 38 aa, Artificial Sequence
  GFR-binding peptide
  MOD_RES (33), (34): Xaa is C or S
  MOD_RES (11), (12), (13), (14), (15): Xaa is A or G
  MOD_RES (16), (17), (18), (19): Xaa is A or G or is absent
EVTMNRHKRLXXXXXXXXXYYLISTASMKEPVXXPEPI

SEQ ID NO: 61453 - protein, 40 aa, Artificial Sequence; identical to SEQ ID NO: 26995
  GFR-binding peptide
  MOD_RES (1), (35), (36): Xaa is C or S
  MOD_RES (13), (14), (15), (16), (17): Xaa is A or G
  MOD_RES (18), (19), (20), (21): Xaa is A or G or is absent

SEQ ID NO: 61454 - protein, 35 aa, Artificial Sequence
  GFR-binding peptide
  MOD_RES (32), (33): Xaa is C or S
ESVAMGRHKRLYTVVGKDYYLISTASLKTPVXXAK

SEQ ID NO: 61455 - protein, 40 aa, Artificial Sequence; identical to SEQ ID NO: 5870
  GFR-binding peptide
  MOD_RES (2), (34), (35): Xaa is C or S

SEQ ID NO: 61456 - protein, 38 aa, Artificial Sequence; identical to SEQ ID NO: 31974
  GFR-binding peptide
  MOD_RES (1), (3), (37), (38): Xaa is C or S
  MOD_RES (15), (16), (17), (18), (19): Xaa is A or G
  MOD_RES (20), (21), (22), (23): Xaa is A or G or is absent

SEQ ID NO: 61457 - protein, 39 aa, Artificial Sequence
  GFR-binding peptide
  MOD_RES (2), (35), (36): Xaa is C or S
  MOD_RES (13), (14), (15), (16), (17): Xaa is A or G
  MOD_RES (18), (19), (20), (21): Xaa is A or G or is absent
KXSRVIMPIKGYXXXXXXXXXFYLINIPSLAQPVXXPAA

SEQ ID NO: 61458 - protein, 36 aa, Artificial Sequence
  GFR-binding peptide
  MOD_RES (1), (32), (33): Xaa is C or S
XSKVIMPIKGYIKPTKGIFYLINIPSLDQSVXXPSA

SEQ ID NO: 61459 - protein, 32 aa, Artificial Sequence
  GFR-binding peptide
  MOD_RES (32), (32): Xaa is C or S
SEVVMDYHYKLVVNNASDKYLISIPSLRTPVX

SEQ ID NO: 61460 - protein, 35 aa, Artificial Sequence; identical to SEQ ID NO: 27002
  GFR-binding peptide
  MOD_RES (1), (35): Xaa is C or S
  MOD_RES (13), (14), (15), (16), (17): Xaa is A or G
  MOD_RES (18), (19), (20), (21): Xaa is A or G or is absent

SEQ ID NO: 61461 - protein, 34 aa, Artificial Sequence
  GFR-binding peptide
  MOD_RES (2), (2): Xaa is C or S
  MOD_RES (13), (14), (15), (16), (17): Xaa is A or G
  MOD_RES (18), (19), (20), (21): Xaa is A or G or is absent
GXEEVIMEYKFKXXXXXXXXXLYLMSIPETKVPA

SEQ ID NO: 61462 - protein, 39 aa, Artificial Sequence; identical to SEQ ID NO: 5877
  GFR-binding peptide
  MOD_RES (1), (3), (38), (39): Xaa is C or S
  MOD_RES (16), (17), (18), (19), (20): Xaa is A or G
  MOD_RES (21), (22), (23), (24): Xaa is A or G or is absent

SEQ ID NO: 61463 - protein, 43 aa, Artificial Sequence; identical to SEQ ID NO: 5882
  GFR-binding peptide
  MOD_RES (2), (4), (37), (38): Xaa is C or S
  MOD_RES (15), (16), (17), (18), (19): Xaa is A or G
  MOD_RES (20), (21), (22), (23): Xaa is A or G or is absent

SEQ ID NO: 61464 - protein, 41 aa, Artificial Sequence; identical to SEQ ID NO: 5883
  GFR-binding peptide
  MOD_RES (2), (4), (35), (36): Xaa is C or S

SEQ ID NO: 61465 - protein, 33 aa, Artificial Sequence
  GFR-binding peptide
  MOD_RES (31), (32): Xaa is C or S
EEVIMRHKRLLLVRGNDYYLMSTASTKVPAXXT

SEQ ID NO: 61466 - protein, 35 aa, Artificial Sequence; identical to SEQ ID NO: 5885
  GFR-binding peptide
  MOD_RES (2), (34), (35): Xaa is C or S

SEQ ID NO: 61467 - protein, 32 aa, Artificial Sequence; identical to SEQ ID NO: 56937
  GFR-binding peptide
  MOD_RES (2), (2): Xaa is C or S

SEQ ID NO: 61468 - protein, 42 aa, Artificial Sequence; identical to SEQ ID NO: 5887
  GFR-binding peptide
  MOD_RES (2), (36): Xaa is C or S
  MOD_RES (14), (15), (16), (17), (18): Xaa is A or G
  MOD_RES (19), (20), (21), (22): Xaa is A or G or is absent

SEQ ID NO: 61469 - protein, 38 aa, Artificial Sequence
  GFR-binding peptide
  MOD_RES (33), (34): Xaa is C or S
  MOD_RES (11), (12), (13), (14), (15): Xaa is A or G
  MOD_RES (16), (17), (18), (19): Xaa is A or G or is absent
DVVMGRHKRLXXXXXXXXXYYLMSTASMKTPTXXPGAS

SEQ ID NO: 61470 - protein, 35 aa, Artificial Sequence
  GFR-binding peptide
  MOD_RES (1), (35): Xaa is C or S
  MOD_RES (13), (14), (15), (16), (17): Xaa is A or G
  MOD_RES (18), (19), (20), (21): Xaa is A or G or is absent
XRDVVMGRHKRLXXXXXXXXXYYLMSTASMKTPTX

SEQ ID NO: 61471 - protein, 41 aa, Artificial Sequence; identical to SEQ ID NO: 27013
  GFR-binding peptide
  MOD_RES (2), (35), (36): Xaa is C or S
  MOD_RES (13), (14), (15), (16), (17): Xaa is A or G
  MOD_RES (18), (19), (20), (21): Xaa is A or G or is absent

SEQ ID NO: 61472 - protein, 38 aa, Artificial Sequence; identical to SEQ ID NO: 27017
  GFR-binding peptide
  MOD_RES (1), (33): Xaa is C or S

SEQ ID NO: 61473 - protein, 34 aa, Artificial Sequence; identical to SEQ ID NO: 5897
  GFR-binding peptide
  MOD_RES (2), (2): Xaa is C or S
  MOD_RES (13), (14), (15), (16), (17): Xaa is A or G
  MOD_RES (18), (19), (20), (21): Xaa is A or G or is absent

SEQ ID NO: 61474 - protein, 31 aa, Artificial Sequence; identical to SEQ ID NO: 5898
  GFR-binding peptide

SEQ ID NO: 61475 - protein, 40 aa, Artificial Sequence; identical to SEQ ID NO: 5900
  GFR-binding peptide
  MOD_RES (2), (37), (38): Xaa is C or S
  MOD_RES (15), (16), (17), (18), (19): Xaa is A or G
  MOD_RES (20), (21), (22), (23): Xaa is A or G or is absent

SEQ ID NO: 61476 - protein, 37 aa, Artificial Sequence
  GFR-binding peptide
  MOD_RES (34), (35): Xaa is C or S
  MOD_RES (12), (13), (14), (15), (16): Xaa is A or G
  MOD_RES (17), (18), (19), (20): Xaa is A or G or is absent
SEVTMNEYKFKXXXXXXXXXLYLISIPEMKEPVXXPE

SEQ ID NO: 61477 - protein, 37 aa, Artificial Sequence; identical to SEQ ID NO: 32002
  GFR-binding peptide
  MOD_RES (1), (35), (36): Xaa is C or S
  MOD_RES (13), (14), (15), (16), (17): Xaa is A or G
  MOD_RES (18), (19), (20), (21): Xaa is A or G or is absent

SEQ ID NO: 61478 - protein, 34 aa, Artificial Sequence; identical to SEQ ID NO: 27023
  GFR-binding peptide
  MOD_RES (1), (33), (34): Xaa is C or S

SEQ ID NO: 61479 - protein, 33 aa, Artificial Sequence; identical to SEQ ID NO: 32004
  GFR-binding peptide
  MOD_RES (32), (32): Xaa is C or S

SEQ ID NO: 61480 - protein, 39 aa, Artificial Sequence; identical to SEQ ID NO: 5904
  GFR-binding peptide
  MOD_RES (2), (4), (37), (38): Xaa is C or S
  MOD_RES (15), (16), (17), (18), (19): Xaa is A or G
  MOD_RES (20), (21), (22), (23): Xaa is A or G or is absent

SEQ ID NO: 61481 - protein, 36 aa, Artificial Sequence; identical to SEQ ID NO: 5908
  GFR-binding peptide
  MOD_RES (2), (33), (34): Xaa is C or S

SEQ ID NO: 61482 - protein, 39 aa, Artificial Sequence; identical to SEQ ID NO: 5911
  GFR-binding peptide
  MOD_RES (2), (4), (35), (36): Xaa is C or S

SEQ ID NO: 61483 - protein, 36 aa, Artificial Sequence; identical to SEQ ID NO: 5913
  GFR-binding peptide
  MOD_RES (34), (35): Xaa is C or S
  MOD_RES (12), (13), (14), (15), (16): Xaa is A or G
  MOD_RES (17), (18), (19), (20): Xaa is A or G or is absent

SEQ ID NO: 61484 - protein, 38 aa, Artificial Sequence; identical to SEQ ID NO: 32010
  GFR-binding peptide
  MOD_RES (2), (36), (37): Xaa is C or S
  MOD_RES (14), (15), (16), (17), (18): Xaa is A or G
  MOD_RES (19), (20), (21), (22): Xaa is A or G or is absent

SEQ ID NO: 61485 - protein, 30 aa, Artificial Sequence; identical to SEQ ID NO: 5914
  GFR-binding peptide

SEQ ID NO: 61486 - protein, 39 aa, Artificial Sequence; identical to SEQ ID NO: 32021
  GFR-binding peptide
  MOD_RES (1), (35), (36): Xaa is C or S
  MOD_RES (13), (14), (15), (16), (17): Xaa is A or G
  MOD_RES (18), (19), (20), (21): Xaa is A or G or is absent

SEQ ID NO: 61487 - protein, 39 aa, Artificial Sequence
  GFR-binding peptide
  MOD_RES (2), (34), (35): Xaa is C or S
AXSEVTMNRYKKLVVNKNEDFYLISIANMKEPVXXPEPI

SEQ ID NO: 61488 - protein, 40 aa, Artificial Sequence
  GFR-binding peptide
  MOD_RES (34), (35): Xaa is C or S
  MOD_RES (12), (13), (14), (15), (16): Xaa is A or G
  MOD_RES (17), (18), (19), (20): Xaa is A or G or is absent
SEVVMDYHYKLXXXXXXXXXKYLISIPSLRTPVXXTPPTS

SEQ ID NO: 61489 - protein, 40 aa, Artificial Sequence
  GFR-binding peptide
  MOD_RES (34), (35): Xaa is C or S
  MOD_RES (12), (13), (14), (15), (16): Xaa is A or G
  MOD_RES (17), (18), (19), (20): Xaa is A or G or is absent
SEVTMNRHKRLXXXXXXXXXYYLISTASMKEPVXXPEPIG

SEQ ID NO: 61490 - protein, 37 aa, Artificial Sequence; identical to SEQ ID NO: 32030
  GFR-binding peptide
  MOD_RES (2), (34), (35): Xaa is C or S

SEQ ID NO: 61491 - protein, 37 aa, Artificial Sequence; identical to SEQ ID NO: 32033
  GFR-binding peptide
  MOD_RES (34), (35): Xaa is C or S
  MOD_RES (12), (13), (14), (15), (16): Xaa is A or G
  MOD_RES (17), (18), (19), (20): Xaa is A or G or is absent

SEQ ID NO: 61492 - protein, 33 aa, Artificial Sequence; identical to SEQ ID NO: 5924
  GFR-binding peptide
  MOD_RES (31), (31): Xaa is C or S

SEQ ID NO: 61493 - protein, 41 aa, Artificial Sequence; identical to SEQ ID NO: 27040
  GFR-binding peptide
  MOD_RES (1), (3), (35), (36): Xaa is C or S

SEQ ID NO: 61494 - protein, 35 aa, Artificial Sequence; identical to SEQ ID NO: 27041
  GFR-binding peptide
  MOD_RES (2), (34), (35): Xaa is C or S

SEQ ID NO: 61495 - protein, 37 aa, Artificial Sequence; identical to SEQ ID NO: 5928
  GFR-binding peptide
  MOD_RES (1), (3), (36), (37): Xaa is C or S

SEQ ID NO: 61496 - protein, 37 aa, Artificial Sequence; identical to SEQ ID NO: 27046
  GFR-binding peptide
  MOD_RES (2), (4), (36), (37): Xaa is C or S

SEQ ID NO: 61497 - protein, 36 aa, Artificial Sequence
  GFR-binding peptide
  MOD_RES (2), (35), (36): Xaa is C or S
  MOD_RES (13), (14), (15), (16), (17): Xaa is A or G
  MOD_RES (18), (19), (20), (21): Xaa is A or G or is absent
GXEEVIMYHYKLXXXXXXXXXKYLMSIPSTKVPAXX

SEQ ID NO: 61498 - protein, 38 aa, Artificial Sequence
  GFR-binding peptide
  MOD_RES (1), (33), (34): Xaa is C or S
XSEVVMDYHYKLVVNNASDKYLISIPSLRTPVXXTPPT

SEQ ID NO: 61499 - protein, 36 aa, Artificial Sequence
  GFR-binding peptide
  MOD_RES (2), (36): Xaa is C or S
  MOD_RES (14), (15), (16), (17), (18): Xaa is A or G
  MOD_RES (19), (20), (21), (22): Xaa is A or G or is absent
AXSEVTMNRYKKLXXXXXXXXXFYLISIANMKEPVX

SEQ ID NO: 61500 - protein, 36 aa, Artificial Sequence; identical to SEQ ID NO: 13356
  GFR-binding peptide
  MOD_RES (1), (33), (34): Xaa is C or S

SEQ ID NO: 61501 - protein, 34 aa, Artificial Sequence; identical to SEQ ID NO: 27053
  GFR-binding peptide
  MOD_RES (2), (2): Xaa is C or S
  MOD_RES (13), (14), (15), (16), (17): Xaa is A or G
  MOD_RES (18), (19), (20), (21): Xaa is A or G or is absent

SEQ ID NO: 61502 - protein, 33 aa, Artificial Sequence
  GFR-binding peptide
  MOD_RES (2), (33): Xaa is C or S
KXSKVVMPIKGYVKPTRGVFYLINIPSLDQPVX

SEQ ID NO: 61503 - protein, 37 aa, Artificial Sequence; identical to SEQ ID NO: 5936
  GFR-binding peptide
  MOD_RES (1), (36), (37): Xaa is C or S
  MOD_RES (14), (15), (16), (17), (18): Xaa is A or G
  MOD_RES (19), (20), (21), (22): Xaa is A or G or is absent

SEQ ID NO: 61504 - protein, 35 aa, Artificial Sequence
  GFR-binding peptide
  MOD_RES (2), (2): Xaa is C or S
  MOD_RES (14), (15), (16), (17), (18): Xaa is A or G
  MOD_RES (19), (20), (21), (22): Xaa is A or G or is absent
GXRDVVMGRHKRLXXXXXXXXXYYLMSTASMKTPT

SEQ ID NO: 61505 - protein, 36 aa, Artificial Sequence
  GFR-binding peptide
  MOD_RES (1), (33), (34): Xaa is C or S
XSEVVMDYHYKLVVNNASDKYLISIPSLRTPVXXTP

SEQ ID NO: 61506 - protein, 41 aa, Artificial Sequence
  GFR-binding peptide
  MOD_RES (2), (4), (35), (36): Xaa is C or S
SXKXSKVVMPIKGYVKPTRGVFYLINIPSLDQPVXXPSASA

SEQ ID NO: 61507 - protein, 34 aa, Artificial Sequence; identical to SEQ ID NO: 32050
  GFR-binding peptide
  MOD_RES (1), (34): Xaa is C or S
  MOD_RES (12), (13), (14), (15), (16): Xaa is A or G
  MOD_RES (17), (18), (19), (20): Xaa is A or G or is absent

SEQ ID NO: 61508 - protein, 36 aa, Artificial Sequence; identical to SEQ ID NO: 27060
  GFR-binding peptide
  MOD_RES (32), (33): Xaa is C or S

SEQ ID NO: 61509 - protein, 37 aa, Artificial Sequence; identical to SEQ ID NO: 32051
  GFR-binding peptide
  MOD_RES (1), (33), (34): Xaa is C or S

SEQ ID NO: 61510 - protein, 34 aa, Artificial Sequence
  GFR-binding peptide
  MOD_RES (31), (32): Xaa is C or S
EEVIMEYKFKLLVRGNDLYLMSIPETKVPAXXTS

SEQ ID NO: 61511 - protein, 39 aa, Artificial Sequence; identical to SEQ ID NO: 32056
  GFR-binding peptide
  MOD_RES (1), (35), (36): Xaa is C or S
  MOD_RES (13), (14), (15), (16), (17): Xaa is A or G
  MOD_RES (18), (19), (20), (21): Xaa is A or G or is absent

SEQ ID NO: 61512 - protein, 43 aa, Artificial Sequence; identical to SEQ ID NO: 13372
  GFR-binding peptide
  MOD_RES (2), (4), (38), (39): Xaa is C or S
  MOD_RES (16), (17), (18), (19), (20): Xaa is A or G
  MOD_RES (21), (22), (23), (24): Xaa is A or G or is absent

SEQ ID NO: 61513 - protein, 39 aa, Artificial Sequence
  GFR-binding peptide
  MOD_RES (34), (35): Xaa is C or S
  MOD_RES (12), (13), (14), (15), (16): Xaa is A or G
  MOD_RES (17), (18), (19), (20): Xaa is A or G or is absent
SEVTMNYHYKLXXXXXXXXXKYLISIPSMKEPVXXPEPI

SEQ ID NO: 61514 - protein, 39 aa, Artificial Sequence
  GFR-binding peptide
  MOD_RES (1), (3), (37), (38): Xaa is C or S
  MOD_RES (15), (16), (17), (18), (19): Xaa is A or G
  MOD_RES (20), (21), (22), (23): Xaa is A or G or is absent
XGXSEVVMDEYKFKXXXXXXXXXLYLISIPELRTPVXXT

SEQ ID NO: 61515 - protein, 40 aa, Artificial Sequence
  GFR-binding peptide
  MOD_RES (1), (3), (35), (36): Xaa is C or S
XGXESVAMGRHKRLYTVVGKDYYLISTASLKTPVXXAKSA

SEQ ID NO: 61516 - protein, 38 aa, Artificial Sequence
  GFR-binding peptide
  MOD_RES (2), (33), (34): Xaa is C or S
KXSKVIMPIKGYIKPTKGIFYLINIPSLDQSVXXPSAS

SEQ ID NO: 61517 - protein, 37 aa, Artificial Sequence; identical to SEQ ID NO: 27065
  GFR-binding peptide
  MOD_RES (1), (3), (37): Xaa is C or S
  MOD_RES (15), (16), (17), (18), (19): Xaa is A or G
  MOD_RES (20), (21), (22), (23): Xaa is A or G or is absent

SEQ ID NO: 61518 - protein, 37 aa, Artificial Sequence; identical to SEQ ID NO: 5952
  GFR-binding peptide
  MOD_RES (1), (35), (36): Xaa is C or S
  MOD_RES (13), (14), (15), (16), (17): Xaa is A or G
  MOD_RES (18), (19), (20), (21): Xaa is A or G or is absent

SEQ ID NO: 61519 - protein, 36 aa, Artificial Sequence; identical to SEQ ID NO: 5953
  GFR-binding peptide
  MOD_RES (2), (36): Xaa is C or S
  MOD_RES (14), (15), (16), (17), (18): Xaa is A or G
  MOD_RES (19), (20), (21), (22): Xaa is A or G or is absent

SEQ ID NO: 61520 - protein, 39 aa, Artificial Sequence; identical to SEQ ID NO: 27069
  GFR-binding peptide
  MOD_RES (1), (3), (35), (36): Xaa is C or S

SEQ ID NO: 61521 - protein, 37 aa, Artificial Sequence; identical to SEQ ID NO: 5955
  GFR-binding peptide
  MOD_RES (33), (34): Xaa is C or S

SEQ ID NO: 61522 - protein, 32 aa, Artificial Sequence
  GFR-binding peptide
  MOD_RES (31), (32): Xaa is C or S
DVVMGEYKFKIIQQKDNLYLMSIPEMKTPTXX

SEQ ID NO: 61523 - protein, 34 aa, Artificial Sequence
  GFR-binding peptide
  MOD_RES (34), (34): Xaa is C or S
  MOD_RES (12), (13), (14), (15), (16): Xaa is A or G
  MOD_RES (17), (18), (19), (20): Xaa is A or G or is absent
AEVVMDRHKRLXXXXXXXXXYYLISTASLRAPVX

SEQ ID NO: 61524 - protein, 33 aa, Artificial Sequence; identical to SEQ ID NO: 5957
  GFR-binding peptide
  MOD_RES (33), (33): Xaa is C or S
  MOD_RES (11), (12), (13), (14), (15): Xaa is A or G
  MOD_RES (16), (17), (18), (19): Xaa is A or G or is absent

SEQ ID NO: 61525 - protein, 38 aa, Artificial Sequence; identical to SEQ ID NO: 13382
  GFR-binding peptide
  MOD_RES (1), (33), (34): Xaa is C or S

SEQ ID NO: 61526 - protein, 42 aa, Artificial Sequence; identical to SEQ ID NO: 5958
  GFR-binding peptide
  MOD_RES (2), (4), (37), (38): Xaa is C or S

SEQ ID NO: 61527 - protein, 37 aa, Artificial Sequence
  GFR-binding peptide
  MOD_RES (1), (33), (34): Xaa is C or S
XSEVVMDYHYKLVVNNASDKYLISIPSLRTPVXXTPP

SEQ ID NO: 61528 - protein, 38 aa, Artificial Sequence; identical to SEQ ID NO: 27078
  GFR-binding peptide
  MOD_RES (1), (35), (36): Xaa is C or S
  MOD_RES (13), (14), (15), (16), (17): Xaa is A or G
  MOD_RES (18), (19), (20), (21): Xaa is A or G or is absent

SEQ ID NO: 61529 - protein, 34 aa, Artificial Sequence; identical to SEQ ID NO: 5966
  GFR-binding peptide
  MOD_RES (31), (32): Xaa is C or S

SEQ ID NO: 61530 - protein, 41 aa, Artificial Sequence; identical to SEQ ID NO: 5967
  GFR-binding peptide
  MOD_RES (1), (35), (36): Xaa is C or S
  MOD_RES (13), (14), (15), (16), (17): Xaa is A or G
  MOD_RES (18), (19), (20), (21): Xaa is A or G or is absent

SEQ ID NO: 61531 - protein, 33 aa, Artificial Sequence
  GFR-binding peptide
  MOD_RES (1), (33): Xaa is C or S
XSEVVMDRHKRLVVNNASDYYLISTASLRTPVX

SEQ ID NO: 61532 - protein, 39 aa, Artificial Sequence; identical to SEQ ID NO: 27085
  GFR-binding peptide
  MOD_RES (2), (4), (36): Xaa is C or S

SEQ ID NO: 61533 - protein, 32 aa, Artificial Sequence; identical to SEQ ID NO: 5972
  GFR-binding peptide
  MOD_RES (2), (2): Xaa is C or S

SEQ ID NO: 61534 - protein, 39 aa, Artificial Sequence; identical to SEQ ID NO: 5973
  GFR-binding peptide
  MOD_RES (1), (34), (35): Xaa is C or S

SEQ ID NO: 61535 - protein, 36 aa, Artificial Sequence; identical to SEQ ID NO: 32086
  GFR-binding peptide
  MOD_RES (2), (35), (36): Xaa is C or S

SEQ ID NO: 61536 - protein, 42 aa, Artificial Sequence
  GFR-binding peptide
  MOD_RES (1), (3), (36), (37): Xaa is C or S
  MOD_RES (14), (15), (16), (17), (18): Xaa is A or G
  MOD_RES (19), (20), (21), (22): Xaa is A or G or is absent
XKXSKVIMPIKGYXXXXXXXXXFYLINIPSLDQSVXXPSASA

SEQ ID NO: 61537 - protein, 34 aa, Artificial Sequence; identical to SEQ ID NO: 5975
  GFR-binding peptide
  MOD_RES (1), (3): Xaa is C or S

SEQ ID NO: 61538 - protein, 36 aa, Artificial Sequence; identical to SEQ ID NO: 5980
  GFR-binding peptide
  MOD_RES (2), (36): Xaa is C or S
  MOD_RES (14), (15), (16), (17), (18): Xaa is A or G
  MOD_RES (19), (20), (21), (22): Xaa is A or G or is absent

SEQ ID NO: 61539 - protein, 40 aa, Artificial Sequence; identical to SEQ ID NO: 5981
  GFR-binding peptide
  MOD_RES (1), (35), (36): Xaa is C or S
  MOD_RES (13), (14), (15), (16), (17): Xaa is A or G
  MOD_RES (18), (19), (20), (21): Xaa is A or G or is absent

SEQ ID NO: 61540 - protein, 32 aa, Artificial Sequence; identical to SEQ ID NO: 5983
  GFR-binding peptide
  MOD_RES (11), (12), (13), (14), (15): Xaa is A or G
  MOD_RES (16), (17), (18), (19): Xaa is A or G or is absent

SEQ ID NO: 61541 - protein, 35 aa, Artificial Sequence; identical to SEQ ID NO: 27097
  GFR-binding peptide
  MOD_RES (33), (33): Xaa is C or S
  MOD_RES (11), (12), (13), (14), (15): Xaa is A or G
  MOD_RES (16), (17), (18), (19): Xaa is A or G or is absent

SEQ ID NO: 61542 - protein, 42 aa, Artificial Sequence; identical to SEQ ID NO: 5986
  GFR-binding peptide
  MOD_RES (1), (3), (36), (37): Xaa is C or S
  MOD_RES (14), (15), (16), (17), (18): Xaa is A or G
  MOD_RES (19), (20), (21), (22): Xaa is A or G or is absent

SEQ ID NO: 61543 - protein, 37 aa, Artificial Sequence; identical to SEQ ID NO: 27099
  GFR-binding peptide
  MOD_RES (1), (3), (35), (36): Xaa is C or S

SEQ ID NO: 61544 - protein, 31 aa, Artificial Sequence; identical to SEQ ID NO: 5987
  GFR-binding peptide
  MOD_RES (31), (31): Xaa is C or S

SEQ ID NO: 61545 - protein, 36 aa, Artificial Sequence
  GFR-binding peptide
  MOD_RES (1), (3): Xaa is C or S
  MOD_RES (15), (16), (17), (18), (19): Xaa is A or G
  MOD_RES (20), (21), (22), (23): Xaa is A or G or is absent
XAXSEVTMNYHYKLXXXXXXXXXKYLISIPSMKEPV

SEQ ID NO: 61546 - protein, 37 aa, Artificial Sequence; identical to SEQ ID NO: 32100
  GFR-binding peptide
  MOD_RES (2), (4): Xaa is C or S
  MOD_RES (16), (17), (18), (19), (20): Xaa is A or G
  MOD_RES (21), (22), (23), (24): Xaa is A or G or is absent

SEQ ID NO: 61547 - protein, 35 aa, Artificial Sequence; identical to SEQ ID NO: 5988
  GFR-binding peptide
  MOD_RES (1), (35): Xaa is C or S
  MOD_RES (13), (14), (15), (16), (17): Xaa is A or G
  MOD_RES (18), (19), (20), (21): Xaa is A or G or is absent

SEQ ID NO: 61548 - protein, 39 aa, Artificial Sequence; identical to SEQ ID NO: 32103
  GFR-binding peptide
  MOD_RES (2), (4), (38), (39): Xaa is C or S
  MOD_RES (16), (17), (18), (19), (20): Xaa is A or G
  MOD_RES (21), (22), (23), (24): Xaa is A or G or is absent

SEQ ID NO: 61549 - protein, 33 aa, Artificial Sequence; identical to SEQ ID NO: 5993
  GFR-binding peptide
  MOD_RES (32), (33): Xaa is C or S

SEQ ID NO: 61550 - protein, 39 aa, Artificial Sequence; identical to SEQ ID NO: 5994
  GFR-binding peptide
  MOD_RES (1), (3), (35), (36): Xaa is C or S

SEQ ID NO: 61551 - protein, 33 aa, Artificial Sequence; identical to SEQ ID NO: 27106
  GFR-binding peptide
  MOD_RES (2), (2): Xaa is C or S

SEQ ID NO: 61552 - protein, 35 aa, Artificial Sequence; identical to SEQ ID NO: 5996
  GFR-binding peptide
  MOD_RES (33), (34): Xaa is C or S
  MOD_RES (11), (12), (13), (14), (15): Xaa is A or G
  MOD_RES (16), (17), (18), (19): Xaa is A or G or is absent

SEQ ID NO: 61553 - protein, 33 aa, Artificial Sequence; identical to SEQ ID NO: 32110
  GFR-binding peptide
  MOD_RES (2), (2): Xaa is C or S

SEQ ID NO: 61554 - protein, 40 aa, Artificial Sequence; identical to SEQ ID NO: 32113
  GFR-binding peptide
  MOD_RES (34), (35): Xaa is C or S
  MOD_RES (12), (13), (14), (15), (16): Xaa is A or G
  MOD_RES (17), (18), (19), (20): Xaa is A or G or is absent

SEQ ID NO: 61555 - protein, 35 aa, Artificial Sequence; identical to SEQ ID NO: 32115
  GFR-binding peptide
  MOD_RES (32), (33): Xaa is C or S

SEQ ID NO: 61556 - protein, 34 aa, Artificial Sequence; identical to SEQ ID NO: 27115
  GFR-binding peptide
  MOD_RES (33), (34): Xaa is C or S
  MOD_RES (11), (12), (13), (14), (15): Xaa is A or G
  MOD_RES (16), (17), (18), (19): Xaa is A or G or is absent

SEQ ID NO: 61557 - protein, 34 aa, Artificial Sequence
  GFR-binding peptide
  MOD_RES (1), (33), (34): Xaa is C or S
XSEVVMDRHKRLVVNNASDYYLISTASLRTPVXX

SEQ ID NO: 61558 - protein, 39 aa, Artificial Sequence; identical to SEQ ID NO: 6004
  GFR-binding peptide
  MOD_RES (1), (34), (35): Xaa is C or S
  MOD_RES (12), (13), (14), (15), (16): Xaa is A or G
  MOD_RES (17), (18), (19), (20): Xaa is A or G or is absent

SEQ ID NO: 61559 - protein, 30 aa, Artificial Sequence
  GFR-binding peptide
EEVIMYHYKLLLVRGNDKYLMSIPSTKVPA

SEQ ID NO: 61560 - protein, 40 aa, Artificial Sequence
  GFR-binding peptide
  MOD_RES (2), (4), (38), (39): Xaa is C or S
  MOD_RES (16), (17), (18), (19), (20): Xaa is A or G
  MOD_RES (21), (22), (23), (24): Xaa is A or G or is absent
RXGXESVAMGRHKRLXXXXXXXXXYYLISTASLKTPVXXA

SEQ ID NO: 61561 - protein, 36 aa, Artificial Sequence
  GFR-binding peptide
  MOD_RES (1), (33), (34): Xaa is C or S
XSEVTMNEYKFKVVNKNEDLYLISIPEMKEPVXXPE

SEQ ID NO: 61562 - protein, 36 aa, Artificial Sequence; identical to SEQ ID NO: 6006
  GFR-binding peptide
  MOD_RES (32), (33): Xaa is C or S

SEQ ID NO: 61563 - protein, 39 aa, Artificial Sequence; identical to SEQ ID NO: 27127
  GFR-binding peptide
  MOD_RES (1), (3), (35), (36): Xaa is C or S

SEQ ID NO: 61564 - protein, 38 aa, Artificial Sequence; identical to SEQ ID NO: 27130
  GFR-binding peptide
  MOD_RES (1), (3), (35), (36): Xaa is C or S

SEQ ID NO: 61565 - protein, 36 aa, Artificial Sequence; identical to SEQ ID NO: 6010
  GFR-binding peptide
  MOD_RES (2), (34), (35): Xaa is C or S

SEQ ID NO: 61566 - protein, 37 aa, Artificial Sequence; identical to SEQ ID NO: 6012
  GFR-binding peptide
  MOD_RES (34), (35): Xaa is C or S
  MOD_RES (12), (13), (14), (15), (16): Xaa is A or G
  MOD_RES (17), (18), (19), (20): Xaa is A or G or is absent

SEQ ID NO: 61567 - protein, 35 aa, Artificial Sequence; identical to SEQ ID NO: 32137
  GFR-binding peptide
  MOD_RES (1), (3), (35): Xaa is C or S

SEQ ID NO: 61568 - protein, 35 aa, Artificial Sequence; identical to SEQ ID NO: 6013
  GFR-binding peptide
  MOD_RES (34), (35): Xaa is C or S
  MOD_RES (12), (13), (14), (15), (16): Xaa is A or G
  MOD_RES (17), (18), (19), (20): Xaa is A or G or is absent

SEQ ID NO: 61569 - protein, 37 aa, Artificial Sequence
  GFR-binding peptide
  MOD_RES (1), (3), (34), (35): Xaa is C or S
XGXEEVIMYHYKLLLVRGNDKYLMSIPSTKVPAXXTS

SEQ ID NO: 61570 - protein, 40 aa, Artificial Sequence; identical to SEQ ID NO: 6014
  GFR-binding peptide
  MOD_RES (1), (3), (36), (37): Xaa is C or S
  MOD_RES (14), (15), (16), (17), (18): Xaa is A or G
  MOD_RES (19), (20), (21), (22): Xaa is A or G or is absent

SEQ ID NO: 61571 - protein, 40 aa, Artificial Sequence; identical to SEQ ID NO: 27133
  GFR-binding peptide
  MOD_RES (2), (34), (35): Xaa is C or S

SEQ ID NO: 61572 - protein, 34 aa, Artificial Sequence; identical to SEQ ID NO: 27136
  GFR-binding peptide
  MOD_RES (34), (34): Xaa is C or S
  MOD_RES (12), (13), (14), (15), (16): Xaa is A or G
  MOD_RES (17), (18), (19), (20): Xaa is A or G or is absent

SEQ ID NO: 61573 - protein, 36 aa, Artificial Sequence; identical to SEQ ID NO: 27137
  GFR-binding peptide
  MOD_RES (2), (34), (35): Xaa is C or S

SEQ ID NO: 61574 - protein, 39 aa, Artificial Sequence; identical to SEQ ID NO: 13426
  GFR-binding peptide
  MOD_RES (1), (35), (36): Xaa is C or S
  MOD_RES (13), (14), (15), (16), (17): Xaa is A or G
  MOD_RES (18), (19), (20), (21): Xaa is A or G or is absent

SEQ ID NO: 61575 - protein, 40 aa, Artificial Sequence
  GFR-binding peptide
  MOD_RES (1), (3), (36), (37): Xaa is C or S
  MOD_RES (14), (15), (16), (17), (18): Xaa is A or G
  MOD_RES (19), (20), (21), (22): Xaa is A or G or is absent
XKXSKVIMPIKGYXXXXXXXXXFYLINIPSLDQSVXXPSA

SEQ ID NO: 61576 - protein, 39 aa, Artificial Sequence; identical to SEQ ID NO: 6018
  GFR-binding peptide
  MOD_RES (1), (35), (36): Xaa is C or S
  MOD_RES (13), (14), (15), (16), (17): Xaa is A or G
  MOD_RES (18), (19), (20), (21): Xaa is A or G or is absent

SEQ ID NO: 61577 - protein, 33 aa, Artificial Sequence; identical to SEQ ID NO: 6019
  GFR-binding peptide
  MOD_RES (31), (32): Xaa is C or S

SEQ ID NO: 61578 - protein, 36 aa, Artificial Sequence; identical to SEQ ID NO: 32145
  GFR-binding peptide
  MOD_RES (1), (33), (34): Xaa is C or S

SEQ ID NO: 61579 - protein, 40 aa, Artificial Sequence
  GFR-binding peptide
  MOD_RES (1), (3), (35), (36): Xaa is C or S
XAXSEVTMNRHKRLVVNKNEDYYLISTASMKEPVXXPEPI

SEQ ID NO: 61580 - protein, 38 aa, Artificial Sequence
  GFR-binding peptide
  MOD_RES (34), (35): Xaa is C or S
  MOD_RES (12), (13), (14), (15), (16): Xaa is A or G
  MOD_RES (17), (18), (19), (20): Xaa is A or G or is absent
RDVVMGRHKRLXXXXXXXXXYYLMSTASMKTPTXXPGA

SEQ ID NO: 61581 - protein, 37 aa, Artificial Sequence; identical to SEQ ID NO: 27143
  GFR-binding peptide
  MOD_RES (2), (36), (37): Xaa is C or S
  MOD_RES (14), (15), (16), (17), (18): Xaa is A or G
  MOD_RES (19), (20), (21), (22): Xaa is A or G or is absent

SEQ ID NO: 61582 - protein, 35 aa, Artificial Sequence; identical to SEQ ID NO: 27144
  GFR-binding peptide
  MOD_RES (2), (35): Xaa is C or S

SEQ ID NO: 61583 - protein, 33 aa, Artificial Sequence
  GFR-binding peptide
  MOD_RES (1), (33): Xaa is C or S
XSEVVMDEYKFKVVNNASDLYLISIPELRTPVX

SEQ ID NO: 61584 - protein, 36 aa, Artificial Sequence; identical to SEQ ID NO: 6025
  GFR-binding peptide
  MOD_RES (32), (33): Xaa is C or S

SEQ ID NO: 61585 - protein, 39 aa, Artificial Sequence; identical to SEQ ID NO: 6026
  GFR-binding peptide
  MOD_RES (1), (3), (37): Xaa is C or S
  MOD_RES (15), (16), (17), (18), (19): Xaa is A or G
  MOD_RES (20), (21), (22), (23): Xaa is A or G or is absent

SEQ ID NO: 61586 - protein, 37 aa, Artificial Sequence; identical to SEQ ID NO: 32152
  GFR-binding peptide
  MOD_RES (31), (31): Xaa is C or S

SEQ ID NO: 61587 - protein, 33 aa, Artificial Sequence; identical to SEQ ID NO: 6027
  GFR-binding peptide
  MOD_RES (2), (2): Xaa is C or S

SEQ ID NO: 61588 - protein, 42 aa, Artificial Sequence
  GFR-binding peptide
  MOD_RES (2), (4), (37), (38): Xaa is C or S
  MOD_RES (15), (16), (17), (18), (19): Xaa is A or G
  MOD_RES (20), (21), (22), (23): Xaa is A or G or is absent
LXGXEEVIMRHKRLXXXXXXXXXYYLMSTASTKVPAXXTSPV

SEQ ID NO: 61589 - protein, 40 aa, Artificial Sequence; identical to SEQ ID NO: 6029
  GFR-binding peptide
  MOD_RES (2), (34), (35): Xaa is C or S

SEQ ID NO: 61590 - protein, 40 aa, Artificial Sequence; identical to SEQ ID NO: 6030
  GFR-binding peptide
  MOD_RES (2), (34): Xaa is C or S

SEQ ID NO: 61591 - protein, 36 aa, Artificial Sequence; identical to SEQ ID NO: 27154
  GFR-binding peptide
  MOD_RES (33), (34): Xaa is C or S
  MOD_RES (11), (12), (13), (14), (15): Xaa is A or G
  MOD_RES (16), (17), (18), (19): Xaa is A or G or is absent

SEQ ID NO: 61592 - protein, 36 aa, Artificial Sequence; identical to SEQ ID NO: 27155
  GFR-binding peptide
  MOD_RES (2), (34), (35): Xaa is C or S

SEQ ID NO: 61593 - protein, 42 aa, Artificial Sequence; identical to SEQ ID NO: 6036
  GFR-binding peptide
  MOD_RES (1), (3), (38), (39): Xaa is C or S
  MOD_RES (16), (17), (18), (19), (20): Xaa is A or G
  MOD_RES (21), (22), (23), (24): Xaa is A or G or is absent

SEQ ID NO: 61594 - protein, 34 aa, Artificial Sequence; identical to SEQ ID NO: 6037
  GFR-binding peptide
  MOD_RES (34), (34): Xaa is C or S
  MOD_RES (12), (13), (14), (15), (16): Xaa is A or G
  MOD_RES (17), (18), (19), (20): Xaa is A or G or is absent

SEQ ID NO: 61595 - protein, 37 aa, Artificial Sequence; identical to SEQ ID NO: 6039
  GFR-binding peptide
  MOD_RES (2), (4): Xaa is C or S
  MOD_RES (16), (17), (18), (19), (20): Xaa is A or G
  MOD_RES (21), (22), (23), (24): Xaa is A or G or is absent

SEQ ID NO: 61596 - protein, 35 aa, Artificial Sequence; identical to SEQ ID NO: 32163
  GFR-binding peptide
  MOD_RES (2), (34), (35): Xaa is C or S

SEQ ID NO: 61597 - protein, 39 aa, Artificial Sequence; identical to SEQ ID NO: 6040
  GFR-binding peptide
  MOD_RES (1), (3), (37), (38): Xaa is C or S
  MOD_RES (15), (16), (17), (18), (19): Xaa is A or G
  MOD_RES (20), (21), (22), (23): Xaa is A or G or is absent

SEQ ID NO: 61598 - protein, 39 aa, Artificial Sequence
  GFR-binding peptide
  MOD_RES (2), (36), (37): Xaa is C or S
  MOD_RES (14), (15), (16), (17), (18): Xaa is A or G
  MOD_RES (19), (20), (21), (22): Xaa is A or G or is absent
GXRDVVMGRHKRLXXXXXXXXXYYLMSTASMKTPTXXPG

SEQ ID NO: 61599 - protein, 35 aa, Artificial Sequence
  GFR-binding peptide
  MOD_RES (34), (35): Xaa is C or S
  MOD_RES (12), (13), (14), (15), (16): Xaa is A or G
  MOD_RES (17), (18), (19), (20): Xaa is A or G or is absent
AEVVMDRHKRLXXXXXXXXXYYLISTASLRAPVXX

SEQ ID NO: 61600 - protein, 32 aa, Artificial Sequence; identical to SEQ ID NO: 6044
  GFR-binding peptide
  MOD_RES (2), (2): Xaa is C or S

SEQ ID NO: 61601 - protein, 39 aa, Artificial Sequence
  GFR-binding peptide
  MOD_RES (2), (34), (35): Xaa is C or S
AXSEVTMNPIKGYVVNKNEDFYLINIPSMKEPVXXPEPI

SEQ ID NO: 61602 - protein, 37 aa, Artificial Sequence; identical to SEQ ID NO: 13448
  GFR-binding peptide
  MOD_RES (1), (33), (34): Xaa is C or S

SEQ ID NO: 61603 - protein, 33 aa, Artificial Sequence
  GFR-binding peptide
  MOD_RES (1), (3): Xaa is C or S
XGXEEVIMEYKFKLLVRGNDLYLMSIPETKVPA

SEQ ID NO: 61604 - protein, 33 aa, Artificial Sequence; identical to SEQ ID NO: 27171
  GFR-binding peptide
  MOD_RES (32), (33): Xaa is C or S

SEQ ID NO: 61605 - protein, 35 aa, Artificial Sequence; identical to SEQ ID NO: 27172
  GFR-binding peptide
  MOD_RES (34), (35): Xaa is C or S
  MOD_RES (12), (13), (14), (15), (16): Xaa is A or G
  MOD_RES (17), (18), (19), (20): Xaa is A or G or is absent

SEQ ID NO: 61606 - protein, 33 aa, Artificial Sequence
  GFR-binding peptide
  MOD_RES (1), (3): Xaa is C or S
XKXSRVIMPIKGYVKPKRGVFYLINIPSLAQPV

SEQ ID NO: 61607 - protein, 37 aa, Artificial Sequence
  GFR-binding peptide
  MOD_RES (1), (3), (35), (36): Xaa is C or S
XAXSEVTMNRYKKLVVNKNEDFYLISIANMKEPVXXP

SEQ ID NO: 61608 - protein, 34 aa, Artificial Sequence
  GFR-binding peptide
  MOD_RES (2), (33), (34): Xaa is C or S
KXSKVVMPIKGYVKPTRGVFYLINIPSLDQPVXX

SEQ ID NO: 61609 - protein, 36 aa, Artificial Sequence
  GFR-binding peptide
  MOD_RES (2), (35), (36): Xaa is C or S
  MOD_RES (13), (14), (15), (16), (17): Xaa is A or G
  MOD_RES (18), (19), (20), (21): Xaa is A or G or is absent
KXSRVIMPIKGYXXXXXXXXXFYLINIPSLAQPVXX

SEQ ID NO: 61610 - protein, 42 aa, Artificial Sequence
  GFR-binding peptide
  MOD_RES (1), (3), (36), (37): Xaa is C or S
  MOD_RES (14), (15), (16), (17), (18): Xaa is A or G
  MOD_RES (19), (20), (21), (22): Xaa is A or G or is absent
XGXEEVIMRHKRLXXXXXXXXXYYLMSTASTKVPAXXTSPVR

SEQ ID NO: 61611 - protein, 40 aa, Artificial Sequence; identical to SEQ ID NO: 27181
  GFR-binding peptide
  MOD_RES (2), (34): Xaa is C or S

SEQ ID NO: 61612 - protein, 35 aa, Artificial Sequence; identical to SEQ ID NO: 27187
  GFR-binding peptide
  MOD_RES (2), (4): Xaa is C or S

SEQ ID NO: 61613 - protein, 38 aa, Artificial Sequence; identical to SEQ ID NO: 6066
  GFR-binding peptide
  MOD_RES (1), (3), (35), (36): Xaa is C or S

SEQ ID NO: 61614 - protein, 37 aa, Artificial Sequence; identical to SEQ ID NO: 6068
  GFR-binding peptide
  MOD_RES (2), (4): Xaa is C or S
  MOD_RES (16), (17), (18), (19), (20): Xaa is A or G
  MOD_RES (21), (22), (23), (24): Xaa is A or G or is absent

SEQ ID NO: 61615 - protein, 36 aa, Artificial Sequence; identical to SEQ ID NO: 27195
  GFR-binding peptide
  MOD_RES (34), (35): Xaa is C or S
  MOD_RES (12), (13), (14), (15), (16): Xaa is A or G
  MOD_RES (17), (18), (19), (20): Xaa is A or G or is absent

SEQ ID NO: 61616 - protein, 30 aa, Artificial Sequence
  GFR-binding peptide
EVVMDRHKRLVVNNAADYYLISTASLRAPV

SEQ ID NO: 61617 - protein, 38 aa, Artificial Sequence
  GFR-binding peptide
  MOD_RES (32), (33): Xaa is C or S
ESVAMGRHKRLYTVVGKDYYLISTASLKTPVXXAKSAK

SEQ ID NO: 61618 - protein, 36 aa, Artificial Sequence; identical to SEQ ID NO: 6073
  GFR-binding peptide
  MOD_RES (2), (36): Xaa is C or S
  MOD_RES (14), (15), (16), (17), (18): Xaa is A or G
  MOD_RES (19), (20), (21), (22): Xaa is A or G or is absent

SEQ ID NO: 61619 - protein, 39 aa, Artificial Sequence; identical to SEQ ID NO: 6076
  GFR-binding peptide
  MOD_RES (33), (34): Xaa is C or S
  MOD_RES (11), (12), (13), (14), (15): Xaa is A or G
  MOD_RES (16), (17), (18), (19): Xaa is A or G or is absent

SEQ ID NO: 61620 - protein, 39 aa, Artificial Sequence
  GFR-binding peptide
  MOD_RES (2), (33), (34): Xaa is C or S
GXEEVIMYHYKLLLVRGNDKYLMSIPSTKVPAXXTSPVR

SEQ ID NO: 61621 - protein, 41 aa, Artificial Sequence; identical to SEQ ID NO: 27201
  GFR-binding peptide
  MOD_RES (1), (35), (36): Xaa is C or S
  MOD_RES (13), (14), (15), (16), (17): Xaa is A or G
  MOD_RES (18), (19), (20), (21): Xaa is A or G or is absent

SEQ ID NO: 61622 - protein, 36 aa, Artificial Sequence; identical to SEQ ID NO: 6078
  GFR-binding peptide
  MOD_RES (31), (32): Xaa is C or S

SEQ ID NO: 61623 - protein, 37 aa, Artificial Sequence
  GFR-binding peptide
  MOD_RES (1), (3), (36), (37): Xaa is C or S
  MOD_RES (14), (15), (16), (17), (18): Xaa is A or G
  MOD_RES (19), (20), (21), (22): Xaa is A or G or is absent
XGXEEVIMRHKRLXXXXXXXXXYYLMSTASTKVPAXX

SEQ ID NO: 61624 - protein, 41 aa, Artificial Sequence
  GFR-binding peptide
  MOD_RES (2), (36), (37): Xaa is C or S
  MOD_RES (14), (15), (16), (17), (18): Xaa is A or G
  MOD_RES (19), (20), (21), (22): Xaa is A or G or is absent
GXRDVVMGEYKFKXXXXXXXXXLYLMSIPEMKTPTXXPGAS

SEQ ID NO: 61625 - protein, 39 aa, Artificial Sequence
  GFR-binding peptide
  MOD_RES (1), (3), (35), (36): Xaa is C or S
XGXESVAMGRHKRLYTVVGKDYYLISTASLKTPVXXAKS

SEQ ID NO: 61626 - protein, 33 aa, Artificial Sequence; identical to SEQ ID NO: 32197
  GFR-binding peptide
  MOD_RES (31), (32): Xaa is C or S

SEQ ID NO: 61627 - protein, 30 aa, Artificial Sequence; identical to SEQ ID NO: 32198
  GFR-binding peptide

SEQ ID NO: 61628 - protein, 42 aa, Artificial Sequence; identical to SEQ ID NO: 32201
  GFR-binding peptide
  MOD_RES (2), (36), (37): Xaa is C or S
  MOD_RES (14), (15), (16), (17), (18): Xaa is A or G
  MOD_RES (19), (20), (21), (22): Xaa is A or G or is absent

SEQ ID NO: 61629 - protein, 39 aa, Artificial Sequence
  GFR-binding peptide
  MOD_RES (1), (3), (37), (38): Xaa is C or S
  MOD_RES (15), (16), (17), (18), (19): Xaa is A or G
  MOD_RES (20), (21), (22), (23): Xaa is A or G or is absent
XAXSEVTMNYHYKLXXXXXXXXXKYLISIPSMKEPVXXP

SEQ ID NO: 61630 - protein, 34 aa, Artificial Sequence; identical to SEQ ID NO: 27209
  GFR-binding peptide
  MOD_RES (34), (34): Xaa is C or S
  MOD_RES (12), (13), (14), (15), (16): Xaa is A or G
  MOD_RES (17), (18), (19), (20): Xaa is A or G or is absent

SEQ ID NO: 61631 - protein, 44 aa, Artificial Sequence
  GFR-binding peptide
  MOD_RES (2), (4), (38), (39): Xaa is C or S
  MOD_RES (16), (17), (18), (19), (20): Xaa is A or G
  MOD_RES (21), (22), (23), (24): Xaa is A or G or is absent
RXAXSEVTMNPIKGYXXXXXXXXXFYLINIPSMKEPVXXPEPIG

SEQ ID NO: 61632 - protein, 37 aa, Artificial Sequence; identical to SEQ ID NO: 6086
  GFR-binding peptide
  MOD_RES (33), (34): Xaa is C or S
  MOD_RES (11), (12), (13), (14), (15): Xaa is A or G
  MOD_RES (16), (17), (18), (19): Xaa is A or G or is absent

SEQ ID NO: 61633 - protein, 40 aa, Artificial Sequence; identical to SEQ ID NO: 27211
  GFR-binding peptide
  MOD_RES (2), (4), (38), (39): Xaa is C or S
  MOD_RES (16), (17), (18), (19), (20): Xaa is A or G
  MOD_RES (21), (22), (23), (24): Xaa is A or G or is absent

SEQ ID NO: 61634 - protein, 40 aa, Artificial Sequence; identical to SEQ ID NO: 32213
  GFR-binding peptide
  MOD_RES (2), (4), (38), (39): Xaa is C or S
  MOD_RES (16), (17), (18), (19), (20): Xaa is A or G
  MOD_RES (21), (22), (23), (24): Xaa is A or G or is absent

SEQ ID NO: 61635 - protein, 36 aa, Artificial Sequence
  GFR-binding peptide
  MOD_RES (32), (33): Xaa is C or S
SEVVMDYHYKLVVNNASDKYLISIPSLRTPVXXTPP

SEQ ID NO: 61636 - protein, 40 aa, Artificial Sequence; identical to SEQ ID NO: 6092
  GFR-binding peptide
  MOD_RES (34), (35): Xaa is C or S
  MOD_RES (12), (13), (14), (15), (16): Xaa is A or G
  MOD_RES (17), (18), (19), (20): Xaa is A or G or is absent

SEQ ID NO: 61637 - protein, 36 aa, Artificial Sequence; identical to SEQ ID NO: 32218
  GFR-binding peptide
  MOD_RES (1), (33), (34): Xaa is C or S

SEQ ID NO: 61638 - protein, 44 aa, Artificial Sequence; identical to SEQ ID NO: 6096
  GFR-binding peptide
  MOD_RES (2), (4), (38), (39): Xaa is C or S
  MOD_RES (16), (17), (18), (19), (20): Xaa is A or G
  MOD_RES (21), (22), (23), (24): Xaa is A or G or is absent

SEQ ID NO: 61639 - protein, 35 aa, Artificial Sequence; identical to SEQ ID NO: 6097
  GFR-binding peptide
  MOD_RES (33), (34): Xaa is C or S
  MOD_RES (11), (12), (13), (14), (15): Xaa is A or G
  MOD_RES (16), (17), (18), (19): Xaa is A or G or is absent

SEQ ID NO: 61640 - protein, 39 aa, Artificial Sequence; identical to SEQ ID NO: 6098
  GFR-binding peptide
  MOD_RES (34), (35): Xaa is C or S
  MOD_RES (12), (13), (14), (15), (16): Xaa is A or G
  MOD_RES (17), (18), (19), (20): Xaa is A or G or is absent

SEQ ID NO: 61641 - protein, 39 aa, Artificial Sequence; identical to SEQ ID NO: 27225
  GFR-binding peptide
  MOD_RES (1), (3), (37), (38): Xaa is C or S
  MOD_RES (15), (16), (17), (18), (19): Xaa is A or G
  MOD_RES (20), (21), (22), (23): Xaa is A or G or is absent

SEQ ID NO: 61642 - protein, 37 aa, Artificial Sequence; identical to SEQ ID NO: 6099
  GFR-binding peptide
  MOD_RES (33), (34): Xaa is C or S
  MOD_RES (11), (12), (13), (14), (15): Xaa is A or G
  MOD_RES (16), (17), (18), (19): Xaa is A or G or is absent

SEQ ID NO: 61643 - protein, 38 aa, Artificial Sequence; identical to SEQ ID NO: 27230
  GFR-binding peptide
  MOD_RES (2), (4), (36), (37): Xaa is C or S

SEQ ID NO: 61644 - protein, 34 aa, Artificial Sequence
  GFR-binding peptide
  MOD_RES (1), (3), (34): Xaa is C or S
XGXEEVIMEYKFKLLVRGNDLYLMSIPETKVPAX

SEQ ID NO: 61645 - protein, 37 aa, Artificial Sequence; identical to SEQ ID NO: 27231
  GFR-binding peptide
  MOD_RES (2), (4), (35), (36): Xaa is C or S

SEQ ID NO: 61646 - protein, 38 aa, Artificial Sequence; identical to SEQ ID NO: 32223
  GFR-binding peptide
  MOD_RES (2), (4), (36), (37): Xaa is C or S

SEQ ID NO: 61647 - protein, 37 aa, Artificial Sequence; identical to SEQ ID NO: 6101
  GFR-binding peptide
  MOD_RES (35), (36): Xaa is C or S
  MOD_RES (13), (14), (15), (16), (17): Xaa is A or G
  MOD_RES (18), (19), (20), (21): Xaa is A or G or is absent

SEQ ID NO: 61648 - protein, 34 aa, Artificial Sequence; identical to SEQ ID NO: 27234
  GFR-binding peptide
  MOD_RES (33), (34): Xaa is C or S
  MOD_RES (11), (12), (13), (14), (15): Xaa is A or G
  MOD_RES (16), (17), (18), (19): Xaa is A or G or is absent

SEQ ID NO: 61649 - protein, 40 aa, Artificial Sequence; identical to SEQ ID NO: 6103
  GFR-binding peptide
  MOD_RES (1), (3), (36), (37): Xaa is C or S

SEQ ID NO: 61650 - protein, 38 aa, Artificial Sequence; identical to SEQ ID NO: 32225
  GFR-binding peptide
  MOD_RES (2), (4), (36), (37): Xaa is C or S

SEQ ID NO: 61651 - protein, 37 aa, Artificial Sequence; identical to SEQ ID NO: 6104
  GFR-binding peptide
  MOD_RES (2), (34): Xaa is C or S

SEQ ID NO: 61652 - protein, 39 aa, Artificial Sequence; identical to SEQ ID NO: 6106
  GFR-binding peptide
  MOD_RES (34), (35): Xaa is C or S
  MOD_RES (12), (13), (14), (15), (16): Xaa is A or G
  MOD_RES (17), (18), (19), (20): Xaa is A or G or is absent

SEQ ID NO: 61653 - protein, 39 aa, Artificial Sequence
  GFR-binding peptide
  MOD_RES (2), (4), (38), (39): Xaa is C or S
  MOD_RES (16), (17), (18), (19), (20): Xaa is A or G
  MOD_RES (21), (22), (23), (24): Xaa is A or G or is absent
RXGXESVAMGRHKRLXXXXXXXXXYYLISTASLKTPVXX

SEQ ID NO: 61654 - protein, 39 aa, Artificial Sequence; identical to SEQ ID NO: 6107
  GFR-binding peptide
  MOD_RES (33), (34): Xaa is C or S
  MOD_RES (11), (12), (13), (14), (15): Xaa is A or G
  MOD_RES (16), (17), (18), (19): Xaa is A or G or is absent

SEQ ID NO: 61655 - protein, 40 aa, Artificial Sequence; identical to SEQ ID NO: 6109
  GFR-binding peptide
  MOD_RES (2), (35), (36): Xaa is C or S
  MOD_RES (13), (14), (15), (16), (17): Xaa is A or G
  MOD_RES (18), (19), (20), (21): Xaa is A or G or is absent

SEQ ID NO: 61656 - protein, 37 aa, Artificial Sequence; identical to SEQ ID NO: 6110
  GFR-binding peptide
  MOD_RES (2), (35), (36): Xaa is C or S

SEQ ID NO: 61657 - protein, 42 aa, Artificial Sequence
  GFR-binding peptide
  MOD_RES (2), (4), (36), (37): Xaa is C or S
RXGXSEVVMDYHYKLVVNNASDKYLISIPSLRTPVXXTPPTS

SEQ ID NO: 61658 - protein, 36 aa, Artificial Sequence
  GFR-binding peptide
  MOD_RES (2), (4), (36): Xaa is C or S
RXAXSEVTMNRHKRLVVNKNEDYYLISTASMKEPVX

SEQ ID NO: 61659 - protein, 42 aa, Artificial Sequence; identical to SEQ ID NO: 6115
  GFR-binding peptide
  MOD_RES (2), (36), (37): Xaa is C or S
  MOD_RES (14), (15), (16), (17), (18): Xaa is A or G
  MOD_RES (19), (20), (21), (22): Xaa is A or G or is absent

SEQ ID NO: 61660 - protein, 35 aa, Artificial Sequence
  GFR-binding peptide
  MOD_RES (2), (2): Xaa is C or S
  MOD_RES (14), (15), (16), (17), (18): Xaa is A or G
  MOD_RES (19), (20), (21), (22): Xaa is A or G or is absent
GXSEVVMDRHKRLXXXXXXXXXYYLISTASLRTPV

SEQ ID NO: 61661 - protein, 35 aa, Artificial Sequence
  GFR-binding peptide
  MOD_RES (1), (3), (35): Xaa is C or S
XGXSEVVMDRHKRLVVNNASDYYLISTASLRTPVX

SEQ ID NO: 61662 - protein, 33 aa, Artificial Sequence; identical to SEQ ID NO: 27252
  GFR-binding peptide
  MOD_RES (31), (32): Xaa is C or S

SEQ ID NO: 61663 - protein, 39 aa, Artificial Sequence
  GFR-binding peptide
  MOD_RES (2), (34), (35): Xaa is C or S
GXRDVVMGYHYKLIIQQKDNKYLMSIPSMKTPTXXPGAS

SEQ ID NO: 61664 - protein, 40 aa, Artificial Sequence; identical to SEQ ID NO: 32243
  GFR-binding peptide
  MOD_RES (2), (35), (36): Xaa is C or S
  MOD_RES (13), (14), (15), (16), (17): Xaa is A or G
  MOD_RES (18), (19), (20), (21): Xaa is A or G or is absent

SEQ ID NO: 61665 - protein, 38 aa, Artificial Sequence; identical to SEQ ID NO: 6125
  GFR-binding peptide
  MOD_RES (1), (3), (35), (36): Xaa is C or S

SEQ ID NO: 61666 - protein, 34 aa, Artificial Sequence; identical to SEQ ID NO: 6127
  GFR-binding peptide
  MOD_RES (33), (34): Xaa is C or S
  MOD_RES (11), (12), (13), (14), (15): Xaa is A or G
  MOD_RES (16), (17), (18), (19): Xaa is A or G or is absent

SEQ ID NO: 61667 - protein, 39 aa, Artificial Sequence; identical to SEQ ID NO: 27260
  GFR-binding peptide
  MOD_RES (34), (34): Xaa is C or S
  MOD_RES (12), (13), (14), (15), (16): Xaa is A or G
  MOD_RES (17), (18), (19), (20): Xaa is A or G or is absent

SEQ ID NO: 61668 - protein, 40 aa, Artificial Sequence
  GFR-binding peptide
  MOD_RES (1), (3), (35), (36): Xaa is C or S
XAXSEVTMNPIKGYVVNKNEDFYLINIPSMKEPVXXPEPI

SEQ ID NO: 61669 - protein, 36 aa, Artificial Sequence; identical to SEQ ID NO: 32247
  GFR-binding peptide
  MOD_RES (34), (35): Xaa is C or S
  MOD_RES (12), (13), (14), (15), (16): Xaa is A or G
  MOD_RES (17), (18), (19), (20): Xaa is A or G or is absent

SEQ ID NO: 61670 - protein, 39 aa, Artificial Sequence; identical to SEQ ID NO: 6133
  GFR-binding peptide
  MOD_RES (33), (34): Xaa is C or S
  MOD_RES (11), (12), (13), (14), (15): Xaa is A or G
  MOD_RES (16), (17), (18), (19): Xaa is A or G or is absent

SEQ ID NO: 61671 - protein, 41 aa, Artificial Sequence
  GFR-binding peptide
  MOD_RES (1), (3), (37), (38): Xaa is C or S
  MOD_RES (15), (16), (17), (18), (19): Xaa is A or G
  MOD_RES (20), (21), (22), (23): Xaa is A or G or is absent
XAXSEVTMNEYKFKXXXXXXXXXLYLISIPEMKEPVXXPEP

SEQ ID NO: 61672 - protein, 40 aa, Artificial Sequence; identical to SEQ ID NO: 6134
  GFR-binding peptide
  MOD_RES (2), (34), (35): Xaa is C or S

SEQ ID NO: 61673 - protein, 36 aa, Artificial Sequence; identical to SEQ ID NO: 27265
  GFR-binding peptide
  MOD_RES (34), (35): Xaa is C or S
  MOD_RES (12), (13), (14), (15), (16): Xaa is A or G
  MOD_RES (17), (18), (19), (20): Xaa is A or G or is absent

SEQ ID NO: 61674 - protein, 41 aa, Artificial Sequence; identical to SEQ ID NO: 27267
  GFR-binding peptide
  MOD_RES (2), (35), (36): Xaa is C or S

SEQ ID NO: 61675 - protein, 35 aa, Artificial Sequence
  GFR-binding peptide
  MOD_RES (32), (33): Xaa is C or S
RDVVMGYHYKLIIQQKDNKYLMSIPSMKTPTXXPG

SEQ ID NO: 61676 - protein, 40 aa, Artificial Sequence; identical to SEQ ID NO: 27269
  GFR-binding peptide
  MOD_RES (2), (4), (37), (38): Xaa is C or S

SEQ ID NO: 61677 - protein, 38 aa, Artificial Sequence; identical to SEQ ID NO: 32257
  GFR-binding peptide
  MOD_RES (2), (36), (37): Xaa is C or S
  MOD_RES (14), (15), (16), (17), (18): Xaa is A or G
  MOD_RES (19), (20), (21), (22): Xaa is A or G or is absent

SEQ ID NO: 61678 - protein, 41 aa, Artificial Sequence
  GFR-binding peptide
  MOD_RES (1), (35), (36): Xaa is C or S
  MOD_RES (13), (14), (15), (16), (17): Xaa is A or G
  MOD_RES (18), (19), (20), (21): Xaa is A or G or is absent
XRDVVMGRHKRLXXXXXXXXXYYLMSTASMKTPTXXPGASG

SEQ ID NO: 61679 - protein, 35 aa, Artificial Sequence; identical to SEQ ID NO: 27272
  GFR-binding peptide
  MOD_RES (2), (35): Xaa is C or S
  MOD_RES (13), (14), (15), (16), (17): Xaa is A or G
  MOD_RES (18), (19), (20), (21): Xaa is A or G or is absent

SEQ ID NO: 61680 - protein, 34 aa, Artificial Sequence
  GFR-binding peptide
  MOD_RES (1), (1): Xaa is C or S
  MOD_RES (13), (14), (15), (16), (17): Xaa is A or G
  MOD_RES (18), (19), (20), (21): Xaa is A or G or is absent
XSEVTMNRYKKLXXXXXXXXXFYLISIANMKEPV

SEQ ID NO: 61681 - protein, 42 aa, Artificial Sequence; identical to SEQ ID NO: 32262
  GFR-binding peptide
  MOD_RES (2), (36), (37): Xaa is C or S
  MOD_RES (14), (15), (16), (17), (18): Xaa is A or G
  MOD_RES (19), (20), (21), (22): Xaa is A or G or is absent

SEQ ID NO: 61682 - protein, 37 aa, Artificial Sequence; identical to SEQ ID NO: 27275
  GFR-binding peptide
  MOD_RES (31), (32): Xaa is C or S

SEQ ID NO: 61683 - protein, 37 aa, Artificial Sequence; identical to SEQ ID NO: 6146
  GFR-binding peptide
  MOD_RES (2), (33), (34): Xaa is C or S

SEQ ID NO: 61684 - protein, 34 aa, Artificial Sequence; identical to SEQ ID NO: 6149
  GFR-binding peptide
  MOD_RES (34), (34): Xaa is C or S
  MOD_RES (12), (13), (14), (15), (16): Xaa is A or G
  MOD_RES (17), (18), (19), (20): Xaa is A or G or is absent

SEQ ID NO: 61685 - protein, 41 aa, Artificial Sequence; identical to SEQ ID NO: 27279
  GFR-binding peptide
  MOD_RES (1), (3), (35), (36): Xaa is C or S

SEQ ID NO: 61686 - protein, 36 aa, Artificial Sequence; identical to SEQ ID NO: 27280
  GFR-binding peptide
  MOD_RES (1), (3): Xaa is C or S
  MOD_RES (15), (16), (17), (18), (19): Xaa is A or G
  MOD_RES (20), (21), (22), (23): Xaa is A or G or is absent

SEQ ID NO: 61687 - protein, 37 aa, Artificial Sequence; identical to SEQ ID NO: 6152
  GFR-binding peptide
  MOD_RES (1), (34), (35): Xaa is C or S
  MOD_RES (12), (13), (14), (15), (16): Xaa is A or G
  MOD_RES (17), (18), (19), (20): Xaa is A or G or is absent

SEQ ID NO: 61688 - protein, 38 aa, Artificial Sequence; identical to SEQ ID NO: 6153
  GFR-binding peptide
  MOD_RES (1), (33): Xaa is C or S

SEQ ID NO: 61689 - protein, 40 aa, Artificial Sequence; identical to SEQ ID NO: 32270
  GFR-binding peptide
  MOD_RES (2), (34), (35): Xaa is C or S

SEQ ID NO: 61690 - protein, 36 aa, Artificial Sequence; identical to SEQ ID NO: 6154
  GFR-binding peptide
  MOD_RES (1), (3): Xaa is C or S
  MOD_RES (15), (16), (17), (18), (19): Xaa is A or G
  MOD_RES (20), (21), (22), (23): Xaa is A or G or is absent

SEQ ID NO: 61691 - protein, 40 aa, Artificial Sequence; identical to SEQ ID NO: 27290
  GFR-binding peptide
  MOD_RES (2), (4), (36), (37): Xaa is C or S

SEQ ID NO: 61692 - protein, 37 aa, Artificial Sequence
  GFR-binding peptide
  MOD_RES (2), (35), (36): Xaa is C or S
  MOD_RES (13), (14), (15), (16), (17): Xaa is A or G
  MOD_RES (18), (19), (20), (21): Xaa is A or G or is absent
KXSRVIMPIKGYXXXXXXXXXFYLINIPSLAQPVXXP

SEQ ID NO: 61693 - protein, 38 aa, Artificial Sequence; identical to SEQ ID NO: 6159
  GFR-binding peptide
  MOD_RES (2), (4), (38): Xaa is C or S
  MOD_RES (16), (17), (18), (19), (20): Xaa is A or G
  MOD_RES (21), (22), (23), (24): Xaa is A or G or is absent

SEQ ID NO: 61694 - protein, 39 aa, Artificial Sequence
  GFR-binding peptide
  MOD_RES (2), (36), (37): Xaa is C or S
  MOD_RES (14), (15), (16), (17), (18): Xaa is A or G
  MOD_RES (19), (20), (21), (22): Xaa is A or G or is absent
GXSEVVMDRHKRLXXXXXXXXXYYLISTASLRTPVXXTP

SEQ ID NO: 61695 - protein, 34 aa, Artificial Sequence
  GFR-binding peptide
  MOD_RES (1), (34): Xaa is C or S
  MOD_RES (12), (13), (14), (15), (16): Xaa is A or G
  MOD_RES (17), (18), (19), (20): Xaa is A or G or is absent
XEEVIMEYKFKXXXXXXXXXLYLMSIPETKVPAX

SEQ ID NO: 61696 - protein, 36 aa, Artificial Sequence
  GFR-binding peptide
  MOD_RES (33), (34): Xaa is C or S
  MOD_RES (11), (12), (13), (14), (15): Xaa is A or G
  MOD_RES (16), (17), (18), (19): Xaa is A or G or is absent
EVTMNEYKFKXXXXXXXXXLYLISIPEMKEPVXXPE

SEQ ID NO: 61697 - protein, 37 aa, Artificial Sequence; identical to SEQ ID NO: 6160
  GFR-binding peptide
  MOD_RES (2), (4), (37): Xaa is C or S
  MOD_RES (15), (16), (17), (18), (19): Xaa is A or G
  MOD_RES (20), (21), (22), (23): Xaa is A or G or is absent

SEQ ID NO: 61698 - protein, 32 aa, Artificial Sequence
  GFR-binding peptide
  MOD_RES (31), (32): Xaa is C or S
EVVMDYHYKLVVNNASDKYLISIPSLRTPVXX

SEQ ID NO: 61699 - protein, 34 aa, Artificial Sequence; identical to SEQ ID NO: 32278
  GFR-binding peptide
  MOD_RES (33), (34): Xaa is C or S
  MOD_RES (11), (12), (13), (14), (15): Xaa is A or G
  MOD_RES (16), (17), (18), (19): Xaa is A or G or is absent

SEQ ID NO: 61700 - protein, 33 aa, Artificial Sequence; identical to SEQ ID NO: 57210
  GFR-binding peptide
  MOD_RES (1), (32), (33): Xaa is C or S

SEQ ID NO: 61701 - protein, 37 aa, Artificial Sequence
  GFR-binding peptide
  MOD_RES (1), (3), (36), (37): Xaa is C or S
  MOD_RES (14), (15), (16), (17), (18): Xaa is A or G
  MOD_RES (19), (20), (21), (22): Xaa is A or G or is absent
XKXSKVVMPIKGYXXXXXXXXXFYLINIPSLDQPVXX

SEQ ID NO: 61702 - protein, 39 aa, Artificial Sequence; identical to SEQ ID NO: 27298
  GFR-binding peptide
  MOD_RES (2), (4), (38), (39): Xaa is C or S
  MOD_RES (16), (17), (18), (19), (20): Xaa is A or G
  MOD_RES (21), (22), (23), (24): Xaa is A or G or is absent

SEQ ID NO: 61703 - protein, 34 aa, Artificial Sequence; identical to SEQ ID NO: 6162
  GFR-binding peptide
  MOD_RES (1), (1): Xaa is C or S
  MOD_RES (13), (14), (15), (16), (17): Xaa is A or G
  MOD_RES (18), (19), (20), (21): Xaa is A or G or is absent

SEQ ID NO: 61704 - protein, 32 aa, Artificial Sequence
  GFR-binding peptide
  MOD_RES (31), (32): Xaa is C or S
EVTMNRYKKLVVNKNEDFYLISIANMKEPVXX

SEQ ID NO: 61705 - protein, 40 aa, Artificial Sequence; identical to SEQ ID NO: 6164
  GFR-binding peptide
  MOD_RES (2), (4), (36), (37): Xaa is C or S

SEQ ID NO: 61706 - protein, 38 aa, Artificial Sequence; identical to SEQ ID NO: 6167
  GFR-binding peptide
  MOD_RES (2), (34), (35): Xaa is C or S

SEQ ID NO: 61707 - protein, 35 aa, Artificial Sequence; identical to SEQ ID NO: 6171
  GFR-binding peptide
  MOD_RES (34), (35): Xaa is C or S
  MOD_RES (12), (13), (14), (15), (16): Xaa is A or G
  MOD_RES (17), (18), (19), (20): Xaa is A or G or is absent

SEQ ID NO: 61708 - protein, 35 aa, Artificial Sequence
  GFR-binding peptide
  MOD_RES (1), (35): Xaa is C or S
  MOD_RES (13), (14), (15), (16), (17): Xaa is A or G
  MOD_RES (18), (19), (20), (21): Xaa is A or G or is absent
XSEVTMNRYKKLXXXXXXXXXFYLISIANMKEPVX

SEQ ID NO: 61709 - protein, 31 aa, Artificial Sequence
  GFR-binding peptide
  MOD_RES (31), (31): Xaa is C or S
EVVMDYHYKLVVNNASDKYLISIPSLRTPVX

SEQ ID NO: 61710 - protein, 36 aa, Artificial Sequence; identical to SEQ ID NO: 6175
  GFR-binding peptide
  MOD_RES (1), (34), (35): Xaa is C or S
  MOD_RES (12), (13), (14), (15), (16): Xaa is A or G
  MOD_RES (17), (18), (19), (20): Xaa is A or G or is absent

SEQ ID NO: 61711 - protein, 32 aa, Artificial Sequence
  GFR-binding peptide
  MOD_RES (1), (32): Xaa is C or S
XSKVVMPIKGYVKPTRGVFYLINIPSLDQPVX

SEQ ID NO: 61712 - protein, 31 aa, Artificial Sequence
  GFR-binding peptide
  MOD_RES (1), (1): Xaa is C or S
XSKVVMPIKGYVKPTRGVFYLINIPSLDQPV

SEQ ID NO: 61713 - protein, 39 aa, Artificial Sequence; identical to SEQ ID NO: 6177
  GFR-binding peptide
  MOD_RES (2), (4), (36), (37): Xaa is C or S

SEQ ID NO: 61714 - protein, 40 aa, Artificial Sequence; identical to SEQ ID NO: 27314
  GFR-binding peptide
  MOD_RES (2), (4), (35), (36): Xaa is C or S

SEQ ID NO: 61715 - protein, 38 aa, Artificial Sequence
  GFR-binding peptide
  MOD_RES (1), (35), (36): Xaa is C or S
  MOD_RES (13), (14), (15), (16), (17): Xaa is A or G
  MOD_RES (18), (19), (20), (21): Xaa is A or G or is absent
XSEVVMDRHKRLXXXXXXXXXYYLISTASLRTPVXXTP

SEQ ID NO: 61716 - protein, 38 aa, Artificial Sequence; identical to SEQ ID NO: 2269
  GFR-binding peptide
  MOD_RES (32), (33): Xaa is C or S

SEQ ID NO: 61717 - protein, 36 aa, Artificial Sequence
  GFR-binding peptide
  MOD_RES (1), (3), (35), (36): Xaa is C or S
XAXSEVTMNYHYKLVVNKNEDKYLISIPSMKEPVXX

SEQ ID NO: 61718 - protein, 42 aa, Artificial Sequence; identical to SEQ ID NO: 2274
  GFR-binding peptide
  MOD_RES (1), (3), (38), (39): Xaa is C or S
  MOD_RES (16), (17), (18), (19), (20): Xaa is A or G
  MOD_RES (21), (22), (23), (24): Xaa is A or G or is absent

SEQ ID NO: 61719 - protein, 36 aa, Artificial Sequence
  GFR-binding peptide
  MOD_RES (1), (3): Xaa is C or S
  MOD_RES (15), (16), (17), (18), (19): Xaa is A or G
  MOD_RES (20), (21), (22), (23): Xaa is A or G or is absent
XAXSEVTMNRHKRLXXXXXXXXXYYLISTASMKEPV

SEQ ID NO: 61720 - protein, 31 aa, Artificial Sequence
  GFR-binding peptide
  MOD_RES (31), (31): Xaa is C or S
EVTMNRYKKLVVNKNEDFYLISIANMKEPVX

SEQ ID NO: 61721 - protein, 38 aa, Artificial Sequence
  GFR-binding peptide
  MOD_RES (1), (3), (34), (35): Xaa is C or S
XGXEEVIMRHKRLLLVRGNDYYLMSTASTKVPAXXTSP

SEQ ID NO: 61722 - protein, 38 aa, Artificial Sequence; identical to SEQ ID NO: 2276
  GFR-binding peptide
  MOD_RES (32), (32): Xaa is C or S

SEQ ID NO: 61723 - protein, 33 aa, Artificial Sequence; identical to SEQ ID NO: 2277
  GFR-binding peptide
  MOD_RES (2), (2): Xaa is C or S

SEQ ID NO: 61724 - protein, 42 aa, Artificial Sequence
  GFR-binding peptide
  MOD_RES (2), (36), (37): Xaa is C or S
  MOD_RES (14), (15), (16), (17), (18): Xaa is A or G
  MOD_RES (19), (20), (21), (22): Xaa is A or G or is absent
GXRDVVMGEYKFKXXXXXXXXXLYLMSIPEMKTPTXXPGASG

SEQ ID NO: 61725 - protein, 34 aa, Artificial Sequence
  GFR-binding peptide
  MOD_RES (1), (3): Xaa is C or S
XAXSEVTMNEYKFKVVNKNEDLYLISIPEMKEPV

SEQ ID NO: 61726 - protein, 44 aa, Artificial Sequence; identical to SEQ ID NO: 56141
  GFR-binding peptide
  MOD_RES (2), (4), (38), (39): Xaa is C or S
  MOD_RES (16), (17), (18), (19), (20): Xaa is A or G
  MOD_RES (21), (22), (23), (24): Xaa is A or G or is absent

SEQ ID NO: 61727 - protein, 38 aa, Artificial Sequence; identical to SEQ ID NO: 56142
  GFR-binding peptide
  MOD_RES (1), (3), (37), (38): Xaa is C or S
  MOD_RES (15), (16), (17), (18), (19): Xaa is A or G
  MOD_RES (20), (21), (22), (23): Xaa is A or G or is absent

SEQ ID NO: 61728 - protein, 40 aa, Artificial Sequence
  GFR-binding peptide
  MOD_RES (1), (3), (34), (35): Xaa is C or S
XKXSKVIMPIKGYIKPTKGIFYLINIPSLDQSVXXPSASA

SEQ ID NO: 61729 - protein, 33 aa, Artificial Sequence
  GFR-binding peptide
  MOD_RES (33), (33): Xaa is C or S
  MOD_RES (11), (12), (13), (14), (15): Xaa is A or G
  MOD_RES (16), (17), (18), (19): Xaa is A or G or is absent
EEVIMYHYKLXXXXXXXXXKYLMSIPSTKVPAX

SEQ ID NO: 61730 - protein, 35 aa, Artificial Sequence; identical to SEQ ID NO: 31213
  GFR-binding peptide
  MOD_RES (34), (35): Xaa is C or S
  MOD_RES (12), (13), (14), (15), (16): Xaa is A or G
  MOD_RES (17), (18), (19), (20): Xaa is A or G or is absent

SEQ ID NO: 61731 - protein, 37 aa, Artificial Sequence
  GFR-binding peptide
  MOD_RES (2), (4), (36), (37): Xaa is C or S
RXAXSEVTMNYHYKLVVNKNEDKYLISIPSMKEPVXX

SEQ ID NO: 61732 - protein, 39 aa, Artificial Sequence
  GFR-binding peptide
  MOD_RES (1), (3), (34), (35): Xaa is C or S
XKXSKVVMPIKGYVKPTRGVFYLINIPSLDQPVXXPSAS

SEQ ID NO: 61733 - protein, 33 aa, Artificial Sequence
  GFR-binding peptide
  MOD_RES (33), (33): Xaa is C or S
  MOD_RES (11), (12), (13), (14), (15): Xaa is A or G
  MOD_RES (16), (17), (18), (19): Xaa is A or G or is absent
EEVIMEYKFKXXXXXXXXXLYLMSIPETKVPAX

SEQ ID NO: 61734 - protein, 35 aa, Artificial Sequence; identical to SEQ ID NO: 31221
  GFR-binding peptide
  MOD_RES (32), (33): Xaa is C or S

SEQ ID NO: 61735 - protein, 38 aa, Artificial Sequence; identical to SEQ ID NO: 2287
  GFR-binding peptide
  MOD_RES (32), (33): Xaa is C or S

SEQ ID NO: 61736 - protein, 33 aa, Artificial Sequence; identical to SEQ ID NO: 23269
  GFR-binding peptide
  MOD_RES (31), (32): Xaa is C or S

SEQ ID NO: 61737 - protein, 36 aa, Artificial Sequence; identical to SEQ ID NO: 56147
  GFR-binding peptide
  MOD_RES (33), (34): Xaa is C or S
  MOD_RES (11), (12), (13), (14), (15): Xaa is A or G
  MOD_RES (16), (17), (18), (19): Xaa is A or G or is absent

SEQ ID NO: 61738 - protein, 41 aa, Artificial Sequence; identical to SEQ ID NO: 56148
  GFR-binding peptide
  MOD_RES (2), (36), (37): Xaa is C or S
  MOD_RES (14), (15), (16), (17), (18): Xaa is A or G
  MOD_RES (19), (20), (21), (22): Xaa is A or G or is absent

SEQ ID NO: 61739 - protein, 40 aa, Artificial Sequence
  GFR-binding peptide
  MOD_RES (2), (4), (37), (38): Xaa is C or S
  MOD_RES (15), (16), (17), (18), (19): Xaa is A or G
  MOD_RES (20), (21), (22), (23): Xaa is A or G or is absent
LXGXEEVIMYHYKLXXXXXXXXXKYLMSIPSTKVPAXXTS

SEQ ID NO: 61740 - protein, 42 aa, Artificial Sequence; identical to SEQ ID NO: 2289
  GFR-binding peptide
  MOD_RES (1), (3), (37), (38): Xaa is C or S
  MOD_RES (15), (16), (17), (18), (19): Xaa is A or G
  MOD_RES (20), (21), (22), (23): Xaa is A or G or is absent

SEQ ID NO: 61741 - protein, 40 aa, Artificial Sequence; identical to SEQ ID NO: 23272
  GFR-binding peptide
  MOD_RES (1), (3), (36), (37): Xaa is C or S
  MOD_RES (14), (15), (16), (17), (18): Xaa is A or G
  MOD_RES (19), (20), (21), (22): Xaa is A or G or is absent

SEQ ID NO: 61742 - protein, 39 aa, Artificial Sequence; identical to SEQ ID NO: 2290
  GFR-binding peptide
  MOD_RES (2), (36), (37): Xaa is C or S
  MOD_RES (14), (15), (16), (17), (18): Xaa is A or G
  MOD_RES (19), (20), (21), (22): Xaa is A or G or is absent

SEQ ID NO: 61743 - protein, 38 aa, Artificial Sequence; identical to SEQ ID NO: 2294
  GFR-binding peptide
  MOD_RES (2), (4), (37), (38): Xaa is C or S
  MOD_RES (15), (16), (17), (18), (19): Xaa is A or G
  MOD_RES (20), (21), (22), (23): Xaa is A or G or is absent

SEQ ID NO: 61744 - protein, 34 aa, Artificial Sequence
  GFR-binding peptide
  MOD_RES (32), (33): Xaa is C or S
AEVVMDRHKRLVVNNAADYYLISTASLRAPVXXS

SEQ ID NO: 61745 - protein, 40 aa, Artificial Sequence; identical to SEQ ID NO: 23278
  GFR-binding peptide
  MOD_RES (2), (4), (36), (37): Xaa is C or S

SEQ ID NO: 61746 - protein, 40 aa, Artificial Sequence; identical to SEQ ID NO: 23280
  GFR-binding peptide
  MOD_RES (1), (3), (35), (36): Xaa is C or S

SEQ ID NO: 61747 - protein, 35 aa, Artificial Sequence; identical to SEQ ID NO: 23286
  GFR-binding peptide
  MOD_RES (1), (35): Xaa is C or S
  MOD_RES (13), (14), (15), (16), (17): Xaa is A or G
  MOD_RES (18), (19), (20), (21): Xaa is A or G or is absent

SEQ ID NO: 61748 - protein, 35 aa, Artificial Sequence; identical to SEQ ID NO: 23287
  GFR-binding peptide
  MOD_RES (33), (34): Xaa is C or S
  MOD_RES (11), (12), (13), (14), (15): Xaa is A or G
  MOD_RES (16), (17), (18), (19): Xaa is A or G or is absent

SEQ ID NO: 61749 - protein, 36 aa, Artificial Sequence; identical to SEQ ID NO: 23290
  GFR-binding peptide
  MOD_RES (1), (35), (36): Xaa is C or S
  MOD_RES (13), (14), (15), (16), (17): Xaa is A or G
  MOD_RES (18), (19), (20), (21): Xaa is A or G or is absent

SEQ ID NO: 61750 - protein, 36 aa, Artificial Sequence; identical to SEQ ID NO: 31239
  GFR-binding peptide
  MOD_RES (1), (3): Xaa is C or S
  MOD_RES (15), (16), (17), (18), (19): Xaa is A or G
  MOD_RES (20), (21), (22), (23): Xaa is A or G or is absent

SEQ ID NO: 61751 - protein, 34 aa, Artificial Sequence; identical to SEQ ID NO: 2306
  GFR-binding peptide
  MOD_RES (32), (33): Xaa is C or S

SEQ ID NO: 61752 - protein, 30 aa, Artificial Sequence; identical to SEQ ID NO: 2308
  GFR-binding peptide

SEQ ID NO: 61753 - protein, 32 aa, Artificial Sequence; identical to SEQ ID NO: 2312
  GFR-binding peptide
  MOD_RES (32), (32): Xaa is C or S

SEQ ID NO: 61754 - protein, 35 aa, Artificial Sequence; identical to SEQ ID NO: 23295
  GFR-binding peptide
  MOD_RES (1), (3): Xaa is C or S
  MOD_RES (14), (15), (16), (17), (18): Xaa is A or G
  MOD_RES (19), (20), (21), (22): Xaa is A or G or is absent

SEQ ID NO: 61755 - protein, 43 aa, Artificial Sequence; identical to SEQ ID NO: 31244
  GFR-binding peptide
  MOD_RES (1), (3), (37), (38): Xaa is C or S
  MOD_RES (15), (16), (17), (18), (19): Xaa is A or G
  MOD_RES (20), (21), (22), (23): Xaa is A or G or is absent

SEQ ID NO: 61756 - protein, 35 aa, Artificial Sequence; identical to SEQ ID NO: 2314
  GFR-binding peptide
  MOD_RES (2), (35): Xaa is C or S

SEQ ID NO: 61757 - protein, 35 aa, Artificial Sequence; identical to SEQ ID NO: 31247
  GFR-binding peptide
  MOD_RES (1), (1): Xaa is C or S
  MOD_RES (14), (15), (16), (17), (18): Xaa is A or G
  MOD_RES (19), (20), (21), (22): Xaa is A or G or is absent

SEQ ID NO: 61758 - protein, 40 aa, Artificial Sequence; identical to SEQ ID NO: 23297
  GFR-binding peptide
  MOD_RES (1), (35), (36): Xaa is C or S
  MOD_RES (13), (14), (15), (16), (17): Xaa is A or G
  MOD_RES (18), (19), (20), (21): Xaa is A or G or is absent

SEQ ID NO: 61759 - protein, 37 aa, Artificial Sequence; identical to SEQ ID NO: 2318
  GFR-binding peptide
  MOD_RES (1), (3), (36), (37): Xaa is C or S

SEQ ID NO: 61760 - protein, 41 aa, Artificial Sequence; identical to SEQ ID NO: 56183
  GFR-binding peptide
  MOD_RES (1), (3), (35), (36): Xaa is C or S

SEQ ID NO: 61761 - protein, 40 aa, Artificial Sequence
  GFR-binding peptide
  MOD_RES (1), (3), (35), (36): Xaa is C or S
XAXSEVTMNYHYKLVVNKNEDKYLISIPSMKEPVXXPEPI

SEQ ID NO: 61762 - protein, 30 aa, Artificial Sequence; identical to SEQ ID NO: 23302
  GFR-binding peptide

SEQ ID NO: 61763 - protein, 34 aa, Artificial Sequence; identical to SEQ ID NO: 2326
  GFR-binding peptide
  MOD_RES (1), (34): Xaa is C or S
  MOD_RES (12), (13), (14), (15), (16): Xaa is A or G
  MOD_RES (17), (18), (19), (20): Xaa is A or G or is absent

SEQ ID NO: 61764 - protein, 40 aa, Artificial Sequence; identical to SEQ ID NO: 23308
  GFR-binding peptide
  MOD_RES (35), (36): Xaa is C or S
  MOD_RES (13), (14), (15), (16), (17): Xaa is A or G
  MOD_RES (18), (19), (20), (21): Xaa is A or G or is absent

SEQ ID NO: 61765 - protein, 42 aa, Artificial Sequence; identical to SEQ ID NO: 2328
  GFR-binding peptide
  MOD_RES (2), (4), (37), (38): Xaa is C or S
  MOD_RES (15), (16), (17), (18), (19): Xaa is A or G
  MOD_RES (20), (21), (22), (23): Xaa is A or G or is absent

SEQ ID NO: 61766 - protein, 40 aa, Artificial Sequence; identical to SEQ ID NO: 31256
  GFR-binding peptide
  MOD_RES (2), (34), (35): Xaa is C or S

SEQ ID NO: 61767 - protein, 33 aa, Artificial Sequence; identical to SEQ ID NO: 2330
  GFR-binding peptide
  MOD_RES (1), (1): Xaa is C or S
  MOD_RES (12), (13), (14), (15), (16): Xaa is A or G
  MOD_RES (17), (18), (19), (20): Xaa is A or G or is absent

SEQ ID NO: 61768 - protein, 38 aa, Artificial Sequence; identical to SEQ ID NO: 31263
  GFR-binding peptide
  MOD_RES (1), (3), (35), (36): Xaa is C or S

SEQ ID NO: 61769 - protein, 37 aa, Artificial Sequence; identical to SEQ ID NO: 23318
  GFR-binding peptide
  MOD_RES (1), (33), (34): Xaa is C or S

SEQ ID NO: 61770 - protein, 41 aa, Artificial Sequence; identical to SEQ ID NO: 31266
  GFR-binding peptide
  MOD_RES (1), (3), (38), (39): Xaa is C or S
  MOD_RES (16), (17), (18), (19), (20): Xaa is A or G
  MOD_RES (21), (22), (23), (24): Xaa is A or G or is absent

SEQ ID NO: 61771 - protein, 42 aa, Artificial Sequence; identical to SEQ ID NO: 23321
  GFR-binding peptide
  MOD_RES (2), (4), (36), (37): Xaa is C or S

SEQ ID NO: 61772 - protein, 37 aa, Artificial Sequence
  GFR-binding peptide
  MOD_RES (2), (33), (34): Xaa is C or S
KXSKVIMPIKGYIKPTKGIFYLINIPSLDQSVXXPSA

SEQ ID NO: 61773 - protein, 39 aa, Artificial Sequence; identical to SEQ ID NO: 2341
  GFR-binding peptide
  MOD_RES (33), (34): Xaa is C or S
  MOD_RES (11), (12), (13), (14), (15): Xaa is A or G
  MOD_RES (16), (17), (18), (19): Xaa is A or G or is absent

SEQ ID NO: 61774 - protein, 33 aa, Artificial Sequence
  GFR-binding peptide
  MOD_RES (33), (33): Xaa is C or S
  MOD_RES (11), (12), (13), (14), (15): Xaa is A or G
  MOD_RES (16), (17), (18), (19): Xaa is A or G or is absent
EVTMNYHYKLXXXXXXXXXKYLISIPSMKEPVX

SEQ ID NO: 61775 - protein, 35 aa, Artificial Sequence; identical to SEQ ID NO: 31287
  GFR-binding peptide
  MOD_RES (31), (32): Xaa is C or S

SEQ ID NO: 61776 - protein, 37 aa, Artificial Sequence; identical to SEQ ID NO: 23329
  GFR-binding peptide
  MOD_RES (1), (33), (34): Xaa is C or S

SEQ ID NO: 61777 - protein, 39 aa, Artificial Sequence; identical to SEQ ID NO: 2346
  GFR-binding peptide
  MOD_RES (33), (34): Xaa is C or S
  MOD_RES (11), (12), (13), (14), (15): Xaa is A or G
  MOD_RES (16), (17), (18), (19): Xaa is A or G or is absent

SEQ ID NO: 61778 - protein, 32 aa, Artificial Sequence
  GFR-binding peptide
  MOD_RES (31), (32): Xaa is C or S
EEVIMEYKFKLLVRGNDLYLMSIPETKVPAXX

SEQ ID NO: 61779 - protein, 33 aa, Artificial Sequence
  GFR-binding peptide
  MOD_RES (33), (33): Xaa is C or S
  MOD_RES (11), (12), (13), (14), (15): Xaa is A or G
  MOD_RES (16), (17), (18), (19): Xaa is A or G or is absent
EVTMNEYKFKXXXXXXXXXLYLISIPEMKEPVX

SEQ ID NO: 61780 - protein, 36 aa, Artificial Sequence; identical to SEQ ID NO: 23330
  GFR-binding peptide
  MOD_RES (1), (3), (36): Xaa is C or S
  MOD_RES (14), (15), (16), (17), (18): Xaa is A or G
  MOD_RES (19), (20), (21), (22): Xaa is A or G or is absent

SEQ ID NO: 61781 - protein, 35 aa, Artificial Sequence; identical to SEQ ID NO: 2347
  GFR-binding peptide
  MOD_RES (2), (2): Xaa is C or S
  MOD_RES (14), (15), (16), (17), (18): Xaa is A or G
  MOD_RES (19), (20), (21), (22): Xaa is A or G or is absent

SEQ ID NO: 61782 - protein, 33 aa, Artificial Sequence; identical to SEQ ID NO: 2352
  GFR-binding peptide
  MOD_RES (2), (33): Xaa is C or S

SEQ ID NO: 61783 - protein, 35 aa, Artificial Sequence; identical to SEQ ID NO: 23335
  GFR-binding peptide
  MOD_RES (1), (32), (33): Xaa is C or S

SEQ ID NO: 61784 - protein, 43 aa, Artificial Sequence; identical to SEQ ID NO: 2355
  GFR-binding peptide
  MOD_RES (2), (4), (38), (39): Xaa is C or S
  MOD_RES (16), (17), (18), (19), (20): Xaa is A or G
  MOD_RES (21), (22), (23), (24): Xaa is A or G or is absent

SEQ ID NO: 61785 - protein, 34 aa, Artificial Sequence; identical to SEQ ID NO: 2356
  GFR-binding peptide
  MOD_RES (1), (34): Xaa is C or S
  MOD_RES (12), (13), (14), (15), (16): Xaa is A or G
  MOD_RES (17), (18), (19), (20): Xaa is A or G or is absent

SEQ ID NO: 61786 - protein, 36 aa, Artificial Sequence; identical to SEQ ID NO: 23342
  GFR-binding peptide
  MOD_RES (1), (35), (36): Xaa is C or S
  MOD_RES (13), (14), (15), (16), (17): Xaa is A or G
  MOD_RES (18), (19), (20), (21): Xaa is A or G or is absent

SEQ ID NO: 61787 - protein, 41 aa, Artificial Sequence; identical to SEQ ID NO: 23344
  GFR-binding peptide
  MOD_RES (2), (4), (36), (37): Xaa is C or S

SEQ ID NO: 61788 - protein, 35 aa, Artificial Sequence
  GFR-binding peptide
  MOD_RES (2), (34), (35): Xaa is C or S
AXSEVTMNPIKGYVVNKNEDFYLINIPSMKEPVXX

SEQ ID NO: 61789 - protein, 44 aa, Artificial Sequence
  GFR-binding peptide
  MOD_RES (2), (4), (38), (39): Xaa is C or S
  MOD_RES (16), (17), (18), (19), (20): Xaa is A or G
  MOD_RES (21), (22), (23), (24): Xaa is A or G or is absent
HXGXSRVVMNEYKFKXXXXXXXXXLYLVSIPELKTPAXXPKPVH

SEQ ID NO: 61790 - protein, 37 aa, Artificial Sequence; identical to SEQ ID NO: 31314
  GFR-binding peptide
  MOD_RES (31), (32): Xaa is C or S

SEQ ID NO: 61791 - protein, 33 aa, Artificial Sequence; identical to SEQ ID NO: 2369
  GFR-binding peptide
  MOD_RES (2), (2): Xaa is C or S

SEQ ID NO: 61792 - protein, 38 aa, Artificial Sequence; identical to SEQ ID NO: 31324
  GFR-binding peptide
  MOD_RES (2), (34), (35): Xaa is C or S

SEQ ID NO: 61793 - protein, 38 aa, Artificial Sequence; identical to SEQ ID NO: 2380
  GFR-binding peptide
  MOD_RES (1), (3), (37), (38): Xaa is C or S
  MOD_RES (15), (16), (17), (18), (19): Xaa is A or G
  MOD_RES (20), (21), (22), (23): Xaa is A or G or is absent

SEQ ID NO: 61794 - protein, 39 aa, Artificial Sequence; identical to SEQ ID NO: 2381
  GFR-binding peptide
  MOD_RES (2), (36), (37): Xaa is C or S
  MOD_RES (14), (15), (16), (17), (18): Xaa is A or G
  MOD_RES (19), (20), (21), (22): Xaa is A or G or is absent

SEQ ID NO: 61795 - protein, 42 aa, Artificial Sequence; identical to SEQ ID NO: 2383
  GFR-binding peptide
  MOD_RES (2), (36), (37): Xaa is C or S
  MOD_RES (14), (15), (16), (17), (18): Xaa is A or G
  MOD_RES (19), (20), (21), (22): Xaa is A or G or is absent

SEQ ID NO: 61796 - protein, 40 aa, Artificial Sequence; identical to SEQ ID NO: 31328
  GFR-binding peptide
  MOD_RES (34), (35): Xaa is C or S
  MOD_RES (12), (13), (14), (15), (16): Xaa is A or G
  MOD_RES (17), (18), (19), (20): Xaa is A or G or is absent

SEQ ID NO: 61797 - protein, 38 aa, Artificial Sequence; identical to SEQ ID NO: 23355
  GFR-binding peptide
  MOD_RES (32), (33): Xaa is C or S

SEQ ID NO: 61798 - protein, 36 aa, Artificial Sequence; identical to SEQ ID NO: 2386
  GFR-binding peptide
  MOD_RES (1), (3), (34), (35): Xaa is C or S

SEQ ID NO: 61799 - protein, 38 aa, Artificial Sequence; identical to SEQ ID NO: 23358
  GFR-binding peptide
  MOD_RES (34), (35): Xaa is C or S
  MOD_RES (12), (13), (14), (15), (16): Xaa is A or G
  MOD_RES (17), (18), (19), (20): Xaa is A or G or is absent

SEQ ID NO: 61800 - protein, 39 aa, Artificial Sequence
  GFR-binding peptide
  MOD_RES (1), (3), (35), (36): Xaa is C or S
XGXAEVVMDRHKRLVVNNAADYYLISTASLRAPVXXSAP

SEQ ID NO: 61801 - protein, 44 aa, Artificial Sequence; identical to SEQ ID NO: 31331
  GFR-binding peptide
  MOD_RES (2), (4), (38), (39): Xaa is C or S
  MOD_RES (16), (17), (18), (19), (20): Xaa is A or G
  MOD_RES (21), (22), (23), (24): Xaa is A or G or is absent

SEQ ID NO: 61802 - protein, 38 aa, Artificial Sequence; identical to SEQ ID NO: 23360
  GFR-binding peptide
  MOD_RES (1), (3), (35), (36): Xaa is C or S

SEQ ID NO: 61803 - protein, 35 aa, Artificial Sequence; identical to SEQ ID NO: 2390
  GFR-binding peptide
  MOD_RES (1), (32), (33): Xaa is C or S

SEQ ID NO: 61804 - protein, 39 aa, Artificial Sequence
  GFR-binding peptide
  MOD_RES (2), (4), (38), (39): Xaa is C or S
  MOD_RES (16), (17), (18), (19), (20): Xaa is A or G
  MOD_RES (21), (22), (23), (24): Xaa is A or G or is absent
RXGXAEVVMDRHKRLXXXXXXXXXYYLISTASLRAPVXX

SEQ ID NO: 61805 - protein, 38 aa, Artificial Sequence
  GFR-binding peptide
  MOD_RES (2), (4), (36), (37): Xaa is C or S
SXGXRDVVMGYHYKLIIQQKDNKYLMSIPSMKTPTXXP

SEQ ID NO: 61806 - protein, 33 aa, Artificial Sequence; identical to SEQ ID NO: 31342
  GFR-binding peptide
  MOD_RES (33), (33): Xaa is C or S
  MOD_RES (11), (12), (13), (14), (15): Xaa is A or G
  MOD_RES (16), (17), (18), (19): Xaa is A or G or is absent

SEQ ID NO: 61807 - protein, 35 aa, Artificial Sequence; identical to SEQ ID NO: 23368
  GFR-binding peptide
  MOD_RES (1), (3), (35): Xaa is C or S

SEQ ID NO: 61808 - protein, 36 aa, Artificial Sequence; identical to SEQ ID NO: 23370
  GFR-binding peptide
  MOD_RES (33), (34): Xaa is C or S
  MOD_RES (11), (12), (13), (14), (15): Xaa is A or G
  MOD_RES (16), (17), (18), (19): Xaa is A or G or is absent

SEQ ID NO: 61809 - protein, 39 aa, Artificial Sequence
  GFR-binding peptide
  MOD_RES (2), (36), (37): Xaa is C or S
  MOD_RES (14), (15), (16), (17), (18): Xaa is A or G
  MOD_RES (19), (20), (21), (22): Xaa is A or G or is absent
AXSEVTMNRYKKLXXXXXXXXXFYLISIANMKEPVXXPE

SEQ ID NO: 61810 - protein, 35 aa, Artificial Sequence
  GFR-binding peptide
  MOD_RES (2), (2): Xaa is C or S
  MOD_RES (14), (15), (16), (17), (18): Xaa is A or G
  MOD_RES (19), (20), (21), (22): Xaa is A or G or is absent
AXSEVTMNPIKGYXXXXXXXXXFYLINIPSMKEPV

SEQ ID NO: 61811 - protein, 41 aa, Artificial Sequence; identical to SEQ ID NO: 2401
  GFR-binding peptide
  MOD_RES (1), (3), (35), (36): Xaa is C or S

SEQ ID NO: 61812 - protein, 38 aa, Artificial Sequence; identical to SEQ ID NO: 2402
  GFR-binding peptide
  MOD_RES (2), (4), (36), (37): Xaa is C or S

SEQ ID NO: 61813 - protein, 40 aa, Artificial Sequence
  GFR-binding peptide
  MOD_RES (2), (36), (37): Xaa is C or S
  MOD_RES (14), (15), (16), (17), (18): Xaa is A or G
  MOD_RES (19), (20), (21), (22): Xaa is A or G or is absent
GXSEVVMDYHYKLXXXXXXXXXKYLISIPSLRTPVXXTPP

SEQ ID NO: 61814 - protein, 31 aa, Artificial Sequence
  GFR-binding peptide
  MOD_RES (31), (31): Xaa is C or S
EVVMDEYKFKVVNNASDLYLISIPELRTPVX

SEQ ID NO: 61815 - protein, 31 aa, Artificial Sequence; identical to SEQ ID NO: 31363
  GFR-binding peptide
  MOD_RES (31), (31): Xaa is C or S

SEQ ID NO: 61816 - protein, 36 aa, Artificial Sequence; identical to SEQ ID NO: 2404
  GFR-binding peptide
  MOD_RES (2), (34), (35): Xaa is C or S

SEQ ID NO: 61817 - protein, 41 aa, Artificial Sequence; identical to SEQ ID NO: 31364
  GFR-binding peptide
  MOD_RES (2), (35), (36): Xaa is C or S

SEQ ID NO: 61818 - protein, 37 aa, Artificial Sequence
  GFR-binding peptide
  MOD_RES (1), (34), (35): Xaa is C or S
  MOD_RES (12), (13), (14), (15), (16): Xaa is A or G
  MOD_RES (17), (18), (19), (20): Xaa is A or G or is absent
XEEVIMRHKRLXXXXXXXXXYYLMSTASTKVPAXXTS

SEQ ID NO: 61819 - protein, 34 aa, Artificial Sequence; identical to SEQ ID NO: 2411
  GFR-binding peptide
  MOD_RES (31), (32): Xaa is C or S

SEQ ID NO: 61820 - protein, 38 aa, Artificial Sequence; identical to SEQ ID NO: 2412
  GFR-binding peptide
  MOD_RES (2), (4), (36), (37): Xaa is C or S

SEQ ID NO: 61821 - protein, 34 aa, Artificial Sequence; identical to SEQ ID NO: 31368
  GFR-binding peptide
  MOD_RES (33), (34): Xaa is C or S
  MOD_RES (11), (12), (13), (14), (15): Xaa is A or G
  MOD_RES (16), (17), (18), (19): Xaa is A or G or is absent

SEQ ID NO: 61822 - protein, 36 aa, Artificial Sequence; identical to SEQ ID NO: 2413
  GFR-binding peptide
  MOD_RES (2), (35), (36): Xaa is C or S
  MOD_RES (13), (14), (15), (16), (17): Xaa is A or G
  MOD_RES (18), (19), (20), (21): Xaa is A or G or is absent

SEQ ID NO: 61823 - protein, 39 aa, Artificial Sequence; identical to SEQ ID NO: 2415
  GFR-binding peptide
  MOD_RES (1), (3), (35), (36): Xaa is C or S

SEQ ID NO: 61824 - protein, 40 aa, Artificial Sequence; identical to SEQ ID NO: 9911
  GFR-binding peptide
  MOD_RES (2), (34), (35): Xaa is C or S

SEQ ID NO: 61825 - protein, 34 aa, Artificial Sequence
  GFR-binding peptide
  MOD_RES (33), (34): Xaa is C or S
  MOD_RES (11), (12), (13), (14), (15): Xaa is A or G
  MOD_RES (16), (17), (18), (19): Xaa is A or G or is absent
SRVIMPIKGYXXXXXXXXXFYLINIPSLAQPVXX

SEQ ID NO: 61826 - protein, 37 aa, Artificial Sequence; identical to SEQ ID NO: 23396
  GFR-binding peptide
  MOD_RES (2), (4), (36), (37): Xaa is C or S

SEQ ID NO: 61827 - protein, 36 aa, Artificial Sequence; identical to SEQ ID NO: 2418
  GFR-binding peptide
  MOD_RES (1), (32), (33): Xaa is C or S

SEQ ID NO: 61828 - protein, 40 aa, Artificial Sequence; identical to SEQ ID NO: 2420
  GFR-binding peptide
  MOD_RES (2), (4), (36), (37): Xaa is C or S

SEQ ID NO: 61829 - protein, 35 aa, Artificial Sequence; identical to SEQ ID NO: 2425
  GFR-binding peptide
  MOD_RES (2), (35): Xaa is C or S
  MOD_RES (13), (14), (15), (16), (17): Xaa is A or G
  MOD_RES (18), (19), (20), (21): Xaa is A or G or is absent

SEQ ID NO: 61830 - protein, 41 aa, Artificial Sequence; identical to SEQ ID NO: 23403
  GFR-binding peptide
  MOD_RES (2), (4), (36), (37): Xaa is C or S

SEQ ID NO: 61831 - protein, 41 aa, Artificial Sequence; identical to SEQ ID NO: 23404
  GFR-binding peptide
  MOD_RES (1), (3), (36), (37): Xaa is C or S
  MOD_RES (14), (15), (16), (17), (18): Xaa is A or G
  MOD_RES (19), (20), (21), (22): Xaa is A or G or is absent

SEQ ID NO: 61832 - protein, 33 aa, Artificial Sequence
  GFR-binding peptide
  MOD_RES (12), (13), (14), (15), (16): Xaa is A or G
  MOD_RES (17), (18), (19), (20): Xaa is A or G or is absent
SEVTMNRYKKLXXXXXXXXXFYLISIANMKEPV

SEQ ID NO: 61833 - protein, 37 aa, Artificial Sequence; identical to SEQ ID NO: 31379
  GFR-binding peptide
  MOD_RES (1), (3), (35), (36): Xaa is C or S

SEQ ID NO: 61834 - protein, 38 aa, Artificial Sequence; identical to SEQ ID NO: 31380
  GFR-binding peptide
  MOD_RES (33), (34): Xaa is C or S
  MOD_RES (11), (12), (13), (14), (15): Xaa is A or G
  MOD_RES (16), (17), (18), (19): Xaa is A or G or is absent

SEQ ID NO: 61835 - protein, 33 aa, Artificial Sequence; identical to SEQ ID NO: 31382
  GFR-binding peptide
  MOD_RES (12), (13), (14), (15), (16): Xaa is A or G
  MOD_RES (17), (18), (19), (20): Xaa is A or G or is absent

SEQ ID NO: 61836 - protein, 36 aa, Artificial Sequence; identical to SEQ ID NO: 31384
  GFR-binding peptide
  MOD_RES (33), (34): Xaa is C or S
  MOD_RES (11), (12), (13), (14), (15): Xaa is A or G
  MOD_RES (16), (17), (18), (19): Xaa is A or G or is absent

SEQ ID NO: 61837 - protein, 37 aa, Artificial Sequence; identical to SEQ ID NO: 2429
  GFR-binding peptide
  MOD_RES (2), (4), (36), (37): Xaa is C or S

SEQ ID NO: 61838 - protein, 35 aa, Artificial Sequence; identical to SEQ ID NO: 23410
  GFR-binding peptide
  MOD_RES (2), (35): Xaa is C or S
  MOD_RES (13), (14), (15), (16), (17): Xaa is A or G
  MOD_RES (18), (19), (20), (21): Xaa is A or G or is absent

SEQ ID NO: 61839 - protein, 37 aa, Artificial Sequence; identical to SEQ ID NO: 31391
  GFR-binding peptide
  MOD_RES (34), (35): Xaa is C or S
  MOD_RES (12), (13), (14), (15), (16): Xaa is A or G
  MOD_RES (17), (18), (19), (20): Xaa is A or G or is absent

SEQ ID NO: 61840 - protein, 40 aa, Artificial Sequence; identical to SEQ ID NO: 2431
  GFR-binding peptide
  MOD_RES (34), (35): Xaa is C or S
  MOD_RES (12), (13), (14), (15), (16): Xaa is A or G
  MOD_RES (17), (18), (19), (20): Xaa is A or G or is absent

SEQ ID NO: 61841 - protein, 40 aa, Artificial Sequence; identical to SEQ ID NO: 23411
  GFR-binding peptide
  MOD_RES (2), (36), (37): Xaa is C or S
  MOD_RES (14), (15), (16), (17), (18): Xaa is A or G
  MOD_RES (19), (20), (21), (22): Xaa is A or G or is absent

SEQ ID NO: 61842 - protein, 33 aa, Artificial Sequence; identical to SEQ ID NO: 23412
  GFR-binding peptide
  MOD_RES (31), (32): Xaa is C or S

SEQ ID NO: 61843 - protein, 43 aa, Artificial Sequence; identical to SEQ ID NO: 23415
  GFR-binding peptide
  MOD_RES (1), (3), (37), (38): Xaa is C or S
  MOD_RES (15), (16), (17), (18), (19): Xaa is A or G
  MOD_RES (20), (21), (22), (23): Xaa is A or G or is absent

SEQ ID NO: 61844 - protein, 39 aa, Artificial Sequence
  GFR-binding peptide
  MOD_RES (1), (3), (35), (36): Xaa is C or S
XGXRDVVMGYHYKLIIQQKDNKYLMSIPSMKTPTXXPGA

SEQ ID NO: 61845 - protein, 41 aa, Artificial Sequence; identical to SEQ ID NO: 2437
  GFR-binding peptide
  MOD_RES (2), (36), (37): Xaa is C or S
  MOD_RES (14), (15), (16), (17), (18): Xaa is A or G
  MOD_RES (19), (20), (21), (22): Xaa is A or G or is absent

SEQ ID NO: 61846 - protein, 33 aa, Artificial Sequence; identical to SEQ ID NO: 31402
  GFR-binding peptide
  MOD_RES (2), (2): Xaa is C or S

SEQ ID NO: 61847 - protein, 41 aa, Artificial Sequence
  GFR-binding peptide
  MOD_RES (2), (35), (36): Xaa is C or S
  MOD_RES (13), (14), (15), (16), (17): Xaa is A or G
  MOD_RES (18), (19), (20), (21): Xaa is A or G or is absent
GXEEVIMEYKFKXXXXXXXXXLYLMSIPETKVPAXXTSPVR

SEQ ID NO: 61848 - protein, 36 aa, Artificial Sequence; identical to SEQ ID NO: 2440
  GFR-binding peptide
  MOD_RES (33), (34): Xaa is C or S

SEQ ID NO: 61849 - protein, 35 aa, Artificial Sequence; identical to SEQ ID NO: 2442
  GFR-binding peptide
  MOD_RES (31), (32): Xaa is C or S

SEQ ID NO: 61850 - protein, 38 aa, Artificial Sequence; identical to SEQ ID NO: 31413
  GFR-binding peptide
  MOD_RES (33), (34): Xaa is C or S
  MOD_RES (11), (12), (13), (14), (15): Xaa is A or G
  MOD_RES (16), (17), (18), (19): Xaa is A or G or is absent

SEQ ID NO: 61851 - protein, 39 aa, Artificial Sequence; identical to SEQ ID NO: 2446
  GFR-binding peptide
  MOD_RES (2), (35), (36): Xaa is C or S
  MOD_RES (13), (14), (15), (16), (17): Xaa is A or G
  MOD_RES (18), (19), (20), (21): Xaa is A or G or is absent

SEQ ID NO: 61852 - protein, 31 aa, Artificial Sequence; identical to SEQ ID NO: 2448
  GFR-binding peptide
  MOD_RES (31), (31): Xaa is C or S

SEQ ID NO: 61853 - protein, 33 aa, Artificial Sequence
  GFR-binding peptide
  MOD_RES (31), (32): Xaa is C or S
EVVMDYHYKLVVNNASDKYLISIPSLRTPVXXT

SEQ ID NO: 61854 - protein, 37 aa, Artificial Sequence
  GFR-binding peptide
  MOD_RES (2), (4): Xaa is C or S
  MOD_RES (16), (17), (18), (19), (20): Xaa is A or G
  MOD_RES (21), (22), (23), (24): Xaa is A or G or is absent
RXAXSEVTMNRHKRLXXXXXXXXXYYLISTASMKEPV

SEQ ID NO: 61855 - protein, 35 aa, Artificial Sequence; identical to SEQ ID NO: 31417
  GFR-binding peptide
  MOD_RES (32), (33): Xaa is C or S

SEQ ID NO: 61856 - protein, 39 aa, Artificial Sequence
  GFR-binding peptide
  MOD_RES (2), (4), (36), (37): Xaa is C or S
RXGXSEVVMDRHKRLVVNNASDYYLISTASLRTPVXXTP

SEQ ID NO: 61857 - protein, 39 aa, Artificial Sequence; identical to SEQ ID NO: 31421
  GFR-binding peptide
  MOD_RES (1), (3), (37), (38): Xaa is C or S
  MOD_RES (15), (16), (17), (18), (19): Xaa is A or G
  MOD_RES (20), (21), (22), (23): Xaa is A or G or is absent

SEQ ID NO: 61858 - protein, 33 aa, Artificial Sequence; identical to SEQ ID NO: 31422
  GFR-binding peptide
  MOD_RES (32), (33): Xaa is C or S

SEQ ID NO: 61859 - protein, 35 aa, Artificial Sequence; identical to SEQ ID NO: 31424
  GFR-binding peptide
  MOD_RES (1), (3), (35): Xaa is C or S

SEQ ID NO: 61860 - protein, 39 aa, Artificial Sequence
  GFR-binding peptide
  MOD_RES (2), (4), (37), (38): Xaa is C or S
  MOD_RES (15), (16), (17), (18), (19): Xaa is A or G
  MOD_RES (20), (21), (22), (23): Xaa is A or G or is absent
LXGXEEVIMEYKFKXXXXXXXXXLYLMSIPETKVPAXXT

SEQ ID NO: 61861 - protein, 34 aa, Artificial Sequence; identical to SEQ ID NO: 2455
  GFR-binding peptide
  MOD_RES (1), (3): Xaa is C or S

SEQ ID NO: 61862 - protein, 41 aa, Artificial Sequence; identical to SEQ ID NO: 31426
  GFR-binding peptide
  MOD_RES (1), (3), (35), (36): Xaa is C or S

SEQ ID NO: 61863 - protein, 39 aa, Artificial Sequence; identical to SEQ ID NO: 2457
  GFR-binding peptide
  MOD_RES (1), (3), (35), (36): Xaa is C or S

SEQ ID NO: 61864 - protein, 39 aa, Artificial Sequence
  GFR-binding peptide
  MOD_RES (1), (3), (37), (38): Xaa is C or S
  MOD_RES (15), (16), (17), (18), (19): Xaa is A or G
  MOD_RES (20), (21), (22), (23): Xaa is A or G or is absent
XGXESVAMGRHKRLXXXXXXXXXYYLISTASLKTPVXXA

SEQ ID NO: 61865 - protein, 39 aa, Artificial Sequence; identical to SEQ ID NO: 2459
  GFR-binding peptide
  MOD_RES (33), (34): Xaa is C or S
  MOD_RES (11), (12), (13), (14), (15): Xaa is A or G
  MOD_RES (16), (17), (18), (19): Xaa is A or G or is absent

SEQ ID NO: 61866 - protein, 40 aa, Artificial Sequence; identical to SEQ ID NO: 23442
  GFR-binding peptide
  MOD_RES (1), (35), (36): Xaa is C or S
  MOD_RES (13), (14), (15), (16), (17): Xaa is A or G
  MOD_RES (18), (19), (20), (21): Xaa is A or G or is absent

SEQ ID NO: 61867 - protein, 43 aa, Artificial Sequence
  GFR-binding peptide
  MOD_RES (1), (3), (37), (38): Xaa is C or S
  MOD_RES (15), (16), (17), (18), (19): Xaa is A or G
  MOD_RES (20), (21), (22), (23): Xaa is A or G or is absent
XAXSEVTMNRYKKLXXXXXXXXXFYLISIANMKEPVXXPEPIG

SEQ ID NO: 61868 - protein, 42 aa, Artificial Sequence; identical to SEQ ID NO: 23444
  GFR-binding peptide
  MOD_RES (1), (3), (37), (38): Xaa is C or S
  MOD_RES (15), (16), (17), (18), (19): Xaa is A or G
  MOD_RES (20), (21), (22), (23): Xaa is A or G or is absent

SEQ ID NO: 61869 - protein, 41 aa, Artificial Sequence; identical to SEQ ID NO: 31432
  GFR-binding peptide
  MOD_RES (2), (4), (36), (37): Xaa is C or S

SEQ ID NO: 61870 - protein, 42 aa, Artificial Sequence; identical to SEQ ID NO: 23445
  GFR-binding peptide
  MOD_RES (2), (36), (37): Xaa is C or S
  MOD_RES (14), (15), (16), (17), (18): Xaa is A or G
  MOD_RES (19), (20), (21), (22): Xaa is A or G or is absent

SEQ ID NO: 61871 - protein, 37 aa, Artificial Sequence; identical to SEQ ID NO: 23446
  GFR-binding peptide
  MOD_RES (1), (3), (37): Xaa is C or S
  MOD_RES (15), (16), (17), (18), (19): Xaa is A or G
  MOD_RES (20), (21), (22), (23): Xaa is A or G or is absent

SEQ ID NO: 61872 - protein, 40 aa, Artificial Sequence; identical to SEQ ID NO: 2469
  GFR-binding peptide
  MOD_RES (1), (3), (38), (39): Xaa is C or S
  MOD_RES (16), (17), (18), (19), (20): Xaa is A or G
  MOD_RES (21), (22), (23), (24): Xaa is A or G or is absent

SEQ ID NO: 61873 - protein, 43 aa, Artificial Sequence; identical to SEQ ID NO: 2473
  GFR-binding peptide
  MOD_RES (2), (4), (39), (40): Xaa is C or S
  MOD_RES (17), (18), (19), (20), (21): Xaa is A or G
  MOD_RES (22), (23), (24), (25): Xaa is A or G or is absent

SEQ ID NO: 61874 - protein, 43 aa, Artificial Sequence; identical to SEQ ID NO: 31439
  GFR-binding peptide
  MOD_RES (2), (37), (38): Xaa is C or S
  MOD_RES (15), (16), (17), (18), (19): Xaa is A or G
  MOD_RES (20), (21), (22), (23): Xaa is A or G or is absent

SEQ ID NO: 61875 - protein, 35 aa, Artificial Sequence; identical to SEQ ID NO: 2478
  GFR-binding peptide
  MOD_RES (31), (32): Xaa is C or S

SEQ ID NO: 61876 - protein, 39 aa, Artificial Sequence
  GFR-binding peptide
  MOD_RES (2), (35), (36): Xaa is C or S
  MOD_RES (13), (14), (15), (16), (17): Xaa is A or G
  MOD_RES (18), (19), (20), (21): Xaa is A or G or is absent
GXEEVIMEYKFKXXXXXXXXXLYLMSIPETKVPAXXTSP

SEQ ID NO: 61877 - protein, 38 aa, Artificial Sequence; identical to SEQ ID NO: 23458
  GFR-binding peptide
  MOD_RES (2), (36), (37): Xaa is C or S
  MOD_RES (14), (15), (16), (17), (18): Xaa is A or G
  MOD_RES (19), (20), (21), (22): Xaa is A or G or is absent

SEQ ID NO: 61878 - protein, 35 aa, Artificial Sequence; identical to SEQ ID NO: 23459
  GFR-binding peptide
  MOD_RES (1), (35): Xaa is C or S
  MOD_RES (13), (14), (15), (16), (17): Xaa is A or G
  MOD_RES (18), (19), (20), (21): Xaa is A or G or is absent

SEQ ID NO: 61879 - protein, 36 aa, Artificial Sequence; identical to SEQ ID NO: 2480
  GFR-binding peptide
  MOD_RES (33), (34): Xaa is C or S
  MOD_RES (11), (12), (13), (14), (15): Xaa is A or G
  MOD_RES (16), (17), (18), (19): Xaa is A or G or is absent

SEQ ID NO: 61880 - protein, 37 aa, Artificial Sequence
  GFR-binding peptide
  MOD_RES (2), (34), (35): Xaa is C or S
AXSEVTMNYHYKLVVNKNEDKYLISIPSMKEPVXXPE

SEQ ID NO: 61881 - protein, 41 aa, Artificial Sequence; identical to SEQ ID NO: 31449
  GFR-binding peptide
  MOD_RES (1), (35), (36): Xaa is C or S
  MOD_RES (13), (14), (15), (16), (17): Xaa is A or G
  MOD_RES (18), (19), (20), (21): Xaa is A or G or is absent

SEQ ID NO: 61882 - protein, 33 aa, Artificial Sequence; identical to SEQ ID NO: 23465
  GFR-binding peptide
  MOD_RES (2), (2): Xaa is C or S

SEQ ID NO: 61883 - protein, 33 aa, Artificial Sequence; identical to SEQ ID NO: 31450
  GFR-binding peptide
  MOD_RES (1), (33): Xaa is C or S

SEQ ID NO: 61884 - protein, 42 aa, Artificial Sequence; identical to SEQ ID NO: 31459
  GFR-binding peptide
  MOD_RES (1), (3), (37), (38): Xaa is C or S
  MOD_RES (15), (16), (17), (18), (19): Xaa is A or G
  MOD_RES (20), (21), (22), (23): Xaa is A or G or is absent

SEQ ID NO: 61885 - protein, 30 aa, Artificial Sequence; identical to SEQ ID NO: 23473
  GFR-binding peptide

SEQ ID NO: 61886 - protein, 34 aa, Artificial Sequence; identical to SEQ ID NO: 2495
  GFR-binding peptide
  MOD_RES (1), (32), (33): Xaa is C or S

SEQ ID NO: 61887 - protein, 41 aa, Artificial Sequence; identical to SEQ ID NO: 10000
  GFR-binding peptide
  MOD_RES (2), (4), (36), (37): Xaa is C or S

SEQ ID NO: 61888 - protein, 38 aa, Artificial Sequence; identical to SEQ ID NO: 31467
  GFR-binding peptide
  MOD_RES (2), (4), (36), (37): Xaa is C or S

SEQ ID NO: 61889 - protein, 34 aa, Artificial Sequence; identical to SEQ ID NO: 2502
  GFR-binding peptide
  MOD_RES (2), (4): Xaa is C or S

SEQ ID NO: 61890 - protein, 34 aa, Artificial Sequence; identical to SEQ ID NO: 2503
  GFR-binding peptide
  MOD_RES (34), (34): Xaa is C or S
  MOD_RES (12), (13), (14), (15), (16): Xaa is A or G
  MOD_RES (17), (18), (19), (20): Xaa is A or G or is absent

SEQ ID NO: 61891 - protein, 35 aa, Artificial Sequence; identical to SEQ ID NO: 23485
  GFR-binding peptide
  MOD_RES (1), (3), (35): Xaa is C or S

SEQ ID NO: 61892 - protein, 36 aa, Artificial Sequence
  GFR-binding peptide
  MOD_RES (2), (36): Xaa is C or S
  MOD_RES (14), (15), (16), (17), (18): Xaa is A or G
  MOD_RES (19), (20), (21), (22): Xaa is A or G or is absent
GXSEVVMDRHKRLXXXXXXXXXYYLISTASLRTPVX

SEQ ID NO: 61893 - protein, 41 aa, Artificial Sequence
  GFR-binding peptide
  MOD_RES (2), (35), (36): Xaa is C or S
  MOD_RES (13), (14), (15), (16), (17): Xaa is A or G
  MOD_RES (18), (19), (20), (21): Xaa is A or G or is absent
KXSKVIMPIKGYXXXXXXXXXFYLINIPSLDQSVXXPSASA

SEQ ID NO: 61894 - protein, 38 aa, Artificial Sequence; identical to SEQ ID NO: 23489
  GFR-binding peptide
  MOD_RES (2), (35), (36): Xaa is C or S
  MOD_RES (13), (14), (15), (16), (17): Xaa is A or G
  MOD_RES (18), (19), (20), (21): Xaa is A or G or is absent

SEQ ID NO: 61895 - protein, 39 aa, Artificial Sequence; identical to SEQ ID NO: 23492
  GFR-binding peptide
  MOD_RES (2), (4), (38), (39): Xaa is C or S
  MOD_RES (16), (17), (18), (19), (20): Xaa is A or G
  MOD_RES (21), (22), (23), (24): Xaa is A or G or is absent

SEQ ID NO: 61896 - protein, 39 aa, Artificial Sequence; identical to SEQ ID NO: 31479
  GFR-binding peptide
  MOD_RES (2), (4), (38), (39): Xaa is C or S
  MOD_RES (16), (17), (18), (19), (20): Xaa is A or G
  MOD_RES (21), (22), (23), (24): Xaa is A or G or is absent

SEQ ID NO: 61897 - protein, 37 aa, Artificial Sequence
  GFR-binding peptide
  MOD_RES (32), (33): Xaa is C or S
SEVVMDRHKRLVVNNASDYYLISTASLRTPVXXTPPT

SEQ ID NO: 61898 - protein, 39 aa, Artificial Sequence; identical to SEQ ID NO: 2516
  GFR-binding peptide
  MOD_RES (1), (34), (35): Xaa is C or S

SEQ ID NO: 61899 - protein, 38 aa, Artificial Sequence; identical to SEQ ID NO: 2519
  GFR-binding peptide
  MOD_RES (34), (35): Xaa is C or S
  MOD_RES (12), (13), (14), (15), (16): Xaa is A or G
  MOD_RES (17), (18), (19), (20): Xaa is A or G or is absent

SEQ ID NO: 61900 - protein, 39 aa, Artificial Sequence
  GFR-binding peptide
  MOD_RES (34), (35): Xaa is C or S
  MOD_RES (12), (13), (14), (15), (16): Xaa is A or G
  MOD_RES (17), (18), (19), (20): Xaa is A or G or is absent
SEVTMNEYKFKXXXXXXXXXLYLISIPEMKEPVXXPEPI

SEQ ID NO: 61901 - protein, 41 aa, Artificial Sequence
  GFR-binding peptide
  MOD_RES (1), (35), (36): Xaa is C or S
  MOD_RES (13), (14), (15), (16), (17): Xaa is A or G
  MOD_RES (18), (19), (20), (21): Xaa is A or G or is absent
XSEVVMDYHYKLXXXXXXXXXKYLISIPSLRTPVXXTPPTS

SEQ ID NO: 61902 - protein, 35 aa, Artificial Sequence
  GFR-binding peptide
  MOD_RES (33), (34): Xaa is C or S
  MOD_RES (11), (12), (13), (14), (15): Xaa is A or G
  MOD_RES (16), (17), (18), (19): Xaa is A or G or is absent
SKVIMPIKGYXXXXXXXXXFYLINIPSLDQSVXXP

SEQ ID NO: 61903 - protein, 36 aa, Artificial Sequence; identical to SEQ ID NO: 2523
  GFR-binding peptide
  MOD_RES (2), (36): Xaa is C or S
  MOD_RES (14), (15), (16), (17), (18): Xaa is A or G
  MOD_RES (19), (20), (21), (22): Xaa is A or G or is absent

SEQ ID NO: 61904 - protein, 34 aa, Artificial Sequence; identical to SEQ ID NO: 10019
  GFR-binding peptide
  MOD_RES (1), (3): Xaa is C or S

SEQ ID NO: 61905 - protein, 40 aa, Artificial Sequence
  GFR-binding peptide
  MOD_RES (1), (35), (36): Xaa is C or S
  MOD_RES (13), (14), (15), (16), (17): Xaa is A or G
  MOD_RES (18), (19), (20), (21): Xaa is A or G or is absent
XSEVTMNRHKRLXXXXXXXXXYYLISTASMKEPVXXPEPI

SEQ ID NO: 61906 - protein, 36 aa, Artificial Sequence; identical to SEQ ID NO: 31496
  GFR-binding peptide
  MOD_RES (2), (36): Xaa is C or S
  MOD_RES (14), (15), (16), (17), (18): Xaa is A or G
  MOD_RES (19), (20), (21), (22): Xaa is A or G or is absent

SEQ ID NO: 61907 - protein, 33 aa, Artificial Sequence; identical to SEQ ID NO: 23507
  GFR-binding peptide
  MOD_RES (1), (1): Xaa is C or S
  MOD_RES (12), (13), (14), (15), (16): Xaa is A or G
  MOD_RES (17), (18), (19), (20): Xaa is A or G or is absent

SEQ ID NO: 61908 - protein, 35 aa, Artificial Sequence
  GFR-binding peptide
  MOD_RES (2), (4): Xaa is C or S
RXAXSEVTMNEYKFKVVNKNEDLYLISIPEMKEPV

SEQ ID NO: 61909 - protein, 38 aa, Artificial Sequence; identical to SEQ ID NO: 23508
  GFR-binding peptide
  MOD_RES (1), (3), (35), (36): Xaa is C or S

SEQ ID NO: 61910 - protein, 37 aa, Artificial Sequence
  GFR-binding peptide
  MOD_RES (2), (4), (35), (36): Xaa is C or S
LXGXEEVIMEYKFKLLVRGNDLYLMSIPETKVPAXXT

SEQ ID NO: 61911 - protein, 35 aa, Artificial Sequence
  GFR-binding peptide
  MOD_RES (2), (4): Xaa is C or S
SXGXRDVVMGRHKRLIIQQKDNYYLMSTASMKTPT

SEQ ID NO: 61912 - protein, 32 aa, Artificial Sequence; identical to SEQ ID NO: 31501
  GFR-binding peptide
  MOD_RES (11), (12), (13), (14), (15): Xaa is A or G
  MOD_RES (16), (17), (18), (19): Xaa is A or G or is absent

SEQ ID NO: 61913 - protein, 41 aa, Artificial Sequence; identical to SEQ ID NO: 23513
  GFR-binding peptide
  MOD_RES (1), (35), (36): Xaa is C or S
  MOD_RES (13), (14), (15), (16), (17): Xaa is A or G
  MOD_RES (18), (19), (20), (21): Xaa is A or G or is absent

SEQ ID NO: 61914 - protein, 38 aa, Artificial Sequence; identical to SEQ ID NO: 23516
  GFR-binding peptide
  MOD_RES (1), (3), (35), (36): Xaa is C or S

SEQ ID NO: 61915 - protein, 39 aa, Artificial Sequence; identical to SEQ ID NO: 31506
  GFR-binding peptide
  MOD_RES (1), (34), (35): Xaa is C or S
  MOD_RES (12), (13), (14), (15), (16): Xaa is A or G
  MOD_RES (17), (18), (19), (20): Xaa is A or G or is absent

SEQ ID NO: 61916 - protein, 41 aa, Artificial Sequence
  GFR-binding peptide
  MOD_RES (2), (4), (36), (37): Xaa is C or S
SXGXRDVVMGRHKRLIIQQKDNYYLMSTASMKTPTXXPGAS

SEQ ID NO: 61917 - protein, 43 aa, Artificial Sequence; identical to SEQ ID NO: 23518
  GFR-binding peptide
  MOD_RES (2), (4), (37), (38): Xaa is C or S
  MOD_RES (15), (16), (17), (18), (19): Xaa is A or G
  MOD_RES (20), (21), (22), (23): Xaa is A or G or is absent

SEQ ID NO: 61918 - protein, 34 aa, Artificial Sequence
  GFR-binding peptide
  MOD_RES (34), (34): Xaa is C or S
  MOD_RES (12), (13), (14), (15), (16): Xaa is A or G
  MOD_RES (17), (18), (19), (20): Xaa is A or G or is absent
SEVTMNPIKGYXXXXXXXXXFYLINIPSMKEPVX

SEQ ID NO: 61919 - protein, 41 aa, Artificial Sequence; identical to SEQ ID NO: 23520
  GFR-binding peptide
  MOD_RES (2), (36), (37): Xaa is C or S
  MOD_RES (14), (15), (16), (17), (18): Xaa is A or G
  MOD_RES (19), (20), (21), (22): Xaa is A or G or is absent

SEQ ID NO: 61920 - protein, 36 aa, Artificial Sequence; identical to SEQ ID NO: 23525
  GFR-binding peptide
  MOD_RES (1), (32), (33): Xaa is C or S

SEQ ID NO: 61921 - protein, 32 aa, Artificial Sequence; identical to SEQ ID NO: 10038
  GFR-binding peptide
  MOD_RES (31), (32): Xaa is C or S

SEQ ID NO: 61922 - protein, 37 aa, Artificial Sequence; identical to SEQ ID NO: 31515
  GFR-binding peptide
  MOD_RES (2), (4), (37): Xaa is C or S

SEQ ID NO: 61923 - protein, 41 aa, Artificial Sequence; identical to SEQ ID NO: 2543
  GFR-binding peptide
  MOD_RES (1), (3), (37), (38): Xaa is C or S
  MOD_RES (15), (16), (17), (18), (19): Xaa is A or G
  MOD_RES (20), (21), (22), (23): Xaa is A or G or is absent

SEQ ID NO: 61924 - protein, 40 aa, Artificial Sequence
  GFR-binding peptide
  MOD_RES (2), (35), (36): Xaa is C or S
  MOD_RES (13), (14), (15), (16), (17): Xaa is A or G
  MOD_RES (18), (19), (20), (21): Xaa is A or G or is absent
KXSRVIMPIKGYXXXXXXXXXFYLINIPSLAQPVXXPAAS

SEQ ID NO: 61925 - protein, 41 aa, Artificial Sequence; identical to SEQ ID NO: 2544
  GFR-binding peptide
  MOD_RES (2), (4), (36), (37): Xaa is C or S

SEQ ID NO: 61926 - protein, 35 aa, Artificial Sequence; identical to SEQ ID NO: 23529
  GFR-binding peptide
  MOD_RES (31), (32): Xaa is C or S

SEQ ID NO: 61927 - protein, 40 aa, Artificial Sequence; identical to SEQ ID NO: 23531
  GFR-binding peptide
  MOD_RES (2), (4), (38), (39): Xaa is C or S
  MOD_RES (16), (17), (18), (19), (20): Xaa is A or G
  MOD_RES (21), (22), (23), (24): Xaa is A or G or is absent

SEQ ID NO: 61928 - protein, 35 aa, Artificial Sequence; identical to SEQ ID NO: 2547
  GFR-binding peptide
  MOD_RES (2), (34), (35): Xaa is C or S

SEQ ID NO: 61929 - protein, 35 aa, Artificial Sequence; identical to SEQ ID NO: 2548
  GFR-binding peptide
  MOD_RES (32), (33): Xaa is C or S

SEQ ID NO: 61930 - protein, 40 aa, Artificial Sequence
  GFR-binding peptide
  MOD_RES (2), (4), (36), (37): Xaa is C or S
RXAXSEVTMNEYKFKVVNKNEDLYLISIPEMKEPVXXPEP

SEQ ID NO: 61931 - protein, 33 aa, Artificial Sequence
  GFR-binding peptide
  MOD_RES (2), (33): Xaa is C or S
GXEEVIMEYKFKLLVRGNDLYLMSIPETKVPAX

SEQ ID NO: 61932 - protein, 41 aa, Artificial Sequence; identical to SEQ ID NO: 31524
  GFR-binding peptide
  MOD_RES (1), (3), (37): Xaa is C or S
  MOD_RES (15), (16), (17), (18), (19): Xaa is A or G
  MOD_RES (20), (21), (22), (23): Xaa is A or G or is absent

SEQ ID NO: 61933 - protein, 40 aa, Artificial Sequence; identical to SEQ ID NO: 23538
  GFR-binding peptide
  MOD_RES (1), (35): Xaa is C or S
  MOD_RES (13), (14), (15), (16), (17): Xaa is A or G
  MOD_RES (18), (19), (20), (21): Xaa is A or G or is absent

SEQ ID NO: 61934 - protein, 37 aa, Artificial Sequence; identical to SEQ ID NO: 2553
  GFR-binding peptide
  MOD_RES (2), (4), (37): Xaa is C or S

SEQ ID NO: 61935 - protein, 43 aa, Artificial Sequence
  GFR-binding peptide
  MOD_RES (1), (3), (37), (38): Xaa is C or S
  MOD_RES (15), (16), (17), (18), (19): Xaa is A or G
  MOD_RES (20), (21), (22), (23): Xaa is A or G or is absent
XGXSRVVMNEYKFKXXXXXXXXXLYLVSIPELKTPAXXPKPVH

SEQ ID NO: 61936 - protein, 35 aa, Artificial Sequence; identical to SEQ ID NO: 2556
  GFR-binding peptide
  MOD_RES (1), (3): Xaa is C or S
  MOD_RES (14), (15), (16), (17), (18): Xaa is A or G
  MOD_RES (19), (20), (21), (22): Xaa is A or G or is absent

SEQ ID NO: 61937 - protein, 35 aa, Artificial Sequence
  GFR-binding peptide
  MOD_RES (1), (33), (34): Xaa is C or S
XSEVTMNRHKRLVVNKNEDYYLISTASMKEPVXXP

SEQ ID NO: 61938 - protein, 43 aa, Artificial Sequence; identical to SEQ ID NO: 31529
  GFR-binding peptide
  MOD_RES (2), (4), (38): Xaa is C or S
  MOD_RES (16), (17), (18), (19), (20): Xaa is A or G
  MOD_RES (21), (22), (23), (24): Xaa is A or G or is absent

SEQ ID NO: 61939 - protein, 39 aa, Artificial Sequence; identical to SEQ ID NO: 31531
  GFR-binding peptide
  MOD_RES (1), (33), (34): Xaa is C or S

SEQ ID NO: 61940 - protein, 34 aa, Artificial Sequence; identical to SEQ ID NO: 2558
  GFR-binding peptide
  MOD_RES (2), (4): Xaa is C or S

SEQ ID NO: 61941 - protein, 33 aa, Artificial Sequence; identical to SEQ ID NO: 31532
  GFR-binding peptide
  MOD_RES (33), (33): Xaa is C or S
  MOD_RES (11), (12), (13), (14), (15): Xaa is A or G
  MOD_RES (16), (17), (18), (19): Xaa is A or G or is absent

SEQ ID NO: 61942 - protein, 36 aa, Artificial Sequence; identical to SEQ ID NO: 2560
  GFR-binding peptide
  MOD_RES (1), (3), (36): Xaa is C or S
  MOD_RES (14), (15), (16), (17), (18): Xaa is A or G
  MOD_RES (19), (20), (21), (22): Xaa is A or G or is absent

SEQ ID NO: 61943 - protein, 37 aa, Artificial Sequence; identical to SEQ ID NO: 23548
  GFR-binding peptide
  MOD_RES (2), (34): Xaa is C or S

SEQ ID NO: 61944 - protein, 38 aa, Artificial Sequence; identical to SEQ ID NO: 2561
  GFR-binding peptide
  MOD_RES (1), (3), (35), (36): Xaa is C or S

SEQ ID NO: 61945 - protein, 37 aa, Artificial Sequence; identical to SEQ ID NO: 23551
  GFR-binding peptide
  MOD_RES (1), (33), (34): Xaa is C or S

SEQ ID NO: 61946 - protein, 38 aa, Artificial Sequence
  GFR-binding peptide
  MOD_RES (2), (4), (35), (36): Xaa is C or S
LXGXEEVIMYHYKLLLVRGNDKYLMSIPSTKVPAXXTS

SEQ ID NO: 61947 - protein, 41 aa, Artificial Sequence
  GFR-binding peptide
  MOD_RES (2), (4), (35), (36): Xaa is C or S
SXKXSKVIMPIKGYIKPTKGIFYLINIPSLDQSVXXPSASA

SEQ ID NO: 61948 - protein, 33 aa, Artificial Sequence; identical to SEQ ID NO: 31537
  GFR-binding peptide
  MOD_RES (33), (33): Xaa is C or S
  MOD_RES (11), (12), (13), (14), (15): Xaa is A or G
  MOD_RES (16), (17), (18), (19): Xaa is A or G or is absent

SEQ ID NO: 61949 - protein, 41 aa, Artificial Sequence; identical to SEQ ID NO: 31540
  GFR-binding peptide
  MOD_RES (2), (36), (37): Xaa is C or S
  MOD_RES (14), (15), (16), (17), (18): Xaa is A or G
  MOD_RES (19), (20), (21), (22): Xaa is A or G or is absent

SEQ ID NO: 61950 - protein, 36 aa, Artificial Sequence
  GFR-binding peptide
  MOD_RES (32), (33): Xaa is C or S
AEVVMDRHKRLVVNNAADYYLISTASLRAPVXXSAP

SEQ ID NO: 61951 - protein, 36 aa, Artificial Sequence; identical to SEQ ID NO: 2566
  GFR-binding peptide
  MOD_RES (1), (3), (36): Xaa is C or S
  MOD_RES (14), (15), (16), (17), (18): Xaa is A or G
  MOD_RES (19), (20), (21), (22): Xaa is A or G or is absent

SEQ ID NO: 61952 - protein, 40 aa, Artificial Sequence; identical to SEQ ID NO: 23560
  GFR-binding peptide
  MOD_RES (2), (4), (38), (39): Xaa is C or S
  MOD_RES (16), (17), (18), (19), (20): Xaa is A or G
  MOD_RES (21), (22), (23), (24): Xaa is A or G or is absent

SEQ ID NO: 61953 - protein, 38 aa, Artificial Sequence
  GFR-binding peptide
  MOD_RES (1), (32), (33): Xaa is C or S
XEEVIMYHYKLLLVRGNDKYLMSIPSTKVPAXXTSPVR

SEQ ID NO: 61954 - protein, 42 aa, Artificial Sequence
  GFR-binding peptide
  MOD_RES (2), (36), (37): Xaa is C or S
  MOD_RES (14), (15), (16), (17), (18): Xaa is A or G
  MOD_RES (19), (20), (21), (22): Xaa is A or G or is absent
AXSEVTMNRYKKLXXXXXXXXXFYLISIANMKEPVXXPEPIG

SEQ ID NO: 61955 - protein, 39 aa, Artificial Sequence; identical to SEQ ID NO: 23564
  GFR-binding peptide
  MOD_RES (2), (4), (36), (37): Xaa is C or S

SEQ ID NO: 61956 - protein, 37 aa, Artificial Sequence; identical to SEQ ID NO: 23565
  GFR-binding peptide
  MOD_RES (1), (3), (37): Xaa is C or S
  MOD_RES (15), (16), (17), (18), (19): Xaa is A or G
  MOD_RES (20), (21), (22), (23): Xaa is A or G or is absent

SEQ ID NO: 61957 - protein, 34 aa, Artificial Sequence; identical to SEQ ID NO: 2570
  GFR-binding peptide
  MOD_RES (2), (2): Xaa is C or S
  MOD_RES (13), (14), (15), (16), (17): Xaa is A or G
  MOD_RES (18), (19), (20), (21): Xaa is A or G or is absent

SEQ ID NO: 61958 - protein, 40 aa, Artificial Sequence
  GFR-binding peptide
  MOD_RES (1), (3), (35), (36): Xaa is C or S
XGXSEVVMDEYKFKVVNNASDLYLISIPELRTPVXXTPPT

SEQ ID NO: 61959 - protein, 35 aa, Artificial Sequence; identical to SEQ ID NO: 2574
  GFR-binding peptide
  MOD_RES (1), (3): Xaa is C or S
  MOD_RES (14), (15), (16), (17), (18): Xaa is A or G
  MOD_RES (19), (20), (21), (22): Xaa is A or G or is absent

SEQ ID NO: 61960 - protein, 32 aa, Artificial Sequence; identical to SEQ ID NO: 23571
  GFR-binding peptide
  MOD_RES (11), (12), (13), (14), (15): Xaa is A or G
  MOD_RES (16), (17), (18), (19): Xaa is A or G or is absent

SEQ ID NO: 61961 - protein, 37 aa, Artificial Sequence; identical to SEQ ID NO: 23574
  GFR-binding peptide
  MOD_RES (34), (35): Xaa is C or S
  MOD_RES (12), (13), (14), (15), (16): Xaa is A or G
  MOD_RES (17), (18), (19), (20): Xaa is A or G or is absent

SEQ ID NO: 61962 - protein, 42 aa, Artificial Sequence; identical to SEQ ID NO: 2578
  GFR-binding peptide
  MOD_RES (2), (4), (38), (39): Xaa is C or S
  MOD_RES (16), (17), (18), (19), (20): Xaa is A or G
  MOD_RES (21), (22), (23), (24): Xaa is A or G or is absent

SEQ ID NO: 61963 - protein, 37 aa, Artificial Sequence
  GFR-binding peptide
  MOD_RES (34), (35): Xaa is C or S
  MOD_RES (12), (13), (14), (15), (16): Xaa is A or G
  MOD_RES (17), (18), (19), (20): Xaa is A or G or is absent
RDVVMGYHYKLXXXXXXXXXKYLMSIPSMKTPTXXPG

SEQ ID NO: 61964 - protein, 38 aa, Artificial Sequence; identical to SEQ ID NO: 2579
  GFR-binding peptide
  MOD_RES (1), (3), (36), (37): Xaa is C or S
  MOD_RES (14), (15), (16), (17), (18): Xaa is A or G
  MOD_RES (19), (20), (21), (22): Xaa is A or G or is absent

SEQ ID NO: 61965 - protein, 41 aa, Artificial Sequence; identical to SEQ ID NO: 31563
  GFR-binding peptide
  MOD_RES (35), (36): Xaa is C or S
  MOD_RES (13), (14), (15), (16), (17): Xaa is A or G
  MOD_RES (18), (19), (20), (21): Xaa is A or G or is absent

SEQ ID NO: 61966 - protein, 38 aa, Artificial Sequence; identical to SEQ ID NO: 2586
  GFR-binding peptide
  MOD_RES (1), (34), (35): Xaa is C or S
  MOD_RES (12), (13), (14), (15), (16): Xaa is A or G
  MOD_RES (17), (18), (19), (20): Xaa is A or G or is absent

SEQ ID NO: 61967 - protein, 38 aa, Artificial Sequence
  GFR-binding peptide
  MOD_RES (33), (34): Xaa is C or S
  MOD_RES (11), (12), (13), (14), (15): Xaa is A or G
  MOD_RES (16), (17), (18), (19): Xaa is A or G or is absent
EVTMNPIKGYXXXXXXXXXFYLINIPSMKEPVXXPEPI

SEQ ID NO: 61968 - protein, 38 aa, Artificial Sequence
  GFR-binding peptide
  MOD_RES (1), (32), (33): Xaa is C or S
XSKVIMPIKGYIKPTKGIFYLINIPSLDQSVXXPSASA

SEQ ID NO: 61969 - protein, 38 aa, Artificial Sequence; identical to SEQ ID NO: 23589
  GFR-binding peptide
  MOD_RES (2), (34), (35): Xaa is C or S

SEQ ID NO: 61970 - protein, 41 aa, Artificial Sequence; identical to SEQ ID NO: 23593
  GFR-binding peptide
  MOD_RES (2), (4), (36), (37): Xaa is C or S

SEQ ID NO: 61971 - protein, 36 aa, Artificial Sequence
  GFR-binding peptide
  MOD_RES (1), (35), (36): Xaa is C or S
  MOD_RES (13), (14), (15), (16), (17): Xaa is A or G
  MOD_RES (18), (19), (20), (21): Xaa is A or G or is absent
XSEVTMNRHKRLXXXXXXXXXYYLISTASMKEPVXX

SEQ ID NO: 61972 - protein, 32 aa, Artificial Sequence
  GFR-binding peptide
  MOD_RES (1), (1): Xaa is C or S
XRDVVMGYHYKLIIQQKDNKYLMSIPSMKTPT

SEQ ID NO: 61973 - protein, 40 aa, Artificial Sequence
  GFR-binding peptide
  MOD_RES (1), (3), (34), (35): Xaa is C or S
XGXEEVIMRHKRLLLVRGNDYYLMSTASTKVPAXXTSPVR

SEQ ID NO: 61974 - protein, 36 aa, Artificial Sequence
  GFR-binding peptide
  MOD_RES (1), (33), (34): Xaa is C or S
XRDVVMGYHYKLIIQQKDNKYLMSIPSMKTPTXXPG

SEQ ID NO: 61975 - protein, 35 aa, Artificial Sequence; identical to SEQ ID NO: 23598
  GFR-binding peptide
  MOD_RES (32), (33): Xaa is C or S

SEQ ID NO: 61976 - protein, 41 aa, Artificial Sequence; identical to SEQ ID NO: 2597
  GFR-binding peptide
  MOD_RES (2), (36), (37): Xaa is C or S
  MOD_RES (14), (15), (16), (17), (18): Xaa is A or G
  MOD_RES (19), (20), (21), (22): Xaa is A or G or is absent

SEQ ID NO: 61977 - protein, 39 aa, Artificial Sequence; identical to SEQ ID NO: 23600
  GFR-binding peptide
  MOD_RES (34), (35): Xaa is C or S
  MOD_RES (12), (13), (14), (15), (16): Xaa is A or G
  MOD_RES (17), (18), (19), (20): Xaa is A or G or is absent

SEQ ID NO: 61978 - protein, 40 aa, Artificial Sequence; identical to SEQ ID NO: 31577
  GFR-binding peptide
  MOD_RES (1), (3), (37), (38): Xaa is C or S
  MOD_RES (15), (16), (17), (18), (19): Xaa is A or G
  MOD_RES (20), (21), (22), (23): Xaa is A or G or is absent

SEQ ID NO: 61979 - protein, 40 aa, Artificial Sequence; identical to SEQ ID NO: 31578
  GFR-binding peptide
  MOD_RES (2), (35), (36): Xaa is C or S

SEQ ID NO: 61980 - protein, 36 aa, Artificial Sequence; identical to SEQ ID NO: 2600
  GFR-binding peptide
  MOD_RES (32), (33): Xaa is C or S

SEQ ID NO: 61981 - protein, 33 aa, Artificial Sequence
  GFR-binding peptide
  MOD_RES (33), (33): Xaa is C or S
  MOD_RES (11), (12), (13), (14), (15): Xaa is A or G
  MOD_RES (16), (17), (18), (19): Xaa is A or G or is absent
EVTMNRHKRLXXXXXXXXXYYLISTASMKEPVX

SEQ ID NO: 61982 - protein, 41 aa, Artificial Sequence
  GFR-binding peptide
  MOD_RES (1), (35), (36): Xaa is C or S
  MOD_RES (13), (14), (15), (16), (17): Xaa is A or G
  MOD_RES (18), (19), (20), (21): Xaa is A or G or is absent
XSEVTMNEYKFKXXXXXXXXXLYLISIPEMKEPVXXPEPIG

SEQ ID NO: 61983 - protein, 41 aa, Artificial Sequence; identical to SEQ ID NO: 23607
  GFR-binding peptide
  MOD_RES (2), (4), (36), (37): Xaa is C or S

SEQ ID NO: 61984 - protein, 38 aa, Artificial Sequence; identical to SEQ ID NO: 23608
  GFR-binding peptide
  MOD_RES (1), (3), (36), (37): Xaa is C or S

SEQ ID NO: 61985 - protein, 36 aa, Artificial Sequence; identical to SEQ ID NO: 23609
  GFR-binding peptide
  MOD_RES (2), (35), (36): Xaa is C or S
  MOD_RES (13), (14), (15), (16), (17): Xaa is A or G
  MOD_RES (18), (19), (20), (21): Xaa is A or G or is absent

SEQ ID NO: 61986 - protein, 33 aa, Artificial Sequence; identical to SEQ ID NO: 31585
  GFR-binding peptide
  MOD_RES (31), (32): Xaa is C or S

SEQ ID NO: 61987 - protein, 40 aa, Artificial Sequence; identical to SEQ ID NO: 23610
  GFR-binding peptide
  MOD_RES (2), (4), (36), (37): Xaa is C or S

SEQ ID NO: 61988 - protein, 32 aa, Artificial Sequence; identical to SEQ ID NO: 2604
  GFR-binding peptide
  MOD_RES (11), (12), (13), (14), (15): Xaa is A or G
  MOD_RES (16), (17), (18), (19): Xaa is A or G or is absent

SEQ ID NO: 61989 - protein, 37 aa, Artificial Sequence; identical to SEQ ID NO: 2605
  GFR-binding peptide
  MOD_RES (1), (3), (35), (36): Xaa is C or S

SEQ ID NO: 61990 - protein, 38 aa, Artificial Sequence; identical to SEQ ID NO: 23615
  GFR-binding peptide
  MOD_RES (2), (36), (37): Xaa is C or S
  MOD_RES (14), (15), (16), (17), (18): Xaa is A or G
  MOD_RES (19), (20), (21), (22): Xaa is A or G or is absent

SEQ ID NO: 61991 - protein, 35 aa, Artificial Sequence; identical to SEQ ID NO: 31587
  GFR-binding peptide
  MOD_RES (2), (2): Xaa is C or S
  MOD_RES (14), (15), (16), (17), (18): Xaa is A or G
  MOD_RES (19), (20), (21), (22): Xaa is A or G or is absent

SEQ ID NO: 61992 - protein, 40 aa, Artificial Sequence; identical to SEQ ID NO: 31590
  GFR-binding peptide
  MOD_RES (2), (4), (37), (38): Xaa is C or S
  MOD_RES (15), (16), (17), (18), (19): Xaa is A or G
  MOD_RES (20), (21), (22), (23): Xaa is A or G or is absent

SEQ ID NO: 61993 - protein, 37 aa, Artificial Sequence; identical to SEQ ID NO: 31591
  GFR-binding peptide
  MOD_RES (2), (36), (37): Xaa is C or S
  MOD_RES (14), (15), (16), (17), (18): Xaa is A or G
  MOD_RES (19), (20), (21), (22): Xaa is A or G or is absent

SEQ ID NO: 61994 - protein, 41 aa, Artificial Sequence; identical to SEQ ID NO: 56516
  GFR-binding peptide
  MOD_RES (2), (4), (37), (38): Xaa is C or S
  MOD_RES (15), (16), (17), (18), (19): Xaa is A or G
  MOD_RES (20), (21), (22), (23): Xaa is A or G or is absent

SEQ ID NO: 61995 - protein, 35 aa, Artificial Sequence; identical to SEQ ID NO: 2608
  GFR-binding peptide
  MOD_RES (2), (4), (35): Xaa is C or S

SEQ ID NO: 61996 - protein, 42 aa, Artificial Sequence
  GFR-binding peptide
  MOD_RES (2), (4), (38), (39): Xaa is C or S
  MOD_RES (16), (17), (18), (19), (20): Xaa is A or G
  MOD_RES (21), (22), (23), (24): Xaa is A or G or is absent
RXAXSEVTMNPIKGYXXXXXXXXXFYLINIPSMKEPVXXPEP

SEQ ID NO: 61997 - protein, 36 aa, Artificial Sequence; identical to SEQ ID NO: 2609
  GFR-binding peptide
  MOD_RES (2), (34): Xaa is C or S

SEQ ID NO: 61998 - protein, 32 aa, Artificial Sequence
  GFR-binding peptide
  MOD_RES (32), (32): Xaa is C or S
SEVTMNRYKKLVVNKNEDFYLISIANMKEPVX

SEQ ID NO: 61999 - protein, 32 aa, Artificial Sequence; identical to SEQ ID NO: 2610
  GFR-binding peptide
  MOD_RES (11), (12), (13), (14), (15): Xaa is A or G
  MOD_RES (16), (17), (18), (19): Xaa is A or G or is absent

SEQ ID NO: 62000 - protein, 39 aa, Artificial Sequence; identical to SEQ ID NO: 2611
  GFR-binding peptide
  MOD_RES (1), (3), (38), (39): Xaa is C or S
  MOD_RES (16), (17), (18), (19), (20): Xaa is A or G
  MOD_RES (21), (22), (23), (24): Xaa is A or G or is absent

SEQ ID NO: 62001 - protein, 33 aa, Artificial Sequence
  GFR-binding peptide
  MOD_RES (1), (32), (33): Xaa is C or S
XSKVIMPIKGYIKPTKGIFYLINIPSLDQSVXX

SEQ ID NO: 62002 - protein, 32 aa, Artificial Sequence
  GFR-binding peptide
  MOD_RES (31), (32): Xaa is C or S
SKVVMPIKGYVKPTRGVFYLINIPSLDQPVXX

SEQ ID NO: 62003 - protein, 38 aa, Artificial Sequence
  GFR-binding peptide
  MOD_RES (2), (4), (37), (38): Xaa is C or S
  MOD_RES (15), (16), (17), (18), (19): Xaa is A or G
  MOD_RES (20), (21), (22), (23): Xaa is A or G or is absent
SXKXSKVVMPIKGYXXXXXXXXXFYLINIPSLDQPVXX

SEQ ID NO: 62004 - protein, 43 aa, Artificial Sequence; identical to SEQ ID NO: 2613
  GFR-binding peptide
  MOD_RES (2), (4), (38), (39): Xaa is C or S
  MOD_RES (16), (17), (18), (19), (20): Xaa is A or G
  MOD_RES (21), (22), (23), (24): Xaa is A or G or is absent

SEQ ID NO: 62005 - protein, 35 aa, Artificial Sequence; identical to SEQ ID NO: 2614
  GFR-binding peptide
  MOD_RES (33), (34): Xaa is C or S
  MOD_RES (11), (12), (13), (14), (15): Xaa is A or G
  MOD_RES (16), (17), (18), (19): Xaa is A or G or is absent

SEQ ID NO: 62006 - protein, 36 aa, Artificial Sequence; identical to SEQ ID NO: 23622
  GFR-binding peptide
  MOD_RES (2), (4), (36): Xaa is C or S

SEQ ID NO: 62007 - protein, 30 aa, Artificial Sequence; identical to SEQ ID NO: 23623
  GFR-binding peptide

SEQ ID NO: 62008 - protein, 36 aa, Artificial Sequence
  GFR-binding peptide
  MOD_RES (2), (34), (35): Xaa is C or S
AXSEVTMNEYKFKVVNKNEDLYLISIPEMKEPVXXP

SEQ ID NO: 62009 - protein, 39 aa, Artificial Sequence; identical to SEQ ID NO: 31606
  GFR-binding peptide
  MOD_RES (1), (35), (36): Xaa is C or S
  MOD_RES (13), (14), (15), (16), (17): Xaa is A or G
  MOD_RES (18), (19), (20), (21): Xaa is A or G or is absent

SEQ ID NO: 62010 - protein, 42 aa, Artificial Sequence; identical to SEQ ID NO: 2624
  GFR-binding peptide
  MOD_RES (2), (4), (37), (38): Xaa is C or S
  MOD_RES (15), (16), (17), (18), (19): Xaa is A or G
  MOD_RES (20), (21), (22), (23): Xaa is A or G or is absent

SEQ ID NO: 62011 - protein, 33 aa, Artificial Sequence; identical to SEQ ID NO: 2625
  GFR-binding peptide
  MOD_RES (31), (32): Xaa is C or S

SEQ ID NO: 62012 - protein, 33 aa, Artificial Sequence; identical to SEQ ID NO: 23631
  GFR-binding peptide
  MOD_RES (32), (33): Xaa is C or S

SEQ ID NO: 62013 - protein, 36 aa, Artificial Sequence; identical to SEQ ID NO: 2631
  GFR-binding peptide
  MOD_RES (33), (34): Xaa is C or S
  MOD_RES (11), (12), (13), (14), (15): Xaa is A or G
  MOD_RES (16), (17), (18), (19): Xaa is A or G or is absent

SEQ ID NO: 62014 - protein, 38 aa, Artificial Sequence
  GFR-binding peptide
  MOD_RES (2), (4), (38): Xaa is C or S
  MOD_RES (16), (17), (18), (19), (20): Xaa is A or G
  MOD_RES (21), (22), (23), (24): Xaa is A or G or is absent
RXAXSEVTMNYHYKLXXXXXXXXXKYLISIPSMKEPVX

SEQ ID NO: 62015 - protein, 38 aa, Artificial Sequence
  GFR-binding peptide
  MOD_RES (2), (4), (36), (37): Xaa is C or S
RXGXAEVVMDRHKRLVVNNAADYYLISTASLRAPVXXS

SEQ ID NO: 62016 - protein, 40 aa, Artificial Sequence; identical to SEQ ID NO: 31612
  GFR-binding peptide
  MOD_RES (1), (3), (35), (36): Xaa is C or S

SEQ ID NO: 62017 - protein, 37 aa, Artificial Sequence; identical to SEQ ID NO: 23636
  GFR-binding peptide
  MOD_RES (34), (35): Xaa is C or S
  MOD_RES (12), (13), (14), (15), (16): Xaa is A or G
  MOD_RES (17), (18), (19), (20): Xaa is A or G or is absent

SEQ ID NO: 62018 - protein, 39 aa, Artificial Sequence; identical to SEQ ID NO: 2637
  GFR-binding peptide
  MOD_RES (2), (4), (37), (38): Xaa is C or S
  MOD_RES (15), (16), (17), (18), (19): Xaa is A or G
  MOD_RES (20), (21), (22), (23): Xaa is A or G or is absent

SEQ ID NO: 62019 - protein, 34 aa, Artificial Sequence; identical to SEQ ID NO: 23640
  GFR-binding peptide
  MOD_RES (31), (32): Xaa is C or S

SEQ ID NO: 62020 - protein, 39 aa, Artificial Sequence; identical to SEQ ID NO: 2640
  GFR-binding peptide
  MOD_RES (2), (36): Xaa is C or S
  MOD_RES (14), (15), (16), (17), (18): Xaa is A or G
  MOD_RES (19), (20), (21), (22): Xaa is A or G or is absent

SEQ ID NO: 62021 - protein, 37 aa, Artificial Sequence; identical to SEQ ID NO: 2641
  GFR-binding peptide
  MOD_RES (32), (33): Xaa is C or S

SEQ ID NO: 62022 - protein, 38 aa, Artificial Sequence; identical to SEQ ID NO: 23642
  GFR-binding peptide
  MOD_RES (2), (4), (38): Xaa is C or S
  MOD_RES (16), (17), (18), (19), (20): Xaa is A or G
  MOD_RES (21), (22), (23), (24): Xaa is A or G or is absent

SEQ ID NO: 62023 - protein, 37 aa, Artificial Sequence
  GFR-binding peptide
  MOD_RES (31), (32): Xaa is C or S
EVTMNPIKGYVVNKNEDFYLINIPSMKEPVXXPEPIG

SEQ ID NO: 62024 - protein, 37 aa, Artificial Sequence; identical to SEQ ID NO: 2642
  GFR-binding peptide
  MOD_RES (31), (32): Xaa is C or S

SEQ ID NO: 62025 - protein, 37 aa, Artificial Sequence; identical to SEQ ID NO: 23647
  GFR-binding peptide
  MOD_RES (1), (33), (34): Xaa is C or S

SEQ ID NO: 62026 - protein, 39 aa, Artificial Sequence; identical to SEQ ID NO: 23648
  GFR-binding peptide
  MOD_RES (1), (35), (36): Xaa is C or S
  MOD_RES (13), (14), (15), (16), (17): Xaa is A or G
  MOD_RES (18), (19), (20), (21): Xaa is A or G or is absent

SEQ ID NO: 62027 - protein, 42 aa, Artificial Sequence
  GFR-binding peptide
  MOD_RES (2), (4), (37), (38): Xaa is C or S
  MOD_RES (15), (16), (17), (18), (19): Xaa is A or G
  MOD_RES (20), (21), (22), (23): Xaa is A or G or is absent
SXKXSKVIMPIKGYXXXXXXXXXFYLINIPSLDQSVXXPSAS

SEQ ID NO: 62028 - protein, 39 aa, Artificial Sequence; identical to SEQ ID NO: 2648
  GFR-binding peptide
  MOD_RES (2), (34), (35): Xaa is C or S

SEQ ID NO: 62029 - protein, 33 aa, Artificial Sequence
  GFR-binding peptide
  MOD_RES (1), (32), (33): Xaa is C or S
XEEVIMEYKFKLLVRGNDLYLMSIPETKVPAXX

SEQ ID NO: 62030 - protein, 39 aa, Artificial Sequence; identical to SEQ ID NO: 2649
  GFR-binding peptide
  MOD_RES (2), (4), (38), (39): Xaa is C or S
  MOD_RES (16), (17), (18), (19), (20): Xaa is A or G
  MOD_RES (21), (22), (23), (24): Xaa is A or G or is absent

SEQ ID NO: 62031 - protein, 35 aa, Artificial Sequence; identical to SEQ ID NO: 31627
  GFR-binding peptide
  MOD_RES (2), (34), (35): Xaa is C or S

SEQ ID NO: 62032 - protein, 42 aa, Artificial Sequence; identical to SEQ ID NO: 31629
  GFR-binding peptide
  MOD_RES (2), (4), (38): Xaa is C or S
  MOD_RES (16), (17), (18), (19), (20): Xaa is A or G
  MOD_RES (21), (22), (23), (24): Xaa is A or G or is absent

SEQ ID NO: 62033 - protein, 38 aa, Artificial Sequence
  GFR-binding peptide
  MOD_RES (1), (3), (37), (38): Xaa is C or S
  MOD_RES (15), (16), (17), (18), (19): Xaa is A or G
  MOD_RES (20), (21), (22), (23): Xaa is A or G or is absent
XAXSEVTMNRHKRLXXXXXXXXXYYLISTASMKEPVXX

SEQ ID NO: 62034 - protein, 39 aa, Artificial Sequence; identical to SEQ ID NO: 2654
  GFR-binding peptide
  MOD_RES (2), (35), (36): Xaa is C or S
  MOD_RES (13), (14), (15), (16), (17): Xaa is A or G
  MOD_RES (18), (19), (20), (21): Xaa is A or G or is absent

SEQ ID NO: 62035 - protein, 35 aa, Artificial Sequence; identical to SEQ ID NO: 23655
  GFR-binding peptide
  MOD_RES (31), (32): Xaa is C or S

SEQ ID NO: 62036 - protein, 40 aa, Artificial Sequence; identical to SEQ ID NO: 31636
  GFR-binding peptide
  MOD_RES (34), (35): Xaa is C or S
  MOD_RES (12), (13), (14), (15), (16): Xaa is A or G
  MOD_RES (17), (18), (19), (20): Xaa is A or G or is absent

SEQ ID NO: 62037 - protein, 38 aa, Artificial Sequence; identical to SEQ ID NO: 23657
  GFR-binding peptide
  MOD_RES (1), (35), (36): Xaa is C or S
  MOD_RES (13), (14), (15), (16), (17): Xaa is A or G
  MOD_RES (18), (19), (20), (21): Xaa is A or G or is absent

SEQ ID NO: 62038 - protein, 36 aa, Artificial Sequence; identical to SEQ ID NO: 56563
  GFR-binding peptide
  MOD_RES (1), (3): Xaa is C or S
  MOD_RES (15), (16), (17), (18), (19): Xaa is A or G
  MOD_RES (20), (21), (22), (23): Xaa is A or G or is absent

SEQ ID NO: 62039 - protein, 41 aa, Artificial Sequence; identical to SEQ ID NO: 23661
  GFR-binding peptide
  MOD_RES (1), (3), (37), (38): Xaa is C or S
  MOD_RES (15), (16), (17), (18), (19): Xaa is A or G
  MOD_RES (20), (21), (22), (23): Xaa is A or G or is absent

SEQ ID NO: 62040 - protein, 37 aa, Artificial Sequence; identical to SEQ ID NO: 2663
  GFR-binding peptide
  MOD_RES (33), (34): Xaa is C or S
  MOD_RES (11), (12), (13), (14), (15): Xaa is A or G
  MOD_RES (16), (17), (18), (19): Xaa is A or G or is absent

SEQ ID NO: 62041 - protein, 36 aa, Artificial Sequence; identical to SEQ ID NO: 31643
  GFR-binding peptide
  MOD_RES (1), (3), (35), (36): Xaa is C or S

SEQ ID NO: 62042 - protein, 35 aa, Artificial Sequence; identical to SEQ ID NO: 10150
  GFR-binding peptide
  MOD_RES (1), (35): Xaa is C or S
  MOD_RES (13), (14), (15), (16), (17): Xaa is A or G
  MOD_RES (18), (19), (20), (21): Xaa is A or G or is absent

SEQ ID NO: 62043 - protein, 38 aa, Artificial Sequence
  GFR-binding peptide
  MOD_RES (32), (33): Xaa is C or S
SEVTMNRHKRLVVNKNEDYYLISTASMKEPVXXPEPIG

SEQ ID NO: 62044 - protein, 39 aa, Artificial Sequence
  GFR-binding peptide
  MOD_RES (2), (4), (35), (36): Xaa is C or S
LXGXEEVIMRHKRLLLVRGNDYYLMSTASTKVPAXXTSP

SEQ ID NO: 62045 - protein, 39 aa, Artificial Sequence; identical to SEQ ID NO: 23667
  GFR-binding peptide
  MOD_RES (33), (34): Xaa is C or S
  MOD_RES (11), (12), (13), (14), (15): Xaa is A or G
  MOD_RES (16), (17), (18), (19): Xaa is A or G or is absent

SEQ ID NO: 62046 - protein, 31 aa, Artificial Sequence; identical to SEQ ID NO: 2670
  GFR-binding peptide
  MOD_RES (31), (31): Xaa is C or S

SEQ ID NO: 62047 - protein, 35 aa, Artificial Sequence; identical to SEQ ID NO: 23669
  GFR-binding peptide
  MOD_RES (1), (35): Xaa is C or S
  MOD_RES (13), (14), (15), (16), (17): Xaa is A or G
  MOD_RES (18), (19), (20), (21): Xaa is A or G or is absent

SEQ ID NO: 62048 - protein, 38 aa, Artificial Sequence
  GFR-binding peptide
  MOD_RES (2), (34), (35): Xaa is C or S
AXSEVTMNYHYKLVVNKNEDKYLISIPSMKEPVXXPEP

SEQ ID NO: 62049 - protein, 38 aa, Artificial Sequence
  GFR-binding peptide
  MOD_RES (1), (3), (36), (37): Xaa is C or S
  MOD_RES (14), (15), (16), (17), (18): Xaa is A or G
  MOD_RES (19), (20), (21), (22): Xaa is A or G or is absent
XKXSKVIMPIKGYXXXXXXXXXFYLINIPSLDQSVXXP

SEQ ID NO: 62050 - protein, 42 aa, Artificial Sequence; identical to SEQ ID NO: 23672
  GFR-binding peptide
  MOD_RES (1), (3), (37), (38): Xaa is C or S
  MOD_RES (15), (16), (17), (18), (19): Xaa is A or G
  MOD_RES (20), (21), (22), (23): Xaa is A or G or is absent

SEQ ID NO: 62051 - protein, 38 aa, Artificial Sequence; identical to SEQ ID NO: 2673
  GFR-binding peptide
  MOD_RES (2), (36), (37): Xaa is C or S
  MOD_RES (14), (15), (16), (17), (18): Xaa is A or G
  MOD_RES (19), (20), (21), (22): Xaa is A or G or is absent

SEQ ID NO: 62052 - protein, 38 aa, Artificial Sequence; identical to SEQ ID NO: 2675
  GFR-binding peptide
  MOD_RES (2), (4), (38): Xaa is C or S
  MOD_RES (16), (17), (18), (19), (20): Xaa is A or G
  MOD_RES (21), (22), (23), (24): Xaa is A or G or is absent

SEQ ID NO: 62053 - protein, 35 aa, Artificial Sequence; identical to SEQ ID NO: 23676
  GFR-binding peptide
  MOD_RES (2), (4): Xaa is C or S

SEQ ID NO: 62054 - protein, 39 aa, Artificial Sequence; identical to SEQ ID NO: 31652
  GFR-binding peptide
  MOD_RES (2), (36), (37): Xaa is C or S
  MOD_RES (14), (15), (16), (17), (18): Xaa is A or G
  MOD_RES (19), (20), (21), (22): Xaa is A or G or is absent

SEQ ID NO: 62055 - protein, 38 aa, Artificial Sequence; identical to SEQ ID NO: 31653
  GFR-binding peptide
  MOD_RES (2), (4), (38): Xaa is C or S
  MOD_RES (16), (17), (18), (19), (20): Xaa is A or G
  MOD_RES (21), (22), (23), (24): Xaa is A or G or is absent

SEQ ID NO: 62056 - protein, 40 aa, Artificial Sequence; identical to SEQ ID NO: 23677
  GFR-binding peptide
  MOD_RES (1), (3), (35), (36): Xaa is C or S

SEQ ID NO: 62057 - protein, 35 aa, Artificial Sequence; identical to SEQ ID NO: 2679
  GFR-binding peptide
  MOD_RES (1), (1): Xaa is C or S
  MOD_RES (14), (15), (16), (17), (18): Xaa is A or G
  MOD_RES (19), (20), (21), (22): Xaa is A or G or is absent

SEQ ID NO: 62058 - protein, 41 aa, Artificial Sequence; identical to SEQ ID NO: 31658
  GFR-binding peptide
  MOD_RES (1), (3), (37), (38): Xaa is C or S
  MOD_RES (15), (16), (17), (18), (19): Xaa is A or G
  MOD_RES (20), (21), (22), (23): Xaa is A or G or is absent

SEQ ID NO: 62059 - protein, 34 aa, Artificial Sequence; identical to SEQ ID NO: 56596
  GFR-binding peptide
  MOD_RES (34), (34): Xaa is C or S
  MOD_RES (12), (13), (14), (15), (16): Xaa is A or G
  MOD_RES (17), (18), (19), (20): Xaa is A or G or is absent

SEQ ID NO: 62060 - protein, 39 aa, Artificial Sequence
  GFR-binding peptide
  MOD_RES (2), (4), (35), (36): Xaa is C or S
SXKXSRVIMPIKGYVKPKRGVFYLINIPSLAQPVXXPAA

SEQ ID NO: 62061 - protein, 42 aa, Artificial Sequence; identical to SEQ ID NO: 2684
  GFR-binding peptide
  MOD_RES (2), (36): Xaa is C or S
  MOD_RES (14), (15), (16), (17), (18): Xaa is A or G
  MOD_RES (19), (20), (21), (22): Xaa is A or G or is absent

SEQ ID NO: 62062 - protein, 36 aa, Artificial Sequence; identical to SEQ ID NO: 2685
  GFR-binding peptide
  MOD_RES (1), (3), (35): Xaa is C or S

SEQ ID NO: 62063 - protein, 38 aa, Artificial Sequence; identical to SEQ ID NO: 2687
  GFR-binding peptide
  MOD_RES (34), (35): Xaa is C or S
  MOD_RES (12), (13), (14), (15), (16): Xaa is A or G
  MOD_RES (17), (18), (19), (20): Xaa is A or G or is absent

SEQ ID NO: 62064 - protein, 37 aa, Artificial Sequence
  GFR-binding peptide
  MOD_RES (1), (33), (34): Xaa is C or S
XESVAMGRHKRLYTVVGKDYYLISTASLKTPVXXAKS

SEQ ID NO: 62065 - protein, 38 aa, Artificial Sequence; identical to SEQ ID NO: 2691
  GFR-binding peptide
  MOD_RES (2), (4), (37), (38): Xaa is C or S
  MOD_RES (15), (16), (17), (18), (19): Xaa is A or G
  MOD_RES (20), (21), (22), (23): Xaa is A or G or is absent

SEQ ID NO: 62066 - protein, 35 aa, Artificial Sequence; identical to SEQ ID NO: 23685
  GFR-binding peptide
  MOD_RES (32), (33): Xaa is C or S

SEQ ID NO: 62067 - protein, 33 aa, Artificial Sequence; identical to SEQ ID NO: 23686
  GFR-binding peptide
  MOD_RES (33), (33): Xaa is C or S
  MOD_RES (11), (12), (13), (14), (15): Xaa is A or G
  MOD_RES (16), (17), (18), (19): Xaa is A or G or is absent

SEQ ID NO: 62068 - protein, 34 aa, Artificial Sequence; identical to SEQ ID NO: 2693
  GFR-binding peptide
  MOD_RES (34), (34): Xaa is C or S
  MOD_RES (12), (13), (14), (15), (16): Xaa is A or G
  MOD_RES (17), (18), (19), (20): Xaa is A or G or is absent

SEQ ID NO: 62069 - protein, 34 aa, Artificial Sequence; identical to SEQ ID NO: 23691
  GFR-binding peptide
  MOD_RES (1), (34): Xaa is C or S
  MOD_RES (12), (13), (14), (15), (16): Xaa is A or G
  MOD_RES (17), (18), (19), (20): Xaa is A or G or is absent

SEQ ID NO: 62070 - protein, 38 aa, Artificial Sequence; identical to SEQ ID NO: 23692
  GFR-binding peptide
  MOD_RES (2), (4), (36), (37): Xaa is C or S

SEQ ID NO: 62071 - protein, 41 aa, Artificial Sequence; identical to SEQ ID NO: 23693
  GFR-binding peptide
  MOD_RES (2), (4), (39), (40): Xaa is C or S
  MOD_RES (17), (18), (19), (20), (21): Xaa is A or G
  MOD_RES (22), (23), (24), (25): Xaa is A or G or is absent

SEQ ID NO: 62072 - protein, 36 aa, Artificial Sequence
  GFR-binding peptide
  MOD_RES (2), (34), (35): Xaa is C or S
GXRDVVMGEYKFKIIQQKDNLYLMSIPEMKTPTXXP

SEQ ID NO: 62073 - protein, 43 aa, Artificial Sequence; identical to SEQ ID NO: 23694
  GFR-binding peptide
  MOD_RES (2), (4), (38), (39): Xaa is C or S
  MOD_RES (16), (17), (18), (19), (20): Xaa is A or G
  MOD_RES (21), (22), (23), (24): Xaa is A or G or is absent

SEQ ID NO: 62074 - protein, 36 aa, Artificial Sequence; identical to SEQ ID NO: 2695
  GFR-binding peptide
  MOD_RES (32), (33): Xaa is C or S

SEQ ID NO: 62075 - protein, 36 aa, Artificial Sequence
  GFR-binding peptide
  MOD_RES (34), (35): Xaa is C or S
  MOD_RES (12), (13), (14), (15), (16): Xaa is A or G
  MOD_RES (17), (18), (19), (20): Xaa is A or G or is absent
ESVAMGRHKRLXXXXXXXXXYYLISTASLKTPVXXA

SEQ ID NO: 62076 - protein, 42 aa, Artificial Sequence; identical to SEQ ID NO: 31670
  GFR-binding peptide
  MOD_RES (2), (4), (36), (37): Xaa is C or S

SEQ ID NO: 62077 - protein, 41 aa, Artificial Sequence; identical to SEQ ID NO: 23697
  GFR-binding peptide
  MOD_RES (2), (4), (37), (38): Xaa is C or S

SEQ ID NO: 62078 - protein, 36 aa, Artificial Sequence; identical to SEQ ID NO: 31673
  GFR-binding peptide
  MOD_RES (33), (34): Xaa is C or S
  MOD_RES (11), (12), (13), (14), (15): Xaa is A or G
  MOD_RES (16), (17), (18), (19): Xaa is A or G or is absent

SEQ ID NO: 62079 - protein, 34 aa, Artificial Sequence
  GFR-binding peptide
  MOD_RES (2), (34): Xaa is C or S
AXSEVTMNYHYKLVVNKNEDKYLISIPSMKEPVX

SEQ ID NO: 62080 - protein, 36 aa, Artificial Sequence; identical to SEQ ID NO: 2699
  GFR-binding peptide
  MOD_RES (2), (35), (36): Xaa is C or S
  MOD_RES (13), (14), (15), (16), (17): Xaa is A or G
  MOD_RES (18), (19), (20), (21): Xaa is A or G or is absent

SEQ ID NO: 62081 - protein, 39 aa, Artificial Sequence; identical to SEQ ID NO: 23700
  GFR-binding peptide
  MOD_RES (1), (3), (35), (36): Xaa is C or S

SEQ ID NO: 62082 - protein, 42 aa, Artificial Sequence; identical to SEQ ID NO: 23701
  GFR-binding peptide
  MOD_RES (1), (3), (38), (39): Xaa is C or S
  MOD_RES (16), (17), (18), (19), (20): Xaa is A or G
  MOD_RES (21), (22), (23), (24): Xaa is A or G or is absent

SEQ ID NO: 62083 - protein, 34 aa, Artificial Sequence; identical to SEQ ID NO: 2702
  GFR-binding peptide
  MOD_RES (2), (33), (34): Xaa is C or S

SEQ ID NO: 62084 - protein, 31 aa, Artificial Sequence
  GFR-binding peptide
  MOD_RES (31), (31): Xaa is C or S
EVVMDRHKRLVVNNASDYYLISTASLRTPVX

SEQ ID NO: 62085 - protein, 40 aa, Artificial Sequence; identical to SEQ ID NO: 23707
  GFR-binding peptide
  MOD_RES (1), (3), (37), (38): Xaa is C or S
  MOD_RES (15), (16), (17), (18), (19): Xaa is A or G
  MOD_RES (20), (21), (22), (23): Xaa is A or G or is absent

SEQ ID NO: 62086 - protein, 37 aa, Artificial Sequence; identical to SEQ ID NO: 2707
  GFR-binding peptide
  MOD_RES (33), (34): Xaa is C or S
  MOD_RES (11), (12), (13), (14), (15): Xaa is A or G
  MOD_RES (16), (17), (18), (19): Xaa is A or G or is absent

SEQ ID NO: 62087 - protein, 33 aa, Artificial Sequence; identical to SEQ ID NO: 2711
  GFR-binding peptide
  MOD_RES (33), (33): Xaa is C or S
  MOD_RES (11), (12), (13), (14), (15): Xaa is A or G
  MOD_RES (16), (17), (18), (19): Xaa is A or G or is absent

SEQ ID NO: 62088 - protein, 43 aa, Artificial Sequence; identical to SEQ ID NO: 23709
  GFR-binding peptide
  MOD_RES (2), (4), (38), (39): Xaa is C or S
  MOD_RES (16), (17), (18), (19), (20): Xaa is A or G
  MOD_RES (21), (22), (23), (24): Xaa is A or G or is absent

SEQ ID NO: 62089 - protein, 32 aa, Artificial Sequence; identical to SEQ ID NO: 2713
  GFR-binding peptide
  MOD_RES (11), (12), (13), (14), (15): Xaa is A or G
  MOD_RES (16), (17), (18), (19): Xaa is A or G or is absent

SEQ ID NO: 62090 - protein, 33 aa, Artificial Sequence
  GFR-binding peptide
  MOD_RES (12), (13), (14), (15), (16): Xaa is A or G
  MOD_RES (17), (18), (19), (20): Xaa is A or G or is absent
RDVVMGYHYKLXXXXXXXXXKYLMSIPSMKTPT

SEQ ID NO: 62091 - protein, 35 aa, Artificial Sequence; identical to SEQ ID NO: 31689
  GFR-binding peptide
  MOD_RES (31), (32): Xaa is C or S

SEQ ID NO: 62092 - protein, 38 aa, Artificial Sequence
  GFR-binding peptide
  MOD_RES (33), (34): Xaa is C or S
  MOD_RES (11), (12), (13), (14), (15): Xaa is A or G
  MOD_RES (16), (17), (18), (19): Xaa is A or G or is absent
EVVMDRHKRLXXXXXXXXXYYLISTASLRTPVXXTPPT

SEQ ID NO: 62093 - protein, 34 aa, Artificial Sequence
  GFR-binding peptide
  MOD_RES (1), (1): Xaa is C or S
  MOD_RES (13), (14), (15), (16), (17): Xaa is A or G
  MOD_RES (18), (19), (20), (21): Xaa is A or G or is absent
XSEVTMNYHYKLXXXXXXXXXKYLISIPSMKEPV

SEQ ID NO: 62094 - protein, 40 aa, Artificial Sequence
  GFR-binding peptide
  MOD_RES (1), (3), (37), (38): Xaa is C or S
  MOD_RES (15), (16), (17), (18), (19): Xaa is A or G
  MOD_RES (20), (21), (22), (23): Xaa is A or G or is absent
XGXESVAMGRHKRLXXXXXXXXXYYLISTASLKTPVXXAK

SEQ ID NO: 62095 - protein, 41 aa, Artificial Sequence
  GFR-binding peptide
  MOD_RES (1), (3), (37), (38): Xaa is C or S
  MOD_RES (15), (16), (17), (18), (19): Xaa is A or G
  MOD_RES (20), (21), (22), (23): Xaa is A or G or is absent
XGXSEVVMDYHYKLXXXXXXXXXKYLISIPSLRTPVXXTPP

SEQ ID NO: 62096 - protein, 39 aa, Artificial Sequence; identical to SEQ ID NO: 31693
  GFR-binding peptide
  MOD_RES (2), (34), (35): Xaa is C or S

SEQ ID NO: 62097 - protein, 35 aa, Artificial Sequence; identical to SEQ ID NO: 2721
  GFR-binding peptide
  MOD_RES (2), (35): Xaa is C or S
  MOD_RES (13), (14), (15), (16), (17): Xaa is A or G
  MOD_RES (18), (19), (20), (21): Xaa is A or G or is absent

SEQ ID NO: 62098 - protein, 39 aa, Artificial Sequence; identical to SEQ ID NO: 31697
  GFR-binding peptide
  MOD_RES (2), (37), (38): Xaa is C or S
  MOD_RES (15), (16), (17), (18), (19): Xaa is A or G
  MOD_RES (20), (21), (22), (23): Xaa is A or G or is absent

SEQ ID NO: 62099 - protein, 34 aa, Artificial Sequence; identical to SEQ ID NO: 31700
  GFR-binding peptide
  MOD_RES (2), (2): Xaa is C or S
  MOD_RES (13), (14), (15), (16), (17): Xaa is A or G
  MOD_RES (18), (19), (20), (21): Xaa is A or G or is absent

SEQ ID NO: 62100 - protein, 37 aa, Artificial Sequence; identical to SEQ ID NO: 2722
  GFR-binding peptide
  MOD_RES (1), (35), (36): Xaa is C or S
  MOD_RES (13), (14), (15), (16), (17): Xaa is A or G
  MOD_RES (18), (19), (20), (21): Xaa is A or G or is absent

SEQ ID NO: 62101 - protein, 33 aa, Artificial Sequence; identical to SEQ ID NO: 2723
  GFR-binding peptide
  MOD_RES (32), (33): Xaa is C or S

SEQ ID NO: 62102 - protein, 43 aa, Artificial Sequence; identical to SEQ ID NO: 23716
  GFR-binding peptide
  MOD_RES (1), (3), (37), (38): Xaa is C or S
  MOD_RES (15), (16), (17), (18), (19): Xaa is A or G
  MOD_RES (20), (21), (22), (23): Xaa is A or G or is absent

SEQ ID NO: 62103 - protein, 39 aa, Artificial Sequence; identical to SEQ ID NO: 2727
  GFR-binding peptide
  MOD_RES (1), (3), (35): Xaa is C or S

SEQ ID NO: 62104 - protein, 39 aa, Artificial Sequence; identical to SEQ ID NO: 23718
  GFR-binding peptide
  MOD_RES (33), (34): Xaa is C or S
  MOD_RES (11), (12), (13), (14), (15): Xaa is A or G
  MOD_RES (16), (17), (18), (19): Xaa is A or G or is absent

SEQ ID NO: 62105 - protein, 40 aa, Artificial Sequence; identical to SEQ ID NO: 23719
  GFR-binding peptide
  MOD_RES (1), (3), (34), (35): Xaa is C or S

SEQ ID NO: 62106 - protein, 34 aa, Artificial Sequence; identical to SEQ ID NO: 2730
  GFR-binding peptide
  MOD_RES (34), (34): Xaa is C or S
  MOD_RES (12), (13), (14), (15), (16): Xaa is A or G
  MOD_RES (17), (18), (19), (20): Xaa is A or G or is absent

SEQ ID NO: 62107 - protein, 38 aa, Artificial Sequence
  GFR-binding peptide
  MOD_RES (32), (33): Xaa is C or S
RDVVMGRHKRLIIQQKDNYYLMSTASMKTPTXXPGASG

SEQ ID NO: 62108 - protein, 35 aa, Artificial Sequence; identical to SEQ ID NO: 23722
  GFR-binding peptide
  MOD_RES (1), (3), (35): Xaa is C or S

SEQ ID NO: 62109 - protein, 37 aa, Artificial Sequence; identical to SEQ ID NO: 2733
  GFR-binding peptide
  MOD_RES (33), (34): Xaa is C or S
  MOD_RES (11), (12), (13), (14), (15): Xaa is A or G
  MOD_RES (16), (17), (18), (19): Xaa is A or G or is absent

SEQ ID NO: 62110 - protein, 39 aa, Artificial Sequence
  GFR-binding peptide
  MOD_RES (2), (4), (36), (37): Xaa is C or S
RXAXSEVTMNRHKRLVVNKNEDYYLISTASMKEPVXXPE

SEQ ID NO: 62111 - protein, 32 aa, Artificial Sequence; identical to SEQ ID NO: 10224
  GFR-binding peptide
  MOD_RES (11), (12), (13), (14), (15): Xaa is A or G
  MOD_RES (16), (17), (18), (19): Xaa is A or G or is absent

SEQ ID NO: 62112 - protein, 36 aa, Artificial Sequence; identical to SEQ ID NO: 23725
  GFR-binding peptide
  MOD_RES (31), (32): Xaa is C or S

SEQ ID NO: 62113 - protein, 35 aa, Artificial Sequence
  GFR-binding peptide
  MOD_RES (1), (35): Xaa is C or S
  MOD_RES (13), (14), (15), (16), (17): Xaa is A or G
  MOD_RES (18), (19), (20), (21): Xaa is A or G or is absent
XSEVTMNYHYKLXXXXXXXXXKYLISIPSMKEPVX

SEQ ID NO: 62114 - protein, 35 aa, Artificial Sequence; identical to SEQ ID NO: 23726
  GFR-binding peptide
  MOD_RES (2), (2): Xaa is C or S
  MOD_RES (14), (15), (16), (17), (18): Xaa is A or G
  MOD_RES (19), (20), (21), (22): Xaa is A or G or is absent

SEQ ID NO: 62115 - protein, 31 aa, Artificial Sequence; identical to SEQ ID NO: 2746
  GFR-binding peptide
  MOD_RES (1), (1): Xaa is C or S

SEQ ID NO: 62116 - protein, 38 aa, Artificial Sequence; identical to SEQ ID NO: 23729
  GFR-binding peptide
  MOD_RES (1), (3), (37): Xaa is C or S
  MOD_RES (15), (16), (17), (18), (19): Xaa is A or G
  MOD_RES (20), (21), (22), (23): Xaa is A or G or is absent

SEQ ID NO: 62117 - protein, 38 aa, Artificial Sequence
  GFR-binding peptide
  MOD_RES (2), (4), (35), (36): Xaa is C or S
SXKXSKVIMPIKGYIKPTKGIFYLINIPSLDQSVXXPS

SEQ ID NO: 62118 - protein, 35 aa, Artificial Sequence
  GFR-binding peptide
  MOD_RES (34), (35): Xaa is C or S
  MOD_RES (12), (13), (14), (15), (16): Xaa is A or G
  MOD_RES (17), (18), (19), (20): Xaa is A or G or is absent
SEVVMDEYKFKXXXXXXXXXLYLISIPELRTPVXX

SEQ ID NO: 62119 - protein, 38 aa, Artificial Sequence
  GFR-binding peptide
  MOD_RES (1), (34), (35): Xaa is C or S
  MOD_RES (12), (13), (14), (15), (16): Xaa is A or G
  MOD_RES (17), (18), (19), (20): Xaa is A or G or is absent
XEEVIMRHKRLXXXXXXXXXYYLMSTASTKVPAXXTSP

SEQ ID NO: 62120 - protein, 40 aa, Artificial Sequence
  GFR-binding peptide
  MOD_RES (2), (4), (37), (38): Xaa is C or S
  MOD_RES (15), (16), (17), (18), (19): Xaa is A or G
  MOD_RES (20), (21), (22), (23): Xaa is A or G or is absent
SXKXSRVIMPIKGYXXXXXXXXXFYLINIPSLAQPVXXPA

SEQ ID NO: 62121 - protein, 36 aa, Artificial Sequence; identical to SEQ ID NO: 2748
  GFR-binding peptide
  MOD_RES (1), (3), (34), (35): Xaa is C or S

SEQ ID NO: 62122 - protein, 41 aa, Artificial Sequence; identical to SEQ ID NO: 31738
  GFR-binding peptide
  MOD_RES (2), (4), (37), (38): Xaa is C or S

SEQ ID NO: 62123 - protein, 36 aa, Artificial Sequence
  GFR-binding peptide
  MOD_RES (2), (4), (35), (36): Xaa is C or S
LXGXEEVIMRHKRLLLVRGNDYYLMSTASTKVPAXX

SEQ ID NO: 62124 - protein, 39 aa, Artificial Sequence; identical to SEQ ID NO: 56674
  GFR-binding peptide
  MOD_RES (2), (4), (38), (39): Xaa is C or S
  MOD_RES (16), (17), (18), (19), (20): Xaa is A or G
  MOD_RES (21), (22), (23), (24): Xaa is A or G or is absent

SEQ ID NO: 62125 - protein, 33 aa, Artificial Sequence; identical to SEQ ID NO: 2749
  GFR-binding peptide
  MOD_RES (33), (33): Xaa is C or S
  MOD_RES (11), (12), (13), (14), (15): Xaa is A or G
  MOD_RES (16), (17), (18), (19): Xaa is A or G or is absent

SEQ ID NO: 62126 - protein, 41 aa, Artificial Sequence; identical to SEQ ID NO: 2751
  GFR-binding peptide
  MOD_RES (2), (4), (37), (38): Xaa is C or S
  MOD_RES (15), (16), (17), (18), (19): Xaa is A or G
  MOD_RES (20), (21), (22), (23): Xaa is A or G or is absent

SEQ ID NO: 62127 - protein, 41 aa, Artificial Sequence; identical to SEQ ID NO: 31740
  GFR-binding peptide
  MOD_RES (2), (4), (36), (37): Xaa is C or S

SEQ ID NO: 62128 - protein, 38 aa, Artificial Sequence
  GFR-binding peptide
  MOD_RES (2), (4), (37), (38): Xaa is C or S
  MOD_RES (15), (16), (17), (18), (19): Xaa is A or G
  MOD_RES (20), (21), (22), (23): Xaa is A or G or is absent
SXKXSRVIMPIKGYXXXXXXXXXFYLINIPSLAQPVXX

SEQ ID NO: 62129 - protein, 37 aa, Artificial Sequence; identical to SEQ ID NO: 2755
  GFR-binding peptide
  MOD_RES (1), (33), (34): Xaa is C or S

SEQ ID NO: 62130 - protein, 37 aa, Artificial Sequence; identical to SEQ ID NO: 2756
  GFR-binding peptide
  MOD_RES (2), (35), (36): Xaa is C or S

SEQ ID NO: 62131 - protein, 35 aa, Artificial Sequence; identical to SEQ ID NO: 23741
  GFR-binding peptide
  MOD_RES (31), (32): Xaa is C or S

SEQ ID NO: 62132 - protein, 43 aa, Artificial Sequence; identical to SEQ ID NO: 23742
  GFR-binding peptide
  MOD_RES (1), (3), (37), (38): Xaa is C or S
  MOD_RES (15), (16), (17), (18), (19): Xaa is A or G
  MOD_RES (20), (21), (22), (23): Xaa is A or G or is absent

SEQ ID NO: 62133 - protein, 40 aa, Artificial Sequence; identical to SEQ ID NO: 2758
  GFR-binding peptide
  MOD_RES (1), (3), (37), (38): Xaa is C or S
  MOD_RES (15), (16), (17), (18), (19): Xaa is A or G
  MOD_RES (20), (21), (22), (23): Xaa is A or G or is absent

SEQ ID NO: 62134 - protein, 37 aa, Artificial Sequence; identical to SEQ ID NO: 2759
  GFR-binding peptide
  MOD_RES (32), (33): Xaa is C or S

SEQ ID NO: 62135 - protein, 39 aa, Artificial Sequence
  GFR-binding peptide
  MOD_RES (2), (4), (38), (39): Xaa is C or S
  MOD_RES (16), (17), (18), (19), (20): Xaa is A or G
  MOD_RES (21), (22), (23), (24): Xaa is A or G or is absent
SXGXRDVVMGEYKFKXXXXXXXXXLYLMSIPEMKTPTXX

SEQ ID NO: 62136 - protein, 34 aa, Artificial Sequence
  GFR-binding peptide
  MOD_RES (32), (33): Xaa is C or S
SEVTMNYHYKLVVNKNEDKYLISIPSMKEPVXXP

SEQ ID NO: 62137 - protein, 35 aa, Artificial Sequence; identical to SEQ ID NO: 31746
  GFR-binding peptide
  MOD_RES (31), (32): Xaa is C or S

SEQ ID NO: 62138 - protein, 42 aa, Artificial Sequence; identical to SEQ ID NO: 31748
  GFR-binding peptide
  MOD_RES (2), (4), (39), (40): Xaa is C or S
  MOD_RES (17), (18), (19), (20), (21): Xaa is A or G
  MOD_RES (22), (23), (24), (25): Xaa is A or G or is absent

SEQ ID NO: 62139 - protein, 39 aa, Artificial Sequence
  GFR-binding peptide
  MOD_RES (1), (33), (34): Xaa is C or S
XSEVTMNPIKGYVVNKNEDFYLINIPSMKEPVXXPEPIG

SEQ ID NO: 62140 - protein, 37 aa, Artificial Sequence; identical to SEQ ID NO: 2761
  GFR-binding peptide
  MOD_RES (1), (35), (36): Xaa is C or S
  MOD_RES (13), (14), (15), (16), (17): Xaa is A or G
  MOD_RES (18), (19), (20), (21): Xaa is A or G or is absent

SEQ ID NO: 62141 - protein, 40 aa, Artificial Sequence
  GFR-binding peptide
  MOD_RES (1), (3), (35), (36): Xaa is C or S
XGXAEVVMDRHKRLVVNNAADYYLISTASLRAPVXXSAPA

SEQ ID NO: 62142 - protein, 34 aa, Artificial Sequence
  GFR-binding peptide
  MOD_RES (2), (34): Xaa is C or S
GXRDVVMGYHYKLIIQQKDNKYLMSIPSMKTPTX

SEQ ID NO: 62143 - protein, 33 aa, Artificial Sequence; identical to SEQ ID NO: 2763
  GFR-binding peptide
  MOD_RES (31), (32): Xaa is C or S

SEQ ID NO: 62144 - protein, 32 aa, Artificial Sequence
  GFR-binding peptide
  MOD_RES (31), (32): Xaa is C or S
SVAMGRHKRLYTVVGKDYYLISTASLKTPVXX

SEQ ID NO: 62145 - protein, 41 aa, Artificial Sequence; identical to SEQ ID NO: 23754
  GFR-binding peptide
  MOD_RES (1), (35), (36): Xaa is C or S
  MOD_RES (13), (14), (15), (16), (17): Xaa is A or G
  MOD_RES (18), (19), (20), (21): Xaa is A or G or is absent

SEQ ID NO: 62146 - protein, 35 aa, Artificial Sequence; identical to SEQ ID NO: 56700
  GFR-binding peptide
  MOD_RES (31), (32): Xaa is C or S

SEQ ID NO: 62147 - protein, 34 aa, Artificial Sequence; identical to SEQ ID NO: 31762
  GFR-binding peptide
  MOD_RES (33), (34): Xaa is C or S

SEQ ID NO: 62148 - protein, 35 aa, Artificial Sequence; identical to SEQ ID NO: 31764
  GFR-binding peptide
  MOD_RES (1), (33), (34): Xaa is C or S

SEQ ID NO: 62149 - protein, 39 aa, Artificial Sequence; identical to SEQ ID NO: 23760
  GFR-binding peptide
  MOD_RES (2), (4), (36), (37): Xaa is C or S

SEQ ID NO: 62150 - protein, 33 aa, Artificial Sequence; identical to SEQ ID NO: 56708
  GFR-binding peptide
  MOD_RES (2), (33): Xaa is C or S

SEQ ID NO: 62151 - protein, 35 aa, Artificial Sequence
  GFR-binding peptide
  MOD_RES (1), (33), (34): Xaa is C or S
XRDVVMGEYKFKIIQQKDNLYLMSIPEMKTPTXXP

SEQ ID NO: 62152 - protein, 37 aa, Artificial Sequence; identical to SEQ ID NO: 2767
  GFR-binding peptide
  MOD_RES (2), (4): Xaa is C or S
  MOD_RES (16), (17), (18), (19), (20): Xaa is A or G
  MOD_RES (21), (22), (23), (24): Xaa is A or G or is absent

SEQ ID NO: 62153 - protein, 41 aa, Artificial Sequence; identical to SEQ ID NO: 2768
  GFR-binding peptide
  MOD_RES (1), (3), (35), (36): Xaa is C or S

SEQ ID NO: 62154 - protein, 39 aa, Artificial Sequence
  GFR-binding peptide
  MOD_RES (2), (34), (35): Xaa is C or S
AXSEVTMNEYKFKVVNKNEDLYLISIPEMKEPVXXPEPI

SEQ ID NO: 62155 - protein, 33 aa, Artificial Sequence; identical to SEQ ID NO: 23765
  GFR-binding peptide
  MOD_RES (12), (13), (14), (15), (16): Xaa is A or G
  MOD_RES (17), (18), (19), (20): Xaa is A or G or is absent

SEQ ID NO: 62156 - protein, 37 aa, Artificial Sequence; identical to SEQ ID NO: 2772
  GFR-binding peptide
  MOD_RES (1), (33), (34): Xaa is C or S

SEQ ID NO: 62157 - protein, 44 aa, Artificial Sequence; identical to SEQ ID NO: 2774
  GFR-binding peptide
  MOD_RES (2), (4), (38), (39): Xaa is C or S
  MOD_RES (16), (17), (18), (19), (20): Xaa is A or G
  MOD_RES (21), (22), (23), (24): Xaa is A or G or is absent

SEQ ID NO: 62158 - protein, 33 aa, Artificial Sequence; identical to SEQ ID NO: 2775
  GFR-binding peptide
  MOD_RES (1), (3): Xaa is C or S

SEQ ID NO: 62159 - protein, 34 aa, Artificial Sequence; identical to SEQ ID NO: 23768
  GFR-binding peptide
  MOD_RES (31), (32): Xaa is C or S

SEQ ID NO: 62160 - protein, 40 aa, Artificial Sequence; identical to SEQ ID NO: 56718
  GFR-binding peptide
  MOD_RES (1), (3), (36), (37): Xaa is C or S
  MOD_RES (14), (15), (16), (17), (18): Xaa is A or G
  MOD_RES (19), (20), (21), (22): Xaa is A or G or is absent

SEQ ID NO: 62161 - protein, 34 aa, Artificial Sequence
  GFR-binding peptide
  MOD_RES (31), (32): Xaa is C or S
EEVIMRHKRLLLVRGNDYYLMSTASTKVPAXXTS

SEQ ID NO: 62162 - protein, 37 aa, Artificial Sequence; identical to SEQ ID NO: 2780
  GFR-binding peptide
  MOD_RES (1), (34), (35): Xaa is C or S
  MOD_RES (12), (13), (14), (15), (16): Xaa is A or G
  MOD_RES (17), (18), (19), (20): Xaa is A or G or is absent

SEQ ID NO: 62163 - protein, 32 aa, Artificial Sequence; identical to SEQ ID NO: 31775
  GFR-binding peptide

SEQ ID NO: 62164 - protein, 32 aa, Artificial Sequence
  GFR-binding peptide
  MOD_RES (2), (2): Xaa is C or S
KXSRVIMPIKGYVKPKRGVFYLINIPSLAQPV

SEQ ID NO: 62165 - protein, 37 aa, Artificial Sequence; identical to SEQ ID NO: 23776
  GFR-binding peptide
  MOD_RES (2), (4): Xaa is C or S
  MOD_RES (16), (17), (18), (19), (20): Xaa is A or G
  MOD_RES (21), (22), (23), (24): Xaa is A or G or is absent

SEQ ID NO: 62166 - protein, 39 aa, Artificial Sequence; identical to SEQ ID NO: 23777
  GFR-binding peptide
  MOD_RES (34), (35): Xaa is C or S
  MOD_RES (12), (13), (14), (15), (16): Xaa is A or G
  MOD_RES (17), (18), (19), (20): Xaa is A or G or is absent

SEQ ID NO: 62167 - protein, 32 aa, Artificial Sequence
  GFR-binding peptide
  MOD_RES (31), (32): Xaa is C or S
EEVIMYHYKLLLVRGNDKYLMSIPSTKVPAXX

SEQ ID NO: 62168 - protein, 35 aa, Artificial Sequence; identical to SEQ ID NO: 31779
  GFR-binding peptide
  MOD_RES (2), (34), (35): Xaa is C or S

SEQ ID NO: 62169 - protein, 42 aa, Artificial Sequence; identical to SEQ ID NO: 2784
  GFR-binding peptide
  MOD_RES (2), (37), (38): Xaa is C or S
  MOD_RES (15), (16), (17), (18), (19): Xaa is A or G
  MOD_RES (20), (21), (22), (23): Xaa is A or G or is absent

SEQ ID NO: 62170 - protein, 35 aa, Artificial Sequence; identical to SEQ ID NO: 2785
  GFR-binding peptide
  MOD_RES (2), (4): Xaa is C or S

SEQ ID NO: 62171 - protein, 33 aa, Artificial Sequence; identical to SEQ ID NO: 2787
  GFR-binding peptide
  MOD_RES (32), (33): Xaa is C or S

SEQ ID NO: 62172 - protein, 38 aa, Artificial Sequence
  GFR-binding peptide
  MOD_RES (1), (35), (36): Xaa is C or S
  MOD_RES (13), (14), (15), (16), (17): Xaa is A or G
  MOD_RES (18), (19), (20), (21): Xaa is A or G or is absent
XSEVVMDEYKFKXXXXXXXXXLYLISIPELRTPVXXTP

SEQ ID NO: 62173 - protein, 36 aa, Artificial Sequence; identical to SEQ ID NO: 2792
  GFR-binding peptide
  MOD_RES (32), (33): Xaa is C or S

SEQ ID NO: 62174 - protein, 34 aa, Artificial Sequence; identical to SEQ ID NO: 2796
  GFR-binding peptide
  MOD_RES (31), (32): Xaa is C or S

SEQ ID NO: 62175 - protein, 39 aa, Artificial Sequence; identical to SEQ ID NO: 2798
  GFR-binding peptide
  MOD_RES (1), (33), (34): Xaa is C or S

SEQ ID NO: 62176 - protein, 42 aa, Artificial Sequence; identical to SEQ ID NO: 2799
  GFR-binding peptide
  MOD_RES (1), (3), (37), (38): Xaa is C or S
  MOD_RES (15), (16), (17), (18), (19): Xaa is A or G
  MOD_RES (20), (21), (22), (23): Xaa is A or G or is absent

SEQ ID NO: 62177 - protein, 40 aa, Artificial Sequence; identical to SEQ ID NO: 2800
  GFR-binding peptide
  MOD_RES (2), (4), (37), (38): Xaa is C or S
  MOD_RES (15), (16), (17), (18), (19): Xaa is A or G
  MOD_RES (20), (21), (22), (23): Xaa is A or G or is absent

SEQ ID NO: 62178 - protein, 35 aa, Artificial Sequence
  GFR-binding peptide
  MOD_RES (34), (35): Xaa is C or S
  MOD_RES (12), (13), (14), (15), (16): Xaa is A or G
  MOD_RES (17), (18), (19), (20): Xaa is A or G or is absent
SEVVMDYHYKLXXXXXXXXXKYLISIPSLRTPVXX

SEQ ID NO: 62179 - protein, 32 aa, Artificial Sequence
  GFR-binding peptide
  MOD_RES (11), (12), (13), (14), (15): Xaa is A or G
  MOD_RES (16), (17), (18), (19): Xaa is A or G or is absent
SRVIMPIKGYXXXXXXXXXFYLINIPSLAQPV

SEQ ID NO: 62180 - protein, 37 aa, Artificial Sequence; identical to SEQ ID NO: 31795
  GFR-binding peptide
  MOD_RES (1), (3), (35), (36): Xaa is C or S

SEQ ID NO: 62181 - protein, 37 aa, Artificial Sequence; identical to SEQ ID NO: 2802
  GFR-binding peptide
  MOD_RES (33), (34): Xaa is C or S

SEQ ID NO: 62182 - protein, 34 aa, Artificial Sequence; identical to SEQ ID NO: 2804
  GFR-binding peptide
  MOD_RES (1), (33), (34): Xaa is C or S

SEQ ID NO: 62183 - protein, 36 aa, Artificial Sequence; identical to SEQ ID NO: 2805
  GFR-binding peptide
  MOD_RES (2), (33), (34): Xaa is C or S

SEQ ID NO: 62184 - protein, 32 aa, Artificial Sequence; identical to SEQ ID NO: 23794
  GFR-binding peptide
  MOD_RES (31), (32): Xaa is C or S

SEQ ID NO: 62185 - protein, 41 aa, Artificial Sequence; identical to SEQ ID NO: 2806
  GFR-binding peptide
  MOD_RES (1), (3), (37): Xaa is C or S
  MOD_RES (15), (16), (17), (18), (19): Xaa is A or G
  MOD_RES (20), (21), (22), (23): Xaa is A or G or is absent

SEQ ID NO: 62186 - protein, 36 aa, Artificial Sequence; identical to SEQ ID NO: 2807
  GFR-binding peptide
  MOD_RES (1), (33): Xaa is C or S

SEQ ID NO: 62187 - protein, 41 aa, Artificial Sequence
  GFR-binding peptide
  MOD_RES (2), (4), (36), (37): Xaa is C or S
RXAXSEVTMNYHYKLVVNKNEDKYLISIPSMKEPVXXPEPI

SEQ ID NO: 62188 - protein, 33 aa, Artificial Sequence; identical to SEQ ID NO: 23801
  GFR-binding peptide
  MOD_RES (32), (33): Xaa is C or S

SEQ ID NO: 62189 - protein, 40 aa, Artificial Sequence; identical to SEQ ID NO: 2809
  GFR-binding peptide
  MOD_RES (1), (35), (36): Xaa is C or S
  MOD_RES (13), (14), (15), (16), (17): Xaa is A or G
  MOD_RES (18), (19), (20), (21): Xaa is A or G or is absent

SEQ ID NO: 62190 - protein, 45 aa, Artificial Sequence; identical to SEQ ID NO: 31801
  GFR-binding peptide
  MOD_RES (2), (4), (39), (40): Xaa is C or S
  MOD_RES (17), (18), (19), (20), (21): Xaa is A or G
  MOD_RES (22), (23), (24), (25): Xaa is A or G or is absent

SEQ ID NO: 62191 - protein, 35 aa, Artificial Sequence; identical to SEQ ID NO: 2810
  GFR-binding peptide
  MOD_RES (32), (33): Xaa is C or S

SEQ ID NO: 62192 - protein, 35 aa, Artificial Sequence
  GFR-binding peptide
  MOD_RES (2), (4), (35): Xaa is C or S
SXKXSRVIMPIKGYVKPKRGVFYLINIPSLAQPVX

SEQ ID NO: 62193 - protein, 36 aa, Artificial Sequence; identical to SEQ ID NO: 2811
  GFR-binding peptide
  MOD_RES (2), (36): Xaa is C or S
  MOD_RES (14), (15), (16), (17), (18): Xaa is A or G
  MOD_RES (19), (20), (21), (22): Xaa is A or G or is absent

SEQ ID NO: 62194 - protein, 33 aa, Artificial Sequence; identical to SEQ ID NO: 2812
  GFR-binding peptide
  MOD_RES (1), (1): Xaa is C or S
  MOD_RES (12), (13), (14), (15), (16): Xaa is A or G
  MOD_RES (17), (18), (19), (20): Xaa is A or G or is absent

SEQ ID NO: 62195 - protein, 34 aa, Artificial Sequence; identical to SEQ ID NO: 2813
  GFR-binding peptide
  MOD_RES (33), (34): Xaa is C or S
  MOD_RES (11), (12), (13), (14), (15): Xaa is A or G
  MOD_RES (16), (17), (18), (19): Xaa is A or G or is absent

SEQ ID NO: 62196 - protein, 36 aa, Artificial Sequence; identical to SEQ ID NO: 31803
  GFR-binding peptide
  MOD_RES (2), (4), (36): Xaa is C or S

SEQ ID NO: 62197 - protein, 39 aa, Artificial Sequence; identical to SEQ ID NO: 23807
  GFR-binding peptide
  MOD_RES (1), (35), (36): Xaa is C or S
  MOD_RES (13), (14), (15), (16), (17): Xaa is A or G
  MOD_RES (18), (19), (20), (21): Xaa is A or G or is absent

SEQ ID NO: 62198 - protein, 32 aa, Artificial Sequence; identical to SEQ ID NO: 31809
  GFR-binding peptide
  MOD_RES (11), (12), (13), (14), (15): Xaa is A or G
  MOD_RES (16), (17), (18), (19): Xaa is A or G or is absent

SEQ ID NO: 62199 - protein, 34 aa, Artificial Sequence
  GFR-binding peptide
  MOD_RES (1), (34): Xaa is C or S
  MOD_RES (12), (13), (14), (15), (16): Xaa is A or G
  MOD_RES (17), (18), (19), (20): Xaa is A or G or is absent
XEEVIMYHYKLXXXXXXXXXKYLMSIPSTKVPAX

SEQ ID NO: 62200 - protein, 40 aa, Artificial Sequence; identical to SEQ ID NO: 23808
  GFR-binding peptide
  MOD_RES (2), (36), (37): Xaa is C or S
  MOD_RES (14), (15), (16), (17), (18): Xaa is A or G
  MOD_RES (19), (20), (21), (22): Xaa is A or G or is absent

SEQ ID NO: 62201 - protein, 34 aa, Artificial Sequence; identical to SEQ ID NO: 2816
  GFR-binding peptide
  MOD_RES (1), (3), (34): Xaa is C or S

SEQ ID NO: 62202 - protein, 36 aa, Artificial Sequence; identical to SEQ ID NO: 31810
  GFR-binding peptide
  MOD_RES (2), (4), (36): Xaa is C or S

SEQ ID NO: 62203 - protein, 36 aa, Artificial Sequence; identical to SEQ ID NO: 56773
  GFR-binding peptide
  MOD_RES (34), (35): Xaa is C or S
  MOD_RES (12), (13), (14), (15), (16): Xaa is A or G
  MOD_RES (17), (18), (19), (20): Xaa is A or G or is absent

SEQ ID NO: 62204 - protein, 39 aa, Artificial Sequence
  GFR-binding peptide
  MOD_RES (2), (4), (36), (37): Xaa is C or S
SXGXRDVVMGEYKFKIIQQKDNLYLMSIPEMKTPTXXPG

SEQ ID NO: 62205 - protein, 33 aa, Artificial Sequence; identical to SEQ ID NO: 2819
  GFR-binding peptide
  MOD_RES (32), (33): Xaa is C or S

SEQ ID NO: 62206 - protein, 41 aa, Artificial Sequence; identical to SEQ ID NO: 2820
  GFR-binding peptide
  MOD_RES (2), (4), (38), (39): Xaa is C or S
  MOD_RES (16), (17), (18), (19), (20): Xaa is A or G
  MOD_RES (21), (22), (23), (24): Xaa is A or G or is absent

SEQ ID NO: 62207 - protein, 42 aa, Artificial Sequence; identical to SEQ ID NO: 23810
  GFR-binding peptide
  MOD_RES (1), (3), (36), (37): Xaa is C or S

SEQ ID NO: 62208 - protein, 40 aa, Artificial Sequence; identical to SEQ ID NO: 31818
  GFR-binding peptide
  MOD_RES (2), (34), (35): Xaa is C or S

SEQ ID NO: 62209 - protein, 36 aa, Artificial Sequence; identical to SEQ ID NO: 2822
  GFR-binding peptide
  MOD_RES (1), (3), (34), (35): Xaa is C or S

SEQ ID NO: 62210 - protein, 33 aa, Artificial Sequence; identical to SEQ ID NO: 2824
  GFR-binding peptide
  MOD_RES (31), (32): Xaa is C or S

SEQ ID NO: 62211 - protein, 35 aa, Artificial Sequence
  GFR-binding peptide
  MOD_RES (1), (3), (35): Xaa is C or S
XGXRDVVMGRHKRLIIQQKDNYYLMSTASMKTPTX

SEQ ID NO: 62212 - protein, 32 aa, Artificial Sequence; identical to SEQ ID NO: 2827
  GFR-binding peptide
  MOD_RES (1), (32): Xaa is C or S

SEQ ID NO: 62213 - protein, 32 aa, Artificial Sequence; identical to SEQ ID NO: 2828
  GFR-binding peptide
  MOD_RES (31), (32): Xaa is C or S

SEQ ID NO: 62214 - protein, 34 aa, Artificial Sequence; identical to SEQ ID NO: 23826
  GFR-binding peptide
  MOD_RES (2), (34): Xaa is C or S

SEQ ID NO: 62215 - protein, 38 aa, Artificial Sequence; identical to SEQ ID NO: 23827
  GFR-binding peptide
  MOD_RES (2), (35), (36): Xaa is C or S
  MOD_RES (13), (14), (15), (16), (17): Xaa is A or G
  MOD_RES (18), (19), (20), (21): Xaa is A or G or is absent

SEQ ID NO: 62216 - protein, 42 aa, Artificial Sequence; identical to SEQ ID NO: 2837
  GFR-binding peptide
  MOD_RES (1), (3), (37), (38): Xaa is C or S
  MOD_RES (15), (16), (17), (18), (19): Xaa is A or G
  MOD_RES (20), (21), (22), (23): Xaa is A or G or is absent

SEQ ID NO: 62217 - protein, 39 aa, Artificial Sequence; identical to SEQ ID NO: 2839
  GFR-binding peptide
  MOD_RES (2), (4), (39): Xaa is C or S
  MOD_RES (17), (18), (19), (20), (21): Xaa is A or G
  MOD_RES (22), (23), (24), (25): Xaa is A or G or is absent

SEQ ID NO: 62218 - protein, 43 aa, Artificial Sequence; identical to SEQ ID NO: 31833
  GFR-binding peptide
  MOD_RES (2), (4), (39), (40): Xaa is C or S
  MOD_RES (17), (18), (19), (20), (21): Xaa is A or G
  MOD_RES (22), (23), (24), (25): Xaa is A or G or is absent

SEQ ID NO: 62219 - protein, 35 aa, Artificial Sequence; identical to SEQ ID NO: 31838
  GFR-binding peptide
  MOD_RES (2), (34), (35): Xaa is C or S

SEQ ID NO: 62220 - protein, 36 aa, Artificial Sequence
  GFR-binding peptide
  MOD_RES (1), (33), (34): Xaa is C or S
XSEVTMNRYKKLVVNKNEDFYLISIANMKEPVXXPE

SEQ ID NO: 62221 - protein, 35 aa, Artificial Sequence; identical to SEQ ID NO: 2842
  GFR-binding peptide
  MOD_RES (34), (35): Xaa is C or S
  MOD_RES (12), (13), (14), (15), (16): Xaa is A or G
  MOD_RES (17), (18), (19), (20): Xaa is A or G or is absent

SEQ ID NO: 62222 - protein, 33 aa, Artificial Sequence
  GFR-binding peptide
  MOD_RES (2), (2): Xaa is C or S
AXSEVTMNEYKFKVVNKNEDLYLISIPEMKEPV

SEQ ID NO: 62223 - protein, 33 aa, Artificial Sequence; identical to SEQ ID NO: 23833
  GFR-binding peptide
  MOD_RES (33), (33): Xaa is C or S
  MOD_RES (11), (12), (13), (14), (15): Xaa is A or G
  MOD_RES (16), (17), (18), (19): Xaa is A or G or is absent

SEQ ID NO: 62224 - protein, 34 aa, Artificial Sequence; identical to SEQ ID NO: 2843
  GFR-binding peptide
  MOD_RES (33), (34): Xaa is C or S
  MOD_RES (11), (12), (13), (14), (15): Xaa is A or G
  MOD_RES (16), (17), (18), (19): Xaa is A or G or is absent

SEQ ID NO: 62225 - protein, 37 aa, Artificial Sequence; identical to SEQ ID NO: 23836
  GFR-binding peptide
  MOD_RES (1), (33), (34): Xaa is C or S

SEQ ID NO: 62226 - protein, 41 aa, Artificial Sequence
  GFR-binding peptide
  MOD_RES (2), (4), (38), (39): Xaa is C or S
  MOD_RES (16), (17), (18), (19), (20): Xaa is A or G
  MOD_RES (21), (22), (23), (24): Xaa is A or G or is absent
RXGXSEVVMDRHKRLXXXXXXXXXYYLISTASLRTPVXXTP

SEQ ID NO: 62227 - protein, 34 aa, Artificial Sequence; identical to SEQ ID NO: 2849
  GFR-binding peptide
  MOD_RES (1), (1): Xaa is C or S
  MOD_RES (13), (14), (15), (16), (17): Xaa is A or G
  MOD_RES (18), (19), (20), (21): Xaa is A or G or is absent

SEQ ID NO: 62228 - protein, 38 aa, Artificial Sequence; identical to SEQ ID NO: 31849
  GFR-binding peptide
  MOD_RES (2), (34), (35): Xaa is C or S

SEQ ID NO: 62229 - protein, 40 aa, Artificial Sequence; identical to SEQ ID NO: 31852
  GFR-binding peptide
  MOD_RES (2), (4), (35), (36): Xaa is C or S

SEQ ID NO: 62230 - protein, 38 aa, Artificial Sequence; identical to SEQ ID NO: 2855
  GFR-binding peptide
  MOD_RES (2), (4), (36), (37): Xaa is C or S

SEQ ID NO: 62231 - protein, 38 aa, Artificial Sequence
  GFR-binding peptide
  MOD_RES (1), (3), (37), (38): Xaa is C or S
  MOD_RES (15), (16), (17), (18), (19): Xaa is A or G
  MOD_RES (20), (21), (22), (23): Xaa is A or G or is absent
XGXSEVVMDRHKRLXXXXXXXXXYYLISTASLRTPVXX

SEQ ID NO: 62232 - protein, 41 aa, Artificial Sequence; identical to SEQ ID NO: 31859
  GFR-binding peptide
  MOD_RES (2), (36), (37): Xaa is C or S
  MOD_RES (14), (15), (16), (17), (18): Xaa is A or G
  MOD_RES (19), (20), (21), (22): Xaa is A or G or is absent

SEQ ID NO: 62233 - protein, 40 aa, Artificial Sequence
  GFR-binding peptide
  MOD_RES (2), (35), (36): Xaa is C or S
  MOD_RES (13), (14), (15), (16), (17): Xaa is A or G
  MOD_RES (18), (19), (20), (21): Xaa is A or G or is absent
KXSKVIMPIKGYXXXXXXXXXFYLINIPSLDQSVXXPSAS

SEQ ID NO: 62234 - protein, 37 aa, Artificial Sequence
  GFR-binding peptide
  MOD_RES (2), (4): Xaa is C or S
  MOD_RES (16), (17), (18), (19), (20): Xaa is A or G
  MOD_RES (21), (22), (23), (24): Xaa is A or G or is absent
SXGXRDVVMGYHYKLXXXXXXXXXKYLMSIPSMKTPT

SEQ ID NO: 62235 - protein, 39 aa, Artificial Sequence; identical to SEQ ID NO: 2868
  GFR-binding peptide
  MOD_RES (33), (34): Xaa is C or S
  MOD_RES (11), (12), (13), (14), (15): Xaa is A or G
  MOD_RES (16), (17), (18), (19): Xaa is A or G or is absent

SEQ ID NO: 62236 - protein, 38 aa, Artificial Sequence; identical to SEQ ID NO: 2869
  GFR-binding peptide
  MOD_RES (1), (36), (37): Xaa is C or S
  MOD_RES (14), (15), (16), (17), (18): Xaa is A or G
  MOD_RES (19), (20), (21), (22): Xaa is A or G or is absent

SEQ ID NO: 62237 - protein, 31 aa, Artificial Sequence; identical to SEQ ID NO: 23856
  GFR-binding peptide
  MOD_RES (31), (31): Xaa is C or S

SEQ ID NO: 62238 - protein, 39 aa, Artificial Sequence; identical to SEQ ID NO: 2870
  GFR-binding peptide
  MOD_RES (1), (34), (35): Xaa is C or S
  MOD_RES (12), (13), (14), (15), (16): Xaa is A or G
  MOD_RES (17), (18), (19), (20): Xaa is A or G or is absent

SEQ ID NO: 62239 - protein, 33 aa, Artificial Sequence; identical to SEQ ID NO: 2872
  GFR-binding peptide
  MOD_RES (33), (33): Xaa is C or S
  MOD_RES (11), (12), (13), (14), (15): Xaa is A or G
  MOD_RES (16), (17), (18), (19): Xaa is A or G or is absent

SEQ ID NO: 62240 - protein, 39 aa, Artificial Sequence; identical to SEQ ID NO: 2874
  GFR-binding peptide
  MOD_RES (1), (34), (35): Xaa is C or S
  MOD_RES (12), (13), (14), (15), (16): Xaa is A or G
  MOD_RES (17), (18), (19), (20): Xaa is A or G or is absent

SEQ ID NO: 62241 - protein, 34 aa, Artificial Sequence; identical to SEQ ID NO: 2875
  GFR-binding peptide
  MOD_RES (1), (32), (33): Xaa is C or S

SEQ ID NO: 62242 - protein, 34 aa, Artificial Sequence; identical to SEQ ID NO: 2876
  GFR-binding peptide
  MOD_RES (32), (33): Xaa is C or S

SEQ ID NO: 62243 - protein, 35 aa, Artificial Sequence; identical to SEQ ID NO: 31878
  GFR-binding peptide
  MOD_RES (31), (31): Xaa is C or S

SEQ ID NO: 62244 - protein, 33 aa, Artificial Sequence; identical to SEQ ID NO: 2878
  GFR-binding peptide
  MOD_RES (2), (2): Xaa is C or S

SEQ ID NO: 62245 - protein, 33 aa, Artificial Sequence
  GFR-binding peptide
  MOD_RES (31), (32): Xaa is C or S
EVVMDRHKRLVVNNASDYYLISTASLRTPVXXT

SEQ ID NO: 62246 - protein, 33 aa, Artificial Sequence
  GFR-binding peptide
  MOD_RES (32), (33): Xaa is C or S
ESVAMGRHKRLYTVVGKDYYLISTASLKTPVXX

SEQ ID NO: 62247 - protein, 33 aa, Artificial Sequence; identical to SEQ ID NO: 23869
  GFR-binding peptide
  MOD_RES (32), (33): Xaa is C or S

SEQ ID NO: 62248 - protein, 39 aa, Artificial Sequence; identical to SEQ ID NO: 23870
  GFR-binding peptide
  MOD_RES (1), (3), (34), (35): Xaa is C or S

SEQ ID NO: 62249 - protein, 35 aa, Artificial Sequence; identical to SEQ ID NO: 31881
  GFR-binding peptide
  MOD_RES (2), (4): Xaa is C or S

SEQ ID NO: 62250 - protein, 34 aa, Artificial Sequence
  GFR-binding peptide
  MOD_RES (31), (32): Xaa is C or S
EVTMNEYKFKVVNKNEDLYLISIPEMKEPVXXPE

SEQ ID NO: 62251 - protein, 37 aa, Artificial Sequence; identical to SEQ ID NO: 2882
  GFR-binding peptide
  MOD_RES (2), (33), (34): Xaa is C or S

SEQ ID NO: 62252 - protein, 35 aa, Artificial Sequence; identical to SEQ ID NO: 31885
  GFR-binding peptide
  MOD_RES (1), (33), (34): Xaa is C or S

SEQ ID NO: 62253 - protein, 43 aa, Artificial Sequence
  GFR-binding peptide
  MOD_RES (1), (3), (37), (38): Xaa is C or S
  MOD_RES (15), (16), (17), (18), (19): Xaa is A or G
  MOD_RES (20), (21), (22), (23): Xaa is A or G or is absent
XGXRDVVMGEYKFKXXXXXXXXXLYLMSIPEMKTPTXXPGASG

SEQ ID NO: 62254 - protein, 39 aa, Artificial Sequence; identical to SEQ ID NO: 31888
  GFR-binding peptide
  MOD_RES (2), (36): Xaa is C or S
  MOD_RES (14), (15), (16), (17), (18): Xaa is A or G
  MOD_RES (19), (20), (21), (22): Xaa is A or G or is absent

SEQ ID NO: 62255 - protein, 43 aa, Artificial Sequence; identical to SEQ ID NO: 2884
  GFR-binding peptide
  MOD_RES (2), (4), (37), (38): Xaa is C or S
  MOD_RES (15), (16), (17), (18), (19): Xaa is A or G
  MOD_RES (20), (21), (22), (23): Xaa is A or G or is absent

SEQ ID NO: 62256 - protein, 37 aa, Artificial Sequence; identical to SEQ ID NO: 23874
  GFR-binding peptide
  MOD_RES (31), (32): Xaa is C or S

SEQ ID NO: 62257 - protein, 40 aa, Artificial Sequence; identical to SEQ ID NO: 31889
  GFR-binding peptide
  MOD_RES (1), (3), (35), (36): Xaa is C or S

SEQ ID NO: 62258 - protein, 38 aa, Artificial Sequence; identical to SEQ ID NO: 31894
  GFR-binding peptide
  MOD_RES (32), (33): Xaa is C or S

SEQ ID NO: 62259 - protein, 36 aa, Artificial Sequence; identical to SEQ ID NO: 2886
  GFR-binding peptide
  MOD_RES (1), (3), (35), (36): Xaa is C or S

SEQ ID NO: 62260 - protein, 36 aa, Artificial Sequence; identical to SEQ ID NO: 31895
  GFR-binding peptide
  MOD_RES (2), (4), (36): Xaa is C or S

SEQ ID NO: 62261 - protein, 40 aa, Artificial Sequence; identical to SEQ ID NO: 2887
  GFR-binding peptide
  MOD_RES (2), (4), (38), (39): Xaa is C or S
  MOD_RES (16), (17), (18), (19), (20): Xaa is A or G
  MOD_RES (21), (22), (23), (24): Xaa is A or G or is absent

SEQ ID NO: 62262 - protein, 34 aa, Artificial Sequence; identical to SEQ ID NO: 23878
  GFR-binding peptide
  MOD_RES (1), (1): Xaa is C or S
  MOD_RES (13), (14), (15), (16), (17): Xaa is A or G
  MOD_RES (18), (19), (20), (21): Xaa is A or G or is absent

SEQ ID NO: 62263 - protein, 34 aa, Artificial Sequence; identical to SEQ ID NO: 2888
  GFR-binding peptide
  MOD_RES (1), (3): Xaa is C or S

SEQ ID NO: 62264 - protein, 38 aa, Artificial Sequence; identical to SEQ ID NO: 23880
  GFR-binding peptide
  MOD_RES (2), (4), (36): Xaa is C or S

SEQ ID NO: 62265 - protein, 38 aa, Artificial Sequence
  GFR-binding peptide
  MOD_RES (1), (32), (33): Xaa is C or S
XEEVIMEYKFKLLVRGNDLYLMSIPETKVPAXXTSPVR

SEQ ID NO: 62266 - protein, 39 aa, Artificial Sequence; identical to SEQ ID NO: 31896
  GFR-binding peptide
  MOD_RES (2), (36), (37): Xaa is C or S
  MOD_RES (14), (15), (16), (17), (18): Xaa is A or G
  MOD_RES (19), (20), (21), (22): Xaa is A or G or is absent

SEQ ID NO: 62267 - protein, 37 aa, Artificial Sequence; identical to SEQ ID NO: 23882
  GFR-binding peptide
  MOD_RES (1), (3), (37): Xaa is C or S
  MOD_RES (15), (16), (17), (18), (19): Xaa is A or G
  MOD_RES (20), (21), (22), (23): Xaa is A or G or is absent

SEQ ID NO: 62268 - protein, 33 aa, Artificial Sequence
  GFR-binding peptide
  MOD_RES (2), (2): Xaa is C or S
GXESVAMGRHKRLYTVVGKDYYLISTASLKTPV

SEQ ID NO: 62269 - protein, 39 aa, Artificial Sequence; identical to SEQ ID NO: 2893
  GFR-binding peptide
  MOD_RES (2), (35), (36): Xaa is C or S
  MOD_RES (13), (14), (15), (16), (17): Xaa is A or G
  MOD_RES (18), (19), (20), (21): Xaa is A or G or is absent

SEQ ID NO: 62270 - protein, 37 aa, Artificial Sequence; identical to SEQ ID NO: 2894
  GFR-binding peptide
  MOD_RES (2), (35), (36): Xaa is C or S
  MOD_RES (13), (14), (15), (16), (17): Xaa is A or G
  MOD_RES (18), (19), (20), (21): Xaa is A or G or is absent

SEQ ID NO: 62271 - protein, 39 aa, Artificial Sequence; identical to SEQ ID NO: 2895
  GFR-binding peptide
  MOD_RES (1), (36), (37): Xaa is C or S
  MOD_RES (14), (15), (16), (17), (18): Xaa is A or G
  MOD_RES (19), (20), (21), (22): Xaa is A or G or is absent

SEQ ID NO: 62272 - protein, 35 aa, Artificial Sequence; identical to SEQ ID NO: 31908
  GFR-binding peptide
  MOD_RES (32), (33): Xaa is C or S

SEQ ID NO: 62273 - protein, 33 aa, Artificial Sequence
  GFR-binding peptide
  MOD_RES (12), (13), (14), (15), (16): Xaa is A or G
  MOD_RES (17), (18), (19), (20): Xaa is A or G or is absent
SEVVMDRHKRLXXXXXXXXXYYLISTASLRTPV

SEQ ID NO: 62274 - protein, 37 aa, Artificial Sequence
  GFR-binding peptide
  MOD_RES (2), (33), (34): Xaa is C or S
GXEEVIMEYKFKLLVRGNDLYLMSIPETKVPAXXTSP

SEQ ID NO: 62275 - protein, 36 aa, Artificial Sequence; identical to SEQ ID NO: 2897
  GFR-binding peptide
  MOD_RES (1), (35), (36): Xaa is C or S
  MOD_RES (13), (14), (15), (16), (17): Xaa is A or G
  MOD_RES (18), (19), (20), (21): Xaa is A or G or is absent

SEQ ID NO: 62276 - protein, 34 aa, Artificial Sequence; identical to SEQ ID NO: 2898
  GFR-binding peptide
  MOD_RES (1), (1): Xaa is C or S
  MOD_RES (13), (14), (15), (16), (17): Xaa is A or G
  MOD_RES (18), (19), (20), (21): Xaa is A or G or is absent

SEQ ID NO: 62277 - protein, 35 aa, Artificial Sequence; identical to SEQ ID NO: 23894
  GFR-binding peptide
  MOD_RES (32), (33): Xaa is C or S

SEQ ID NO: 62278 - protein, 40 aa, Artificial Sequence
  GFR-binding peptide
  MOD_RES (1), (3), (37), (38): Xaa is C or S
  MOD_RES (15), (16), (17), (18), (19): Xaa is A or G
  MOD_RES (20), (21), (22), (23): Xaa is A or G or is absent
XAXSEVTMNRYKKLXXXXXXXXXFYLISIANMKEPVXXPE

SEQ ID NO: 62279 - protein, 38 aa, Artificial Sequence
  GFR-binding peptide
  MOD_RES (2), (4), (37), (38): Xaa is C or S
  MOD_RES (15), (16), (17), (18), (19): Xaa is A or G
  MOD_RES (20), (21), (22), (23): Xaa is A or G or is absent
LXGXEEVIMRHKRLXXXXXXXXXYYLMSTASTKVPAXX

SEQ ID NO: 62280 - protein, 31 aa, Artificial Sequence
  GFR-binding peptide
  MOD_RES (1), (1): Xaa is C or S
XEEVIMEYKFKLLVRGNDLYLMSIPETKVPA

SEQ ID NO: 62281 - protein, 42 aa, Artificial Sequence; identical to SEQ ID NO: 23902
  GFR-binding peptide
  MOD_RES (2), (4), (38), (39): Xaa is C or S
  MOD_RES (16), (17), (18), (19), (20): Xaa is A or G
  MOD_RES (21), (22), (23), (24): Xaa is A or G or is absent

SEQ ID NO: 62282 - protein, 36 aa, Artificial Sequence; identical to SEQ ID NO: 31920
  GFR-binding peptide
  MOD_RES (32), (33): Xaa is C or S

SEQ ID NO: 62283 - protein, 38 aa, Artificial Sequence; identical to SEQ ID NO: 23903
  GFR-binding peptide
  MOD_RES (33), (34): Xaa is C or S
  MOD_RES (11), (12), (13), (14), (15): Xaa is A or G
  MOD_RES (16), (17), (18), (19): Xaa is A or G or is absent

SEQ ID NO: 62284 - protein, 31 aa, Artificial Sequence; identical to SEQ ID NO: 2907
  GFR-binding peptide
  MOD_RES (31), (31): Xaa is C or S

SEQ ID NO: 62285 - protein, 34 aa, Artificial Sequence; identical to SEQ ID NO: 23906
  GFR-binding peptide
  MOD_RES (1), (33): Xaa is C or S

SEQ ID NO: 62286 - protein, 35 aa, Artificial Sequence
  GFR-binding peptide
  MOD_RES (31), (32): Xaa is C or S
SKVIMPIKGYIKPTKGIFYLINIPSLDQSVXXPSA

SEQ ID NO: 62287 - protein, 36 aa, Artificial Sequence; identical to SEQ ID NO: 2910
  GFR-binding peptide
  MOD_RES (2), (4): Xaa is C or S
  MOD_RES (15), (16), (17), (18), (19): Xaa is A or G
  MOD_RES (20), (21), (22), (23): Xaa is A or G or is absent

SEQ ID NO: 62288 - protein, 39 aa, Artificial Sequence; identical to SEQ ID NO: 23908
  GFR-binding peptide
  MOD_RES (2), (36), (37): Xaa is C or S
  MOD_RES (14), (15), (16), (17), (18): Xaa is A or G
  MOD_RES (19), (20), (21), (22): Xaa is A or G or is absent

SEQ ID NO: 62289 - protein, 36 aa, Artificial Sequence; identical to SEQ ID NO: 31925
  GFR-binding peptide
  MOD_RES (1), (35), (36): Xaa is C or S
  MOD_RES (13), (14), (15), (16), (17): Xaa is A or G
  MOD_RES (18), (19), (20), (21): Xaa is A or G or is absent

SEQ ID NO: 62290 - protein, 32 aa, Artificial Sequence
  GFR-binding peptide
  MOD_RES (32), (32): Xaa is C or S
SEVTMNPIKGYVVNKNEDFYLINIPSMKEPVX

SEQ ID NO: 62291 - protein, 35 aa, Artificial Sequence; identical to SEQ ID NO: 10383
  GFR-binding peptide
  MOD_RES (2), (2): Xaa is C or S
  MOD_RES (14), (15), (16), (17), (18): Xaa is A or G
  MOD_RES (19), (20), (21), (22): Xaa is A or G or is absent

SEQ ID NO: 62292 - protein, 39 aa, Artificial Sequence; identical to SEQ ID NO: 23915
  GFR-binding peptide
  MOD_RES (2), (34), (35): Xaa is C or S

SEQ ID NO: 62293 - protein, 35 aa, Artificial Sequence; identical to SEQ ID NO: 2918
  GFR-binding peptide
  MOD_RES (33), (34): Xaa is C or S
  MOD_RES (11), (12), (13), (14), (15): Xaa is A or G
  MOD_RES (16), (17), (18), (19): Xaa is A or G or is absent

SEQ ID NO: 62294 - protein, 40 aa, Artificial Sequence; identical to SEQ ID NO: 23919
  GFR-binding peptide
  MOD_RES (2), (4), (36), (37): Xaa is C or S

SEQ ID NO: 62295 - protein, 38 aa, Artificial Sequence; identical to SEQ ID NO: 31929
  GFR-binding peptide
  MOD_RES (1), (33), (34): Xaa is C or S

SEQ ID NO: 62296 - protein, 39 aa, Artificial Sequence; identical to SEQ ID NO: 2922
  GFR-binding peptide
  MOD_RES (2), (4), (38), (39): Xaa is C or S
  MOD_RES (16), (17), (18), (19), (20): Xaa is A or G
  MOD_RES (21), (22), (23), (24): Xaa is A or G or is absent

SEQ ID NO: 62297 - protein, 39 aa, Artificial Sequence; identical to SEQ ID NO: 23921
  GFR-binding peptide
  MOD_RES (34), (35): Xaa is C or S
  MOD_RES (12), (13), (14), (15), (16): Xaa is A or G
  MOD_RES (17), (18), (19), (20): Xaa is A or G or is absent

SEQ ID NO: 62298 - protein, 36 aa, Artificial Sequence; identical to SEQ ID NO: 31933
  GFR-binding peptide
  MOD_RES (1), (3), (35), (36): Xaa is C or S

SEQ ID NO: 62299 - protein, 39 aa, Artificial Sequence; identical to SEQ ID NO: 2926
  GFR-binding peptide
  MOD_RES (2), (36), (37): Xaa is C or S
  MOD_RES (14), (15), (16), (17), (18): Xaa is A or G
  MOD_RES (19), (20), (21), (22): Xaa is A or G or is absent

SEQ ID NO: 62300 - protein, 36 aa, Artificial Sequence; identical to SEQ ID NO: 23928
  GFR-binding peptide
  MOD_RES (1), (3), (35), (36): Xaa is C or S

SEQ ID NO: 62301 - protein, 40 aa, Artificial Sequence; identical to SEQ ID NO: 2928
  GFR-binding peptide
  MOD_RES (2), (4), (35), (36): Xaa is C or S

SEQ ID NO: 62302 - protein, 41 aa, Artificial Sequence; identical to SEQ ID NO: 23931
  GFR-binding peptide
  MOD_RES (2), (36), (37): Xaa is C or S
  MOD_RES (14), (15), (16), (17), (18): Xaa is A or G
  MOD_RES (19), (20), (21), (22): Xaa is A or G or is absent

SEQ ID NO: 62303 - protein, 40 aa, Artificial Sequence
  GFR-binding peptide
  MOD_RES (34), (35): Xaa is C or S
  MOD_RES (12), (13), (14), (15), (16): Xaa is A or G
  MOD_RES (17), (18), (19), (20): Xaa is A or G or is absent
ESVAMGRHKRLXXXXXXXXXYYLISTASLKTPVXXAKSAK

SEQ ID NO: 62304 - protein, 40 aa, Artificial Sequence
  GFR-binding peptide
  MOD_RES (34), (35): Xaa is C or S
  MOD_RES (12), (13), (14), (15), (16): Xaa is A or G
  MOD_RES (17), (18), (19), (20): Xaa is A or G or is absent
SEVVMDEYKFKXXXXXXXXXLYLISIPELRTPVXXTPPTS

SEQ ID NO: 62305 - protein, 38 aa, Artificial Sequence; identical to SEQ ID NO: 2934
  GFR-binding peptide
  MOD_RES (2), (34), (35): Xaa is C or S

SEQ ID NO: 62306 - protein, 36 aa, Artificial Sequence; identical to SEQ ID NO: 2936
  GFR-binding peptide
  MOD_RES (34), (35): Xaa is C or S
  MOD_RES (12), (13), (14), (15), (16): Xaa is A or G
  MOD_RES (17), (18), (19), (20): Xaa is A or G or is absent

SEQ ID NO: 62307 - protein, 41 aa, Artificial Sequence; identical to SEQ ID NO: 2937
  GFR-binding peptide
  MOD_RES (1), (3), (35), (36): Xaa is C or S

SEQ ID NO: 62308 - protein, 36 aa, Artificial Sequence
  GFR-binding peptide
  MOD_RES (34), (35): Xaa is C or S
  MOD_RES (12), (13), (14), (15), (16): Xaa is A or G
  MOD_RES (17), (18), (19), (20): Xaa is A or G or is absent
SEVTMNPIKGYXXXXXXXXXFYLINIPSMKEPVXXP

SEQ ID NO: 62309 - protein, 38 aa, Artificial Sequence
  GFR-binding peptide
  MOD_RES (2), (36), (37): Xaa is C or S
  MOD_RES (14), (15), (16), (17), (18): Xaa is A or G
  MOD_RES (19), (20), (21), (22): Xaa is A or G or is absent
GXSEVVMDEYKFKXXXXXXXXXLYLISIPELRTPVXXT

SEQ ID NO: 62310 - protein, 37 aa, Artificial Sequence; identical to SEQ ID NO: 2938
  GFR-binding peptide
  MOD_RES (1), (33), (34): Xaa is C or S

SEQ ID NO: 62311 - protein, 36 aa, Artificial Sequence
  GFR-binding peptide
  MOD_RES (2), (4), (36): Xaa is C or S
RXGXSEVVMDYHYKLVVNNASDKYLISIPSLRTPVX

SEQ ID NO: 62312 - protein, 35 aa, Artificial Sequence; identical to SEQ ID NO: 2939
  GFR-binding peptide
  MOD_RES (1), (3), (34), (35): Xaa is C or S

SEQ ID NO: 62313 - protein, 38 aa, Artificial Sequence
  GFR-binding peptide
  MOD_RES (33), (34): Xaa is C or S
  MOD_RES (11), (12), (13), (14), (15): Xaa is A or G
  MOD_RES (16), (17), (18), (19): Xaa is A or G or is absent
EVVMDEYKFKXXXXXXXXXLYLISIPELRTPVXXTPPT

SEQ ID NO: 62314 - protein, 38 aa, Artificial Sequence; identical to SEQ ID NO: 2940
  GFR-binding peptide
  MOD_RES (2), (34), (35): Xaa is C or S

SEQ ID NO: 62315 - protein, 38 aa, Artificial Sequence; identical to SEQ ID NO: 2941
  GFR-binding peptide
  MOD_RES (34), (35): Xaa is C or S
  MOD_RES (12), (13), (14), (15), (16): Xaa is A or G
  MOD_RES (17), (18), (19), (20): Xaa is A or G or is absent

SEQ ID NO: 62316 - protein, 40 aa, Artificial Sequence; identical to SEQ ID NO: 2942
  GFR-binding peptide
  MOD_RES (2), (4), (38), (39): Xaa is C or S
  MOD_RES (16), (17), (18), (19), (20): Xaa is A or G
  MOD_RES (21), (22), (23), (24): Xaa is A or G or is absent

SEQ ID NO: 62317 - protein, 38 aa, Artificial Sequence; identical to SEQ ID NO: 2945
  GFR-binding peptide
  MOD_RES (2), (4): Xaa is C or S
  MOD_RES (17), (18), (19), (20), (21): Xaa is A or G
  MOD_RES (22), (23), (24), (25): Xaa is A or G or is absent

SEQ ID NO: 62318 - protein, 33 aa, Artificial Sequence
  GFR-binding peptide
  MOD_RES (2), (2): Xaa is C or S
AXSEVTMNRYKKLVVNKNEDFYLISIANMKEPV

SEQ ID NO: 62319 - protein, 39 aa, Artificial Sequence; identical to SEQ ID NO: 23950
  GFR-binding peptide
  MOD_RES (1), (3), (36), (37): Xaa is C or S
  MOD_RES (14), (15), (16), (17), (18): Xaa is A or G
  MOD_RES (19), (20), (21), (22): Xaa is A or G or is absent

SEQ ID NO: 62320 - protein, 42 aa, Artificial Sequence; identical to SEQ ID NO: 31961
  GFR-binding peptide
  MOD_RES (2), (4), (38), (39): Xaa is C or S
  MOD_RES (16), (17), (18), (19), (20): Xaa is A or G
  MOD_RES (21), (22), (23), (24): Xaa is A or G or is absent

SEQ ID NO: 62321 - protein, 38 aa, Artificial Sequence; identical to SEQ ID NO: 2949
  GFR-binding peptide
  MOD_RES (2), (4), (35), (36): Xaa is C or S

SEQ ID NO: 62322 - protein, 41 aa, Artificial Sequence
  GFR-binding peptide
  MOD_RES (2), (35), (36): Xaa is C or S
  MOD_RES (13), (14), (15), (16), (17): Xaa is A or G
  MOD_RES (18), (19), (20), (21): Xaa is A or G or is absent
KXSRVIMPIKGYXXXXXXXXXFYLINIPSLAQPVXXPAASA

SEQ ID NO: 62323 - protein, 38 aa, Artificial Sequence; identical to SEQ ID NO: 2952
  GFR-binding peptide
  MOD_RES (1), (34), (35): Xaa is C or S
  MOD_RES (12), (13), (14), (15), (16): Xaa is A or G
  MOD_RES (17), (18), (19), (20): Xaa is A or G or is absent

SEQ ID NO: 62324 - protein, 41 aa, Artificial Sequence; identical to SEQ ID NO: 2954
  GFR-binding peptide
  MOD_RES (1), (3), (35): Xaa is C or S

SEQ ID NO: 62325 - protein, 41 aa, Artificial Sequence; identical to SEQ ID NO: 2957
  GFR-binding peptide
  MOD_RES (1), (3), (35), (36): Xaa is C or S

SEQ ID NO: 62326 - protein, 38 aa, Artificial Sequence; identical to SEQ ID NO: 23960
  GFR-binding peptide
  MOD_RES (1), (3), (35): Xaa is C or S

SEQ ID NO: 62327 - protein, 41 aa, Artificial Sequence; identical to SEQ ID NO: 2960
  GFR-binding peptide
  MOD_RES (2), (4), (36): Xaa is C or S

SEQ ID NO: 62328 - protein, 35 aa, Artificial Sequence; identical to SEQ ID NO: 2961
  GFR-binding peptide
  MOD_RES (31), (32): Xaa is C or S

SEQ ID NO: 62329 - protein, 37 aa, Artificial Sequence; identical to SEQ ID NO: 2963
  GFR-binding peptide
  MOD_RES (1), (35): Xaa is C or S
  MOD_RES (13), (14), (15), (16), (17): Xaa is A or G
  MOD_RES (18), (19), (20), (21): Xaa is A or G or is absent

SEQ ID NO: 62330 - protein, 36 aa, Artificial Sequence; identical to SEQ ID NO: 2965
  GFR-binding peptide
  MOD_RES (1), (3): Xaa is C or S
  MOD_RES (15), (16), (17), (18), (19): Xaa is A or G
  MOD_RES (20), (21), (22), (23): Xaa is A or G or is absent

SEQ ID NO: 62331 - protein, 42 aa, Artificial Sequence
  GFR-binding peptide
  MOD_RES (1), (3), (36), (37): Xaa is C or S
  MOD_RES (14), (15), (16), (17), (18): Xaa is A or G
  MOD_RES (19), (20), (21), (22): Xaa is A or G or is absent
XGXEEVIMEYKFKXXXXXXXXXLYLMSIPETKVPAXXTSPVR

SEQ ID NO: 62332 - protein, 31 aa, Artificial Sequence
  GFR-binding peptide
SEVTMNEYKFKVVNKNEDLYLISIPEMKEPV

SEQ ID NO: 62333 - protein, 36 aa, Artificial Sequence
  GFR-binding peptide
  MOD_RES (2), (4): Xaa is C or S
  MOD_RES (15), (16), (17), (18), (19): Xaa is A or G
  MOD_RES (20), (21), (22), (23): Xaa is A or G or is absent
SXKXSKVVMPIKGYXXXXXXXXXFYLINIPSLDQPV

SEQ ID NO: 62334 - protein, 38 aa, Artificial Sequence
  GFR-binding peptide
  MOD_RES (2), (4), (36), (37): Xaa is C or S
RXGXSEVVMDEYKFKVVNNASDLYLISIPELRTPVXXT

SEQ ID NO: 62335 - protein, 38 aa, Artificial Sequence
  GFR-binding peptide
  MOD_RES (33), (34): Xaa is C or S
  MOD_RES (11), (12), (13), (14), (15): Xaa is A or G
  MOD_RES (16), (17), (18), (19): Xaa is A or G or is absent
EVVMDYHYKLXXXXXXXXXKYLISIPSLRTPVXXTPPT

SEQ ID NO: 62336 - protein, 43 aa, Artificial Sequence
  GFR-binding peptide
  MOD_RES (2), (4), (38), (39): Xaa is C or S
  MOD_RES (16), (17), (18), (19), (20): Xaa is A or G
  MOD_RES (21), (22), (23), (24): Xaa is A or G or is absent
SXGXRDVVMGEYKFKXXXXXXXXXLYLMSIPEMKTPTXXPGAS

SEQ ID NO: 62337 - protein, 32 aa, Artificial Sequence; identical to SEQ ID NO: 2973
  GFR-binding peptide
  MOD_RES (31), (32): Xaa is C or S

SEQ ID NO: 62338 - protein, 40 aa, Artificial Sequence; identical to SEQ ID NO: 31987
  GFR-binding peptide
  MOD_RES (34), (35): Xaa is C or S
  MOD_RES (12), (13), (14), (15), (16): Xaa is A or G
  MOD_RES (17), (18), (19), (20): Xaa is A or G or is absent

SEQ ID NO: 62339 - protein, 37 aa, Artificial Sequence
  GFR-binding peptide
  MOD_RES (1), (34), (35): Xaa is C or S
  MOD_RES (12), (13), (14), (15), (16): Xaa is A or G
  MOD_RES (17), (18), (19), (20): Xaa is A or G or is absent
XSRVIMPIKGYXXXXXXXXXFYLINIPSLAQPVXXPA

SEQ ID NO: 62340 - protein, 36 aa, Artificial Sequence; identical to SEQ ID NO: 23971
  GFR-binding peptide
  MOD_RES (34), (35): Xaa is C or S
  MOD_RES (12), (13), (14), (15), (16): Xaa is A or G
  MOD_RES (17), (18), (19), (20): Xaa is A or G or is absent

SEQ ID NO: 62341 - protein, 33 aa, Artificial Sequence; identical to SEQ ID NO: 2975
  GFR-binding peptide
  MOD_RES (33), (33): Xaa is C or S
  MOD_RES (11), (12), (13), (14), (15): Xaa is A or G
  MOD_RES (16), (17), (18), (19): Xaa is A or G or is absent

SEQ ID NO: 62342 - protein, 37 aa, Artificial Sequence
  GFR-binding peptide
  MOD_RES (2), (4), (36), (37): Xaa is C or S
RXGXSEVVMDEYKFKVVNNASDLYLISIPELRTPVXX

SEQ ID NO: 62343 - protein, 31 aa, Artificial Sequence
  GFR-binding peptide
AEVVMDRHKRLVVNNAADYYLISTASLRAPV

SEQ ID NO: 62344 - protein, 37 aa, Artificial Sequence
  GFR-binding peptide
  MOD_RES (2), (4): Xaa is C or S
  MOD_RES (16), (17), (18), (19), (20): Xaa is A or G
  MOD_RES (21), (22), (23), (24): Xaa is A or G or is absent
RXGXSEVVMDEYKFKXXXXXXXXXLYLISIPELRTPV

SEQ ID NO: 62345 - protein, 39 aa, Artificial Sequence; identical to SEQ ID NO: 2982
  GFR-binding peptide
  MOD_RES (1), (3), (36), (37): Xaa is C or S
  MOD_RES (14), (15), (16), (17), (18): Xaa is A or G
  MOD_RES (19), (20), (21), (22): Xaa is A or G or is absent

SEQ ID NO: 62346 - protein, 34 aa, Artificial Sequence; identical to SEQ ID NO: 2985
  GFR-binding peptide
  MOD_RES (2), (2): Xaa is C or S

SEQ ID NO: 62347 - protein, 35 aa, Artificial Sequence
  GFR-binding peptide
  MOD_RES (31), (32): Xaa is C or S
EVTMNYHYKLVVNKNEDKYLISIPSMKEPVXXPEP

SEQ ID NO: 62348 - protein, 36 aa, Artificial Sequence; identical to SEQ ID NO: 2988
  GFR-binding peptide
  MOD_RES (1), (32), (33): Xaa is C or S

SEQ ID NO: 62349 - protein, 36 aa, Artificial Sequence; identical to SEQ ID NO: 10446
  GFR-binding peptide
  MOD_RES (1), (35), (36): Xaa is C or S
  MOD_RES (13), (14), (15), (16), (17): Xaa is A or G
  MOD_RES (18), (19), (20), (21): Xaa is A or G or is absent

SEQ ID NO: 62350 - protein, 36 aa, Artificial Sequence; identical to SEQ ID NO: 56957
  GFR-binding peptide
  MOD_RES (2), (34), (35): Xaa is C or S

SEQ ID NO: 62351 - protein, 37 aa, Artificial Sequence; identical to SEQ ID NO: 2992
  GFR-binding peptide
  MOD_RES (2), (36), (37): Xaa is C or S
  MOD_RES (14), (15), (16), (17), (18): Xaa is A or G
  MOD_RES (19), (20), (21), (22): Xaa is A or G or is absent

SEQ ID NO: 62352 - protein, 34 aa, Artificial Sequence; identical to SEQ ID NO: 10448
  GFR-binding peptide
  MOD_RES (33), (34): Xaa is C or S
  MOD_RES (11), (12), (13), (14), (15): Xaa is A or G
  MOD_RES (16), (17), (18), (19): Xaa is A or G or is absent

SEQ ID NO: 62353 - protein, 36 aa, Artificial Sequence; identical to SEQ ID NO: 23992
  GFR-binding peptide
  MOD_RES (33), (34): Xaa is C or S

SEQ ID NO: 62354 - protein, 33 aa, Artificial Sequence; identical to SEQ ID NO: 2995
  GFR-binding peptide
  MOD_RES (1), (32), (33): Xaa is C or S

SEQ ID NO: 62355 - protein, 34 aa, Artificial Sequence
  GFR-binding peptide
  MOD_RES (31), (32): Xaa is C or S
EVTMNRHKRLVVNKNEDYYLISTASMKEPVXXPE

SEQ ID NO: 62356 - protein, 38 aa, Artificial Sequence; identical to SEQ ID NO: 2996
  GFR-binding peptide
  MOD_RES (33), (34): Xaa is C or S
  MOD_RES (11), (12), (13), (14), (15): Xaa is A or G
  MOD_RES (16), (17), (18), (19): Xaa is A or G or is absent

SEQ ID NO: 62357 - protein, 36 aa, Artificial Sequence
  GFR-binding peptide
  MOD_RES (1), (34), (35): Xaa is C or S
  MOD_RES (12), (13), (14), (15), (16): Xaa is A or G
  MOD_RES (17), (18), (19), (20): Xaa is A or G or is absent
XEEVIMYHYKLXXXXXXXXXKYLMSIPSTKVPAXXT

SEQ ID NO: 62358 - protein, 36 aa, Artificial Sequence; identical to SEQ ID NO: 32009
  GFR-binding peptide
  MOD_RES (2), (34), (35): Xaa is C or S

SEQ ID NO: 62359 - protein, 35 aa, Artificial Sequence; identical to SEQ ID NO: 32014
  GFR-binding peptide
  MOD_RES (31), (32): Xaa is C or S

SEQ ID NO: 62360 - protein, 37 aa, Artificial Sequence; identical to SEQ ID NO: 3002
  GFR-binding peptide
  MOD_RES (2), (34), (35): Xaa is C or S

SEQ ID NO: 62361 - protein, 39 aa, Artificial Sequence; identical to SEQ ID NO: 3003
  GFR-binding peptide
  MOD_RES (2), (34), (35): Xaa is C or S

SEQ ID NO: 62362 - protein, 35 aa, Artificial Sequence; identical to SEQ ID NO: 3004
  GFR-binding peptide
  MOD_RES (1), (34), (35): Xaa is C or S
  MOD_RES (12), (13), (14), (15), (16): Xaa is A or G
  MOD_RES (17), (18), (19), (20): Xaa is A or G or is absent

SEQ ID NO: 62363 - protein, 38 aa, Artificial Sequence; identical to SEQ ID NO: 56973
  GFR-binding peptide
  MOD_RES (2), (4), (38): Xaa is C or S
  MOD_RES (16), (17), (18), (19), (20): Xaa is A or G
  MOD_RES (21), (22), (23), (24): Xaa is A or G or is absent

SEQ ID NO: 62364 - protein, 36 aa, Artificial Sequence; identical to SEQ ID NO: 32025
  GFR-binding peptide
  MOD_RES (2), (34), (35): Xaa is C or S

SEQ ID NO: 62365 - protein, 36 aa, Artificial Sequence; identical to SEQ ID NO: 3006
  GFR-binding peptide
  MOD_RES (2), (4), (36): Xaa is C or S

SEQ ID NO: 62366 - protein, 39 aa, Artificial Sequence; identical to SEQ ID NO: 3007
  GFR-binding peptide
  MOD_RES (1), (3), (35), (36): Xaa is C or S

SEQ ID NO: 62367 - protein, 41 aa, Artificial Sequence; identical to SEQ ID NO: 24003
  GFR-binding peptide
  MOD_RES (2), (36): Xaa is C or S
  MOD_RES (14), (15), (16), (17), (18): Xaa is A or G
  MOD_RES (19), (20), (21), (22): Xaa is A or G or is absent

SEQ ID NO: 62368 - protein, 41 aa, Artificial Sequence; identical to SEQ ID NO: 24004
  GFR-binding peptide
  MOD_RES (2), (4), (38), (39): Xaa is C or S
  MOD_RES (16), (17), (18), (19), (20): Xaa is A or G
  MOD_RES (21), (22), (23), (24): Xaa is A or G or is absent

SEQ ID NO: 62369 - protein, 41 aa, Artificial Sequence; identical to SEQ ID NO: 3009
  GFR-binding peptide
  MOD_RES (1), (3), (37), (38): Xaa is C or S
  MOD_RES (15), (16), (17), (18), (19): Xaa is A or G
  MOD_RES (20), (21), (22), (23): Xaa is A or G or is absent

SEQ ID NO: 62370 - protein, 36 aa, Artificial Sequence
  GFR-binding peptide
  MOD_RES (1), (35), (36): Xaa is C or S
  MOD_RES (13), (14), (15), (16), (17): Xaa is A or G
  MOD_RES (18), (19), (20), (21): Xaa is A or G or is absent
XSEVTMNYHYKLXXXXXXXXXKYLISIPSMKEPVXX

SEQ ID NO: 62371 - protein, 34 aa, Artificial Sequence; identical to SEQ ID NO: 3010
  GFR-binding peptide
  MOD_RES (2), (2): Xaa is C or S

SEQ ID NO: 62372 - protein, 38 aa, Artificial Sequence; identical to SEQ ID NO: 24005
  GFR-binding peptide
  MOD_RES (1), (34), (35): Xaa is C or S
  MOD_RES (12), (13), (14), (15), (16): Xaa is A or G
  MOD_RES (17), (18), (19), (20): Xaa is A or G or is absent

SEQ ID NO: 62373 - protein, 33 aa, Artificial Sequence; identical to SEQ ID NO: 24006
  GFR-binding peptide
  MOD_RES (33), (33): Xaa is C or S
  MOD_RES (11), (12), (13), (14), (15): Xaa is A or G
  MOD_RES (16), (17), (18), (19): Xaa is A or G or is absent

SEQ ID NO: 62374 - protein, 41 aa, Artificial Sequence
  GFR-binding peptide
  MOD_RES (2), (4), (38), (39): Xaa is C or S
  MOD_RES (16), (17), (18), (19), (20): Xaa is A or G
  MOD_RES (21), (22), (23), (24): Xaa is A or G or is absent
RXGXSEVVMDEYKFKXXXXXXXXXLYLISIPELRTPVXXTP

SEQ ID NO: 62375 - protein, 40 aa, Artificial Sequence
  GFR-binding peptide
  MOD_RES (2), (4), (36), (37): Xaa is C or S
RXGXSEVVMDRHKRLVVNNASDYYLISTASLRTPVXXTPP

SEQ ID NO: 62376 - protein, 41 aa, Artificial Sequence; identical to SEQ ID NO: 32037
  GFR-binding peptide
  MOD_RES (1), (35): Xaa is C or S
  MOD_RES (13), (14), (15), (16), (17): Xaa is A or G
  MOD_RES (18), (19), (20), (21): Xaa is A or G or is absent

SEQ ID NO: 62377 - protein, 39 aa, Artificial Sequence; identical to SEQ ID NO: 32041
  GFR-binding peptide
  MOD_RES (1), (3), (35), (36): Xaa is C or S

SEQ ID NO: 62378 - protein, 35 aa, Artificial Sequence; identical to SEQ ID NO: 3016
  GFR-binding peptide
  MOD_RES (1), (32), (33): Xaa is C or S

SEQ ID NO: 62379 - protein, 34 aa, Artificial Sequence; identical to SEQ ID NO: 3017
  GFR-binding peptide
  MOD_RES (32), (33): Xaa is C or S

SEQ ID NO: 62380 - protein, 40 aa, Artificial Sequence
  GFR-binding peptide
  MOD_RES (2), (4), (35), (36): Xaa is C or S
SXKXSKVVMPIKGYVKPTRGVFYLINIPSLDQPVXXPSAS

SEQ ID NO: 62381 - protein, 36 aa, Artificial Sequence; identical to SEQ ID NO: 24014
  GFR-binding peptide
  MOD_RES (32), (33): Xaa is C or S

SEQ ID NO: 62382 - protein, 37 aa, Artificial Sequence; identical to SEQ ID NO: 3019
  GFR-binding peptide
  MOD_RES (33), (34): Xaa is C or S
  MOD_RES (11), (12), (13), (14), (15): Xaa is A or G
  MOD_RES (16), (17), (18), (19): Xaa is A or G or is absent

SEQ ID NO: 62383 - protein, 34 aa, Artificial Sequence; identical to SEQ ID NO: 24016
  GFR-binding peptide
  MOD_RES (2), (2): Xaa is C or S
  MOD_RES (13), (14), (15), (16), (17): Xaa is A or G
  MOD_RES (18), (19), (20), (21): Xaa is A or G or is absent

SEQ ID NO: 62384 - protein, 32 aa, Artificial Sequence; identical to SEQ ID NO: 24017
  GFR-binding peptide
  MOD_RES (31), (32): Xaa is C or S

SEQ ID NO: 62385 - protein, 35 aa, Artificial Sequence; identical to SEQ ID NO: 3021
  GFR-binding peptide
  MOD_RES (1), (34), (35): Xaa is C or S
  MOD_RES (12), (13), (14), (15), (16): Xaa is A or G
  MOD_RES (17), (18), (19), (20): Xaa is A or G or is absent

SEQ ID NO: 62386 - protein, 40 aa, Artificial Sequence
  GFR-binding peptide
  MOD_RES (2), (4), (38), (39): Xaa is C or S
  MOD_RES (16), (17), (18), (19), (20): Xaa is A or G
  MOD_RES (21), (22), (23), (24): Xaa is A or G or is absent
RXAXSEVTMNYHYKLXXXXXXXXXKYLISIPSMKEPVXXP

SEQ ID NO: 62387 - protein, 37 aa, Artificial Sequence; identical to SEQ ID NO: 3024
  GFR-binding peptide
  MOD_RES (32), (32): Xaa is C or S

SEQ ID NO: 62388 - protein, 36 aa, Artificial Sequence; identical to SEQ ID NO: 24020
  GFR-binding peptide
  MOD_RES (31), (32): Xaa is C or S

SEQ ID NO: 62389 - protein, 40 aa, Artificial Sequence; identical to SEQ ID NO: 3025
  GFR-binding peptide
  MOD_RES (2), (4), (37), (38): Xaa is C or S
  MOD_RES (15), (16), (17), (18), (19): Xaa is A or G
  MOD_RES (20), (21), (22), (23): Xaa is A or G or is absent

SEQ ID NO: 62390 - protein, 35 aa, Artificial Sequence; identical to SEQ ID NO: 3027
  GFR-binding peptide
  MOD_RES (34), (35): Xaa is C or S
  MOD_RES (12), (13), (14), (15), (16): Xaa is A or G
  MOD_RES (17), (18), (19), (20): Xaa is A or G or is absent

SEQ ID NO: 62391 - protein, 37 aa, Artificial Sequence; identical to SEQ ID NO: 24024
  GFR-binding peptide
  MOD_RES (33), (34): Xaa is C or S
  MOD_RES (11), (12), (13), (14), (15): Xaa is A or G
  MOD_RES (16), (17), (18), (19): Xaa is A or G or is absent

SEQ ID NO: 62392 - protein, 34 aa, Artificial Sequence; identical to SEQ ID NO: 32052
  GFR-binding peptide
  MOD_RES (1), (33), (34): Xaa is C or S

SEQ ID NO: 62393 - protein, 40 aa, Artificial Sequence; identical to SEQ ID NO: 32054
  GFR-binding peptide
  MOD_RES (1), (35), (36): Xaa is C or S
  MOD_RES (13), (14), (15), (16), (17): Xaa is A or G
  MOD_RES (18), (19), (20), (21): Xaa is A or G or is absent

SEQ ID NO: 62394 - protein, 34 aa, Artificial Sequence
  GFR-binding peptide
  MOD_RES (1), (1): Xaa is C or S
  MOD_RES (13), (14), (15), (16), (17): Xaa is A or G
  MOD_RES (18), (19), (20), (21): Xaa is A or G or is absent
XSEVTMNRHKRLXXXXXXXXXYYLISTASMKEPV

SEQ ID NO: 62395 - protein, 38 aa, Artificial Sequence; identical to SEQ ID NO: 3034
  GFR-binding peptide
  MOD_RES (35), (36): Xaa is C or S
  MOD_RES (13), (14), (15), (16), (17): Xaa is A or G
  MOD_RES (18), (19), (20), (21): Xaa is A or G or is absent

SEQ ID NO: 62396 - protein, 40 aa, Artificial Sequence; identical to SEQ ID NO: 32071
  GFR-binding peptide
  MOD_RES (2), (4), (36), (37): Xaa is C or S

SEQ ID NO: 62397 - protein, 32 aa, Artificial Sequence
  GFR-binding peptide
  MOD_RES (32), (32): Xaa is C or S
SEVTMNEYKFKVVNKNEDLYLISIPEMKEPVX

SEQ ID NO: 62398 - protein, 40 aa, Artificial Sequence
  GFR-binding peptide
  MOD_RES (2), (36), (37): Xaa is C or S
  MOD_RES (14), (15), (16), (17), (18): Xaa is A or G
  MOD_RES (19), (20), (21), (22): Xaa is A or G or is absent
GXRDVVMGYHYKLXXXXXXXXXKYLMSIPSMKTPTXXPGA

SEQ ID NO: 62399 - protein, 35 aa, Artificial Sequence; identical to SEQ ID NO: 24031
  GFR-binding peptide
  MOD_RES (2), (2): Xaa is C or S
  MOD_RES (14), (15), (16), (17), (18): Xaa is A or G
  MOD_RES (19), (20), (21), (22): Xaa is A or G or is absent

SEQ ID NO: 62400 - protein, 42 aa, Artificial Sequence; identical to SEQ ID NO: 24035
  GFR-binding peptide
  MOD_RES (2), (4), (37), (38): Xaa is C or S

SEQ ID NO: 62401 - protein, 35 aa, Artificial Sequence; identical to SEQ ID NO: 24036
  GFR-binding peptide
  MOD_RES (2), (4): Xaa is C or S

SEQ ID NO: 62402 - protein, 37 aa, Artificial Sequence
  GFR-binding peptide
  MOD_RES (34), (35): Xaa is C or S
  MOD_RES (12), (13), (14), (15), (16): Xaa is A or G
  MOD_RES (17), (18), (19), (20): Xaa is A or G or is absent
SEVTMNPIKGYXXXXXXXXXFYLINIPSMKEPVXXPE

SEQ ID NO: 62403 - protein, 42 aa, Artificial Sequence; identical to SEQ ID NO: 3037
  GFR-binding peptide
  MOD_RES (2), (4), (36), (37): Xaa is C or S

SEQ ID NO: 62404 - protein, 36 aa, Artificial Sequence; identical to SEQ ID NO: 3038
  GFR-binding peptide
  MOD_RES (1), (34), (35): Xaa is C or S
  MOD_RES (12), (13), (14), (15), (16): Xaa is A or G
  MOD_RES (17), (18), (19), (20): Xaa is A or G or is absent

SEQ ID NO: 62405 - protein, 33 aa, Artificial Sequence
  GFR-binding peptide
  MOD_RES (2), (2): Xaa is C or S
GXAEVVMDRHKRLVVNNAADYYLISTASLRAPV

SEQ ID NO: 62406 - protein, 37 aa, Artificial Sequence; identical to SEQ ID NO: 3044
  GFR-binding peptide
  MOD_RES (2), (33), (34): Xaa is C or S

SEQ ID NO: 62407 - protein, 34 aa, Artificial Sequence; identical to SEQ ID NO: 24041
  GFR-binding peptide
  MOD_RES (1), (32), (33): Xaa is C or S

SEQ ID NO: 62408 - protein, 44 aa, Artificial Sequence; identical to SEQ ID NO: 32079
  GFR-binding peptide
  MOD_RES (2), (4), (38), (39): Xaa is C or S
  MOD_RES (16), (17), (18), (19), (20): Xaa is A or G
  MOD_RES (21), (22), (23), (24): Xaa is A or G or is absent

SEQ ID NO: 62409 - protein, 35 aa, Artificial Sequence; identical to SEQ ID NO: 3047
  GFR-binding peptide
  MOD_RES (35), (35): Xaa is C or S
  MOD_RES (13), (14), (15), (16), (17): Xaa is A or G
  MOD_RES (18), (19), (20), (21): Xaa is A or G or is absent

SEQ ID NO: 62410 - protein, 33 aa, Artificial Sequence; identical to SEQ ID NO: 24045
  GFR-binding peptide
  MOD_RES (33), (33): Xaa is C or S
  MOD_RES (11), (12), (13), (14), (15): Xaa is A or G
  MOD_RES (16), (17), (18), (19): Xaa is A or G or is absent

SEQ ID NO: 62411 - protein, 32 aa, Artificial Sequence; identical to SEQ ID NO: 57023
  GFR-binding peptide
  MOD_RES (1), (32): Xaa is C or S

SEQ ID NO: 62412 - protein, 38 aa, Artificial Sequence
  GFR-binding peptide
  MOD_RES (34), (35): Xaa is C or S
  MOD_RES (12), (13), (14), (15), (16): Xaa is A or G
  MOD_RES (17), (18), (19), (20): Xaa is A or G or is absent
SEVTMNPIKGYXXXXXXXXXFYLINIPSMKEPVXXPEP

SEQ ID NO: 62413 - protein, 37 aa, Artificial Sequence; identical to SEQ ID NO: 24048
  GFR-binding peptide
  MOD_RES (2), (36), (37): Xaa is C or S
  MOD_RES (14), (15), (16), (17), (18): Xaa is A or G
  MOD_RES (19), (20), (21), (22): Xaa is A or G or is absent

SEQ ID NO: 62414 - protein, 38 aa, Artificial Sequence; identical to SEQ ID NO: 3054
  GFR-binding peptide
  MOD_RES (1), (3), (36), (37): Xaa is C or S
  MOD_RES (14), (15), (16), (17), (18): Xaa is A or G
  MOD_RES (19), (20), (21), (22): Xaa is A or G or is absent

SEQ ID NO: 62415 - protein, 35 aa, Artificial Sequence; identical to SEQ ID NO: 24056
  GFR-binding peptide
  MOD_RES (32), (33): Xaa is C or S

SEQ ID NO: 62416 - protein, 33 aa, Artificial Sequence; identical to SEQ ID NO: 3055
  GFR-binding peptide
  MOD_RES (32), (33): Xaa is C or S

SEQ ID NO: 62417 - protein, 37 aa, Artificial Sequence
  GFR-binding peptide
  MOD_RES (1), (3), (35), (36): Xaa is C or S
XAXSEVTMNYHYKLVVNKNEDKYLISIPSMKEPVXXP

SEQ ID NO: 62418 - protein, 33 aa, Artificial Sequence
  GFR-binding peptide
  MOD_RES (1), (32), (33): Xaa is C or S
XEEVIMRHKRLLLVRGNDYYLMSTASTKVPAXX

SEQ ID NO: 62419 - protein, 40 aa, Artificial Sequence; identical to SEQ ID NO: 3058
  GFR-binding peptide
  MOD_RES (2), (4), (38), (39): Xaa is C or S
  MOD_RES (16), (17), (18), (19), (20): Xaa is A or G
  MOD_RES (21), (22), (23), (24): Xaa is A or G or is absent

SEQ ID NO: 62420 - protein, 31 aa, Artificial Sequence; identical to SEQ ID NO: 32102
  GFR-binding peptide
  MOD_RES (31), (31): Xaa is C or S

SEQ ID NO: 62421 - protein, 36 aa, Artificial Sequence
  GFR-binding peptide
  MOD_RES (2), (4), (36): Xaa is C or S
RXAXSEVTMNEYKFKVVNKNEDLYLISIPEMKEPVX

SEQ ID NO: 62422 - protein, 36 aa, Artificial Sequence; identical to SEQ ID NO: 32105
  GFR-binding peptide
  MOD_RES (1), (35): Xaa is C or S
  MOD_RES (13), (14), (15), (16), (17): Xaa is A or G
  MOD_RES (18), (19), (20), (21): Xaa is A or G or is absent

SEQ ID NO: 62423 - protein, 32 aa, Artificial Sequence; identical to SEQ ID NO: 3061
  GFR-binding peptide
  MOD_RES (11), (12), (13), (14), (15): Xaa is A or G
  MOD_RES (16), (17), (18), (19): Xaa is A or G or is absent

SEQ ID NO: 62424 - protein, 34 aa, Artificial Sequence; identical to SEQ ID NO: 24067
  GFR-binding peptide
  MOD_RES (34), (34): Xaa is C or S
  MOD_RES (12), (13), (14), (15), (16): Xaa is A or G
  MOD_RES (17), (18), (19), (20): Xaa is A or G or is absent

SEQ ID NO: 62425 - protein, 35 aa, Artificial Sequence; identical to SEQ ID NO: 3064
  GFR-binding peptide
  MOD_RES (32), (33): Xaa is C or S

SEQ ID NO: 62426 - protein, 35 aa, Artificial Sequence; identical to SEQ ID NO: 57048
  GFR-binding peptide
  MOD_RES (2), (4), (35): Xaa is C or S

SEQ ID NO: 62427 - protein, 41 aa, Artificial Sequence
  GFR-binding peptide
  MOD_RES (1), (35), (36): Xaa is C or S
  MOD_RES (13), (14), (15), (16), (17): Xaa is A or G
  MOD_RES (18), (19), (20), (21): Xaa is A or G or is absent
XSEVVMDRHKRLXXXXXXXXXYYLISTASLRTPVXXTPPTS

SEQ ID NO: 62428 - protein, 40 aa, Artificial Sequence; identical to SEQ ID NO: 3065
  GFR-binding peptide
  MOD_RES (2), (34), (35): Xaa is C or S

SEQ ID NO: 62429 - protein, 41 aa, Artificial Sequence; identical to SEQ ID NO: 57050
  GFR-binding peptide
  MOD_RES (1), (3), (37), (38): Xaa is C or S
  MOD_RES (15), (16), (17), (18), (19): Xaa is A or G
  MOD_RES (20), (21), (22), (23): Xaa is A or G or is absent

SEQ ID NO: 62430 - protein, 42 aa, Artificial Sequence; identical to SEQ ID NO: 24072
  GFR-binding peptide
  MOD_RES (2), (4), (36), (37): Xaa is C or S

SEQ ID NO: 62431 - protein, 36 aa, Artificial Sequence; identical to SEQ ID NO: 3069
  GFR-binding peptide
  MOD_RES (1), (3): Xaa is C or S
  MOD_RES (15), (16), (17), (18), (19): Xaa is A or G
  MOD_RES (20), (21), (22), (23): Xaa is A or G or is absent

SEQ ID NO: 62432 - protein, 37 aa, Artificial Sequence
  GFR-binding peptide
  MOD_RES (1), (35), (36): Xaa is C or S
  MOD_RES (13), (14), (15), (16), (17): Xaa is A or G
  MOD_RES (18), (19), (20), (21): Xaa is A or G or is absent
XSEVVMDEYKFKXXXXXXXXXLYLISIPELRTPVXXT

SEQ ID NO: 62433 - protein, 36 aa, Artificial Sequence; identical to SEQ ID NO: 3070
  GFR-binding peptide
  MOD_RES (2), (34), (35): Xaa is C or S

SEQ ID NO: 62434 - protein, 36 aa, Artificial Sequence
  GFR-binding peptide
  MOD_RES (2), (4), (35), (36): Xaa is C or S
LXGXEEVIMEYKFKLLVRGNDLYLMSIPETKVPAXX

SEQ ID NO: 62435 - protein, 39 aa, Artificial Sequence; identical to SEQ ID NO: 3072
  GFR-binding peptide
  MOD_RES (1), (33), (34): Xaa is C or S

SEQ ID NO: 62436 - protein, 35 aa, Artificial Sequence; identical to SEQ ID NO: 3073
  GFR-binding peptide
  MOD_RES (2), (2): Xaa is C or S
  MOD_RES (14), (15), (16), (17), (18): Xaa is A or G
  MOD_RES (19), (20), (21), (22): Xaa is A or G or is absent

SEQ ID NO: 62437 - protein, 31 aa, Artificial Sequence; identical to SEQ ID NO: 3074
  GFR-binding peptide
  MOD_RES (31), (31): Xaa is C or S

SEQ ID NO: 62438 - protein, 40 aa, Artificial Sequence; identical to SEQ ID NO: 32119
  GFR-binding peptide
  MOD_RES (1), (35), (36): Xaa is C or S
  MOD_RES (13), (14), (15), (16), (17): Xaa is A or G
  MOD_RES (18), (19), (20), (21): Xaa is A or G or is absent

SEQ ID NO: 62439 - protein, 37 aa, Artificial Sequence; identical to SEQ ID NO: 10532
  GFR-binding peptide
  MOD_RES (34), (35): Xaa is C or S
  MOD_RES (12), (13), (14), (15), (16): Xaa is A or G
  MOD_RES (17), (18), (19), (20): Xaa is A or G or is absent

SEQ ID NO: 62440 - protein, 35 aa, Artificial Sequence
  GFR-binding peptide
  MOD_RES (2), (34), (35): Xaa is C or S
GXSEVVMDYHYKLVVNNASDKYLISIPSLRTPVXX

SEQ ID NO: 62441 - protein, 40 aa, Artificial Sequence; identical to SEQ ID NO: 3076
  GFR-binding peptide
  MOD_RES (1), (3), (36), (37): Xaa is C or S
  MOD_RES (14), (15), (16), (17), (18): Xaa is A or G
  MOD_RES (19), (20), (21), (22): Xaa is A or G or is absent

SEQ ID NO: 62442 - protein, 35 aa, Artificial Sequence
  GFR-binding peptide
  MOD_RES (31), (32): Xaa is C or S
EEVIMYHYKLLLVRGNDKYLMSIPSTKVPAXXTSP

SEQ ID NO: 62443 - protein, 38 aa, Artificial Sequence; identical to SEQ ID NO: 32128
  GFR-binding peptide
  MOD_RES (2), (4), (37), (38): Xaa is C or S

SEQ ID NO: 62444 - protein, 39 aa, Artificial Sequence; identical to SEQ ID NO: 24083
  GFR-binding peptide
  MOD_RES (33), (34): Xaa is C or S
  MOD_RES (11), (12), (13), (14), (15): Xaa is A or G
  MOD_RES (16), (17), (18), (19): Xaa is A or G or is absent

SEQ ID NO: 62445 - protein, 37 aa, Artificial Sequence
  GFR-binding peptide
  MOD_RES (2), (4), (37): Xaa is C or S
  MOD_RES (15), (16), (17), (18), (19): Xaa is A or G
  MOD_RES (20), (21), (22), (23): Xaa is A or G or is absent
SXKXSRVIMPIKGYXXXXXXXXXFYLINIPSLAQPVX

SEQ ID NO: 62446 - protein, 40 aa, Artificial Sequence; identical to SEQ ID NO: 3083
  GFR-binding peptide
  MOD_RES (2), (4), (38), (39): Xaa is C or S
  MOD_RES (16), (17), (18), (19), (20): Xaa is A or G
  MOD_RES (21), (22), (23), (24): Xaa is A or G or is absent

SEQ ID NO: 62447 - protein, 38 aa, Artificial Sequence; identical to SEQ ID NO: 24088
  GFR-binding peptide
  MOD_RES (34), (35): Xaa is C or S
  MOD_RES (12), (13), (14), (15), (16): Xaa is A or G
  MOD_RES (17), (18), (19), (20): Xaa is A or G or is absent

SEQ ID NO: 62448 - protein, 38 aa, Artificial Sequence; identical to SEQ ID NO: 3088
  GFR-binding peptide
  MOD_RES (1), (32), (33): Xaa is C or S

SEQ ID NO: 62449 - protein, 32 aa, Artificial Sequence
  GFR-binding peptide
  MOD_RES (31), (32): Xaa is C or S
EEVIMRHKRLLLVRGNDYYLMSTASTKVPAXX

SEQ ID NO: 62450 - protein, 38 aa, Artificial Sequence; identical to SEQ ID NO: 3090
  GFR-binding peptide
  MOD_RES (2), (4), (38): Xaa is C or S
  MOD_RES (16), (17), (18), (19), (20): Xaa is A or G
  MOD_RES (21), (22), (23), (24): Xaa is A or G or is absent

SEQ ID NO: 62451 - protein, 35 aa, Artificial Sequence
  GFR-binding peptide
  MOD_RES (31), (32): Xaa is C or S
EVTMNPIKGYVVNKNEDFYLINIPSMKEPVXXPEP

SEQ ID NO: 62452 - protein, 36 aa, Artificial Sequence
  GFR-binding peptide
  MOD_RES (2), (4), (36): Xaa is C or S
SXGXRDVVMGRHKRLIIQQKDNYYLMSTASMKTPTX

SEQ ID NO: 62453 - protein, 35 aa, Artificial Sequence; identical to SEQ ID NO: 32146
  GFR-binding peptide
  MOD_RES (33), (34): Xaa is C or S
  MOD_RES (11), (12), (13), (14), (15): Xaa is A or G
  MOD_RES (16), (17), (18), (19): Xaa is A or G or is absent

SEQ ID NO: 62454 - protein, 32 aa, Artificial Sequence; identical to SEQ ID NO: 3097
  GFR-binding peptide
  MOD_RES (11), (12), (13), (14), (15): Xaa is A or G
  MOD_RES (16), (17), (18), (19): Xaa is A or G or is absent

SEQ ID NO: 62455 - protein, 40 aa, Artificial Sequence; identical to SEQ ID NO: 24097
  GFR-binding peptide
  MOD_RES (1), (34), (35): Xaa is C or S

SEQ ID NO: 62456 - protein, 39 aa, Artificial Sequence; identical to SEQ ID NO: 3098
  GFR-binding peptide
  MOD_RES (2), (35), (36): Xaa is C or S
  MOD_RES (13), (14), (15), (16), (17): Xaa is A or G
  MOD_RES (18), (19), (20), (21): Xaa is A or G or is absent

SEQ ID NO: 62457 - protein, 42 aa, Artificial Sequence; identical to SEQ ID NO: 57078
  GFR-binding peptide
  MOD_RES (2), (4), (37), (38): Xaa is C or S
  MOD_RES (15), (16), (17), (18), (19): Xaa is A or G
  MOD_RES (20), (21), (22), (23): Xaa is A or G or is absent

SEQ ID NO: 62458 - protein, 39 aa, Artificial Sequence; identical to SEQ ID NO: 24099
  GFR-binding peptide
  MOD_RES (2), (4), (36), (37): Xaa is C or S

SEQ ID NO: 62459 - protein, 38 aa, Artificial Sequence; identical to SEQ ID NO: 24100
  GFR-binding peptide
  MOD_RES (2), (37), (38): Xaa is C or S
  MOD_RES (15), (16), (17), (18), (19): Xaa is A or G
  MOD_RES (20), (21), (22), (23): Xaa is A or G or is absent

SEQ ID NO: 62460 - protein, 37 aa, Artificial Sequence; identical to SEQ ID NO: 3101
  GFR-binding peptide
  MOD_RES (1), (3), (35), (36): Xaa is C or S

SEQ ID NO: 62461 - protein, 38 aa, Artificial Sequence; identical to SEQ ID NO: 24102
  GFR-binding peptide
  MOD_RES (2), (35), (36): Xaa is C or S
  MOD_RES (13), (14), (15), (16), (17): Xaa is A or G
  MOD_RES (18), (19), (20), (21): Xaa is A or G or is absent

SEQ ID NO: 62462 - protein, 39 aa, Artificial Sequence
  GFR-binding peptide
  MOD_RES (1), (34), (35): Xaa is C or S
  MOD_RES (12), (13), (14), (15), (16): Xaa is A or G
  MOD_RES (17), (18), (19), (20): Xaa is A or G or is absent
XSRVIMPIKGYXXXXXXXXXFYLINIPSLAQPVXXPAAS

SEQ ID NO: 62463 - protein, 41 aa, Artificial Sequence; identical to SEQ ID NO: 32154
  GFR-binding peptide
  MOD_RES (1), (35), (36): Xaa is C or S
  MOD_RES (13), (14), (15), (16), (17): Xaa is A or G
  MOD_RES (18), (19), (20), (21): Xaa is A or G or is absent

SEQ ID NO: 62464 - protein, 42 aa, Artificial Sequence; identical to SEQ ID NO: 32155
  GFR-binding peptide
  MOD_RES (1), (3), (37), (38): Xaa is C or S
  MOD_RES (15), (16), (17), (18), (19): Xaa is A or G
  MOD_RES (20), (21), (22), (23): Xaa is A or G or is absent

SEQ ID NO: 62465 - protein, 40 aa, Artificial Sequence; identical to SEQ ID NO: 3109
  GFR-binding peptide
  MOD_RES (1), (34), (35): Xaa is C or S
  MOD_RES (12), (13), (14), (15), (16): Xaa is A or G
  MOD_RES (17), (18), (19), (20): Xaa is A or G or is absent

SEQ ID NO: 62466 - protein, 35 aa, Artificial Sequence; identical to SEQ ID NO: 3112
  GFR-binding peptide
  MOD_RES (1), (3): Xaa is C or S
  MOD_RES (14), (15), (16), (17), (18): Xaa is A or G
  MOD_RES (19), (20), (21), (22): Xaa is A or G or is absent

SEQ ID NO: 62467 - protein, 40 aa, Artificial Sequence
  GFR-binding peptide
  MOD_RES (2), (35), (36): Xaa is C or S
  MOD_RES (13), (14), (15), (16), (17): Xaa is A or G
  MOD_RES (18), (19), (20), (21): Xaa is A or G or is absent
KXSKVVMPIKGYXXXXXXXXXFYLINIPSLDQPVXXPSAS

SEQ ID NO: 62468 - protein, 30 aa, Artificial Sequence; identical to SEQ ID NO: 3113
  GFR-binding peptide

SEQ ID NO: 62469 - protein, 41 aa, Artificial Sequence; identical to SEQ ID NO: 3116
  GFR-binding peptide
  MOD_RES (2), (36), (37): Xaa is C or S
  MOD_RES (14), (15), (16), (17), (18): Xaa is A or G
  MOD_RES (19), (20), (21), (22): Xaa is A or G or is absent

SEQ ID NO: 62470 - protein, 34 aa, Artificial Sequence; identical to SEQ ID NO: 3119
  GFR-binding peptide
  MOD_RES (31), (32): Xaa is C or S

SEQ ID NO: 62471 - protein, 37 aa, Artificial Sequence; identical to SEQ ID NO: 24116
  GFR-binding peptide
  MOD_RES (1), (33), (34): Xaa is C or S

SEQ ID NO: 62472 - protein, 33 aa, Artificial Sequence; identical to SEQ ID NO: 32164
  GFR-binding peptide
  MOD_RES (1), (1): Xaa is C or S

SEQ ID NO: 62473 - protein, 34 aa, Artificial Sequence; identical to SEQ ID NO: 3122
  GFR-binding peptide
  MOD_RES (32), (32): Xaa is C or S

SEQ ID NO: 62474 - protein, 37 aa, Artificial Sequence; identical to SEQ ID NO: 3124
  GFR-binding peptide
  MOD_RES (2), (4), (37): Xaa is C or S
  MOD_RES (15), (16), (17), (18), (19): Xaa is A or G
  MOD_RES (20), (21), (22), (23): Xaa is A or G or is absent

SEQ ID NO: 62475 - protein, 37 aa, Artificial Sequence; identical to SEQ ID NO: 24121
  GFR-binding peptide
  MOD_RES (2), (4), (36), (37): Xaa is C or S

SEQ ID NO: 62476 - protein, 43 aa, Artificial Sequence; identical to SEQ ID NO: 24123
  GFR-binding peptide
  MOD_RES (1), (3), (37), (38): Xaa is C or S
  MOD_RES (15), (16), (17), (18), (19): Xaa is A or G
  MOD_RES (20), (21), (22), (23): Xaa is A or G or is absent

SEQ ID NO: 62477 - protein, 41 aa, Artificial Sequence; identical to SEQ ID NO: 3127
  GFR-binding peptide
  MOD_RES (2), (36): Xaa is C or S
  MOD_RES (14), (15), (16), (17), (18): Xaa is A or G
  MOD_RES (19), (20), (21), (22): Xaa is A or G or is absent

SEQ ID NO: 62478 - protein, 40 aa, Artificial Sequence; identical to SEQ ID NO: 3130
  GFR-binding peptide
  MOD_RES (1), (3), (36), (37): Xaa is C or S
  MOD_RES (14), (15), (16), (17), (18): Xaa is A or G
  MOD_RES (19), (20), (21), (22): Xaa is A or G or is absent

SEQ ID NO: 62479 - protein, 37 aa, Artificial Sequence; identical to SEQ ID NO: 3131
  GFR-binding peptide
  MOD_RES (2), (34), (35): Xaa is C or S

SEQ ID NO: 62480 - protein, 37 aa, Artificial Sequence
  GFR-binding peptide
  MOD_RES (33), (34): Xaa is C or S
  MOD_RES (11), (12), (13), (14), (15): Xaa is A or G
  MOD_RES (16), (17), (18), (19): Xaa is A or G or is absent
SRVIMPIKGYXXXXXXXXXFYLINIPSLAQPVXXPAA

SEQ ID NO: 62481 - protein, 34 aa, Artificial Sequence; identical to SEQ ID NO: 32170
  GFR-binding peptide
  MOD_RES (2), (34): Xaa is C or S

SEQ ID NO: 62482 - protein, 38 aa, Artificial Sequence; identical to SEQ ID NO: 3140
  GFR-binding peptide
  MOD_RES (2), (33), (34): Xaa is C or S

SEQ ID NO: 62483 - protein, 35 aa, Artificial Sequence; identical to SEQ ID NO: 32173
  GFR-binding peptide
  MOD_RES (2), (34), (35): Xaa is C or S

SEQ ID NO: 62484 - protein, 34 aa, Artificial Sequence; identical to SEQ ID NO: 24138
  GFR-binding peptide
  MOD_RES (1), (3): Xaa is C or S

SEQ ID NO: 62485 - protein, 37 aa, Artificial Sequence; identical to SEQ ID NO: 32176
  GFR-binding peptide
  MOD_RES (1), (33), (34): Xaa is C or S

SEQ ID NO: 62486 - protein, 33 aa, Artificial Sequence
  GFR-binding peptide
  MOD_RES (33), (33): Xaa is C or S
  MOD_RES (11), (12), (13), (14), (15): Xaa is A or G
  MOD_RES (16), (17), (18), (19): Xaa is A or G or is absent
EEVIMRHKRLXXXXXXXXXYYLMSTASTKVPAX

SEQ ID NO: 62487 - protein, 37 aa, Artificial Sequence
  GFR-binding peptide
  MOD_RES (1), (3), (35), (36): Xaa is C or S
XGXESVAMGRHKRLYTVVGKDYYLISTASLKTPVXXA

SEQ ID NO: 62488 - protein, 33 aa, Artificial Sequence; identical to SEQ ID NO: 3148
  GFR-binding peptide
  MOD_RES (1), (3): Xaa is C or S

SEQ ID NO: 62489 - protein, 35 aa, Artificial Sequence
  GFR-binding peptide
  MOD_RES (2), (34), (35): Xaa is C or S
AXSEVTMNRHKRLVVNKNEDYYLISTASMKEPVXX

SEQ ID NO: 62490 - protein, 42 aa, Artificial Sequence
  GFR-binding peptide
  MOD_RES (1), (3), (36), (37): Xaa is C or S
  MOD_RES (14), (15), (16), (17), (18): Xaa is A or G
  MOD_RES (19), (20), (21), (22): Xaa is A or G or is absent
XGXEEVIMYHYKLXXXXXXXXXKYLMSIPSTKVPAXXTSPVR

SEQ ID NO: 62491 - protein, 31 aa, Artificial Sequence; identical to SEQ ID NO: 3149
  GFR-binding peptide
  MOD_RES (31), (31): Xaa is C or S

SEQ ID NO: 62492 - protein, 35 aa, Artificial Sequence
  GFR-binding peptide
  MOD_RES (2), (4): Xaa is C or S
RXGXSEVVMDYHYKLVVNNASDKYLISIPSLRTPV

SEQ ID NO: 62493 - protein, 33 aa, Artificial Sequence; identical to SEQ ID NO: 24144
  GFR-binding peptide
  MOD_RES (2), (2): Xaa is C or S

SEQ ID NO: 62494 - protein, 36 aa, Artificial Sequence
  GFR-binding peptide
  MOD_RES (33), (34): Xaa is C or S
  MOD_RES (11), (12), (13), (14), (15): Xaa is A or G
  MOD_RES (16), (17), (18), (19): Xaa is A or G or is absent
EVTMNRYKKLXXXXXXXXXFYLISIANMKEPVXXPE

SEQ ID NO: 62495 - protein, 38 aa, Artificial Sequence; identical to SEQ ID NO: 3153
  GFR-binding peptide
  MOD_RES (2), (34), (35): Xaa is C or S

SEQ ID NO: 62496 - protein, 40 aa, Artificial Sequence; identical to SEQ ID NO: 24149
  GFR-binding peptide
  MOD_RES (2), (36), (37): Xaa is C or S
  MOD_RES (14), (15), (16), (17), (18): Xaa is A or G
  MOD_RES (19), (20), (21), (22): Xaa is A or G or is absent

SEQ ID NO: 62497 - protein, 41 aa, Artificial Sequence; identical to SEQ ID NO: 32196
  GFR-binding peptide
  MOD_RES (1), (35), (36): Xaa is C or S
  MOD_RES (13), (14), (15), (16), (17): Xaa is A or G
  MOD_RES (18), (19), (20), (21): Xaa is A or G or is absent

SEQ ID NO: 62498 - protein, 34 aa, Artificial Sequence; identical to SEQ ID NO: 3165
  GFR-binding peptide
  MOD_RES (1), (3), (34): Xaa is C or S

SEQ ID NO: 62499 - protein, 37 aa, Artificial Sequence; identical to SEQ ID NO: 3167
  GFR-binding peptide
  MOD_RES (2), (34), (35): Xaa is C or S

SEQ ID NO: 62500 - protein, 38 aa, Artificial Sequence; identical to SEQ ID NO: 24160
  GFR-binding peptide
  MOD_RES (2), (36), (37): Xaa is C or S
  MOD_RES (14), (15), (16), (17), (18): Xaa is A or G
  MOD_RES (19), (20), (21), (22): Xaa is A or G or is absent

SEQ ID NO: 62501 - protein, 35 aa, Artificial Sequence
  GFR-binding peptide
  MOD_RES (31), (32): Xaa is C or S
EVVMDYHYKLVVNNASDKYLISIPSLRTPVXXTPP

SEQ ID NO: 62502 - protein, 36 aa, Artificial Sequence; identical to SEQ ID NO: 32205
  GFR-binding peptide
  MOD_RES (1), (32), (33): Xaa is C or S

SEQ ID NO: 62503 - protein, 36 aa, Artificial Sequence
  GFR-binding peptide
  MOD_RES (32), (33): Xaa is C or S
ESVAMGRHKRLYTVVGKDYYLISTASLKTPVXXAKS

SEQ ID NO: 62504 - protein, 35 aa, Artificial Sequence; identical to SEQ ID NO: 32206
  GFR-binding peptide
  MOD_RES (1), (33), (34): Xaa is C or S

SEQ ID NO: 62505 - protein, 33 aa, Artificial Sequence
  GFR-binding peptide
  MOD_RES (1), (32), (33): Xaa is C or S
XEEVIMYHYKLLLVRGNDKYLMSIPSTKVPAXX

SEQ ID NO: 62506 - protein, 31 aa, Artificial Sequence; identical to SEQ ID NO: 32208
  GFR-binding peptide
  MOD_RES (31), (31): Xaa is C or S

SEQ ID NO: 62507 - protein, 38 aa, Artificial Sequence; identical to SEQ ID NO: 3168
  GFR-binding peptide
  MOD_RES (33), (34): Xaa is C or S
  MOD_RES (11), (12), (13), (14), (15): Xaa is A or G
  MOD_RES (16), (17), (18), (19): Xaa is A or G or is absent

SEQ ID NO: 62508 - protein, 33 aa, Artificial Sequence; identical to SEQ ID NO: 32211
  GFR-binding peptide
  MOD_RES (1), (33): Xaa is C or S

SEQ ID NO: 62509 - protein, 37 aa, Artificial Sequence; identical to SEQ ID NO: 24169
  GFR-binding peptide
  MOD_RES (2), (33), (34): Xaa is C or S

SEQ ID NO: 62510 - protein, 37 aa, Artificial Sequence
  GFR-binding peptide
  MOD_RES (2), (36), (37): Xaa is C or S
  MOD_RES (14), (15), (16), (17), (18): Xaa is A or G
  MOD_RES (19), (20), (21), (22): Xaa is A or G or is absent
GXSEVVMDYHYKLXXXXXXXXXKYLISIPSLRTPVXX

SEQ ID NO: 62511 - protein, 34 aa, Artificial Sequence; identical to SEQ ID NO: 32212
  GFR-binding peptide
  MOD_RES (34), (34): Xaa is C or S
  MOD_RES (12), (13), (14), (15), (16): Xaa is A or G
  MOD_RES (17), (18), (19), (20): Xaa is A or G or is absent

SEQ ID NO: 62512 - protein, 38 aa, Artificial Sequence; identical to SEQ ID NO: 3176
  GFR-binding peptide
  MOD_RES (2), (4), (35), (36): Xaa is C or S

SEQ ID NO: 62513 - protein, 34 aa, Artificial Sequence; identical to SEQ ID NO: 24171
  GFR-binding peptide
  MOD_RES (1), (33), (34): Xaa is C or S

SEQ ID NO: 62514 - protein, 34 aa, Artificial Sequence; identical to SEQ ID NO: 3178
  GFR-binding peptide
  MOD_RES (1), (34): Xaa is C or S
  MOD_RES (12), (13), (14), (15), (16): Xaa is A or G
  MOD_RES (17), (18), (19), (20): Xaa is A or G or is absent

SEQ ID NO: 62515 - protein, 32 aa, Artificial Sequence
  GFR-binding peptide
  MOD_RES (32), (32): Xaa is C or S
AEVVMDRHKRLVVNNAADYYLISTASLRAPVX

SEQ ID NO: 62516 - protein, 34 aa, Artificial Sequence; identical to SEQ ID NO: 3180
  GFR-binding peptide
  MOD_RES (2), (34): Xaa is C or S

SEQ ID NO: 62517 - protein, 35 aa, Artificial Sequence
  GFR-binding peptide
  MOD_RES (1), (35): Xaa is C or S
  MOD_RES (13), (14), (15), (16), (17): Xaa is A or G
  MOD_RES (18), (19), (20), (21): Xaa is A or G or is absent
XSEVTMNRHKRLXXXXXXXXXYYLISTASMKEPVX

SEQ ID NO: 62518 - protein, 35 aa, Artificial Sequence; identical to SEQ ID NO: 32220
  GFR-binding peptide
  MOD_RES (2), (4): Xaa is C or S

SEQ ID NO: 62519 - protein, 34 aa, Artificial Sequence; identical to SEQ ID NO: 24177
  GFR-binding peptide
  MOD_RES (2), (34): Xaa is C or S

SEQ ID NO: 62520 - protein, 34 aa, Artificial Sequence; identical to SEQ ID NO: 3184
  GFR-binding peptide
  MOD_RES (1), (1): Xaa is C or S
  MOD_RES (13), (14), (15), (16), (17): Xaa is A or G
  MOD_RES (18), (19), (20), (21): Xaa is A or G or is absent

SEQ ID NO: 62521 - protein, 36 aa, Artificial Sequence; identical to SEQ ID NO: 3187
  GFR-binding peptide
  MOD_RES (2), (36): Xaa is C or S
  MOD_RES (14), (15), (16), (17), (18): Xaa is A or G
  MOD_RES (19), (20), (21), (22): Xaa is A or G or is absent

SEQ ID NO: 62522 - protein, 34 aa, Artificial Sequence
  GFR-binding peptide
  MOD_RES (31), (32): Xaa is C or S
EVVMDRHKRLVVNNASDYYLISTASLRTPVXXTP

SEQ ID NO: 62523 - protein, 36 aa, Artificial Sequence; identical to SEQ ID NO: 3188
  GFR-binding peptide
  MOD_RES (34), (35): Xaa is C or S
  MOD_RES (12), (13), (14), (15), (16): Xaa is A or G
  MOD_RES (17), (18), (19), (20): Xaa is A or G or is absent

SEQ ID NO: 62524 - protein, 36 aa, Artificial Sequence; identical to SEQ ID NO: 3189
  GFR-binding peptide
  MOD_RES (1), (3), (35), (36): Xaa is C or S

SEQ ID NO: 62525 - protein, 42 aa, Artificial Sequence; identical to SEQ ID NO: 3190
  GFR-binding peptide
  MOD_RES (2), (4), (38), (39): Xaa is C or S
  MOD_RES (16), (17), (18), (19), (20): Xaa is A or G
  MOD_RES (21), (22), (23), (24): Xaa is A or G or is absent

SEQ ID NO: 62526 - protein, 38 aa, Artificial Sequence
  GFR-binding peptide
  MOD_RES (34), (35): Xaa is C or S
  MOD_RES (12), (13), (14), (15), (16): Xaa is A or G
  MOD_RES (17), (18), (19), (20): Xaa is A or G or is absent
SEVTMNRHKRLXXXXXXXXXYYLISTASMKEPVXXPEP

SEQ ID NO: 62527 - protein, 36 aa, Artificial Sequence
  GFR-binding peptide
  MOD_RES (2), (36): Xaa is C or S
  MOD_RES (14), (15), (16), (17), (18): Xaa is A or G
  MOD_RES (19), (20), (21), (22): Xaa is A or G or is absent
GXESVAMGRHKRLXXXXXXXXXYYLISTASLKTPVX

SEQ ID NO: 62528 - protein, 39 aa, Artificial Sequence; identical to SEQ ID NO: 3191
  GFR-binding peptide
  MOD_RES (34), (34): Xaa is C or S
  MOD_RES (12), (13), (14), (15), (16): Xaa is A or G
  MOD_RES (17), (18), (19), (20): Xaa is A or G or is absent

SEQ ID NO: 62529 - protein, 38 aa, Artificial Sequence
  GFR-binding peptide
  MOD_RES (2), (36), (37): Xaa is C or S
  MOD_RES (14), (15), (16), (17), (18): Xaa is A or G
  MOD_RES (19), (20), (21), (22): Xaa is A or G or is absent
GXSEVVMDYHYKLXXXXXXXXXKYLISIPSLRTPVXXT

SEQ ID NO: 62530 - protein, 41 aa, Artificial Sequence; identical to SEQ ID NO: 3195
  GFR-binding peptide
  MOD_RES (1), (3), (36), (37): Xaa is C or S
  MOD_RES (14), (15), (16), (17), (18): Xaa is A or G
  MOD_RES (19), (20), (21), (22): Xaa is A or G or is absent

SEQ ID NO: 62531 - protein, 34 aa, Artificial Sequence; identical to SEQ ID NO: 24185
  GFR-binding peptide
  MOD_RES (1), (3): Xaa is C or S

SEQ ID NO: 62532 - protein, 37 aa, Artificial Sequence; identical to SEQ ID NO: 3198
  GFR-binding peptide
  MOD_RES (1), (3), (35), (36): Xaa is C or S

SEQ ID NO: 62533 - protein, 34 aa, Artificial Sequence; identical to SEQ ID NO: 24187
  GFR-binding peptide
  MOD_RES (1), (3): Xaa is C or S

SEQ ID NO: 62534 - protein, 38 aa, Artificial Sequence; identical to SEQ ID NO: 3199
  GFR-binding peptide
  MOD_RES (2), (37), (38): Xaa is C or S
  MOD_RES (15), (16), (17), (18), (19): Xaa is A or G
  MOD_RES (20), (21), (22), (23): Xaa is A or G or is absent

SEQ ID NO: 62535 - protein, 38 aa, Artificial Sequence; identical to SEQ ID NO: 32237
  GFR-binding peptide
  MOD_RES (1), (35), (36): Xaa is C or S
  MOD_RES (13), (14), (15), (16), (17): Xaa is A or G
  MOD_RES (18), (19), (20), (21): Xaa is A or G or is absent

SEQ ID NO: 62536 - protein, 32 aa, Artificial Sequence; identical to SEQ ID NO: 24194
  GFR-binding peptide
  MOD_RES (31), (32): Xaa is C or S

SEQ ID NO: 62537 - protein, 40 aa, Artificial Sequence; identical to SEQ ID NO: 3205
  GFR-binding peptide
  MOD_RES (2), (4), (36), (37): Xaa is C or S

SEQ ID NO: 62538 - protein, 33 aa, Artificial Sequence; identical to SEQ ID NO: 3206
  GFR-binding peptide
  MOD_RES (2), (33): Xaa is C or S

SEQ ID NO: 62539 - protein, 38 aa, Artificial Sequence
  GFR-binding peptide
  MOD_RES (1), (35), (36): Xaa is C or S
  MOD_RES (13), (14), (15), (16), (17): Xaa is A or G
  MOD_RES (18), (19), (20), (21): Xaa is A or G or is absent
XRDVVMGYHYKLXXXXXXXXXKYLMSIPSMKTPTXXPG

SEQ ID NO: 62540 - protein, 41 aa, Artificial Sequence; identical to SEQ ID NO: 24204
  GFR-binding peptide
  MOD_RES (2), (4), (38), (39): Xaa is C or S
  MOD_RES (16), (17), (18), (19), (20): Xaa is A or G
  MOD_RES (21), (22), (23), (24): Xaa is A or G or is absent

SEQ ID NO: 62541 - protein, 37 aa, Artificial Sequence
  GFR-binding peptide
  MOD_RES (32), (33): Xaa is C or S
ESVAMGRHKRLYTVVGKDYYLISTASLKTPVXXAKSA

SEQ ID NO: 62542 - protein, 31 aa, Artificial Sequence
  GFR-binding peptide
SEVTMNPIKGYVVNKNEDFYLINIPSMKEPV

SEQ ID NO: 62543 - protein, 37 aa, Artificial Sequence
  GFR-binding peptide
  MOD_RES (33), (34): Xaa is C or S
  MOD_RES (11), (12), (13), (14), (15): Xaa is A or G
  MOD_RES (16), (17), (18), (19): Xaa is A or G or is absent
SVAMGRHKRLXXXXXXXXXYYLISTASLKTPVXXAKS

SEQ ID NO: 62544 - protein, 36 aa, Artificial Sequence
  GFR-binding peptide
  MOD_RES (1), (3), (35), (36): Xaa is C or S
XGXRDVVMGEYKFKIIQQKDNLYLMSIPEMKTPTXX

SEQ ID NO: 62545 - protein, 43 aa, Artificial Sequence; identical to SEQ ID NO: 3214
  GFR-binding peptide
  MOD_RES (2), (4), (37), (38): Xaa is C or S
  MOD_RES (15), (16), (17), (18), (19): Xaa is A or G
  MOD_RES (20), (21), (22), (23): Xaa is A or G or is absent

SEQ ID NO: 62546 - protein, 39 aa, Artificial Sequence; identical to SEQ ID NO: 3215
  GFR-binding peptide
  MOD_RES (2), (34), (35): Xaa is C or S

SEQ ID NO: 62547 - protein, 36 aa, Artificial Sequence
  GFR-binding peptide
  MOD_RES (1), (3): Xaa is C or S
  MOD_RES (15), (16), (17), (18), (19): Xaa is A or G
  MOD_RES (20), (21), (22), (23): Xaa is A or G or is absent
XGXSEVVMDRHKRLXXXXXXXXXYYLISTASLRTPV

SEQ ID NO: 62548 - protein, 39 aa, Artificial Sequence; identical to SEQ ID NO: 10657
  GFR-binding peptide
  MOD_RES (33), (34): Xaa is C or S
  MOD_RES (11), (12), (13), (14), (15): Xaa is A or G
  MOD_RES (16), (17), (18), (19): Xaa is A or G or is absent

SEQ ID NO: 62549 - protein, 37 aa, Artificial Sequence; identical to SEQ ID NO: 3221
  GFR-binding peptide
  MOD_RES (2), (4), (36), (37): Xaa is C or S

SEQ ID NO: 62550 - protein, 33 aa, Artificial Sequence
  GFR-binding peptide
  MOD_RES (1), (33): Xaa is C or S
XSEVTMNRYKKLVVNKNEDFYLISIANMKEPVX

SEQ ID NO: 62551 - protein, 39 aa, Artificial Sequence; identical to SEQ ID NO: 3225
  GFR-binding peptide
  MOD_RES (2), (35), (36): Xaa is C or S
  MOD_RES (13), (14), (15), (16), (17): Xaa is A or G
  MOD_RES (18), (19), (20), (21): Xaa is A or G or is absent

SEQ ID NO: 62552 - protein, 35 aa, Artificial Sequence; identical to SEQ ID NO: 3226
  GFR-binding peptide
  MOD_RES (2), (2): Xaa is C or S
  MOD_RES (14), (15), (16), (17), (18): Xaa is A or G
  MOD_RES (19), (20), (21), (22): Xaa is A or G or is absent

SEQ ID NO: 62553 - protein, 34 aa, Artificial Sequence; identical to SEQ ID NO: 24221
  GFR-binding peptide
  MOD_RES (1), (34): Xaa is C or S

SEQ ID NO: 62554 - protein, 41 aa, Artificial Sequence; identical to SEQ ID NO: 3227
  GFR-binding peptide
  MOD_RES (2), (4), (35), (36): Xaa is C or S

SEQ ID NO: 62555 - protein, 34 aa, Artificial Sequence
  GFR-binding peptide
  MOD_RES (1), (33), (34): Xaa is C or S
XSEVTMNRYKKLVVNKNEDFYLISIANMKEPVXX

SEQ ID NO: 62556 - protein, 36 aa, Artificial Sequence; identical to SEQ ID NO: 3228
  GFR-binding peptide
  MOD_RES (2), (35), (36): Xaa is C or S

SEQ ID NO: 62557 - protein, 36 aa, Artificial Sequence
  GFR-binding peptide
  MOD_RES (33), (34): Xaa is C or S
  MOD_RES (11), (12), (13), (14), (15): Xaa is A or G
  MOD_RES (16), (17), (18), (19): Xaa is A or G or is absent
SRVIMPIKGYXXXXXXXXXFYLINIPSLAQPVXXPA

SEQ ID NO: 62558 - protein, 39 aa, Artificial Sequence; identical to SEQ ID NO: 3232
  GFR-binding peptide
  MOD_RES (1), (33), (34): Xaa is C or S

SEQ ID NO: 62559 - protein, 34 aa, Artificial Sequence; identical to SEQ ID NO: 3233
  GFR-binding peptide
  MOD_RES (33), (34): Xaa is C or S
  MOD_RES (11), (12), (13), (14), (15): Xaa is A or G
  MOD_RES (16), (17), (18), (19): Xaa is A or G or is absent

SEQ ID NO: 62560 - protein, 39 aa, Artificial Sequence; identical to SEQ ID NO: 3235
  GFR-binding peptide
  MOD_RES (1), (3), (36), (37): Xaa is C or S
  MOD_RES (14), (15), (16), (17), (18): Xaa is A or G
  MOD_RES (19), (20), (21), (22): Xaa is A or G or is absent

SEQ ID NO: 62561 - protein, 39 aa, Artificial Sequence; identical to SEQ ID NO: 3236
  GFR-binding peptide
  MOD_RES (2), (4), (38): Xaa is C or S
  MOD_RES (16), (17), (18), (19), (20): Xaa is A or G
  MOD_RES (21), (22), (23), (24): Xaa is A or G or is absent

SEQ ID NO: 62562 - protein, 33 aa, Artificial Sequence; identical to SEQ ID NO: 3237
  GFR-binding peptide
  MOD_RES (32), (33): Xaa is C or S

SEQ ID NO: 62563 - protein, 36 aa, Artificial Sequence
  GFR-binding peptide
  MOD_RES (1), (3), (35), (36): Xaa is C or S
XGXESVAMGRHKRLYTVVGKDYYLISTASLKTPVXX

SEQ ID NO: 62564 - protein, 31 aa, Artificial Sequence; identical to SEQ ID NO: 3242
  GFR-binding peptide
  MOD_RES (1), (1): Xaa is C or S

SEQ ID NO: 62565 - protein, 42 aa, Artificial Sequence
  GFR-binding peptide
  MOD_RES (2), (36), (37): Xaa is C or S
  MOD_RES (14), (15), (16), (17), (18): Xaa is A or G
  MOD_RES (19), (20), (21), (22): Xaa is A or G or is absent
GXRDVVMGYHYKLXXXXXXXXXKYLMSIPSMKTPTXXPGASG

SEQ ID NO: 62566 - protein, 39 aa, Artificial Sequence; identical to SEQ ID NO: 24235
  GFR-binding peptide
  MOD_RES (2), (36), (37): Xaa is C or S
  MOD_RES (14), (15), (16), (17), (18): Xaa is A or G
  MOD_RES (19), (20), (21), (22): Xaa is A or G or is absent

SEQ ID NO: 62567 - protein, 39 aa, Artificial Sequence
  GFR-binding peptide
  MOD_RES (34), (35): Xaa is C or S
  MOD_RES (12), (13), (14), (15), (16): Xaa is A or G
  MOD_RES (17), (18), (19), (20): Xaa is A or G or is absent
RDVVMGRHKRLXXXXXXXXXYYLMSTASMKTPTXXPGAS

SEQ ID NO: 62568 - protein, 36 aa, Artificial Sequence; identical to SEQ ID NO: 3245
  GFR-binding peptide
  MOD_RES (1), (3), (34), (35): Xaa is C or S

SEQ ID NO: 62569 - protein, 36 aa, Artificial Sequence; identical to SEQ ID NO: 24237
  GFR-binding peptide
  MOD_RES (2), (4), (36): Xaa is C or S

SEQ ID NO: 62570 - protein, 41 aa, Artificial Sequence; identical to SEQ ID NO: 24238
  GFR-binding peptide
  MOD_RES (2), (36), (37): Xaa is C or S
  MOD_RES (14), (15), (16), (17), (18): Xaa is A or G
  MOD_RES (19), (20), (21), (22): Xaa is A or G or is absent

SEQ ID NO: 62571 - protein, 34 aa, Artificial Sequence; identical to SEQ ID NO: 3249
  GFR-binding peptide
  MOD_RES (2), (33), (34): Xaa is C or S

SEQ ID NO: 62572 - protein, 36 aa, Artificial Sequence; identical to SEQ ID NO: 3251
  GFR-binding peptide
  MOD_RES (34), (35): Xaa is C or S
  MOD_RES (12), (13), (14), (15), (16): Xaa is A or G
  MOD_RES (17), (18), (19), (20): Xaa is A or G or is absent

SEQ ID NO: 62573 - protein, 41 aa, Artificial Sequence
  GFR-binding peptide
  MOD_RES (2), (35), (36): Xaa is C or S
  MOD_RES (13), (14), (15), (16), (17): Xaa is A or G
  MOD_RES (18), (19), (20), (21): Xaa is A or G or is absent
KXSKVVMPIKGYXXXXXXXXXFYLINIPSLDQPVXXPSASA

SEQ ID NO: 62574 - protein, 33 aa, Artificial Sequence
  GFR-binding peptide
  MOD_RES (32), (33): Xaa is C or S
SEVVMDRHKRLVVNNASDYYLISTASLRTPVXX

SEQ ID NO: 62575 - protein, 41 aa, Artificial Sequence
  GFR-binding peptide
  MOD_RES (1), (3), (37), (38): Xaa is C or S
  MOD_RES (15), (16), (17), (18), (19): Xaa is A or G
  MOD_RES (20), (21), (22), (23): Xaa is A or G or is absent
XAXSEVTMNRHKRLXXXXXXXXXYYLISTASMKEPVXXPEP

SEQ ID NO: 62576 - protein, 37 aa, Artificial Sequence; identical to SEQ ID NO: 32282
  GFR-binding peptide
  MOD_RES (2), (36), (37): Xaa is C or S
  MOD_RES (14), (15), (16), (17), (18): Xaa is A or G
  MOD_RES (19), (20), (21), (22): Xaa is A or G or is absent

SEQ ID NO: 62577 - protein, 35 aa, Artificial Sequence; identical to SEQ ID NO: 3257
  GFR-binding peptide
  MOD_RES (1), (35): Xaa is C or S
  MOD_RES (13), (14), (15), (16), (17): Xaa is A or G
  MOD_RES (18), (19), (20), (21): Xaa is A or G or is absent

SEQ ID NO: 62578 - protein, 37 aa, Artificial Sequence; identical to SEQ ID NO: 3258
  GFR-binding peptide
  MOD_RES (2), (4), (37): Xaa is C or S
  MOD_RES (15), (16), (17), (18), (19): Xaa is A or G
  MOD_RES (20), (21), (22), (23): Xaa is A or G or is absent

SEQ ID NO: 62579 - protein, 34 aa, Artificial Sequence; identical to SEQ ID NO: 32286
  GFR-binding peptide
  MOD_RES (2), (34): Xaa is C or S

SEQ ID NO: 62580 - protein, 30 aa, Artificial Sequence; identical to SEQ ID NO: 32289
  GFR-binding peptide

SEQ ID NO: 62581 - protein, 40 aa, Artificial Sequence
  GFR-binding peptide
  MOD_RES (1), (3), (37), (38): Xaa is C or S
  MOD_RES (15), (16), (17), (18), (19): Xaa is A or G
  MOD_RES (20), (21), (22), (23): Xaa is A or G or is absent
XGXSEVVMDEYKFKXXXXXXXXXLYLISIPELRTPVXXTP

SEQ ID NO: 62582 - protein, 39 aa, Artificial Sequence; identical to SEQ ID NO: 24254
  GFR-binding peptide
  MOD_RES (2), (4), (38), (39): Xaa is C or S
  MOD_RES (16), (17), (18), (19), (20): Xaa is A or G
  MOD_RES (21), (22), (23), (24): Xaa is A or G or is absent

SEQ ID NO: 62583 - protein, 30 aa, Artificial Sequence; identical to SEQ ID NO: 3268
  GFR-binding peptide

SEQ ID NO: 62584 - protein, 35 aa, Artificial Sequence; identical to SEQ ID NO: 3270
  GFR-binding peptide
  MOD_RES (2), (4): Xaa is C or S

SEQ ID NO: 62585 - protein, 32 aa, Artificial Sequence; identical to SEQ ID NO: 24263
  GFR-binding peptide
  MOD_RES (11), (12), (13), (14), (15): Xaa is A or G
  MOD_RES (16), (17), (18), (19): Xaa is A or G or is absent

SEQ ID NO: 62586 - protein, 38 aa, Artificial Sequence
  GFR-binding peptide
  MOD_RES (1), (35), (36): Xaa is C or S
  MOD_RES (13), (14), (15), (16), (17): Xaa is A or G
  MOD_RES (18), (19), (20), (21): Xaa is A or G or is absent
XSEVTMNRHKRLXXXXXXXXXYYLISTASMKEPVXXPE

SEQ ID NO: 62587 - protein, 42 aa, Artificial Sequence; identical to SEQ ID NO: 3272
  GFR-binding peptide
  MOD_RES (2), (4), (36), (37): Xaa is C or S

SEQ ID NO: 62588 - protein, 33 aa, Artificial Sequence; identical to SEQ ID NO: 24267
  GFR-binding peptide
  MOD_RES (1), (33): Xaa is C or S

SEQ ID NO: 62589 - protein, 38 aa, Artificial Sequence; identical to SEQ ID NO: 24268
  GFR-binding peptide
  MOD_RES (2), (4), (38): Xaa is C or S
  MOD_RES (16), (17), (18), (19), (20): Xaa is A or G
  MOD_RES (21), (22), (23), (24): Xaa is A or G or is absent

SEQ ID NO: 62590 - protein, 37 aa, Artificial Sequence
  GFR-binding peptide
  MOD_RES (33), (34): Xaa is C or S
  MOD_RES (11), (12), (13), (14), (15): Xaa is A or G
  MOD_RES (16), (17), (18), (19): Xaa is A or G or is absent
EVVMDEYKFKXXXXXXXXXLYLISIPELRTPVXXTPP

SEQ ID NO: 62591 - protein, 41 aa, Artificial Sequence
  GFR-binding peptide
  MOD_RES (1), (3), (37), (38): Xaa is C or S
  MOD_RES (15), (16), (17), (18), (19): Xaa is A or G
  MOD_RES (20), (21), (22), (23): Xaa is A or G or is absent
XGXSEVVMDEYKFKXXXXXXXXXLYLISIPELRTPVXXTPP

SEQ ID NO: 62592 - protein, 37 aa, Artificial Sequence; identical to SEQ ID NO: 3273
  GFR-binding peptide
  MOD_RES (33), (33): Xaa is C or S
  MOD_RES (11), (12), (13), (14), (15): Xaa is A or G
  MOD_RES (16), (17), (18), (19): Xaa is A or G or is absent

SEQ ID NO: 62593 - protein, 41 aa, Artificial Sequence
  GFR-binding peptide
  MOD_RES (1), (3), (35), (36): Xaa is C or S
XGXSRVVMNYHYKLIVNSSDDKYLVSIPSLKTPAXXPKPVH

SEQ ID NO: 62594 - protein, 37 aa, Artificial Sequence; identical to SEQ ID NO: 31203
  GFR-binding peptide
  MOD_RES (32), (33): Xaa is C or S

SEQ ID NO: 62595 - protein, 44 aa, Artificial Sequence
  GFR-binding peptide
  MOD_RES (2), (4), (38), (39): Xaa is C or S
  MOD_RES (16), (17), (18), (19), (20): Xaa is A or G
  MOD_RES (21), (22), (23), (24): Xaa is A or G or is absent
RXGXSEVVMDEYKFKXXXXXXXXXLYLISIPELRTPVXXTPPTS

SEQ ID NO: 62596 - protein, 41 aa, Artificial Sequence; identical to SEQ ID NO: 3278
  GFR-binding peptide
  MOD_RES (2), (35), (36): Xaa is C or S

SEQ ID NO: 62597 - protein, 40 aa, Artificial Sequence; identical to SEQ ID NO: 3279
  GFR-binding peptide
  MOD_RES (2), (36), (37): Xaa is C or S
  MOD_RES (14), (15), (16), (17), (18): Xaa is A or G
  MOD_RES (19), (20), (21), (22): Xaa is A or G or is absent

SEQ ID NO: 62598 - protein, 39 aa, Artificial Sequence; identical to SEQ ID NO: 24272
  GFR-binding peptide
  MOD_RES (2), (35), (36): Xaa is C or S

SEQ ID NO: 62599 - protein, 32 aa, Artificial Sequence; identical to SEQ ID NO: 3280
  GFR-binding peptide
  MOD_RES (1), (1): Xaa is C or S

SEQ ID NO: 62600 - protein, 33 aa, Artificial Sequence; identical to SEQ ID NO: 3281
  GFR-binding peptide
  MOD_RES (2), (33): Xaa is C or S

SEQ ID NO: 62601 - protein, 35 aa, Artificial Sequence; identical to SEQ ID NO: 24276
  GFR-binding peptide
  MOD_RES (31), (32): Xaa is C or S

SEQ ID NO: 62602 - protein, 38 aa, Artificial Sequence; identical to SEQ ID NO: 56144
  GFR-binding peptide
  MOD_RES (32), (33): Xaa is C or S

SEQ ID NO: 62603 - protein, 37 aa, Artificial Sequence; identical to SEQ ID NO: 24277
  GFR-binding peptide
  MOD_RES (2), (36), (37): Xaa is C or S
  MOD_RES (14), (15), (16), (17), (18): Xaa is A or G
  MOD_RES (19), (20), (21), (22): Xaa is A or G or is absent

SEQ ID NO: 62604 - protein, 38 aa, Artificial Sequence; identical to SEQ ID NO: 24279
  GFR-binding peptide
  MOD_RES (32), (32): Xaa is C or S

SEQ ID NO: 62605 - protein, 39 aa, Artificial Sequence
  GFR-binding peptide
  MOD_RES (33), (34): Xaa is C or S
  MOD_RES (11), (12), (13), (14), (15): Xaa is A or G
  MOD_RES (16), (17), (18), (19): Xaa is A or G or is absent
SVAMGRHKRLXXXXXXXXXYYLISTASLKTPVXXAKSAK

SEQ ID NO: 62606 - protein, 37 aa, Artificial Sequence; identical to SEQ ID NO: 3289
  GFR-binding peptide
  MOD_RES (1), (33), (34): Xaa is C or S

SEQ ID NO: 62607 - protein, 37 aa, Artificial Sequence; identical to SEQ ID NO: 24281
  GFR-binding peptide
  MOD_RES (33), (33): Xaa is C or S
  MOD_RES (11), (12), (13), (14), (15): Xaa is A or G
  MOD_RES (16), (17), (18), (19): Xaa is A or G or is absent

SEQ ID NO: 62608 - protein, 42 aa, Artificial Sequence; identical to SEQ ID NO: 3290
  GFR-binding peptide
  MOD_RES (2), (36), (37): Xaa is C or S
  MOD_RES (14), (15), (16), (17), (18): Xaa is A or G
  MOD_RES (19), (20), (21), (22): Xaa is A or G or is absent

SEQ ID NO: 62609 - protein, 36 aa, Artificial Sequence
  GFR-binding peptide
  MOD_RES (1), (3): Xaa is C or S
  MOD_RES (15), (16), (17), (18), (19): Xaa is A or G
  MOD_RES (20), (21), (22), (23): Xaa is A or G or is absent
XGXRDVVMGYHYKLXXXXXXXXXKYLMSIPSMKTPT

SEQ ID NO: 62610 - protein, 34 aa, Artificial Sequence; identical to SEQ ID NO: 24282
  GFR-binding peptide
  MOD_RES (34), (34): Xaa is C or S
  MOD_RES (12), (13), (14), (15), (16): Xaa is A or G
  MOD_RES (17), (18), (19), (20): Xaa is A or G or is absent

SEQ ID NO: 62611 - protein, 36 aa, Artificial Sequence
  GFR-binding peptide
  MOD_RES (31), (32): Xaa is C or S
EVVMDRHKRLVVNNAADYYLISTASLRAPVXXSAPA

SEQ ID NO: 62612 - protein, 41 aa, Artificial Sequence; identical to SEQ ID NO: 3292
  GFR-binding peptide
  MOD_RES (1), (3), (36), (37): Xaa is C or S
  MOD_RES (14), (15), (16), (17), (18): Xaa is A or G
  MOD_RES (19), (20), (21), (22): Xaa is A or G or is absent

SEQ ID NO: 62613 - protein, 39 aa, Artificial Sequence; identical to SEQ ID NO: 56149
  GFR-binding peptide
  MOD_RES (1), (3), (36), (37): Xaa is C or S
  MOD_RES (14), (15), (16), (17), (18): Xaa is A or G
  MOD_RES (19), (20), (21), (22): Xaa is A or G or is absent

SEQ ID NO: 62614 - protein, 33 aa, Artificial Sequence; identical to SEQ ID NO: 3294
  GFR-binding peptide
  MOD_RES (2), (33): Xaa is C or S

SEQ ID NO: 62615 - protein, 37 aa, Artificial Sequence; identical to SEQ ID NO: 24289
  GFR-binding peptide
  MOD_RES (2), (36), (37): Xaa is C or S
  MOD_RES (14), (15), (16), (17), (18): Xaa is A or G
  MOD_RES (19), (20), (21), (22): Xaa is A or G or is absent

SEQ ID NO: 62616 - protein, 42 aa, Artificial Sequence; identical to SEQ ID NO: 31231
  GFR-binding peptide
  MOD_RES (2), (4), (37), (38): Xaa is C or S

SEQ ID NO: 62617 - protein, 40 aa, Artificial Sequence; identical to SEQ ID NO: 24290
  GFR-binding peptide
  MOD_RES (34), (35): Xaa is C or S
  MOD_RES (12), (13), (14), (15), (16): Xaa is A or G
  MOD_RES (17), (18), (19), (20): Xaa is A or G or is absent

SEQ ID NO: 62618 - protein, 37 aa, Artificial Sequence
  GFR-binding peptide
  MOD_RES (2), (34), (35): Xaa is C or S
GXSEVVMDYHYKLVVNNASDKYLISIPSLRTPVXXTP

SEQ ID NO: 62619 - protein, 35 aa, Artificial Sequence; identical to SEQ ID NO: 24291
  GFR-binding peptide
  MOD_RES (1), (34), (35): Xaa is C or S
  MOD_RES (12), (13), (14), (15), (16): Xaa is A or G
  MOD_RES (17), (18), (19), (20): Xaa is A or G or is absent

SEQ ID NO: 62620 - protein, 38 aa, Artificial Sequence; identical to SEQ ID NO: 24293
  GFR-binding peptide
  MOD_RES (33), (34): Xaa is C or S
  MOD_RES (11), (12), (13), (14), (15): Xaa is A or G
  MOD_RES (16), (17), (18), (19): Xaa is A or G or is absent

SEQ ID NO: 62621 - protein, 40 aa, Artificial Sequence; identical to SEQ ID NO: 24294
  GFR-binding peptide
  MOD_RES (2), (36), (37): Xaa is C or S
  MOD_RES (14), (15), (16), (17), (18): Xaa is A or G
  MOD_RES (19), (20), (21), (22): Xaa is A or G or is absent

SEQ ID NO: 62622 - protein, 39 aa, Artificial Sequence; identical to SEQ ID NO: 56165
  GFR-binding peptide
  MOD_RES (2), (35), (36): Xaa is C or S
  MOD_RES (13), (14), (15), (16), (17): Xaa is A or G
  MOD_RES (18), (19), (20), (21): Xaa is A or G or is absent

SEQ ID NO: 62623 - protein, 38 aa, Artificial Sequence; identical to SEQ ID NO: 24299
  GFR-binding peptide
  MOD_RES (2), (4), (37), (38): Xaa is C or S
  MOD_RES (15), (16), (17), (18), (19): Xaa is A or G
  MOD_RES (20), (21), (22), (23): Xaa is A or G or is absent

SEQ ID NO: 62624 - protein, 31 aa, Artificial Sequence; identical to SEQ ID NO: 3305
  GFR-binding peptide
  MOD_RES (31), (31): Xaa is C or S

SEQ ID NO: 62625 - protein, 36 aa, Artificial Sequence; identical to SEQ ID NO: 3306
  GFR-binding peptide
  MOD_RES (1), (3), (34), (35): Xaa is C or S

SEQ ID NO: 62626 - protein, 36 aa, Artificial Sequence
  GFR-binding peptide
  MOD_RES (33), (34): Xaa is C or S
  MOD_RES (11), (12), (13), (14), (15): Xaa is A or G
  MOD_RES (16), (17), (18), (19): Xaa is A or G or is absent
SKVVMPIKGYXXXXXXXXXFYLINIPSLDQPVXXPS

SEQ ID NO: 62627 - protein, 34 aa, Artificial Sequence; identical to SEQ ID NO: 3309
  GFR-binding peptide
  MOD_RES (1), (34): Xaa is C or S

SEQ ID NO: 62628 - protein, 37 aa, Artificial Sequence
  GFR-binding peptide
  MOD_RES (31), (32): Xaa is C or S
EVTMNYHYKLVVNKNEDKYLISIPSMKEPVXXPEPIG

SEQ ID NO: 62629 - protein, 37 aa, Artificial Sequence; identical to SEQ ID NO: 3311
  GFR-binding peptide
  MOD_RES (31), (32): Xaa is C or S

SEQ ID NO: 62630 - protein, 36 aa, Artificial Sequence
  GFR-binding peptide
  MOD_RES (2), (4), (36): Xaa is C or S
SXGXRDVVMGEYKFKIIQQKDNLYLMSIPEMKTPTX

SEQ ID NO: 62631 - protein, 41 aa, Artificial Sequence
  GFR-binding peptide
  MOD_RES (1), (3), (36), (37): Xaa is C or S
  MOD_RES (14), (15), (16), (17), (18): Xaa is A or G
  MOD_RES (19), (20), (21), (22): Xaa is A or G or is absent
XKXSKVIMPIKGYXXXXXXXXXFYLINIPSLDQSVXXPSAS

SEQ ID NO: 62632 - protein, 40 aa, Artificial Sequence; identical to SEQ ID NO: 3312
  GFR-binding peptide
  MOD_RES (1), (35), (36): Xaa is C or S
  MOD_RES (13), (14), (15), (16), (17): Xaa is A or G
  MOD_RES (18), (19), (20), (21): Xaa is A or G or is absent

SEQ ID NO: 62633 - protein, 34 aa, Artificial Sequence; identical to SEQ ID NO: 3316
  GFR-binding peptide
  MOD_RES (2), (2): Xaa is C or S

SEQ ID NO: 62634 - protein, 37 aa, Artificial Sequence
  GFR-binding peptide
  MOD_RES (2), (4): Xaa is C or S
  MOD_RES (16), (17), (18), (19), (20): Xaa is A or G
  MOD_RES (21), (22), (23), (24): Xaa is A or G or is absent
RXAXSEVTMNRYKKLXXXXXXXXXFYLISIANMKEPV

SEQ ID NO: 62635 - protein, 40 aa, Artificial Sequence; identical to SEQ ID NO: 56179
  GFR-binding peptide
  MOD_RES (2), (4), (36), (37): Xaa is C or S

SEQ ID NO: 62636 - protein, 37 aa, Artificial Sequence; identical to SEQ ID NO: 24308
  GFR-binding peptide
  MOD_RES (1), (3), (34), (35): Xaa is C or S

SEQ ID NO: 62637 - protein, 33 aa, Artificial Sequence; identical to SEQ ID NO: 3319
  GFR-binding peptide
  MOD_RES (1), (1): Xaa is C or S

SEQ ID NO: 62638 - protein, 35 aa, Artificial Sequence; identical to SEQ ID NO: 24310
  GFR-binding peptide
  MOD_RES (33), (34): Xaa is C or S
  MOD_RES (11), (12), (13), (14), (15): Xaa is A or G
  MOD_RES (16), (17), (18), (19): Xaa is A or G or is absent

SEQ ID NO: 62639 - protein, 34 aa, Artificial Sequence; identical to SEQ ID NO: 24312
  GFR-binding peptide
  MOD_RES (2), (34): Xaa is C or S

SEQ ID NO: 62640 - protein, 40 aa, Artificial Sequence; identical to SEQ ID NO: 24315
  GFR-binding peptide
  MOD_RES (2), (4), (36): Xaa is C or S

SEQ ID NO: 62641 - protein, 40 aa, Artificial Sequence; identical to SEQ ID NO: 3321
  GFR-binding peptide
  MOD_RES (1), (3), (37), (38): Xaa is C or S
  MOD_RES (15), (16), (17), (18), (19): Xaa is A or G
  MOD_RES (20), (21), (22), (23): Xaa is A or G or is absent

SEQ ID NO: 62642 - protein, 40 aa, Artificial Sequence
  GFR-binding peptide
  MOD_RES (1), (3), (35), (36): Xaa is C or S
XGXRDVVMGEYKFKIIQQKDNLYLMSIPEMKTPTXXPGAS

SEQ ID NO: 62643 - protein, 38 aa, Artificial Sequence; identical to SEQ ID NO: 3328
  GFR-binding peptide
  MOD_RES (34), (34): Xaa is C or S
  MOD_RES (12), (13), (14), (15), (16): Xaa is A or G
  MOD_RES (17), (18), (19), (20): Xaa is A or G or is absent

SEQ ID NO: 62644 - protein, 35 aa, Artificial Sequence; identical to SEQ ID NO: 3329
  GFR-binding peptide
  MOD_RES (2), (4): Xaa is C or S

SEQ ID NO: 62645 - protein, 39 aa, Artificial Sequence; identical to SEQ ID NO: 3330
  GFR-binding peptide
  MOD_RES (1), (33), (34): Xaa is C or S

SEQ ID NO: 62646 - protein, 42 aa, Artificial Sequence
  GFR-binding peptide
  MOD_RES (1), (3), (37), (38): Xaa is C or S
  MOD_RES (15), (16), (17), (18), (19): Xaa is A or G
  MOD_RES (20), (21), (22), (23): Xaa is A or G or is absent
XAXSEVTMNRYKKLXXXXXXXXXFYLISIANMKEPVXXPEPI

SEQ ID NO: 62647 - protein, 40 aa, Artificial Sequence
  GFR-binding peptide
  MOD_RES (2), (34), (35): Xaa is C or S
GXRDVVMGRHKRLIIQQKDNYYLMSTASMKTPTXXPGASG

SEQ ID NO: 62648 - protein, 40 aa, Artificial Sequence
  GFR-binding peptide
  MOD_RES (1), (3), (37), (38): Xaa is C or S
  MOD_RES (15), (16), (17), (18), (19): Xaa is A or G
  MOD_RES (20), (21), (22), (23): Xaa is A or G or is absent
XAXSEVTMNYHYKLXXXXXXXXXKYLISIPSMKEPVXXPE

SEQ ID NO: 62649 - protein, 37 aa, Artificial Sequence
  GFR-binding peptide
  MOD_RES (1), (33), (34): Xaa is C or S
XSEVTMNRYKKLVVNKNEDFYLISIANMKEPVXXPEP

SEQ ID NO: 62650 - protein, 35 aa, Artificial Sequence
  GFR-binding peptide
  MOD_RES (2), (4), (35): Xaa is C or S
LXGXEEVIMRHKRLLLVRGNDYYLMSTASTKVPAX

SEQ ID NO: 62651 - protein, 39 aa, Artificial Sequence; identical to SEQ ID NO: 3334
  GFR-binding peptide
  MOD_RES (2), (33), (34): Xaa is C or S

SEQ ID NO: 62652 - protein, 36 aa, Artificial Sequence
  GFR-binding peptide
  MOD_RES (2), (4): Xaa is C or S
  MOD_RES (15), (16), (17), (18), (19): Xaa is A or G
  MOD_RES (20), (21), (22), (23): Xaa is A or G or is absent
LXGXEEVIMRHKRLXXXXXXXXXYYLMSTASTKVPA

SEQ ID NO: 62653 - protein, 37 aa, Artificial Sequence; identical to SEQ ID NO: 3340
  GFR-binding peptide
  MOD_RES (2), (4), (37): Xaa is C or S
  MOD_RES (15), (16), (17), (18), (19): Xaa is A or G
  MOD_RES (20), (21), (22), (23): Xaa is A or G or is absent

SEQ ID NO: 62654 - protein, 34 aa, Artificial Sequence
  GFR-binding peptide
  MOD_RES (34), (34): Xaa is C or S
  MOD_RES (12), (13), (14), (15), (16): Xaa is A or G
  MOD_RES (17), (18), (19), (20): Xaa is A or G or is absent
SEVVMDYHYKLXXXXXXXXXKYLISIPSLRTPVX

SEQ ID NO: 62655 - protein, 40 aa, Artificial Sequence; identical to SEQ ID NO: 3343
  GFR-binding peptide
  MOD_RES (2), (4), (36), (37): Xaa is C or S

SEQ ID NO: 62656 - protein, 37 aa, Artificial Sequence; identical to SEQ ID NO: 31281
  GFR-binding peptide
  MOD_RES (32), (33): Xaa is C or S

SEQ ID NO: 62657 - protein, 41 aa, Artificial Sequence
  GFR-binding peptide
  MOD_RES (1), (3), (35), (36): Xaa is C or S
XGXRDVVMGYHYKLIIQQKDNKYLMSIPSMKTPTXXPGASG

SEQ ID NO: 62658 - protein, 40 aa, Artificial Sequence; identical to SEQ ID NO: 31286
  GFR-binding peptide
  MOD_RES (2), (4), (36), (37): Xaa is C or S

SEQ ID NO: 62659 - protein, 35 aa, Artificial Sequence; identical to SEQ ID NO: 3349
  GFR-binding peptide
  MOD_RES (1), (3), (34), (35): Xaa is C or S

SEQ ID NO: 62660 - protein, 40 aa, Artificial Sequence; identical to SEQ ID NO: 3351
  GFR-binding peptide
  MOD_RES (34), (35): Xaa is C or S
  MOD_RES (12), (13), (14), (15), (16): Xaa is A or G
  MOD_RES (17), (18), (19), (20): Xaa is A or G or is absent

SEQ ID NO: 62661 - protein, 34 aa, Artificial Sequence
  GFR-binding peptide
  MOD_RES (31), (32): Xaa is C or S
SVAMGRHKRLYTVVGKDYYLISTASLKTPVXXAK

SEQ ID NO: 62662 - protein, 33 aa, Artificial Sequence; identical to SEQ ID NO: 3352
  GFR-binding peptide
  MOD_RES (33), (33): Xaa is C or S
  MOD_RES (11), (12), (13), (14), (15): Xaa is A or G
  MOD_RES (16), (17), (18), (19): Xaa is A or G or is absent

SEQ ID NO: 62663 - protein, 38 aa, Artificial Sequence; identical to SEQ ID NO: 24333
  GFR-binding peptide
  MOD_RES (34), (35): Xaa is C or S
  MOD_RES (12), (13), (14), (15), (16): Xaa is A or G
  MOD_RES (17), (18), (19), (20): Xaa is A or G or is absent

SEQ ID NO: 62664 - protein, 43 aa, Artificial Sequence; identical to SEQ ID NO: 3356
  GFR-binding peptide
  MOD_RES (1), (3), (37), (38): Xaa is C or S
  MOD_RES (15), (16), (17), (18), (19): Xaa is A or G
  MOD_RES (20), (21), (22), (23): Xaa is A or G or is absent

SEQ ID NO: 62665 - protein, 35 aa, Artificial Sequence
  GFR-binding peptide
  MOD_RES (1), (33), (34): Xaa is C or S
XRDVVMGRHKRLIIQQKDNYYLMSTASMKTPTXXP

SEQ ID NO: 62666 - protein, 31 aa, Artificial Sequence; identical to SEQ ID NO: 31296
  GFR-binding peptide

SEQ ID NO: 62667 - protein, 34 aa, Artificial Sequence; identical to SEQ ID NO: 24340
  GFR-binding peptide
  MOD_RES (31), (32): Xaa is C or S

SEQ ID NO: 62668 - protein, 40 aa, Artificial Sequence
  GFR-binding peptide
  MOD_RES (1), (3), (35), (36): Xaa is C or S
XGXRDVVMGYHYKLIIQQKDNKYLMSIPSMKTPTXXPGAS

SEQ ID NO: 62669 - protein, 34 aa, Artificial Sequence; identical to SEQ ID NO: 3360
  GFR-binding peptide
  MOD_RES (1), (32), (33): Xaa is C or S

SEQ ID NO: 62670 - protein, 39 aa, Artificial Sequence; identical to SEQ ID NO: 24342
  GFR-binding peptide
  MOD_RES (1), (33), (34): Xaa is C or S

SEQ ID NO: 62671 - protein, 36 aa, Artificial Sequence; identical to SEQ ID NO: 24343
  GFR-binding peptide
  MOD_RES (2), (4): Xaa is C or S

SEQ ID NO: 62672 - protein, 33 aa, Artificial Sequence; identical to SEQ ID NO: 3364
  GFR-binding peptide
  MOD_RES (31), (32): Xaa is C or S

SEQ ID NO: 62673 - protein, 36 aa, Artificial Sequence
  GFR-binding peptide
  MOD_RES (2), (34), (35): Xaa is C or S
GXRDVVMGRHKRLIIQQKDNYYLMSTASMKTPTXXP

SEQ ID NO: 62674 - protein, 35 aa, Artificial Sequence; identical to SEQ ID NO: 31306
  GFR-binding peptide
  MOD_RES (2), (34), (35): Xaa is C or S

SEQ ID NO: 62675 - protein, 40 aa, Artificial Sequence; identical to SEQ ID NO: 24348
  GFR-binding peptide
  MOD_RES (2), (36), (37): Xaa is C or S
  MOD_RES (14), (15), (16), (17), (18): Xaa is A or G
  MOD_RES (19), (20), (21), (22): Xaa is A or G or is absent

SEQ ID NO: 62676 - protein, 37 aa, Artificial Sequence; identical to SEQ ID NO: 3369
  GFR-binding peptide
  MOD_RES (2), (4), (36), (37): Xaa is C or S

SEQ ID NO: 62677 - protein, 30 aa, Artificial Sequence; identical to SEQ ID NO: 24357
  GFR-binding peptide

SEQ ID NO: 62678 - protein, 35 aa, Artificial Sequence; identical to SEQ ID NO: 31320
  GFR-binding peptide
  MOD_RES (1), (32), (33): Xaa is C or S

SEQ ID NO: 62679 - protein, 39 aa, Artificial Sequence; identical to SEQ ID NO: 24362
  GFR-binding peptide
  MOD_RES (2), (34), (35): Xaa is C or S

SEQ ID NO: 62680 - protein, 37 aa, Artificial Sequence; identical to SEQ ID NO: 3380
  GFR-binding peptide
  MOD_RES (1), (33), (34): Xaa is C or S

SEQ ID NO: 62681 - protein, 36 aa, Artificial Sequence; identical to SEQ ID NO: 3382
  GFR-binding peptide
  MOD_RES (1), (35), (36): Xaa is C or S
  MOD_RES (13), (14), (15), (16), (17): Xaa is A or G
  MOD_RES (18), (19), (20), (21): Xaa is A or G or is absent

SEQ ID NO: 62682 - protein, 38 aa, Artificial Sequence; identical to SEQ ID NO: 31334
  GFR-binding peptide
  MOD_RES (33), (34): Xaa is C or S
  MOD_RES (11), (12), (13), (14), (15): Xaa is A or G
  MOD_RES (16), (17), (18), (19): Xaa is A or G or is absent

SEQ ID NO: 62683 - protein, 40 aa, Artificial Sequence
  GFR-binding peptide
  MOD_RES (1), (3), (35), (36): Xaa is C or S
XAXSEVTMNRYKKLVVNKNEDFYLISIANMKEPVXXPEPI

SEQ ID NO: 62684 - protein, 33 aa, Artificial Sequence; identical to SEQ ID NO: 24369
  GFR-binding peptide
  MOD_RES (33), (33): Xaa is C or S

SEQ ID NO: 62685 - protein, 33 aa, Artificial Sequence
  GFR-binding peptide
  MOD_RES (2), (2): Xaa is C or S
AXSEVTMNRHKRLVVNKNEDYYLISTASMKEPV

SEQ ID NO: 62686 - protein, 39 aa, Artificial Sequence
  GFR-binding peptide
  MOD_RES (33), (34): Xaa is C or S
  MOD_RES (11), (12), (13), (14), (15): Xaa is A or G
  MOD_RES (16), (17), (18), (19): Xaa is A or G or is absent
SKVIMPIKGYXXXXXXXXXFYLINIPSLDQSVXXPSASA

SEQ ID NO: 62687 - protein, 33 aa, Artificial Sequence; identical to SEQ ID NO: 31337
  GFR-binding peptide
  MOD_RES (32), (33): Xaa is C or S

SEQ ID NO: 62688 - protein, 36 aa, Artificial Sequence; identical to SEQ ID NO: 3390
  GFR-binding peptide
  MOD_RES (31), (32): Xaa is C or S

SEQ ID NO: 62689 - protein, 35 aa, Artificial Sequence; identical to SEQ ID NO: 31347
  GFR-binding peptide
  MOD_RES (35), (35): Xaa is C or S
  MOD_RES (13), (14), (15), (16), (17): Xaa is A or G
  MOD_RES (18), (19), (20), (21): Xaa is A or G or is absent

SEQ ID NO: 62690 - protein, 41 aa, Artificial Sequence; identical to SEQ ID NO: 3395
  GFR-binding peptide
  MOD_RES (2), (4), (38), (39): Xaa is C or S
  MOD_RES (16), (17), (18), (19), (20): Xaa is A or G
  MOD_RES (21), (22), (23), (24): Xaa is A or G or is absent

SEQ ID NO: 62691 - protein, 37 aa, Artificial Sequence
  GFR-binding peptide
  MOD_RES (1), (33), (34): Xaa is C or S
XSEVTMNYHYKLVVNKNEDKYLISIPSMKEPVXXPEP

SEQ ID NO: 62692 - protein, 40 aa, Artificial Sequence; identical to SEQ ID NO: 3397
  GFR-binding peptide
  MOD_RES (2), (36), (37): Xaa is C or S
  MOD_RES (14), (15), (16), (17), (18): Xaa is A or G
  MOD_RES (19), (20), (21), (22): Xaa is A or G or is absent

SEQ ID NO: 62693 - protein, 39 aa, Artificial Sequence
  GFR-binding peptide
  MOD_RES (2), (34), (35): Xaa is C or S
GXSEVVMDYHYKLVVNNASDKYLISIPSLRTPVXXTPPT

SEQ ID NO: 62694 - protein, 40 aa, Artificial Sequence; identical to SEQ ID NO: 24376
  GFR-binding peptide
  MOD_RES (1), (35), (36): Xaa is C or S
  MOD_RES (13), (14), (15), (16), (17): Xaa is A or G
  MOD_RES (18), (19), (20), (21): Xaa is A or G or is absent

SEQ ID NO: 62695 - protein, 42 aa, Artificial Sequence; identical to SEQ ID NO: 24377
  GFR-binding peptide
  MOD_RES (2), (4), (36), (37): Xaa is C or S

SEQ ID NO: 62696 - protein, 38 aa, Artificial Sequence; identical to SEQ ID NO: 24381
  GFR-binding peptide
  MOD_RES (34), (35): Xaa is C or S
  MOD_RES (12), (13), (14), (15), (16): Xaa is A or G
  MOD_RES (17), (18), (19), (20): Xaa is A or G or is absent

SEQ ID NO: 62697 - protein, 38 aa, Artificial Sequence; identical to SEQ ID NO: 24382
  GFR-binding peptide
  MOD_RES (34), (35): Xaa is C or S
  MOD_RES (12), (13), (14), (15), (16): Xaa is A or G
  MOD_RES (17), (18), (19), (20): Xaa is A or G or is absent

SEQ ID NO: 62698 - protein, 36 aa, Artificial Sequence
  GFR-binding peptide
  MOD_RES (2), (4), (35), (36): Xaa is C or S
SXKXSRVIMPIKGYVKPKRGVFYLINIPSLAQPVXX

SEQ ID NO: 62699 - protein, 36 aa, Artificial Sequence
  GFR-binding peptide
  MOD_RES (2), (34), (35): Xaa is C or S
AXSEVTMNRHKRLVVNKNEDYYLISTASMKEPVXXP

SEQ ID NO: 62700 - protein, 41 aa, Artificial Sequence; identical to SEQ ID NO: 3407
  GFR-binding peptide
  MOD_RES (2), (4), (36), (37): Xaa is C or S

SEQ ID NO: 62701 - protein, 34 aa, Artificial Sequence; identical to SEQ ID NO: 56276
  GFR-binding peptide
  MOD_RES (31), (32): Xaa is C or S

SEQ ID NO: 62702 - protein, 40 aa, Artificial Sequence
  GFR-binding peptide
  MOD_RES (2), (4), (36), (37): Xaa is C or S
SXGXRDVVMGEYKFKIIQQKDNLYLMSIPEMKTPTXXPGA

SEQ ID NO: 62703 - protein, 36 aa, Artificial Sequence; identical to SEQ ID NO: 31370
  GFR-binding peptide
  MOD_RES (2), (34), (35): Xaa is C or S

SEQ ID NO: 62704 - protein, 35 aa, Artificial Sequence
  GFR-binding peptide
  MOD_RES (31), (32): Xaa is C or S
EVTMNRHKRLVVNKNEDYYLISTASMKEPVXXPEP

SEQ ID NO: 62705 - protein, 40 aa, Artificial Sequence; identical to SEQ ID NO: 3411
  GFR-binding peptide
  MOD_RES (1), (34), (35): Xaa is C or S
  MOD_RES (12), (13), (14), (15), (16): Xaa is A or G
  MOD_RES (17), (18), (19), (20): Xaa is A or G or is absent

SEQ ID NO: 62706 - protein, 39 aa, Artificial Sequence
  GFR-binding peptide
  MOD_RES (2), (36), (37): Xaa is C or S
  MOD_RES (14), (15), (16), (17), (18): Xaa is A or G
  MOD_RES (19), (20), (21), (22): Xaa is A or G or is absent
GXSEVVMDYHYKLXXXXXXXXXKYLISIPSLRTPVXXTP

SEQ ID NO: 62707 - protein, 41 aa, Artificial Sequence
  GFR-binding peptide
  MOD_RES (2), (4), (37), (38): Xaa is C or S
  MOD_RES (15), (16), (17), (18), (19): Xaa is A or G
  MOD_RES (20), (21), (22), (23): Xaa is A or G or is absent
SXKXSKVIMPIKGYXXXXXXXXXFYLINIPSLDQSVXXPSA

SEQ ID NO: 62708 - protein, 31 aa, Artificial Sequence
  GFR-binding peptide
  MOD_RES (1), (1): Xaa is C or S
XEEVIMRHKRLLLVRGNDYYLMSTASTKVPA

SEQ ID NO: 62709 - protein, 42 aa, Artificial Sequence; identical to SEQ ID NO: 3412
  GFR-binding peptide
  MOD_RES (2), (36), (37): Xaa is C or S
  MOD_RES (14), (15), (16), (17), (18): Xaa is A or G
  MOD_RES (19), (20), (21), (22): Xaa is A or G or is absent

SEQ ID NO: 62710 - protein, 39 aa, Artificial Sequence; identical to SEQ ID NO: 3413
  GFR-binding peptide
  MOD_RES (33), (34): Xaa is C or S
  MOD_RES (11), (12), (13), (14), (15): Xaa is A or G
  MOD_RES (16), (17), (18), (19): Xaa is A or G or is absent

SEQ ID NO: 62711 - protein, 34 aa, Artificial Sequence; identical to SEQ ID NO: 24397
  GFR-binding peptide
  MOD_RES (2), (34): Xaa is C or S

SEQ ID NO: 62712 - protein, 31 aa, Artificial Sequence; identical to SEQ ID NO: 3415
  GFR-binding peptide

SEQ ID NO: 62713 - protein, 36 aa, Artificial Sequence; identical to SEQ ID NO: 31375
  GFR-binding peptide
  MOD_RES (1), (3), (35), (36): Xaa is C or S

SEQ ID NO: 62714 - protein, 41 aa, Artificial Sequence; identical to SEQ ID NO: 3416
  GFR-binding peptide
  MOD_RES (2), (4), (36), (37): Xaa is C or S

SEQ ID NO: 62715 - protein, 40 aa, Artificial Sequence; identical to SEQ ID NO: 3417
  GFR-binding peptide
  MOD_RES (2), (34), (35): Xaa is C or S

SEQ ID NO: 62716 - protein, 36 aa, Artificial Sequence; identical to SEQ ID NO: 3418
  GFR-binding peptide
  MOD_RES (33), (34): Xaa is C or S
  MOD_RES (11), (12), (13), (14), (15): Xaa is A or G
  MOD_RES (16), (17), (18), (19): Xaa is A or G or is absent

SEQ ID NO: 62717 - protein, 39 aa, Artificial Sequence; identical to SEQ ID NO: 3419
  GFR-binding peptide
  MOD_RES (1), (35), (36): Xaa is C or S
  MOD_RES (13), (14), (15), (16), (17): Xaa is A or G
  MOD_RES (18), (19), (20), (21): Xaa is A or G or is absent

SEQ ID NO: 62718 - protein, 41 aa, Artificial Sequence
  GFR-binding peptide
  MOD_RES (2), (4), (36), (37): Xaa is C or S
RXGXESVAMGRHKRLYTVVGKDYYLISTASLKTPVXXAKSA

SEQ ID NO: 62719 - protein, 40 aa, Artificial Sequence; identical to SEQ ID NO: 31385
  GFR-binding peptide
  MOD_RES (2), (4), (36): Xaa is C or S

SEQ ID NO: 62720 - protein, 37 aa, Artificial Sequence; identical to SEQ ID NO: 31386
  GFR-binding peptide
  MOD_RES (2), (4), (36), (37): Xaa is C or S

SEQ ID NO: 62721 - protein, 31 aa, Artificial Sequence; identical to SEQ ID NO: 3421
  GFR-binding peptide

SEQ ID NO: 62722 - protein, 39 aa, Artificial Sequence; identical to SEQ ID NO: 31389
  GFR-binding peptide
  MOD_RES (34), (35): Xaa is C or S
  MOD_RES (12), (13), (14), (15), (16): Xaa is A or G
  MOD_RES (17), (18), (19), (20): Xaa is A or G or is absent

SEQ ID NO: 62723 - protein, 39 aa, Artificial Sequence
  GFR-binding peptide
  MOD_RES (2), (36), (37): Xaa is C or S
  MOD_RES (14), (15), (16), (17), (18): Xaa is A or G
  MOD_RES (19), (20), (21), (22): Xaa is A or G or is absent
GXSEVVMDEYKFKXXXXXXXXXLYLISIPELRTPVXXTP

SEQ ID NO: 62724 - protein, 40 aa, Artificial Sequence
  GFR-binding peptide
  MOD_RES (1), (35), (36): Xaa is C or S
  MOD_RES (13), (14), (15), (16), (17): Xaa is A or G
  MOD_RES (18), (19), (20), (21): Xaa is A or G or is absent
XSEVTMNYHYKLXXXXXXXXXKYLISIPSMKEPVXXPEPI

SEQ ID NO: 62725 - protein, 33 aa, Artificial Sequence; identical to SEQ ID NO: 3424
  GFR-binding peptide
  MOD_RES (12), (13), (14), (15), (16): Xaa is A or G
  MOD_RES (17), (18), (19), (20): Xaa is A or G or is absent

SEQ ID NO: 62726 - protein, 36 aa, Artificial Sequence; identical to SEQ ID NO: 56304
  GFR-binding peptide
  MOD_RES (2), (4): Xaa is C or S
  MOD_RES (15), (16), (17), (18), (19): Xaa is A or G
  MOD_RES (20), (21), (22), (23): Xaa is A or G or is absent

SEQ ID NO: 62727 - protein, 32 aa, Artificial Sequence; identical to SEQ ID NO: 24418
  GFR-binding peptide
  MOD_RES (31), (32): Xaa is C or S

SEQ ID NO: 62728 - protein, 35 aa, Artificial Sequence
  GFR-binding peptide
  MOD_RES (34), (35): Xaa is C or S
  MOD_RES (12), (13), (14), (15), (16): Xaa is A or G
  MOD_RES (17), (18), (19), (20): Xaa is A or G or is absent
RDVVMGRHKRLXXXXXXXXXYYLMSTASMKTPTXX

SEQ ID NO: 62729 - protein, 39 aa, Artificial Sequence; identical to SEQ ID NO: 31401
  GFR-binding peptide
  MOD_RES (1), (3), (35), (36): Xaa is C or S

SEQ ID NO: 62730 - protein, 40 aa, Artificial Sequence; identical to SEQ ID NO: 3428
  GFR-binding peptide
  MOD_RES (2), (35), (36): Xaa is C or S

SEQ ID NO: 62731 - protein, 34 aa, Artificial Sequence; identical to SEQ ID NO: 3429
  GFR-binding peptide
  MOD_RES (34), (34): Xaa is C or S
  MOD_RES (12), (13), (14), (15), (16): Xaa is A or G
  MOD_RES (17), (18), (19), (20): Xaa is A or G or is absent

SEQ ID NO: 62732 - protein, 35 aa, Artificial Sequence; identical to SEQ ID NO: 24424
  GFR-binding peptide
  MOD_RES (1), (33), (34): Xaa is C or S

SEQ ID NO: 62733 - protein, 33 aa, Artificial Sequence; identical to SEQ ID NO: 31404
  GFR-binding peptide
  MOD_RES (2), (2): Xaa is C or S

SEQ ID NO: 62734 - protein, 39 aa, Artificial Sequence; identical to SEQ ID NO: 31405
  GFR-binding peptide
  MOD_RES (1), (3), (37), (38): Xaa is C or S
  MOD_RES (15), (16), (17), (18), (19): Xaa is A or G
  MOD_RES (20), (21), (22), (23): Xaa is A or G or is absent

SEQ ID NO: 62735 - protein, 38 aa, Artificial Sequence; identical to SEQ ID NO: 3433
  GFR-binding peptide
  MOD_RES (1), (3), (37), (38): Xaa is C or S
  MOD_RES (15), (16), (17), (18), (19): Xaa is A or G
  MOD_RES (20), (21), (22), (23): Xaa is A or G or is absent

SEQ ID NO: 62736 - protein, 39 aa, Artificial Sequence
  GFR-binding peptide
  MOD_RES (1), (3), (35), (36): Xaa is C or S
XGXRDVVMGRHKRLIIQQKDNYYLMSTASMKTPTXXPGA

SEQ ID NO: 62737 - protein, 36 aa, Artificial Sequence; identical to SEQ ID NO: 56312
  GFR-binding peptide
  MOD_RES (31), (32): Xaa is C or S

SEQ ID NO: 62738 - protein, 39 aa, Artificial Sequence
  GFR-binding peptide
  MOD_RES (2), (34), (35): Xaa is C or S
AXSEVTMNYHYKLVVNKNEDKYLISIPSMKEPVXXPEPI

SEQ ID NO: 62739 - protein, 44 aa, Artificial Sequence; identical to SEQ ID NO: 10856
  GFR-binding peptide
  MOD_RES (2), (4), (38), (39): Xaa is C or S
  MOD_RES (16), (17), (18), (19), (20): Xaa is A or G
  MOD_RES (21), (22), (23), (24): Xaa is A or G or is absent

SEQ ID NO: 62740 - protein, 43 aa, Artificial Sequence
  GFR-binding peptide
  MOD_RES (2), (4), (38), (39): Xaa is C or S
  MOD_RES (16), (17), (18), (19), (20): Xaa is A or G
  MOD_RES (21), (22), (23), (24): Xaa is A or G or is absent
RXGXSEVVMDEYKFKXXXXXXXXXLYLISIPELRTPVXXTPPT

SEQ ID NO: 62741 - protein, 37 aa, Artificial Sequence; identical to SEQ ID NO: 3443
  GFR-binding peptide
  MOD_RES (1), (33), (34): Xaa is C or S

SEQ ID NO: 62742 - protein, 33 aa, Artificial Sequence
  GFR-binding peptide
  MOD_RES (31), (32): Xaa is C or S
DVVMGYHYKLIIQQKDNKYLMSIPSMKTPTXXP

SEQ ID NO: 62743 - protein, 35 aa, Artificial Sequence; identical to SEQ ID NO: 31420
  GFR-binding peptide
  MOD_RES (33), (34): Xaa is C or S
  MOD_RES (11), (12), (13), (14), (15): Xaa is A or G
  MOD_RES (16), (17), (18), (19): Xaa is A or G or is absent

SEQ ID NO: 62744 - protein, 42 aa, Artificial Sequence; identical to SEQ ID NO: 3445
  GFR-binding peptide
  MOD_RES (1), (3), (38), (39): Xaa is C or S
  MOD_RES (16), (17), (18), (19), (20): Xaa is A or G
  MOD_RES (21), (22), (23), (24): Xaa is A or G or is absent

SEQ ID NO: 62745 - protein, 37 aa, Artificial Sequence
  GFR-binding peptide
  MOD_RES (2), (4), (37): Xaa is C or S
  MOD_RES (15), (16), (17), (18), (19): Xaa is A or G
  MOD_RES (20), (21), (22), (23): Xaa is A or G or is absent
SXKXSKVVMPIKGYXXXXXXXXXFYLINIPSLDQPVX

SEQ ID NO: 62746 - protein, 38 aa, Artificial Sequence; identical to SEQ ID NO: 24434
  GFR-binding peptide
  MOD_RES (2), (33), (34): Xaa is C or S

SEQ ID NO: 62747 - protein, 38 aa, Artificial Sequence; identical to SEQ ID NO: 31423
  GFR-binding peptide
  MOD_RES (34), (35): Xaa is C or S
  MOD_RES (12), (13), (14), (15), (16): Xaa is A or G
  MOD_RES (17), (18), (19), (20): Xaa is A or G or is absent

SEQ ID NO: 62748 - protein, 40 aa, Artificial Sequence; identical to SEQ ID NO: 3450
  GFR-binding peptide
  MOD_RES (1), (3), (36), (37): Xaa is C or S

SEQ ID NO: 62749 - protein, 40 aa, Artificial Sequence
  GFR-binding peptide
  MOD_RES (1), (35), (36): Xaa is C or S
  MOD_RES (13), (14), (15), (16), (17): Xaa is A or G
  MOD_RES (18), (19), (20), (21): Xaa is A or G or is absent
XSEVVMDYHYKLXXXXXXXXXKYLISIPSLRTPVXXTPPT

SEQ ID NO: 62750 - protein, 36 aa, Artificial Sequence
  GFR-binding peptide
  MOD_RES (34), (35): Xaa is C or S
  MOD_RES (12), (13), (14), (15), (16): Xaa is A or G
  MOD_RES (17), (18), (19), (20): Xaa is A or G or is absent
SEVVMDYHYKLXXXXXXXXXKYLISIPSLRTPVXXT

SEQ ID NO: 62751 - protein, 33 aa, Artificial Sequence; identical to SEQ ID NO: 3452
  GFR-binding peptide
  MOD_RES (32), (33): Xaa is C or S

SEQ ID NO: 62752 - protein, 43 aa, Artificial Sequence; identical to SEQ ID NO: 24437
  GFR-binding peptide
  MOD_RES (2), (4), (38), (39): Xaa is C or S
  MOD_RES (16), (17), (18), (19), (20): Xaa is A or G
  MOD_RES (21), (22), (23), (24): Xaa is A or G or is absent

SEQ ID NO: 62753 - protein, 40 aa, Artificial Sequence; identical to SEQ ID NO: 3458
  GFR-binding peptide
  MOD_RES (1), (3), (37): Xaa is C or S
  MOD_RES (15), (16), (17), (18), (19): Xaa is A or G
  MOD_RES (20), (21), (22), (23): Xaa is A or G or is absent

SEQ ID NO: 62754 - protein, 40 aa, Artificial Sequence; identical to SEQ ID NO: 24440
  GFR-binding peptide
  MOD_RES (2), (36), (37): Xaa is C or S
  MOD_RES (14), (15), (16), (17), (18): Xaa is A or G
  MOD_RES (19), (20), (21), (22): Xaa is A or G or is absent

SEQ ID NO: 62755 - protein, 38 aa, Artificial Sequence
  GFR-binding peptide
  MOD_RES (1), (3), (34), (35): Xaa is C or S
XGXEEVIMYHYKLLLVRGNDKYLMSIPSTKVPAXXTSP

SEQ ID NO: 62756 - protein, 33 aa, Artificial Sequence
  GFR-binding peptide
  MOD_RES (1), (1): Xaa is C or S
  MOD_RES (12), (13), (14), (15), (16): Xaa is A or G
  MOD_RES (17), (18), (19), (20): Xaa is A or G or is absent
XSKVVMPIKGYXXXXXXXXXFYLINIPSLDQPV

SEQ ID NO: 62757 - protein, 33 aa, Artificial Sequence; identical to SEQ ID NO: 24443
  GFR-binding peptide
  MOD_RES (33), (33): Xaa is C or S
  MOD_RES (11), (12), (13), (14), (15): Xaa is A or G
  MOD_RES (16), (17), (18), (19): Xaa is A or G or is absent

SEQ ID NO: 62758 - protein, 36 aa, Artificial Sequence; identical to SEQ ID NO: 31433
  GFR-binding peptide
  MOD_RES (2), (4): Xaa is C or S

SEQ ID NO: 62759 - protein, 41 aa, Artificial Sequence; identical to SEQ ID NO: 3464
  GFR-binding peptide
  MOD_RES (2), (4), (37), (38): Xaa is C or S
  MOD_RES (15), (16), (17), (18), (19): Xaa is A or G
  MOD_RES (20), (21), (22), (23): Xaa is A or G or is absent

SEQ ID NO: 62760 - protein, 34 aa, Artificial Sequence; identical to SEQ ID NO: 3465
  GFR-binding peptide
  MOD_RES (31), (32): Xaa is C or S

SEQ ID NO: 62761 - protein, 41 aa, Artificial Sequence; identical to SEQ ID NO: 3466
  GFR-binding peptide
  MOD_RES (2), (4), (37), (38): Xaa is C or S

SEQ ID NO: 62762 - protein, 39 aa, Artificial Sequence; identical to SEQ ID NO: 3468
  GFR-binding peptide
  MOD_RES (2), (34), (35): Xaa is C or S

SEQ ID NO: 62763 - protein, 36 aa, Artificial Sequence
  GFR-binding peptide
  MOD_RES (2), (33), (34): Xaa is C or S
KXSKVIMPIKGYIKPTKGIFYLINIPSLDQSVXXPS

SEQ ID NO: 62764 - protein, 37 aa, Artificial Sequence
  GFR-binding peptide
  MOD_RES (1), (33), (34): Xaa is C or S
XRDVVMGYHYKLIIQQKDNKYLMSIPSMKTPTXXPGA

SEQ ID NO: 62765 - protein, 36 aa, Artificial Sequence; identical to SEQ ID NO: 31442
  GFR-binding peptide
  MOD_RES (1), (3): Xaa is C or S
  MOD_RES (15), (16), (17), (18), (19): Xaa is A or G
  MOD_RES (20), (21), (22), (23): Xaa is A or G or is absent

SEQ ID NO: 62766 - protein, 34 aa, Artificial Sequence; identical to SEQ ID NO: 24452
  GFR-binding peptide
  MOD_RES (32), (33): Xaa is C or S

SEQ ID NO: 62767 - protein, 33 aa, Artificial Sequence; identical to SEQ ID NO: 3472
  GFR-binding peptide
  MOD_RES (2), (2): Xaa is C or S

SEQ ID NO: 62768 - protein, 39 aa, Artificial Sequence; identical to SEQ ID NO: 24454
  GFR-binding peptide
  MOD_RES (1), (3), (35), (36): Xaa is C or S

SEQ ID NO: 62769 - protein, 42 aa, Artificial Sequence; identical to SEQ ID NO: 3476
  GFR-binding peptide
  MOD_RES (1), (3), (37), (38): Xaa is C or S
  MOD_RES (15), (16), (17), (18), (19): Xaa is A or G
  MOD_RES (20), (21), (22), (23): Xaa is A or G or is absent

SEQ ID NO: 62770 - protein, 37 aa, Artificial Sequence; identical to SEQ ID NO: 24458
  GFR-binding peptide
  MOD_RES (33), (34): Xaa is C or S
  MOD_RES (11), (12), (13), (14), (15): Xaa is A or G
  MOD_RES (16), (17), (18), (19): Xaa is A or G or is absent

SEQ ID NO: 62771 - protein, 34 aa, Artificial Sequence; identical to SEQ ID NO: 3477
  GFR-binding peptide
  MOD_RES (2), (4): Xaa is C or S

SEQ ID NO: 62772 - protein, 39 aa, Artificial Sequence; identical to SEQ ID NO: 3478
  GFR-binding peptide
  MOD_RES (1), (3), (35), (36): Xaa is C or S

SEQ ID NO: 62773 - protein, 35 aa, Artificial Sequence; identical to SEQ ID NO: 3480
  GFR-binding peptide
  MOD_RES (33), (34): Xaa is C or S
  MOD_RES (11), (12), (13), (14), (15): Xaa is A or G
  MOD_RES (16), (17), (18), (19): Xaa is A or G or is absent

SEQ ID NO: 62774 - protein, 39 aa, Artificial Sequence; identical to SEQ ID NO: 31454
  GFR-binding peptide
  MOD_RES (1), (3), (36), (37): Xaa is C or S

SEQ ID NO: 62775 - protein, 34 aa, Artificial Sequence; identical to SEQ ID NO: 31455
  GFR-binding peptide
  MOD_RES (32), (33): Xaa is C or S

SEQ ID NO: 62776 - protein, 35 aa, Artificial Sequence; identical to SEQ ID NO: 3481
  GFR-binding peptide
  MOD_RES (31), (32): Xaa is C or S

SEQ ID NO: 62777 - protein, 41 aa, Artificial Sequence; identical to SEQ ID NO: 56380
  GFR-binding peptide
  MOD_RES (2), (35), (36): Xaa is C or S
  MOD_RES (13), (14), (15), (16), (17): Xaa is A or G
  MOD_RES (18), (19), (20), (21): Xaa is A or G or is absent

SEQ ID NO: 62778 - protein, 32 aa, Artificial Sequence
  GFR-binding peptide
  MOD_RES (1), (1): Xaa is C or S
XSEVVMDYHYKLVVNNASDKYLISIPSLRTPV

SEQ ID NO: 62779 - protein, 39 aa, Artificial Sequence; identical to SEQ ID NO: 31457
  GFR-binding peptide
  MOD_RES (1), (3), (35), (36): Xaa is C or S

SEQ ID NO: 62780 - protein, 35 aa, Artificial Sequence; identical to SEQ ID NO: 3485
  GFR-binding peptide
  MOD_RES (2), (34): Xaa is C or S

SEQ ID NO: 62781 - protein, 35 aa, Artificial Sequence; identical to SEQ ID NO: 3487
  GFR-binding peptide
  MOD_RES (34), (35): Xaa is C or S
  MOD_RES (12), (13), (14), (15), (16): Xaa is A or G
  MOD_RES (17), (18), (19), (20): Xaa is A or G or is absent

SEQ ID NO: 62782 - protein, 40 aa, Artificial Sequence; identical to SEQ ID NO: 3488
  GFR-binding peptide
  MOD_RES (1), (3), (36), (37): Xaa is C or S
  MOD_RES (14), (15), (16), (17), (18): Xaa is A or G
  MOD_RES (19), (20), (21), (22): Xaa is A or G or is absent

SEQ ID NO: 62783 - protein, 32 aa, Artificial Sequence; identical to SEQ ID NO: 10902
  GFR-binding peptide
  MOD_RES (1), (1): Xaa is C or S

SEQ ID NO: 62784 - protein, 41 aa, Artificial Sequence; identical to SEQ ID NO: 31462
  GFR-binding peptide
  MOD_RES (1), (36), (37): Xaa is C or S
  MOD_RES (14), (15), (16), (17), (18): Xaa is A or G
  MOD_RES (19), (20), (21), (22): Xaa is A or G or is absent

SEQ ID NO: 62785 - protein, 34 aa, Artificial Sequence; identical to SEQ ID NO: 31463
  GFR-binding peptide
  MOD_RES (33), (34): Xaa is C or S
  MOD_RES (11), (12), (13), (14), (15): Xaa is A or G
  MOD_RES (16), (17), (18), (19): Xaa is A or G or is absent

SEQ ID NO: 62786 - protein, 38 aa, Artificial Sequence; identical to SEQ ID NO: 3492
  GFR-binding peptide
  MOD_RES (1), (3), (36), (37): Xaa is C or S
  MOD_RES (14), (15), (16), (17), (18): Xaa is A or G
  MOD_RES (19), (20), (21), (22): Xaa is A or G or is absent

SEQ ID NO: 62787 - protein, 36 aa, Artificial Sequence; identical to SEQ ID NO: 24473
  GFR-binding peptide
  MOD_RES (1), (3): Xaa is C or S
  MOD_RES (15), (16), (17), (18), (19): Xaa is A or G
  MOD_RES (20), (21), (22), (23): Xaa is A or G or is absent

SEQ ID NO: 62788 - protein, 30 aa, Artificial Sequence; identical to SEQ ID NO: 3495
  GFR-binding peptide

SEQ ID NO: 62789 - protein, 32 aa, Artificial Sequence; identical to SEQ ID NO: 3497
  GFR-binding peptide
  MOD_RES (11), (12), (13), (14), (15): Xaa is A or G
  MOD_RES (16), (17), (18), (19): Xaa is A or G or is absent

SEQ ID NO: 62790 - protein, 33 aa, Artificial Sequence; identical to SEQ ID NO: 3498
  GFR-binding peptide
  MOD_RES (33), (33): Xaa is C or S
  MOD_RES (11), (12), (13), (14), (15): Xaa is A or G
  MOD_RES (16), (17), (18), (19): Xaa is A or G or is absent

SEQ ID NO: 62791 - protein, 35 aa, Artificial Sequence
  GFR-binding peptide
  MOD_RES (32), (33): Xaa is C or S
AEVVMDRHKRLVVNNAADYYLISTASLRAPVXXSA

SEQ ID NO: 62792 - protein, 36 aa, Artificial Sequence
  GFR-binding peptide
  MOD_RES (31), (32): Xaa is C or S
DVVMGEYKFKIIQQKDNLYLMSIPEMKTPTXXPGAS

SEQ ID NO: 62793 - protein, 40 aa, Artificial Sequence; identical to SEQ ID NO: 24484
  GFR-binding peptide
  MOD_RES (1), (3), (35): Xaa is C or S

SEQ ID NO: 62794 - protein, 40 aa, Artificial Sequence; identical to SEQ ID NO: 3502
  GFR-binding peptide
  MOD_RES (2), (4), (35), (36): Xaa is C or S

SEQ ID NO: 62795 - protein, 40 aa, Artificial Sequence; identical to SEQ ID NO: 3503
  GFR-binding peptide
  MOD_RES (1), (3), (35), (36): Xaa is C or S

SEQ ID NO: 62796 - protein, 36 aa, Artificial Sequence; identical to SEQ ID NO: 3504
  GFR-binding peptide
  MOD_RES (32), (33): Xaa is C or S

SEQ ID NO: 62797 - protein, 35 aa, Artificial Sequence
  GFR-binding peptide
  MOD_RES (31), (32): Xaa is C or S
EEVIMRHKRLLLVRGNDYYLMSTASTKVPAXXTSP

SEQ ID NO: 62798 - protein, 37 aa, Artificial Sequence; identical to SEQ ID NO: 24487
  GFR-binding peptide
  MOD_RES (1), (34), (35): Xaa is C or S
  MOD_RES (12), (13), (14), (15), (16): Xaa is A or G
  MOD_RES (17), (18), (19), (20): Xaa is A or G or is absent

SEQ ID NO: 62799 - protein, 38 aa, Artificial Sequence; identical to SEQ ID NO: 3505
  GFR-binding peptide
  MOD_RES (1), (3), (34), (35): Xaa is C or S

SEQ ID NO: 62800 - protein, 39 aa, Artificial Sequence
  GFR-binding peptide
  MOD_RES (1), (3), (37), (38): Xaa is C or S
  MOD_RES (15), (16), (17), (18), (19): Xaa is A or G
  MOD_RES (20), (21), (22), (23): Xaa is A or G or is absent
XGXSEVVMDYHYKLXXXXXXXXXKYLISIPSLRTPVXXT

SEQ ID NO: 62801 - protein, 36 aa, Artificial Sequence; identical to SEQ ID NO: 31489
  GFR-binding peptide
  MOD_RES (2), (35), (36): Xaa is C or S
  MOD_RES (13), (14), (15), (16), (17): Xaa is A or G
  MOD_RES (18), (19), (20), (21): Xaa is A or G or is absent

SEQ ID NO: 62802 - protein, 35 aa, Artificial Sequence; identical to SEQ ID NO: 3509
  GFR-binding peptide
  MOD_RES (2), (2): Xaa is C or S
  MOD_RES (14), (15), (16), (17), (18): Xaa is A or G
  MOD_RES (19), (20), (21), (22): Xaa is A or G or is absent

SEQ ID NO: 62803 - protein, 43 aa, Artificial Sequence; identical to SEQ ID NO: 3510
  GFR-binding peptide
  MOD_RES (1), (3), (38), (39): Xaa is C or S
  MOD_RES (16), (17), (18), (19), (20): Xaa is A or G
  MOD_RES (21), (22), (23), (24): Xaa is A or G or is absent

SEQ ID NO: 62804 - protein, 39 aa, Artificial Sequence; identical to SEQ ID NO: 3511
  GFR-binding peptide
  MOD_RES (1), (35): Xaa is C or S
  MOD_RES (13), (14), (15), (16), (17): Xaa is A or G
  MOD_RES (18), (19), (20), (21): Xaa is A or G or is absent

SEQ ID NO: 62805 - protein, 36 aa, Artificial Sequence; identical to SEQ ID NO: 24497
  GFR-binding peptide
  MOD_RES (1), (3): Xaa is C or S
  MOD_RES (15), (16), (17), (18), (19): Xaa is A or G
  MOD_RES (20), (21), (22), (23): Xaa is A or G or is absent

SEQ ID NO: 62806 - protein, 34 aa, Artificial Sequence; identical to SEQ ID NO: 3514
  GFR-binding peptide
  MOD_RES (34), (34): Xaa is C or S
  MOD_RES (12), (13), (14), (15), (16): Xaa is A or G
  MOD_RES (17), (18), (19), (20): Xaa is A or G or is absent

SEQ ID NO: 62807 - protein, 37 aa, Artificial Sequence; identical to SEQ ID NO: 3515
  GFR-binding peptide
  MOD_RES (2), (4), (35), (36): Xaa is C or S

SEQ ID NO: 62808 - protein, 33 aa, Artificial Sequence
  GFR-binding peptide
  MOD_RES (33), (33): Xaa is C or S
  MOD_RES (11), (12), (13), (14), (15): Xaa is A or G
  MOD_RES (16), (17), (18), (19): Xaa is A or G or is absent
DVVMGRHKRLXXXXXXXXXYYLMSTASMKTPTX

SEQ ID NO: 62809 - protein, 35 aa, Artificial Sequence; identical to SEQ ID NO: 24502
  GFR-binding peptide
  MOD_RES (2), (34), (35): Xaa is C or S

SEQ ID NO: 62810 - protein, 34 aa, Artificial Sequence
  GFR-binding peptide
  MOD_RES (1), (1): Xaa is C or S
  MOD_RES (13), (14), (15), (16), (17): Xaa is A or G
  MOD_RES (18), (19), (20), (21): Xaa is A or G or is absent
XESVAMGRHKRLXXXXXXXXXYYLISTASLKTPV

SEQ ID NO: 62811 - protein, 35 aa, Artificial Sequence; identical to SEQ ID NO: 24505
  GFR-binding peptide
  MOD_RES (2), (2): Xaa is C or S
  MOD_RES (14), (15), (16), (17), (18): Xaa is A or G
  MOD_RES (19), (20), (21), (22): Xaa is A or G or is absent

SEQ ID NO: 62812 - protein, 40 aa, Artificial Sequence; identical to SEQ ID NO: 3523
  GFR-binding peptide
  MOD_RES (2), (34), (35): Xaa is C or S

SEQ ID NO: 62813 - protein, 32 aa, Artificial Sequence; identical to SEQ ID NO: 31499
  GFR-binding peptide
  MOD_RES (31), (32): Xaa is C or S

SEQ ID NO: 62814 - protein, 37 aa, Artificial Sequence
  GFR-binding peptide
  MOD_RES (32), (33): Xaa is C or S
SEVVMDEYKFKVVNNASDLYLISIPELRTPVXXTPPT

SEQ ID NO: 62815 - protein, 35 aa, Artificial Sequence; identical to SEQ ID NO: 24510
  GFR-binding peptide
  MOD_RES (2), (33), (34): Xaa is C or S

SEQ ID NO: 62816 - protein, 32 aa, Artificial Sequence; identical to SEQ ID NO: 24514
  GFR-binding peptide
  MOD_RES (1), (1): Xaa is C or S

SEQ ID NO: 62817 - protein, 36 aa, Artificial Sequence; identical to SEQ ID NO: 3527
  GFR-binding peptide
  MOD_RES (1), (3), (34), (35): Xaa is C or S

SEQ ID NO: 62818 - protein, 38 aa, Artificial Sequence; identical to SEQ ID NO: 31504
  GFR-binding peptide
  MOD_RES (34), (35): Xaa is C or S
  MOD_RES (12), (13), (14), (15), (16): Xaa is A or G
  MOD_RES (17), (18), (19), (20): Xaa is A or G or is absent

SEQ ID NO: 62819 - protein, 34 aa, Artificial Sequence
  GFR-binding peptide
  MOD_RES (34), (34): Xaa is C or S
  MOD_RES (12), (13), (14), (15), (16): Xaa is A or G
  MOD_RES (17), (18), (19), (20): Xaa is A or G or is absent
SEVVMDEYKFKXXXXXXXXXLYLISIPELRTPVX

SEQ ID NO: 62820 - protein, 35 aa, Artificial Sequence
  GFR-binding peptide
  MOD_RES (1), (3), (35): Xaa is C or S
XGXRDVVMGEYKFKIIQQKDNLYLMSIPEMKTPTX

SEQ ID NO: 62821 - protein, 35 aa, Artificial Sequence; identical to SEQ ID NO: 3534
  GFR-binding peptide
  MOD_RES (1), (34), (35): Xaa is C or S
  MOD_RES (12), (13), (14), (15), (16): Xaa is A or G
  MOD_RES (17), (18), (19), (20): Xaa is A or G or is absent

SEQ ID NO: 62822 - protein, 34 aa, Artificial Sequence; identical to SEQ ID NO: 24523
  GFR-binding peptide
  MOD_RES (31), (32): Xaa is C or S

SEQ ID NO: 62823 - protein, 36 aa, Artificial Sequence; identical to SEQ ID NO: 3535
  GFR-binding peptide
  MOD_RES (1), (3), (36): Xaa is C or S
  MOD_RES (14), (15), (16), (17), (18): Xaa is A or G
  MOD_RES (19), (20), (21), (22): Xaa is A or G or is absent

SEQ ID NO: 62824 - protein, 38 aa, Artificial Sequence; identical to SEQ ID NO: 24526
  GFR-binding peptide
  MOD_RES (2), (34), (35): Xaa is C or S

SEQ ID NO: 62825 - protein, 34 aa, Artificial Sequence
  GFR-binding peptide
  MOD_RES (31), (32): Xaa is C or S
EVVMDRHKRLVVNNAADYYLISTASLRAPVXXSA

SEQ ID NO: 62826 - protein, 39 aa, Artificial Sequence; identical to SEQ ID NO: 24527
  GFR-binding peptide
  MOD_RES (1), (33), (34): Xaa is C or S

SEQ ID NO: 62827 - protein, 38 aa, Artificial Sequence; identical to SEQ ID NO: 24531
  GFR-binding peptide
  MOD_RES (1), (3), (37), (38): Xaa is C or S
  MOD_RES (15), (16), (17), (18), (19): Xaa is A or G
  MOD_RES (20), (21), (22), (23): Xaa is A or G or is absent

SEQ ID NO: 62828 - protein, 38 aa, Artificial Sequence; identical to SEQ ID NO: 24532
  GFR-binding peptide
  MOD_RES (33), (34): Xaa is C or S
  MOD_RES (11), (12), (13), (14), (15): Xaa is A or G
  MOD_RES (16), (17), (18), (19): Xaa is A or G or is absent

SEQ ID NO: 62829 - protein, 43 aa, Artificial Sequence; identical to SEQ ID NO: 10947
  GFR-binding peptide
  MOD_RES (1), (3), (37), (38): Xaa is C or S
  MOD_RES (15), (16), (17), (18), (19): Xaa is A or G
  MOD_RES (20), (21), (22), (23): Xaa is A or G or is absent

SEQ ID NO: 62830 - protein, 35 aa, Artificial Sequence; identical to SEQ ID NO: 3538
  GFR-binding peptide
  MOD_RES (2), (33), (34): Xaa is C or S

SEQ ID NO: 62831 - protein, 42 aa, Artificial Sequence
  GFR-binding peptide
  MOD_RES (2), (36), (37): Xaa is C or S
  MOD_RES (14), (15), (16), (17), (18): Xaa is A or G
  MOD_RES (19), (20), (21), (22): Xaa is A or G or is absent
GXSEVVMDEYKFKXXXXXXXXXLYLISIPELRTPVXXTPPTS

SEQ ID NO: 62832 - protein, 37 aa, Artificial Sequence; identical to SEQ ID NO: 24533
  GFR-binding peptide
  MOD_RES (31), (32): Xaa is C or S

SEQ ID NO: 62833 - protein, 41 aa, Artificial Sequence
  GFR-binding peptide
  MOD_RES (2), (4), (38), (39): Xaa is C or S
  MOD_RES (16), (17), (18), (19), (20): Xaa is A or G
  MOD_RES (21), (22), (23), (24): Xaa is A or G or is absent
RXAXSEVTMNPIKGYXXXXXXXXXFYLINIPSMKEPVXXPE

SEQ ID NO: 62834 - protein, 38 aa, Artificial Sequence; identical to SEQ ID NO: 3542
  GFR-binding peptide
  MOD_RES (2), (4), (38): Xaa is C or S
  MOD_RES (16), (17), (18), (19), (20): Xaa is A or G
  MOD_RES (21), (22), (23), (24): Xaa is A or G or is absent

SEQ ID NO: 62835 - protein, 38 aa, Artificial Sequence; identical to SEQ ID NO: 3543
  GFR-binding peptide
  MOD_RES (1), (3), (35), (36): Xaa is C or S

SEQ ID NO: 62836 - protein, 38 aa, Artificial Sequence; identical to SEQ ID NO: 24538
  GFR-binding peptide
  MOD_RES (1), (35), (36): Xaa is C or S
  MOD_RES (13), (14), (15), (16), (17): Xaa is A or G
  MOD_RES (18), (19), (20), (21): Xaa is A or G or is absent

SEQ ID NO: 62837 - protein, 35 aa, Artificial Sequence; identical to SEQ ID NO: 3545
  GFR-binding peptide
  MOD_RES (1), (35): Xaa is C or S
  MOD_RES (13), (14), (15), (16), (17): Xaa is A or G
  MOD_RES (18), (19), (20), (21): Xaa is A or G or is absent

SEQ ID NO: 62838 - protein, 33 aa, Artificial Sequence; identical to SEQ ID NO: 31530
  GFR-binding peptide
  MOD_RES (1), (33): Xaa is C or S

SEQ ID NO: 62839 - protein, 37 aa, Artificial Sequence
  GFR-binding peptide
  MOD_RES (33), (34): Xaa is C or S
  MOD_RES (11), (12), (13), (14), (15): Xaa is A or G
  MOD_RES (16), (17), (18), (19): Xaa is A or G or is absent
DVVMGRHKRLXXXXXXXXXYYLMSTASMKTPTXXPGA

SEQ ID NO: 62840 - protein, 37 aa, Artificial Sequence; identical to SEQ ID NO: 24540
  GFR-binding peptide
  MOD_RES (2), (4), (36), (37): Xaa is C or S

SEQ ID NO: 62841 - protein, 38 aa, Artificial Sequence; identical to SEQ ID NO: 56461
  GFR-binding peptide
  MOD_RES (2), (4), (37), (38): Xaa is C or S
  MOD_RES (15), (16), (17), (18), (19): Xaa is A or G
  MOD_RES (20), (21), (22), (23): Xaa is A or G or is absent

SEQ ID NO: 62842 - protein, 36 aa, Artificial Sequence; identical to SEQ ID NO: 31534
  GFR-binding peptide
  MOD_RES (2), (34), (35): Xaa is C or S

SEQ ID NO: 62843 - protein, 33 aa, Artificial Sequence
  GFR-binding peptide
  MOD_RES (31), (32): Xaa is C or S
SKVVMPIKGYVKPTRGVFYLINIPSLDQPVXXP

SEQ ID NO: 62844 - protein, 40 aa, Artificial Sequence
  GFR-binding peptide
  MOD_RES (2), (4), (38), (39): Xaa is C or S
  MOD_RES (16), (17), (18), (19), (20): Xaa is A or G
  MOD_RES (21), (22), (23), (24): Xaa is A or G or is absent
RXGXSEVVMDEYKFKXXXXXXXXXLYLISIPELRTPVXXT

SEQ ID NO: 62845 - protein, 34 aa, Artificial Sequence; identical to SEQ ID NO: 3549
  GFR-binding peptide
  MOD_RES (2), (2): Xaa is C or S
  MOD_RES (13), (14), (15), (16), (17): Xaa is A or G
  MOD_RES (18), (19), (20), (21): Xaa is A or G or is absent

SEQ ID NO: 62846 - protein, 35 aa, Artificial Sequence
  GFR-binding peptide
  MOD_RES (1), (35): Xaa is C or S
  MOD_RES (13), (14), (15), (16), (17): Xaa is A or G
  MOD_RES (18), (19), (20), (21): Xaa is A or G or is absent
XESVAMGRHKRLXXXXXXXXXYYLISTASLKTPVX

SEQ ID NO: 62847 - protein, 40 aa, Artificial Sequence; identical to SEQ ID NO: 24550
  GFR-binding peptide
  MOD_RES (34), (35): Xaa is C or S
  MOD_RES (12), (13), (14), (15), (16): Xaa is A or G
  MOD_RES (17), (18), (19), (20): Xaa is A or G or is absent

SEQ ID NO: 62848 - protein, 37 aa, Artificial Sequence
  GFR-binding peptide
  MOD_RES (1), (32), (33): Xaa is C or S
XSRVIMPIKGYVKPKRGVFYLINIPSLAQPVXXPAAS

SEQ ID NO: 62849 - protein, 36 aa, Artificial Sequence
  GFR-binding peptide
  MOD_RES (33), (34): Xaa is C or S
  MOD_RES (11), (12), (13), (14), (15): Xaa is A or G
  MOD_RES (16), (17), (18), (19): Xaa is A or G or is absent
DVVMGEYKFKXXXXXXXXXLYLMSIPEMKTPTXXPG

SEQ ID NO: 62850 - protein, 39 aa, Artificial Sequence
  GFR-binding peptide
  MOD_RES (2), (34), (35): Xaa is C or S
GXESVAMGRHKRLYTVVGKDYYLISTASLKTPVXXAKSA

SEQ ID NO: 62851 - protein, 39 aa, Artificial Sequence; identical to SEQ ID NO: 3554
  GFR-binding peptide
  MOD_RES (1), (33), (34): Xaa is C or S

SEQ ID NO: 62852 - protein, 42 aa, Artificial Sequence; identical to SEQ ID NO: 24558
  GFR-binding peptide
  MOD_RES (1), (3), (37), (38): Xaa is C or S
  MOD_RES (15), (16), (17), (18), (19): Xaa is A or G
  MOD_RES (20), (21), (22), (23): Xaa is A or G or is absent

SEQ ID NO: 62853 - protein, 40 aa, Artificial Sequence; identical to SEQ ID NO: 24560
  GFR-binding peptide
  MOD_RES (2), (34), (35): Xaa is C or S

SEQ ID NO: 62854 - protein, 38 aa, Artificial Sequence
  GFR-binding peptide
  MOD_RES (2), (34), (35): Xaa is C or S
GXSEVVMDYHYKLVVNNASDKYLISIPSLRTPVXXTPP

SEQ ID NO: 62855 - protein, 38 aa, Artificial Sequence; identical to SEQ ID NO: 24562
  GFR-binding peptide
  MOD_RES (2), (34), (35): Xaa is C or S

SEQ ID NO: 62856 - protein, 39 aa, Artificial Sequence; identical to SEQ ID NO: 3556
  GFR-binding peptide
  MOD_RES (2), (33), (34): Xaa is C or S

SEQ ID NO: 62857 - protein, 39 aa, Artificial Sequence; identical to SEQ ID NO: 24564
  GFR-binding peptide
  MOD_RES (1), (3), (35), (36): Xaa is C or S

SEQ ID NO: 62858 - protein, 42 aa, Artificial Sequence; identical to SEQ ID NO: 24566
  GFR-binding peptide
  MOD_RES (1), (3), (37), (38): Xaa is C or S
  MOD_RES (15), (16), (17), (18), (19): Xaa is A or G
  MOD_RES (20), (21), (22), (23): Xaa is A or G or is absent

SEQ ID NO: 62859 - protein, 33 aa, Artificial Sequence; identical to SEQ ID NO: 3558
  GFR-binding peptide
  MOD_RES (12), (13), (14), (15), (16): Xaa is A or G
  MOD_RES (17), (18), (19), (20): Xaa is A or G or is absent

SEQ ID NO: 62860 - protein, 35 aa, Artificial Sequence; identical to SEQ ID NO: 24568
  GFR-binding peptide
  MOD_RES (34), (35): Xaa is C or S
  MOD_RES (12), (13), (14), (15), (16): Xaa is A or G
  MOD_RES (17), (18), (19), (20): Xaa is A or G or is absent

SEQ ID NO: 62861 - protein, 34 aa, Artificial Sequence
  GFR-binding peptide
  MOD_RES (2), (33), (34): Xaa is C or S
GXEEVIMRHKRLLLVRGNDYYLMSTASTKVPAXX

SEQ ID NO: 62862 - protein, 33 aa, Artificial Sequence; identical to SEQ ID NO: 3561
  GFR-binding peptide
  MOD_RES (1), (33): Xaa is C or S

SEQ ID NO: 62863 - protein, 35 aa, Artificial Sequence; identical to SEQ ID NO: 3562
  GFR-binding peptide
  MOD_RES (2), (4): Xaa is C or S

SEQ ID NO: 62864 - protein, 33 aa, Artificial Sequence; identical to SEQ ID NO: 10982
  GFR-binding peptide
  MOD_RES (32), (33): Xaa is C or S

SEQ ID NO: 62865 - protein, 32 aa, Artificial Sequence; identical to SEQ ID NO: 3564
  GFR-binding peptide
  MOD_RES (11), (12), (13), (14), (15): Xaa is A or G
  MOD_RES (16), (17), (18), (19): Xaa is A or G or is absent

SEQ ID NO: 62866 - protein, 37 aa, Artificial Sequence; identical to SEQ ID NO: 24575
  GFR-binding peptide
  MOD_RES (32), (33): Xaa is C or S

SEQ ID NO: 62867 - protein, 38 aa, Artificial Sequence; identical to SEQ ID NO: 56491
  GFR-binding peptide
  MOD_RES (33), (34): Xaa is C or S
  MOD_RES (11), (12), (13), (14), (15): Xaa is A or G
  MOD_RES (16), (17), (18), (19): Xaa is A or G or is absent

SEQ ID NO: 62868 - protein, 36 aa, Artificial Sequence
  GFR-binding peptide
  MOD_RES (1), (3), (35), (36): Xaa is C or S
XAXSEVTMNRHKRLVVNKNEDYYLISTASMKEPVXX

SEQ ID NO: 62869 - protein, 41 aa, Artificial Sequence; identical to SEQ ID NO: 3568
  GFR-binding peptide
  MOD_RES (1), (3), (35), (36): Xaa is C or S

SEQ ID NO: 62870 - protein, 35 aa, Artificial Sequence; identical to SEQ ID NO: 3570
  GFR-binding peptide
  MOD_RES (2), (34), (35): Xaa is C or S

SEQ ID NO: 62871 - protein, 35 aa, Artificial Sequence
  GFR-binding peptide
  MOD_RES (31), (32): Xaa is C or S
EVVMDRHKRLVVNNASDYYLISTASLRTPVXXTPP

SEQ ID NO: 62872 - protein, 30 aa, Artificial Sequence; identical to SEQ ID NO: 3571
  GFR-binding peptide

SEQ ID NO: 62873 - protein, 38 aa, Artificial Sequence; identical to SEQ ID NO: 3572
  GFR-binding peptide
  MOD_RES (2), (4), (38): Xaa is C or S
  MOD_RES (16), (17), (18), (19), (20): Xaa is A or G
  MOD_RES (21), (22), (23), (24): Xaa is A or G or is absent

SEQ ID NO: 62874 - protein, 40 aa, Artificial Sequence; identical to SEQ ID NO: 31576
  GFR-binding peptide
  MOD_RES (34), (35): Xaa is C or S
  MOD_RES (12), (13), (14), (15), (16): Xaa is A or G
  MOD_RES (17), (18), (19), (20): Xaa is A or G or is absent

SEQ ID NO: 62875 - protein, 32 aa, Artificial Sequence; identical to SEQ ID NO: 3577
  GFR-binding peptide
  MOD_RES (1), (1): Xaa is C or S

SEQ ID NO: 62876 - protein, 37 aa, Artificial Sequence; identical to SEQ ID NO: 3579
  GFR-binding peptide
  MOD_RES (2), (36), (37): Xaa is C or S
  MOD_RES (14), (15), (16), (17), (18): Xaa is A or G
  MOD_RES (19), (20), (21), (22): Xaa is A or G or is absent

SEQ ID NO: 62877 - protein, 34 aa, Artificial Sequence; identical to SEQ ID NO: 24585
  GFR-binding peptide
  MOD_RES (31), (32): Xaa is C or S

SEQ ID NO: 62878 - protein, 42 aa, Artificial Sequence; identical to SEQ ID NO: 3580
  GFR-binding peptide
  MOD_RES (1), (36), (37): Xaa is C or S
  MOD_RES (14), (15), (16), (17), (18): Xaa is A or G
  MOD_RES (19), (20), (21), (22): Xaa is A or G or is absent

SEQ ID NO: 62879 - protein, 33 aa, Artificial Sequence; identical to SEQ ID NO: 24588
  GFR-binding peptide
  MOD_RES (33), (33): Xaa is C or S
  MOD_RES (11), (12), (13), (14), (15): Xaa is A or G
  MOD_RES (16), (17), (18), (19): Xaa is A or G or is absent

SEQ ID NO: 62880 - protein, 32 aa, Artificial Sequence; identical to SEQ ID NO: 3581
  GFR-binding peptide
  MOD_RES (32), (32): Xaa is C or S

SEQ ID NO: 62881 - protein, 37 aa, Artificial Sequence; identical to SEQ ID NO: 3582
  GFR-binding peptide
  MOD_RES (34), (35): Xaa is C or S
  MOD_RES (12), (13), (14), (15), (16): Xaa is A or G
  MOD_RES (17), (18), (19), (20): Xaa is A or G or is absent

SEQ ID NO: 62882 - protein, 38 aa, Artificial Sequence; identical to SEQ ID NO: 3583
  GFR-binding peptide
  MOD_RES (32), (33): Xaa is C or S

SEQ ID NO: 62883 - protein, 41 aa, Artificial Sequence; identical to SEQ ID NO: 24593
  GFR-binding peptide
  MOD_RES (1), (35), (36): Xaa is C or S
  MOD_RES (13), (14), (15), (16), (17): Xaa is A or G
  MOD_RES (18), (19), (20), (21): Xaa is A or G or is absent

SEQ ID NO: 62884 - protein, 35 aa, Artificial Sequence
  GFR-binding peptide
  MOD_RES (1), (35): Xaa is C or S
  MOD_RES (13), (14), (15), (16), (17): Xaa is A or G
  MOD_RES (18), (19), (20), (21): Xaa is A or G or is absent
XSEVVMDRHKRLXXXXXXXXXYYLISTASLRTPVX

SEQ ID NO: 62885 - protein, 34 aa, Artificial Sequence; identical to SEQ ID NO: 3585
  GFR-binding peptide
  MOD_RES (1), (33), (34): Xaa is C or S

SEQ ID NO: 62886 - protein, 39 aa, Artificial Sequence; identical to SEQ ID NO: 3586
  GFR-binding peptide
  MOD_RES (2), (4), (36), (37): Xaa is C or S

SEQ ID NO: 62887 - protein, 36 aa, Artificial Sequence; identical to SEQ ID NO: 3589
  GFR-binding peptide
  MOD_RES (1), (3), (36): Xaa is C or S
  MOD_RES (14), (15), (16), (17), (18): Xaa is A or G
  MOD_RES (19), (20), (21), (22): Xaa is A or G or is absent

SEQ ID NO: 62888 - protein, 41 aa, Artificial Sequence; identical to SEQ ID NO: 24599
  GFR-binding peptide
  MOD_RES (1), (35), (36): Xaa is C or S
  MOD_RES (13), (14), (15), (16), (17): Xaa is A or G
  MOD_RES (18), (19), (20), (21): Xaa is A or G or is absent

SEQ ID NO: 62889 - protein, 40 aa, Artificial Sequence; identical to SEQ ID NO: 3591
  GFR-binding peptide
  MOD_RES (1), (3), (37), (38): Xaa is C or S
  MOD_RES (15), (16), (17), (18), (19): Xaa is A or G
  MOD_RES (20), (21), (22), (23): Xaa is A or G or is absent

SEQ ID NO: 62890 - protein, 40 aa, Artificial Sequence; identical to SEQ ID NO: 3592
  GFR-binding peptide
  MOD_RES (1), (3), (34), (35): Xaa is C or S

SEQ ID NO: 62891 - protein, 41 aa, Artificial Sequence; identical to SEQ ID NO: 3593
  GFR-binding peptide
  MOD_RES (1), (3), (36), (37): Xaa is C or S

SEQ ID NO: 62892 - protein, 40 aa, Artificial Sequence; identical to SEQ ID NO: 24604
  GFR-binding peptide
  MOD_RES (1), (3), (38), (39): Xaa is C or S
  MOD_RES (16), (17), (18), (19), (20): Xaa is A or G
  MOD_RES (21), (22), (23), (24): Xaa is A or G or is absent

SEQ ID NO: 62893 - protein, 42 aa, Artificial Sequence
  GFR-binding peptide
  MOD_RES (2), (36), (37): Xaa is C or S
  MOD_RES (14), (15), (16), (17), (18): Xaa is A or G
  MOD_RES (19), (20), (21), (22): Xaa is A or G or is absent
GXSEVVMDYHYKLXXXXXXXXXKYLISIPSLRTPVXXTPPTS

SEQ ID NO: 62894 - protein, 37 aa, Artificial Sequence
  GFR-binding peptide
  MOD_RES (1), (3), (36), (37): Xaa is C or S
  MOD_RES (14), (15), (16), (17), (18): Xaa is A or G
  MOD_RES (19), (20), (21), (22): Xaa is A or G or is absent
XGXEEVIMEYKFKXXXXXXXXXLYLMSIPETKVPAXX

SEQ ID NO: 62895 - protein, 33 aa, Artificial Sequence
  GFR-binding peptide
  MOD_RES (2), (33): Xaa is C or S
GXEEVIMRHKRLLLVRGNDYYLMSTASTKVPAX

SEQ ID NO: 62896 - protein, 37 aa, Artificial Sequence
  GFR-binding peptide
  MOD_RES (2), (33), (34): Xaa is C or S
GXEEVIMRHKRLLLVRGNDYYLMSTASTKVPAXXTSP

SEQ ID NO: 62897 - protein, 34 aa, Artificial Sequence; identical to SEQ ID NO: 31593
  GFR-binding peptide
  MOD_RES (1), (33), (34): Xaa is C or S

SEQ ID NO: 62898 - protein, 38 aa, Artificial Sequence; identical to SEQ ID NO: 31595
  GFR-binding peptide
  MOD_RES (1), (3), (37), (38): Xaa is C or S
  MOD_RES (15), (16), (17), (18), (19): Xaa is A or G
  MOD_RES (20), (21), (22), (23): Xaa is A or G or is absent

SEQ ID NO: 62899 - protein, 36 aa, Artificial Sequence; identical to SEQ ID NO: 24607
  GFR-binding peptide
  MOD_RES (32), (33): Xaa is C or S

SEQ ID NO: 62900 - protein, 38 aa, Artificial Sequence; identical to SEQ ID NO: 24609
  GFR-binding peptide
  MOD_RES (1), (3), (37), (38): Xaa is C or S
  MOD_RES (15), (16), (17), (18), (19): Xaa is A or G
  MOD_RES (20), (21), (22), (23): Xaa is A or G or is absent

SEQ ID NO: 62901 - protein, 37 aa, Artificial Sequence; identical to SEQ ID NO: 24611
  GFR-binding peptide
  MOD_RES (1), (3), (34), (35): Xaa is C or S

SEQ ID NO: 62902 - protein, 38 aa, Artificial Sequence; identical to SEQ ID NO: 3600
  GFR-binding peptide
  MOD_RES (1), (3), (36), (37): Xaa is C or S

SEQ ID NO: 62903 - protein, 35 aa, Artificial Sequence; identical to SEQ ID NO: 3603
  GFR-binding peptide
  MOD_RES (1), (3): Xaa is C or S
  MOD_RES (14), (15), (16), (17), (18): Xaa is A or G
  MOD_RES (19), (20), (21), (22): Xaa is A or G or is absent

SEQ ID NO: 62904 - protein, 39 aa, Artificial Sequence; identical to SEQ ID NO: 3604
  GFR-binding peptide
  MOD_RES (2), (36), (37): Xaa is C or S
  MOD_RES (14), (15), (16), (17), (18): Xaa is A or G
  MOD_RES (19), (20), (21), (22): Xaa is A or G or is absent

SEQ ID NO: 62905 - protein, 35 aa, Artificial Sequence
  GFR-binding peptide
  MOD_RES (1), (33), (34): Xaa is C or S
XSEVTMNEYKFKVVNKNEDLYLISIPEMKEPVXXP

SEQ ID NO: 62906 - protein, 33 aa, Artificial Sequence; identical to SEQ ID NO: 24618
  GFR-binding peptide
  MOD_RES (12), (13), (14), (15), (16): Xaa is A or G
  MOD_RES (17), (18), (19), (20): Xaa is A or G or is absent

SEQ ID NO: 62907 - protein, 38 aa, Artificial Sequence; identical to SEQ ID NO: 24619
  GFR-binding peptide
  MOD_RES (2), (4), (36), (37): Xaa is C or S

SEQ ID NO: 62908 - protein, 39 aa, Artificial Sequence
  GFR-binding peptide
  MOD_RES (1), (35), (36): Xaa is C or S
  MOD_RES (13), (14), (15), (16), (17): Xaa is A or G
  MOD_RES (18), (19), (20), (21): Xaa is A or G or is absent
XSEVVMDEYKFKXXXXXXXXXLYLISIPELRTPVXXTPP

SEQ ID NO: 62909 - protein, 40 aa, Artificial Sequence; identical to SEQ ID NO: 3613
  GFR-binding peptide
  MOD_RES (2), (4), (38), (39): Xaa is C or S
  MOD_RES (16), (17), (18), (19), (20): Xaa is A or G
  MOD_RES (21), (22), (23), (24): Xaa is A or G or is absent

SEQ ID NO: 62910 - protein, 34 aa, Artificial Sequence; identical to SEQ ID NO: 31610
  GFR-binding peptide
  MOD_RES (1), (3): Xaa is C or S

SEQ ID NO: 62911 - protein, 34 aa, Artificial Sequence; identical to SEQ ID NO: 3615
  GFR-binding peptide
  MOD_RES (31), (32): Xaa is C or S

SEQ ID NO: 62912 - protein, 35 aa, Artificial Sequence; identical to SEQ ID NO: 24623
  GFR-binding peptide
  MOD_RES (2), (2): Xaa is C or S
  MOD_RES (14), (15), (16), (17), (18): Xaa is A or G
  MOD_RES (19), (20), (21), (22): Xaa is A or G or is absent

SEQ ID NO: 62913 - protein, 38 aa, Artificial Sequence; identical to SEQ ID NO: 24625
  GFR-binding peptide
  MOD_RES (1), (3), (37), (38): Xaa is C or S
  MOD_RES (15), (16), (17), (18), (19): Xaa is A or G
  MOD_RES (20), (21), (22), (23): Xaa is A or G or is absent

SEQ ID NO: 62914 - protein, 40 aa, Artificial Sequence
  GFR-binding peptide
  MOD_RES (2), (4), (37), (38): Xaa is C or S
  MOD_RES (15), (16), (17), (18), (19): Xaa is A or G
  MOD_RES (20), (21), (22), (23): Xaa is A or G or is absent
LXGXEEVIMEYKFKXXXXXXXXXLYLMSIPETKVPAXXTS

SEQ ID NO: 62915 - protein, 37 aa, Artificial Sequence; identical to SEQ ID NO: 11036
  GFR-binding peptide
  MOD_RES (1), (35), (36): Xaa is C or S
  MOD_RES (13), (14), (15), (16), (17): Xaa is A or G
  MOD_RES (18), (19), (20), (21): Xaa is A or G or is absent

SEQ ID NO: 62916 - protein, 39 aa, Artificial Sequence; identical to SEQ ID NO: 3620
  GFR-binding peptide
  MOD_RES (2), (4), (36), (37): Xaa is C or S

SEQ ID NO: 62917 - protein, 36 aa, Artificial Sequence; identical to SEQ ID NO: 24629
  GFR-binding peptide
  MOD_RES (31), (32): Xaa is C or S

SEQ ID NO: 62918 - protein, 35 aa, Artificial Sequence; identical to SEQ ID NO: 3622
  GFR-binding peptide
  MOD_RES (2), (35): Xaa is C or S

SEQ ID NO: 62919 - protein, 37 aa, Artificial Sequence
  GFR-binding peptide
  MOD_RES (1), (35), (36): Xaa is C or S
  MOD_RES (13), (14), (15), (16), (17): Xaa is A or G
  MOD_RES (18), (19), (20), (21): Xaa is A or G or is absent
XSEVTMNYHYKLXXXXXXXXXKYLISIPSMKEPVXXP

SEQ ID NO: 62920 - protein, 37 aa, Artificial Sequence; identical to SEQ ID NO: 24633
  GFR-binding peptide
  MOD_RES (33), (34): Xaa is C or S
  MOD_RES (11), (12), (13), (14), (15): Xaa is A or G
  MOD_RES (16), (17), (18), (19): Xaa is A or G or is absent

SEQ ID NO: 62921 - protein, 38 aa, Artificial Sequence; identical to SEQ ID NO: 31626
  GFR-binding peptide
  MOD_RES (1), (36), (37): Xaa is C or S
  MOD_RES (14), (15), (16), (17), (18): Xaa is A or G
  MOD_RES (19), (20), (21), (22): Xaa is A or G or is absent

SEQ ID NO: 62922 - protein, 38 aa, Artificial Sequence; identical to SEQ ID NO: 31630
  GFR-binding peptide
  MOD_RES (1), (3), (35), (36): Xaa is C or S

SEQ ID NO: 62923 - protein, 37 aa, Artificial Sequence
  GFR-binding peptide
  MOD_RES (1), (32), (33): Xaa is C or S
XSKVIMPIKGYIKPTKGIFYLINIPSLDQSVXXPSAS

SEQ ID NO: 62924 - protein, 42 aa, Artificial Sequence; identical to SEQ ID NO: 31635
  GFR-binding peptide
  MOD_RES (2), (36), (37): Xaa is C or S
  MOD_RES (14), (15), (16), (17), (18): Xaa is A or G
  MOD_RES (19), (20), (21), (22): Xaa is A or G or is absent

SEQ ID NO: 62925 - protein, 37 aa, Artificial Sequence; identical to SEQ ID NO: 3629
  GFR-binding peptide
  MOD_RES (1), (34), (35): Xaa is C or S
  MOD_RES (12), (13), (14), (15), (16): Xaa is A or G
  MOD_RES (17), (18), (19), (20): Xaa is A or G or is absent

SEQ ID NO: 62926 - protein, 39 aa, Artificial Sequence; identical to SEQ ID NO: 3632
  GFR-binding peptide
  MOD_RES (33), (34): Xaa is C or S

SEQ ID NO: 62927 - protein, 35 aa, Artificial Sequence; identical to SEQ ID NO: 3633
  GFR-binding peptide
  MOD_RES (2), (34), (35): Xaa is C or S

SEQ ID NO: 62928 - protein, 37 aa, Artificial Sequence; identical to SEQ ID NO: 24646
  GFR-binding peptide
  MOD_RES (1), (3), (37): Xaa is C or S
  MOD_RES (15), (16), (17), (18), (19): Xaa is A or G
  MOD_RES (20), (21), (22), (23): Xaa is A or G or is absent

SEQ ID NO: 62929 - protein, 32 aa, Artificial Sequence; identical to SEQ ID NO: 24647
  GFR-binding peptide
  MOD_RES (11), (12), (13), (14), (15): Xaa is A or G
  MOD_RES (16), (17), (18), (19): Xaa is A or G or is absent

SEQ ID NO: 62930 - protein, 37 aa, Artificial Sequence; identical to SEQ ID NO: 31642
  GFR-binding peptide
  MOD_RES (1), (3), (37): Xaa is C or S
  MOD_RES (15), (16), (17), (18), (19): Xaa is A or G
  MOD_RES (20), (21), (22), (23): Xaa is A or G or is absent

SEQ ID NO: 62931 - protein, 41 aa, Artificial Sequence; identical to SEQ ID NO: 24650
  GFR-binding peptide
  MOD_RES (2), (35), (36): Xaa is C or S
  MOD_RES (13), (14), (15), (16), (17): Xaa is A or G
  MOD_RES (18), (19), (20), (21): Xaa is A or G or is absent

SEQ ID NO: 62932 - protein, 37 aa, Artificial Sequence; identical to SEQ ID NO: 3635
  GFR-binding peptide
  MOD_RES (2), (35), (36): Xaa is C or S
  MOD_RES (13), (14), (15), (16), (17): Xaa is A or G
  MOD_RES (18), (19), (20), (21): Xaa is A or G or is absent

SEQ ID NO: 62933 - protein, 40 aa, Artificial Sequence; identical to SEQ ID NO: 3636
  GFR-binding peptide
  MOD_RES (1), (34), (35): Xaa is C or S
  MOD_RES (12), (13), (14), (15), (16): Xaa is A or G
  MOD_RES (17), (18), (19), (20): Xaa is A or G or is absent

SEQ ID NO: 62934 - protein, 35 aa, Artificial Sequence; identical to SEQ ID NO: 3637
  GFR-binding peptide
  MOD_RES (2), (35): Xaa is C or S
  MOD_RES (13), (14), (15), (16), (17): Xaa is A or G
  MOD_RES (18), (19), (20), (21): Xaa is A or G or is absent

SEQ ID NO: 62935 - protein, 34 aa, Artificial Sequence; identical to SEQ ID NO: 3638
  GFR-binding peptide
  MOD_RES (1), (33), (34): Xaa is C or S

SEQ ID NO: 62936 - protein, 36 aa, Artificial Sequence; identical to SEQ ID NO: 3639
  GFR-binding peptide
  MOD_RES (2), (4), (35), (36): Xaa is C or S

SEQ ID NO: 62937 - protein, 40 aa, Artificial Sequence; identical to SEQ ID NO: 56579
  GFR-binding peptide
  MOD_RES (2), (36), (37): Xaa is C or S
  MOD_RES (14), (15), (16), (17), (18): Xaa is A or G
  MOD_RES (19), (20), (21), (22): Xaa is A or G or is absent

SEQ ID NO: 62938 - protein, 36 aa, Artificial Sequence; identical to SEQ ID NO: 3640
  GFR-binding peptide
  MOD_RES (1), (35), (36): Xaa is C or S
  MOD_RES (13), (14), (15), (16), (17): Xaa is A or G
  MOD_RES (18), (19), (20), (21): Xaa is A or G or is absent

SEQ ID NO: 62939 - protein, 42 aa, Artificial Sequence; identical to SEQ ID NO: 3642
  GFR-binding peptide
  MOD_RES (2), (4), (38), (39): Xaa is C or S
  MOD_RES (16), (17), (18), (19), (20): Xaa is A or G
  MOD_RES (21), (22), (23), (24): Xaa is A or G or is absent

SEQ ID NO: 62940 - protein, 33 aa, Artificial Sequence
  GFR-binding peptide
  MOD_RES (31), (32): Xaa is C or S
EVVMDEYKFKVVNNASDLYLISIPELRTPVXXT

SEQ ID NO: 62941 - protein, 37 aa, Artificial Sequence; identical to SEQ ID NO: 31648
  GFR-binding peptide
  MOD_RES (31), (32): Xaa is C or S

SEQ ID NO: 62942 - protein, 42 aa, Artificial Sequence; identical to SEQ ID NO: 3646
  GFR-binding peptide
  MOD_RES (2), (36), (37): Xaa is C or S
  MOD_RES (14), (15), (16), (17), (18): Xaa is A or G
  MOD_RES (19), (20), (21), (22): Xaa is A or G or is absent

SEQ ID NO: 62943 - protein, 43 aa, Artificial Sequence; identical to SEQ ID NO: 3647
  GFR-binding peptide
  MOD_RES (2), (4), (38), (39): Xaa is C or S
  MOD_RES (16), (17), (18), (19), (20): Xaa is A or G
  MOD_RES (21), (22), (23), (24): Xaa is A or G or is absent

SEQ ID NO: 62944 - protein, 40 aa, Artificial Sequence
  GFR-binding peptide
  MOD_RES (1), (3), (34), (35): Xaa is C or S
XGXEEVIMYHYKLLLVRGNDKYLMSIPSTKVPAXXTSPVR

SEQ ID NO: 62945 - protein, 38 aa, Artificial Sequence
  GFR-binding peptide
  MOD_RES (1), (3), (37), (38): Xaa is C or S
  MOD_RES (15), (16), (17), (18), (19): Xaa is A or G
  MOD_RES (20), (21), (22), (23): Xaa is A or G or is absent
XGXRDVVMGYHYKLXXXXXXXXXKYLMSIPSMKTPTXX

SEQ ID NO: 62946 - protein, 36 aa, Artificial Sequence; identical to SEQ ID NO: 31650
  GFR-binding peptide
  MOD_RES (1), (33), (34): Xaa is C or S

SEQ ID NO: 62947 - protein, 37 aa, Artificial Sequence; identical to SEQ ID NO: 56588
  GFR-binding peptide
  MOD_RES (2), (33), (34): Xaa is C or S

SEQ ID NO: 62948 - protein, 39 aa, Artificial Sequence; identical to SEQ ID NO: 3650
  GFR-binding peptide
  MOD_RES (1), (3), (35): Xaa is C or S

SEQ ID NO: 62949 - protein, 35 aa, Artificial Sequence; identical to SEQ ID NO: 3651
  GFR-binding peptide
  MOD_RES (1), (3): Xaa is C or S
  MOD_RES (14), (15), (16), (17), (18): Xaa is A or G
  MOD_RES (19), (20), (21), (22): Xaa is A or G or is absent

SEQ ID NO: 62950 - protein, 44 aa, Artificial Sequence; identical to SEQ ID NO: 3654
  GFR-binding peptide
  MOD_RES (1), (3), (38), (39): Xaa is C or S
  MOD_RES (16), (17), (18), (19), (20): Xaa is A or G
  MOD_RES (21), (22), (23), (24): Xaa is A or G or is absent

SEQ ID NO: 62951 - protein, 36 aa, Artificial Sequence; identical to SEQ ID NO: 24674
  GFR-binding peptide
  MOD_RES (34), (35): Xaa is C or S
  MOD_RES (12), (13), (14), (15), (16): Xaa is A or G
  MOD_RES (17), (18), (19), (20): Xaa is A or G or is absent

SEQ ID NO: 62952 - protein, 39 aa, Artificial Sequence; identical to SEQ ID NO: 3655
  GFR-binding peptide
  MOD_RES (2), (4), (39): Xaa is C or S
  MOD_RES (17), (18), (19), (20), (21): Xaa is A or G
  MOD_RES (22), (23), (24), (25): Xaa is A or G or is absent

SEQ ID NO: 62953 - protein, 33 aa, Artificial Sequence
  GFR-binding peptide
  MOD_RES (33), (33): Xaa is C or S
  MOD_RES (11), (12), (13), (14), (15): Xaa is A or G
  MOD_RES (16), (17), (18), (19): Xaa is A or G or is absent
DVVMGYHYKLXXXXXXXXXKYLMSIPSMKTPTX

SEQ ID NO: 62954 - protein, 37 aa, Artificial Sequence
  GFR-binding peptide
  MOD_RES (33), (34): Xaa is C or S
  MOD_RES (11), (12), (13), (14), (15): Xaa is A or G
  MOD_RES (16), (17), (18), (19): Xaa is A or G or is absent
EVTMNRYKKLXXXXXXXXXFYLISIANMKEPVXXPEP

SEQ ID NO: 62955 - protein, 35 aa, Artificial Sequence; identical to SEQ ID NO: 3656
  GFR-binding peptide
  MOD_RES (32), (33): Xaa is C or S

SEQ ID NO: 62956 - protein, 39 aa, Artificial Sequence; identical to SEQ ID NO: 3659
  GFR-binding peptide
  MOD_RES (1), (3), (34), (35): Xaa is C or S

SEQ ID NO: 62957 - protein, 38 aa, Artificial Sequence
  GFR-binding peptide
  MOD_RES (1), (35), (36): Xaa is C or S
  MOD_RES (13), (14), (15), (16), (17): Xaa is A or G
  MOD_RES (18), (19), (20), (21): Xaa is A or G or is absent
XSEVTMNYHYKLXXXXXXXXXKYLISIPSMKEPVXXPE

SEQ ID NO: 62958 - protein, 34 aa, Artificial Sequence; identical to SEQ ID NO: 3662
  GFR-binding peptide
  MOD_RES (33), (34): Xaa is C or S
  MOD_RES (11), (12), (13), (14), (15): Xaa is A or G
  MOD_RES (16), (17), (18), (19): Xaa is A or G or is absent

SEQ ID NO: 62959 - protein, 36 aa, Artificial Sequence
  GFR-binding peptide
  MOD_RES (1), (35), (36): Xaa is C or S
  MOD_RES (13), (14), (15), (16), (17): Xaa is A or G
  MOD_RES (18), (19), (20), (21): Xaa is A or G or is absent
XRDVVMGYHYKLXXXXXXXXXKYLMSIPSMKTPTXX

SEQ ID NO: 62960 - protein, 39 aa, Artificial Sequence; identical to SEQ ID NO: 3667
  GFR-binding peptide
  MOD_RES (34), (35): Xaa is C or S
  MOD_RES (12), (13), (14), (15), (16): Xaa is A or G
  MOD_RES (17), (18), (19), (20): Xaa is A or G or is absent

SEQ ID NO: 62961 - protein, 41 aa, Artificial Sequence; identical to SEQ ID NO: 3668
  GFR-binding peptide
  MOD_RES (1), (3), (35), (36): Xaa is C or S

SEQ ID NO: 62962 - protein, 34 aa, Artificial Sequence; identical to SEQ ID NO: 3669
  GFR-binding peptide
  MOD_RES (33), (34): Xaa is C or S
  MOD_RES (11), (12), (13), (14), (15): Xaa is A or G
  MOD_RES (16), (17), (18), (19): Xaa is A or G or is absent

SEQ ID NO: 62963 - protein, 37 aa, Artificial Sequence; identical to SEQ ID NO: 31675
  GFR-binding peptide
  MOD_RES (1), (3), (35), (36): Xaa is C or S

SEQ ID NO: 62964 - protein, 34 aa, Artificial Sequence
  GFR-binding peptide
  MOD_RES (1), (1): Xaa is C or S
  MOD_RES (13), (14), (15), (16), (17): Xaa is A or G
  MOD_RES (18), (19), (20), (21): Xaa is A or G or is absent
XSEVVMDRHKRLXXXXXXXXXYYLISTASLRTPV

SEQ ID NO: 62965 - protein, 34 aa, Artificial Sequence
  GFR-binding peptide
  MOD_RES (1), (32), (33): Xaa is C or S
XEEVIMEYKFKLLVRGNDLYLMSIPETKVPAXXT

SEQ ID NO: 62966 - protein, 37 aa, Artificial Sequence; identical to SEQ ID NO: 3673
  GFR-binding peptide
  MOD_RES (1), (3), (37): Xaa is C or S
  MOD_RES (15), (16), (17), (18), (19): Xaa is A or G
  MOD_RES (20), (21), (22), (23): Xaa is A or G or is absent

SEQ ID NO: 62967 - protein, 41 aa, Artificial Sequence; identical to SEQ ID NO: 3678
  GFR-binding peptide
  MOD_RES (1), (3), (37), (38): Xaa is C or S
  MOD_RES (15), (16), (17), (18), (19): Xaa is A or G
  MOD_RES (20), (21), (22), (23): Xaa is A or G or is absent

SEQ ID NO: 62968 - protein, 37 aa, Artificial Sequence; identical to SEQ ID NO: 31682
  GFR-binding peptide
  MOD_RES (2), (4), (36), (37): Xaa is C or S

SEQ ID NO: 62969 - protein, 34 aa, Artificial Sequence; identical to SEQ ID NO: 3682
  GFR-binding peptide
  MOD_RES (1), (32), (33): Xaa is C or S

SEQ ID NO: 62970 - protein, 37 aa, Artificial Sequence; identical to SEQ ID NO: 24700
  GFR-binding peptide
  MOD_RES (33), (34): Xaa is C or S
  MOD_RES (11), (12), (13), (14), (15): Xaa is A or G
  MOD_RES (16), (17), (18), (19): Xaa is A or G or is absent

SEQ ID NO: 62971 - protein, 33 aa, Artificial Sequence; identical to SEQ ID NO: 56621
  GFR-binding peptide
  MOD_RES (1), (33): Xaa is C or S

SEQ ID NO: 62972 - protein, 35 aa, Artificial Sequence; identical to SEQ ID NO: 3683
  GFR-binding peptide
  MOD_RES (33), (34): Xaa is C or S
  MOD_RES (11), (12), (13), (14), (15): Xaa is A or G
  MOD_RES (16), (17), (18), (19): Xaa is A or G or is absent

SEQ ID NO: 62973 - protein, 38 aa, Artificial Sequence; identical to SEQ ID NO: 3684
  GFR-binding peptide
  MOD_RES (2), (33), (34): Xaa is C or S

SEQ ID NO: 62974 - protein, 41 aa, Artificial Sequence; identical to SEQ ID NO: 24703
  GFR-binding peptide
  MOD_RES (2), (37), (38): Xaa is C or S
  MOD_RES (15), (16), (17), (18), (19): Xaa is A or G
  MOD_RES (20), (21), (22), (23): Xaa is A or G or is absent

SEQ ID NO: 62975 - protein, 38 aa, Artificial Sequence
  GFR-binding peptide
  MOD_RES (1), (32), (33): Xaa is C or S
XEEVIMRHKRLLLVRGNDYYLMSTASTKVPAXXTSPVR

SEQ ID NO: 62976 - protein, 39 aa, Artificial Sequence; identical to SEQ ID NO: 56629
  GFR-binding peptide
  MOD_RES (2), (4), (36), (37): Xaa is C or S

SEQ ID NO: 62977 - protein, 34 aa, Artificial Sequence; identical to SEQ ID NO: 31690
  GFR-binding peptide
  MOD_RES (1), (33), (34): Xaa is C or S

SEQ ID NO: 62978 - protein, 40 aa, Artificial Sequence
  GFR-binding peptide
  MOD_RES (2), (4), (36), (37): Xaa is C or S
RXAXSEVTMNRHKRLVVNKNEDYYLISTASMKEPVXXPEP

SEQ ID NO: 62979 - protein, 34 aa, Artificial Sequence; identical to SEQ ID NO: 3692
  GFR-binding peptide
  MOD_RES (2), (34): Xaa is C or S

SEQ ID NO: 62980 - protein, 38 aa, Artificial Sequence; identical to SEQ ID NO: 3693
  GFR-binding peptide
  MOD_RES (1), (3), (37), (38): Xaa is C or S
  MOD_RES (15), (16), (17), (18), (19): Xaa is A or G
  MOD_RES (20), (21), (22), (23): Xaa is A or G or is absent

SEQ ID NO: 62981 - protein, 41 aa, Artificial Sequence; identical to SEQ ID NO: 24712
  GFR-binding peptide
  MOD_RES (2), (36), (37): Xaa is C or S
  MOD_RES (14), (15), (16), (17), (18): Xaa is A or G
  MOD_RES (19), (20), (21), (22): Xaa is A or G or is absent

SEQ ID NO: 62982 - protein, 40 aa, Artificial Sequence
  GFR-binding peptide
  MOD_RES (2), (4), (38), (39): Xaa is C or S
  MOD_RES (16), (17), (18), (19), (20): Xaa is A or G
  MOD_RES (21), (22), (23), (24): Xaa is A or G or is absent
RXGXAEVVMDRHKRLXXXXXXXXXYYLISTASLRAPVXXS

SEQ ID NO: 62983 - protein, 39 aa, Artificial Sequence; identical to SEQ ID NO: 31702
  GFR-binding peptide
  MOD_RES (1), (35), (36): Xaa is C or S
  MOD_RES (13), (14), (15), (16), (17): Xaa is A or G
  MOD_RES (18), (19), (20), (21): Xaa is A or G or is absent

SEQ ID NO: 62984 - protein, 39 aa, Artificial Sequence
  GFR-binding peptide
  MOD_RES (1), (34), (35): Xaa is C or S
  MOD_RES (12), (13), (14), (15), (16): Xaa is A or G
  MOD_RES (17), (18), (19), (20): Xaa is A or G or is absent
XEEVIMYHYKLXXXXXXXXXKYLMSIPSTKVPAXXTSPV

SEQ ID NO: 62985 - protein, 36 aa, Artificial Sequence; identical to SEQ ID NO: 3698
  GFR-binding peptide
  MOD_RES (1), (36): Xaa is C or S
  MOD_RES (14), (15), (16), (17), (18): Xaa is A or G
  MOD_RES (19), (20), (21), (22): Xaa is A or G or is absent

SEQ ID NO: 62986 - protein, 35 aa, Artificial Sequence; identical to SEQ ID NO: 31705
  GFR-binding peptide
  MOD_RES (31), (32): Xaa is C or S

SEQ ID NO: 62987 - protein, 38 aa, Artificial Sequence
  GFR-binding peptide
  MOD_RES (1), (3), (35), (36): Xaa is C or S
XGXAEVVMDRHKRLVVNNAADYYLISTASLRAPVXXSA

SEQ ID NO: 62988 - protein, 38 aa, Artificial Sequence; identical to SEQ ID NO: 24721
  GFR-binding peptide
  MOD_RES (1), (3), (37), (38): Xaa is C or S
  MOD_RES (15), (16), (17), (18), (19): Xaa is A or G
  MOD_RES (20), (21), (22), (23): Xaa is A or G or is absent

SEQ ID NO: 62989 - protein, 40 aa, Artificial Sequence; identical to SEQ ID NO: 11129
  GFR-binding peptide
  MOD_RES (2), (4), (38), (39): Xaa is C or S
  MOD_RES (16), (17), (18), (19), (20): Xaa is A or G
  MOD_RES (21), (22), (23), (24): Xaa is A or G or is absent

SEQ ID NO: 62990 - protein, 38 aa, Artificial Sequence; identical to SEQ ID NO: 24727
  GFR-binding peptide
  MOD_RES (34), (35): Xaa is C or S
  MOD_RES (12), (13), (14), (15), (16): Xaa is A or G
  MOD_RES (17), (18), (19), (20): Xaa is A or G or is absent

SEQ ID NO: 62991 - protein, 42 aa, Artificial Sequence
  GFR-binding peptide
  MOD_RES (2), (4), (36), (37): Xaa is C or S
SXGXRDVVMGEYKFKIIQQKDNLYLMSIPEMKTPTXXPGASG

SEQ ID NO: 62992 - protein, 38 aa, Artificial Sequence; identical to SEQ ID NO: 31714
  GFR-binding peptide
  MOD_RES (33), (34): Xaa is C or S
  MOD_RES (11), (12), (13), (14), (15): Xaa is A or G
  MOD_RES (16), (17), (18), (19): Xaa is A or G or is absent

SEQ ID NO: 62993 - protein, 37 aa, Artificial Sequence; identical to SEQ ID NO: 3710
  GFR-binding peptide
  MOD_RES (2), (4), (36), (37): Xaa is C or S

SEQ ID NO: 62994 - protein, 35 aa, Artificial Sequence; identical to SEQ ID NO: 24731
  GFR-binding peptide
  MOD_RES (1), (32), (33): Xaa is C or S

SEQ ID NO: 62995 - protein, 38 aa, Artificial Sequence; identical to SEQ ID NO: 3712
  GFR-binding peptide
  MOD_RES (2), (4), (36), (37): Xaa is C or S

SEQ ID NO: 62996 - protein, 35 aa, Artificial Sequence; identical to SEQ ID NO: 3714
  GFR-binding peptide
  MOD_RES (34), (35): Xaa is C or S
  MOD_RES (12), (13), (14), (15), (16): Xaa is A or G
  MOD_RES (17), (18), (19), (20): Xaa is A or G or is absent

SEQ ID NO: 62997 - protein, 37 aa, Artificial Sequence; identical to SEQ ID NO: 31720
  GFR-binding peptide
  MOD_RES (31), (32): Xaa is C or S

SEQ ID NO: 62998 - protein, 36 aa, Artificial Sequence; identical to SEQ ID NO: 3716
  GFR-binding peptide
  MOD_RES (31), (32): Xaa is C or S

SEQ ID NO: 62999 - protein, 40 aa, Artificial Sequence; identical to SEQ ID NO: 31722
  GFR-binding peptide
  MOD_RES (2), (4), (38), (39): Xaa is C or S
  MOD_RES (16), (17), (18), (19), (20): Xaa is A or G
  MOD_RES (21), (22), (23), (24): Xaa is A or G or is absent

SEQ ID NO: 63000 - protein, 39 aa, Artificial Sequence; identical to SEQ ID NO: 31724
  GFR-binding peptide
  MOD_RES (2), (4), (36), (37): Xaa is C or S

SEQ ID NO: 63001 - protein, 34 aa, Artificial Sequence
  GFR-binding peptide
  MOD_RES (2), (34): Xaa is C or S
AXSEVTMNRYKKLVVNKNEDFYLISIANMKEPVX

SEQ ID NO: 63002 - protein, 38 aa, Artificial Sequence; identical to SEQ ID NO: 31732
  GFR-binding peptide
  MOD_RES (2), (4), (38): Xaa is C or S
  MOD_RES (16), (17), (18), (19), (20): Xaa is A or G
  MOD_RES (21), (22), (23), (24): Xaa is A or G or is absent

SEQ ID NO: 63003 - protein, 39 aa, Artificial Sequence; identical to SEQ ID NO: 3721
  GFR-binding peptide
  MOD_RES (1), (3), (34), (35): Xaa is C or S

SEQ ID NO: 63004 - protein, 39 aa, Artificial Sequence; identical to SEQ ID NO: 3724
  GFR-binding peptide
  MOD_RES (2), (33), (34): Xaa is C or S

SEQ ID NO: 63005 - protein, 37 aa, Artificial Sequence
  GFR-binding peptide
  MOD_RES (33), (34): Xaa is C or S
  MOD_RES (11), (12), (13), (14), (15): Xaa is A or G
  MOD_RES (16), (17), (18), (19): Xaa is A or G or is absent
SKVIMPIKGYXXXXXXXXXFYLINIPSLDQSVXXPSA

SEQ ID NO: 63006 - protein, 35 aa, Artificial Sequence; identical to SEQ ID NO: 31737
  GFR-binding peptide
  MOD_RES (2), (4): Xaa is C or S

SEQ ID NO: 63007 - protein, 44 aa, Artificial Sequence
  GFR-binding peptide
  MOD_RES (2), (4), (38), (39): Xaa is C or S
  MOD_RES (16), (17), (18), (19), (20): Xaa is A or G
  MOD_RES (21), (22), (23), (24): Xaa is A or G or is absent
SXGXRDVVMGYHYKLXXXXXXXXXKYLMSIPSMKTPTXXPGASG

SEQ ID NO: 63008 - protein, 39 aa, Artificial Sequence; identical to SEQ ID NO: 3725
  GFR-binding peptide
  MOD_RES (2), (35), (36): Xaa is C or S
  MOD_RES (13), (14), (15), (16), (17): Xaa is A or G
  MOD_RES (18), (19), (20), (21): Xaa is A or G or is absent

SEQ ID NO: 63009 - protein, 34 aa, Artificial Sequence; identical to SEQ ID NO: 3726
  GFR-binding peptide
  MOD_RES (2), (2): Xaa is C or S
  MOD_RES (13), (14), (15), (16), (17): Xaa is A or G
  MOD_RES (18), (19), (20), (21): Xaa is A or G or is absent

SEQ ID NO: 63010 - protein, 38 aa, Artificial Sequence; identical to SEQ ID NO: 24749
  GFR-binding peptide
  MOD_RES (32), (33): Xaa is C or S

SEQ ID NO: 63011 - protein, 38 aa, Artificial Sequence
  GFR-binding peptide
  MOD_RES (2), (4), (35), (36): Xaa is C or S
LXGXEEVIMRHKRLLLVRGNDYYLMSTASTKVPAXXTS

SEQ ID NO: 63012 - protein, 42 aa, Artificial Sequence; identical to SEQ ID NO: 3729
  GFR-binding peptide
  MOD_RES (2), (37), (38): Xaa is C or S
  MOD_RES (15), (16), (17), (18), (19): Xaa is A or G
  MOD_RES (20), (21), (22), (23): Xaa is A or G or is absent

SEQ ID NO: 63013 - protein, 34 aa, Artificial Sequence; identical to SEQ ID NO: 24753
  GFR-binding peptide
  MOD_RES (1), (1): Xaa is C or S
  MOD_RES (13), (14), (15), (16), (17): Xaa is A or G
  MOD_RES (18), (19), (20), (21): Xaa is A or G or is absent

SEQ ID NO: 63014 - protein, 36 aa, Artificial Sequence
  GFR-binding peptide
  MOD_RES (31), (32): Xaa is C or S
DVVMGYHYKLIIQQKDNKYLMSIPSMKTPTXXPGAS

SEQ ID NO: 63015 - protein, 39 aa, Artificial Sequence; identical to SEQ ID NO: 24757
  GFR-binding peptide
  MOD_RES (1), (3), (35), (36): Xaa is C or S

SEQ ID NO: 63016 - protein, 39 aa, Artificial Sequence; identical to SEQ ID NO: 3732
  GFR-binding peptide
  MOD_RES (33), (34): Xaa is C or S
  MOD_RES (11), (12), (13), (14), (15): Xaa is A or G
  MOD_RES (16), (17), (18), (19): Xaa is A or G or is absent

SEQ ID NO: 63017 - protein, 40 aa, Artificial Sequence; identical to SEQ ID NO: 3735
  GFR-binding peptide
  MOD_RES (2), (36), (37): Xaa is C or S
  MOD_RES (14), (15), (16), (17), (18): Xaa is A or G
  MOD_RES (19), (20), (21), (22): Xaa is A or G or is absent

SEQ ID NO: 63018 - protein, 39 aa, Artificial Sequence; identical to SEQ ID NO: 24761
  GFR-binding peptide
  MOD_RES (1), (3), (38), (39): Xaa is C or S
  MOD_RES (16), (17), (18), (19), (20): Xaa is A or G
  MOD_RES (21), (22), (23), (24): Xaa is A or G or is absent

SEQ ID NO: 63019 - protein, 39 aa, Artificial Sequence; identical to SEQ ID NO: 3738
  GFR-binding peptide
  MOD_RES (34), (35): Xaa is C or S
  MOD_RES (12), (13), (14), (15), (16): Xaa is A or G
  MOD_RES (17), (18), (19), (20): Xaa is A or G or is absent

SEQ ID NO: 63020 - protein, 38 aa, Artificial Sequence; identical to SEQ ID NO: 31753
  GFR-binding peptide
  MOD_RES (32), (33): Xaa is C or S

SEQ ID NO: 63021 - protein, 35 aa, Artificial Sequence; identical to SEQ ID NO: 31755
  GFR-binding peptide
  MOD_RES (1), (33), (34): Xaa is C or S

SEQ ID NO: 63022 - protein, 37 aa, Artificial Sequence; identical to SEQ ID NO: 24767
  GFR-binding peptide
  MOD_RES (1), (3), (35), (36): Xaa is C or S

SEQ ID NO: 63023 - protein, 37 aa, Artificial Sequence
  GFR-binding peptide
  MOD_RES (1), (3), (37): Xaa is C or S
  MOD_RES (15), (16), (17), (18), (19): Xaa is A or G
  MOD_RES (20), (21), (22), (23): Xaa is A or G or is absent
XGXSEVVMDRHKRLXXXXXXXXXYYLISTASLRTPVX

SEQ ID NO: 63024 - protein, 43 aa, Artificial Sequence
  GFR-binding peptide
  MOD_RES (1), (3), (37), (38): Xaa is C or S
  MOD_RES (15), (16), (17), (18), (19): Xaa is A or G
  MOD_RES (20), (21), (22), (23): Xaa is A or G or is absent
XGXSRVVMNYHYKLXXXXXXXXXKYLVSIPSLKTPAXXPKPVH

SEQ ID NO: 63025 - protein, 41 aa, Artificial Sequence
  GFR-binding peptide
  MOD_RES (1), (35), (36): Xaa is C or S
  MOD_RES (13), (14), (15), (16), (17): Xaa is A or G
  MOD_RES (18), (19), (20), (21): Xaa is A or G or is absent
XRDVVMGEYKFKXXXXXXXXXLYLMSIPEMKTPTXXPGASG

SEQ ID NO: 63026 - protein, 41 aa, Artificial Sequence; identical to SEQ ID NO: 31757
  GFR-binding peptide
  MOD_RES (1), (3), (37), (38): Xaa is C or S
  MOD_RES (15), (16), (17), (18), (19): Xaa is A or G
  MOD_RES (20), (21), (22), (23): Xaa is A or G or is absent

SEQ ID NO: 63027 - protein, 37 aa, Artificial Sequence; identical to SEQ ID NO: 3744
  GFR-binding peptide
  MOD_RES (31), (32): Xaa is C or S

SEQ ID NO: 63028 - protein, 32 aa, Artificial Sequence; identical to SEQ ID NO: 3745
  GFR-binding peptide
  MOD_RES (2), (2): Xaa is C or S

SEQ ID NO: 63029 - protein, 37 aa, Artificial Sequence; identical to SEQ ID NO: 24770
  GFR-binding peptide
  MOD_RES (31), (32): Xaa is C or S

SEQ ID NO: 63030 - protein, 38 aa, Artificial Sequence; identical to SEQ ID NO: 3746
  GFR-binding peptide
  MOD_RES (32), (33): Xaa is C or S

SEQ ID NO: 63031 - protein, 41 aa, Artificial Sequence; identical to SEQ ID NO: 24772
  GFR-binding peptide
  MOD_RES (1), (3), (37), (38): Xaa is C or S
  MOD_RES (15), (16), (17), (18), (19): Xaa is A or G
  MOD_RES (20), (21), (22), (23): Xaa is A or G or is absent

SEQ ID NO: 63032 - protein, 31 aa, Artificial Sequence; identical to SEQ ID NO: 24774
  GFR-binding peptide

SEQ ID NO: 63033 - protein, 38 aa, Artificial Sequence; identical to SEQ ID NO: 3748
  GFR-binding peptide
  MOD_RES (35), (36): Xaa is C or S
  MOD_RES (13), (14), (15), (16), (17): Xaa is A or G
  MOD_RES (18), (19), (20), (21): Xaa is A or G or is absent

SEQ ID NO: 63034 - protein, 38 aa, Artificial Sequence; identical to SEQ ID NO: 24776
  GFR-binding peptide
  MOD_RES (2), (4), (36), (37): Xaa is C or S

SEQ ID NO: 63035 - protein, 40 aa, Artificial Sequence; identical to SEQ ID NO: 31768
  GFR-binding peptide
  MOD_RES (2), (4), (36), (37): Xaa is C or S

SEQ ID NO: 63036 - protein, 38 aa, Artificial Sequence; identical to SEQ ID NO: 24778
  GFR-binding peptide
  MOD_RES (1), (35), (36): Xaa is C or S
  MOD_RES (13), (14), (15), (16), (17): Xaa is A or G
  MOD_RES (18), (19), (20), (21): Xaa is A or G or is absent

SEQ ID NO: 63037 - protein, 37 aa, Artificial Sequence; identical to SEQ ID NO: 3749
  GFR-binding peptide
  MOD_RES (2), (4), (37): Xaa is C or S
  MOD_RES (15), (16), (17), (18), (19): Xaa is A or G
  MOD_RES (20), (21), (22), (23): Xaa is A or G or is absent

SEQ ID NO: 63038 - protein, 35 aa, Artificial Sequence; identical to SEQ ID NO: 24780
  GFR-binding peptide
  MOD_RES (33), (34): Xaa is C or S
  MOD_RES (11), (12), (13), (14), (15): Xaa is A or G
  MOD_RES (16), (17), (18), (19): Xaa is A or G or is absent

SEQ ID NO: 63039 - protein, 39 aa, Artificial Sequence; identical to SEQ ID NO: 3750
  GFR-binding peptide
  MOD_RES (1), (3), (34), (35): Xaa is C or S

SEQ ID NO: 63040 - protein, 40 aa, Artificial Sequence; identical to SEQ ID NO: 3757
  GFR-binding peptide
  MOD_RES (1), (3), (37), (38): Xaa is C or S
  MOD_RES (15), (16), (17), (18), (19): Xaa is A or G
  MOD_RES (20), (21), (22), (23): Xaa is A or G or is absent

SEQ ID NO: 63041 - protein, 37 aa, Artificial Sequence; identical to SEQ ID NO: 24788
  GFR-binding peptide
  MOD_RES (32), (33): Xaa is C or S

SEQ ID NO: 63042 - protein, 37 aa, Artificial Sequence; identical to SEQ ID NO: 3762
  GFR-binding peptide
  MOD_RES (34), (35): Xaa is C or S
  MOD_RES (12), (13), (14), (15), (16): Xaa is A or G
  MOD_RES (17), (18), (19), (20): Xaa is A or G or is absent

SEQ ID NO: 63043 - protein, 38 aa, Artificial Sequence; identical to SEQ ID NO: 31776
  GFR-binding peptide
  MOD_RES (1), (3), (36), (37): Xaa is C or S
  MOD_RES (14), (15), (16), (17), (18): Xaa is A or G
  MOD_RES (19), (20), (21), (22): Xaa is A or G or is absent

SEQ ID NO: 63044 - protein, 35 aa, Artificial Sequence; identical to SEQ ID NO: 3763
  GFR-binding peptide
  MOD_RES (2), (4): Xaa is C or S

SEQ ID NO: 63045 - protein, 40 aa, Artificial Sequence; identical to SEQ ID NO: 56726
  GFR-binding peptide
  MOD_RES (1), (35), (36): Xaa is C or S
  MOD_RES (13), (14), (15), (16), (17): Xaa is A or G
  MOD_RES (18), (19), (20), (21): Xaa is A or G or is absent

SEQ ID NO: 63046 - protein, 39 aa, Artificial Sequence
  GFR-binding peptide
  MOD_RES (1), (34), (35): Xaa is C or S
  MOD_RES (12), (13), (14), (15), (16): Xaa is A or G
  MOD_RES (17), (18), (19), (20): Xaa is A or G or is absent
XEEVIMEYKFKXXXXXXXXXLYLMSIPETKVPAXXTSPV

SEQ ID NO: 63047 - protein, 38 aa, Artificial Sequence; identical to SEQ ID NO: 31777
  GFR-binding peptide
  MOD_RES (1), (35), (36): Xaa is C or S
  MOD_RES (13), (14), (15), (16), (17): Xaa is A or G
  MOD_RES (18), (19), (20), (21): Xaa is A or G or is absent

SEQ ID NO: 63048 - protein, 33 aa, Artificial Sequence
  GFR-binding peptide
  MOD_RES (33), (33): Xaa is C or S
  MOD_RES (11), (12), (13), (14), (15): Xaa is A or G
  MOD_RES (16), (17), (18), (19): Xaa is A or G or is absent
SVAMGRHKRLXXXXXXXXXYYLISTASLKTPVX

SEQ ID NO: 63049 - protein, 38 aa, Artificial Sequence; identical to SEQ ID NO: 3766
  GFR-binding peptide
  MOD_RES (2), (4): Xaa is C or S
  MOD_RES (17), (18), (19), (20), (21): Xaa is A or G
  MOD_RES (22), (23), (24), (25): Xaa is A or G or is absent

SEQ ID NO: 63050 - protein, 34 aa, Artificial Sequence
  GFR-binding peptide
  MOD_RES (2), (34): Xaa is C or S
AXSEVTMNEYKFKVVNKNEDLYLISIPEMKEPVX

SEQ ID NO: 63051 - protein, 35 aa, Artificial Sequence; identical to SEQ ID NO: 3767
  GFR-binding peptide
  MOD_RES (2), (35): Xaa is C or S
  MOD_RES (13), (14), (15), (16), (17): Xaa is A or G
  MOD_RES (18), (19), (20), (21): Xaa is A or G or is absent

SEQ ID NO: 63052 - protein, 39 aa, Artificial Sequence; identical to SEQ ID NO: 24800
  GFR-binding peptide
  MOD_RES (34), (35): Xaa is C or S
  MOD_RES (12), (13), (14), (15), (16): Xaa is A or G
  MOD_RES (17), (18), (19), (20): Xaa is A or G or is absent

SEQ ID NO: 63053 - protein, 42 aa, Artificial Sequence; identical to SEQ ID NO: 3772
  GFR-binding peptide
  MOD_RES (2), (4), (37), (38): Xaa is C or S

SEQ ID NO: 63054 - protein, 41 aa, Artificial Sequence; identical to SEQ ID NO: 31786
  GFR-binding peptide
  MOD_RES (1), (3), (35), (36): Xaa is C or S

SEQ ID NO: 63055 - protein, 34 aa, Artificial Sequence
  GFR-binding peptide
  MOD_RES (33), (34): Xaa is C or S
  MOD_RES (11), (12), (13), (14), (15): Xaa is A or G
  MOD_RES (16), (17), (18), (19): Xaa is A or G or is absent
SKVIMPIKGYXXXXXXXXXFYLINIPSLDQSVXX

SEQ ID NO: 63056 - protein, 39 aa, Artificial Sequence; identical to SEQ ID NO: 24805
  GFR-binding peptide
  MOD_RES (1), (35), (36): Xaa is C or S
  MOD_RES (13), (14), (15), (16), (17): Xaa is A or G
  MOD_RES (18), (19), (20), (21): Xaa is A or G or is absent

SEQ ID NO: 63057 - protein, 36 aa, Artificial Sequence; identical to SEQ ID NO: 24807
  GFR-binding peptide
  MOD_RES (2), (4), (35), (36): Xaa is C or S

SEQ ID NO: 63058 - protein, 42 aa, Artificial Sequence; identical to SEQ ID NO: 3782
  GFR-binding peptide
  MOD_RES (2), (36), (37): Xaa is C or S
  MOD_RES (14), (15), (16), (17), (18): Xaa is A or G
  MOD_RES (19), (20), (21), (22): Xaa is A or G or is absent

SEQ ID NO: 63059 - protein, 34 aa, Artificial Sequence; identical to SEQ ID NO: 3783
  GFR-binding peptide
  MOD_RES (1), (34): Xaa is C or S

SEQ ID NO: 63060 - protein, 39 aa, Artificial Sequence
  GFR-binding peptide
  MOD_RES (1), (34), (35): Xaa is C or S
  MOD_RES (12), (13), (14), (15), (16): Xaa is A or G
  MOD_RES (17), (18), (19), (20): Xaa is A or G or is absent
XSKVIMPIKGYXXXXXXXXXFYLINIPSLDQSVXXPSAS

SEQ ID NO: 63061 - protein, 35 aa, Artificial Sequence; identical to SEQ ID NO: 3785
  GFR-binding peptide
  MOD_RES (1), (3), (35): Xaa is C or S

SEQ ID NO: 63062 - protein, 40 aa, Artificial Sequence; identical to SEQ ID NO: 24814
  GFR-binding peptide
  MOD_RES (34), (35): Xaa is C or S
  MOD_RES (12), (13), (14), (15), (16): Xaa is A or G
  MOD_RES (17), (18), (19), (20): Xaa is A or G or is absent

SEQ ID NO: 63063 - protein, 37 aa, Artificial Sequence; identical to SEQ ID NO: 24815
  GFR-binding peptide
  MOD_RES (1), (34), (35): Xaa is C or S
  MOD_RES (12), (13), (14), (15), (16): Xaa is A or G
  MOD_RES (17), (18), (19), (20): Xaa is A or G or is absent

SEQ ID NO: 63064 - protein, 35 aa, Artificial Sequence; identical to SEQ ID NO: 24816
  GFR-binding peptide
  MOD_RES (2), (4), (35): Xaa is C or S

SEQ ID NO: 63065 - protein, 40 aa, Artificial Sequence; identical to SEQ ID NO: 3795
  GFR-binding peptide
  MOD_RES (2), (36), (37): Xaa is C or S
  MOD_RES (14), (15), (16), (17), (18): Xaa is A or G
  MOD_RES (19), (20), (21), (22): Xaa is A or G or is absent

SEQ ID NO: 63066 - protein, 39 aa, Artificial Sequence; identical to SEQ ID NO: 31804
  GFR-binding peptide
  MOD_RES (33), (34): Xaa is C or S
  MOD_RES (11), (12), (13), (14), (15): Xaa is A or G
  MOD_RES (16), (17), (18), (19): Xaa is A or G or is absent

SEQ ID NO: 63067 - protein, 38 aa, Artificial Sequence
  GFR-binding peptide
  MOD_RES (2), (4), (36), (37): Xaa is C or S
RXAXSEVTMNRHKRLVVNKNEDYYLISTASMKEPVXXP

SEQ ID NO: 63068 - protein, 31 aa, Artificial Sequence; identical to SEQ ID NO: 31811
  GFR-binding peptide
  MOD_RES (31), (31): Xaa is C or S

SEQ ID NO: 63069 - protein, 38 aa, Artificial Sequence
  GFR-binding peptide
  MOD_RES (1), (35), (36): Xaa is C or S
  MOD_RES (13), (14), (15), (16), (17): Xaa is A or G
  MOD_RES (18), (19), (20), (21): Xaa is A or G or is absent
XSEVTMNRYKKLXXXXXXXXXFYLISIANMKEPVXXPE

SEQ ID NO: 63070 - protein, 34 aa, Artificial Sequence; identical to SEQ ID NO: 24830
  GFR-binding peptide
  MOD_RES (1), (1): Xaa is C or S
  MOD_RES (13), (14), (15), (16), (17): Xaa is A or G
  MOD_RES (18), (19), (20), (21): Xaa is A or G or is absent

SEQ ID NO: 63071 - protein, 40 aa, Artificial Sequence; identical to SEQ ID NO: 31821
  GFR-binding peptide
  MOD_RES (2), (34), (35): Xaa is C or S

SEQ ID NO: 63072 - protein, 35 aa, Artificial Sequence; identical to SEQ ID NO: 3807
  GFR-binding peptide
  MOD_RES (1), (32), (33): Xaa is C or S

SEQ ID NO: 63073 - protein, 36 aa, Artificial Sequence; identical to SEQ ID NO: 3808
  GFR-binding peptide
  MOD_RES (1), (3), (34), (35): Xaa is C or S

SEQ ID NO: 63074 - protein, 39 aa, Artificial Sequence; identical to SEQ ID NO: 24837
  GFR-binding peptide
  MOD_RES (2), (4), (36), (37): Xaa is C or S

SEQ ID NO: 63075 - protein, 42 aa, Artificial Sequence; identical to SEQ ID NO: 31827
  GFR-binding peptide
  MOD_RES (2), (36), (37): Xaa is C or S
  MOD_RES (14), (15), (16), (17), (18): Xaa is A or G
  MOD_RES (19), (20), (21), (22): Xaa is A or G or is absent

SEQ ID NO: 63076 - protein, 33 aa, Artificial Sequence; identical to SEQ ID NO: 3810
  GFR-binding peptide
  MOD_RES (2), (2): Xaa is C or S

SEQ ID NO: 63077 - protein, 40 aa, Artificial Sequence
  GFR-binding peptide
  MOD_RES (1), (35), (36): Xaa is C or S
  MOD_RES (13), (14), (15), (16), (17): Xaa is A or G
  MOD_RES (18), (19), (20), (21): Xaa is A or G or is absent
XSEVTMNRYKKLXXXXXXXXXFYLISIANMKEPVXXPEPI

SEQ ID NO: 63078 - protein, 39 aa, Artificial Sequence; identical to SEQ ID NO: 3812
  GFR-binding peptide
  MOD_RES (1), (35): Xaa is C or S
  MOD_RES (13), (14), (15), (16), (17): Xaa is A or G
  MOD_RES (18), (19), (20), (21): Xaa is A or G or is absent

SEQ ID NO: 63079 - protein, 37 aa, Artificial Sequence; identical to SEQ ID NO: 3815
  GFR-binding peptide
  MOD_RES (34), (35): Xaa is C or S
  MOD_RES (12), (13), (14), (15), (16): Xaa is A or G
  MOD_RES (17), (18), (19), (20): Xaa is A or G or is absent

SEQ ID NO: 63080 - protein, 36 aa, Artificial Sequence; identical to SEQ ID NO: 31836
  GFR-binding peptide
  MOD_RES (1), (3): Xaa is C or S
  MOD_RES (15), (16), (17), (18), (19): Xaa is A or G
  MOD_RES (20), (21), (22), (23): Xaa is A or G or is absent

SEQ ID NO: 63081 - protein, 34 aa, Artificial Sequence; identical to SEQ ID NO: 31842
  GFR-binding peptide
  MOD_RES (31), (32): Xaa is C or S

SEQ ID NO: 63082 - protein, 40 aa, Artificial Sequence; identical to SEQ ID NO: 24848
  GFR-binding peptide
  MOD_RES (1), (3), (35), (36): Xaa is C or S

SEQ ID NO: 63083 - protein, 37 aa, Artificial Sequence; identical to SEQ ID NO: 24851
  GFR-binding peptide
  MOD_RES (1), (35), (36): Xaa is C or S
  MOD_RES (13), (14), (15), (16), (17): Xaa is A or G
  MOD_RES (18), (19), (20), (21): Xaa is A or G or is absent

SEQ ID NO: 63084 - protein, 36 aa, Artificial Sequence; identical to SEQ ID NO: 24852
  GFR-binding peptide
  MOD_RES (1), (3), (35), (36): Xaa is C or S

SEQ ID NO: 63085 - protein, 35 aa, Artificial Sequence; identical to SEQ ID NO: 3820
  GFR-binding peptide
  MOD_RES (2), (33), (34): Xaa is C or S

SEQ ID NO: 63086 - protein, 41 aa, Artificial Sequence; identical to SEQ ID NO: 31846
  GFR-binding peptide
  MOD_RES (1), (3), (35), (36): Xaa is C or S

SEQ ID NO: 63087 - protein, 31 aa, Artificial Sequence; identical to SEQ ID NO: 3821
  GFR-binding peptide

SEQ ID NO: 63088 - protein, 36 aa, Artificial Sequence; identical to SEQ ID NO: 3823
  GFR-binding peptide
  MOD_RES (2), (4), (36): Xaa is C or S

SEQ ID NO: 63089 - protein, 34 aa, Artificial Sequence; identical to SEQ ID NO: 3824
  GFR-binding peptide
  MOD_RES (1), (3): Xaa is C or S

SEQ ID NO: 63090 - protein, 35 aa, Artificial Sequence; identical to SEQ ID NO: 3826
  GFR-binding peptide
  MOD_RES (2), (33), (34): Xaa is C or S

SEQ ID NO: 63091 - protein, 35 aa, Artificial Sequence; identical to SEQ ID NO: 31848
  GFR-binding peptide
  MOD_RES (33), (33): Xaa is C or S
  MOD_RES (11), (12), (13), (14), (15): Xaa is A or G
  MOD_RES (16), (17), (18), (19): Xaa is A or G or is absent

SEQ ID NO: 63092 - protein, 36 aa, Artificial Sequence; identical to SEQ ID NO: 56796
  GFR-binding peptide
  MOD_RES (1), (3), (36): Xaa is C or S
  MOD_RES (14), (15), (16), (17), (18): Xaa is A or G
  MOD_RES (19), (20), (21), (22): Xaa is A or G or is absent

SEQ ID NO: 63093 - protein, 35 aa, Artificial Sequence; identical to SEQ ID NO: 24860
  GFR-binding peptide
  MOD_RES (31), (32): Xaa is C or S

SEQ ID NO: 63094 - protein, 37 aa, Artificial Sequence; identical to SEQ ID NO: 24861
  GFR-binding peptide
  MOD_RES (1), (33): Xaa is C or S

SEQ ID NO: 63095 - protein, 37 aa, Artificial Sequence; identical to SEQ ID NO: 24864
  GFR-binding peptide
  MOD_RES (1), (3), (35), (36): Xaa is C or S

SEQ ID NO: 63096 - protein, 37 aa, Artificial Sequence; identical to SEQ ID NO: 3828
  GFR-binding peptide
  MOD_RES (33), (34): Xaa is C or S
  MOD_RES (11), (12), (13), (14), (15): Xaa is A or G
  MOD_RES (16), (17), (18), (19): Xaa is A or G or is absent

SEQ ID NO: 63097 - protein, 32 aa, Artificial Sequence; identical to SEQ ID NO: 3829
  GFR-binding peptide
  MOD_RES (1), (1): Xaa is C or S

SEQ ID NO: 63098 - protein, 35 aa, Artificial Sequence; identical to SEQ ID NO: 3830
  GFR-binding peptide
  MOD_RES (34), (35): Xaa is C or S
  MOD_RES (12), (13), (14), (15), (16): Xaa is A or G
  MOD_RES (17), (18), (19), (20): Xaa is A or G or is absent

SEQ ID NO: 63099 - protein, 35 aa, Artificial Sequence; identical to SEQ ID NO: 3831
  GFR-binding peptide
  MOD_RES (2), (34), (35): Xaa is C or S

SEQ ID NO: 63100 - protein, 38 aa, Artificial Sequence; identical to SEQ ID NO: 24872
  GFR-binding peptide
  MOD_RES (33), (34): Xaa is C or S
  MOD_RES (11), (12), (13), (14), (15): Xaa is A or G
  MOD_RES (16), (17), (18), (19): Xaa is A or G or is absent

SEQ ID NO: 63101 - protein, 35 aa, Artificial Sequence
  GFR-binding peptide
  MOD_RES (2), (4), (35): Xaa is C or S
SXKXSKVIMPIKGYIKPTKGIFYLINIPSLDQSVX

SEQ ID NO: 63102 - protein, 42 aa, Artificial Sequence
  GFR-binding peptide
  MOD_RES (2), (4), (37), (38): Xaa is C or S
  MOD_RES (15), (16), (17), (18), (19): Xaa is A or G
  MOD_RES (20), (21), (22), (23): Xaa is A or G or is absent
LXGXEEVIMYHYKLXXXXXXXXXKYLMSIPSTKVPAXXTSPV

SEQ ID NO: 63103 - protein, 36 aa, Artificial Sequence; identical to SEQ ID NO: 31864
  GFR-binding peptide
  MOD_RES (1), (3), (36): Xaa is C or S

SEQ ID NO: 63104 - protein, 31 aa, Artificial Sequence; identical to SEQ ID NO: 31865
  GFR-binding peptide
  MOD_RES (31), (31): Xaa is C or S

SEQ ID NO: 63105 - protein, 40 aa, Artificial Sequence; identical to SEQ ID NO: 24874
  GFR-binding peptide
  MOD_RES (1), (35), (36): Xaa is C or S
  MOD_RES (13), (14), (15), (16), (17): Xaa is A or G
  MOD_RES (18), (19), (20), (21): Xaa is A or G or is absent

SEQ ID NO: 63106 - protein, 40 aa, Artificial Sequence; identical to SEQ ID NO: 24875
  GFR-binding peptide
  MOD_RES (1), (3), (35), (36): Xaa is C or S

SEQ ID NO: 63107 - protein, 38 aa, Artificial Sequence; identical to SEQ ID NO: 3836
  GFR-binding peptide
  MOD_RES (33), (34): Xaa is C or S

SEQ ID NO: 63108 - protein, 36 aa, Artificial Sequence; identical to SEQ ID NO: 3837
  GFR-binding peptide
  MOD_RES (32), (33): Xaa is C or S

SEQ ID NO: 63109 - protein, 37 aa, Artificial Sequence
  GFR-binding peptide
  MOD_RES (1), (3), (35), (36): Xaa is C or S
XAXSEVTMNRHKRLVVNKNEDYYLISTASMKEPVXXP

SEQ ID NO: 63110 - protein, 42 aa, Artificial Sequence; identical to SEQ ID NO: 24882
  GFR-binding peptide
  MOD_RES (2), (4), (36), (37): Xaa is C or S

SEQ ID NO: 63111 - protein, 33 aa, Artificial Sequence
  GFR-binding peptide
  MOD_RES (2), (2): Xaa is C or S
GXSEVVMDYHYKLVVNNASDKYLISIPSLRTPV

SEQ ID NO: 63112 - protein, 32 aa, Artificial Sequence; identical to SEQ ID NO: 24885
  GFR-binding peptide
  MOD_RES (1), (1): Xaa is C or S

SEQ ID NO: 63113 - protein, 39 aa, Artificial Sequence; identical to SEQ ID NO: 24886
  GFR-binding peptide
  MOD_RES (1), (3), (37), (38): Xaa is C or S
  MOD_RES (15), (16), (17), (18), (19): Xaa is A or G
  MOD_RES (20), (21), (22), (23): Xaa is A or G or is absent

SEQ ID NO: 63114 - protein, 38 aa, Artificial Sequence; identical to SEQ ID NO: 24887
  GFR-binding peptide
  MOD_RES (1), (3), (37), (38): Xaa is C or S
  MOD_RES (15), (16), (17), (18), (19): Xaa is A or G
  MOD_RES (20), (21), (22), (23): Xaa is A or G or is absent

SEQ ID NO: 63115 - protein, 42 aa, Artificial Sequence; identical to SEQ ID NO: 3843
  GFR-binding peptide
  MOD_RES (1), (3), (36), (37): Xaa is C or S
  MOD_RES (14), (15), (16), (17), (18): Xaa is A or G
  MOD_RES (19), (20), (21), (22): Xaa is A or G or is absent

SEQ ID NO: 63116 - protein, 38 aa, Artificial Sequence; identical to SEQ ID NO: 24892
  GFR-binding peptide
  MOD_RES (2), (4): Xaa is C or S
  MOD_RES (17), (18), (19), (20), (21): Xaa is A or G
  MOD_RES (22), (23), (24), (25): Xaa is A or G or is absent

SEQ ID NO: 63117 - protein, 41 aa, Artificial Sequence; identical to SEQ ID NO: 24893
  GFR-binding peptide
  MOD_RES (1), (35), (36): Xaa is C or S
  MOD_RES (13), (14), (15), (16), (17): Xaa is A or G
  MOD_RES (18), (19), (20), (21): Xaa is A or G or is absent

SEQ ID NO: 63118 - protein, 37 aa, Artificial Sequence
  GFR-binding peptide
  MOD_RES (2), (4), (36), (37): Xaa is C or S
RXGXESVAMGRHKRLYTVVGKDYYLISTASLKTPVXX

SEQ ID NO: 63119 - protein, 38 aa, Artificial Sequence; identical to SEQ ID NO: 24894
  GFR-binding peptide
  MOD_RES (33), (34): Xaa is C or S
  MOD_RES (11), (12), (13), (14), (15): Xaa is A or G
  MOD_RES (16), (17), (18), (19): Xaa is A or G or is absent

SEQ ID NO: 63120 - protein, 39 aa, Artificial Sequence; identical to SEQ ID NO: 24896
  GFR-binding peptide
  MOD_RES (2), (33), (34): Xaa is C or S

SEQ ID NO: 63121 - protein, 38 aa, Artificial Sequence; identical to SEQ ID NO: 24899
  GFR-binding peptide
  MOD_RES (1), (35), (36): Xaa is C or S
  MOD_RES (13), (14), (15), (16), (17): Xaa is A or G
  MOD_RES (18), (19), (20), (21): Xaa is A or G or is absent

SEQ ID NO: 63122 - protein, 34 aa, Artificial Sequence; identical to SEQ ID NO: 3846
  GFR-binding peptide
  MOD_RES (2), (33), (34): Xaa is C or S

SEQ ID NO: 63123 - protein, 34 aa, Artificial Sequence; identical to SEQ ID NO: 24901
  GFR-binding peptide
  MOD_RES (31), (32): Xaa is C or S

SEQ ID NO: 63124 - protein, 39 aa, Artificial Sequence; identical to SEQ ID NO: 3847
  GFR-binding peptide
  MOD_RES (1), (3), (36), (37): Xaa is C or S
  MOD_RES (14), (15), (16), (17), (18): Xaa is A or G
  MOD_RES (19), (20), (21), (22): Xaa is A or G or is absent

SEQ ID NO: 63125 - protein, 36 aa, Artificial Sequence; identical to SEQ ID NO: 24904
  GFR-binding peptide
  MOD_RES (2), (36): Xaa is C or S
  MOD_RES (14), (15), (16), (17), (18): Xaa is A or G
  MOD_RES (19), (20), (21), (22): Xaa is A or G or is absent

SEQ ID NO: 63126 - protein, 35 aa, Artificial Sequence; identical to SEQ ID NO: 24905
  GFR-binding peptide
  MOD_RES (34), (35): Xaa is C or S
  MOD_RES (12), (13), (14), (15), (16): Xaa is A or G
  MOD_RES (17), (18), (19), (20): Xaa is A or G or is absent

SEQ ID NO: 63127 - protein, 42 aa, Artificial Sequence; identical to SEQ ID NO: 3848
  GFR-binding peptide
  MOD_RES (1), (3), (37), (38): Xaa is C or S
  MOD_RES (15), (16), (17), (18), (19): Xaa is A or G
  MOD_RES (20), (21), (22), (23): Xaa is A or G or is absent

SEQ ID NO: 63128 - protein, 33 aa, Artificial Sequence; identical to SEQ ID NO: 31890
  GFR-binding peptide
  MOD_RES (1), (33): Xaa is C or S

SEQ ID NO: 63129 - protein, 38 aa, Artificial Sequence; identical to SEQ ID NO: 24910
  GFR-binding peptide
  MOD_RES (34), (35): Xaa is C or S
  MOD_RES (12), (13), (14), (15), (16): Xaa is A or G
  MOD_RES (17), (18), (19), (20): Xaa is A or G or is absent

SEQ ID NO: 63130 - protein, 38 aa, Artificial Sequence; identical to SEQ ID NO: 11278
  GFR-binding peptide
  MOD_RES (2), (36), (37): Xaa is C or S
  MOD_RES (14), (15), (16), (17), (18): Xaa is A or G
  MOD_RES (19), (20), (21), (22): Xaa is A or G or is absent

SEQ ID NO: 63131 - protein, 35 aa, Artificial Sequence
  GFR-binding peptide
  MOD_RES (1), (3), (35): Xaa is C or S
XAXSEVTMNRYKKLVVNKNEDFYLISIANMKEPVX

SEQ ID NO: 63132 - protein, 36 aa, Artificial Sequence; identical to SEQ ID NO: 24913
  GFR-binding peptide
  MOD_RES (1), (3), (35), (36): Xaa is C or S

SEQ ID NO: 63133 - protein, 38 aa, Artificial Sequence
  GFR-binding peptide
  MOD_RES (2), (4), (38): Xaa is C or S
  MOD_RES (16), (17), (18), (19), (20): Xaa is A or G
  MOD_RES (21), (22), (23), (24): Xaa is A or G or is absent
SXGXRDVVMGRHKRLXXXXXXXXXYYLMSTASMKTPTX

SEQ ID NO: 63134 - protein, 31 aa, Artificial Sequence; identical to SEQ ID NO: 3853
  GFR-binding peptide
  MOD_RES (31), (31): Xaa is C or S

SEQ ID NO: 63135 - protein, 37 aa, Artificial Sequence; identical to SEQ ID NO: 3854
  GFR-binding peptide
  MOD_RES (1), (35), (36): Xaa is C or S
  MOD_RES (13), (14), (15), (16), (17): Xaa is A or G
  MOD_RES (18), (19), (20), (21): Xaa is A or G or is absent

SEQ ID NO: 63136 - protein, 36 aa, Artificial Sequence; identical to SEQ ID NO: 3855
  GFR-binding peptide
  MOD_RES (1), (3), (34), (35): Xaa is C or S

SEQ ID NO: 63137 - protein, 42 aa, Artificial Sequence; identical to SEQ ID NO: 31903
  GFR-binding peptide
  MOD_RES (2), (4), (37), (38): Xaa is C or S
  MOD_RES (15), (16), (17), (18), (19): Xaa is A or G
  MOD_RES (20), (21), (22), (23): Xaa is A or G or is absent

SEQ ID NO: 63138 - protein, 39 aa, Artificial Sequence
  GFR-binding peptide
  MOD_RES (1), (33), (34): Xaa is C or S
XSRVVMNYHYKLIVNSSDDKYLVSIPSLKTPAXXPKPVH

SEQ ID NO: 63139 - protein, 39 aa, Artificial Sequence
  GFR-binding peptide
  MOD_RES (1), (3), (34), (35): Xaa is C or S
XKXSKVIMPIKGYIKPTKGIFYLINIPSLDQSVXXPSAS

SEQ ID NO: 63140 - protein, 34 aa, Artificial Sequence
  GFR-binding peptide
  MOD_RES (1), (3): Xaa is C or S
XGXESVAMGRHKRLYTVVGKDYYLISTASLKTPV

SEQ ID NO: 63141 - protein, 38 aa, Artificial Sequence
  GFR-binding peptide
  MOD_RES (32), (33): Xaa is C or S
SEVTMNEYKFKVVNKNEDLYLISIPEMKEPVXXPEPIG

SEQ ID NO: 63142 - protein, 36 aa, Artificial Sequence
  GFR-binding peptide
  MOD_RES (2), (34), (35): Xaa is C or S
GXESVAMGRHKRLYTVVGKDYYLISTASLKTPVXXA

SEQ ID NO: 63143 - protein, 34 aa, Artificial Sequence; identical to SEQ ID NO: 31909
  GFR-binding peptide
  MOD_RES (1), (3): Xaa is C or S

SEQ ID NO: 63144 - protein, 38 aa, Artificial Sequence; identical to SEQ ID NO: 3859
  GFR-binding peptide
  MOD_RES (34), (35): Xaa is C or S
  MOD_RES (12), (13), (14), (15), (16): Xaa is A or G
  MOD_RES (17), (18), (19), (20): Xaa is A or G or is absent

SEQ ID NO: 63145 - protein, 41 aa, Artificial Sequence; identical to SEQ ID NO: 3860
  GFR-binding peptide
  MOD_RES (2), (4), (38), (39): Xaa is C or S
  MOD_RES (16), (17), (18), (19), (20): Xaa is A or G
  MOD_RES (21), (22), (23), (24): Xaa is A or G or is absent

SEQ ID NO: 63146 - protein, 36 aa, Artificial Sequence
  GFR-binding peptide
  MOD_RES (1), (3), (34), (35): Xaa is C or S
XKXSKVIMPIKGYIKPTKGIFYLINIPSLDQSVXXP

SEQ ID NO: 63147 - protein, 34 aa, Artificial Sequence; identical to SEQ ID NO: 3862
  GFR-binding peptide
  MOD_RES (31), (32): Xaa is C or S

SEQ ID NO: 63148 - protein, 42 aa, Artificial Sequence; identical to SEQ ID NO: 3864
  GFR-binding peptide
  MOD_RES (2), (36), (37): Xaa is C or S
  MOD_RES (14), (15), (16), (17), (18): Xaa is A or G
  MOD_RES (19), (20), (21), (22): Xaa is A or G or is absent

SEQ ID NO: 63149 - protein, 37 aa, Artificial Sequence; identical to SEQ ID NO: 24930
  GFR-binding peptide
  MOD_RES (1), (3), (35), (36): Xaa is C or S

SEQ ID NO: 63150 - protein, 43 aa, Artificial Sequence; identical to SEQ ID NO: 24932
  GFR-binding peptide
  MOD_RES (1), (3), (37), (38): Xaa is C or S
  MOD_RES (15), (16), (17), (18), (19): Xaa is A or G
  MOD_RES (20), (21), (22), (23): Xaa is A or G or is absent

SEQ ID NO: 63151 - protein, 35 aa, Artificial Sequence
  GFR-binding peptide
  MOD_RES (33), (34): Xaa is C or S
  MOD_RES (11), (12), (13), (14), (15): Xaa is A or G
  MOD_RES (16), (17), (18), (19): Xaa is A or G or is absent
SRVIMPIKGYXXXXXXXXXFYLINIPSLAQPVXXP

SEQ ID NO: 63152 - protein, 38 aa, Artificial Sequence; identical to SEQ ID NO: 3865
  GFR-binding peptide
  MOD_RES (33), (34): Xaa is C or S
  MOD_RES (11), (12), (13), (14), (15): Xaa is A or G
  MOD_RES (16), (17), (18), (19): Xaa is A or G or is absent

SEQ ID NO: 63153 - protein, 39 aa, Artificial Sequence
  GFR-binding peptide
  MOD_RES (1), (3), (37), (38): Xaa is C or S
  MOD_RES (15), (16), (17), (18), (19): Xaa is A or G
  MOD_RES (20), (21), (22), (23): Xaa is A or G or is absent
XAXSEVTMNRHKRLXXXXXXXXXYYLISTASMKEPVXXP

SEQ ID NO: 63154 - protein, 36 aa, Artificial Sequence; identical to SEQ ID NO: 24938
  GFR-binding peptide
  MOD_RES (31), (32): Xaa is C or S

SEQ ID NO: 63155 - protein, 31 aa, Artificial Sequence
  GFR-binding peptide
SEVTMNRYKKLVVNKNEDFYLISIANMKEPV

SEQ ID NO: 63156 - protein, 38 aa, Artificial Sequence; identical to SEQ ID NO: 24939
  GFR-binding peptide
  MOD_RES (1), (35), (36): Xaa is C or S
  MOD_RES (13), (14), (15), (16), (17): Xaa is A or G
  MOD_RES (18), (19), (20), (21): Xaa is A or G or is absent

SEQ ID NO: 63157 - protein, 34 aa, Artificial Sequence; identical to SEQ ID NO: 24942
  GFR-binding peptide
  MOD_RES (2), (34): Xaa is C or S

SEQ ID NO: 63158 - protein, 36 aa, Artificial Sequence
  GFR-binding peptide
  MOD_RES (2), (34), (35): Xaa is C or S
GXAEVVMDRHKRLVVNNAADYYLISTASLRAPVXXS

SEQ ID NO: 63159 - protein, 36 aa, Artificial Sequence; identical to SEQ ID NO: 24947
  GFR-binding peptide
  MOD_RES (32), (33): Xaa is C or S

SEQ ID NO: 63160 - protein, 37 aa, Artificial Sequence; identical to SEQ ID NO: 24949
  GFR-binding peptide
  MOD_RES (34), (35): Xaa is C or S
  MOD_RES (12), (13), (14), (15), (16): Xaa is A or G
  MOD_RES (17), (18), (19), (20): Xaa is A or G or is absent

SEQ ID NO: 63161 - protein, 34 aa, Artificial Sequence; identical to SEQ ID NO: 31923
  GFR-binding peptide
  MOD_RES (32), (33): Xaa is C or S

SEQ ID NO: 63162 - protein, 36 aa, Artificial Sequence
  GFR-binding peptide
  MOD_RES (2), (34), (35): Xaa is C or S
AXSEVTMNRYKKLVVNKNEDFYLISIANMKEPVXXP

SEQ ID NO: 63163 - protein, 33 aa, Artificial Sequence; identical to SEQ ID NO: 24952
  GFR-binding peptide
  MOD_RES (33), (33): Xaa is C or S
  MOD_RES (11), (12), (13), (14), (15): Xaa is A or G
  MOD_RES (16), (17), (18), (19): Xaa is A or G or is absent

SEQ ID NO: 63164 - protein, 39 aa, Artificial Sequence; identical to SEQ ID NO: 31928
  GFR-binding peptide
  MOD_RES (2), (36), (37): Xaa is C or S
  MOD_RES (14), (15), (16), (17), (18): Xaa is A or G
  MOD_RES (19), (20), (21), (22): Xaa is A or G or is absent

SEQ ID NO: 63165 - protein, 36 aa, Artificial Sequence; identical to SEQ ID NO: 24954
  GFR-binding peptide
  MOD_RES (2), (4): Xaa is C or S
  MOD_RES (15), (16), (17), (18), (19): Xaa is A or G
  MOD_RES (20), (21), (22), (23): Xaa is A or G or is absent

SEQ ID NO: 63166 - protein, 38 aa, Artificial Sequence; identical to SEQ ID NO: 31930
  GFR-binding peptide
  MOD_RES (34), (35): Xaa is C or S
  MOD_RES (12), (13), (14), (15), (16): Xaa is A or G
  MOD_RES (17), (18), (19), (20): Xaa is A or G or is absent

SEQ ID NO: 63167 - protein, 41 aa, Artificial Sequence; identical to SEQ ID NO: 31931
  GFR-binding peptide
  MOD_RES (2), (36), (37): Xaa is C or S
  MOD_RES (14), (15), (16), (17), (18): Xaa is A or G
  MOD_RES (19), (20), (21), (22): Xaa is A or G or is absent

SEQ ID NO: 63168 - protein, 38 aa, Artificial Sequence; identical to SEQ ID NO: 3885
  GFR-binding peptide
  MOD_RES (1), (3), (35), (36): Xaa is C or S

SEQ ID NO: 63169 - protein, 39 aa, Artificial Sequence; identical to SEQ ID NO: 24959
  GFR-binding peptide
  MOD_RES (1), (36), (37): Xaa is C or S
  MOD_RES (14), (15), (16), (17), (18): Xaa is A or G
  MOD_RES (19), (20), (21), (22): Xaa is A or G or is absent

SEQ ID NO: 63170 - protein, 40 aa, Artificial Sequence; identical to SEQ ID NO: 3887
  GFR-binding peptide
  MOD_RES (35), (36): Xaa is C or S
  MOD_RES (13), (14), (15), (16), (17): Xaa is A or G
  MOD_RES (18), (19), (20), (21): Xaa is A or G or is absent

SEQ ID NO: 63171 - protein, 38 aa, Artificial Sequence; identical to SEQ ID NO: 3888
  GFR-binding peptide
  MOD_RES (1), (3), (34), (35): Xaa is C or S

SEQ ID NO: 63172 - protein, 35 aa, Artificial Sequence; identical to SEQ ID NO: 31938
  GFR-binding peptide
  MOD_RES (2), (4): Xaa is C or S

SEQ ID NO: 63173 - protein, 42 aa, Artificial Sequence; identical to SEQ ID NO: 24963
  GFR-binding peptide
  MOD_RES (1), (3), (36), (37): Xaa is C or S
  MOD_RES (14), (15), (16), (17), (18): Xaa is A or G
  MOD_RES (19), (20), (21), (22): Xaa is A or G or is absent

SEQ ID NO: 63174 - protein, 33 aa, Artificial Sequence
  GFR-binding peptide
  MOD_RES (32), (33): Xaa is C or S
SEVTMNYHYKLVVNKNEDKYLISIPSMKEPVXX

SEQ ID NO: 63175 - protein, 38 aa, Artificial Sequence; identical to SEQ ID NO: 31941
  GFR-binding peptide
  MOD_RES (1), (33): Xaa is C or S

SEQ ID NO: 63176 - protein, 34 aa, Artificial Sequence; identical to SEQ ID NO: 3894
  GFR-binding peptide
  MOD_RES (33), (34): Xaa is C or S
  MOD_RES (11), (12), (13), (14), (15): Xaa is A or G
  MOD_RES (16), (17), (18), (19): Xaa is A or G or is absent

SEQ ID NO: 63177 - protein, 38 aa, Artificial Sequence; identical to SEQ ID NO: 56895
  GFR-binding peptide
  MOD_RES (1), (3), (34), (35): Xaa is C or S

SEQ ID NO: 63178 - protein, 34 aa, Artificial Sequence
  GFR-binding peptide
  MOD_RES (2), (33), (34): Xaa is C or S
GXEEVIMEYKFKLLVRGNDLYLMSIPETKVPAXX

SEQ ID NO: 63179 - protein, 35 aa, Artificial Sequence
  GFR-binding peptide
  MOD_RES (33), (34): Xaa is C or S
  MOD_RES (11), (12), (13), (14), (15): Xaa is A or G
  MOD_RES (16), (17), (18), (19): Xaa is A or G or is absent
EVVMDRHKRLXXXXXXXXXYYLISTASLRTPVXXT

SEQ ID NO: 63180 - protein, 34 aa, Artificial Sequence; identical to SEQ ID NO: 3896
  GFR-binding peptide
  MOD_RES (1), (3): Xaa is C or S

SEQ ID NO: 63181 - protein, 37 aa, Artificial Sequence; identical to SEQ ID NO: 3897
  GFR-binding peptide
  MOD_RES (32), (33): Xaa is C or S

SEQ ID NO: 63182 - protein, 38 aa, Artificial Sequence; identical to SEQ ID NO: 24975
  GFR-binding peptide
  MOD_RES (2), (4), (37), (38): Xaa is C or S

SEQ ID NO: 63183 - protein, 42 aa, Artificial Sequence; identical to SEQ ID NO: 3898
  GFR-binding peptide
  MOD_RES (2), (4), (36), (37): Xaa is C or S

SEQ ID NO: 63184 - protein, 36 aa, Artificial Sequence
  GFR-binding peptide
  MOD_RES (32), (33): Xaa is C or S
SEVTMNPIKGYVVNKNEDFYLINIPSMKEPVXXPEP

SEQ ID NO: 63185 - protein, 32 aa, Artificial Sequence; identical to SEQ ID NO: 24981
  GFR-binding peptide
  MOD_RES (11), (12), (13), (14), (15): Xaa is A or G
  MOD_RES (16), (17), (18), (19): Xaa is A or G or is absent

SEQ ID NO: 63186 - protein, 35 aa, Artificial Sequence; identical to SEQ ID NO: 31955
  GFR-binding peptide
  MOD_RES (32), (33): Xaa is C or S

SEQ ID NO: 63187 - protein, 35 aa, Artificial Sequence
  GFR-binding peptide
  MOD_RES (2), (4): Xaa is C or S
RXAXSEVTMNRHKRLVVNKNEDYYLISTASMKEPV

SEQ ID NO: 63188 - protein, 37 aa, Artificial Sequence; identical to SEQ ID NO: 56907
  GFR-binding peptide
  MOD_RES (1), (32), (33): Xaa is C or S

SEQ ID NO: 63189 - protein, 36 aa, Artificial Sequence; identical to SEQ ID NO: 3903
  GFR-binding peptide
  MOD_RES (31), (32): Xaa is C or S

SEQ ID NO: 63190 - protein, 32 aa, Artificial Sequence; identical to SEQ ID NO: 24983
  GFR-binding peptide
  MOD_RES (1), (1): Xaa is C or S

SEQ ID NO: 63191 - protein, 40 aa, Artificial Sequence; identical to SEQ ID NO: 24984
  GFR-binding peptide
  MOD_RES (2), (4), (37), (38): Xaa is C or S
  MOD_RES (15), (16), (17), (18), (19): Xaa is A or G
  MOD_RES (20), (21), (22), (23): Xaa is A or G or is absent

SEQ ID NO: 63192 - protein, 40 aa, Artificial Sequence
  GFR-binding peptide
  MOD_RES (1), (3), (34), (35): Xaa is C or S
XKXSKVVMPIKGYVKPTRGVFYLINIPSLDQPVXXPSASA

SEQ ID NO: 63193 - protein, 34 aa, Artificial Sequence; identical to SEQ ID NO: 3904
  GFR-binding peptide
  MOD_RES (1), (33), (34): Xaa is C or S

SEQ ID NO: 63194 - protein, 37 aa, Artificial Sequence; identical to SEQ ID NO: 24986
  GFR-binding peptide
  MOD_RES (32), (33): Xaa is C or S

SEQ ID NO: 63195 - protein, 37 aa, Artificial Sequence; identical to SEQ ID NO: 3907
  GFR-binding peptide
  MOD_RES (1), (3), (37): Xaa is C or S
  MOD_RES (15), (16), (17), (18), (19): Xaa is A or G
  MOD_RES (20), (21), (22), (23): Xaa is A or G or is absent

SEQ ID NO: 63196 - protein, 34 aa, Artificial Sequence; identical to SEQ ID NO: 3908
  GFR-binding peptide
  MOD_RES (32), (33): Xaa is C or S

SEQ ID NO: 63197 - protein, 37 aa, Artificial Sequence; identical to SEQ ID NO: 3909
  GFR-binding peptide
  MOD_RES (2), (35), (36): Xaa is C or S
  MOD_RES (13), (14), (15), (16), (17): Xaa is A or G
  MOD_RES (18), (19), (20), (21): Xaa is A or G or is absent

SEQ ID NO: 63198 - protein, 36 aa, Artificial Sequence
  GFR-binding peptide
  MOD_RES (32), (33): Xaa is C or S
SEVTMNYHYKLVVNKNEDKYLISIPSMKEPVXXPEP

SEQ ID NO: 63199 - protein, 41 aa, Artificial Sequence; identical to SEQ ID NO: 11333
  GFR-binding peptide
  MOD_RES (2), (4), (38), (39): Xaa is C or S
  MOD_RES (16), (17), (18), (19), (20): Xaa is A or G
  MOD_RES (21), (22), (23), (24): Xaa is A or G or is absent

SEQ ID NO: 63200 - protein, 36 aa, Artificial Sequence; identical to SEQ ID NO: 31973
  GFR-binding peptide
  MOD_RES (2), (36): Xaa is C or S
  MOD_RES (14), (15), (16), (17), (18): Xaa is A or G
  MOD_RES (19), (20), (21), (22): Xaa is A or G or is absent

SEQ ID NO: 63201 - protein, 40 aa, Artificial Sequence; identical to SEQ ID NO: 3914
  GFR-binding peptide
  MOD_RES (2), (35), (36): Xaa is C or S

SEQ ID NO: 63202 - protein, 34 aa, Artificial Sequence; identical to SEQ ID NO: 3919
  GFR-binding peptide
  MOD_RES (2), (33), (34): Xaa is C or S

SEQ ID NO: 63203 - protein, 34 aa, Artificial Sequence; identical to SEQ ID NO: 25000
  GFR-binding peptide
  MOD_RES (33), (34): Xaa is C or S
  MOD_RES (11), (12), (13), (14), (15): Xaa is A or G
  MOD_RES (16), (17), (18), (19): Xaa is A or G or is absent

SEQ ID NO: 63204 - protein, 41 aa, Artificial Sequence; identical to SEQ ID NO: 3921
  GFR-binding peptide
  MOD_RES (1), (36), (37): Xaa is C or S
  MOD_RES (14), (15), (16), (17), (18): Xaa is A or G
  MOD_RES (19), (20), (21), (22): Xaa is A or G or is absent

SEQ ID NO: 63205 - protein, 34 aa, Artificial Sequence
  GFR-binding peptide
  MOD_RES (2), (4): Xaa is C or S
SXKXSKVVMPIKGYVKPTRGVFYLINIPSLDQPV

SEQ ID NO: 63206 - protein, 37 aa, Artificial Sequence; identical to SEQ ID NO: 31983
  GFR-binding peptide
  MOD_RES (1), (3), (35), (36): Xaa is C or S

SEQ ID NO: 63207 - protein, 39 aa, Artificial Sequence; identical to SEQ ID NO: 25004
  GFR-binding peptide
  MOD_RES (2), (4), (38), (39): Xaa is C or S
  MOD_RES (16), (17), (18), (19), (20): Xaa is A or G
  MOD_RES (21), (22), (23), (24): Xaa is A or G or is absent

SEQ ID NO: 63208 - protein, 42 aa, Artificial Sequence; identical to SEQ ID NO: 3929
  GFR-binding peptide
  MOD_RES (2), (4), (38): Xaa is C or S
  MOD_RES (16), (17), (18), (19), (20): Xaa is A or G
  MOD_RES (21), (22), (23), (24): Xaa is A or G or is absent

SEQ ID NO: 63209 - protein, 36 aa, Artificial Sequence; identical to SEQ ID NO: 25010
  GFR-binding peptide
  MOD_RES (2), (4), (36): Xaa is C or S

SEQ ID NO: 63210 - protein, 30 aa, Artificial Sequence
  GFR-binding peptide
SVAMGRHKRLYTVVGKDYYLISTASLKTPV

SEQ ID NO: 63211 - protein, 42 aa, Artificial Sequence
  GFR-binding peptide
  MOD_RES (2), (4), (36), (37): Xaa is C or S
RXAXSEVTMNRHKRLVVNKNEDYYLISTASMKEPVXXPEPIG

SEQ ID NO: 63212 - protein, 36 aa, Artificial Sequence; identical to SEQ ID NO: 31993
  GFR-binding peptide
  MOD_RES (1), (3), (35), (36): Xaa is C or S

SEQ ID NO: 63213 - protein, 32 aa, Artificial Sequence; identical to SEQ ID NO: 3936
  GFR-binding peptide
  MOD_RES (31), (32): Xaa is C or S

SEQ ID NO: 63214 - protein, 33 aa, Artificial Sequence; identical to SEQ ID NO: 25020
  GFR-binding peptide
  MOD_RES (12), (13), (14), (15), (16): Xaa is A or G
  MOD_RES (17), (18), (19), (20): Xaa is A or G or is absent

SEQ ID NO: 63215 - protein, 34 aa, Artificial Sequence; identical to SEQ ID NO: 31995
  GFR-binding peptide
  MOD_RES (32), (32): Xaa is C or S

SEQ ID NO: 63216 - protein, 33 aa, Artificial Sequence; identical to SEQ ID NO: 3940
  GFR-binding peptide
  MOD_RES (1), (32), (33): Xaa is C or S

SEQ ID NO: 63217 - protein, 40 aa, Artificial Sequence; identical to SEQ ID NO: 3944
  GFR-binding peptide
  MOD_RES (1), (35), (36): Xaa is C or S
  MOD_RES (13), (14), (15), (16), (17): Xaa is A or G
  MOD_RES (18), (19), (20), (21): Xaa is A or G or is absent

SEQ ID NO: 63218 - protein, 38 aa, Artificial Sequence
  GFR-binding peptide
  MOD_RES (2), (4), (38): Xaa is C or S
  MOD_RES (16), (17), (18), (19), (20): Xaa is A or G
  MOD_RES (21), (22), (23), (24): Xaa is A or G or is absent
SXGXRDVVMGEYKFKXXXXXXXXXLYLMSIPEMKTPTX

SEQ ID NO: 63219 - protein, 40 aa, Artificial Sequence; identical to SEQ ID NO: 3946
  GFR-binding peptide
  MOD_RES (1), (3), (36), (37): Xaa is C or S
  MOD_RES (14), (15), (16), (17), (18): Xaa is A or G
  MOD_RES (19), (20), (21), (22): Xaa is A or G or is absent

SEQ ID NO: 63220 - protein, 44 aa, Artificial Sequence; identical to SEQ ID NO: 32003
  GFR-binding peptide
  MOD_RES (2), (4), (38): Xaa is C or S
  MOD_RES (16), (17), (18), (19), (20): Xaa is A or G
  MOD_RES (21), (22), (23), (24): Xaa is A or G or is absent

SEQ ID NO: 63221 - protein, 39 aa, Artificial Sequence; identical to SEQ ID NO: 3949
  GFR-binding peptide
  MOD_RES (2), (36), (37): Xaa is C or S
  MOD_RES (14), (15), (16), (17), (18): Xaa is A or G
  MOD_RES (19), (20), (21), (22): Xaa is A or G or is absent

SEQ ID NO: 63222 - protein, 35 aa, Artificial Sequence
  GFR-binding peptide
  MOD_RES (2), (2): Xaa is C or S
  MOD_RES (14), (15), (16), (17), (18): Xaa is A or G
  MOD_RES (19), (20), (21), (22): Xaa is A or G or is absent
GXSEVVMDYHYKLXXXXXXXXXKYLISIPSLRTPV

SEQ ID NO: 63223 - protein, 36 aa, Artificial Sequence; identical to SEQ ID NO: 3951
  GFR-binding peptide
  MOD_RES (34), (35): Xaa is C or S
  MOD_RES (12), (13), (14), (15), (16): Xaa is A or G
  MOD_RES (17), (18), (19), (20): Xaa is A or G or is absent

SEQ ID NO: 63224 - protein, 41 aa, Artificial Sequence; identical to SEQ ID NO: 32011
  GFR-binding peptide
  MOD_RES (1), (35), (36): Xaa is C or S
  MOD_RES (13), (14), (15), (16), (17): Xaa is A or G
  MOD_RES (18), (19), (20), (21): Xaa is A or G or is absent

SEQ ID NO: 63225 - protein, 34 aa, Artificial Sequence
  GFR-binding peptide
  MOD_RES (31), (32): Xaa is C or S
SRVIMPIKGYVKPKRGVFYLINIPSLAQPVXXPA

SEQ ID NO: 63226 - protein, 34 aa, Artificial Sequence; identical to SEQ ID NO: 3953
  GFR-binding peptide
  MOD_RES (31), (32): Xaa is C or S

SEQ ID NO: 63227 - protein, 37 aa, Artificial Sequence; identical to SEQ ID NO: 3957
  GFR-binding peptide
  MOD_RES (2), (4): Xaa is C or S
  MOD_RES (16), (17), (18), (19), (20): Xaa is A or G
  MOD_RES (21), (22), (23), (24): Xaa is A or G or is absent

SEQ ID NO: 63228 - protein, 37 aa, Artificial Sequence; identical to SEQ ID NO: 11377
  GFR-binding peptide
  MOD_RES (2), (4): Xaa is C or S
  MOD_RES (16), (17), (18), (19), (20): Xaa is A or G
  MOD_RES (21), (22), (23), (24): Xaa is A or G or is absent

SEQ ID NO: 63229 - protein, 35 aa, Artificial Sequence; identical to SEQ ID NO: 32020
  GFR-binding peptide
  MOD_RES (1), (33), (34): Xaa is C or S

SEQ ID NO: 63230 - protein, 35 aa, Artificial Sequence; identical to SEQ ID NO: 25039
  GFR-binding peptide
  MOD_RES (33), (34): Xaa is C or S
  MOD_RES (11), (12), (13), (14), (15): Xaa is A or G
  MOD_RES (16), (17), (18), (19): Xaa is A or G or is absent

SEQ ID NO: 63231 - protein, 41 aa, Artificial Sequence; identical to SEQ ID NO: 3958
  GFR-binding peptide
  MOD_RES (1), (3), (35), (36): Xaa is C or S

SEQ ID NO: 63232 - protein, 34 aa, Artificial Sequence; identical to SEQ ID NO: 32023
  GFR-binding peptide
  MOD_RES (1), (33), (34): Xaa is C or S

SEQ ID NO: 63233 - protein, 35 aa, Artificial Sequence
  GFR-binding peptide
  MOD_RES (32), (33): Xaa is C or S
SEVTMNYHYKLVVNKNEDKYLISIPSMKEPVXXPE

SEQ ID NO: 63234 - protein, 39 aa, Artificial Sequence; identical to SEQ ID NO: 25043
  GFR-binding peptide
  MOD_RES (1), (35), (36): Xaa is C or S
  MOD_RES (13), (14), (15), (16), (17): Xaa is A or G
  MOD_RES (18), (19), (20), (21): Xaa is A or G or is absent

SEQ ID NO: 63235 - protein, 34 aa, Artificial Sequence
  GFR-binding peptide
  MOD_RES (32), (33): Xaa is C or S
SEVTMNRYKKLVVNKNEDFYLISIANMKEPVXXP

SEQ ID NO: 63236 - protein, 32 aa, Artificial Sequence; identical to SEQ ID NO: 25046
  GFR-binding peptide
  MOD_RES (2), (2): Xaa is C or S

SEQ ID NO: 63237 - protein, 36 aa, Artificial Sequence; identical to SEQ ID NO: 25052
  GFR-binding peptide
  MOD_RES (33), (34): Xaa is C or S
  MOD_RES (11), (12), (13), (14), (15): Xaa is A or G
  MOD_RES (16), (17), (18), (19): Xaa is A or G or is absent

SEQ ID NO: 63238 - protein, 39 aa, Artificial Sequence; identical to SEQ ID NO: 3970
  GFR-binding peptide
  MOD_RES (1), (3), (37), (38): Xaa is C or S
  MOD_RES (15), (16), (17), (18), (19): Xaa is A or G
  MOD_RES (20), (21), (22), (23): Xaa is A or G or is absent

SEQ ID NO: 63239 - protein, 36 aa, Artificial Sequence
  GFR-binding peptide
  MOD_RES (1), (3), (34), (35): Xaa is C or S
XKXSKVVMPIKGYVKPTRGVFYLINIPSLDQPVXXP

SEQ ID NO: 63240 - protein, 39 aa, Artificial Sequence; identical to SEQ ID NO: 32038
  GFR-binding peptide
  MOD_RES (2), (4), (36), (37): Xaa is C or S

SEQ ID NO: 63241 - protein, 41 aa, Artificial Sequence; identical to SEQ ID NO: 3971
  GFR-binding peptide
  MOD_RES (2), (4), (37), (38): Xaa is C or S
  MOD_RES (15), (16), (17), (18), (19): Xaa is A or G
  MOD_RES (20), (21), (22), (23): Xaa is A or G or is absent

SEQ ID NO: 63242 - protein, 37 aa, Artificial Sequence; identical to SEQ ID NO: 3975
  GFR-binding peptide
  MOD_RES (2), (4), (37): Xaa is C or S
  MOD_RES (15), (16), (17), (18), (19): Xaa is A or G
  MOD_RES (20), (21), (22), (23): Xaa is A or G or is absent

SEQ ID NO: 63243 - protein, 36 aa, Artificial Sequence; identical to SEQ ID NO: 3978
  GFR-binding peptide
  MOD_RES (1), (3), (34), (35): Xaa is C or S

SEQ ID NO: 63244 - protein, 39 aa, Artificial Sequence; identical to SEQ ID NO: 56992
  GFR-binding peptide
  MOD_RES (2), (34), (35): Xaa is C or S

SEQ ID NO: 63245 - protein, 39 aa, Artificial Sequence; identical to SEQ ID NO: 3982
  GFR-binding peptide
  MOD_RES (2), (35), (36): Xaa is C or S
  MOD_RES (13), (14), (15), (16), (17): Xaa is A or G
  MOD_RES (18), (19), (20), (21): Xaa is A or G or is absent

SEQ ID NO: 63246 - protein, 38 aa, Artificial Sequence; identical to SEQ ID NO: 3984
  GFR-binding peptide
  MOD_RES (33), (34): Xaa is C or S
  MOD_RES (11), (12), (13), (14), (15): Xaa is A or G
  MOD_RES (16), (17), (18), (19): Xaa is A or G or is absent

SEQ ID NO: 63247 - protein, 36 aa, Artificial Sequence; identical to SEQ ID NO: 3985
  GFR-binding peptide
  MOD_RES (1), (34), (35): Xaa is C or S
  MOD_RES (12), (13), (14), (15), (16): Xaa is A or G
  MOD_RES (17), (18), (19), (20): Xaa is A or G or is absent

SEQ ID NO: 63248 - protein, 40 aa, Artificial Sequence; identical to SEQ ID NO: 3988
  GFR-binding peptide
  MOD_RES (1), (3), (37), (38): Xaa is C or S
  MOD_RES (15), (16), (17), (18), (19): Xaa is A or G
  MOD_RES (20), (21), (22), (23): Xaa is A or G or is absent

SEQ ID NO: 63249 - protein, 36 aa, Artificial Sequence
  GFR-binding peptide
  MOD_RES (1), (3), (34), (35): Xaa is C or S
XGXEEVIMEYKFKLLVRGNDLYLMSIPETKVPAXXT

SEQ ID NO: 63250 - protein, 38 aa, Artificial Sequence; identical to SEQ ID NO: 32064
  GFR-binding peptide
  MOD_RES (1), (35), (36): Xaa is C or S
  MOD_RES (13), (14), (15), (16), (17): Xaa is A or G
  MOD_RES (18), (19), (20), (21): Xaa is A or G or is absent

SEQ ID NO: 63251 - protein, 38 aa, Artificial Sequence; identical to SEQ ID NO: 3991
  GFR-binding peptide
  MOD_RES (2), (4), (35), (36): Xaa is C or S

SEQ ID NO: 63252 - protein, 37 aa, Artificial Sequence; identical to SEQ ID NO: 32067
  GFR-binding peptide
  MOD_RES (1), (35), (36): Xaa is C or S
  MOD_RES (13), (14), (15), (16), (17): Xaa is A or G
  MOD_RES (18), (19), (20), (21): Xaa is A or G or is absent

SEQ ID NO: 63253 - protein, 41 aa, Artificial Sequence; identical to SEQ ID NO: 25075
  GFR-binding peptide
  MOD_RES (2), (4), (36): Xaa is C or S

SEQ ID NO: 63254 - protein, 35 aa, Artificial Sequence; identical to SEQ ID NO: 57005
  GFR-binding peptide
  MOD_RES (1), (33), (34): Xaa is C or S

SEQ ID NO: 63255 - protein, 41 aa, Artificial Sequence
  GFR-binding peptide
  MOD_RES (2), (4), (37), (38): Xaa is C or S
  MOD_RES (15), (16), (17), (18), (19): Xaa is A or G
  MOD_RES (20), (21), (22), (23): Xaa is A or G or is absent
LXGXEEVIMYHYKLXXXXXXXXXKYLMSIPSTKVPAXXTSP

SEQ ID NO: 63256 - protein, 36 aa, Artificial Sequence; identical to SEQ ID NO: 25079
  GFR-binding peptide
  MOD_RES (1), (3): Xaa is C or S
  MOD_RES (15), (16), (17), (18), (19): Xaa is A or G
  MOD_RES (20), (21), (22), (23): Xaa is A or G or is absent

SEQ ID NO: 63257 - protein, 35 aa, Artificial Sequence
  GFR-binding peptide
  MOD_RES (2), (4), (35): Xaa is C or S
LXGXEEVIMYHYKLLLVRGNDKYLMSIPSTKVPAX

SEQ ID NO: 63258 - protein, 32 aa, Artificial Sequence
  GFR-binding peptide
  MOD_RES (11), (12), (13), (14), (15): Xaa is A or G
  MOD_RES (16), (17), (18), (19): Xaa is A or G or is absent
SVAMGRHKRLXXXXXXXXXYYLISTASLKTPV

SEQ ID NO: 63259 - protein, 38 aa, Artificial Sequence; identical to SEQ ID NO: 3999
  GFR-binding peptide
  MOD_RES (1), (3), (34), (35): Xaa is C or S

SEQ ID NO: 63260 - protein, 34 aa, Artificial Sequence
  GFR-binding peptide
  MOD_RES (1), (33), (34): Xaa is C or S
XSEVTMNRHKRLVVNKNEDYYLISTASMKEPVXX

SEQ ID NO: 63261 - protein, 41 aa, Artificial Sequence; identical to SEQ ID NO: 4001
  GFR-binding peptide
  MOD_RES (2), (4), (35), (36): Xaa is C or S

SEQ ID NO: 63262 - protein, 37 aa, Artificial Sequence; identical to SEQ ID NO: 4002
  GFR-binding peptide
  MOD_RES (2), (4): Xaa is C or S
  MOD_RES (16), (17), (18), (19), (20): Xaa is A or G
  MOD_RES (21), (22), (23), (24): Xaa is A or G or is absent

SEQ ID NO: 63263 - protein, 37 aa, Artificial Sequence; identical to SEQ ID NO: 4005
  GFR-binding peptide
  MOD_RES (33), (34): Xaa is C or S
  MOD_RES (11), (12), (13), (14), (15): Xaa is A or G
  MOD_RES (16), (17), (18), (19): Xaa is A or G or is absent

SEQ ID NO: 63264 - protein, 31 aa, Artificial Sequence
  GFR-binding peptide
  MOD_RES (1), (1): Xaa is C or S
XEEVIMYHYKLLLVRGNDKYLMSIPSTKVPA

SEQ ID NO: 63265 - protein, 35 aa, Artificial Sequence; identical to SEQ ID NO: 32076
  GFR-binding peptide
  MOD_RES (1), (35): Xaa is C or S
  MOD_RES (13), (14), (15), (16), (17): Xaa is A or G
  MOD_RES (18), (19), (20), (21): Xaa is A or G or is absent

SEQ ID NO: 63266 - protein, 43 aa, Artificial Sequence
  GFR-binding peptide
  MOD_RES (1), (3), (37), (38): Xaa is C or S
  MOD_RES (15), (16), (17), (18), (19): Xaa is A or G
  MOD_RES (20), (21), (22), (23): Xaa is A or G or is absent
XAXSEVTMNRHKRLXXXXXXXXXYYLISTASMKEPVXXPEPIG

SEQ ID NO: 63267 - protein, 39 aa, Artificial Sequence; identical to SEQ ID NO: 25085
  GFR-binding peptide
  MOD_RES (1), (3), (36), (37): Xaa is C or S

SEQ ID NO: 63268 - protein, 41 aa, Artificial Sequence; identical to SEQ ID NO: 32080
  GFR-binding peptide
  MOD_RES (1), (3), (37), (38): Xaa is C or S
  MOD_RES (15), (16), (17), (18), (19): Xaa is A or G
  MOD_RES (20), (21), (22), (23): Xaa is A or G or is absent

SEQ ID NO: 63269 - protein, 42 aa, Artificial Sequence; identical to SEQ ID NO: 32083
  GFR-binding peptide
  MOD_RES (2), (4), (36), (37): Xaa is C or S

SEQ ID NO: 63270 - protein, 42 aa, Artificial Sequence; identical to SEQ ID NO: 32084
  GFR-binding peptide
  MOD_RES (2), (36): Xaa is C or S
  MOD_RES (14), (15), (16), (17), (18): Xaa is A or G
  MOD_RES (19), (20), (21), (22): Xaa is A or G or is absent

SEQ ID NO: 63271 - protein, 36 aa, Artificial Sequence; identical to SEQ ID NO: 4007
  GFR-binding peptide
  MOD_RES (1), (32), (33): Xaa is C or S

SEQ ID NO: 63272 - protein, 38 aa, Artificial Sequence
  GFR-binding peptide
  MOD_RES (2), (35), (36): Xaa is C or S
  MOD_RES (13), (14), (15), (16), (17): Xaa is A or G
  MOD_RES (18), (19), (20), (21): Xaa is A or G or is absent
KXSKVVMPIKGYXXXXXXXXXFYLINIPSLDQPVXXPS

SEQ ID NO: 63273 - protein, 42 aa, Artificial Sequence; identical to SEQ ID NO: 4008
  GFR-binding peptide
  MOD_RES (1), (3), (36), (37): Xaa is C or S

SEQ ID NO: 63274 - protein, 35 aa, Artificial Sequence; identical to SEQ ID NO: 32085
  GFR-binding peptide
  MOD_RES (1), (3), (35): Xaa is C or S

SEQ ID NO: 63275 - protein, 40 aa, Artificial Sequence
  GFR-binding peptide
  MOD_RES (34), (35): Xaa is C or S
  MOD_RES (12), (13), (14), (15), (16): Xaa is A or G
  MOD_RES (17), (18), (19), (20): Xaa is A or G or is absent
RDVVMGRHKRLXXXXXXXXXYYLMSTASMKTPTXXPGASG

SEQ ID NO: 63276 - protein, 39 aa, Artificial Sequence
  GFR-binding peptide
  MOD_RES (33), (34): Xaa is C or S
  MOD_RES (11), (12), (13), (14), (15): Xaa is A or G
  MOD_RES (16), (17), (18), (19): Xaa is A or G or is absent
EEVIMEYKFKXXXXXXXXXLYLMSIPETKVPAXXTSPVR

SEQ ID NO: 63277 - protein, 38 aa, Artificial Sequence
  GFR-binding peptide
  MOD_RES (1), (3), (35), (36): Xaa is C or S
XAXSEVTMNRYKKLVVNKNEDFYLISIANMKEPVXXPE

SEQ ID NO: 63278 - protein, 34 aa, Artificial Sequence; identical to SEQ ID NO: 32095
  GFR-binding peptide
  MOD_RES (1), (1): Xaa is C or S
  MOD_RES (13), (14), (15), (16), (17): Xaa is A or G
  MOD_RES (18), (19), (20), (21): Xaa is A or G or is absent

SEQ ID NO: 63279 - protein, 32 aa, Artificial Sequence; identical to SEQ ID NO: 32097
  GFR-binding peptide
  MOD_RES (1), (1): Xaa is C or S

SEQ ID NO: 63280 - protein, 33 aa, Artificial Sequence; identical to SEQ ID NO: 32098
  GFR-binding peptide
  MOD_RES (2), (2): Xaa is C or S

SEQ ID NO: 63281 - protein, 41 aa, Artificial Sequence; identical to SEQ ID NO: 25094
  GFR-binding peptide
  MOD_RES (2), (4), (38), (39): Xaa is C or S
  MOD_RES (16), (17), (18), (19), (20): Xaa is A or G
  MOD_RES (21), (22), (23), (24): Xaa is A or G or is absent

SEQ ID NO: 63282 - protein, 39 aa, Artificial Sequence; identical to SEQ ID NO: 4015
  GFR-binding peptide
  MOD_RES (33), (34): Xaa is C or S
  MOD_RES (11), (12), (13), (14), (15): Xaa is A or G
  MOD_RES (16), (17), (18), (19): Xaa is A or G or is absent

SEQ ID NO: 63283 - protein, 35 aa, Artificial Sequence
  GFR-binding peptide
  MOD_RES (1), (34), (35): Xaa is C or S
  MOD_RES (12), (13), (14), (15), (16): Xaa is A or G
  MOD_RES (17), (18), (19), (20): Xaa is A or G or is absent
XSRVIMPIKGYXXXXXXXXXFYLINIPSLAQPVXX

SEQ ID NO: 63284 - protein, 42 aa, Artificial Sequence; identical to SEQ ID NO: 32101
  GFR-binding peptide
  MOD_RES (2), (36), (37): Xaa is C or S
  MOD_RES (14), (15), (16), (17), (18): Xaa is A or G
  MOD_RES (19), (20), (21), (22): Xaa is A or G or is absent

SEQ ID NO: 63285 - protein, 40 aa, Artificial Sequence
  GFR-binding peptide
  MOD_RES (34), (35): Xaa is C or S
  MOD_RES (12), (13), (14), (15), (16): Xaa is A or G
  MOD_RES (17), (18), (19), (20): Xaa is A or G or is absent
SEVTMNRYKKLXXXXXXXXXFYLISIANMKEPVXXPEPIG

SEQ ID NO: 63286 - protein, 37 aa, Artificial Sequence; identical to SEQ ID NO: 32106
  GFR-binding peptide
  MOD_RES (2), (4): Xaa is C or S
  MOD_RES (16), (17), (18), (19), (20): Xaa is A or G
  MOD_RES (21), (22), (23), (24): Xaa is A or G or is absent

SEQ ID NO: 63287 - protein, 36 aa, Artificial Sequence; identical to SEQ ID NO: 4022
  GFR-binding peptide
  MOD_RES (1), (35), (36): Xaa is C or S
  MOD_RES (13), (14), (15), (16), (17): Xaa is A or G
  MOD_RES (18), (19), (20), (21): Xaa is A or G or is absent

SEQ ID NO: 63288 - protein, 38 aa, Artificial Sequence; identical to SEQ ID NO: 4023
  GFR-binding peptide
  MOD_RES (2), (4), (37), (38): Xaa is C or S

SEQ ID NO: 63289 - protein, 37 aa, Artificial Sequence
  GFR-binding peptide
  MOD_RES (1), (34), (35): Xaa is C or S
  MOD_RES (12), (13), (14), (15), (16): Xaa is A or G
  MOD_RES (17), (18), (19), (20): Xaa is A or G or is absent
XSKVIMPIKGYXXXXXXXXXFYLINIPSLDQSVXXPS

SEQ ID NO: 63290 - protein, 36 aa, Artificial Sequence; identical to SEQ ID NO: 25099
  GFR-binding peptide
  MOD_RES (1), (3), (36): Xaa is C or S

SEQ ID NO: 63291 - protein, 36 aa, Artificial Sequence
  GFR-binding peptide
  MOD_RES (2), (4), (36): Xaa is C or S
RXAXSEVTMNRYKKLVVNKNEDFYLISIANMKEPVX

SEQ ID NO: 63292 - protein, 44 aa, Artificial Sequence; identical to SEQ ID NO: 32109
  GFR-binding peptide
  MOD_RES (2), (4), (38), (39): Xaa is C or S
  MOD_RES (16), (17), (18), (19), (20): Xaa is A or G
  MOD_RES (21), (22), (23), (24): Xaa is A or G or is absent

SEQ ID NO: 63293 - protein, 36 aa, Artificial Sequence; identical to SEQ ID NO: 4029
  GFR-binding peptide
  MOD_RES (33), (34): Xaa is C or S

SEQ ID NO: 63294 - protein, 36 aa, Artificial Sequence; identical to SEQ ID NO: 25105
  GFR-binding peptide
  MOD_RES (31), (32): Xaa is C or S

SEQ ID NO: 63295 - protein, 39 aa, Artificial Sequence; identical to SEQ ID NO: 25107
  GFR-binding peptide
  MOD_RES (1), (3), (37), (38): Xaa is C or S
  MOD_RES (15), (16), (17), (18), (19): Xaa is A or G
  MOD_RES (20), (21), (22), (23): Xaa is A or G or is absent

SEQ ID NO: 63296 - protein, 32 aa, Artificial Sequence
  GFR-binding peptide
  MOD_RES (32), (32): Xaa is C or S
RDVVMGYHYKLIIQQKDNKYLMSIPSMKTPTX

SEQ ID NO: 63297 - protein, 34 aa, Artificial Sequence; identical to SEQ ID NO: 4032
  GFR-binding peptide
  MOD_RES (2), (34): Xaa is C or S

SEQ ID NO: 63298 - protein, 32 aa, Artificial Sequence
  GFR-binding peptide
  MOD_RES (32), (32): Xaa is C or S
SEVTMNYHYKLVVNKNEDKYLISIPSMKEPVX

SEQ ID NO: 63299 - protein, 34 aa, Artificial Sequence; identical to SEQ ID NO: 32126
  GFR-binding peptide
  MOD_RES (1), (1): Xaa is C or S
  MOD_RES (13), (14), (15), (16), (17): Xaa is A or G
  MOD_RES (18), (19), (20), (21): Xaa is A or G or is absent

SEQ ID NO: 63300 - protein, 41 aa, Artificial Sequence; identical to SEQ ID NO: 32132
  GFR-binding peptide
  MOD_RES (1), (3), (36), (37): Xaa is C or S
  MOD_RES (14), (15), (16), (17), (18): Xaa is A or G
  MOD_RES (19), (20), (21), (22): Xaa is A or G or is absent

SEQ ID NO: 63301 - protein, 40 aa, Artificial Sequence; identical to SEQ ID NO: 4035
  GFR-binding peptide
  MOD_RES (1), (34), (35): Xaa is C or S

SEQ ID NO: 63302 - protein, 37 aa, Artificial Sequence; identical to SEQ ID NO: 4037
  GFR-binding peptide
  MOD_RES (2), (35), (36): Xaa is C or S
  MOD_RES (13), (14), (15), (16), (17): Xaa is A or G
  MOD_RES (18), (19), (20), (21): Xaa is A or G or is absent

SEQ ID NO: 63303 - protein, 39 aa, Artificial Sequence; identical to SEQ ID NO: 25115
  GFR-binding peptide
  MOD_RES (1), (34), (35): Xaa is C or S
  MOD_RES (12), (13), (14), (15), (16): Xaa is A or G
  MOD_RES (17), (18), (19), (20): Xaa is A or G or is absent

SEQ ID NO: 63304 - protein, 37 aa, Artificial Sequence
  GFR-binding peptide
  MOD_RES (31), (32): Xaa is C or S
EVTMNRHKRLVVNKNEDYYLISTASMKEPVXXPEPIG

SEQ ID NO: 63305 - protein, 44 aa, Artificial Sequence; identical to SEQ ID NO: 4038
  GFR-binding peptide
  MOD_RES (2), (4), (38), (39): Xaa is C or S
  MOD_RES (16), (17), (18), (19), (20): Xaa is A or G
  MOD_RES (21), (22), (23), (24): Xaa is A or G or is absent

SEQ ID NO: 63306 - protein, 35 aa, Artificial Sequence
  GFR-binding peptide
  MOD_RES (1), (3), (35): Xaa is C or S
XGXRDVVMGYHYKLIIQQKDNKYLMSIPSMKTPTX

SEQ ID NO: 63307 - protein, 39 aa, Artificial Sequence
  GFR-binding peptide
  MOD_RES (1), (3), (35), (36): Xaa is C or S
XAXSEVTMNRYKKLVVNKNEDFYLISIANMKEPVXXPEP

SEQ ID NO: 63308 - protein, 34 aa, Artificial Sequence; identical to SEQ ID NO: 25119
  GFR-binding peptide
  MOD_RES (31), (32): Xaa is C or S

SEQ ID NO: 63309 - protein, 33 aa, Artificial Sequence; identical to SEQ ID NO: 4044
  GFR-binding peptide
  MOD_RES (1), (32), (33): Xaa is C or S

SEQ ID NO: 63310 - protein, 34 aa, Artificial Sequence
  GFR-binding peptide
  MOD_RES (1), (33), (34): Xaa is C or S
XSEVTMNEYKFKVVNKNEDLYLISIPEMKEPVXX

SEQ ID NO: 63311 - protein, 33 aa, Artificial Sequence
  GFR-binding peptide
  MOD_RES (31), (32): Xaa is C or S
DVVMGEYKFKIIQQKDNLYLMSIPEMKTPTXXP

SEQ ID NO: 63312 - protein, 32 aa, Artificial Sequence; identical to SEQ ID NO: 25127
  GFR-binding peptide
  MOD_RES (31), (32): Xaa is C or S

SEQ ID NO: 63313 - protein, 36 aa, Artificial Sequence
  GFR-binding peptide
  MOD_RES (33), (34): Xaa is C or S
  MOD_RES (11), (12), (13), (14), (15): Xaa is A or G
  MOD_RES (16), (17), (18), (19): Xaa is A or G or is absent
EVTMNPIKGYXXXXXXXXXFYLINIPSMKEPVXXPE

SEQ ID NO: 63314 - protein, 42 aa, Artificial Sequence; identical to SEQ ID NO: 4055
  GFR-binding peptide
  MOD_RES (1), (36), (37): Xaa is C or S
  MOD_RES (14), (15), (16), (17), (18): Xaa is A or G
  MOD_RES (19), (20), (21), (22): Xaa is A or G or is absent

SEQ ID NO: 63315 - protein, 40 aa, Artificial Sequence; identical to SEQ ID NO: 4056
  GFR-binding peptide
  MOD_RES (1), (34), (35): Xaa is C or S
  MOD_RES (12), (13), (14), (15), (16): Xaa is A or G
  MOD_RES (17), (18), (19), (20): Xaa is A or G or is absent

SEQ ID NO: 63316 - protein, 39 aa, Artificial Sequence
  GFR-binding peptide
  MOD_RES (2), (4), (38), (39): Xaa is C or S
  MOD_RES (16), (17), (18), (19), (20): Xaa is A or G
  MOD_RES (21), (22), (23), (24): Xaa is A or G or is absent
RXAXSEVTMNYHYKLXXXXXXXXXKYLISIPSMKEPVXX

SEQ ID NO: 63317 - protein, 37 aa, Artificial Sequence; identical to SEQ ID NO: 4063
  GFR-binding peptide
  MOD_RES (1), (34), (35): Xaa is C or S
  MOD_RES (12), (13), (14), (15), (16): Xaa is A or G
  MOD_RES (17), (18), (19), (20): Xaa is A or G or is absent

SEQ ID NO: 63318 - protein, 35 aa, Artificial Sequence
  GFR-binding peptide
  MOD_RES (2), (35): Xaa is C or S
  MOD_RES (13), (14), (15), (16), (17): Xaa is A or G
  MOD_RES (18), (19), (20), (21): Xaa is A or G or is absent
KXSRVIMPIKGYXXXXXXXXXFYLINIPSLAQPVX

SEQ ID NO: 63319 - protein, 35 aa, Artificial Sequence; identical to SEQ ID NO: 4069
  GFR-binding peptide
  MOD_RES (33), (34): Xaa is C or S
  MOD_RES (11), (12), (13), (14), (15): Xaa is A or G
  MOD_RES (16), (17), (18), (19): Xaa is A or G or is absent

SEQ ID NO: 63320 - protein, 35 aa, Artificial Sequence; identical to SEQ ID NO: 4071
  GFR-binding peptide
  MOD_RES (32), (33): Xaa is C or S

SEQ ID NO: 63321 - protein, 37 aa, Artificial Sequence
  GFR-binding peptide
  MOD_RES (1), (3), (37): Xaa is C or S
  MOD_RES (15), (16), (17), (18), (19): Xaa is A or G
  MOD_RES (20), (21), (22), (23): Xaa is A or G or is absent
XGXRDVVMGRHKRLXXXXXXXXXYYLMSTASMKTPTX

SEQ ID NO: 63322 - protein, 38 aa, Artificial Sequence; identical to SEQ ID NO: 25144
  GFR-binding peptide
  MOD_RES (34), (34): Xaa is C or S
  MOD_RES (12), (13), (14), (15), (16): Xaa is A or G
  MOD_RES (17), (18), (19), (20): Xaa is A or G or is absent

SEQ ID NO: 63323 - protein, 39 aa, Artificial Sequence; identical to SEQ ID NO: 4073
  GFR-binding peptide
  MOD_RES (1), (35), (36): Xaa is C or S
  MOD_RES (13), (14), (15), (16), (17): Xaa is A or G
  MOD_RES (18), (19), (20), (21): Xaa is A or G or is absent

SEQ ID NO: 63324 - protein, 40 aa, Artificial Sequence
  GFR-binding peptide
  MOD_RES (1), (3), (35), (36): Xaa is C or S
XGXRDVVMGRHKRLIIQQKDNYYLMSTASMKTPTXXPGAS

SEQ ID NO: 63325 - protein, 35 aa, Artificial Sequence
  GFR-binding peptide
  MOD_RES (2), (2): Xaa is C or S
  MOD_RES (14), (15), (16), (17), (18): Xaa is A or G
  MOD_RES (19), (20), (21), (22): Xaa is A or G or is absent
GXSEVVMDEYKFKXXXXXXXXXLYLISIPELRTPV

SEQ ID NO: 63326 - protein, 34 aa, Artificial Sequence; identical to SEQ ID NO: 32167
  GFR-binding peptide
  MOD_RES (1), (34): Xaa is C or S

SEQ ID NO: 63327 - protein, 33 aa, Artificial Sequence
  GFR-binding peptide
  MOD_RES (1), (33): Xaa is C or S
XSEVTMNRHKRLVVNKNEDYYLISTASMKEPVX

SEQ ID NO: 63328 - protein, 36 aa, Artificial Sequence; identical to SEQ ID NO: 25151
  GFR-binding peptide
  MOD_RES (32), (33): Xaa is C or S

SEQ ID NO: 63329 - protein, 38 aa, Artificial Sequence; identical to SEQ ID NO: 25153
  GFR-binding peptide
  MOD_RES (2), (4), (35), (36): Xaa is C or S

SEQ ID NO: 63330 - protein, 39 aa, Artificial Sequence; identical to SEQ ID NO: 4078
  GFR-binding peptide
  MOD_RES (1), (3), (36), (37): Xaa is C or S
  MOD_RES (14), (15), (16), (17), (18): Xaa is A or G
  MOD_RES (19), (20), (21), (22): Xaa is A or G or is absent

SEQ ID NO: 63331 - protein, 38 aa, Artificial Sequence; identical to SEQ ID NO: 25154
  GFR-binding peptide
  MOD_RES (2), (36), (37): Xaa is C or S
  MOD_RES (14), (15), (16), (17), (18): Xaa is A or G
  MOD_RES (19), (20), (21), (22): Xaa is A or G or is absent

SEQ ID NO: 63332 - protein, 39 aa, Artificial Sequence; identical to SEQ ID NO: 32168
  GFR-binding peptide
  MOD_RES (1), (33), (34): Xaa is C or S

SEQ ID NO: 63333 - protein, 39 aa, Artificial Sequence; identical to SEQ ID NO: 25155
  GFR-binding peptide
  MOD_RES (1), (3), (35): Xaa is C or S

SEQ ID NO: 63334 - protein, 41 aa, Artificial Sequence; identical to SEQ ID NO: 25157
  GFR-binding peptide
  MOD_RES (2), (36), (37): Xaa is C or S
  MOD_RES (14), (15), (16), (17), (18): Xaa is A or G
  MOD_RES (19), (20), (21), (22): Xaa is A or G or is absent

SEQ ID NO: 63335 - protein, 41 aa, Artificial Sequence; identical to SEQ ID NO: 4080
  GFR-binding peptide
  MOD_RES (35), (36): Xaa is C or S
  MOD_RES (13), (14), (15), (16), (17): Xaa is A or G
  MOD_RES (18), (19), (20), (21): Xaa is A or G or is absent

SEQ ID NO: 63336 - protein, 40 aa, Artificial Sequence; identical to SEQ ID NO: 4081
  GFR-binding peptide
  MOD_RES (2), (4), (36), (37): Xaa is C or S

SEQ ID NO: 63337 - protein, 33 aa, Artificial Sequence
  GFR-binding peptide
  MOD_RES (1), (33): Xaa is C or S
XSEVTMNEYKFKVVNKNEDLYLISIPEMKEPVX

SEQ ID NO: 63338 - protein, 41 aa, Artificial Sequence; identical to SEQ ID NO: 32172
  GFR-binding peptide
  MOD_RES (1), (35), (36): Xaa is C or S
  MOD_RES (13), (14), (15), (16), (17): Xaa is A or G
  MOD_RES (18), (19), (20), (21): Xaa is A or G or is absent

SEQ ID NO: 63339 - protein, 38 aa, Artificial Sequence; identical to SEQ ID NO: 4083
  GFR-binding peptide
  MOD_RES (1), (3), (34), (35): Xaa is C or S

SEQ ID NO: 63340 - protein, 37 aa, Artificial Sequence; identical to SEQ ID NO: 4084
  GFR-binding peptide
  MOD_RES (2), (4): Xaa is C or S
  MOD_RES (16), (17), (18), (19), (20): Xaa is A or G
  MOD_RES (21), (22), (23), (24): Xaa is A or G or is absent

SEQ ID NO: 63341 - protein, 33 aa, Artificial Sequence; identical to SEQ ID NO: 4085
  GFR-binding peptide
  MOD_RES (12), (13), (14), (15), (16): Xaa is A or G
  MOD_RES (17), (18), (19), (20): Xaa is A or G or is absent

SEQ ID NO: 63342 - protein, 39 aa, Artificial Sequence; identical to SEQ ID NO: 4091
  GFR-binding peptide
  MOD_RES (2), (34): Xaa is C or S

SEQ ID NO: 63343 - protein, 38 aa, Artificial Sequence; identical to SEQ ID NO: 4093
  GFR-binding peptide
  MOD_RES (2), (4), (36), (37): Xaa is C or S

SEQ ID NO: 63344 - protein, 40 aa, Artificial Sequence; identical to SEQ ID NO: 4096
  GFR-binding peptide
  MOD_RES (1), (36), (37): Xaa is C or S
  MOD_RES (14), (15), (16), (17), (18): Xaa is A or G
  MOD_RES (19), (20), (21), (22): Xaa is A or G or is absent

SEQ ID NO: 63345 - protein, 40 aa, Artificial Sequence; identical to SEQ ID NO: 4098
  GFR-binding peptide
  MOD_RES (1), (3), (34), (35): Xaa is C or S

SEQ ID NO: 63346 - protein, 36 aa, Artificial Sequence
  GFR-binding peptide
  MOD_RES (1), (35), (36): Xaa is C or S
  MOD_RES (13), (14), (15), (16), (17): Xaa is A or G
  MOD_RES (18), (19), (20), (21): Xaa is A or G or is absent
XRDVVMGRHKRLXXXXXXXXXYYLMSTASMKTPTXX

SEQ ID NO: 63347 - protein, 38 aa, Artificial Sequence; identical to SEQ ID NO: 4101
  GFR-binding peptide
  MOD_RES (1), (32), (33): Xaa is C or S

SEQ ID NO: 63348 - protein, 40 aa, Artificial Sequence; identical to SEQ ID NO: 32183
  GFR-binding peptide
  MOD_RES (1), (35), (36): Xaa is C or S
  MOD_RES (13), (14), (15), (16), (17): Xaa is A or G
  MOD_RES (18), (19), (20), (21): Xaa is A or G or is absent

SEQ ID NO: 63349 - protein, 37 aa, Artificial Sequence; identical to SEQ ID NO: 4102
  GFR-binding peptide
  MOD_RES (2), (37): Xaa is C or S
  MOD_RES (15), (16), (17), (18), (19): Xaa is A or G
  MOD_RES (20), (21), (22), (23): Xaa is A or G or is absent

SEQ ID NO: 63350 - protein, 39 aa, Artificial Sequence; identical to SEQ ID NO: 4104
  GFR-binding peptide
  MOD_RES (1), (3), (34), (35): Xaa is C or S

SEQ ID NO: 63351 - protein, 38 aa, Artificial Sequence; identical to SEQ ID NO: 25171
  GFR-binding peptide
  MOD_RES (1), (3), (37), (38): Xaa is C or S
  MOD_RES (15), (16), (17), (18), (19): Xaa is A or G
  MOD_RES (20), (21), (22), (23): Xaa is A or G or is absent

SEQ ID NO: 63352 - protein, 36 aa, Artificial Sequence; identical to SEQ ID NO: 25172
  GFR-binding peptide
  MOD_RES (1), (35), (36): Xaa is C or S
  MOD_RES (13), (14), (15), (16), (17): Xaa is A or G
  MOD_RES (18), (19), (20), (21): Xaa is A or G or is absent

SEQ ID NO: 63353 - protein, 39 aa, Artificial Sequence; identical to SEQ ID NO: 32186
  GFR-binding peptide
  MOD_RES (1), (33), (34): Xaa is C or S

SEQ ID NO: 63354 - protein, 37 aa, Artificial Sequence; identical to SEQ ID NO: 4110
  GFR-binding peptide
  MOD_RES (1), (34), (35): Xaa is C or S

SEQ ID NO: 63355 - protein, 41 aa, Artificial Sequence; identical to SEQ ID NO: 4111
  GFR-binding peptide
  MOD_RES (2), (36), (37): Xaa is C or S
  MOD_RES (14), (15), (16), (17), (18): Xaa is A or G
  MOD_RES (19), (20), (21), (22): Xaa is A or G or is absent

SEQ ID NO: 63356 - protein, 38 aa, Artificial Sequence; identical to SEQ ID NO: 4112
  GFR-binding peptide
  MOD_RES (1), (3), (34), (35): Xaa is C or S

SEQ ID NO: 63357 - protein, 37 aa, Artificial Sequence; identical to SEQ ID NO: 32189
  GFR-binding peptide
  MOD_RES (2), (37): Xaa is C or S
  MOD_RES (15), (16), (17), (18), (19): Xaa is A or G
  MOD_RES (20), (21), (22), (23): Xaa is A or G or is absent

SEQ ID NO: 63358 - protein, 37 aa, Artificial Sequence; identical to SEQ ID NO: 4117
  GFR-binding peptide
  MOD_RES (33), (33): Xaa is C or S
  MOD_RES (11), (12), (13), (14), (15): Xaa is A or G
  MOD_RES (16), (17), (18), (19): Xaa is A or G or is absent

SEQ ID NO: 63359 - protein, 42 aa, Artificial Sequence; identical to SEQ ID NO: 32191
  GFR-binding peptide
  MOD_RES (1), (3), (37), (38): Xaa is C or S
  MOD_RES (15), (16), (17), (18), (19): Xaa is A or G
  MOD_RES (20), (21), (22), (23): Xaa is A or G or is absent

SEQ ID NO: 63360 - protein, 37 aa, Artificial Sequence; identical to SEQ ID NO: 4118
  GFR-binding peptide
  MOD_RES (1), (33): Xaa is C or S

SEQ ID NO: 63361 - protein, 36 aa, Artificial Sequence; identical to SEQ ID NO: 32193
  GFR-binding peptide
  MOD_RES (33), (34): Xaa is C or S
  MOD_RES (11), (12), (13), (14), (15): Xaa is A or G
  MOD_RES (16), (17), (18), (19): Xaa is A or G or is absent

SEQ ID NO: 63362 - protein, 35 aa, Artificial Sequence
  GFR-binding peptide
  MOD_RES (1), (3): Xaa is C or S
  MOD_RES (14), (15), (16), (17), (18): Xaa is A or G
  MOD_RES (19), (20), (21), (22): Xaa is A or G or is absent
XGXEEVIMYHYKLXXXXXXXXXKYLMSIPSTKVPA

SEQ ID NO: 63363 - protein, 40 aa, Artificial Sequence; identical to SEQ ID NO: 32202
  GFR-binding peptide
  MOD_RES (2), (37), (38): Xaa is C or S
  MOD_RES (15), (16), (17), (18), (19): Xaa is A or G
  MOD_RES (20), (21), (22), (23): Xaa is A or G or is absent

SEQ ID NO: 63364 - protein, 35 aa, Artificial Sequence; identical to SEQ ID NO: 4125
  GFR-binding peptide
  MOD_RES (1), (32), (33): Xaa is C or S

SEQ ID NO: 63365 - protein, 38 aa, Artificial Sequence; identical to SEQ ID NO: 4128
  GFR-binding peptide
  MOD_RES (34), (35): Xaa is C or S
  MOD_RES (12), (13), (14), (15), (16): Xaa is A or G
  MOD_RES (17), (18), (19), (20): Xaa is A or G or is absent

SEQ ID NO: 63366 - protein, 37 aa, Artificial Sequence; identical to SEQ ID NO: 4129
  GFR-binding peptide
  MOD_RES (1), (32), (33): Xaa is C or S

SEQ ID NO: 63367 - protein, 40 aa, Artificial Sequence; identical to SEQ ID NO: 4132
  GFR-binding peptide
  MOD_RES (2), (4), (37), (38): Xaa is C or S
  MOD_RES (15), (16), (17), (18), (19): Xaa is A or G
  MOD_RES (20), (21), (22), (23): Xaa is A or G or is absent

SEQ ID NO: 63368 - protein, 34 aa, Artificial Sequence; identical to SEQ ID NO: 4133
  GFR-binding peptide
  MOD_RES (2), (34): Xaa is C or S

SEQ ID NO: 63369 - protein, 37 aa, Artificial Sequence; identical to SEQ ID NO: 4134
  GFR-binding peptide
  MOD_RES (1), (33), (34): Xaa is C or S

SEQ ID NO: 63370 - protein, 38 aa, Artificial Sequence; identical to SEQ ID NO: 32209
  GFR-binding peptide
  MOD_RES (1), (3), (37), (38): Xaa is C or S
  MOD_RES (15), (16), (17), (18), (19): Xaa is A or G
  MOD_RES (20), (21), (22), (23): Xaa is A or G or is absent

SEQ ID NO: 63371 - protein, 31 aa, Artificial Sequence; identical to SEQ ID NO: 25194
  GFR-binding peptide
  MOD_RES (31), (31): Xaa is C or S

SEQ ID NO: 63372 - protein, 37 aa, Artificial Sequence; identical to SEQ ID NO: 25195
  GFR-binding peptide
  MOD_RES (1), (35), (36): Xaa is C or S
  MOD_RES (13), (14), (15), (16), (17): Xaa is A or G
  MOD_RES (18), (19), (20), (21): Xaa is A or G or is absent

SEQ ID NO: 63373 - protein, 40 aa, Artificial Sequence; identical to SEQ ID NO: 4140
  GFR-binding peptide
  MOD_RES (2), (37), (38): Xaa is C or S
  MOD_RES (15), (16), (17), (18), (19): Xaa is A or G
  MOD_RES (20), (21), (22), (23): Xaa is A or G or is absent

SEQ ID NO: 63374 - protein, 40 aa, Artificial Sequence; identical to SEQ ID NO: 32214
  GFR-binding peptide
  MOD_RES (2), (4), (36), (37): Xaa is C or S

SEQ ID NO: 63375 - protein, 38 aa, Artificial Sequence; identical to SEQ ID NO: 4142
  GFR-binding peptide
  MOD_RES (1), (3), (34), (35): Xaa is C or S

SEQ ID NO: 63376 - protein, 36 aa, Artificial Sequence; identical to SEQ ID NO: 25199
  GFR-binding peptide
  MOD_RES (1), (3), (36): Xaa is C or S
  MOD_RES (14), (15), (16), (17), (18): Xaa is A or G
  MOD_RES (19), (20), (21), (22): Xaa is A or G or is absent

SEQ ID NO: 63377 - protein, 38 aa, Artificial Sequence; identical to SEQ ID NO: 4146
  GFR-binding peptide
  MOD_RES (34), (35): Xaa is C or S
  MOD_RES (12), (13), (14), (15), (16): Xaa is A or G
  MOD_RES (17), (18), (19), (20): Xaa is A or G or is absent

SEQ ID NO: 63378 - protein, 36 aa, Artificial Sequence
  GFR-binding peptide
  MOD_RES (31), (32): Xaa is C or S
DVVMGRHKRLIIQQKDNYYLMSTASMKTPTXXPGAS

SEQ ID NO: 63379 - protein, 37 aa, Artificial Sequence
  GFR-binding peptide
  MOD_RES (2), (36), (37): Xaa is C or S
  MOD_RES (14), (15), (16), (17), (18): Xaa is A or G
  MOD_RES (19), (20), (21), (22): Xaa is A or G or is absent
GXAEVVMDRHKRLXXXXXXXXXYYLISTASLRAPVXX

SEQ ID NO: 63380 - protein, 41 aa, Artificial Sequence
  GFR-binding peptide
  MOD_RES (1), (35), (36): Xaa is C or S
  MOD_RES (13), (14), (15), (16), (17): Xaa is A or G
  MOD_RES (18), (19), (20), (21): Xaa is A or G or is absent
XSEVTMNPIKGYXXXXXXXXXFYLINIPSMKEPVXXPEPIG

SEQ ID NO: 63381 - protein, 32 aa, Artificial Sequence; identical to SEQ ID NO: 25207
  GFR-binding peptide
  MOD_RES (31), (32): Xaa is C or S

SEQ ID NO: 63382 - protein, 33 aa, Artificial Sequence
  GFR-binding peptide
  MOD_RES (33), (33): Xaa is C or S
  MOD_RES (11), (12), (13), (14), (15): Xaa is A or G
  MOD_RES (16), (17), (18), (19): Xaa is A or G or is absent
EVVMDRHKRLXXXXXXXXXYYLISTASLRAPVX

SEQ ID NO: 63383 - protein, 34 aa, Artificial Sequence; identical to SEQ ID NO: 4152
  GFR-binding peptide
  MOD_RES (2), (2): Xaa is C or S
  MOD_RES (13), (14), (15), (16), (17): Xaa is A or G
  MOD_RES (18), (19), (20), (21): Xaa is A or G or is absent

SEQ ID NO: 63384 - protein, 37 aa, Artificial Sequence; identical to SEQ ID NO: 25212
  GFR-binding peptide
  MOD_RES (1), (33), (34): Xaa is C or S

SEQ ID NO: 63385 - protein, 34 aa, Artificial Sequence; identical to SEQ ID NO: 25213
  GFR-binding peptide
  MOD_RES (2), (34): Xaa is C or S

SEQ ID NO: 63386 - protein, 34 aa, Artificial Sequence; identical to SEQ ID NO: 25214
  GFR-binding peptide
  MOD_RES (33), (34): Xaa is C or S
  MOD_RES (11), (12), (13), (14), (15): Xaa is A or G
  MOD_RES (16), (17), (18), (19): Xaa is A or G or is absent

SEQ ID NO: 63387 - protein, 40 aa, Artificial Sequence; identical to SEQ ID NO: 32227
  GFR-binding peptide
  MOD_RES (2), (36), (37): Xaa is C or S
  MOD_RES (14), (15), (16), (17), (18): Xaa is A or G
  MOD_RES (19), (20), (21), (22): Xaa is A or G or is absent

SEQ ID NO: 63388 - protein, 36 aa, Artificial Sequence; identical to SEQ ID NO: 25215
  GFR-binding peptide
  MOD_RES (1), (3), (35), (36): Xaa is C or S

SEQ ID NO: 63389 - protein, 38 aa, Artificial Sequence; identical to SEQ ID NO: 32228
  GFR-binding peptide
  MOD_RES (33), (34): Xaa is C or S
  MOD_RES (11), (12), (13), (14), (15): Xaa is A or G
  MOD_RES (16), (17), (18), (19): Xaa is A or G or is absent

SEQ ID NO: 63390 - protein, 36 aa, Artificial Sequence; identical to SEQ ID NO: 25216
  GFR-binding peptide
  MOD_RES (1), (33), (34): Xaa is C or S

SEQ ID NO: 63391 - protein, 39 aa, Artificial Sequence
  GFR-binding peptide
  MOD_RES (2), (4), (38), (39): Xaa is C or S
  MOD_RES (16), (17), (18), (19), (20): Xaa is A or G
  MOD_RES (21), (22), (23), (24): Xaa is A or G or is absent
RXGXSEVVMDYHYKLXXXXXXXXXKYLISIPSLRTPVXX

SEQ ID NO: 63392 - protein, 43 aa, Artificial Sequence; identical to SEQ ID NO: 32231
  GFR-binding peptide
  MOD_RES (2), (4), (38), (39): Xaa is C or S
  MOD_RES (16), (17), (18), (19), (20): Xaa is A or G
  MOD_RES (21), (22), (23), (24): Xaa is A or G or is absent

SEQ ID NO: 63393 - protein, 36 aa, Artificial Sequence; identical to SEQ ID NO: 25220
  GFR-binding peptide
  MOD_RES (1), (3), (35), (36): Xaa is C or S

SEQ ID NO: 63394 - protein, 34 aa, Artificial Sequence; identical to SEQ ID NO: 32232
  GFR-binding peptide
  MOD_RES (33), (34): Xaa is C or S
  MOD_RES (11), (12), (13), (14), (15): Xaa is A or G
  MOD_RES (16), (17), (18), (19): Xaa is A or G or is absent

SEQ ID NO: 63395 - protein, 40 aa, Artificial Sequence
  GFR-binding peptide
  MOD_RES (2), (36), (37): Xaa is C or S
  MOD_RES (14), (15), (16), (17), (18): Xaa is A or G
  MOD_RES (19), (20), (21), (22): Xaa is A or G or is absent
GXSEVVMDEYKFKXXXXXXXXXLYLISIPELRTPVXXTPP

SEQ ID NO: 63396 - protein, 40 aa, Artificial Sequence; identical to SEQ ID NO: 4161
  GFR-binding peptide
  MOD_RES (2), (34), (35): Xaa is C or S

SEQ ID NO: 63397 - protein, 35 aa, Artificial Sequence; identical to SEQ ID NO: 4163
  GFR-binding peptide
  MOD_RES (31), (32): Xaa is C or S

SEQ ID NO: 63398 - protein, 37 aa, Artificial Sequence
  GFR-binding peptide
  MOD_RES (32), (33): Xaa is C or S
RDVVMGYHYKLIIQQKDNKYLMSIPSMKTPTXXPGAS

SEQ ID NO: 63399 - protein, 38 aa, Artificial Sequence; identical to SEQ ID NO: 32241
  GFR-binding peptide
  MOD_RES (1), (3), (37), (38): Xaa is C or S
  MOD_RES (15), (16), (17), (18), (19): Xaa is A or G
  MOD_RES (20), (21), (22), (23): Xaa is A or G or is absent

SEQ ID NO: 63400 - protein, 41 aa, Artificial Sequence; identical to SEQ ID NO: 25227
  GFR-binding peptide
  MOD_RES (1), (3), (35), (36): Xaa is C or S

SEQ ID NO: 63401 - protein, 35 aa, Artificial Sequence; identical to SEQ ID NO: 4171
  GFR-binding peptide
  MOD_RES (32), (33): Xaa is C or S

SEQ ID NO: 63402 - protein, 37 aa, Artificial Sequence; identical to SEQ ID NO: 32244
  GFR-binding peptide
  MOD_RES (31), (32): Xaa is C or S

SEQ ID NO: 63403 - protein, 35 aa, Artificial Sequence; identical to SEQ ID NO: 32245
  GFR-binding peptide
  MOD_RES (1), (35): Xaa is C or S
  MOD_RES (13), (14), (15), (16), (17): Xaa is A or G
  MOD_RES (18), (19), (20), (21): Xaa is A or G or is absent

SEQ ID NO: 63404 - protein, 40 aa, Artificial Sequence
  GFR-binding peptide
  MOD_RES (2), (34), (35): Xaa is C or S
GXSEVVMDEYKFKVVNNASDLYLISIPELRTPVXXTPPTS

SEQ ID NO: 63405 - protein, 42 aa, Artificial Sequence; identical to SEQ ID NO: 32246
  GFR-binding peptide
  MOD_RES (2), (4), (38), (39): Xaa is C or S
  MOD_RES (16), (17), (18), (19), (20): Xaa is A or G
  MOD_RES (21), (22), (23), (24): Xaa is A or G or is absent

SEQ ID NO: 63406 - protein, 36 aa, Artificial Sequence; identical to SEQ ID NO: 4175
  GFR-binding peptide
  MOD_RES (2), (4): Xaa is C or S

SEQ ID NO: 63407 - protein, 34 aa, Artificial Sequence
  GFR-binding peptide
  MOD_RES (1), (3): Xaa is C or S
XGXAEVVMDRHKRLVVNNAADYYLISTASLRAPV

SEQ ID NO: 63408 - protein, 37 aa, Artificial Sequence; identical to SEQ ID NO: 4177
  GFR-binding peptide
  MOD_RES (1), (35), (36): Xaa is C or S
  MOD_RES (13), (14), (15), (16), (17): Xaa is A or G
  MOD_RES (18), (19), (20), (21): Xaa is A or G or is absent

SEQ ID NO: 63409 - protein, 43 aa, Artificial Sequence; identical to SEQ ID NO: 4179
  GFR-binding peptide
  MOD_RES (2), (4), (38), (39): Xaa is C or S
  MOD_RES (16), (17), (18), (19), (20): Xaa is A or G
  MOD_RES (21), (22), (23), (24): Xaa is A or G or is absent

SEQ ID NO: 63410 - protein, 41 aa, Artificial Sequence; identical to SEQ ID NO: 4180
  GFR-binding peptide
  MOD_RES (1), (35), (36): Xaa is C or S
  MOD_RES (13), (14), (15), (16), (17): Xaa is A or G
  MOD_RES (18), (19), (20), (21): Xaa is A or G or is absent

SEQ ID NO: 63411 - protein, 39 aa, Artificial Sequence; identical to SEQ ID NO: 4181
  GFR-binding peptide
  MOD_RES (1), (34), (35): Xaa is C or S
  MOD_RES (12), (13), (14), (15), (16): Xaa is A or G
  MOD_RES (17), (18), (19), (20): Xaa is A or G or is absent

SEQ ID NO: 63412 - protein, 40 aa, Artificial Sequence
  GFR-binding peptide
  MOD_RES (1), (3), (37), (38): Xaa is C or S
  MOD_RES (15), (16), (17), (18), (19): Xaa is A or G
  MOD_RES (20), (21), (22), (23): Xaa is A or G or is absent
XAXSEVTMNPIKGYXXXXXXXXXFYLINIPSMKEPVXXPE

SEQ ID NO: 63413 - protein, 38 aa, Artificial Sequence; identical to SEQ ID NO: 32255
  GFR-binding peptide
  MOD_RES (1), (34), (35): Xaa is C or S

SEQ ID NO: 63414 - protein, 38 aa, Artificial Sequence; identical to SEQ ID NO: 4186
  GFR-binding peptide
  MOD_RES (1), (32), (33): Xaa is C or S

SEQ ID NO: 63415 - protein, 33 aa, Artificial Sequence; identical to SEQ ID NO: 25240
  GFR-binding peptide
  MOD_RES (32), (33): Xaa is C or S

SEQ ID NO: 63416 - protein, 44 aa, Artificial Sequence; identical to SEQ ID NO: 32258
  GFR-binding peptide
  MOD_RES (2), (4), (39), (40): Xaa is C or S
  MOD_RES (17), (18), (19), (20), (21): Xaa is A or G
  MOD_RES (22), (23), (24), (25): Xaa is A or G or is absent

SEQ ID NO: 63417 - protein, 41 aa, Artificial Sequence; identical to SEQ ID NO: 25241
  GFR-binding peptide
  MOD_RES (1), (35), (36): Xaa is C or S
  MOD_RES (13), (14), (15), (16), (17): Xaa is A or G
  MOD_RES (18), (19), (20), (21): Xaa is A or G or is absent

SEQ ID NO: 63418 - protein, 41 aa, Artificial Sequence
  GFR-binding peptide
  MOD_RES (2), (4), (35), (36): Xaa is C or S
LXGXEEVIMEYKFKLLVRGNDLYLMSIPETKVPAXXTSPVR

SEQ ID NO: 63419 - protein, 34 aa, Artificial Sequence; identical to SEQ ID NO: 4189
  GFR-binding peptide
  MOD_RES (32), (33): Xaa is C or S

SEQ ID NO: 63420 - protein, 35 aa, Artificial Sequence; identical to SEQ ID NO: 32259
  GFR-binding peptide
  MOD_RES (1), (3), (35): Xaa is C or S

SEQ ID NO: 63421 - protein, 36 aa, Artificial Sequence; identical to SEQ ID NO: 4191
  GFR-binding peptide
  MOD_RES (31), (32): Xaa is C or S

SEQ ID NO: 63422 - protein, 40 aa, Artificial Sequence
  GFR-binding peptide
  MOD_RES (2), (34), (35): Xaa is C or S
GXSRVVMNRHKRLIVNSSDDYYLVSTASLKTPAXXPKPVH

SEQ ID NO: 63423 - protein, 32 aa, Artificial Sequence; identical to SEQ ID NO: 32263
  GFR-binding peptide
  MOD_RES (31), (32): Xaa is C or S

SEQ ID NO: 63424 - protein, 41 aa, Artificial Sequence; identical to SEQ ID NO: 4193
  GFR-binding peptide
  MOD_RES (1), (3), (37), (38): Xaa is C or S
  MOD_RES (15), (16), (17), (18), (19): Xaa is A or G
  MOD_RES (20), (21), (22), (23): Xaa is A or G or is absent

SEQ ID NO: 63425 - protein, 42 aa, Artificial Sequence
  GFR-binding peptide
  MOD_RES (1), (3), (37), (38): Xaa is C or S
  MOD_RES (15), (16), (17), (18), (19): Xaa is A or G
  MOD_RES (20), (21), (22), (23): Xaa is A or G or is absent
XGXRDVVMGYHYKLXXXXXXXXXKYLMSIPSMKTPTXXPGAS

SEQ ID NO: 63426 - protein, 38 aa, Artificial Sequence; identical to SEQ ID NO: 4196
  GFR-binding peptide
  MOD_RES (1), (3), (35): Xaa is C or S

SEQ ID NO: 63427 - protein, 38 aa, Artificial Sequence; identical to SEQ ID NO: 25251
  GFR-binding peptide
  MOD_RES (1), (34), (35): Xaa is C or S
  MOD_RES (12), (13), (14), (15), (16): Xaa is A or G
  MOD_RES (17), (18), (19), (20): Xaa is A or G or is absent

SEQ ID NO: 63428 - protein, 35 aa, Artificial Sequence
  GFR-binding peptide
  MOD_RES (31), (32): Xaa is C or S
EVVMDRHKRLVVNNAADYYLISTASLRAPVXXSAP

SEQ ID NO: 63429 - protein, 41 aa, Artificial Sequence; identical to SEQ ID NO: 32273
  GFR-binding peptide
  MOD_RES (2), (4), (37), (38): Xaa is C or S
  MOD_RES (15), (16), (17), (18), (19): Xaa is A or G
  MOD_RES (20), (21), (22), (23): Xaa is A or G or is absent

SEQ ID NO: 63430 - protein, 41 aa, Artificial Sequence; identical to SEQ ID NO: 4201
  GFR-binding peptide
  MOD_RES (2), (4), (35), (36): Xaa is C or S

SEQ ID NO: 63431 - protein, 33 aa, Artificial Sequence
  GFR-binding peptide
  MOD_RES (12), (13), (14), (15), (16): Xaa is A or G
  MOD_RES (17), (18), (19), (20): Xaa is A or G or is absent
RDVVMGEYKFKXXXXXXXXXLYLMSIPEMKTPT

SEQ ID NO: 63432 - protein, 38 aa, Artificial Sequence; identical to SEQ ID NO: 4203
  GFR-binding peptide
  MOD_RES (33), (34): Xaa is C or S

SEQ ID NO: 63433 - protein, 44 aa, Artificial Sequence; identical to SEQ ID NO: 25259
  GFR-binding peptide
  MOD_RES (2), (4), (38), (39): Xaa is C or S
  MOD_RES (16), (17), (18), (19), (20): Xaa is A or G
  MOD_RES (21), (22), (23), (24): Xaa is A or G or is absent

SEQ ID NO: 63434 - protein, 37 aa, Artificial Sequence; identical to SEQ ID NO: 25260
  GFR-binding peptide
  MOD_RES (2), (4), (35), (36): Xaa is C or S

SEQ ID NO: 63435 - protein, 36 aa, Artificial Sequence; identical to SEQ ID NO: 25261
  GFR-binding peptide
  MOD_RES (32), (33): Xaa is C or S

SEQ ID NO: 63436 - protein, 39 aa, Artificial Sequence; identical to SEQ ID NO: 32280
  GFR-binding peptide
  MOD_RES (1), (3), (36), (37): Xaa is C or S
  MOD_RES (14), (15), (16), (17), (18): Xaa is A or G
  MOD_RES (19), (20), (21), (22): Xaa is A or G or is absent

SEQ ID NO: 63437 - protein, 35 aa, Artificial Sequence; identical to SEQ ID NO: 4206
  GFR-binding peptide
  MOD_RES (1), (3): Xaa is C or S
  MOD_RES (14), (15), (16), (17), (18): Xaa is A or G
  MOD_RES (19), (20), (21), (22): Xaa is A or G or is absent

SEQ ID NO: 63438 - protein, 38 aa, Artificial Sequence; identical to SEQ ID NO: 4207
  GFR-binding peptide
  MOD_RES (2), (36), (37): Xaa is C or S
  MOD_RES (14), (15), (16), (17), (18): Xaa is A or G
  MOD_RES (19), (20), (21), (22): Xaa is A or G or is absent

SEQ ID NO: 63439 - protein, 38 aa, Artificial Sequence
  GFR-binding peptide
  MOD_RES (1), (3), (34), (35): Xaa is C or S
XKXSRVIMPIKGYVKPKRGVFYLINIPSLAQPVXXPAA

SEQ ID NO: 63440 - protein, 36 aa, Artificial Sequence; identical to SEQ ID NO: 4208
  GFR-binding peptide
  MOD_RES (35), (36): Xaa is C or S
  MOD_RES (13), (14), (15), (16), (17): Xaa is A or G
  MOD_RES (18), (19), (20), (21): Xaa is A or G or is absent

SEQ ID NO: 63441 - protein, 36 aa, Artificial Sequence; identical to SEQ ID NO: 32283
  GFR-binding peptide
  MOD_RES (33), (34): Xaa is C or S
  MOD_RES (11), (12), (13), (14), (15): Xaa is A or G
  MOD_RES (16), (17), (18), (19): Xaa is A or G or is absent

SEQ ID NO: 63442 - protein, 32 aa, Artificial Sequence; identical to SEQ ID NO: 25268
  GFR-binding peptide
  MOD_RES (1), (32): Xaa is C or S

SEQ ID NO: 63443 - protein, 41 aa, Artificial Sequence
  GFR-binding peptide
  MOD_RES (1), (3), (37), (38): Xaa is C or S
  MOD_RES (15), (16), (17), (18), (19): Xaa is A or G
  MOD_RES (20), (21), (22), (23): Xaa is A or G or is absent
XAXSEVTMNRYKKLXXXXXXXXXFYLISIANMKEPVXXPEP

SEQ ID NO: 63444 - protein, 33 aa, Artificial Sequence; identical to SEQ ID NO: 4211
  GFR-binding peptide
  MOD_RES (33), (33): Xaa is C or S
  MOD_RES (11), (12), (13), (14), (15): Xaa is A or G
  MOD_RES (16), (17), (18), (19): Xaa is A or G or is absent

SEQ ID NO: 63445 - protein, 35 aa, Artificial Sequence
  GFR-binding peptide
  MOD_RES (2), (2): Xaa is C or S
  MOD_RES (14), (15), (16), (17), (18): Xaa is A or G
  MOD_RES (19), (20), (21), (22): Xaa is A or G or is absent
AXSEVTMNEYKFKXXXXXXXXXLYLISIPEMKEPV

SEQ ID NO: 63446 - protein, 33 aa, Artificial Sequence; identical to SEQ ID NO: 25272
  GFR-binding peptide
  MOD_RES (2), (33): Xaa is C or S

SEQ ID NO: 63447 - protein, 36 aa, Artificial Sequence; identical to SEQ ID NO: 4213
  GFR-binding peptide
  MOD_RES (2), (35), (36): Xaa is C or S
  MOD_RES (13), (14), (15), (16), (17): Xaa is A or G
  MOD_RES (18), (19), (20), (21): Xaa is A or G or is absent

SEQ ID NO: 63448 - protein, 40 aa, Artificial Sequence
  GFR-binding peptide
  MOD_RES (2), (34), (35): Xaa is C or S
GXSEVVMDRHKRLVVNNASDYYLISTASLRTPVXXTPPTS

SEQ ID NO: 63449 - protein, 33 aa, Artificial Sequence
  GFR-binding peptide
  MOD_RES (33), (33): Xaa is C or S
  MOD_RES (11), (12), (13), (14), (15): Xaa is A or G
  MOD_RES (16), (17), (18), (19): Xaa is A or G or is absent
DVVMGEYKFKXXXXXXXXXLYLMSIPEMKTPTX

SEQ ID NO: 63450 - protein, 32 aa, Artificial Sequence; identical to SEQ ID NO: 4220
  GFR-binding peptide
  MOD_RES (1), (32): Xaa is C or S

SEQ ID NO: 63451 - protein, 31 aa, Artificial Sequence; identical to SEQ ID NO: 4221
  GFR-binding peptide
  MOD_RES (1), (1): Xaa is C or S

SEQ ID NO: 63452 - protein, 36 aa, Artificial Sequence; identical to SEQ ID NO: 25281
  GFR-binding peptide
  MOD_RES (1), (3): Xaa is C or S
  MOD_RES (15), (16), (17), (18), (19): Xaa is A or G
  MOD_RES (20), (21), (22), (23): Xaa is A or G or is absent

SEQ ID NO: 63453 - protein, 40 aa, Artificial Sequence; identical to SEQ ID NO: 4226
  GFR-binding peptide
  MOD_RES (1), (3), (34), (35): Xaa is C or S

SEQ ID NO: 63454 - protein, 39 aa, Artificial Sequence; identical to SEQ ID NO: 31199
  GFR-binding peptide
  MOD_RES (1), (33), (34): Xaa is C or S

SEQ ID NO: 63455 - protein, 37 aa, Artificial Sequence; identical to SEQ ID NO: 25288
  GFR-binding peptide
  MOD_RES (2), (4): Xaa is C or S
  MOD_RES (16), (17), (18), (19), (20): Xaa is A or G
  MOD_RES (21), (22), (23), (24): Xaa is A or G or is absent

SEQ ID NO: 63456 - protein, 41 aa, Artificial Sequence
  GFR-binding peptide
  MOD_RES (2), (4), (37), (38): Xaa is C or S
  MOD_RES (15), (16), (17), (18), (19): Xaa is A or G
  MOD_RES (20), (21), (22), (23): Xaa is A or G or is absent
LXGXEEVIMRHKRLXXXXXXXXXYYLMSTASTKVPAXXTSP

SEQ ID NO: 63457 - protein, 38 aa, Artificial Sequence; identical to SEQ ID NO: 25289
  GFR-binding peptide
  MOD_RES (2), (4), (38): Xaa is C or S
  MOD_RES (16), (17), (18), (19), (20): Xaa is A or G
  MOD_RES (21), (22), (23), (24): Xaa is A or G or is absent

SEQ ID NO: 63458 - protein, 39 aa, Artificial Sequence; identical to SEQ ID NO: 25292
  GFR-binding peptide
  MOD_RES (1), (34), (35): Xaa is C or S
  MOD_RES (12), (13), (14), (15), (16): Xaa is A or G
  MOD_RES (17), (18), (19), (20): Xaa is A or G or is absent

SEQ ID NO: 63459 - protein, 34 aa, Artificial Sequence; identical to SEQ ID NO: 4231
  GFR-binding peptide
  MOD_RES (31), (32): Xaa is C or S

SEQ ID NO: 63460 - protein, 34 aa, Artificial Sequence
  GFR-binding peptide
  MOD_RES (1), (3): Xaa is C or S
XAXSEVTMNPIKGYVVNKNEDFYLINIPSMKEPV

SEQ ID NO: 63461 - protein, 37 aa, Artificial Sequence; identical to SEQ ID NO: 31217
  GFR-binding peptide
  MOD_RES (34), (35): Xaa is C or S
  MOD_RES (12), (13), (14), (15), (16): Xaa is A or G
  MOD_RES (17), (18), (19), (20): Xaa is A or G or is absent

SEQ ID NO: 63462 - protein, 34 aa, Artificial Sequence
  GFR-binding peptide
  MOD_RES (33), (34): Xaa is C or S
  MOD_RES (11), (12), (13), (14), (15): Xaa is A or G
  MOD_RES (16), (17), (18), (19): Xaa is A or G or is absent
EVTMNYHYKLXXXXXXXXXKYLISIPSMKEPVXX

SEQ ID NO: 63463 - protein, 36 aa, Artificial Sequence; identical to SEQ ID NO: 4235
  GFR-binding peptide
  MOD_RES (2), (4), (36): Xaa is C or S

SEQ ID NO: 63464 - protein, 39 aa, Artificial Sequence; identical to SEQ ID NO: 4237
  GFR-binding peptide
  MOD_RES (1), (3), (37): Xaa is C or S
  MOD_RES (15), (16), (17), (18), (19): Xaa is A or G
  MOD_RES (20), (21), (22), (23): Xaa is A or G or is absent

SEQ ID NO: 63465 - protein, 42 aa, Artificial Sequence
  GFR-binding peptide
  MOD_RES (2), (4), (38), (39): Xaa is C or S
  MOD_RES (16), (17), (18), (19), (20): Xaa is A or G
  MOD_RES (21), (22), (23), (24): Xaa is A or G or is absent
RXGXSEVVMDRHKRLXXXXXXXXXYYLISTASLRTPVXXTPP

SEQ ID NO: 63466 - protein, 38 aa, Artificial Sequence; identical to SEQ ID NO: 31222
  GFR-binding peptide
  MOD_RES (2), (34), (35): Xaa is C or S

SEQ ID NO: 63467 - protein, 39 aa, Artificial Sequence; identical to SEQ ID NO: 31224
  GFR-binding peptide
  MOD_RES (2), (4), (38), (39): Xaa is C or S
  MOD_RES (16), (17), (18), (19), (20): Xaa is A or G
  MOD_RES (21), (22), (23), (24): Xaa is A or G or is absent

SEQ ID NO: 63468 - protein, 38 aa, Artificial Sequence
  GFR-binding peptide
  MOD_RES (32), (33): Xaa is C or S
SEVVMDYHYKLVVNNASDKYLISIPSLRTPVXXTPPTS

SEQ ID NO: 63469 - protein, 34 aa, Artificial Sequence
  GFR-binding peptide
  MOD_RES (33), (34): Xaa is C or S
  MOD_RES (11), (12), (13), (14), (15): Xaa is A or G
  MOD_RES (16), (17), (18), (19): Xaa is A or G or is absent
EVTMNEYKFKXXXXXXXXXLYLISIPEMKEPVXX

SEQ ID NO: 63470 - protein, 41 aa, Artificial Sequence; identical to SEQ ID NO: 4244
  GFR-binding peptide
  MOD_RES (1), (3), (38), (39): Xaa is C or S
  MOD_RES (16), (17), (18), (19), (20): Xaa is A or G
  MOD_RES (21), (22), (23), (24): Xaa is A or G or is absent

SEQ ID NO: 63471 - protein, 35 aa, Artificial Sequence; identical to SEQ ID NO: 31233
  GFR-binding peptide
  MOD_RES (1), (3), (35): Xaa is C or S

SEQ ID NO: 63472 - protein, 31 aa, Artificial Sequence; identical to SEQ ID NO: 4248
  GFR-binding peptide
  MOD_RES (31), (31): Xaa is C or S

SEQ ID NO: 63473 - protein, 35 aa, Artificial Sequence; identical to SEQ ID NO: 31235
  GFR-binding peptide
  MOD_RES (1), (34), (35): Xaa is C or S

SEQ ID NO: 63474 - protein, 39 aa, Artificial Sequence
  GFR-binding peptide
  MOD_RES (34), (35): Xaa is C or S
  MOD_RES (12), (13), (14), (15), (16): Xaa is A or G
  MOD_RES (17), (18), (19), (20): Xaa is A or G or is absent
SEVTMNPIKGYXXXXXXXXXFYLINIPSMKEPVXXPEPI

SEQ ID NO: 63475 - protein, 38 aa, Artificial Sequence; identical to SEQ ID NO: 4249
  GFR-binding peptide
  MOD_RES (1), (33): Xaa is C or S

SEQ ID NO: 63476 - protein, 35 aa, Artificial Sequence; identical to SEQ ID NO: 25301
  GFR-binding peptide
  MOD_RES (1), (3), (35): Xaa is C or S

SEQ ID NO: 63477 - protein, 38 aa, Artificial Sequence; identical to SEQ ID NO: 31236
  GFR-binding peptide
  MOD_RES (2), (33), (34): Xaa is C or S

SEQ ID NO: 63478 - protein, 34 aa, Artificial Sequence; identical to SEQ ID NO: 25303
  GFR-binding peptide
  MOD_RES (1), (33), (34): Xaa is C or S

SEQ ID NO: 63479 - protein, 35 aa, Artificial Sequence; identical to SEQ ID NO: 4252
  GFR-binding peptide
  MOD_RES (1), (3), (35): Xaa is C or S

SEQ ID NO: 63480 - protein, 33 aa, Artificial Sequence
  GFR-binding peptide
  MOD_RES (1), (1): Xaa is C or S
  MOD_RES (12), (13), (14), (15), (16): Xaa is A or G
  MOD_RES (17), (18), (19), (20): Xaa is A or G or is absent
XEEVIMRHKRLXXXXXXXXXYYLMSTASTKVPA

SEQ ID NO: 63481 - protein, 39 aa, Artificial Sequence; identical to SEQ ID NO: 25305
  GFR-binding peptide
  MOD_RES (1), (3), (37), (38): Xaa is C or S
  MOD_RES (15), (16), (17), (18), (19): Xaa is A or G
  MOD_RES (20), (21), (22), (23): Xaa is A or G or is absent

SEQ ID NO: 63482 - protein, 33 aa, Artificial Sequence; identical to SEQ ID NO: 25306
  GFR-binding peptide
  MOD_RES (1), (33): Xaa is C or S

SEQ ID NO: 63483 - protein, 33 aa, Artificial Sequence; identical to SEQ ID NO: 25307
  GFR-binding peptide
  MOD_RES (12), (13), (14), (15), (16): Xaa is A or G
  MOD_RES (17), (18), (19), (20): Xaa is A or G or is absent

SEQ ID NO: 63484 - protein, 37 aa, Artificial Sequence
  GFR-binding peptide
  MOD_RES (2), (35), (36): Xaa is C or S
  MOD_RES (13), (14), (15), (16), (17): Xaa is A or G
  MOD_RES (18), (19), (20), (21): Xaa is A or G or is absent
KXSKVVMPIKGYXXXXXXXXXFYLINIPSLDQPVXXP

SEQ ID NO: 63485 - protein, 41 aa, Artificial Sequence; identical to SEQ ID NO: 4256
  GFR-binding peptide
  MOD_RES (2), (4), (36), (37): Xaa is C or S

SEQ ID NO: 63486 - protein, 41 aa, Artificial Sequence
  GFR-binding peptide
  MOD_RES (1), (3), (37), (38): Xaa is C or S
  MOD_RES (15), (16), (17), (18), (19): Xaa is A or G
  MOD_RES (20), (21), (22), (23): Xaa is A or G or is absent
XGXRDVVMGRHKRLXXXXXXXXXYYLMSTASMKTPTXXPGA

SEQ ID NO: 63487 - protein, 32 aa, Artificial Sequence; identical to SEQ ID NO: 25312
  GFR-binding peptide
  MOD_RES (11), (12), (13), (14), (15): Xaa is A or G
  MOD_RES (16), (17), (18), (19): Xaa is A or G or is absent

SEQ ID NO: 63488 - protein, 42 aa, Artificial Sequence
  GFR-binding peptide
  MOD_RES (2), (36), (37): Xaa is C or S
  MOD_RES (14), (15), (16), (17), (18): Xaa is A or G
  MOD_RES (19), (20), (21), (22): Xaa is A or G or is absent
GXAEVVMDRHKRLXXXXXXXXXYYLISTASLRAPVXXSAPAA

SEQ ID NO: 63489 - protein, 44 aa, Artificial Sequence
  GFR-binding peptide
  MOD_RES (2), (4), (38), (39): Xaa is C or S
  MOD_RES (16), (17), (18), (19), (20): Xaa is A or G
  MOD_RES (21), (22), (23), (24): Xaa is A or G or is absent
RXGXSEVVMDRHKRLXXXXXXXXXYYLISTASLRTPVXXTPPTS

SEQ ID NO: 63490 - protein, 33 aa, Artificial Sequence; identical to SEQ ID NO: 11675
  GFR-binding peptide
  MOD_RES (1), (33): Xaa is C or S

SEQ ID NO: 63491 - protein, 40 aa, Artificial Sequence; identical to SEQ ID NO: 25316
  GFR-binding peptide
  MOD_RES (2), (4), (38), (39): Xaa is C or S
  MOD_RES (16), (17), (18), (19), (20): Xaa is A or G
  MOD_RES (21), (22), (23), (24): Xaa is A or G or is absent

SEQ ID NO: 63492 - protein, 39 aa, Artificial Sequence; identical to SEQ ID NO: 4262
  GFR-binding peptide
  MOD_RES (33), (33): Xaa is C or S
  MOD_RES (11), (12), (13), (14), (15): Xaa is A or G
  MOD_RES (16), (17), (18), (19): Xaa is A or G or is absent

SEQ ID NO: 63493 - protein, 34 aa, Artificial Sequence; identical to SEQ ID NO: 4264
  GFR-binding peptide
  MOD_RES (1), (3), (34): Xaa is C or S

SEQ ID NO: 63494 - protein, 40 aa, Artificial Sequence; identical to SEQ ID NO: 25322
  GFR-binding peptide
  MOD_RES (2), (4), (38), (39): Xaa is C or S
  MOD_RES (16), (17), (18), (19), (20): Xaa is A or G
  MOD_RES (21), (22), (23), (24): Xaa is A or G or is absent

SEQ ID NO: 63495 - protein, 41 aa, Artificial Sequence
  GFR-binding peptide
  MOD_RES (1), (3), (37), (38): Xaa is C or S
  MOD_RES (15), (16), (17), (18), (19): Xaa is A or G
  MOD_RES (20), (21), (22), (23): Xaa is A or G or is absent
XGXESVAMGRHKRLXXXXXXXXXYYLISTASLKTPVXXAKS

SEQ ID NO: 63496 - protein, 35 aa, Artificial Sequence; identical to SEQ ID NO: 56197
  GFR-binding peptide
  MOD_RES (2), (34), (35): Xaa is C or S

SEQ ID NO: 63497 - protein, 36 aa, Artificial Sequence; identical to SEQ ID NO: 31262
  GFR-binding peptide
  MOD_RES (31), (32): Xaa is C or S

SEQ ID NO: 63498 - protein, 36 aa, Artificial Sequence; identical to SEQ ID NO: 31264
  GFR-binding peptide
  MOD_RES (1), (33), (34): Xaa is C or S

SEQ ID NO: 63499 - protein, 31 aa, Artificial Sequence; identical to SEQ ID NO: 11698
  GFR-binding peptide
  MOD_RES (31), (31): Xaa is C or S

SEQ ID NO: 63500 - protein, 37 aa, Artificial Sequence; identical to SEQ ID NO: 4279
  GFR-binding peptide
  MOD_RES (2), (4), (36): Xaa is C or S

SEQ ID NO: 63501 - protein, 36 aa, Artificial Sequence
  GFR-binding peptide
  MOD_RES (2), (36): Xaa is C or S
  MOD_RES (14), (15), (16), (17), (18): Xaa is A or G
  MOD_RES (19), (20), (21), (22): Xaa is A or G or is absent
GXSEVVMDEYKFKXXXXXXXXXLYLISIPELRTPVX

SEQ ID NO: 63502 - protein, 38 aa, Artificial Sequence
  GFR-binding peptide
  MOD_RES (1), (34), (35): Xaa is C or S
  MOD_RES (12), (13), (14), (15), (16): Xaa is A or G
  MOD_RES (17), (18), (19), (20): Xaa is A or G or is absent
XEEVIMEYKFKXXXXXXXXXLYLMSIPETKVPAXXTSP

SEQ ID NO: 63503 - protein, 36 aa, Artificial Sequence
  GFR-binding peptide
  MOD_RES (31), (32): Xaa is C or S
EVVMDRHKRLVVNNASDYYLISTASLRTPVXXTPPT

SEQ ID NO: 63504 - protein, 37 aa, Artificial Sequence
  GFR-binding peptide
  MOD_RES (31), (32): Xaa is C or S
SRVIMPIKGYVKPKRGVFYLINIPSLAQPVXXPAASA

SEQ ID NO: 63505 - protein, 37 aa, Artificial Sequence
  GFR-binding peptide
  MOD_RES (34), (35): Xaa is C or S
  MOD_RES (12), (13), (14), (15), (16): Xaa is A or G
  MOD_RES (17), (18), (19), (20): Xaa is A or G or is absent
SEVVMDRHKRLXXXXXXXXXYYLISTASLRTPVXXTP

SEQ ID NO: 63506 - protein, 34 aa, Artificial Sequence; identical to SEQ ID NO: 31284
  GFR-binding peptide
  MOD_RES (31), (32): Xaa is C or S

SEQ ID NO: 63507 - protein, 41 aa, Artificial Sequence
  GFR-binding peptide
  MOD_RES (1), (3), (37), (38): Xaa is C or S
  MOD_RES (15), (16), (17), (18), (19): Xaa is A or G
  MOD_RES (20), (21), (22), (23): Xaa is A or G or is absent
XAXSEVTMNPIKGYXXXXXXXXXFYLINIPSMKEPVXXPEP

SEQ ID NO: 63508 - protein, 35 aa, Artificial Sequence; identical to SEQ ID NO: 4284
  GFR-binding peptide
  MOD_RES (1), (3), (34), (35): Xaa is C or S

SEQ ID NO: 63509 - protein, 42 aa, Artificial Sequence; identical to SEQ ID NO: 31299
  GFR-binding peptide
  MOD_RES (2), (36), (37): Xaa is C or S
  MOD_RES (14), (15), (16), (17), (18): Xaa is A or G
  MOD_RES (19), (20), (21), (22): Xaa is A or G or is absent

SEQ ID NO: 63510 - protein, 41 aa, Artificial Sequence
  GFR-binding peptide
  MOD_RES (2), (4), (35), (36): Xaa is C or S
LXGXEEVIMRHKRLLLVRGNDYYLMSTASTKVPAXXTSPVR

SEQ ID NO: 63511 - protein, 44 aa, Artificial Sequence; identical to SEQ ID NO: 4285
  GFR-binding peptide
  MOD_RES (2), (4), (38), (39): Xaa is C or S
  MOD_RES (16), (17), (18), (19), (20): Xaa is A or G
  MOD_RES (21), (22), (23), (24): Xaa is A or G or is absent

SEQ ID NO: 63512 - protein, 39 aa, Artificial Sequence; identical to SEQ ID NO: 25334
  GFR-binding peptide
  MOD_RES (1), (33), (34): Xaa is C or S

SEQ ID NO: 63513 - protein, 40 aa, Artificial Sequence
  GFR-binding peptide
  MOD_RES (2), (4), (36), (37): Xaa is C or S
SXGXRDVVMGRHKRLIIQQKDNYYLMSTASMKTPTXXPGA

SEQ ID NO: 63514 - protein, 36 aa, Artificial Sequence
  GFR-binding peptide
  MOD_RES (1), (3), (36): Xaa is C or S
  MOD_RES (14), (15), (16), (17), (18): Xaa is A or G
  MOD_RES (19), (20), (21), (22): Xaa is A or G or is absent
XGXEEVIMYHYKLXXXXXXXXXKYLMSIPSTKVPAX

SEQ ID NO: 63515 - protein, 36 aa, Artificial Sequence
  GFR-binding peptide
  MOD_RES (34), (35): Xaa is C or S
  MOD_RES (12), (13), (14), (15), (16): Xaa is A or G
  MOD_RES (17), (18), (19), (20): Xaa is A or G or is absent
RDVVMGRHKRLXXXXXXXXXYYLMSTASMKTPTXXP

SEQ ID NO: 63516 - protein, 42 aa, Artificial Sequence; identical to SEQ ID NO: 56227
  GFR-binding peptide
  MOD_RES (2), (36), (37): Xaa is C or S
  MOD_RES (14), (15), (16), (17), (18): Xaa is A or G
  MOD_RES (19), (20), (21), (22): Xaa is A or G or is absent

SEQ ID NO: 63517 - protein, 35 aa, Artificial Sequence
  GFR-binding peptide
  MOD_RES (31), (32): Xaa is C or S
DVVMGRHKRLIIQQKDNYYLMSTASMKTPTXXPGA

SEQ ID NO: 63518 - protein, 40 aa, Artificial Sequence; identical to SEQ ID NO: 4290
  GFR-binding peptide
  MOD_RES (2), (35), (36): Xaa is C or S
  MOD_RES (13), (14), (15), (16), (17): Xaa is A or G
  MOD_RES (18), (19), (20), (21): Xaa is A or G or is absent

SEQ ID NO: 63519 - protein, 35 aa, Artificial Sequence; identical to SEQ ID NO: 25342
  GFR-binding peptide
  MOD_RES (31), (32): Xaa is C or S

SEQ ID NO: 63520 - protein, 37 aa, Artificial Sequence; identical to SEQ ID NO: 4292
  GFR-binding peptide
  MOD_RES (34), (35): Xaa is C or S
  MOD_RES (12), (13), (14), (15), (16): Xaa is A or G
  MOD_RES (17), (18), (19), (20): Xaa is A or G or is absent

SEQ ID NO: 63521 - protein, 38 aa, Artificial Sequence; identical to SEQ ID NO: 31308
  GFR-binding peptide
  MOD_RES (2), (4), (36), (37): Xaa is C or S

SEQ ID NO: 63522 - protein, 36 aa, Artificial Sequence; identical to SEQ ID NO: 4296
  GFR-binding peptide
  MOD_RES (31), (32): Xaa is C or S

SEQ ID NO: 63523 - protein, 39 aa, Artificial Sequence; identical to SEQ ID NO: 4297
  GFR-binding peptide
  MOD_RES (2), (4), (38), (39): Xaa is C or S
  MOD_RES (16), (17), (18), (19), (20): Xaa is A or G
  MOD_RES (21), (22), (23), (24): Xaa is A or G or is absent

SEQ ID NO: 63524 - protein, 43 aa, Artificial Sequence; identical to SEQ ID NO: 25351
  GFR-binding peptide
  MOD_RES (2), (4), (38), (39): Xaa is C or S
  MOD_RES (16), (17), (18), (19), (20): Xaa is A or G
  MOD_RES (21), (22), (23), (24): Xaa is A or G or is absent

SEQ ID NO: 63525 - protein, 35 aa, Artificial Sequence; identical to SEQ ID NO: 31317
  GFR-binding peptide
  MOD_RES (1), (3), (35): Xaa is C or S

SEQ ID NO: 63526 - protein, 37 aa, Artificial Sequence; identical to SEQ ID NO: 25353
  GFR-binding peptide
  MOD_RES (1), (3), (36), (37): Xaa is C or S
  MOD_RES (14), (15), (16), (17), (18): Xaa is A or G
  MOD_RES (19), (20), (21), (22): Xaa is A or G or is absent

SEQ ID NO: 63527 - protein, 33 aa, Artificial Sequence; identical to SEQ ID NO: 25357
  GFR-binding peptide
  MOD_RES (31), (32): Xaa is C or S

SEQ ID NO: 63528 - protein, 36 aa, Artificial Sequence; identical to SEQ ID NO: 4300
  GFR-binding peptide
  MOD_RES (2), (33), (34): Xaa is C or S

SEQ ID NO: 63529 - protein, 40 aa, Artificial Sequence; identical to SEQ ID NO: 4301
  GFR-binding peptide
  MOD_RES (2), (34): Xaa is C or S

SEQ ID NO: 63530 - protein, 36 aa, Artificial Sequence; identical to SEQ ID NO: 31321
  GFR-binding peptide
  MOD_RES (31), (31): Xaa is C or S

SEQ ID NO: 63531 - protein, 36 aa, Artificial Sequence; identical to SEQ ID NO: 4302
  GFR-binding peptide
  MOD_RES (34), (35): Xaa is C or S
  MOD_RES (12), (13), (14), (15), (16): Xaa is A or G
  MOD_RES (17), (18), (19), (20): Xaa is A or G or is absent

SEQ ID NO: 63532 - protein, 39 aa, Artificial Sequence; identical to SEQ ID NO: 31322
  GFR-binding peptide
  MOD_RES (1), (33), (34): Xaa is C or S

SEQ ID NO: 63533 - protein, 40 aa, Artificial Sequence; identical to SEQ ID NO: 4305
  GFR-binding peptide
  MOD_RES (2), (4), (36), (37): Xaa is C or S

SEQ ID NO: 63534 - protein, 31 aa, Artificial Sequence; identical to SEQ ID NO: 25362
  GFR-binding peptide
  MOD_RES (31), (31): Xaa is C or S

SEQ ID NO: 63535 - protein, 32 aa, Artificial Sequence; identical to SEQ ID NO: 4308
  GFR-binding peptide
  MOD_RES (31), (32): Xaa is C or S

SEQ ID NO: 63536 - protein, 36 aa, Artificial Sequence; identical to SEQ ID NO: 31326
  GFR-binding peptide
  MOD_RES (34), (35): Xaa is C or S
  MOD_RES (12), (13), (14), (15), (16): Xaa is A or G
  MOD_RES (17), (18), (19), (20): Xaa is A or G or is absent

SEQ ID NO: 63537 - protein, 36 aa, Artificial Sequence; identical to SEQ ID NO: 31327
  GFR-binding peptide
  MOD_RES (2), (33), (34): Xaa is C or S

SEQ ID NO: 63538 - protein, 36 aa, Artificial Sequence; identical to SEQ ID NO: 4312
  GFR-binding peptide
  MOD_RES (1), (34), (35): Xaa is C or S

SEQ ID NO: 63539 - protein, 32 aa, Artificial Sequence; identical to SEQ ID NO: 4313
  GFR-binding peptide
  MOD_RES (1), (1): Xaa is C or S

SEQ ID NO: 63540 - protein, 38 aa, Artificial Sequence
  GFR-binding peptide
  MOD_RES (1), (3), (36), (37): Xaa is C or S
  MOD_RES (14), (15), (16), (17), (18): Xaa is A or G
  MOD_RES (19), (20), (21), (22): Xaa is A or G or is absent
XGXEEVIMYHYKLXXXXXXXXXKYLMSIPSTKVPAXXT

SEQ ID NO: 63541 - protein, 35 aa, Artificial Sequence; identical to SEQ ID NO: 31330
  GFR-binding peptide
  MOD_RES (1), (35): Xaa is C or S
  MOD_RES (13), (14), (15), (16), (17): Xaa is A or G
  MOD_RES (18), (19), (20), (21): Xaa is A or G or is absent

SEQ ID NO: 63542 - protein, 39 aa, Artificial Sequence; identical to SEQ ID NO: 25367
  GFR-binding peptide
  MOD_RES (2), (4), (38), (39): Xaa is C or S
  MOD_RES (16), (17), (18), (19), (20): Xaa is A or G
  MOD_RES (21), (22), (23), (24): Xaa is A or G or is absent

SEQ ID NO: 63543 - protein, 38 aa, Artificial Sequence; identical to SEQ ID NO: 4316
  GFR-binding peptide
  MOD_RES (1), (3), (35), (36): Xaa is C or S

SEQ ID NO: 63544 - protein, 42 aa, Artificial Sequence; identical to SEQ ID NO: 25369
  GFR-binding peptide
  MOD_RES (2), (4), (38), (39): Xaa is C or S
  MOD_RES (16), (17), (18), (19), (20): Xaa is A or G
  MOD_RES (21), (22), (23), (24): Xaa is A or G or is absent

SEQ ID NO: 63545 - protein, 41 aa, Artificial Sequence; identical to SEQ ID NO: 4318
  GFR-binding peptide
  MOD_RES (1), (35): Xaa is C or S
  MOD_RES (13), (14), (15), (16), (17): Xaa is A or G
  MOD_RES (18), (19), (20), (21): Xaa is A or G or is absent

SEQ ID NO: 63546 - protein, 38 aa, Artificial Sequence; identical to SEQ ID NO: 25374
  GFR-binding peptide
  MOD_RES (1), (35), (36): Xaa is C or S
  MOD_RES (13), (14), (15), (16), (17): Xaa is A or G
  MOD_RES (18), (19), (20), (21): Xaa is A or G or is absent

SEQ ID NO: 63547 - protein, 37 aa, Artificial Sequence; identical to SEQ ID NO: 31341
  GFR-binding peptide
  MOD_RES (1), (36), (37): Xaa is C or S
  MOD_RES (14), (15), (16), (17), (18): Xaa is A or G
  MOD_RES (19), (20), (21), (22): Xaa is A or G or is absent

SEQ ID NO: 63548 - protein, 36 aa, Artificial Sequence; identical to SEQ ID NO: 4320
  GFR-binding peptide
  MOD_RES (2), (36): Xaa is C or S
  MOD_RES (14), (15), (16), (17), (18): Xaa is A or G
  MOD_RES (19), (20), (21), (22): Xaa is A or G or is absent

SEQ ID NO: 63549 - protein, 32 aa, Artificial Sequence; identical to SEQ ID NO: 25377
  GFR-binding peptide
  MOD_RES (31), (32): Xaa is C or S

SEQ ID NO: 63550 - protein, 38 aa, Artificial Sequence; identical to SEQ ID NO: 4321
  GFR-binding peptide
  MOD_RES (1), (35): Xaa is C or S
  MOD_RES (13), (14), (15), (16), (17): Xaa is A or G
  MOD_RES (18), (19), (20), (21): Xaa is A or G or is absent

SEQ ID NO: 63551 - protein, 39 aa, Artificial Sequence; identical to SEQ ID NO: 25380
  GFR-binding peptide
  MOD_RES (34), (35): Xaa is C or S
  MOD_RES (12), (13), (14), (15), (16): Xaa is A or G
  MOD_RES (17), (18), (19), (20): Xaa is A or G or is absent

SEQ ID NO: 63552 - protein, 34 aa, Artificial Sequence; identical to SEQ ID NO: 4323
  GFR-binding peptide
  MOD_RES (2), (34): Xaa is C or S

SEQ ID NO: 63553 - protein, 37 aa, Artificial Sequence; identical to SEQ ID NO: 25384
  GFR-binding peptide
  MOD_RES (1), (33), (34): Xaa is C or S

SEQ ID NO: 63554 - protein, 35 aa, Artificial Sequence
  GFR-binding peptide
  MOD_RES (2), (2): Xaa is C or S
  MOD_RES (14), (15), (16), (17), (18): Xaa is A or G
  MOD_RES (19), (20), (21), (22): Xaa is A or G or is absent
AXSEVTMNYHYKLXXXXXXXXXKYLISIPSMKEPV

SEQ ID NO: 63555 - protein, 35 aa, Artificial Sequence
  GFR-binding peptide
  MOD_RES (1), (3), (35): Xaa is C or S
XAXSEVTMNRHKRLVVNKNEDYYLISTASMKEPVX

SEQ ID NO: 63556 - protein, 37 aa, Artificial Sequence
  GFR-binding peptide
  MOD_RES (33), (34): Xaa is C or S
  MOD_RES (11), (12), (13), (14), (15): Xaa is A or G
  MOD_RES (16), (17), (18), (19): Xaa is A or G or is absent
EEVIMYHYKLXXXXXXXXXKYLMSIPSTKVPAXXTSP

SEQ ID NO: 63557 - protein, 39 aa, Artificial Sequence; identical to SEQ ID NO: 25394
  GFR-binding peptide
  MOD_RES (34), (35): Xaa is C or S
  MOD_RES (12), (13), (14), (15), (16): Xaa is A or G
  MOD_RES (17), (18), (19), (20): Xaa is A or G or is absent

SEQ ID NO: 63558 - protein, 37 aa, Artificial Sequence; identical to SEQ ID NO: 25396
  GFR-binding peptide
  MOD_RES (34), (35): Xaa is C or S
  MOD_RES (12), (13), (14), (15), (16): Xaa is A or G
  MOD_RES (17), (18), (19), (20): Xaa is A or G or is absent

SEQ ID NO: 63559 - protein, 34 aa, Artificial Sequence; identical to SEQ ID NO: 31361
  GFR-binding peptide
  MOD_RES (1), (32), (33): Xaa is C or S

SEQ ID NO: 63560 - protein, 33 aa, Artificial Sequence; identical to SEQ ID NO: 4335
  GFR-binding peptide
  MOD_RES (1), (1): Xaa is C or S
  MOD_RES (12), (13), (14), (15), (16): Xaa is A or G
  MOD_RES (17), (18), (19), (20): Xaa is A or G or is absent

SEQ ID NO: 63561 - protein, 36 aa, Artificial Sequence; identical to SEQ ID NO: 25399
  GFR-binding peptide
  MOD_RES (1), (33), (34): Xaa is C or S

SEQ ID NO: 63562 - protein, 34 aa, Artificial Sequence; identical to SEQ ID NO: 4338
  GFR-binding peptide
  MOD_RES (1), (34): Xaa is C or S
  MOD_RES (12), (13), (14), (15), (16): Xaa is A or G
  MOD_RES (17), (18), (19), (20): Xaa is A or G or is absent

SEQ ID NO: 63563 - protein, 36 aa, Artificial Sequence; identical to SEQ ID NO: 4339
  GFR-binding peptide
  MOD_RES (32), (33): Xaa is C or S

SEQ ID NO: 63564 - protein, 36 aa, Artificial Sequence; identical to SEQ ID NO: 4342
  GFR-binding peptide
  MOD_RES (2), (34), (35): Xaa is C or S

SEQ ID NO: 63565 - protein, 34 aa, Artificial Sequence; identical to SEQ ID NO: 31371
  GFR-binding peptide
  MOD_RES (31), (32): Xaa is C or S

SEQ ID NO: 63566 - protein, 35 aa, Artificial Sequence
  GFR-binding peptide
  MOD_RES (2), (34), (35): Xaa is C or S
AXSEVTMNRYKKLVVNKNEDFYLISIANMKEPVXX

SEQ ID NO: 63567 - protein, 31 aa, Artificial Sequence; identical to SEQ ID NO: 25407
  GFR-binding peptide
  MOD_RES (31), (31): Xaa is C or S

SEQ ID NO: 63568 - protein, 38 aa, Artificial Sequence
  GFR-binding peptide
  MOD_RES (1), (3), (35), (36): Xaa is C or S
XAXSEVTMNPIKGYVVNKNEDFYLINIPSMKEPVXXPE

SEQ ID NO: 63569 - protein, 32 aa, Artificial Sequence; identical to SEQ ID NO: 31373
  GFR-binding peptide
  MOD_RES (31), (32): Xaa is C or S

SEQ ID NO: 63570 - protein, 40 aa, Artificial Sequence
  GFR-binding peptide
  MOD_RES (1), (3), (35), (36): Xaa is C or S
XGXSEVVMDYHYKLVVNNASDKYLISIPSLRTPVXXTPPT

SEQ ID NO: 63571 - protein, 39 aa, Artificial Sequence
  GFR-binding peptide
  MOD_RES (1), (35), (36): Xaa is C or S
  MOD_RES (13), (14), (15), (16), (17): Xaa is A or G
  MOD_RES (18), (19), (20), (21): Xaa is A or G or is absent
XSEVVMDRHKRLXXXXXXXXXYYLISTASLRTPVXXTPP

SEQ ID NO: 63572 - protein, 37 aa, Artificial Sequence; identical to SEQ ID NO: 4357
  GFR-binding peptide
  MOD_RES (2), (4): Xaa is C or S
  MOD_RES (16), (17), (18), (19), (20): Xaa is A or G
  MOD_RES (21), (22), (23), (24): Xaa is A or G or is absent

SEQ ID NO: 63573 - protein, 39 aa, Artificial Sequence
  GFR-binding peptide
  MOD_RES (1), (33), (34): Xaa is C or S
XSRVVMNEYKFKIVNSSDDLYLVSIPELKTPAXXPKPVH

SEQ ID NO: 63574 - protein, 40 aa, Artificial Sequence
  GFR-binding peptide
  MOD_RES (34), (35): Xaa is C or S
  MOD_RES (12), (13), (14), (15), (16): Xaa is A or G
  MOD_RES (17), (18), (19), (20): Xaa is A or G or is absent
SEVTMNEYKFKXXXXXXXXXLYLISIPEMKEPVXXPEPIG

SEQ ID NO: 63575 - protein, 40 aa, Artificial Sequence; identical to SEQ ID NO: 4363
  GFR-binding peptide
  MOD_RES (1), (3), (35), (36): Xaa is C or S

SEQ ID NO: 63576 - protein, 36 aa, Artificial Sequence; identical to SEQ ID NO: 56293
  GFR-binding peptide
  MOD_RES (31), (32): Xaa is C or S

SEQ ID NO: 63577 - protein, 36 aa, Artificial Sequence; identical to SEQ ID NO: 25421
  GFR-binding peptide
  MOD_RES (2), (34), (35): Xaa is C or S

SEQ ID NO: 63578 - protein, 35 aa, Artificial Sequence
  GFR-binding peptide
  MOD_RES (1), (32), (33): Xaa is C or S
XEEVIMEYKFKLLVRGNDLYLMSIPETKVPAXXTS

SEQ ID NO: 63579 - protein, 41 aa, Artificial Sequence; identical to SEQ ID NO: 25423
  GFR-binding peptide
  MOD_RES (2), (36), (37): Xaa is C or S
  MOD_RES (14), (15), (16), (17), (18): Xaa is A or G
  MOD_RES (19), (20), (21), (22): Xaa is A or G or is absent

SEQ ID NO: 63580 - protein, 38 aa, Artificial Sequence; identical to SEQ ID NO: 31393
  GFR-binding peptide
  MOD_RES (2), (4), (36), (37): Xaa is C or S

SEQ ID NO: 63581 - protein, 38 aa, Artificial Sequence
  GFR-binding peptide
  MOD_RES (2), (4), (35), (36): Xaa is C or S
LXGXEEVIMEYKFKLLVRGNDLYLMSIPETKVPAXXTS

SEQ ID NO: 63582 - protein, 37 aa, Artificial Sequence; identical to SEQ ID NO: 31397
  GFR-binding peptide
  MOD_RES (1), (35), (36): Xaa is C or S
  MOD_RES (13), (14), (15), (16), (17): Xaa is A or G
  MOD_RES (18), (19), (20), (21): Xaa is A or G or is absent

SEQ ID NO: 63583 - protein, 33 aa, Artificial Sequence
  GFR-binding peptide
  MOD_RES (31), (32): Xaa is C or S
EVTMNPIKGYVVNKNEDFYLINIPSMKEPVXXP

SEQ ID NO: 63584 - protein, 37 aa, Artificial Sequence
  GFR-binding peptide
  MOD_RES (1), (35), (36): Xaa is C or S
  MOD_RES (13), (14), (15), (16), (17): Xaa is A or G
  MOD_RES (18), (19), (20), (21): Xaa is A or G or is absent
XSEVTMNRHKRLXXXXXXXXXYYLISTASMKEPVXXP

SEQ ID NO: 63585 - protein, 35 aa, Artificial Sequence; identical to SEQ ID NO: 4369
  GFR-binding peptide
  MOD_RES (33), (34): Xaa is C or S
  MOD_RES (11), (12), (13), (14), (15): Xaa is A or G
  MOD_RES (16), (17), (18), (19): Xaa is A or G or is absent

SEQ ID NO: 63586 - protein, 35 aa, Artificial Sequence; identical to SEQ ID NO: 25432
  GFR-binding peptide
  MOD_RES (34), (35): Xaa is C or S
  MOD_RES (12), (13), (14), (15), (16): Xaa is A or G
  MOD_RES (17), (18), (19), (20): Xaa is A or G or is absent

SEQ ID NO: 63587 - protein, 38 aa, Artificial Sequence; identical to SEQ ID NO: 25433
  GFR-binding peptide
  MOD_RES (32), (33): Xaa is C or S

SEQ ID NO: 63588 - protein, 37 aa, Artificial Sequence
  GFR-binding peptide
  MOD_RES (2), (4): Xaa is C or S
  MOD_RES (16), (17), (18), (19), (20): Xaa is A or G
  MOD_RES (21), (22), (23), (24): Xaa is A or G or is absent
RXAXSEVTMNPIKGYXXXXXXXXXFYLINIPSMKEPV

SEQ ID NO: 63589 - protein, 41 aa, Artificial Sequence; identical to SEQ ID NO: 25435
  GFR-binding peptide
  MOD_RES (2), (4), (38), (39): Xaa is C or S
  MOD_RES (16), (17), (18), (19), (20): Xaa is A or G
  MOD_RES (21), (22), (23), (24): Xaa is A or G or is absent

SEQ ID NO: 63590 - protein, 36 aa, Artificial Sequence
  GFR-binding peptide
  MOD_RES (1), (3): Xaa is C or S
  MOD_RES (15), (16), (17), (18), (19): Xaa is A or G
  MOD_RES (20), (21), (22), (23): Xaa is A or G or is absent
XAXSEVTMNRYKKLXXXXXXXXXFYLISIANMKEPV

SEQ ID NO: 63591 - protein, 37 aa, Artificial Sequence
  GFR-binding peptide
  MOD_RES (1), (3), (35), (36): Xaa is C or S
XGXRDVVMGRHKRLIIQQKDNYYLMSTASMKTPTXXP

SEQ ID NO: 63592 - protein, 35 aa, Artificial Sequence; identical to SEQ ID NO: 11800
  GFR-binding peptide
  MOD_RES (2), (4): Xaa is C or S

SEQ ID NO: 63593 - protein, 35 aa, Artificial Sequence; identical to SEQ ID NO: 4372
  GFR-binding peptide
  MOD_RES (35), (35): Xaa is C or S
  MOD_RES (13), (14), (15), (16), (17): Xaa is A or G
  MOD_RES (18), (19), (20), (21): Xaa is A or G or is absent

SEQ ID NO: 63594 - protein, 39 aa, Artificial Sequence
  GFR-binding peptide
  MOD_RES (2), (36), (37): Xaa is C or S
  MOD_RES (14), (15), (16), (17), (18): Xaa is A or G
  MOD_RES (19), (20), (21), (22): Xaa is A or G or is absent
AXSEVTMNYHYKLXXXXXXXXXKYLISIPSMKEPVXXPE

SEQ ID NO: 63595 - protein, 35 aa, Artificial Sequence; identical to SEQ ID NO: 25440
  GFR-binding peptide
  MOD_RES (1), (1): Xaa is C or S
  MOD_RES (14), (15), (16), (17), (18): Xaa is A or G
  MOD_RES (19), (20), (21), (22): Xaa is A or G or is absent

SEQ ID NO: 63596 - protein, 39 aa, Artificial Sequence; identical to SEQ ID NO: 4377
  GFR-binding peptide
  MOD_RES (1), (3), (36), (37): Xaa is C or S

SEQ ID NO: 63597 - protein, 39 aa, Artificial Sequence; identical to SEQ ID NO: 4379
  GFR-binding peptide
  MOD_RES (2), (4), (35), (36): Xaa is C or S

SEQ ID NO: 63598 - protein, 37 aa, Artificial Sequence; identical to SEQ ID NO: 4380
  GFR-binding peptide
  MOD_RES (2), (34), (35): Xaa is C or S

SEQ ID NO: 63599 - protein, 40 aa, Artificial Sequence; identical to SEQ ID NO: 25443
  GFR-binding peptide
  MOD_RES (1), (3), (34), (35): Xaa is C or S

SEQ ID NO: 63600 - protein, 35 aa, Artificial Sequence
  GFR-binding peptide
  MOD_RES (2), (33), (34): Xaa is C or S
KXSRVIMPIKGYVKPKRGVFYLINIPSLAQPVXXP

SEQ ID NO: 63601 - protein, 30 aa, Artificial Sequence; identical to SEQ ID NO: 25446
  GFR-binding peptide

SEQ ID NO: 63602 - protein, 39 aa, Artificial Sequence
  GFR-binding peptide
  MOD_RES (2), (34), (35): Xaa is C or S
GXAEVVMDRHKRLVVNNAADYYLISTASLRAPVXXSAPA

SEQ ID NO: 63603 - protein, 32 aa, Artificial Sequence; identical to SEQ ID NO: 31427
  GFR-binding peptide
  MOD_RES (31), (32): Xaa is C or S

SEQ ID NO: 63604 - protein, 42 aa, Artificial Sequence; identical to SEQ ID NO: 4388
  GFR-binding peptide
  MOD_RES (2), (4), (38), (39): Xaa is C or S
  MOD_RES (16), (17), (18), (19), (20): Xaa is A or G
  MOD_RES (21), (22), (23), (24): Xaa is A or G or is absent

SEQ ID NO: 63605 - protein, 38 aa, Artificial Sequence; identical to SEQ ID NO: 25452
  GFR-binding peptide
  MOD_RES (1), (3), (35), (36): Xaa is C or S

SEQ ID NO: 63606 - protein, 37 aa, Artificial Sequence; identical to SEQ ID NO: 25453
  GFR-binding peptide
  MOD_RES (2), (36), (37): Xaa is C or S
  MOD_RES (14), (15), (16), (17), (18): Xaa is A or G
  MOD_RES (19), (20), (21), (22): Xaa is A or G or is absent

SEQ ID NO: 63607 - protein, 39 aa, Artificial Sequence
  GFR-binding peptide
  MOD_RES (2), (33), (34): Xaa is C or S
GXEEVIMRHKRLLLVRGNDYYLMSTASTKVPAXXTSPVR

SEQ ID NO: 63608 - protein, 43 aa, Artificial Sequence; identical to SEQ ID NO: 31428
  GFR-binding peptide
  MOD_RES (1), (3), (37), (38): Xaa is C or S
  MOD_RES (15), (16), (17), (18), (19): Xaa is A or G
  MOD_RES (20), (21), (22), (23): Xaa is A or G or is absent

SEQ ID NO: 63609 - protein, 40 aa, Artificial Sequence
  GFR-binding peptide
  MOD_RES (2), (4), (37), (38): Xaa is C or S
  MOD_RES (15), (16), (17), (18), (19): Xaa is A or G
  MOD_RES (20), (21), (22), (23): Xaa is A or G or is absent
SXKXSKVVMPIKGYXXXXXXXXXFYLINIPSLDQPVXXPS

SEQ ID NO: 63610 - protein, 41 aa, Artificial Sequence; identical to SEQ ID NO: 4398
  GFR-binding peptide
  MOD_RES (2), (4), (36), (37): Xaa is C or S

SEQ ID NO: 63611 - protein, 36 aa, Artificial Sequence
  GFR-binding peptide
  MOD_RES (34), (35): Xaa is C or S
  MOD_RES (12), (13), (14), (15), (16): Xaa is A or G
  MOD_RES (17), (18), (19), (20): Xaa is A or G or is absent
AEVVMDRHKRLXXXXXXXXXYYLISTASLRAPVXXS

SEQ ID NO: 63612 - protein, 38 aa, Artificial Sequence; identical to SEQ ID NO: 4401
  GFR-binding peptide
  MOD_RES (1), (3), (34), (35): Xaa is C or S

SEQ ID NO: 63613 - protein, 39 aa, Artificial Sequence; identical to SEQ ID NO: 25463
  GFR-binding peptide
  MOD_RES (34), (35): Xaa is C or S
  MOD_RES (12), (13), (14), (15), (16): Xaa is A or G
  MOD_RES (17), (18), (19), (20): Xaa is A or G or is absent

SEQ ID NO: 63614 - protein, 35 aa, Artificial Sequence; identical to SEQ ID NO: 31436
  GFR-binding peptide
  MOD_RES (2), (33), (34): Xaa is C or S

SEQ ID NO: 63615 - protein, 34 aa, Artificial Sequence; identical to SEQ ID NO: 31437
  GFR-binding peptide
  MOD_RES (1), (33), (34): Xaa is C or S

SEQ ID NO: 63616 - protein, 35 aa, Artificial Sequence; identical to SEQ ID NO: 31438
  GFR-binding peptide
  MOD_RES (32), (33): Xaa is C or S

SEQ ID NO: 63617 - protein, 39 aa, Artificial Sequence; identical to SEQ ID NO: 25466
  GFR-binding peptide
  MOD_RES (2), (4), (37), (38): Xaa is C or S
  MOD_RES (15), (16), (17), (18), (19): Xaa is A or G
  MOD_RES (20), (21), (22), (23): Xaa is A or G or is absent

SEQ ID NO: 63618 - protein, 43 aa, Artificial Sequence; identical to SEQ ID NO: 4407
  GFR-binding peptide
  MOD_RES (2), (37), (38): Xaa is C or S
  MOD_RES (15), (16), (17), (18), (19): Xaa is A or G
  MOD_RES (20), (21), (22), (23): Xaa is A or G or is absent

SEQ ID NO: 63619 - protein, 33 aa, Artificial Sequence; identical to SEQ ID NO: 31443
  GFR-binding peptide
  MOD_RES (33), (33): Xaa is C or S

SEQ ID NO: 63620 - protein, 42 aa, Artificial Sequence; identical to SEQ ID NO: 25469
  GFR-binding peptide
  MOD_RES (2), (37), (38): Xaa is C or S
  MOD_RES (15), (16), (17), (18), (19): Xaa is A or G
  MOD_RES (20), (21), (22), (23): Xaa is A or G or is absent

SEQ ID NO: 63621 - protein, 35 aa, Artificial Sequence; identical to SEQ ID NO: 25470
  GFR-binding peptide
  MOD_RES (2), (33), (34): Xaa is C or S

SEQ ID NO: 63622 - protein, 40 aa, Artificial Sequence
  GFR-binding peptide
  MOD_RES (1), (3), (35), (36): Xaa is C or S
XAXSEVTMNEYKFKVVNKNEDLYLISIPEMKEPVXXPEPI

SEQ ID NO: 63623 - protein, 39 aa, Artificial Sequence
  GFR-binding peptide
  MOD_RES (33), (34): Xaa is C or S
  MOD_RES (11), (12), (13), (14), (15): Xaa is A or G
  MOD_RES (16), (17), (18), (19): Xaa is A or G or is absent
EVTMNPIKGYXXXXXXXXXFYLINIPSMKEPVXXPEPIG

SEQ ID NO: 63624 - protein, 38 aa, Artificial Sequence
  GFR-binding peptide
  MOD_RES (1), (33), (34): Xaa is C or S
XRDVVMGRHKRLIIQQKDNYYLMSTASMKTPTXXPGAS

SEQ ID NO: 63625 - protein, 41 aa, Artificial Sequence; identical to SEQ ID NO: 31448
  GFR-binding peptide
  MOD_RES (1), (35), (36): Xaa is C or S
  MOD_RES (13), (14), (15), (16), (17): Xaa is A or G
  MOD_RES (18), (19), (20), (21): Xaa is A or G or is absent

SEQ ID NO: 63626 - protein, 41 aa, Artificial Sequence; identical to SEQ ID NO: 25475
  GFR-binding peptide
  MOD_RES (2), (4), (36), (37): Xaa is C or S

SEQ ID NO: 63627 - protein, 35 aa, Artificial Sequence; identical to SEQ ID NO: 4414
  GFR-binding peptide
  MOD_RES (1), (3), (34), (35): Xaa is C or S

SEQ ID NO: 63628 - protein, 35 aa, Artificial Sequence; identical to SEQ ID NO: 25477
  GFR-binding peptide
  MOD_RES (2), (2): Xaa is C or S
  MOD_RES (14), (15), (16), (17), (18): Xaa is A or G
  MOD_RES (19), (20), (21), (22): Xaa is A or G or is absent

SEQ ID NO: 63629 - protein, 40 aa, Artificial Sequence
  GFR-binding peptide
  MOD_RES (1), (3), (37), (38): Xaa is C or S
  MOD_RES (15), (16), (17), (18), (19): Xaa is A or G
  MOD_RES (20), (21), (22), (23): Xaa is A or G or is absent
XAXSEVTMNEYKFKXXXXXXXXXLYLISIPEMKEPVXXPE

SEQ ID NO: 63630 - protein, 37 aa, Artificial Sequence; identical to SEQ ID NO: 25480
  GFR-binding peptide
  MOD_RES (2), (4), (37): Xaa is C or S
  MOD_RES (15), (16), (17), (18), (19): Xaa is A or G
  MOD_RES (20), (21), (22), (23): Xaa is A or G or is absent

SEQ ID NO: 63631 - protein, 37 aa, Artificial Sequence
  GFR-binding peptide
  MOD_RES (2), (36), (37): Xaa is C or S
  MOD_RES (14), (15), (16), (17), (18): Xaa is A or G
  MOD_RES (19), (20), (21), (22): Xaa is A or G or is absent
GXRDVVMGRHKRLXXXXXXXXXYYLMSTASMKTPTXX

SEQ ID NO: 63632 - protein, 40 aa, Artificial Sequence; identical to SEQ ID NO: 4416
  GFR-binding peptide
  MOD_RES (35), (36): Xaa is C or S
  MOD_RES (13), (14), (15), (16), (17): Xaa is A or G
  MOD_RES (18), (19), (20), (21): Xaa is A or G or is absent

SEQ ID NO: 63633 - protein, 34 aa, Artificial Sequence; identical to SEQ ID NO: 56377
  GFR-binding peptide
  MOD_RES (31), (32): Xaa is C or S

SEQ ID NO: 63634 - protein, 33 aa, Artificial Sequence; identical to SEQ ID NO: 25483
  GFR-binding peptide
  MOD_RES (31), (32): Xaa is C or S

SEQ ID NO: 63635 - protein, 36 aa, Artificial Sequence; identical to SEQ ID NO: 4418
  GFR-binding peptide
  MOD_RES (2), (35), (36): Xaa is C or S
  MOD_RES (13), (14), (15), (16), (17): Xaa is A or G
  MOD_RES (18), (19), (20), (21): Xaa is A or G or is absent

SEQ ID NO: 63636 - protein, 34 aa, Artificial Sequence; identical to SEQ ID NO: 4421
  GFR-binding peptide
  MOD_RES (2), (4): Xaa is C or S

SEQ ID NO: 63637 - protein, 39 aa, Artificial Sequence; identical to SEQ ID NO: 25488
  GFR-binding peptide
  MOD_RES (33), (34): Xaa is C or S
  MOD_RES (11), (12), (13), (14), (15): Xaa is A or G
  MOD_RES (16), (17), (18), (19): Xaa is A or G or is absent

SEQ ID NO: 63638 - protein, 36 aa, Artificial Sequence
  GFR-binding peptide
  MOD_RES (2), (33), (34): Xaa is C or S
GXEEVIMEYKFKLLVRGNDLYLMSIPETKVPAXXTS

SEQ ID NO: 63639 - protein, 41 aa, Artificial Sequence; identical to SEQ ID NO: 4424
  GFR-binding peptide
  MOD_RES (1), (3), (37), (38): Xaa is C or S
  MOD_RES (15), (16), (17), (18), (19): Xaa is A or G
  MOD_RES (20), (21), (22), (23): Xaa is A or G or is absent

SEQ ID NO: 63640 - protein, 37 aa, Artificial Sequence
  GFR-binding peptide
  MOD_RES (31), (32): Xaa is C or S
SKVVMPIKGYVKPTRGVFYLINIPSLDQPVXXPSASA

SEQ ID NO: 63641 - protein, 34 aa, Artificial Sequence; identical to SEQ ID NO: 25494
  GFR-binding peptide
  MOD_RES (31), (32): Xaa is C or S

SEQ ID NO: 63642 - protein, 38 aa, Artificial Sequence; identical to SEQ ID NO: 25495
  GFR-binding peptide
  MOD_RES (2), (4), (35), (36): Xaa is C or S

SEQ ID NO: 63643 - protein, 36 aa, Artificial Sequence; identical to SEQ ID NO: 4429
  GFR-binding peptide
  MOD_RES (1), (34), (35): Xaa is C or S
  MOD_RES (12), (13), (14), (15), (16): Xaa is A or G
  MOD_RES (17), (18), (19), (20): Xaa is A or G or is absent

SEQ ID NO: 63644 - protein, 38 aa, Artificial Sequence
  GFR-binding peptide
  MOD_RES (1), (3), (37), (38): Xaa is C or S
  MOD_RES (15), (16), (17), (18), (19): Xaa is A or G
  MOD_RES (20), (21), (22), (23): Xaa is A or G or is absent
XGXRDVVMGRHKRLXXXXXXXXXYYLMSTASMKTPTXX

SEQ ID NO: 63645 - protein, 35 aa, Artificial Sequence; identical to SEQ ID NO: 4431
  GFR-binding peptide
  MOD_RES (2), (4): Xaa is C or S

SEQ ID NO: 63646 - protein, 39 aa, Artificial Sequence
  GFR-binding peptide
  MOD_RES (1), (3), (35), (36): Xaa is C or S
XGXSEVVMDYHYKLVVNNASDKYLISIPSLRTPVXXTPP

SEQ ID NO: 63647 - protein, 39 aa, Artificial Sequence; identical to SEQ ID NO: 56393
  GFR-binding peptide
  MOD_RES (1), (35), (36): Xaa is C or S
  MOD_RES (13), (14), (15), (16), (17): Xaa is A or G
  MOD_RES (18), (19), (20), (21): Xaa is A or G or is absent

SEQ ID NO: 63648 - protein, 34 aa, Artificial Sequence; identical to SEQ ID NO: 4432
  GFR-binding peptide
  MOD_RES (2), (2): Xaa is C or S
  MOD_RES (13), (14), (15), (16), (17): Xaa is A or G
  MOD_RES (18), (19), (20), (21): Xaa is A or G or is absent

SEQ ID NO: 63649 - protein, 43 aa, Artificial Sequence; identical to SEQ ID NO: 25504
  GFR-binding peptide
  MOD_RES (2), (4), (37), (38): Xaa is C or S

SEQ ID NO: 63650 - protein, 33 aa, Artificial Sequence; identical to SEQ ID NO: 4435
  GFR-binding peptide
  MOD_RES (1), (32), (33): Xaa is C or S

SEQ ID NO: 63651 - protein, 40 aa, Artificial Sequence; identical to SEQ ID NO: 31472
  GFR-binding peptide
  MOD_RES (1), (3), (37), (38): Xaa is C or S
  MOD_RES (15), (16), (17), (18), (19): Xaa is A or G
  MOD_RES (20), (21), (22), (23): Xaa is A or G or is absent

SEQ ID NO: 63652 - protein, 38 aa, Artificial Sequence; identical to SEQ ID NO: 4437
  GFR-binding peptide
  MOD_RES (1), (3), (36), (37): Xaa is C or S

SEQ ID NO: 63653 - protein, 36 aa, Artificial Sequence; identical to SEQ ID NO: 4439
  GFR-binding peptide
  MOD_RES (32), (33): Xaa is C or S

SEQ ID NO: 63654 - protein, 39 aa, Artificial Sequence; identical to SEQ ID NO: 4440
  GFR-binding peptide
  MOD_RES (2), (34), (35): Xaa is C or S

SEQ ID NO: 63655 - protein, 34 aa, Artificial Sequence; identical to SEQ ID NO: 4441
  GFR-binding peptide
  MOD_RES (1), (34): Xaa is C or S

SEQ ID NO: 63656 - protein, 35 aa, Artificial Sequence; identical to SEQ ID NO: 4442
  GFR-binding peptide
  MOD_RES (33), (34): Xaa is C or S
  MOD_RES (11), (12), (13), (14), (15): Xaa is A or G
  MOD_RES (16), (17), (18), (19): Xaa is A or G or is absent

SEQ ID NO: 63657 - protein, 30 aa, Artificial Sequence; identical to SEQ ID NO: 31478
  GFR-binding peptide

SEQ ID NO: 63658 - protein, 40 aa, Artificial Sequence; identical to SEQ ID NO: 25521
  GFR-binding peptide
  MOD_RES (1), (3), (35), (36): Xaa is C or S

SEQ ID NO: 63659 - protein, 35 aa, Artificial Sequence
  GFR-binding peptide
  MOD_RES (2), (4), (35): Xaa is C or S
LXGXEEVIMEYKFKLLVRGNDLYLMSIPETKVPAX

SEQ ID NO: 63660 - protein, 38 aa, Artificial Sequence; identical to SEQ ID NO: 4446
  GFR-binding peptide
  MOD_RES (34), (35): Xaa is C or S
  MOD_RES (12), (13), (14), (15), (16): Xaa is A or G
  MOD_RES (17), (18), (19), (20): Xaa is A or G or is absent

SEQ ID NO: 63661 - protein, 35 aa, Artificial Sequence; identical to SEQ ID NO: 25527
  GFR-binding peptide
  MOD_RES (1), (3): Xaa is C or S
  MOD_RES (14), (15), (16), (17), (18): Xaa is A or G
  MOD_RES (19), (20), (21), (22): Xaa is A or G or is absent

SEQ ID NO: 63662 - protein, 43 aa, Artificial Sequence; identical to SEQ ID NO: 31493
  GFR-binding peptide
  MOD_RES (1), (3), (37), (38): Xaa is C or S
  MOD_RES (15), (16), (17), (18), (19): Xaa is A or G
  MOD_RES (20), (21), (22), (23): Xaa is A or G or is absent

SEQ ID NO: 63663 - protein, 36 aa, Artificial Sequence; identical to SEQ ID NO: 25528
  GFR-binding peptide
  MOD_RES (1), (34), (35): Xaa is C or S
  MOD_RES (12), (13), (14), (15), (16): Xaa is A or G
  MOD_RES (17), (18), (19), (20): Xaa is A or G or is absent

SEQ ID NO: 63664 - protein, 33 aa, Artificial Sequence; identical to SEQ ID NO: 4452
  GFR-binding peptide
  MOD_RES (31), (32): Xaa is C or S

SEQ ID NO: 63665 - protein, 32 aa, Artificial Sequence; identical to SEQ ID NO: 4453
  GFR-binding peptide
  MOD_RES (11), (12), (13), (14), (15): Xaa is A or G
  MOD_RES (16), (17), (18), (19): Xaa is A or G or is absent

SEQ ID NO: 63666 - protein, 42 aa, Artificial Sequence
  GFR-binding peptide
  MOD_RES (2), (36), (37): Xaa is C or S
  MOD_RES (14), (15), (16), (17), (18): Xaa is A or G
  MOD_RES (19), (20), (21), (22): Xaa is A or G or is absent
AXSEVTMNEYKFKXXXXXXXXXLYLISIPEMKEPVXXPEPIG

SEQ ID NO: 63667 - protein, 36 aa, Artificial Sequence
  GFR-binding peptide
  MOD_RES (1), (3), (35), (36): Xaa is C or S
XAXSEVTMNEYKFKVVNKNEDLYLISIPEMKEPVXX

SEQ ID NO: 63668 - protein, 40 aa, Artificial Sequence; identical to SEQ ID NO: 31500
  GFR-binding peptide
  MOD_RES (1), (36), (37): Xaa is C or S
  MOD_RES (14), (15), (16), (17), (18): Xaa is A or G
  MOD_RES (19), (20), (21), (22): Xaa is A or G or is absent

SEQ ID NO: 63669 - protein, 35 aa, Artificial Sequence; identical to SEQ ID NO: 25537
  GFR-binding peptide
  MOD_RES (31), (32): Xaa is C or S

SEQ ID NO: 63670 - protein, 31 aa, Artificial Sequence; identical to SEQ ID NO: 25540
  GFR-binding peptide
  MOD_RES (31), (31): Xaa is C or S

SEQ ID NO: 63671 - protein, 32 aa, Artificial Sequence; identical to SEQ ID NO: 25541
  GFR-binding peptide
  MOD_RES (11), (12), (13), (14), (15): Xaa is A or G
  MOD_RES (16), (17), (18), (19): Xaa is A or G or is absent

SEQ ID NO: 63672 - protein, 31 aa, Artificial Sequence
  GFR-binding peptide
  MOD_RES (31), (31): Xaa is C or S
EEVIMEYKFKLLVRGNDLYLMSIPETKVPAX

SEQ ID NO: 63673 - protein, 36 aa, Artificial Sequence; identical to SEQ ID NO: 25543
  GFR-binding peptide
  MOD_RES (33), (34): Xaa is C or S
  MOD_RES (11), (12), (13), (14), (15): Xaa is A or G
  MOD_RES (16), (17), (18), (19): Xaa is A or G or is absent

SEQ ID NO: 63674 - protein, 33 aa, Artificial Sequence; identical to SEQ ID NO: 25544
  GFR-binding peptide
  MOD_RES (32), (33): Xaa is C or S

SEQ ID NO: 63675 - protein, 37 aa, Artificial Sequence; identical to SEQ ID NO: 25545
  GFR-binding peptide
  MOD_RES (32), (33): Xaa is C or S

SEQ ID NO: 63676 - protein, 34 aa, Artificial Sequence; identical to SEQ ID NO: 4461
  GFR-binding peptide
  MOD_RES (1), (3), (34): Xaa is C or S

SEQ ID NO: 63677 - protein, 37 aa, Artificial Sequence; identical to SEQ ID NO: 25547
  GFR-binding peptide
  MOD_RES (2), (4), (36), (37): Xaa is C or S

SEQ ID NO: 63678 - protein, 38 aa, Artificial Sequence; identical to SEQ ID NO: 25549
  GFR-binding peptide
  MOD_RES (32), (33): Xaa is C or S

SEQ ID NO: 63679 - protein, 41 aa, Artificial Sequence; identical to SEQ ID NO: 25550
  GFR-binding peptide
  MOD_RES (2), (4), (37), (38): Xaa is C or S
  MOD_RES (15), (16), (17), (18), (19): Xaa is A or G
  MOD_RES (20), (21), (22), (23): Xaa is A or G or is absent

SEQ ID NO: 63680 - protein, 43 aa, Artificial Sequence; identical to SEQ ID NO: 31507
  GFR-binding peptide
  MOD_RES (1), (3), (37), (38): Xaa is C or S
  MOD_RES (15), (16), (17), (18), (19): Xaa is A or G
  MOD_RES (20), (21), (22), (23): Xaa is A or G or is absent

SEQ ID NO: 63681 - protein, 35 aa, Artificial Sequence; identical to SEQ ID NO: 31510
  GFR-binding peptide
  MOD_RES (34), (35): Xaa is C or S
  MOD_RES (12), (13), (14), (15), (16): Xaa is A or G
  MOD_RES (17), (18), (19), (20): Xaa is A or G or is absent

SEQ ID NO: 63682 - protein, 37 aa, Artificial Sequence; identical to SEQ ID NO: 31513
  GFR-binding peptide
  MOD_RES (31), (32): Xaa is C or S

SEQ ID NO: 63683 - protein, 35 aa, Artificial Sequence; identical to SEQ ID NO: 4464
  GFR-binding peptide
  MOD_RES (1), (33), (34): Xaa is C or S

SEQ ID NO: 63684 - protein, 34 aa, Artificial Sequence
  GFR-binding peptide
  MOD_RES (32), (33): Xaa is C or S
RDVVMGYHYKLIIQQKDNKYLMSIPSMKTPTXXP

SEQ ID NO: 63685 - protein, 39 aa, Artificial Sequence; identical to SEQ ID NO: 25554
  GFR-binding peptide
  MOD_RES (1), (3), (36), (37): Xaa is C or S
  MOD_RES (14), (15), (16), (17), (18): Xaa is A or G
  MOD_RES (19), (20), (21), (22): Xaa is A or G or is absent

SEQ ID NO: 63686 - protein, 35 aa, Artificial Sequence; identical to SEQ ID NO: 25555
  GFR-binding peptide
  MOD_RES (1), (34), (35): Xaa is C or S
  MOD_RES (12), (13), (14), (15), (16): Xaa is A or G
  MOD_RES (17), (18), (19), (20): Xaa is A or G or is absent

SEQ ID NO: 63687 - protein, 39 aa, Artificial Sequence; identical to SEQ ID NO: 56442
  GFR-binding peptide
  MOD_RES (2), (4), (35), (36): Xaa is C or S

SEQ ID NO: 63688 - protein, 34 aa, Artificial Sequence; identical to SEQ ID NO: 4469
  GFR-binding peptide
  MOD_RES (13), (14), (15), (16), (17): Xaa is A or G
  MOD_RES (18), (19), (20), (21): Xaa is A or G or is absent

SEQ ID NO: 63689 - protein, 38 aa, Artificial Sequence; identical to SEQ ID NO: 4470
  GFR-binding peptide
  MOD_RES (2), (35), (36): Xaa is C or S
  MOD_RES (13), (14), (15), (16), (17): Xaa is A or G
  MOD_RES (18), (19), (20), (21): Xaa is A or G or is absent

SEQ ID NO: 63690 - protein, 39 aa, Artificial Sequence; identical to SEQ ID NO: 4471
  GFR-binding peptide
  MOD_RES (34), (35): Xaa is C or S
  MOD_RES (12), (13), (14), (15), (16): Xaa is A or G
  MOD_RES (17), (18), (19), (20): Xaa is A or G or is absent

SEQ ID NO: 63691 - protein, 40 aa, Artificial Sequence; identical to SEQ ID NO: 4474
  GFR-binding peptide
  MOD_RES (2), (4), (39), (40): Xaa is C or S
  MOD_RES (17), (18), (19), (20), (21): Xaa is A or G
  MOD_RES (22), (23), (24), (25): Xaa is A or G or is absent

SEQ ID NO: 63692 - protein, 42 aa, Artificial Sequence; identical to SEQ ID NO: 25560
  GFR-binding peptide
  MOD_RES (2), (4), (38), (39): Xaa is C or S
  MOD_RES (16), (17), (18), (19), (20): Xaa is A or G
  MOD_RES (21), (22), (23), (24): Xaa is A or G or is absent

SEQ ID NO: 63693 - protein, 38 aa, Artificial Sequence; identical to SEQ ID NO: 25561
  GFR-binding peptide
  MOD_RES (2), (34), (35): Xaa is C or S

SEQ ID NO: 63694 - protein, 39 aa, Artificial Sequence; identical to SEQ ID NO: 4475
  GFR-binding peptide
  MOD_RES (1), (34), (35): Xaa is C or S
  MOD_RES (12), (13), (14), (15), (16): Xaa is A or G
  MOD_RES (17), (18), (19), (20): Xaa is A or G or is absent

SEQ ID NO: 63695 - protein, 32 aa, Artificial Sequence; identical to SEQ ID NO: 25563
  GFR-binding peptide
  MOD_RES (31), (32): Xaa is C or S

SEQ ID NO: 63696 - protein, 36 aa, Artificial Sequence; identical to SEQ ID NO: 4476
  GFR-binding peptide
  MOD_RES (33), (34): Xaa is C or S
  MOD_RES (11), (12), (13), (14), (15): Xaa is A or G
  MOD_RES (16), (17), (18), (19): Xaa is A or G or is absent

SEQ ID NO: 63697 - protein, 40 aa, Artificial Sequence; identical to SEQ ID NO: 25566
  GFR-binding peptide
  MOD_RES (1), (35), (36): Xaa is C or S
  MOD_RES (13), (14), (15), (16), (17): Xaa is A or G
  MOD_RES (18), (19), (20), (21): Xaa is A or G or is absent

SEQ ID NO: 63698 - protein, 40 aa, Artificial Sequence
  GFR-binding peptide
  MOD_RES (34), (35): Xaa is C or S
  MOD_RES (12), (13), (14), (15), (16): Xaa is A or G
  MOD_RES (17), (18), (19), (20): Xaa is A or G or is absent
AEVVMDRHKRLXXXXXXXXXYYLISTASLRAPVXXSAPAA

SEQ ID NO: 63699 - protein, 35 aa, Artificial Sequence
  GFR-binding peptide
  MOD_RES (1), (33), (34): Xaa is C or S
XSEVVMDYHYKLVVNNASDKYLISIPSLRTPVXXT

SEQ ID NO: 63700 - protein, 36 aa, Artificial Sequence; identical to SEQ ID NO: 56458
  GFR-binding peptide
  MOD_RES (33), (34): Xaa is C or S
  MOD_RES (11), (12), (13), (14), (15): Xaa is A or G
  MOD_RES (16), (17), (18), (19): Xaa is A or G or is absent

SEQ ID NO: 63701 - protein, 38 aa, Artificial Sequence; identical to SEQ ID NO: 4477
  GFR-binding peptide
  MOD_RES (2), (4), (38): Xaa is C or S
  MOD_RES (16), (17), (18), (19), (20): Xaa is A or G
  MOD_RES (21), (22), (23), (24): Xaa is A or G or is absent

SEQ ID NO: 63702 - protein, 42 aa, Artificial Sequence
  GFR-binding peptide
  MOD_RES (1), (3), (37), (38): Xaa is C or S
  MOD_RES (15), (16), (17), (18), (19): Xaa is A or G
  MOD_RES (20), (21), (22), (23): Xaa is A or G or is absent
XGXESVAMGRHKRLXXXXXXXXXYYLISTASLKTPVXXAKSA

SEQ ID NO: 63703 - protein, 37 aa, Artificial Sequence; identical to SEQ ID NO: 31526
  GFR-binding peptide
  MOD_RES (2), (4), (35), (36): Xaa is C or S

SEQ ID NO: 63704 - protein, 39 aa, Artificial Sequence; identical to SEQ ID NO: 31527
  GFR-binding peptide
  MOD_RES (2), (4), (36), (37): Xaa is C or S

SEQ ID NO: 63705 - protein, 38 aa, Artificial Sequence; identical to SEQ ID NO: 11913
  GFR-binding peptide
  MOD_RES (1), (3), (35), (36): Xaa is C or S

SEQ ID NO: 63706 - protein, 39 aa, Artificial Sequence; identical to SEQ ID NO: 25569
  GFR-binding peptide
  MOD_RES (34), (35): Xaa is C or S
  MOD_RES (12), (13), (14), (15), (16): Xaa is A or G
  MOD_RES (17), (18), (19), (20): Xaa is A or G or is absent

SEQ ID NO: 63707 - protein, 40 aa, Artificial Sequence
  GFR-binding peptide
  MOD_RES (1), (3), (37), (38): Xaa is C or S
  MOD_RES (15), (16), (17), (18), (19): Xaa is A or G
  MOD_RES (20), (21), (22), (23): Xaa is A or G or is absent
XAXSEVTMNRHKRLXXXXXXXXXYYLISTASMKEPVXXPE

SEQ ID NO: 63708 - protein, 32 aa, Artificial Sequence
  GFR-binding peptide
  MOD_RES (11), (12), (13), (14), (15): Xaa is A or G
  MOD_RES (16), (17), (18), (19): Xaa is A or G or is absent
EEVIMEYKFKXXXXXXXXXLYLMSIPETKVPA

SEQ ID NO: 63709 - protein, 42 aa, Artificial Sequence; identical to SEQ ID NO: 25571
  GFR-binding peptide
  MOD_RES (2), (4), (38), (39): Xaa is C or S
  MOD_RES (16), (17), (18), (19), (20): Xaa is A or G
  MOD_RES (21), (22), (23), (24): Xaa is A or G or is absent

SEQ ID NO: 63710 - protein, 40 aa, Artificial Sequence; identical to SEQ ID NO: 4482
  GFR-binding peptide
  MOD_RES (2), (35), (36): Xaa is C or S
  MOD_RES (13), (14), (15), (16), (17): Xaa is A or G
  MOD_RES (18), (19), (20), (21): Xaa is A or G or is absent

SEQ ID NO: 63711 - protein, 39 aa, Artificial Sequence; identical to SEQ ID NO: 4484
  GFR-binding peptide
  MOD_RES (33), (34): Xaa is C or S
  MOD_RES (11), (12), (13), (14), (15): Xaa is A or G
  MOD_RES (16), (17), (18), (19): Xaa is A or G or is absent

SEQ ID NO: 63712 - protein, 40 aa, Artificial Sequence; identical to SEQ ID NO: 25576
  GFR-binding peptide
  MOD_RES (2), (4), (35), (36): Xaa is C or S

SEQ ID NO: 63713 - protein, 36 aa, Artificial Sequence; identical to SEQ ID NO: 4487
  GFR-binding peptide
  MOD_RES (33), (34): Xaa is C or S
  MOD_RES (11), (12), (13), (14), (15): Xaa is A or G
  MOD_RES (16), (17), (18), (19): Xaa is A or G or is absent

SEQ ID NO: 63714 - protein, 39 aa, Artificial Sequence
  GFR-binding peptide
  MOD_RES (1), (3), (34), (35): Xaa is C or S
XKXSRVIMPIKGYVKPKRGVFYLINIPSLAQPVXXPAAS

SEQ ID NO: 63715 - protein, 36 aa, Artificial Sequence; identical to SEQ ID NO: 56466
  GFR-binding peptide
  MOD_RES (1), (33), (34): Xaa is C or S

SEQ ID NO: 63716 - protein, 38 aa, Artificial Sequence; identical to SEQ ID NO: 31543
  GFR-binding peptide
  MOD_RES (1), (33), (34): Xaa is C or S

SEQ ID NO: 63717 - protein, 39 aa, Artificial Sequence
  GFR-binding peptide
  MOD_RES (33), (34): Xaa is C or S
  MOD_RES (11), (12), (13), (14), (15): Xaa is A or G
  MOD_RES (16), (17), (18), (19): Xaa is A or G or is absent
EEVIMYHYKLXXXXXXXXXKYLMSIPSTKVPAXXTSPVR

SEQ ID NO: 63718 - protein, 42 aa, Artificial Sequence; identical to SEQ ID NO: 31545
  GFR-binding peptide
  MOD_RES (1), (3), (37), (38): Xaa is C or S
  MOD_RES (15), (16), (17), (18), (19): Xaa is A or G
  MOD_RES (20), (21), (22), (23): Xaa is A or G or is absent

SEQ ID NO: 63719 - protein, 36 aa, Artificial Sequence; identical to SEQ ID NO: 31546
  GFR-binding peptide
  MOD_RES (2), (36): Xaa is C or S
  MOD_RES (14), (15), (16), (17), (18): Xaa is A or G
  MOD_RES (19), (20), (21), (22): Xaa is A or G or is absent

SEQ ID NO: 63720 - protein, 42 aa, Artificial Sequence
  GFR-binding peptide
  MOD_RES (2), (4), (38), (39): Xaa is C or S
  MOD_RES (16), (17), (18), (19), (20): Xaa is A or G
  MOD_RES (21), (22), (23), (24): Xaa is A or G or is absent
SXGXRDVVMGEYKFKXXXXXXXXXLYLMSIPEMKTPTXXPGA

SEQ ID NO: 63721 - protein, 41 aa, Artificial Sequence; identical to SEQ ID NO: 25583
  GFR-binding peptide
  MOD_RES (1), (3), (36), (37): Xaa is C or S
  MOD_RES (14), (15), (16), (17), (18): Xaa is A or G
  MOD_RES (19), (20), (21), (22): Xaa is A or G or is absent

SEQ ID NO: 63722 - protein, 41 aa, Artificial Sequence
  GFR-binding peptide
  MOD_RES (2), (4), (36), (37): Xaa is C or S
RXAXSEVTMNRYKKLVVNKNEDFYLISIANMKEPVXXPEPI

SEQ ID NO: 63723 - protein, 36 aa, Artificial Sequence; identical to SEQ ID NO: 25587
  GFR-binding peptide
  MOD_RES (34), (35): Xaa is C or S
  MOD_RES (12), (13), (14), (15), (16): Xaa is A or G
  MOD_RES (17), (18), (19), (20): Xaa is A or G or is absent

SEQ ID NO: 63724 - protein, 35 aa, Artificial Sequence; identical to SEQ ID NO: 25589
  GFR-binding peptide
  MOD_RES (32), (33): Xaa is C or S

SEQ ID NO: 63725 - protein, 34 aa, Artificial Sequence; identical to SEQ ID NO: 25591
  GFR-binding peptide
  MOD_RES (32), (33): Xaa is C or S

SEQ ID NO: 63726 - protein, 36 aa, Artificial Sequence
  GFR-binding peptide
  MOD_RES (1), (3): Xaa is C or S
  MOD_RES (15), (16), (17), (18), (19): Xaa is A or G
  MOD_RES (20), (21), (22), (23): Xaa is A or G or is absent
XGXRDVVMGEYKFKXXXXXXXXXLYLMSIPEMKTPT

SEQ ID NO: 63727 - protein, 37 aa, Artificial Sequence; identical to SEQ ID NO: 4499
  GFR-binding peptide
  MOD_RES (2), (34), (35): Xaa is C or S

SEQ ID NO: 63728 - protein, 38 aa, Artificial Sequence
  GFR-binding peptide
  MOD_RES (1), (3), (37), (38): Xaa is C or S
  MOD_RES (15), (16), (17), (18), (19): Xaa is A or G
  MOD_RES (20), (21), (22), (23): Xaa is A or G or is absent
XAXSEVTMNRYKKLXXXXXXXXXFYLISIANMKEPVXX

SEQ ID NO: 63729 - protein, 38 aa, Artificial Sequence; identical to SEQ ID NO: 31559
  GFR-binding peptide
  MOD_RES (2), (36), (37): Xaa is C or S
  MOD_RES (14), (15), (16), (17), (18): Xaa is A or G
  MOD_RES (19), (20), (21), (22): Xaa is A or G or is absent

SEQ ID NO: 63730 - protein, 34 aa, Artificial Sequence; identical to SEQ ID NO: 4501
  GFR-binding peptide
  MOD_RES (2), (2): Xaa is C or S
  MOD_RES (13), (14), (15), (16), (17): Xaa is A or G
  MOD_RES (18), (19), (20), (21): Xaa is A or G or is absent

SEQ ID NO: 63731 - protein, 39 aa, Artificial Sequence
  GFR-binding peptide
  MOD_RES (2), (34), (35): Xaa is C or S
GXRDVVMGEYKFKIIQQKDNLYLMSIPEMKTPTXXPGAS

SEQ ID NO: 63732 - protein, 36 aa, Artificial Sequence; identical to SEQ ID NO: 31561
  GFR-binding peptide
  MOD_RES (1), (34), (35): Xaa is C or S

SEQ ID NO: 63733 - protein, 40 aa, Artificial Sequence; identical to SEQ ID NO: 25600
  GFR-binding peptide
  MOD_RES (2), (4), (36), (37): Xaa is C or S

SEQ ID NO: 63734 - protein, 39 aa, Artificial Sequence; identical to SEQ ID NO: 31565
  GFR-binding peptide
  MOD_RES (1), (3), (37), (38): Xaa is C or S
  MOD_RES (15), (16), (17), (18), (19): Xaa is A or G
  MOD_RES (20), (21), (22), (23): Xaa is A or G or is absent

SEQ ID NO: 63735 - protein, 37 aa, Artificial Sequence
  GFR-binding peptide
  MOD_RES (1), (35), (36): Xaa is C or S
  MOD_RES (13), (14), (15), (16), (17): Xaa is A or G
  MOD_RES (18), (19), (20), (21): Xaa is A or G or is absent
XRDVVMGEYKFKXXXXXXXXXLYLMSIPEMKTPTXXP

SEQ ID NO: 63736 - protein, 34 aa, Artificial Sequence; identical to SEQ ID NO: 31567
  GFR-binding peptide
  MOD_RES (2), (34): Xaa is C or S

SEQ ID NO: 63737 - protein, 35 aa, Artificial Sequence
  GFR-binding peptide
  MOD_RES (1), (3), (35): Xaa is C or S
XGXSEVVMDEYKFKVVNNASDLYLISIPELRTPVX

SEQ ID NO: 63738 - protein, 41 aa, Artificial Sequence; identical to SEQ ID NO: 4507
  GFR-binding peptide
  MOD_RES (1), (3), (35), (36): Xaa is C or S

SEQ ID NO: 63739 - protein, 36 aa, Artificial Sequence; identical to SEQ ID NO: 31568
  GFR-binding peptide
  MOD_RES (1), (33), (34): Xaa is C or S

SEQ ID NO: 63740 - protein, 42 aa, Artificial Sequence; identical to SEQ ID NO: 4508
  GFR-binding peptide
  MOD_RES (1), (3), (37), (38): Xaa is C or S
  MOD_RES (15), (16), (17), (18), (19): Xaa is A or G
  MOD_RES (20), (21), (22), (23): Xaa is A or G or is absent

SEQ ID NO: 63741 - protein, 38 aa, Artificial Sequence; identical to SEQ ID NO: 31569
  GFR-binding peptide
  MOD_RES (34), (35): Xaa is C or S
  MOD_RES (12), (13), (14), (15), (16): Xaa is A or G
  MOD_RES (17), (18), (19), (20): Xaa is A or G or is absent

SEQ ID NO: 63742 - protein, 35 aa, Artificial Sequence; identical to SEQ ID NO: 4513
  GFR-binding peptide
  MOD_RES (34), (35): Xaa is C or S
  MOD_RES (12), (13), (14), (15), (16): Xaa is A or G
  MOD_RES (17), (18), (19), (20): Xaa is A or G or is absent

SEQ ID NO: 63743 - protein, 37 aa, Artificial Sequence; identical to SEQ ID NO: 4515
  GFR-binding peptide
  MOD_RES (2), (34): Xaa is C or S

SEQ ID NO: 63744 - protein, 37 aa, Artificial Sequence; identical to SEQ ID NO: 4516
  GFR-binding peptide
  MOD_RES (33), (34): Xaa is C or S
  MOD_RES (11), (12), (13), (14), (15): Xaa is A or G
  MOD_RES (16), (17), (18), (19): Xaa is A or G or is absent

SEQ ID NO: 63745 - protein, 43 aa, Artificial Sequence; identical to SEQ ID NO: 4517
  GFR-binding peptide
  MOD_RES (2), (4), (38): Xaa is C or S
  MOD_RES (16), (17), (18), (19), (20): Xaa is A or G
  MOD_RES (21), (22), (23), (24): Xaa is A or G or is absent

SEQ ID NO: 63746 - protein, 37 aa, Artificial Sequence; identical to SEQ ID NO: 4518
  GFR-binding peptide
  MOD_RES (1), (3), (35), (36): Xaa is C or S

SEQ ID NO: 63747 - protein, 36 aa, Artificial Sequence; identical to SEQ ID NO: 25612
  GFR-binding peptide
  MOD_RES (1), (3): Xaa is C or S
  MOD_RES (15), (16), (17), (18), (19): Xaa is A or G
  MOD_RES (20), (21), (22), (23): Xaa is A or G or is absent

SEQ ID NO: 63748 - protein, 41 aa, Artificial Sequence; identical to SEQ ID NO: 25613
  GFR-binding peptide
  MOD_RES (1), (3), (35), (36): Xaa is C or S

SEQ ID NO: 63749 - protein, 36 aa, Artificial Sequence; identical to SEQ ID NO: 31583
  GFR-binding peptide
  MOD_RES (34), (35): Xaa is C or S
  MOD_RES (12), (13), (14), (15), (16): Xaa is A or G
  MOD_RES (17), (18), (19), (20): Xaa is A or G or is absent

SEQ ID NO: 63750 - protein, 38 aa, Artificial Sequence
  GFR-binding peptide
  MOD_RES (2), (36), (37): Xaa is C or S
  MOD_RES (14), (15), (16), (17), (18): Xaa is A or G
  MOD_RES (19), (20), (21), (22): Xaa is A or G or is absent
AXSEVTMNPIKGYXXXXXXXXXFYLINIPSMKEPVXXP

SEQ ID NO: 63751 - protein, 33 aa, Artificial Sequence
  GFR-binding peptide
  MOD_RES (2), (2): Xaa is C or S
AXSEVTMNYHYKLVVNKNEDKYLISIPSMKEPV

SEQ ID NO: 63752 - protein, 35 aa, Artificial Sequence; identical to SEQ ID NO: 4526
  GFR-binding peptide
  MOD_RES (32), (33): Xaa is C or S

SEQ ID NO: 63753 - protein, 37 aa, Artificial Sequence; identical to SEQ ID NO: 4527
  GFR-binding peptide
  MOD_RES (1), (3), (37): Xaa is C or S
  MOD_RES (15), (16), (17), (18), (19): Xaa is A or G
  MOD_RES (20), (21), (22), (23): Xaa is A or G or is absent

SEQ ID NO: 63754 - protein, 36 aa, Artificial Sequence; identical to SEQ ID NO: 25618
  GFR-binding peptide
  MOD_RES (2), (36): Xaa is C or S
  MOD_RES (14), (15), (16), (17), (18): Xaa is A or G
  MOD_RES (19), (20), (21), (22): Xaa is A or G or is absent

SEQ ID NO: 63755 - protein, 37 aa, Artificial Sequence
  GFR-binding peptide
  MOD_RES (2), (4), (35), (36): Xaa is C or S
SXKXSKVIMPIKGYIKPTKGIFYLINIPSLDQSVXXP

SEQ ID NO: 63756 - protein, 36 aa, Artificial Sequence; identical to SEQ ID NO: 25620
  GFR-binding peptide
  MOD_RES (31), (32): Xaa is C or S

SEQ ID NO: 63757 - protein, 36 aa, Artificial Sequence
  GFR-binding peptide
  MOD_RES (1), (3): Xaa is C or S
  MOD_RES (15), (16), (17), (18), (19): Xaa is A or G
  MOD_RES (20), (21), (22), (23): Xaa is A or G or is absent
XGXRDVVMGRHKRLXXXXXXXXXYYLMSTASMKTPT

SEQ ID NO: 63758 - protein, 38 aa, Artificial Sequence; identical to SEQ ID NO: 31594
  GFR-binding peptide
  MOD_RES (32), (33): Xaa is C or S

SEQ ID NO: 63759 - protein, 38 aa, Artificial Sequence; identical to SEQ ID NO: 4528
  GFR-binding peptide
  MOD_RES (2), (4), (36), (37): Xaa is C or S

SEQ ID NO: 63760 - protein, 34 aa, Artificial Sequence; identical to SEQ ID NO: 31596
  GFR-binding peptide
  MOD_RES (33), (34): Xaa is C or S
  MOD_RES (11), (12), (13), (14), (15): Xaa is A or G
  MOD_RES (16), (17), (18), (19): Xaa is A or G or is absent

SEQ ID NO: 63761 - protein, 34 aa, Artificial Sequence; identical to SEQ ID NO: 31597
  GFR-binding peptide
  MOD_RES (33), (34): Xaa is C or S
  MOD_RES (11), (12), (13), (14), (15): Xaa is A or G
  MOD_RES (16), (17), (18), (19): Xaa is A or G or is absent

SEQ ID NO: 63762 - protein, 33 aa, Artificial Sequence; identical to SEQ ID NO: 4530
  GFR-binding peptide
  MOD_RES (32), (33): Xaa is C or S

SEQ ID NO: 63763 - protein, 35 aa, Artificial Sequence; identical to SEQ ID NO: 25624
  GFR-binding peptide
  MOD_RES (35), (35): Xaa is C or S
  MOD_RES (13), (14), (15), (16), (17): Xaa is A or G
  MOD_RES (18), (19), (20), (21): Xaa is A or G or is absent

SEQ ID NO: 63764 - protein, 39 aa, Artificial Sequence; identical to SEQ ID NO: 25625
  GFR-binding peptide
  MOD_RES (2), (4), (37), (38): Xaa is C or S
  MOD_RES (15), (16), (17), (18), (19): Xaa is A or G
  MOD_RES (20), (21), (22), (23): Xaa is A or G or is absent

SEQ ID NO: 63765 - protein, 41 aa, Artificial Sequence; identical to SEQ ID NO: 25626
  GFR-binding peptide
  MOD_RES (1), (3), (37): Xaa is C or S
  MOD_RES (15), (16), (17), (18), (19): Xaa is A or G
  MOD_RES (20), (21), (22), (23): Xaa is A or G or is absent

SEQ ID NO: 63766 - protein, 38 aa, Artificial Sequence; identical to SEQ ID NO: 25631
  GFR-binding peptide
  MOD_RES (1), (3), (35), (36): Xaa is C or S

SEQ ID NO: 63767 - protein, 35 aa, Artificial Sequence; identical to SEQ ID NO: 4537
  GFR-binding peptide
  MOD_RES (2), (4): Xaa is C or S

SEQ ID NO: 63768 - protein, 34 aa, Artificial Sequence; identical to SEQ ID NO: 4539
  GFR-binding peptide
  MOD_RES (32), (33): Xaa is C or S

SEQ ID NO: 63769 - protein, 37 aa, Artificial Sequence; identical to SEQ ID NO: 4541
  GFR-binding peptide
  MOD_RES (34), (34): Xaa is C or S
  MOD_RES (12), (13), (14), (15), (16): Xaa is A or G
  MOD_RES (17), (18), (19), (20): Xaa is A or G or is absent

SEQ ID NO: 63770 - protein, 34 aa, Artificial Sequence
  GFR-binding peptide
  MOD_RES (32), (33): Xaa is C or S
SEVTMNEYKFKVVNKNEDLYLISIPEMKEPVXXP

SEQ ID NO: 63771 - protein, 38 aa, Artificial Sequence; identical to SEQ ID NO: 25638
  GFR-binding peptide
  MOD_RES (2), (4), (36), (37): Xaa is C or S

SEQ ID NO: 63772 - protein, 38 aa, Artificial Sequence; identical to SEQ ID NO: 25641
  GFR-binding peptide
  MOD_RES (1), (3), (37), (38): Xaa is C or S
  MOD_RES (15), (16), (17), (18), (19): Xaa is A or G
  MOD_RES (20), (21), (22), (23): Xaa is A or G or is absent

SEQ ID NO: 63773 - protein, 39 aa, Artificial Sequence; identical to SEQ ID NO: 25644
  GFR-binding peptide
  MOD_RES (1), (3), (35), (36): Xaa is C or S

SEQ ID NO: 63774 - protein, 38 aa, Artificial Sequence; identical to SEQ ID NO: 4550
  GFR-binding peptide
  MOD_RES (1), (35), (36): Xaa is C or S
  MOD_RES (13), (14), (15), (16), (17): Xaa is A or G
  MOD_RES (18), (19), (20), (21): Xaa is A or G or is absent

SEQ ID NO: 63775 - protein, 34 aa, Artificial Sequence; identical to SEQ ID NO: 4552
  GFR-binding peptide
  MOD_RES (31), (32): Xaa is C or S

SEQ ID NO: 63776 - protein, 40 aa, Artificial Sequence; identical to SEQ ID NO: 4553
  GFR-binding peptide
  MOD_RES (34), (35): Xaa is C or S
  MOD_RES (12), (13), (14), (15), (16): Xaa is A or G
  MOD_RES (17), (18), (19), (20): Xaa is A or G or is absent

SEQ ID NO: 63777 - protein, 36 aa, Artificial Sequence
  GFR-binding peptide
  MOD_RES (1), (34), (35): Xaa is C or S
  MOD_RES (12), (13), (14), (15), (16): Xaa is A or G
  MOD_RES (17), (18), (19), (20): Xaa is A or G or is absent
XSRVIMPIKGYXXXXXXXXXFYLINIPSLAQPVXXP

SEQ ID NO: 63778 - protein, 38 aa, Artificial Sequence; identical to SEQ ID NO: 4559
  GFR-binding peptide
  MOD_RES (1), (3), (36), (37): Xaa is C or S
  MOD_RES (14), (15), (16), (17), (18): Xaa is A or G
  MOD_RES (19), (20), (21), (22): Xaa is A or G or is absent

SEQ ID NO: 63779 - protein, 39 aa, Artificial Sequence; identical to SEQ ID NO: 4560
  GFR-binding peptide
  MOD_RES (2), (4), (37), (38): Xaa is C or S
  MOD_RES (15), (16), (17), (18), (19): Xaa is A or G
  MOD_RES (20), (21), (22), (23): Xaa is A or G or is absent

SEQ ID NO: 63780 - protein, 41 aa, Artificial Sequence
  GFR-binding peptide
  MOD_RES (2), (4), (36), (37): Xaa is C or S
RXGXSEVVMDEYKFKVVNNASDLYLISIPELRTPVXXTPPT

SEQ ID NO: 63781 - protein, 36 aa, Artificial Sequence
  GFR-binding peptide
  MOD_RES (2), (4): Xaa is C or S
  MOD_RES (15), (16), (17), (18), (19): Xaa is A or G
  MOD_RES (20), (21), (22), (23): Xaa is A or G or is absent
SXKXSKVIMPIKGYXXXXXXXXXFYLINIPSLDQSV

SEQ ID NO: 63782 - protein, 41 aa, Artificial Sequence; identical to SEQ ID NO: 25654
  GFR-binding peptide
  MOD_RES (1), (35), (36): Xaa is C or S
  MOD_RES (13), (14), (15), (16), (17): Xaa is A or G
  MOD_RES (18), (19), (20), (21): Xaa is A or G or is absent

SEQ ID NO: 63783 - protein, 36 aa, Artificial Sequence; identical to SEQ ID NO: 31616
  GFR-binding peptide
  MOD_RES (1), (3): Xaa is C or S
  MOD_RES (15), (16), (17), (18), (19): Xaa is A or G
  MOD_RES (20), (21), (22), (23): Xaa is A or G or is absent

SEQ ID NO: 63784 - protein, 38 aa, Artificial Sequence; identical to SEQ ID NO: 4561
  GFR-binding peptide
  MOD_RES (1), (33), (34): Xaa is C or S

SEQ ID NO: 63785 - protein, 36 aa, Artificial Sequence; identical to SEQ ID NO: 4565
  GFR-binding peptide
  MOD_RES (34), (34): Xaa is C or S
  MOD_RES (12), (13), (14), (15), (16): Xaa is A or G
  MOD_RES (17), (18), (19), (20): Xaa is A or G or is absent

SEQ ID NO: 63786 - protein, 33 aa, Artificial Sequence
  GFR-binding peptide
  MOD_RES (31), (32): Xaa is C or S
SKVIMPIKGYIKPTKGIFYLINIPSLDQSVXXP

SEQ ID NO: 63787 - protein, 37 aa, Artificial Sequence; identical to SEQ ID NO: 31622
  GFR-binding peptide
  MOD_RES (2), (34), (35): Xaa is C or S

SEQ ID NO: 63788 - protein, 36 aa, Artificial Sequence; identical to SEQ ID NO: 4568
  GFR-binding peptide
  MOD_RES (2), (33), (34): Xaa is C or S

SEQ ID NO: 63789 - protein, 36 aa, Artificial Sequence; identical to SEQ ID NO: 31625
  GFR-binding peptide
  MOD_RES (32), (33): Xaa is C or S

SEQ ID NO: 63790 - protein, 37 aa, Artificial Sequence; identical to SEQ ID NO: 4572
  GFR-binding peptide
  MOD_RES (2), (4): Xaa is C or S
  MOD_RES (16), (17), (18), (19), (20): Xaa is A or G
  MOD_RES (21), (22), (23), (24): Xaa is A or G or is absent

SEQ ID NO: 63791 - protein, 36 aa, Artificial Sequence; identical to SEQ ID NO: 25666
  GFR-binding peptide
  MOD_RES (31), (32): Xaa is C or S

SEQ ID NO: 63792 - protein, 32 aa, Artificial Sequence; identical to SEQ ID NO: 4580
  GFR-binding peptide
  MOD_RES (11), (12), (13), (14), (15): Xaa is A or G
  MOD_RES (16), (17), (18), (19): Xaa is A or G or is absent

SEQ ID NO: 63793 - protein, 38 aa, Artificial Sequence; identical to SEQ ID NO: 25668
  GFR-binding peptide
  MOD_RES (1), (33), (34): Xaa is C or S

SEQ ID NO: 63794 - protein, 40 aa, Artificial Sequence
  GFR-binding peptide
  MOD_RES (2), (4), (36), (37): Xaa is C or S
RXAXSEVTMNRYKKLVVNKNEDFYLISIANMKEPVXXPEP

SEQ ID NO: 63795 - protein, 42 aa, Artificial Sequence; identical to SEQ ID NO: 25670
  GFR-binding peptide
  MOD_RES (2), (4), (38), (39): Xaa is C or S
  MOD_RES (16), (17), (18), (19), (20): Xaa is A or G
  MOD_RES (21), (22), (23), (24): Xaa is A or G or is absent

SEQ ID NO: 63796 - protein, 43 aa, Artificial Sequence; identical to SEQ ID NO: 31641
  GFR-binding peptide
  MOD_RES (2), (4), (38), (39): Xaa is C or S
  MOD_RES (16), (17), (18), (19), (20): Xaa is A or G
  MOD_RES (21), (22), (23), (24): Xaa is A or G or is absent

SEQ ID NO: 63797 - protein, 41 aa, Artificial Sequence; identical to SEQ ID NO: 25671
  GFR-binding peptide
  MOD_RES (2), (4), (36), (37): Xaa is C or S

SEQ ID NO: 63798 - protein, 39 aa, Artificial Sequence; identical to SEQ ID NO: 31644
  GFR-binding peptide
  MOD_RES (2), (4), (39): Xaa is C or S
  MOD_RES (17), (18), (19), (20), (21): Xaa is A or G
  MOD_RES (22), (23), (24), (25): Xaa is A or G or is absent

SEQ ID NO: 63799 - protein, 36 aa, Artificial Sequence; identical to SEQ ID NO: 25677
  GFR-binding peptide
  MOD_RES (1), (35), (36): Xaa is C or S
  MOD_RES (13), (14), (15), (16), (17): Xaa is A or G
  MOD_RES (18), (19), (20), (21): Xaa is A or G or is absent

SEQ ID NO: 63800 - protein, 38 aa, Artificial Sequence; identical to SEQ ID NO: 4587
  GFR-binding peptide
  MOD_RES (2), (4), (38): Xaa is C or S
  MOD_RES (16), (17), (18), (19), (20): Xaa is A or G
  MOD_RES (21), (22), (23), (24): Xaa is A or G or is absent

SEQ ID NO: 63801 - protein, 35 aa, Artificial Sequence; identical to SEQ ID NO: 4588
  GFR-binding peptide
  MOD_RES (2), (35): Xaa is C or S
  MOD_RES (13), (14), (15), (16), (17): Xaa is A or G
  MOD_RES (18), (19), (20), (21): Xaa is A or G or is absent

SEQ ID NO: 63802 - protein, 39 aa, Artificial Sequence
  GFR-binding peptide
  MOD_RES (33), (34): Xaa is C or S
  MOD_RES (11), (12), (13), (14), (15): Xaa is A or G
  MOD_RES (16), (17), (18), (19): Xaa is A or G or is absent
RVVMNYHYKLXXXXXXXXXKYLVSIPSLKTPAXXPKPVH

SEQ ID NO: 63803 - protein, 44 aa, Artificial Sequence
  GFR-binding peptide
  MOD_RES (2), (4), (38), (39): Xaa is C or S
  MOD_RES (16), (17), (18), (19), (20): Xaa is A or G
  MOD_RES (21), (22), (23), (24): Xaa is A or G or is absent
RXGXSEVVMDYHYKLXXXXXXXXXKYLISIPSLRTPVXXTPPTS

SEQ ID NO: 63804 - protein, 37 aa, Artificial Sequence; identical to SEQ ID NO: 4589
  GFR-binding peptide
  MOD_RES (1), (35), (36): Xaa is C or S
  MOD_RES (13), (14), (15), (16), (17): Xaa is A or G
  MOD_RES (18), (19), (20), (21): Xaa is A or G or is absent

SEQ ID NO: 63805 - protein, 35 aa, Artificial Sequence
  GFR-binding peptide
  MOD_RES (1), (32), (33): Xaa is C or S
XSKVIMPIKGYIKPTKGIFYLINIPSLDQSVXXPS

SEQ ID NO: 63806 - protein, 38 aa, Artificial Sequence
  GFR-binding peptide
  MOD_RES (1), (33), (34): Xaa is C or S
XRDVVMGEYKFKIIQQKDNLYLMSIPEMKTPTXXPGAS

SEQ ID NO: 63807 - protein, 37 aa, Artificial Sequence; identical to SEQ ID NO: 4593
  GFR-binding peptide
  MOD_RES (2), (36), (37): Xaa is C or S
  MOD_RES (14), (15), (16), (17), (18): Xaa is A or G
  MOD_RES (19), (20), (21), (22): Xaa is A or G or is absent

SEQ ID NO: 63808 - protein, 42 aa, Artificial Sequence; identical to SEQ ID NO: 56589
  GFR-binding peptide
  MOD_RES (2), (4), (38), (39): Xaa is C or S
  MOD_RES (16), (17), (18), (19), (20): Xaa is A or G
  MOD_RES (21), (22), (23), (24): Xaa is A or G or is absent

SEQ ID NO: 63809 - protein, 41 aa, Artificial Sequence
  GFR-binding peptide
  MOD_RES (2), (36), (37): Xaa is C or S
  MOD_RES (14), (15), (16), (17), (18): Xaa is A or G
  MOD_RES (19), (20), (21), (22): Xaa is A or G or is absent
GXRDVVMGYHYKLXXXXXXXXXKYLMSIPSMKTPTXXPGAS

SEQ ID NO: 63810 - protein, 37 aa, Artificial Sequence; identical to SEQ ID NO: 56590
  GFR-binding peptide
  MOD_RES (2), (36), (37): Xaa is C or S
  MOD_RES (14), (15), (16), (17), (18): Xaa is A or G
  MOD_RES (19), (20), (21), (22): Xaa is A or G or is absent

SEQ ID NO: 63811 - protein, 36 aa, Artificial Sequence; identical to SEQ ID NO: 4597
  GFR-binding peptide
  MOD_RES (33), (34): Xaa is C or S
  MOD_RES (11), (12), (13), (14), (15): Xaa is A or G
  MOD_RES (16), (17), (18), (19): Xaa is A or G or is absent

SEQ ID NO: 63812 - protein, 40 aa, Artificial Sequence; identical to SEQ ID NO: 25691
  GFR-binding peptide
  MOD_RES (1), (34), (35): Xaa is C or S
  MOD_RES (12), (13), (14), (15), (16): Xaa is A or G
  MOD_RES (17), (18), (19), (20): Xaa is A or G or is absent

SEQ ID NO: 63813 - protein, 36 aa, Artificial Sequence; identical to SEQ ID NO: 31657
  GFR-binding peptide
  MOD_RES (2), (4), (36): Xaa is C or S

SEQ ID NO: 63814 - protein, 35 aa, Artificial Sequence
  GFR-binding peptide
  MOD_RES (32), (33): Xaa is C or S
RDVVMGRHKRLIIQQKDNYYLMSTASMKTPTXXPG

SEQ ID NO: 63815 - protein, 38 aa, Artificial Sequence; identical to SEQ ID NO: 4600
  GFR-binding peptide
  MOD_RES (2), (4), (36), (37): Xaa is C or S

SEQ ID NO: 63816 - protein, 38 aa, Artificial Sequence; identical to SEQ ID NO: 4602
  GFR-binding peptide
  MOD_RES (1), (35), (36): Xaa is C or S
  MOD_RES (13), (14), (15), (16), (17): Xaa is A or G
  MOD_RES (18), (19), (20), (21): Xaa is A or G or is absent

SEQ ID NO: 63817 - protein, 32 aa, Artificial Sequence; identical to SEQ ID NO: 31666
  GFR-binding peptide
  MOD_RES (1), (1): Xaa is C or S

SEQ ID NO: 63818 - protein, 36 aa, Artificial Sequence; identical to SEQ ID NO: 4607
  GFR-binding peptide
  MOD_RES (2), (4), (35), (36): Xaa is C or S

SEQ ID NO: 63819 - protein, 34 aa, Artificial Sequence; identical to SEQ ID NO: 4610
  GFR-binding peptide
  MOD_RES (31), (32): Xaa is C or S

SEQ ID NO: 63820 - protein, 40 aa, Artificial Sequence; identical to SEQ ID NO: 4613
  GFR-binding peptide
  MOD_RES (1), (3), (35): Xaa is C or S

SEQ ID NO: 63821 - protein, 35 aa, Artificial Sequence; identical to SEQ ID NO: 25704
  GFR-binding peptide
  MOD_RES (2), (34), (35): Xaa is C or S

SEQ ID NO: 63822 - protein, 33 aa, Artificial Sequence; identical to SEQ ID NO: 12037
  GFR-binding peptide
  MOD_RES (33), (33): Xaa is C or S
  MOD_RES (11), (12), (13), (14), (15): Xaa is A or G
  MOD_RES (16), (17), (18), (19): Xaa is A or G or is absent

SEQ ID NO: 63823 - protein, 43 aa, Artificial Sequence; identical to SEQ ID NO: 4615
  GFR-binding peptide
  MOD_RES (1), (3), (37): Xaa is C or S
  MOD_RES (15), (16), (17), (18), (19): Xaa is A or G
  MOD_RES (20), (21), (22), (23): Xaa is A or G or is absent

SEQ ID NO: 63824 - protein, 37 aa, Artificial Sequence
  GFR-binding peptide
  MOD_RES (33), (34): Xaa is C or S
  MOD_RES (11), (12), (13), (14), (15): Xaa is A or G
  MOD_RES (16), (17), (18), (19): Xaa is A or G or is absent
EVTMNEYKFKXXXXXXXXXLYLISIPEMKEPVXXPEP

SEQ ID NO: 63825 - protein, 37 aa, Artificial Sequence; identical to SEQ ID NO: 25707
  GFR-binding peptide
  MOD_RES (2), (4): Xaa is C or S
  MOD_RES (16), (17), (18), (19), (20): Xaa is A or G
  MOD_RES (21), (22), (23), (24): Xaa is A or G or is absent

SEQ ID NO: 63826 - protein, 40 aa, Artificial Sequence; identical to SEQ ID NO: 4618
  GFR-binding peptide
  MOD_RES (1), (35), (36): Xaa is C or S
  MOD_RES (13), (14), (15), (16), (17): Xaa is A or G
  MOD_RES (18), (19), (20), (21): Xaa is A or G or is absent

SEQ ID NO: 63827 - protein, 33 aa, Artificial Sequence; identical to SEQ ID NO: 4619
  GFR-binding peptide
  MOD_RES (1), (33): Xaa is C or S

SEQ ID NO: 63828 - protein, 31 aa, Artificial Sequence; identical to SEQ ID NO: 4621
  GFR-binding peptide
  MOD_RES (1), (1): Xaa is C or S

SEQ ID NO: 63829 - protein, 41 aa, Artificial Sequence
  GFR-binding peptide
  MOD_RES (1), (3), (35), (36): Xaa is C or S
XAXSEVTMNPIKGYVVNKNEDFYLINIPSMKEPVXXPEPIG

SEQ ID NO: 63830 - protein, 34 aa, Artificial Sequence
  GFR-binding peptide
  MOD_RES (34), (34): Xaa is C or S
  MOD_RES (12), (13), (14), (15), (16): Xaa is A or G
  MOD_RES (17), (18), (19), (20): Xaa is A or G or is absent
SEVTMNEYKFKXXXXXXXXXLYLISIPEMKEPVX

SEQ ID NO: 63831 - protein, 41 aa, Artificial Sequence; identical to SEQ ID NO: 4623
  GFR-binding peptide
  MOD_RES (2), (4), (38), (39): Xaa is C or S
  MOD_RES (16), (17), (18), (19), (20): Xaa is A or G
  MOD_RES (21), (22), (23), (24): Xaa is A or G or is absent

SEQ ID NO: 63832 - protein, 38 aa, Artificial Sequence; identical to SEQ ID NO: 31678
  GFR-binding peptide
  MOD_RES (33), (34): Xaa is C or S

SEQ ID NO: 63833 - protein, 43 aa, Artificial Sequence; identical to SEQ ID NO: 31679
  GFR-binding peptide
  MOD_RES (1), (3), (37), (38): Xaa is C or S
  MOD_RES (15), (16), (17), (18), (19): Xaa is A or G
  MOD_RES (20), (21), (22), (23): Xaa is A or G or is absent

SEQ ID NO: 63834 - protein, 38 aa, Artificial Sequence; identical to SEQ ID NO: 56620
  GFR-binding peptide
  MOD_RES (1), (34), (35): Xaa is C or S
  MOD_RES (12), (13), (14), (15), (16): Xaa is A or G
  MOD_RES (17), (18), (19), (20): Xaa is A or G or is absent

SEQ ID NO: 63835 - protein, 33 aa, Artificial Sequence; identical to SEQ ID NO: 4627
  GFR-binding peptide
  MOD_RES (1), (3): Xaa is C or S

SEQ ID NO: 63836 - protein, 33 aa, Artificial Sequence
  GFR-binding peptide
  MOD_RES (1), (33): Xaa is C or S
XRDVVMGRHKRLIIQQKDNYYLMSTASMKTPTX

SEQ ID NO: 63837 - protein, 37 aa, Artificial Sequence
  GFR-binding peptide
  MOD_RES (2), (34), (35): Xaa is C or S
GXESVAMGRHKRLYTVVGKDYYLISTASLKTPVXXAK

SEQ ID NO: 63838 - protein, 38 aa, Artificial Sequence
  GFR-binding peptide
  MOD_RES (1), (32), (33): Xaa is C or S
XSRVIMPIKGYVKPKRGVFYLINIPSLAQPVXXPAASA

SEQ ID NO: 63839 - protein, 42 aa, Artificial Sequence; identical to SEQ ID NO: 4632
  GFR-binding peptide
  MOD_RES (1), (3), (37), (38): Xaa is C or S
  MOD_RES (15), (16), (17), (18), (19): Xaa is A or G
  MOD_RES (20), (21), (22), (23): Xaa is A or G or is absent

SEQ ID NO: 63840 - protein, 34 aa, Artificial Sequence; identical to SEQ ID NO: 25721
  GFR-binding peptide
  MOD_RES (33), (34): Xaa is C or S
  MOD_RES (11), (12), (13), (14), (15): Xaa is A or G
  MOD_RES (16), (17), (18), (19): Xaa is A or G or is absent

SEQ ID NO: 63841 - protein, 41 aa, Artificial Sequence
  GFR-binding peptide
  MOD_RES (1), (3), (35), (36): Xaa is C or S
XGXRDVVMGRHKRLIIQQKDNYYLMSTASMKTPTXXPGASG

SEQ ID NO: 63842 - protein, 35 aa, Artificial Sequence; identical to SEQ ID NO: 4635
  GFR-binding peptide
  MOD_RES (32), (33): Xaa is C or S

SEQ ID NO: 63843 - protein, 39 aa, Artificial Sequence
  GFR-binding peptide
  MOD_RES (2), (4), (36), (37): Xaa is C or S
SXGXRDVVMGRHKRLIIQQKDNYYLMSTASMKTPTXXPG

SEQ ID NO: 63844 - protein, 38 aa, Artificial Sequence; identical to SEQ ID NO: 4636
  GFR-binding peptide
  MOD_RES (33), (33): Xaa is C or S
  MOD_RES (11), (12), (13), (14), (15): Xaa is A or G
  MOD_RES (16), (17), (18), (19): Xaa is A or G or is absent

SEQ ID NO: 63845 - protein, 35 aa, Artificial Sequence; identical to SEQ ID NO: 25726
  GFR-binding peptide
  MOD_RES (33), (34): Xaa is C or S
  MOD_RES (11), (12), (13), (14), (15): Xaa is A or G
  MOD_RES (16), (17), (18), (19): Xaa is A or G or is absent

SEQ ID NO: 63846 - protein, 41 aa, Artificial Sequence
  GFR-binding peptide
  MOD_RES (1), (3), (35), (36): Xaa is C or S
XGXSRVVMNRHKRLIVNSSDDYYLVSTASLKTPAXXPKPVH

SEQ ID NO: 63847 - protein, 34 aa, Artificial Sequence
  GFR-binding peptide
  MOD_RES (34), (34): Xaa is C or S
  MOD_RES (12), (13), (14), (15), (16): Xaa is A or G
  MOD_RES (17), (18), (19), (20): Xaa is A or G or is absent
SEVTMNRHKRLXXXXXXXXXYYLISTASMKEPVX

SEQ ID NO: 63848 - protein, 41 aa, Artificial Sequence; identical to SEQ ID NO: 4639
  GFR-binding peptide
  MOD_RES (2), (4), (36), (37): Xaa is C or S

SEQ ID NO: 63849 - protein, 33 aa, Artificial Sequence; identical to SEQ ID NO: 4640
  GFR-binding peptide
  MOD_RES (2), (2): Xaa is C or S

SEQ ID NO: 63850 - protein, 35 aa, Artificial Sequence; identical to SEQ ID NO: 31699
  GFR-binding peptide
  MOD_RES (31), (32): Xaa is C or S

SEQ ID NO: 63851 - protein, 38 aa, Artificial Sequence; identical to SEQ ID NO: 4641
  GFR-binding peptide
  MOD_RES (1), (3), (34), (35): Xaa is C or S

SEQ ID NO: 63852 - protein, 41 aa, Artificial Sequence; identical to SEQ ID NO: 31703
  GFR-binding peptide
  MOD_RES (1), (3), (35), (36): Xaa is C or S

SEQ ID NO: 63853 - protein, 38 aa, Artificial Sequence; identical to SEQ ID NO: 56640
  GFR-binding peptide
  MOD_RES (2), (33), (34): Xaa is C or S

SEQ ID NO: 63854 - protein, 34 aa, Artificial Sequence
  GFR-binding peptide
  MOD_RES (1), (33), (34): Xaa is C or S
XRDVVMGRHKRLIIQQKDNYYLMSTASMKTPTXX

SEQ ID NO: 63855 - protein, 34 aa, Artificial Sequence; identical to SEQ ID NO: 25734
  GFR-binding peptide
  MOD_RES (31), (32): Xaa is C or S

SEQ ID NO: 63856 - protein, 40 aa, Artificial Sequence; identical to SEQ ID NO: 4644
  GFR-binding peptide
  MOD_RES (1), (3), (35), (36): Xaa is C or S

SEQ ID NO: 63857 - protein, 33 aa, Artificial Sequence; identical to SEQ ID NO: 25736
  GFR-binding peptide
  MOD_RES (2), (33): Xaa is C or S

SEQ ID NO: 63858 - protein, 37 aa, Artificial Sequence; identical to SEQ ID NO: 25737
  GFR-binding peptide
  MOD_RES (33), (34): Xaa is C or S

SEQ ID NO: 63859 - protein, 33 aa, Artificial Sequence; identical to SEQ ID NO: 25738
  GFR-binding peptide
  MOD_RES (1), (33): Xaa is C or S

SEQ ID NO: 63860 - protein, 36 aa, Artificial Sequence; identical to SEQ ID NO: 4646
  GFR-binding peptide
  MOD_RES (1), (33), (34): Xaa is C or S

SEQ ID NO: 63861 - protein, 31 aa, Artificial Sequence
  GFR-binding peptide
  MOD_RES (31), (31): Xaa is C or S
EVTMNEYKFKVVNKNEDLYLISIPEMKEPVX

SEQ ID NO: 63862 - protein, 41 aa, Artificial Sequence; identical to SEQ ID NO: 4648
  GFR-binding peptide
  MOD_RES (2), (4), (37), (38): Xaa is C or S
  MOD_RES (15), (16), (17), (18), (19): Xaa is A or G
  MOD_RES (20), (21), (22), (23): Xaa is A or G or is absent

SEQ ID NO: 63863 - protein, 40 aa, Artificial Sequence
  GFR-binding peptide
  MOD_RES (1), (3), (37), (38): Xaa is C or S
  MOD_RES (15), (16), (17), (18), (19): Xaa is A or G
  MOD_RES (20), (21), (22), (23): Xaa is A or G or is absent
XGXRDVVMGRHKRLXXXXXXXXXYYLMSTASMKTPTXXPG

SEQ ID NO: 63864 - protein, 37 aa, Artificial Sequence; identical to SEQ ID NO: 4650
  GFR-binding peptide
  MOD_RES (2), (33), (34): Xaa is C or S

SEQ ID NO: 63865 - protein, 37 aa, Artificial Sequence; identical to SEQ ID NO: 4651
  GFR-binding peptide
  MOD_RES (32), (32): Xaa is C or S

SEQ ID NO: 63866 - protein, 37 aa, Artificial Sequence; identical to SEQ ID NO: 25742
  GFR-binding peptide
  MOD_RES (34), (35): Xaa is C or S
  MOD_RES (12), (13), (14), (15), (16): Xaa is A or G
  MOD_RES (17), (18), (19), (20): Xaa is A or G or is absent

SEQ ID NO: 63867 - protein, 39 aa, Artificial Sequence; identical to SEQ ID NO: 4653
  GFR-binding peptide
  MOD_RES (1), (3), (34), (35): Xaa is C or S

SEQ ID NO: 63868 - protein, 37 aa, Artificial Sequence; identical to SEQ ID NO: 4654
  GFR-binding peptide
  MOD_RES (1), (3), (35): Xaa is C or S

SEQ ID NO: 63869 - protein, 36 aa, Artificial Sequence; identical to SEQ ID NO: 25749
  GFR-binding peptide
  MOD_RES (1), (35), (36): Xaa is C or S
  MOD_RES (13), (14), (15), (16), (17): Xaa is A or G
  MOD_RES (18), (19), (20), (21): Xaa is A or G or is absent

SEQ ID NO: 63870 - protein, 37 aa, Artificial Sequence; identical to SEQ ID NO: 25750
  GFR-binding peptide
  MOD_RES (34), (35): Xaa is C or S
  MOD_RES (12), (13), (14), (15), (16): Xaa is A or G
  MOD_RES (17), (18), (19), (20): Xaa is A or G or is absent

SEQ ID NO: 63871 - protein, 38 aa, Artificial Sequence; identical to SEQ ID NO: 4656
  GFR-binding peptide
  MOD_RES (1), (34), (35): Xaa is C or S
  MOD_RES (12), (13), (14), (15), (16): Xaa is A or G
  MOD_RES (17), (18), (19), (20): Xaa is A or G or is absent

SEQ ID NO: 63872 - protein, 43 aa, Artificial Sequence
  GFR-binding peptide
  MOD_RES (2), (4), (38), (39): Xaa is C or S
  MOD_RES (16), (17), (18), (19), (20): Xaa is A or G
  MOD_RES (21), (22), (23), (24): Xaa is A or G or is absent
RXGXSEVVMDYHYKLXXXXXXXXXKYLISIPSLRTPVXXTPPT

SEQ ID NO: 63873 - protein, 34 aa, Artificial Sequence; identical to SEQ ID NO: 4658
  GFR-binding peptide
  MOD_RES (34), (34): Xaa is C or S
  MOD_RES (12), (13), (14), (15), (16): Xaa is A or G
  MOD_RES (17), (18), (19), (20): Xaa is A or G or is absent

SEQ ID NO: 63874 - protein, 39 aa, Artificial Sequence; identical to SEQ ID NO: 4659
  GFR-binding peptide
  MOD_RES (2), (37), (38): Xaa is C or S
  MOD_RES (15), (16), (17), (18), (19): Xaa is A or G
  MOD_RES (20), (21), (22), (23): Xaa is A or G or is absent

SEQ ID NO: 63875 - protein, 43 aa, Artificial Sequence; identical to SEQ ID NO: 4661
  GFR-binding peptide
  MOD_RES (2), (4), (38): Xaa is C or S
  MOD_RES (16), (17), (18), (19), (20): Xaa is A or G
  MOD_RES (21), (22), (23), (24): Xaa is A or G or is absent

SEQ ID NO: 63876 - protein, 32 aa, Artificial Sequence
  GFR-binding peptide
  MOD_RES (1), (1): Xaa is C or S
XRDVVMGEYKFKIIQQKDNLYLMSIPEMKTPT

SEQ ID NO: 63877 - protein, 38 aa, Artificial Sequence; identical to SEQ ID NO: 4664
  GFR-binding peptide
  MOD_RES (2), (36), (37): Xaa is C or S
  MOD_RES (14), (15), (16), (17), (18): Xaa is A or G
  MOD_RES (19), (20), (21), (22): Xaa is A or G or is absent

SEQ ID NO: 63878 - protein, 40 aa, Artificial Sequence; identical to SEQ ID NO: 4665
  GFR-binding peptide
  MOD_RES (34), (35): Xaa is C or S
  MOD_RES (12), (13), (14), (15), (16): Xaa is A or G
  MOD_RES (17), (18), (19), (20): Xaa is A or G or is absent

SEQ ID NO: 63879 - protein, 34 aa, Artificial Sequence
  GFR-binding peptide
  MOD_RES (31), (32): Xaa is C or S
EVTMNPIKGYVVNKNEDFYLINIPSMKEPVXXPE

SEQ ID NO: 63880 - protein, 36 aa, Artificial Sequence
  GFR-binding peptide
  MOD_RES (31), (32): Xaa is C or S
EVVMDYHYKLVVNNASDKYLISIPSLRTPVXXTPPT

SEQ ID NO: 63881 - protein, 34 aa, Artificial Sequence; identical to SEQ ID NO: 25762
  GFR-binding peptide
  MOD_RES (2), (33), (34): Xaa is C or S

SEQ ID NO: 63882 - protein, 36 aa, Artificial Sequence; identical to SEQ ID NO: 31734
  GFR-binding peptide
  MOD_RES (1), (35), (36): Xaa is C or S
  MOD_RES (13), (14), (15), (16), (17): Xaa is A or G
  MOD_RES (18), (19), (20), (21): Xaa is A or G or is absent

SEQ ID NO: 63883 - protein, 39 aa, Artificial Sequence; identical to SEQ ID NO: 31736
  GFR-binding peptide
  MOD_RES (1), (35): Xaa is C or S
  MOD_RES (13), (14), (15), (16), (17): Xaa is A or G
  MOD_RES (18), (19), (20), (21): Xaa is A or G or is absent

SEQ ID NO: 63884 - protein, 35 aa, Artificial Sequence
  GFR-binding peptide
  MOD_RES (1), (3), (35): Xaa is C or S
XGXESVAMGRHKRLYTVVGKDYYLISTASLKTPVX

SEQ ID NO: 63885 - protein, 38 aa, Artificial Sequence
  GFR-binding peptide
  MOD_RES (2), (36), (37): Xaa is C or S
  MOD_RES (14), (15), (16), (17), (18): Xaa is A or G
  MOD_RES (19), (20), (21), (22): Xaa is A or G or is absent
GXESVAMGRHKRLXXXXXXXXXYYLISTASLKTPVXXA

SEQ ID NO: 63886 - protein, 36 aa, Artificial Sequence; identical to SEQ ID NO: 25765
  GFR-binding peptide
  MOD_RES (1), (33), (34): Xaa is C or S

SEQ ID NO: 63887 - protein, 38 aa, Artificial Sequence
  GFR-binding peptide
  MOD_RES (33), (34): Xaa is C or S
  MOD_RES (11), (12), (13), (14), (15): Xaa is A or G
  MOD_RES (16), (17), (18), (19): Xaa is A or G or is absent
EVTMNRYKKLXXXXXXXXXFYLISIANMKEPVXXPEPI

SEQ ID NO: 63888 - protein, 35 aa, Artificial Sequence
  GFR-binding peptide
  MOD_RES (34), (35): Xaa is C or S
  MOD_RES (12), (13), (14), (15), (16): Xaa is A or G
  MOD_RES (17), (18), (19), (20): Xaa is A or G or is absent
SEVTMNRHKRLXXXXXXXXXYYLISTASMKEPVXX

SEQ ID NO: 63889 - protein, 38 aa, Artificial Sequence; identical to SEQ ID NO: 31743
  GFR-binding peptide
  MOD_RES (1), (33), (34): Xaa is C or S

SEQ ID NO: 63890 - protein, 35 aa, Artificial Sequence; identical to SEQ ID NO: 31751
  GFR-binding peptide
  MOD_RES (1), (33), (34): Xaa is C or S

SEQ ID NO: 63891 - protein, 37 aa, Artificial Sequence; identical to SEQ ID NO: 12118
  GFR-binding peptide
  MOD_RES (1), (3), (37): Xaa is C or S
  MOD_RES (15), (16), (17), (18), (19): Xaa is A or G
  MOD_RES (20), (21), (22), (23): Xaa is A or G or is absent

SEQ ID NO: 63892 - protein, 41 aa, Artificial Sequence; identical to SEQ ID NO: 25776
  GFR-binding peptide
  MOD_RES (2), (35), (36): Xaa is C or S
  MOD_RES (13), (14), (15), (16), (17): Xaa is A or G
  MOD_RES (18), (19), (20), (21): Xaa is A or G or is absent

SEQ ID NO: 63893 - protein, 38 aa, Artificial Sequence; identical to SEQ ID NO: 4689
  GFR-binding peptide
  MOD_RES (1), (33), (34): Xaa is C or S

SEQ ID NO: 63894 - protein, 36 aa, Artificial Sequence; identical to SEQ ID NO: 4690
  GFR-binding peptide
  MOD_RES (2), (36): Xaa is C or S
  MOD_RES (14), (15), (16), (17), (18): Xaa is A or G
  MOD_RES (19), (20), (21), (22): Xaa is A or G or is absent

SEQ ID NO: 63895 - protein, 40 aa, Artificial Sequence; identical to SEQ ID NO: 25779
  GFR-binding peptide
  MOD_RES (1), (3), (36), (37): Xaa is C or S
  MOD_RES (14), (15), (16), (17), (18): Xaa is A or G
  MOD_RES (19), (20), (21), (22): Xaa is A or G or is absent

SEQ ID NO: 63896 - protein, 39 aa, Artificial Sequence; identical to SEQ ID NO: 31765
  GFR-binding peptide
  MOD_RES (2), (4), (38): Xaa is C or S
  MOD_RES (16), (17), (18), (19), (20): Xaa is A or G
  MOD_RES (21), (22), (23), (24): Xaa is A or G or is absent

SEQ ID NO: 63897 - protein, 40 aa, Artificial Sequence; identical to SEQ ID NO: 31766
  GFR-binding peptide
  MOD_RES (2), (4), (36), (37): Xaa is C or S

SEQ ID NO: 63898 - protein, 34 aa, Artificial Sequence; identical to SEQ ID NO: 4695
  GFR-binding peptide
  MOD_RES (33), (34): Xaa is C or S
  MOD_RES (11), (12), (13), (14), (15): Xaa is A or G
  MOD_RES (16), (17), (18), (19): Xaa is A or G or is absent

SEQ ID NO: 63899 - protein, 36 aa, Artificial Sequence
  GFR-binding peptide
  MOD_RES (2), (4), (35), (36): Xaa is C or S
SXKXSKVVMPIKGYVKPTRGVFYLINIPSLDQPVXX

SEQ ID NO: 63900 - protein, 33 aa, Artificial Sequence; identical to SEQ ID NO: 4697
  GFR-binding peptide
  MOD_RES (33), (33): Xaa is C or S
  MOD_RES (11), (12), (13), (14), (15): Xaa is A or G
  MOD_RES (16), (17), (18), (19): Xaa is A or G or is absent

SEQ ID NO: 63901 - protein, 39 aa, Artificial Sequence; identical to SEQ ID NO: 4698
  GFR-binding peptide
  MOD_RES (1), (33), (34): Xaa is C or S

SEQ ID NO: 63902 - protein, 36 aa, Artificial Sequence
  GFR-binding peptide
  MOD_RES (2), (4), (36): Xaa is C or S
RXGXESVAMGRHKRLYTVVGKDYYLISTASLKTPVX

SEQ ID NO: 63903 - protein, 37 aa, Artificial Sequence
  GFR-binding peptide
  MOD_RES (31), (32): Xaa is C or S
EEVIMRHKRLLLVRGNDYYLMSTASTKVPAXXTSPVR

SEQ ID NO: 63904 - protein, 36 aa, Artificial Sequence
  GFR-binding peptide
  MOD_RES (33), (34): Xaa is C or S
  MOD_RES (11), (12), (13), (14), (15): Xaa is A or G
  MOD_RES (16), (17), (18), (19): Xaa is A or G or is absent
EVVMDYHYKLXXXXXXXXXKYLISIPSLRTPVXXTP

SEQ ID NO: 63905 - protein, 38 aa, Artificial Sequence
  GFR-binding peptide
  MOD_RES (1), (33), (34): Xaa is C or S
XSEVTMNPIKGYVVNKNEDFYLINIPSMKEPVXXPEPI

SEQ ID NO: 63906 - protein, 39 aa, Artificial Sequence; identical to SEQ ID NO: 25788
  GFR-binding peptide
  MOD_RES (2), (36), (37): Xaa is C or S
  MOD_RES (14), (15), (16), (17), (18): Xaa is A or G
  MOD_RES (19), (20), (21), (22): Xaa is A or G or is absent

SEQ ID NO: 63907 - protein, 36 aa, Artificial Sequence; identical to SEQ ID NO: 4708
  GFR-binding peptide
  MOD_RES (1), (35), (36): Xaa is C or S
  MOD_RES (13), (14), (15), (16), (17): Xaa is A or G
  MOD_RES (18), (19), (20), (21): Xaa is A or G or is absent

SEQ ID NO: 63908 - protein, 40 aa, Artificial Sequence
  GFR-binding peptide
  MOD_RES (2), (4), (38), (39): Xaa is C or S
  MOD_RES (16), (17), (18), (19), (20): Xaa is A or G
  MOD_RES (21), (22), (23), (24): Xaa is A or G or is absent
SXGXRDVVMGYHYKLXXXXXXXXXKYLMSIPSMKTPTXXP

SEQ ID NO: 63909 - protein, 38 aa, Artificial Sequence; identical to SEQ ID NO: 4711
  GFR-binding peptide
  MOD_RES (2), (4), (35), (36): Xaa is C or S

SEQ ID NO: 63910 - protein, 40 aa, Artificial Sequence; identical to SEQ ID NO: 31778
  GFR-binding peptide
  MOD_RES (1), (3), (36), (37): Xaa is C or S
  MOD_RES (14), (15), (16), (17), (18): Xaa is A or G
  MOD_RES (19), (20), (21), (22): Xaa is A or G or is absent

SEQ ID NO: 63911 - protein, 31 aa, Artificial Sequence; identical to SEQ ID NO: 56733
  GFR-binding peptide
  MOD_RES (31), (31): Xaa is C or S

SEQ ID NO: 63912 - protein, 36 aa, Artificial Sequence; identical to SEQ ID NO: 31780
  GFR-binding peptide
  MOD_RES (31), (32): Xaa is C or S

SEQ ID NO: 63913 - protein, 32 aa, Artificial Sequence
  GFR-binding peptide
  MOD_RES (1), (1): Xaa is C or S
XRDVVMGRHKRLIIQQKDNYYLMSTASMKTPT

SEQ ID NO: 63914 - protein, 41 aa, Artificial Sequence; identical to SEQ ID NO: 4720
  GFR-binding peptide
  MOD_RES (1), (3), (37), (38): Xaa is C or S
  MOD_RES (15), (16), (17), (18), (19): Xaa is A or G
  MOD_RES (20), (21), (22), (23): Xaa is A or G or is absent

SEQ ID NO: 63915 - protein, 38 aa, Artificial Sequence; identical to SEQ ID NO: 4722
  GFR-binding peptide
  MOD_RES (2), (4), (38): Xaa is C or S
  MOD_RES (16), (17), (18), (19), (20): Xaa is A or G
  MOD_RES (21), (22), (23), (24): Xaa is A or G or is absent

SEQ ID NO: 63916 - protein, 37 aa, Artificial Sequence; identical to SEQ ID NO: 25802
  GFR-binding peptide
  MOD_RES (31), (32): Xaa is C or S

SEQ ID NO: 63917 - protein, 33 aa, Artificial Sequence; identical to SEQ ID NO: 4724
  GFR-binding peptide
  MOD_RES (33), (33): Xaa is C or S
  MOD_RES (11), (12), (13), (14), (15): Xaa is A or G
  MOD_RES (16), (17), (18), (19): Xaa is A or G or is absent

SEQ ID NO: 63918 - protein, 40 aa, Artificial Sequence; identical to SEQ ID NO: 31791
  GFR-binding peptide
  MOD_RES (1), (35), (36): Xaa is C or S
  MOD_RES (13), (14), (15), (16), (17): Xaa is A or G
  MOD_RES (18), (19), (20), (21): Xaa is A or G or is absent

SEQ ID NO: 63919 - protein, 43 aa, Artificial Sequence; identical to SEQ ID NO: 4728
  GFR-binding peptide
  MOD_RES (2), (4), (37), (38): Xaa is C or S
  MOD_RES (15), (16), (17), (18), (19): Xaa is A or G
  MOD_RES (20), (21), (22), (23): Xaa is A or G or is absent

SEQ ID NO: 63920 - protein, 39 aa, Artificial Sequence; identical to SEQ ID NO: 4730
  GFR-binding peptide
  MOD_RES (1), (3), (35), (36): Xaa is C or S

SEQ ID NO: 63921 - protein, 39 aa, Artificial Sequence; identical to SEQ ID NO: 25808
  GFR-binding peptide
  MOD_RES (1), (3), (37), (38): Xaa is C or S
  MOD_RES (15), (16), (17), (18), (19): Xaa is A or G
  MOD_RES (20), (21), (22), (23): Xaa is A or G or is absent

SEQ ID NO: 63922 - protein, 36 aa, Artificial Sequence; identical to SEQ ID NO: 25809
  GFR-binding peptide
  MOD_RES (2), (36): Xaa is C or S
  MOD_RES (14), (15), (16), (17), (18): Xaa is A or G
  MOD_RES (19), (20), (21), (22): Xaa is A or G or is absent

SEQ ID NO: 63923 - protein, 34 aa, Artificial Sequence; identical to SEQ ID NO: 25810
  GFR-binding peptide
  MOD_RES (1), (3): Xaa is C or S

SEQ ID NO: 63924 - protein, 38 aa, Artificial Sequence; identical to SEQ ID NO: 4733
  GFR-binding peptide
  MOD_RES (2), (4), (37), (38): Xaa is C or S
  MOD_RES (15), (16), (17), (18), (19): Xaa is A or G
  MOD_RES (20), (21), (22), (23): Xaa is A or G or is absent

SEQ ID NO: 63925 - protein, 33 aa, Artificial Sequence; identical to SEQ ID NO: 25813
  GFR-binding peptide
  MOD_RES (32), (33): Xaa is C or S

SEQ ID NO: 63926 - protein, 33 aa, Artificial Sequence; identical to SEQ ID NO: 4734
  GFR-binding peptide
  MOD_RES (31), (32): Xaa is C or S

SEQ ID NO: 63927 - protein, 34 aa, Artificial Sequence
  GFR-binding peptide
  MOD_RES (1), (33), (34): Xaa is C or S
XSEVTMNYHYKLVVNKNEDKYLISIPSMKEPVXX

SEQ ID NO: 63928 - protein, 37 aa, Artificial Sequence; identical to SEQ ID NO: 31799
  GFR-binding peptide
  MOD_RES (2), (4): Xaa is C or S
  MOD_RES (16), (17), (18), (19), (20): Xaa is A or G
  MOD_RES (21), (22), (23), (24): Xaa is A or G or is absent

SEQ ID NO: 63929 - protein, 35 aa, Artificial Sequence; identical to SEQ ID NO: 4736
  GFR-binding peptide
  MOD_RES (1), (3): Xaa is C or S

SEQ ID NO: 63930 - protein, 41 aa, Artificial Sequence
  GFR-binding peptide
  MOD_RES (2), (4), (36), (37): Xaa is C or S
RXGXAEVVMDRHKRLVVNNAADYYLISTASLRAPVXXSAPA

SEQ ID NO: 63931 - protein, 31 aa, Artificial Sequence
  GFR-binding peptide
  MOD_RES (31), (31): Xaa is C or S
EEVIMRHKRLLLVRGNDYYLMSTASTKVPAX
